United States Patent Application Publication US 2017/0009304 A1 - sequence listing, part 27

SEQ ID NO: 561103 - DNA, 89 bp, Homo sapiens
ccggaccggctggttccccagcaactacgtgcgcgaggtcaaggccagcgggtatttgaagtataccatacaactgttttgaaaatcca

SEQ ID NO: 561104 - DNA, 83 bp, Homo sapiens
ataggatttaaccgctctctgcctcccagtaacagatcaactcctagcaatcatgatcggatacagcgtctgaggcaagaatt

SEQ ID NO: 561105 - DNA, 97 bp, Homo sapiens
ggagctgacggtggaggttcgcggctctaacggggctttctacaagggctttgttcgcgggggtcacagctctcatggctgcagctagcgtgacccc

SEQ ID NO: 561106 - DNA, 71 bp, Homo sapiens
cgcgcgcctcgaggccgagtcaaggccacggcgtatgcctccgaggacggggtcctgaccgaggccatgat

SEQ ID NO: 561107 - DNA, 75 bp, Homo sapiens
ggccggcgggaccataagggcttaactcatatatttaacccccctccaaaaaagatcctgaaggagctagacgag

SEQ ID NO: 561108 - DNA, 82 bp, Homo sapiens
tcaaagcctcctgataaacctgatgaaaaacatcagagattggaacacaaagagtggctgagctcccttcgggcccatgttg

SEQ ID NO: 561109 - DNA, 75 bp, Homo sapiens
gtaaaaggcagagctgggactcatacccagtggccacagatgtctttaattccaaaaacctggccgttcaggcac

SEQ ID NO: 561110 - DNA, 74 bp, Homo sapiens
acgggcttcaccttcaaatacaggagccggtgaaacctgaagaaggcagagatatggcaaacaggattggcgct

SEQ ID NO: 561111 - DNA, 75 bp, Homo sapiens
tggtgtgagcctgacgtctagttcccaggatctaggggtgtttattcctgctcctatggctcaagggatgagaag

SEQ ID NO: 561112 - DNA, 100 bp, Homo sapiens
cgagggggcgtctgaggaggaagacctggaagacagatctggtaatcattaccaaatgaggaggaaaggacgatgtcatcgaggctctgcagcgaggcat

SEQ ID NO: 561113 - DNA, 96 bp, Homo sapiens
aaggctgccagcctcagctatcgccgctgactgtgcccctgtggaaggaggtaactgtgacatttgatgatgtggccttatatttttcggaacaag

SEQ ID NO: 561114 - DNA, 75 bp, Homo sapiens
gaatgtacgaccttgttgctgttgtggttcactgtggaaggatgaagtgtcctcttgctagcaccaataaaagat

SEQ ID NO: 561115 - DNA, 90 bp, Homo sapiens
tggagttcttacaacatggcagacattgacaaaacatacaacctcctcttcagtgtcaaaaaagccacggttagaccagattcctgccgc

SEQ ID NO: 561116 - DNA, 100 bp, Homo sapiens
ccagcctcacatcaacttccagtgagagtgacacaggtcaggaagcagaatattccttatatgctcccattgctatcacatgttttaccagaggcttgga

SEQ ID NO: 561117 - DNA, 100 bp, Homo sapiens
gcaaacggcatgccctgacttacagtcccctgtcgctcatcgccaggttctcgccgatcgccatcgatggtatgagcggcctggcgggcgtgggcctgtc

SEQ ID NO: 561118 - DNA, 90 bp, Homo sapiens
ctgctgacacccatcacccacatctcacagggtgagcccctccagactccgaataggagatcaagagtttgattcattgcctgctttact

SEQ ID NO: 561119 - DNA, 100 bp, Homo sapiens
gacagaatctgggtcctagatgacttcattgcactgctgcaactgccttctccagacctcttgccagatgcctttggtgcttcatgaagaatatttccag

SEQ ID NO: 561120 - DNA, 75 bp, Homo sapiens
ggatttgacggtggctggagcggcacgggcgacgcaagactgcagctgaatatgtaaaatctcgactcccagagg

SEQ ID NO: 561121 - DNA, 75 bp, Homo sapiens
cttgaaaatgaagaacatagtcaaataattatccattgtacaccttcaacaggaaattacattgctgtaggaaac

SEQ ID NO: 561122 - DNA, 74 bp, Homo sapiens
aaacttgccttatcaccttcttgcttgcagactcaatgatgaggcacggcggctcattgctgatttggggagca

SEQ ID NO: 561123 - DNA, 82 bp, Homo sapiens
cccgaaagccgctgggaaaacccgtggaccgggagcccgtggaccgggagccggtggtgtgccaccccgacctggaggagcg

SEQ ID NO: 561124 - DNA, 100 bp, Homo sapiens
gccttccagtacacagacgagcatggggaaggacacagcttgggctatggctttgtgaactacgtgaccgcgaaggatgcagagagagcgatcaacacgc

SEQ ID NO: 561125 - DNA, 83 bp, Homo sapiens
cagcagtacagacagctcaggctgcccagatggtggctcccggagtccagaaagacgagaatccaggacttgaatcgtatctt

SEQ ID NO: 561126 - DNA, 82 bp, Homo sapiens
acggcgagaagcccctccatgtttactactgtttgtgcggccagatggtcctagtgctggttttatgtgctgaaagagttgg

SEQ ID NO: 561127 - DNA, 90 bp, Homo sapiens
ctaacactgtgggacttggtttgcctatgtcaagatcacaggcacgtgtggttctcaaatataggcattctgatgggaacttgtgtgtta

SEQ ID NO: 561128 - DNA, 76 bp, Homo sapiens
aagatgcggaggctgcctcggcggagcagaggaaccacacgctgatcatgccttatgccagcctggaccatcttgg

SEQ ID NO: 561129 - DNA, 83 bp, Homo sapiens
gtacaaaaattcttcaagaaatctaaggaacttcacgtccatcttctaccctcactatggcaactgttacatcttcaactggg

SEQ ID NO: 561130 - DNA, 151 bp, Homo sapiens
ttgtctgtatccgctgctcttgtgacgttgtggagatggggagcgtcctggggctgtgctccatggcgagctggtactatactggcaattgctggagaagattttgcaattgttgcttctgatactcgattgagtgaagggttttcaattc

SEQ ID NO: 561131 - DNA, 100 bp, Homo sapiens
aagaagaaaggattcgttacagccagagattgatttggagcaagaggtggtggtggccttcccccgaagaaatttggtaatcctggggagcgtttgcgta

SEQ ID NO: 561132 - DNA, 98 bp, Homo sapiens
aatgaagagttttccaaagaaagatttgatatagctattatctattacaccagagccattgaatatagattcctcgaggtctgaacaagaaccactga

SEQ ID NO: 561133 - DNA, 100 bp, Homo sapiens
tggcgctgtcaataaagaacggcagtttgaatcggtgctgaacagggcggcaccttcctacttctgcccagccacagccctcccctcacagttgagcacc

SEQ ID NO: 561134 - DNA, 115 bp, Homo sapiens
agcgaccccttgttctttggtggcgctggtacatccccagcttactccgacctctctgaacttcctggaccagatctgtttcctctgcctgcatgctctagcctaccatcttcct

SEQ ID NO: 561135 - DNA, 82 bp, Homo sapiens
cagcagcttcggcggcggcagaggcaaaatgatgcttcaacacccaggccaggtctctgcctcggaagtgagtgcttctgcc

SEQ ID NO: 561136 - DNA, 101 bp, Homo sapiens
gccaggggccgtggaagctgtcaaggagatggccagcctacaaaatggaatgcagtagccctctgggcctgggatattgtggttgataactgtgccatctg

SEQ ID NO: 561137 - DNA, 74 bp, Homo sapiens
cggatcccgcgcgcccccgctcctgcagcagtccagagcgtgagtccattcacatcctgagtgttgatgagaag

SEQ ID NO: 561138 - DNA, 73 bp, Homo sapiens
tttgaagcagcaagtctgttgtctgaattgtactgtcaagaggtcaagagcaatctgaatccaaatgcaaagg

SEQ ID NO: 561139 - DNA, 75 bp, Homo sapiens
acgacattttcgagcgcatcgcagatgaagatgtgtgtgtctttaagtgctcagtgtcccgagagacagagtgca

SEQ ID NO: 561140 - DNA, 98 bp, Homo sapiens
agagttccaggcctgcccacagacggtggtgcctcaaaacacctacccagaataactgaagtgaagtgatggactccgatttggagagtagtaagacg

SEQ ID NO: 561141 - DNA, 83 bp, Homo sapiens
cccctcggaggagggctgtcaggtgaagcctcgtgtgagggggccgccatggcatcagatgaaggcaaactttttgttggagg

SEQ ID NO: 561142 - DNA, 75 bp, Homo sapiens
tgcagaaggtctctggagacatcttcagcaggtgtgggccatgtttgaggattgccccagcattcagttctatga

SEQ ID NO: 561143 - DNA, 50 bp, Homo sapiens
ctgaggcctgagacacaggaccagggcaccgtcacaagcactgcaacctg

SEQ ID NO: 561144 - DNA, 90 bp, Homo sapiens
acaacagcaacctcttcttctggttcttcccagctcaggaatcccccatcccagaagacaaagaccgcagatttgtcttctcttactttc

SEQ ID NO: 561145 - DNA, 75 bp, Homo sapiens
ctcaatctccttttccttggctaccctgcacagccagaggacaacacatcacacacaagaaacagttgtgctcat

SEQ ID NO: 561146 - DNA, 75 bp, Homo sapiens
gaacagggagcggggcttttgtctaaagtgttgtgaagagcgaagacttttcgctcccagcttatatggatcggc

SEQ ID NO: 561147 - DNA, 100 bp, Homo sapiens
gcaggatggtggtggatgcggccaactccaatgggcctttccagcccgtggtccttctccatattcgaggacgggctctacgagtgcattctctgtgcct

SEQ ID NO: 561148 - DNA, 75 bp, Homo sapiens
gtctgggccgccgaatctccggccgaagagcggcggcggcagcggcgcaagagtgagccatggagctacgtgtgg

SEQ ID NO: 561149 - DNA, 74 bp, Homo sapiens
caccgttcacagagctagccggacgtcctccgactcaagtatgcgtgctatgctattggaaaggatgtgcaagc

SEQ ID NO: 561150 - DNA, 75 bp, Homo sapiens
gctgcggccgccgcctccgcctcccaggatgagctgaagtaaccagagagcacagagaaatgctggtgaaactgg

SEQ ID NO: 561151 - DNA, 105 bp, Homo sapiens
ctctacctgacacagctgcagcctgcaattcactcgcactgcctgggattgcactggatccgtgtgctcagaacaagacatgtagactgccaaagtgtatgggat

SEQ ID NO: 561152 - DNA, 100 bp, Homo sapiens
ttggagctgagccccgagaggctggctgaagctatggactctgggcaggtacaggtttgcagattccgccagcagcacagcaagctctacagatgagtgg

SEQ ID NO: 561153 - DNA, 88 bp, Homo sapiens
taccgcagcccccgggcacgacctctcggacacggtgcaggcagccggaagaattaacctcgagtctgcacgcttttaagaacaaggc

SEQ ID NO: 561154 - DNA, 89 bp, Homo sapiens
ctgctgcagaacgggagccgccacttcgaggactggacaatgcagatcttcgtgaagactctgactggtaagaccatcaccctcgaggt

SEQ ID NO: 561155 - DNA, 98 bp, Homo sapiens
cagaatgcacagtatttgctgcagaacagatctgctactgaactttttgaggcatatagcatggcagaaatgacattcaatcctcctgttgaatcttc

SEQ ID NO: 561156 - DNA, 78 bp, Homo sapiens
tttaaccaagttccaacaaaagaatgctgccgcagggtgacctgaaggcgtatctgcgcagcgagcaggagcacatgc

SEQ ID NO: 561157 - DNA, 100 bp, Homo sapiens
gtgtcagtgttaaaggaacctctacaacgaaggtgaagccacggaagataaggtagacgttacatccaagaggaaataatccaggcaaggaagcacaagc

SEQ ID NO: 561158 - DNA, 78 bp, Homo sapiens
gaaccccttcatgcccaaatcccggaaactccagcgtgtctccagccgtgcaaaatgatgcttcaacacccaggccag

SEQ ID NO: 561159 - DNA, 90 bp, Homo sapiens
cgccccgcagccccccaacatcctgctcctgctcatggacgacgttgcacactgggccacagaggatccagcaaggatgaagaaatggag

SEQ ID NO: 561160 - DNA, 75 bp, Homo sapiens
gtcaactcctggaccactagtgggcccatgaagaggttgactacactgaaaagctcaagttcagcgatgaggaag

SEQ ID NO: 561161 - DNA, 100 bp, Homo sapiens
aaaaagatggtgcatgtgcaggattttactgctttttgggataagggttatatcctgtgttgtgacctcatggtttaagtgggaataaagatgagtataa

SEQ ID NO: 561162 - DNA, 75 bp, Homo sapiens
ggacagccgaactggaatctggatgagcagctcaagcaggtagttcctgaaatgactgagatattgaagaaaaaa

SEQ ID NO: 561163 - DNA, 50 bp, Homo sapiens
cagtcagactctggcaacttttagtgacattctgaaagttcccaaacctg

SEQ ID NO: 561164 - DNA, 100 bp, Homo sapiens
cttcagaatgctaaaagaaaaggagccgcgtgtggaggaggctgaagtctcacatcagaggtgtcaaggatctagtgaaaagccatttgatgtatgcggt

SEQ ID NO: 561165 - DNA, 75 bp, Homo sapiens
cccggaggctgggctgtgctagggaaggggactggagcaggtgtggacactgccagcggctgcagccgacttgga

SEQ ID NO: 561166 - DNA, 75 bp, Homo sapiens
tgaggatgaagatgatgaagccgaggtagaagaagatgaacccacagatttgctctggattaatcgaattacagc

SEQ ID NO: 561167 - DNA, 101 bp, Homo sapiens
ttcgttatgacagccaaaaagcagagtttgctggacaaaggagtgatactacatgcctgcttcggccttctgctcttctgttgtgtggtgaccctcaccag

SEQ ID NO: 561168 - DNA, 98 bp, Homo sapiens
ggctttgaactccgagaggaggtggaccagaacttttggaactagtgccggcggctctccaccccccagctgccatttacctgaagaacatggtgaca

SEQ ID NO: 561169 - DNA, 80 bp, Homo sapiens
ctgatccagtggacaaaagaggggaaactatgggagttcccaattaacaatgaagcagatggctcgttcggaacaccacc

SEQ ID NO: 561170 - DNA, 83 bp, Homo sapiens
atggcaacaagtacaagcggcgggtgccccggaggccacaagaggaagctgaatgaagaggacgccgccagcgagtccagcag

SEQ ID NO: 561171 - DNA, 75 bp, Homo sapiens
agcaatgtgttttacatgctgatgtttgcagatgcctgtgccttactgttcatagccctgatgaagcaagttact

SEQ ID NO: 561172 - DNA, 101 bp, Homo sapiens
atcagactgaagagctattgtgatgatccgttggtgctgaatgagatcagagaagaccttcgagtagagtgttcgaagtttggacaaattaggaaactcct

SEQ ID NO: 561173 - DNA, 51 bp, Homo sapiens
tgctacagcatcccacattaagtcaacgacatgaagccattattatatcag

SEQ ID NO: 561174 - DNA, 100 bp, Homo sapiens
gcttcaaacgggcagggctctaggaaacatatgttacgatagccatattgtactccaagatacttggattacgaagatttggagcgcaagtactggaaga

SEQ ID NO: 561175 - DNA, 89 bp, Homo sapiens
tgacgtgttctccaaataccagctcgacaaagatggggttgtcctctttaagaaggtgtgggcccatcgctggatggatctgtcagaac

SEQ ID NO: 561176 - DNA, 95 bp, Homo sapiens
tgctagttaggattttattactggcagcatgtatatcttttcgatctagggcagccctgcagaggtacctgttctactgtaatcgctatatgaac

SEQ ID NO: 561177 - DNA, 74 bp, Homo sapiens
cttcttaatcccatatctggacatctggaacatccatgcaaagggttaccttccagttcaacatttaccttgga

SEQ ID NO: 561178 - DNA, 78 bp, Homo sapiens
ttgaaagctggtaatattcttctgggtgaggatggttcagtacaaatagcagactctcttgagcctgagggatccatt

SEQ ID NO: 561179 - DNA, 75 bp, Homo sapiens
gcctgtataaagatgtcatgatggagaattatggaaacctggtctcactgggatcacgacgctatgccatttttt

SEQ ID NO: 561180 - DNA, 100 bp, Homo sapiens
gatgaccagtctttcccatatcagagcatcacttttcctgagttaagcaataaattggaattaacgacctctggaaagatgccttttatgttaccaggac

SEQ ID NO: 561181 - DNA, 75 bp, Homo sapiens
agttaatcctcaatttaagcctgatctaacccctagaaacaggtgtgatgttagctgttgatgctgtaattgctg

SEQ ID NO: 561182 - DNA, 82 bp, Homo sapiens
caagaagcatgatggacaggatgtttgccctcgagggccgcgatgggcctcttggaacattggtgtgttcatctgcattcga

SEQ ID NO: 561183 - DNA, 98 bp, Homo sapiens
tggaatcccttgcatggctctcaccagtacaggctactctgtcatctttgaagatgttagatgtgggaaagtggccaattttttccctttgttctgaa

SEQ ID NO: 561184 - DNA, 78 bp, Homo sapiens
ggcgcggggaccgctgtgctctcgggacctcaggatggaaaccagcagcctgcaccgcccgagaaggtcggctgggtc

SEQ ID NO: 561185 - DNA, 51 bp, Homo sapiens
aaattcttcatctggctcagagtcaagccttcacagttgttgatcacatag

SEQ ID NO: 561186 - DNA, 82 bp, Homo sapiens
agaagccaaagaactggctaggcaaataagctttaagcttctgcagaaagccgtcattacacctgattttgaaaaaaaccac

SEQ ID NO: 561187 - DNA, 95 bp, Homo sapiens
acttctgaacgaaatggagaaactggaaaagaccctcttcagacttgaacaagctgtatgcaggagctattcttgaagtttgtggatgaaaattg

SEQ ID NO: 561188 - DNA, 74 bp, Homo sapiens
cgcgggaagccccagcccgcagccctcggggcggaaggagagttttacatggaagtggcttacagaaacttggc

SEQ ID NO: 561189 - DNA, 83 bp, Homo sapiens
ccgcgggtctgctctgtgtgccatggacggatgtgaagttcatttccaatccgccctccatggtggcagcggggagcgtggtg

SEQ ID NO: 561190 - DNA, 75 bp, Homo sapiens
gattaaagatgcagtacgccacggggccgctgctcaagttccagatttggaaaattgcctaagaattatgaccca

SEQ ID NO: 561191 - DNA, 101 bp, Homo sapiens
tacgcagaacccgggagtaggagactcagaatcgaatctcttctccctccccttcttggtgaagttcatccacgaccagacctccccaaaccccaagtaca

SEQ ID NO: 561192 - DNA, 100 bp, Homo sapiens
ctgtgtggccctaccggatgagcagacggcggcgctatgaagggcacaaggtccagctgggagctccccgacctccaggagggcaagatccaagccatca

SEQ ID NO: 561193 - DNA, 100 bp, Homo sapiens
ctgcaacgggctcatcaactcctacgaggacaaaagcaacgacttcgtatgtaacagatcaactcctagcaatcatgatcggatacagcgtctgaggcaa

SEQ ID NO: 561194 - DNA, 100 bp, Homo sapiens
attttcctgcatggattgggagatactgggctgctgatactttggctgtgaggcaaaaaaggagaatttatgatatcaccaatgtcttagagggaattga

SEQ ID NO: 561195 - DNA, 75 bp, Homo sapiens
cctcagcctcctgagttgctgggattacagagcttcatagcaagtgaagtactcaagttgttcagtcttaaaaag

SEQ ID NO: 561196 - DNA, 82 bp, Homo sapiens
cgataacaaaatgccggagcgagatacaaaccagtccagctacgggggcccagccagccagcagctgagtgggggttacgga

SEQ ID NO: 561197 - DNA, 100 bp, Homo sapiens
ccggggtcgcggccgtggacggggccggggccgaggccgcggagctcgcggaggcaaggccgaggataaggagtggggatggctataatggatttggtaa

SEQ ID NO: 561198 - DNA, 100 bp, Homo sapiens
gagctacccttcttggagcccacagggcaacagccaactcagtttataaatccagaaacacctggctatgttggatttgcaaacctccccaatcaagttc

SEQ ID NO: 561199 - DNA, 113 bp, Homo sapiens
cggcgttcttccgctggctcagccgcaagtacccgtccatcatagtcaactgcgtggaagagaagctcagagtcaagatctccactgaagttggcatcacaaatgttgatctt

SEQ ID NO: 561200 - DNA, 107 bp, Homo sapiens
cgcgtttcccgcctgagcgcaactagcggcgggtcgtgggcacctccagacttcccaagtaagaagcggaagaggagccgctggaaccaagacacaatggaacagaa

SEQ ID NO: 561201 - DNA, 97 bp, Homo sapiens
ctgctatatgaaatatgggagacgacagaccgtttgtgtgcaatgccccgggctgtggacagtttttggctttcacccccaaccagtgaccaaagac

SEQ ID NO: 561202 - DNA, 74 bp, Homo sapiens
tcagggcagccctggaggcttactgcaagaagtatgagcagctcaaggtacctgtgtgacaaggtcgtccctgg

SEQ ID NO: 561203 - DNA, 82 bp, Homo sapiens
gattctcatggcctctgggtccaccaccttcaccaaggcctggcatgcgtgggcagtgatgaacttcgaagctgtgctacac

SEQ ID NO: 561204 - DNA, 82 bp, Homo sapiens
ggaggagccgcgggcggcgcggcccagctcgttccaggccactcttcacctccaccatgagcctggacatccagagcctgga

SEQ ID NO: 561205 - DNA, 83 bp, Homo sapiens
ccaccatcttcacccagctcgccaccatggccgccttcccaaataaggatctggcatgtcaacacaaacataggaagttgagg

SEQ ID NO: 561206 - DNA, 149 bp, Homo sapiens
gaaggggctagaggcggctccctgggtgacaaccgcgcgccccacctttccccacgtggccgcgaagaccgggtcagactactccctgtgccatgaacggagatgacacctttgcaaggagacccacggttggtgctcaaataccagag

SEQ ID NO: 561207 - DNA, 65 bp, Homo sapiens
ccatgtaccacacctgtgtggccttcgcctggaagaagttggattccatgggttccaagagaaga

SEQ ID NO: 561208 - DNA, 80 bp, Homo sapiens
tatgatgatgatcctgaaatcataacattggaaagaagagaatttgccacagaacagcctggttcactgcacagttccca

SEQ ID NO: 561209 - DNA, 83 bp, Homo sapiens
gcggactccgccaatattatctgtccaagattgaagaactccaggttcctgcacttggccatcatccatgaagaaaaggcact

SEQ ID NO: 561210 - DNA, 100 bp, Homo sapiens
aaaactaggaatctatgatgctgatggtgatggagattttgatgtggatgatgccaaagttttattagtaataagaaacctgactcagaagcaagtgctt

SEQ ID NO: 561211 - DNA, 100 bp, Homo sapiens
aatattgcaataacgccaccaatctgaagctcaaaaaggggcaattccaaaagtcttcagatttccaaaaggaaggactgcagcagacatttctgccccc

SEQ ID NO: 561212 - DNA, 75 bp, Homo sapiens
cacatttgttttgagctaaatattgaggacatcaactagtcaggcagtcttccgtctccagtctggcatctgcca

SEQ ID NO: 561213 - DNA, 75 bp, Homo sapiens
taacaggaacaccacttcaaaataacctaattgagtttccttcctgtgtacagcccttctgaggaggagaagagg

SEQ ID NO: 561214 - DNA, 82 bp, Homo sapiens
ggacatgaagcgctacctgtgggagcgctaccgggaggcgaagagaagcacagaaggtttagcttcttctcccgagataaga

SEQ ID NO: 561215 - DNA, 100 bp, Homo sapiens
ctgagatcaaatggcacttcattggccacctacagaaacaaaatgtcaacaaattgatggctggtgaaactgcgtgctgtaagctgggaccagctttgtc

SEQ ID NO: 561216 - DNA, 82 bp, Homo sapiens
cactctgggcgaaaattggatgtgaaaatgaagccagaccgagctcttcacagatggaatcacaaataaacttattggctgt

SEQ ID NO: 561217 - DNA, 100 bp, Homo sapiens
ctctctttctggcctggaggctatccagcgtgatgatccaatgccctttgacattaaagctgagatgacactgaagacaaatttttttgccactagaaac

SEQ ID NO: 561218 - DNA, 101 bp, Homo sapiens
ggctgaggaaccatgtctccatccccgaccgccctcttctgtcttgtttgcagagcagtctctgatgaagaatgccataaaaacatcggaggagtcatgga

SEQ ID NO: 561219 - DNA, 100 bp, Homo sapiens
tgtgcctagagcactcttcgtggacttggagccaactgttataggcctaatgggattgtttgaaaaacgtcgcttcaggaaattcctagtgtatgttgcc

SEQ ID NO: 561220 - DNA, 100 bp, Homo sapiens
acgggtgaggtacaggctcagtctgcggccaagactccgtcctgcaagatggtgtcctcagaccgaagccaactttcctttctgcccacagaagctcaag

SEQ ID NO: 561221 - DNA, 82 bp, Homo sapiens
cctgcttcccatcgaagctctagaaatgaatgtttccatctcttcagagatgaaccaggtgaaagaaaatggcccgaaccaa

SEQ ID NO: 561222 - DNA, 100 bp, Homo sapiens
aaaaccggagcggccgggggcggccacggtgatgagccgggcctggcggacgcggcgccatcgcagtcagaatgaaaggtacttacatcttgcagcaaaa

SEQ ID NO: 561223 - DNA, 100 bp, Homo sapiens
acactttgttattggagaaacatgcagattatatcgcatcctatggctcaaagaaagatgattattcaaagaagtttggcagagatcacggagctaattc

SEQ ID NO: 561224 - DNA, 98 bp, Homo sapiens
cagagaggcggaagaggaggcctgatggggtggatccataaagaacccagccaacccgcagagggaggggaggggctgagctgtgaggagagcggggc

SEQ ID NO: 561225 - DNA, 75 bp, Homo sapiens
ctccaggacagcacctagtcgtggccggaggagtctcagagctgtcagaaagaatcttttagctgaaaaagtaga

SEQ ID NO: 561226 - DNA, 75 bp, Homo sapiens
acgtcttcaccttcggcagccggctgtacgcacacaccatcgcaggtcaaaatgcagatcttcgtgaaaaccctt

SEQ ID NO: 561227 - DNA, 100 bp, Homo sapiens
gggaaaccgagataggccatggagcaattctaggggcttatagctccaataatggaatgaatcctcactatggatgggctcattgaggacattaagcatc

SEQ ID NO: 561228 - DNA, 90 bp, Homo sapiens
tctgtctggaccccaaggaaaactgggtgcagagggttgtggagaagtttttgaagagaaaccctggccctggatgcccatgttggctgc

SEQ ID NO: 561229 - DNA, 75 bp, Homo sapiens
gtgactttgaacatgctggtgccgctagccaagctgtcctgcctggacaaatttacatgtattggagaccagacc

SEQ ID NO: 561230 - DNA, 83 bp, Homo sapiens
gcgtggtgcaaagtgggcagctcaaatggcaagacgaactcaaccagcacaacaggtgctggagaatctggtaaaagcaccat

SEQ ID NO: 561231 - DNA, 100 bp, Homo sapiens
ctttgggcttcatggagtcgtcttagatgttgattcaccaggcatggtggtgtgttcctgtagtcccagctactcgggaggctgagcaggagaatcgctg

SEQ ID NO: 561232 - DNA, 75 bp, Homo sapiens
gctagctccgcctgcggtacgtgctcccgcctccgactcaaaattaaacaaccaccatgtcgagcaaaaaggcaa

SEQ ID NO: 561233 - DNA, 98 bp, Homo sapiens
taaactatggacgactccgaggaacattgaggaggaagaaggcacctacgatcaaactctggagttccgtaggggaggtgatggccagccaagacgat

SEQ ID NO: 561234 - DNA, 100 bp, Homo sapiens
tgtcttttgcagatgatcgccgggtgtcgatccttttccctccagtcaggcagtagcaggtttgttggcagatgctcgttctttagcagacatagcaaga

SEQ ID NO: 561235 - DNA, 74 bp, Homo sapiens
gcggagggagccgcgggatggaccgcaggaggagacccaggaacaggtccgcctgctcatcaagggaaactcgg

SEQ ID NO: 561236 - DNA, 75 bp, Homo sapiens
cgcgacgctatggcgcactggagtaccctgttcctggcagcctcatggcggtccgagcttcgttcgagaacaact

SEQ ID NO: 561237 - DNA, 82 bp, Homo sapiens
aagaaaagtccgaaagagctgaaccaggacaatcctgtgattgatgaaatagacttccttgaagcttttaaaaatattcagc

SEQ ID NO: 561238 - DNA, 75 bp, Homo sapiens
ctcttttgtctgcccctattgtaagtgcagatggaacacaacaggatacccagagttatattgacgaatgtcctg

SEQ ID NO: 561239 - DNA, 95 bp, Homo sapiens
agaggtgggcggctttgaccgagaggctgctggagctcgtgtttggacgcgtacaccagaggatcgcttcctggcagaatttgggagctgtttat

SEQ ID NO: 561240 - DNA, 89 bp, Homo sapiens
gcatggtgggcaccctctatgacaaggaagttattccaacttttgacatggctgtcaatgaaatcttctttgaccgttaccctgactca

SEQ ID NO: 561241 - DNA, 101 bp, Homo sapiens
cggcgtggaagctgtgagcgcccccatcccggaggtctccgccggctcccggatgaaggatttgggggcagagcacttggcaggtcatgaaggggtccaac

SEQ ID NO: 561242 - DNA, 95 bp, Homo sapiens
ctccagggaaaggatgacatatttttggacctgaaacagaaattctggaacacctatatgttttacatgtggcacccataaaagatgaggctgag

SEQ ID NO: 561243 - DNA, 90 bp, Homo sapiens
gatgcttctcaccgaaggtgttcaccagcacactgctctgccagagggccaagatgggtcgccgagctcaacaggagtcagcgcaggccg

SEQ ID NO: 561244 - DNA, 90 bp, Homo sapiens
cgggtggcggctcgggacggaggacgcgctagtgccaaagagtgtggccagatgcaaaataagtggctgatgataaacattcaaaatgtt

SEQ ID NO: 561245 - DNA, 96 bp, Homo sapiens
tcactcgagagatgaggacactgaaattcagagaggggaagtgatttgcctcagcttgtactaaactatgttccaacttcctgtcaacaatcttgg

SEQ ID NO: 561246 - DNA, 50 bp, Homo sapiens
gattttgaagaagcttgtcgaggacccagatgatgtggtaccagttggcc

SEQ ID NO: 561247 - DNA, 90 bp, Homo sapiens
tggacttctcagcctccagaatgatgaggataggaattcactcaggctccgtgctggctggagttgttggggtgcgaatgccacgttatt

SEQ ID NO: 561248 - DNA, 75 bp, Homo sapiens
aacatgcagattatatcgcatcctatggctcaaagaaagatgattatcttgtcaaaattcccaaaaatgatcccc

SEQ ID NO: 561249 - DNA, 75 bp, Homo sapiens
acggccgtcatcagcctctgctcaggaatggttaatttggagtggcccctggagtcagtttcctacaccatccga

SEQ ID NO: 561250 - DNA, 100 bp, Homo sapiens
ccaggctttatgggagcatgggttaccagcgacgcaccctatctgagtgggacatacttttgaaggatgtgcaatgttcaatcataagtgtgacaaaaac

SEQ ID NO: 561251 - DNA, 100 bp, Homo sapiens
gtggattctcacttctgtcatctagcatgggtttctgccgcagcgccctgcacccgctgtctctcctggtgcaggccatcatgctggccatgaccctggc

SEQ ID NO: 561252 - DNA, 102 bp, Homo sapiens
aagactgtgggcgtggagccggcagccgacggcaaaggtgtcgtggtggtcattaagcggagatccggggttgtgtccactgtggtccccgactctgcccac

SEQ ID NO: 561253 - DNA, 114 bp, Homo sapiens
ctctcccaggccacaagacatttcctgctcggaaccttgtttactaattcaattctgtggtgttcttggtcacacatttatggagtttctgaagggcagtggagattactgcca

SEQ ID NO: 561254 - DNA, 98 bp, Homo sapiens
tccctcaagaatgtgcatgctgctgtggcccgagggaggcagatgggctggtgcaggcactgcagaccaaggtgacccagcaggggctgaagatggtg

SEQ ID NO: 561255 - DNA, 100 bp, Homo sapiens
ctcggctacaacatttggcagagagccgaacactgtcagctacagccagtccagcttgatccacctggtggggccttcagactgcaccctgcacggcttt

SEQ ID NO: 561256 - DNA, 90 bp, Homo sapiens
gccctgtctgacagaactcattctcaccaataatagtctcgtggaactgattgtccgtgtggagcccttggtgaccatgggccaggtgac

SEQ ID NO: 561257 - DNA, 75 bp, Homo sapiens
cctcaggctcagatcagtggccgaggccccagaggctccttcactacttccgcggccgccaccacctggaggaga

SEQ ID NO: 561258 - DNA, 100 bp, Homo sapiens
ggaagatggtagctgtaaacctggccactggaaaacgaaggcagtggcgattttgacagccacataccctgtgggtcacatgccatacggctggttgacg

SEQ ID NO: 561259 - DNA, 83 bp, Homo sapiens
gccgacatgttcacgcacgggatccagagcgccgcgcacttcgtcatgttcttcgcgccctgaagtcaatgaaaggattctat

SEQ ID NO: 561260 - DNA, 89 bp, Homo sapiens
tttgctggttataggaactacactggttgggcagctgccagacagcagatatgggcacggttatgaaatattttgtgttacttgtaaca

SEQ ID NO: 561261 - DNA, 100 bp, Homo sapiens
ctcagaatgaacaaccatattctaccttggtgaataacagcgagtgtgttgcaaacatgaaagaagctttgcatcgtccctatggttgtgatgttgaacc

SEQ ID NO: 561262 - DNA, 97 bp, Homo sapiens
tcaaatccgtgtcggagtccttacaggacttcagaaatgggcttgggaaccagctgagttcaggatcccacacctctgctgcatctcagtgtgactc

SEQ ID NO: 561263 - DNA, 75 bp, Homo sapiens
gctggtcctgctgcgagccggcggcccggagtggggcggcgggctcttgtcaggatggtgaagctgttcatcgga

SEQ ID NO: 561264 - DNA, 95 bp, Homo sapiens
tcgaccccctctaagatacccaagatatggaagatgagaatgtgcctactgctcctgatcctccaagtcaacatttacgtgggcatgggacaggc

SEQ ID NO: 561265 - DNA, 82 bp, Homo sapiens
ggccgtggtgcgggctctgcagcgagcgctcgatggaacctcatcccagctcttttgaaacagatggtcaccatgtttagat

SEQ ID NO: 561266 - DNA, 106 bp, Homo sapiens
ggggcggctctgcgctggccgggggcgcgggcggcggcgccggcaggaagatgccttcaattaagttgcagagttctgatggagagatatttgaagttgatgtgga

SEQ ID NO: 561267 - DNA, 100 bp, Homo sapiens
cggaagacagacgtcccccaaaacccctcgcctggctcggacccacggagccggcagcccagcactccgggccaattcctgtccccccagcagcatggca

SEQ ID NO: 561268 - DNA, 94 bp, Homo sapiens
cagattcgcagtggtcgcttcttctccttgacttctgcgctgacccaggggctggagcgaatcccagaccagctcggctacctggtactgagtg

SEQ ID NO: 561269 - DNA, 100 bp, Homo sapiens
ctgagggctgggcactccccatcacacacacaaggaagcagctggccgaatgtcaaaagcaccttggacaaattgaaaatcggacgggagtggcaagctg

SEQ ID NO: 561270 - DNA, 90 bp, Homo sapiens
gacgaggaaagaggaggaaaacaaaagctgctacttatggaagatacaaagggccagctaaataaagacatgacctatgcgcagttgtac

SEQ ID NO: 561271 - DNA, 98 bp, Homo sapiens
aatggtgtgcttctatttataccaagacaagttgttgcatggcaccgaccttattgtgtagatcttgaagagagtaccttctcacacctgcgttcttt

SEQ ID NO: 561272 - DNA, 75 bp, Homo sapiens
ggactccatgcaggctgcgcggaaactgccctgtggacatcttttccacaagaaaacaatgaagagtcgttatat

SEQ ID NO: 561273 - DNA, 75 bp, Homo sapiens
atcgaatagtgactatagaagctaacaagggagaccagtgtaaatttgatcatgatgcagagatagaaaagaaaa

SEQ ID NO: 561274 - DNA, 100 bp, Homo sapiens
gatatgctgtgcaagtcttgcttaatgtatctaaggttaatgttcgtgaagaaattgaagagttttttccaagaatgtggaagataaatcaagataaaag

SEQ ID NO: 561275 - DNA, 100 bp, Homo sapiens
agaagcaagaaggccctggacacagcaatatctctgggctttcacaggaaaaccagtagattcccagacatcgcgaagtgaatctgaaattgtgccaaaa

SEQ ID NO: 561276 - DNA, 98 bp, Homo sapiens
caaagtttgtgcttcaggaatgaaagccatcatgatggcctctcaaagtcttatgtgtggacatcagggtgacattacttccattcctgaacttgctg

SEQ ID NO: 561277 - DNA, 100 bp, Homo sapiens
ctgcggctggaatcaggatagacaccaaggcaggacccccagagttatgtgtctcggtaccacgtgaaagactcctcacgccacgtcatcctaggcaccc

SEQ ID NO: 561278 - DNA, 51 bp, Homo sapiens
accttccacgtggattctccagacgagagaataatcatgggccagactggg

SEQ ID NO: 561279 - DNA, 80 bp, Homo sapiens
tgctgcacacggatggtcccttggccagctcctggcgccactacattgccatcatgggtccgcaagcaggtggtgaacat

SEQ ID NO: 561280 - DNA, 75 bp, Homo sapiens
cttccatcctctggaaatcagctgtgccatatcctgcaaatgagagttctaaacttgtctctgagaaggtggatg

SEQ ID NO: 561281 - DNA, 74 bp, Homo sapiens
ttttttctcatggatgttcttcttcgagtatttgtagaaggctgaatgccaagggaacagaagcacccgcagta

SEQ ID NO: 561282 - DNA, 50 bp, Homo sapiens
ccaggcgcgggggcgacgacagaattccttgatctatgaacttttctctg

SEQ ID NO: 561283 - DNA, 75 bp, Homo sapiens
cgcaggaagatcggccgccgcggccagatggtgctccaagaggcagcttgtggacctggtgatggaaggggtgtg

SEQ ID NO: 561284 - DNA, 97 bp, Homo sapiens
acctggccgtggacacctgtgtcagcatgtgggacctggttctctccatcgccttgtctgtggggtgcactggtatcatgatattagctggtttgac

SEQ ID NO: 561285 - DNA, 76 bp, Homo sapiens
gcagctccttccgcaagctctttaaaaagaagtttaaagtaaaggtgggtgctgatctccaggatgacatgcgaag

SEQ ID NO: 561286 - DNA, 82 bp, Homo sapiens
acggagagaacacgagcccatcaggggacggcaaaacagaacagaaaggcggagataaaaagaggggtgttaaaagaccacg

SEQ ID NO: 561287 - DNA, 75 bp, Homo sapiens
acctccttcgccacttacagtatgcaacacattttcctatacctctgatgtacctgtgtggtctaagctggaatc

SEQ ID NO: 561288 - DNA, 83 bp, Homo sapiens
ggatgcagcactggaagaaaatggtttggctgtgataggagtatttttaaagagctggactggccattatggaggaggagctg

SEQ ID NO: 561289 - DNA, 80 bp, Homo sapiens
acatctcttctgaactcaagaccagacaatgcagatcttcgtgaagactctgactggtaagaccatcaccctcgaggttg

SEQ ID NO: 561290 - DNA, 101 bp, Homo sapiens
gaagaactcagggtggttcaggtgtgacatgggttatgtgggcatttctggattgctctgggaaggtatcggctaacaagggtgaaattggtgatgccact

SEQ ID NO: 561291 - DNA, 100 bp, Homo sapiens
gctggagcccacagagcctgggcctcttggtttgtgtgcagcttggtgtattatggcctaactctgagtgcgggtgatctaggtggaagtatttatgcca

SEQ ID NO: 561292 - DNA, 100 bp, Homo sapiens
aaacgttgttttatttgtggaagagaagggcacattaaaaaggaatgcccacagtttaaaggctcttcagatcctgcaccagttcaacttatagttcagt

SEQ ID NO: 561293 - DNA, 98 bp, Homo sapiens
acaggagcacctgctggcgctaaaagggttacacatcattttggaatgactgtatatcatctggattacgtggctgtatgttaattgaattagcattg

SEQ ID NO: 561294 - DNA, 95 bp, Homo sapiens
cggggactcaggagtgcccgcgccctgagcgctcagctccagaggcgattcgacggaggcgccttgcacgacttgctggtggacagacctctcag

SEQ ID NO: 561295 - DNA, 100 bp, Homo sapiens
ctacaaccttcgatctcctgacgagcagaagctcctcctggggtagagacagatcttattgatgttggattcacagatgatgtgaagaaaggaggccctg

SEQ ID NO: 561296 - DNA, 113 bp, Homo sapiens
cctttggagacaagtttactccttatgtggggcccatcatcccctgtatcctcaaactgtcggaaaaggtaacagaagatggaactcgaaatcccaatgaaaaacctacccag

SEQ ID NO: 561297 - DNA, 88 bp, Homo sapiens
ggtccctgtgacctgtggagacacggccagatctgccctccacatctacttgtttccaaagttatttgggtcagcattttcctccacc

SEQ ID NO: 561298 - DNA, 100 bp, Homo sapiens
cttcctcggccgagccgggccgcgccgccgctgccgccgccgcgcgcggcaagatggattctggatatactctgagtattgtaacaaccacctggatgct

SEQ ID NO: 561299 - DNA, 100 bp, Homo sapiens
gtttcgcaactaaaaatggtatcaaagtaacagtggaaaatgcaaagtgtgtgcaagcaaatgcttttattcaggtgttccatttggtttaaaaaatact

SEQ ID NO: 561300 - DNA, 75 bp, Homo sapiens
atgttaagacattcttggaagccttaccggatgctgaaaacgccattcaacagatgggtggccagtggcttggtg

SEQ ID NO: 561301 - DNA, 75 bp, Homo sapiens
ggcactttcttctcaatttcatatggcaacaaactcttctcttttaaaaggactaaaacatgctaacatagtgct

SEQ ID NO: 561302 - DNA, 100 bp, Homo sapiens
ctcctcctgatgcttttgcagaccgcggtcctgcaggggcgcttgctgcgagatgaccaggatagtgaaaagtcaaaaccagcaggctcagatggtgagc

SEQ ID NO: 561303 - DNA, 100 bp, Homo sapiens
gaccggcccccacctttcctcaggagtcatttctgttccgcacaggcctgctgaactgggtgctttatataggatggcccactgcgtgaccttggttcag

SEQ ID NO: 561304 - DNA, 75 bp, Homo sapiens
caagaagcattcttcatctaaagataagacaggggcaagtgtccgagtggtgaatcagctacttacagagatgga

SEQ ID NO: 561305 - DNA, 100 bp, Homo sapiens
gtgaccagcccttgcgcgcccagagcaagatcctgttcgtgagaatcatgggtgagagctggcatggcccctagaggtcatttggggtccagctgcctca

SEQ ID NO: 561306 - DNA, 75 bp, Homo sapiens
ttctaagtttttggcaccatatactactttttccagaattcatacaaagagtgtgctgtgcctgaggaacaatac

SEQ ID NO: 561307 - DNA, 100 bp, Homo sapiens
caggaggccaaatcaaccctaactctggctaccagtacaagagactagaagagtgtctacccacagggaaagtggagaatgaggacatgaataaagacca

SEQ ID NO: 561308 - DNA, 100 bp, Homo sapiens
gaacggaggagcccccaccacggccactccccttcagtgacccaaagaacacacttccaccctgggcagcgtgtttggggacgcgtactatgagcagcag

SEQ ID NO: 561309 - DNA, 100 bp, Homo sapiens
gaaaactagagctgaaacaatgggacccatgggttggctttggtcgatggaccttgcactcaagtgaggagacaggccatgcctttcaagtgcatgcagc

SEQ ID NO: 561310 - DNA, 100 bp, Homo sapiens
ctgtgtcccacttgttcgcggcctataggtctggccgtgggcctgggcttcggggcactggcagaggtcgccaagaagagcctgcgctccgaggacccct

SEQ ID NO: 561311 - DNA, 135 bp, Homo sapiens
tgaatttgaaccaccgtttccatcgtctcgtagtccgacgcctggggcgatggatccgtttacggagatgctgtcttcgcaggtgccatgcctacaatggcaagcgtcaagctgtctacacttcatcccattgtg

SEQ ID NO: 561312 - DNA, 98 bp, Homo sapiens
gcacctgagaggaccccaggatctagggcaccatgccggtggaaaggatgcgcatgcgcccgtggctggaggagcagataaactccaacacgatcccg

SEQ ID NO: 561313 - DNA, 75 bp, Homo sapiens
gtgtatccatggagacaagagtcaaccagaaagagattgggtacttaatgggtgtccgcaatgttgccagtgtct

SEQ ID NO: 561314 - DNA, 90 bp, Homo sapiens
gttacatcaaaaattcttcatctggctcagagtcaaggtagcctttccagtaaatatatgactcagggaaaagcctcagcgaagaggacc

SEQ ID NO: 561315 - DNA, 75 bp, Homo sapiens
agagcagaaggatgggaggaaggtcctcctacagacttaattcagtgcacaaatgagatgaatgtgaacatccca

SEQ ID NO: 561316 - DNA, 95 bp, Homo sapiens
aaccggtagcgcttgcagcatggttgaagccatccttgtcaatatatttggtggtatcgtcaactgtgccatcattgccaatgggatcaccaaag

SEQ ID NO: 561317 - DNA, 100 bp, Homo sapiens
tgcctccttattgcggaaatgagctccaccggctccctggccactggggactacactagagcagcggtgctgagcacagtgctctccatgtatgttgtgt

SEQ ID NO: 561318 - DNA, 97 bp, Homo sapiens
ctgagaggaactgagacccaagcagctcagtaaagattttttatcaagcagaaatgcatcgaacaacgagaatcaagatcactgagctaaatcccca

SEQ ID NO: 561319 - DNA, 100 bp, Homo sapiens
atattcatccacatccaaaagattgggttggtatattcaaggtagtatcttccccagcagatgttgctgaaaaagctgacagaattattacaatgctgcc

SEQ ID NO: 561320 - DNA, 75 bp, Homo sapiens
cgactactgtcagcagctgtgccagcctcgaagcggaggatccctgtgtcccagccgggcatggccgacccccac

SEQ ID NO: 561321 - DNA, 100 bp, Homo sapiens
gtgaattaaaggaggaggtgacacggctgaaggaccttcttcgtgctcagggcctgggagatattattgataacagtacaatgtagattataaactggag

SEQ ID NO: 561322 - DNA, 129 bp, Homo sapiens
ctttgtgtcctgagatcaaatggcacttcattggccacctacagaaacaaaatgtcaacaaattgatgggtttcccaaaccactccttatgatccagtgaatattcaagagagctacatttgaagcctg

SEQ ID NO: 561323 - DNA, 100 bp, Homo sapiens
ctcaaagaactaatttttgaagagactgctagattccagccaggatacagatcttaaatttgtcagacagttaaatctcacacagaaacagatgagaaac

SEQ ID NO: 561324 - DNA, 98 bp, Homo sapiens
cgtggacaaagctgttgtctcagggagcacagaagtctagtgacggagcccgcgcgcggcgccaccatgcggcagaaggcggtatcgcttttcttgtg

SEQ ID NO: 561325 - DNA, 74 bp, Homo sapiens
aatatcctcggaagagcgctcccaggagaaacaaatccagaagtggggcaacattgagtgggcccatgactatg

SEQ ID NO: 561326 - DNA, 51 bp, Homo sapiens
ctggaccagcttaatggttctgtgtaccacatgaaggaagatggttgggtg

SEQ ID NO: 561327 - DNA, 95 bp, Homo sapiens
ttcattcctagtcattctctgtaaaggaccgtataatagacgctggccccaaaggaaactactctcgatttatgaatcacagctgccagcccaac

SEQ ID NO: 561328 - DNA, 100 bp, Homo sapiens
gctcccatcattgatgtggtgcgatcggtgtttggagaagagggattgaccctgaatcttgaagacgttcagcctcatgacttaggaaaagttggagagg

SEQ ID NO: 561329 - DNA, 100 bp, Homo sapiens
gtctgattcagatgacaactgtacagatgtcactgcgccatcatgaccgggtcctataacaacttcttcaggatgtttgatagagacacgcggagggatg

SEQ ID NO: 561330 - DNA, 90 bp, Homo sapiens
cacttgctctgcgctgaggtgctgggacagccatggtttcagacgtgagaaggcaaccaaagtgcaggacatcaaaaacaacctgaaaga

SEQ ID NO: 561331 - DNA, 146 bp, Homo sapiens
cagagcctggagtctgcgaaggccgggacccggttccccggcccacagtgggggtgtgcaaacccgagagaactgggtgttacacataatattgcattacttcgagaggtgataatcaactcacgctttgtaaaaggagacatcag

SEQ ID NO: 561332 - DNA, 75 bp, Homo sapiens
tgacaatctcctcagggaaggggcagcacatgaacacctacctcttcatgatgcaagcccaaggcattctgatcc

SEQ ID NO: 561333 - DNA, 90 bp, Homo sapiens
aaatacagatgacttcaccacagaaactttagaatggaggctcggttcttctgacattcttaattacagaggtgctgatactcaaagaag

SEQ ID NO: 561334 - DNA, 78 bp, Homo sapiens
agaagacggggcctgcagctgtgtttgcccttgagggggccctgggactggtgattgcagctggaagtgcccatgacc

SEQ ID NO: 561335 - DNA, 78 bp, Homo sapiens
gtgccaggggacaggctacattccaacagtattggaccaggtacagacatttctcccacagatggcacgggcaaatga

SEQ ID NO: 561336 - DNA, 100 bp, Homo sapiens
gctcctcttgtcatcccactcagcgccatgtcctggatgttcaagaggtggttggaggcaaagtaaagaagcccggtaaacgtggtcggaagccagccaa

SEQ ID NO: 561337 - DNA, 50 bp, Homo sapiens
catattttggaaagcagtttttaagacaaattcgcaggctgaggatcgag

SEQ ID NO: 561338 - DNA, 90 bp, Homo sapiens
caaagcgcctgaggaccggcaacatggtgcggtcggggaataagatcctgacaccaagacgtggaacttcagcatgaatgactatagtgc

SEQ ID NO: 561339 - DNA, 118 bp, Homo sapiens
ctcgatcagctctcgcagtcggagaggcggctaaggaaaggtgccacagcagagacgcgaaggagaggccctagaaccgacagagtctgaggtgcctcccagaccagcctcccccaag

SEQ ID NO: 561340 - DNA, 75 bp, Homo sapiens
agaagtctactaatggacagttagtcacccacctacatgttgagaagtccccacgagaagaagaagaagaggcgg

SEQ ID NO: 561341 - DNA, 100 bp, Homo sapiens
tataccaaccagctgctccaggcaatgcagcgcgtctatggagcccaggtagaacgtcatgacatgaataccttaagcctgcccctgaacatacgccgag

SEQ ID NO: 561342 - DNA, 50 bp, Homo sapiens
gggaagtggatgatgatgatgcaggtgctgatgctactaaggatgacggt

SEQ ID NO: 561343 - DNA, 100 bp, Homo sapiens
attcgaaggaccggggaccttggatagtaaaaccagtggcatcttcaagggggcggggcgtctacctgatcaacaatgttagtggttacttggatgattg

SEQ ID NO: 561344 - DNA, 50 bp, Homo sapiens
cactgccaaccggccagaggacgagtgtgacacatctttgccatcgtggc

SEQ ID NO: 561345 - DNA, 74 bp, Homo sapiens
gacttggtgcactctatacctactgggttcccctggcgaaggaggtggaggagaccatcgagggcatgctcctc

SEQ ID NO: 561346 - DNA, 96 bp, Homo sapiens
tgcttctgcggctgtacggagccatcttgcagaacctcaagaaggcatgaagccagcccctgcagtgccgtccacccgcccctctgggcctgcctg

SEQ ID NO: 561347 - DNA, 95 bp, Homo sapiens
ttcaccaaataatagctgtttgtattttggctgctgcaggagccattttagggatatcagtatgaacaacattactcagttgccagaagatgcat

SEQ ID NO: 561348 - DNA, 75 bp, Homo sapiens
ggcggcggcgccatggcagggcttgcaggtcaaaatgcagatcttcgtgaaaacccttaccggcaagaccatcac

SEQ ID NO: 561349 - DNA, 75 bp, Homo sapiens
acctgaatgcctacttgcaacagggttgcaaactgtcttccagaagttgggatatctaaagcagaagccttagaa

SEQ ID NO: 561350 - DNA, 75 bp, Homo sapiens
cgagatcccctgtgtggccaagaagctggtgtgcggagatgaaggatatgggtctgcaggatggagttcttccgg

SEQ ID NO: 561351 - DNA, 82 bp, Homo sapiens
atatcataagtggaattttggagatattcaaagataacgaaggaggcccaacttcattcaataaggagcctgacggatttat

SEQ ID NO: 561352 - DNA, 101 bp, Homo sapiens
gcaggaacagggagagagtagggacagcgactgggagacgcgctccacagaaacccggactgagaggcagcgagaggatggataatcaaatagtggtttct

SEQ ID NO: 561353 - DNA, 101 bp, Homo sapiens
ctgaggatggagaactcagcaacctgcagccagttacctactgcgagccggccttctggtgctccatctcctactacgagctgaaccagcgcgtcggggag

SEQ ID NO: 561354 - DNA, 75 bp, Homo sapiens
agcaccatcgagccagaagcagtatttgtcctgacttttgaatcagctgtgcaagagaatatcagcattaatggg

SEQ ID NO: 561355 - DNA, 75 bp, Homo sapiens
catcttcatcatgcacatcttcaagcatgctcaggcggcatgcgttcctgcggacgatcgcatcttgtgtcgctg

SEQ ID NO: 561356 - DNA, 75 bp, Homo sapiens
ggctgccatcttagtctagggactgaggagtcgccgccgccccgagtcccgaattttgatttggctgctgggctg

SEQ ID NO: 561357 - DNA, 75 bp, Homo sapiens
atctgaaggaggggcttctggttagcccagagtaatcagtgtgagctgagctctttccctgaatgaatccaagta

SEQ ID NO: 561358 - DNA, 50 bp, Homo sapiens
ctctacaggacccgatatggcatccctgttgatgaaaagcccagaacctt

SEQ ID NO: 561359 - DNA, 80 bp, Homo sapiens
cacatacgtcaaggaaattgagattggcggcagtaagcacacaatgaatgatcacctgcatgtcggcagccacgctcacg

SEQ ID NO: 561360 - DNA, 82 bp, Homo sapiens
cgacaagccgctggcagccgcggatctcaccgccgctcagggtactaggttttgacaagcttgcatcatgcgtgagtataag

SEQ ID NO: 561361 - DNA, 90 bp, Homo sapiens
cagcaaacagtctgcctctgctgtgcaggttgcagagcctgaggcctgtgatcagatgtacgagagcttagcgcgactccattcaaacta

SEQ ID NO: 561362 - DNA, 97 bp, Homo sapiens
tacgctgacctgtacagcctacacagctggtgcgggatccttgtctttgtcctgtactttgtgcaggtcagaggacatgccttttagccccaaagca

SEQ ID NO: 561363 - DNA, 75 bp, Homo sapiens
attggaggagccacccgcacagacatctgccaaggagccctggccgatcaaagtccagatctccatctccaaaaa

SEQ ID NO: 561364 - DNA, 107 bp, Homo sapiens
attaatggatgttccagtatttaaagctattcaaccagatatagtcactgccaatccttggaacacaattgctcttctctgtggcgccttcttggcattatttaaag

SEQ ID NO: 561365 - DNA, 100 bp, Homo sapiens
gagattttcagcctgggtggaacccgcttccgagatacagcagtctggttgccaaggtccttccatagtgacgccccccaaggacatctggaatgtcact

SEQ ID NO: 561366 - DNA, 87 bp, Homo sapiens
cagttatgggtcgcaagaagaagaagcagctgaagccgtggtgctgctctccagggcacaccgtattcagctctgagcggtctttgc

SEQ ID NO: 561367 - DNA, 82 bp, Homo sapiens
ggcgccgaagaggcgactgaggccggacggggcggacggcgacgcagcccgcggcagaagagacaagaggagcagcagcggc

SEQ ID NO: 561368 - DNA, 100 bp, Homo sapiens
caggccggctctttgagctggatgggctgaaggtctaccccattgaccatggagctgccctcctggacctggagcaaaccaccctgccaggcattgcaca

SEQ ID NO: 561369 - DNA, 96 bp, Homo sapiens
gaagacgacgggcagccccggactctgtgcaaagttccccatcaagtggacggcccccgaggcagccctgtacgggaggttcacaatcaagtctga

SEQ ID NO: 561370 - DNA, 75 bp, Homo sapiens
gaaattgaagccattcatgcaatcttgagatcagagctatcatggtgaacttacttcagattgtgcgggaccact

SEQ ID NO: 561371 - DNA, 96 bp, Homo sapiens
tgggcagtcctagtccgaggtgccaccgtggaaggacagaatgctgctcagatggaagataaaaagccctttatcctgtcttccatgaggcttcct

SEQ ID NO: 561372 - DNA, 100 bp, Homo sapiens
atgcctagaccctgcccaacagaatttatatagagatgtgatgttggagaactacagaaacctcgtctccctgggcaacacttccccagatcaaaaggag

SEQ ID NO: 561373 - DNA, 82 bp, Homo sapiens
gccgccgcgctgcgcaagctcgccaaacaggcggaggagcccagagacaatgcagatcttcgtgaagactctgactggtaag

SEQ ID NO: 561374 - DNA, 82 bp, Homo sapiens
ctcagacaagacggtggaggtcaagcccgggatgaagtcacgaaaaaggagaagcgggctctagggaactggaagttgctgg

SEQ ID NO: 561375 - DNA, 100 bp, Homo sapiens
gcggtatccaattggcatccagggtcggactcccggggccatggccggaatgcagtaccctcagcagcaggagggtgaggacaaaatcttcttaatcaac

SEQ ID NO: 561376 - DNA, 50 bp, Homo sapiens
tcggtgctggagaacttcgtgggccgcagttccaagagcctctgagttcc

SEQ ID NO: 561377 - DNA, 100 bp, Homo sapiens
agaagtacagcccaatgtagagtacaaatgcaggttgtacagcagttagagctacagacaatgcctgtggaagacaagtcagaccccccagaggggtctg

SEQ ID NO: 561378 - DNA, 85 bp, Homo sapiens
atcatgtctgcgagccaggattcccgtccctgaagaggaaggagaaggaatatgagcatgaaatggagcggctggcacgtgagaa

SEQ ID NO: 561379 - DNA, 97 bp, Homo sapiens
ctggacatgataagcttaatgaggaaatatcaagaacatgaagatgttcctatttgtattcattgcagcgtattctcagctatgacacagtggtgca

SEQ ID NO: 561380 - DNA, 73 bp, Homo sapiens
gaaagtggggtgagagactatagcaagcagaacatctaaatatattgctgtttgggttagcacaaaacctgca

SEQ ID NO: 561381 - DNA, 100 bp, Homo sapiens
aggaaagaaacttcctcctggaggaatacctggcattgacctctcagatcccaaacaactggcagaatttgctaggagatctctttgctgccactttcct

SEQ ID NO: 561382 - DNA, 75 bp, Homo sapiens
ctgcggcagagcgtgtctgaggtggtgcgcggctccgtgctcctggctccatctactctttgaagcttctgccca

SEQ ID NO: 561383 - DNA, 83 bp, Homo sapiens
ccggaggattgtggctgtcacaggtgccgaggcccagaagattttgactaaaggagaagttcaagtatcagataaagacacac

SEQ ID NO: 561384 - DNA, 100 bp, Homo sapiens
gcagccttcagcttttggcagcatgaaagttagcaatgccaccggaaatgtcatcttctccccagacgctggcttgcaagcacagcagcacccagaggct

SEQ ID NO: 561385 - DNA, 50 bp, Homo sapiens
tgctgctgctcgtcagcgaccccaggacaagaagaggcaagcatctcctc

SEQ ID NO: 561386 - DNA, 99 bp, Homo sapiens
tccgcacgcgggtggagacgacccgcaggaaggagatgaccagcctcagggcctttgccatctatacctccatctccacccttctaccgtgaaggtgag

SEQ ID NO: 561387 - DNA, 49 bp, Homo sapiens
cgagcccatcaaggtgtacggacagataaaataccatgaggagtttgag

SEQ ID NO: 561388 - DNA, 74 bp, Homo sapiens
atttctgcagtgaagattgctgtaaaaaatttcaggattggtactacaaggaatccagaaccctggctgaaatt

SEQ ID NO: 561389 - DNA, 100 bp, Homo sapiens
aatcaatgtcattctgaccttgtgggtttcctgtgctaatggacaaggtatcaattgctaggtgagattaattaccgtgaatgtgacacagatggatgga

SEQ ID NO: 561390 - DNA, 90 bp, Homo sapiens
aaggaaacctttccaacacagatgtccaagctgccaattcagattctgaaataataggttatgctttggacacactatataatataatat

SEQ ID NO: 561391 - DNA, 75 bp, Homo sapiens
tagacactgttgacatcctaggatgcacagctttacacagaggggagaaaaggcctcggagtaaacttcccagag

SEQ ID NO: 561392 - DNA, 91 bp, Homo sapiens
gggagtcctcagcagggggatcattcacagtgaggacagacacaggtgtcgtgaaaactacccctaaaagccaaaatgggaaaggaaaaga

SEQ ID NO: 561393 - DNA, 75 bp, Homo sapiens
ctatgtttggatgttggatctacactttctcaagcactgtgatcttcaaataggcctttgaaattgttgttcgcc

SEQ ID NO: 561394 - DNA, 100 bp, Homo sapiens
tacagaaacctcgtctccctggtccccctctacacaagaatctggatgcacgagaaaagtctaccttcagagaggaaagcccacttaggatcaaaatgat

SEQ ID NO: 561395 - DNA, 104 bp, Homo sapiens
ggctgcccactgactgtcctgtccctgctgggccgtgtttggactcctgcctcggtgagaagccctaccactgcaactgggacggctgcggctggaagtttgcg

SEQ ID NO: 561396 - DNA, 80 bp, Homo sapiens
tggactgagtcctgcaggacacagaaaattcatttgcaaattgcccgacaaaggtaaaaagatctttgactcttttgcca

SEQ ID NO: 561397 - DNA, 96 bp, Homo sapiens
caaggcaaagtttgagaacctctgcaagctcatgaaagaaatcttagataagaaggttgagaagaccctcaccaggacctagaaaacgccaatctt

SEQ ID NO: 561398 - DNA, 83 bp, Homo sapiens
gagacttttggggggaaactaggtcgatggtcggcggcgcccggatgggcagctgagttgatattcactgatggactccaaag

SEQ ID NO: 561399 - DNA, 75 bp, Homo sapiens
gccatggacaccccggaaaatgtccttcaaatgtgaaggctgtgtctgagactcctgcagtgccaccagtttcag

SEQ ID NO: 561400 - DNA, 88 bp, Homo sapiens
cagccccgctcccccggacccatcggcgcgctgcccacacctccaggcgaccgggaacttagtgatttggcccgtgaccctccagcac

SEQ ID NO: 561401 - DNA, 82 bp, Homo sapiens
cactctgtttatgagaattttatgttgctgatgaacaacttagaatggagtataaaggttggatttggtctagggagtccca

SEQ ID NO: 561402 - DNA, 50 bp, Homo sapiens
cgaggaggaggaggaagaggaggacccatgggccgtggaggctatggagg

SEQ ID NO: 561403 - DNA, 75 bp, Homo sapiens
tggtggccctaacacagggggaatgggagcctattgtccagcccctcagagtacaggggctcaggtccaggtggc

SEQ ID NO: 561404 - DNA, 84 bp, Homo sapiens
gcatcatctgtactcgtctctcaccaaagaagattattgagaagtgggtggactttgccagatgtatcggcaagcagtgtaaac

SEQ ID NO: 561405 - DNA, 82 bp, Homo sapiens
gcagcgccgaggccgcggccctgggggcccgcaatccacgccacggaatccccgaggctccccacaggtgcaggaagccgcc

SEQ ID NO: 561406 - DNA, 101 bp, Homo sapiens
attatcctctgtttctctgctgcaccgacctcgacgtcttgcctgtgtcccacttgttcgcggcctatagggtgacatccagcagctgctctttgtctcgg

SEQ ID NO: 561407 - DNA, 100 bp, Homo sapiens
accgccggcgccggcccagcagctgcagccgcagcctgtggctgtgcagggccccgagccggcccgggtcgaggctttcttagaaatggcttctgaggaa

SEQ ID NO: 561408 - DNA, 75 bp, Homo sapiens
ggcggcggcggccgaggaggaggagggggaagcggcggcggcaaaggatatggaatatatgaacgctgtcgagaa

SEQ ID NO: 561409 - DNA, 83 bp, Homo sapiens
ctctcgatgagtcggagaagtcccgtgtcgtgaaaactacccctaaaagccaaaatgggaaaggaaaagactcatatcaacat

SEQ ID NO: 561410 - DNA, 75 bp, Homo sapiens
ccaccaccgtcagctcggccagggctggacctgtcgggacgactgtaagtatgagtgtatgtgggtcaccgttgg

SEQ ID NO: 561411 - DNA, 100 bp, Homo sapiens
tttgctctgaagcatctagtacttatcaaaggatttacaagaccagctagaggatatgatggaagatgcaaatgaaatccaagaagcactgagtcgcagt

SEQ ID NO: 561412 - DNA, 74 bp, Homo sapiens
ggtccccgagtggttccatggtgcaatctcaagagaggttgaaaaataccggccacagaccctgaatgatctca

SEQ ID NO: 561413 - DNA, 80 bp, Homo sapiens
cagatggtggaggaatacacttatttatgaaggggatatgagactttctactcggaatatcctgagtgttgcgtggatgt

SEQ ID NO: 561414 - DNA, 90 bp, Homo sapiens
tgaattcgaaaagcagttcaacgagaatgaagccatccaatggatgcaggaaaactgccaactgggtacatggaaaactcagtctcctac

SEQ ID NO: 561415 - DNA, 97 bp, Homo sapiens
tcgtagtcgctcgggaaaatgttatcgcctttatacagaggctgacccgcggctgattgagtccctctcccagatgctgtccatgggcttctctgat

SEQ ID NO: 561416 - DNA, 87 bp, Homo sapiens
gagtgcaacatctgcaaggtccgcttcaccagtgccatctccctcttctacgagctctcggagaatgacttgaacttcatcaagcag

SEQ ID NO: 561417 - DNA, 75 bp, Homo sapiens
agaagcagcgcctgatcgagtccctccggaactcacactccagatgttctcagtgcagctgagtcttggtgagca

SEQ ID NO: 561418 - DNA, 75 bp, Homo sapiens
gatccgcttcagcaacatttccgccgccaaagaaataaacggtgactggcaaagagctgatgcagtctggaataa

SEQ ID NO: 561419 - DNA, 100 bp, Homo sapiens
ggctctgactactgtaagatcgctgagcagctgggtgacggggatgaagctgagatctgtatctgtggacctgaatgttgatccctcgcttcagattgac

SEQ ID NO: 561420 - DNA, 98 bp, Homo sapiens
tgattttagctacatcaagtgatgaaaaacacccacctgaaaatatcattgatggatgaggaaactgaggcttggtgaagttacgaaacttgtccaaa

SEQ ID NO: 561421 - DNA, 83 bp, Homo sapiens
ccttggacctctgaaggaatagaacggtcaaggagattatgtctacgtttacagcttggtacagctctgtttgcaacaagatc

SEQ ID NO: 561422 - DNA, 100 bp, Homo sapiens
gagatggtggaggaggcggtggaagcgcacgatgggatcgtgattaagatcgaggtacagaccaacgacgagggctcagaaagtttggagacacctgagc

SEQ ID NO: 561423 - DNA, 82 bp, Homo sapiens
gatatgtgcaggctatgaagaaggaggaatagattcttgtcaggaaccatcactgttgctggaggcacctgacaaatcctag

SEQ ID NO: 561424 - DNA, 83 bp, Homo sapiens
aagggacaatggtcaccgtctcttcaggtcatcatcagatttgaaatatttaaagtggatacaaaactatttcagcaatgcag

SEQ ID NO: 561425 - DNA, 51 bp, Homo sapiens
cgaacatcttctggacctttgtccaggtatcaacttgaactgaaggatgac

SEQ ID NO: 561426 - DNA, 96 bp, Homo sapiens
cttggaaagagactctgcgtcaggtcacccagcagagatcagcaatccttggctcactgaggaggtttgatgccacctcagtatggacagcaaggt

SEQ ID NO: 561427 - DNA, 75 bp, Homo sapiens
gcctgagaacctgcgtttggcggaggaatcagagatcattgatttcttcctgggggcctctctcaaggatgaggt

SEQ ID NO: 561428 - DNA, 100 bp, Homo sapiens
ggccgccgggccccggggttgaggcgaggagcccgcgggcggccggtcgggcggggcggcggcgctgacagtaccttccactggaagaatctcaaacagc

SEQ ID NO: 561429 - DNA, 82 bp, Homo sapiens
tgcagccctggaggacggctgggacagcgagcccttcaccctggtggagcgagacggttctccttactatgacaatgtccgc

SEQ ID NO: 561430 - DNA, 98 bp, Homo sapiens
gatggtgcgggcaactacagcgtcaatggcaactgcgagtggctcatcgaggggcccagcactagaagatttcagtcatctgccaccagaacagagac

SEQ ID NO: 561431 - DNA, 73 bp, Homo sapiens
atttgttaaggattccaagtaactcttatttgcaacttgaaaacagtctgaatgaatttggtgaaaagtggga

SEQ ID NO: 561432 - DNA, 78 bp, Homo sapiens
ttcaccgccccacactggcggatgaagcagctggtggggctctactgcgacaaggttgatatccctgaaagtacttaa

SEQ ID NO: 561433 - DNA, 89 bp, Homo sapiens
gtcggatatttgcgaagaagctccctttcccacctagacctgcctagagctggaacgttacctccagagcgagccctgctatgtttcag

SEQ ID NO: 561434 - DNA, 100 bp, Homo sapiens
gcgtcaggtcacccagcagagatcagcaatccttggctcactgaggaggtttggcgataaactacattcagttgagtctgcaagactgggaggaactggg

SEQ ID NO: 561435 - DNA, 82 bp, Homo sapiens
attcagaaggatatcgacgtcgtgatccagaagtccagagctgaggactgcctgtttgcagaaccacgaagctgccctgaga

SEQ ID NO: 561436 - DNA, 100 bp, Homo sapiens
aatggtccgagcatgcattgccattatctgtgaactagctgtgttggagtagaagaacatcatgctgttgacattgacctgtatcactgtcccaactgtg

SEQ ID NO: 561437 - DNA, 74 bp, Homo sapiens
ctggacaatcagtattacctgggagctgactgaggatgaagatgcatcagggggcgatcaagatcaggaagaaa

SEQ ID NO: 561438 - DNA, 101 bp, Homo sapiens
tcttccgaagaaagcgagaaaggaacaggcgccttcaaaagcccacttggcgatgggttacagtaagagccagctgaggtgggtgtcctggttggcaaaga

SEQ ID NO: 561439 - DNA, 96 bp, Homo sapiens
tggcgaggcctttcaccaagtccatgagtacaggggctcaggtccaggtggcaggggatatgctacccaactcaactgagcgggccatcactattg

SEQ ID NO: 561440 - DNA, 100 bp, Homo sapiens
ctgactggggttctgagactccctgtcccggaccgcaggtgtcatggagaaactccagctgggcccagagattctgcagcgggaaaatccaaggcttatt

SEQ ID NO: 561441 - DNA, 98 bp, Homo sapiens
ctcctgagcagctgggactacagaagccccatgtgccactcccctgatctgcagcttcggtaggccggtggacctggagaaggacgactaccagaagg

SEQ ID NO: 561442 - DNA, 83 bp, Homo sapiens
gttaaagactcccagctccgggagttgctgctgcctccaccagacaccaaaccagatccagagacaatggccccgatgggatg

SEQ ID NO: 561443 - DNA, 100 bp, Homo sapiens
cggtttgctatcgggactcggcgaggacgagacagaagagatgggtgatgaagaagttttctcctggttgaagtgtgcaaagggacagtcccacgaacca

SEQ ID NO: 561444 - DNA, 87 bp, Homo sapiens
gctgtcaacaagaagagcagttcccaggatctgcataaaggtaaatgggcttgatactgtgagagtgcctatgtctgtcgtgaactt

SEQ ID NO: 561445 - DNA, 80 bp, Homo sapiens
agttttgaaaacatcagcaaatggcttagaaacatagatgagaatggatttctgcctgatcctccaagaatacgttacag

SEQ ID NO: 561446 - DNA, 100 bp, Homo sapiens
caggagttcgtctcttacgtctgcggaagtgcagctgcctcagttcttagcgcaggctgctccagttacagcaccacccggccgctgcacccggctgctc

SEQ ID NO: 561447 - DNA, 100 bp, Homo sapiens
ctggctgtttcgtgaaggagagagagcaacatctgaatgaattgatgacgaagaagtggctattagggtcaaacgctgtagacattatctgtgtcaccgt

SEQ ID NO: 561448 - DNA, 90 bp, Homo sapiens
cttggagtcatcaatttgatctttcagataatttcatctctcagcttcattttaggatcttagattacacacttactggatgttatgcag

SEQ ID NO: 561449 - DNA, 80 bp, Homo sapiens
gaggaagctgggacacccgggagtcaggaaatggatgtgggctctcttgatgagaagatgaagagcttggatgtgaatca

SEQ ID NO: 561450 - DNA, 100 bp, Homo sapiens
agaagaagctgctatgaggtctcgtaaacaggaggacattccatttctaaaccagttgtggttgatttactggagcgaggaaaagagccctggatgattt

SEQ ID NO: 561451 - DNA, 100 bp, Homo sapiens
gatattttcattatacagacaatacccagtatcccagtcgacatcagtgacagtgatatgatgctgaacatcatcaacagctctattactaccaaagcca

SEQ ID NO: 561452 - DNA, 50 bp, Homo sapiens
cgcgaccagaccggcccccccgagttaccttatcccatatcacacaactg

SEQ ID NO: 561453 - DNA, 98 bp, Homo sapiens
cgaagatggccgctgcgtcctcatcggattccgacgcctgcggagctgagagaagatgctcatgaagcagcaggaccggctggaggagcgagagcagg

SEQ ID NO: 561454 - DNA, 75 bp, Homo sapiens
ggccacccggagccagcggagggacagaataaatccaccagtaccccaacttctccggggccccggactcattca

SEQ ID NO: 561455 - DNA, 83 bp, Homo sapiens
ccgtaagtcctctgtcaccaacatcatctgaggctgaatttgataagaccactctaatcttccagtaccaacaattgcagcaa

SEQ ID NO: 561456 - DNA, 100 bp, Homo sapiens
ggaacctgccgtctccgccatcgagcgcccctccgagctggggttggacgctgccagtttgcacagcagcagctgggagtgtccactcgccttccaccag

SEQ ID NO: 561457 - DNA, 90 bp, Homo sapiens
gtggacgccgctgaccgccgcgcgcccgaaccgggtgtccacatgagtgcctctcccagcagatccaggaataactcaagtcacctgtac

SEQ ID NO: 561458 - DNA, 100 bp, Homo sapiens
tctggactgatctccatgtcctgttgtggggcttttacagcctttgggtggcacaagatctctgtaaagtagcaggcatagcaaaagttctggtggctca

SEQ ID NO: 561459 - DNA, 83 bp, Homo sapiens
aatgacagtgccaagccatattcagcccatgatgaagtggctgtaattgatgaaattcaaatgattagagatccagccagagg

SEQ ID NO: 561460 - DNA, 98 bp, Homo sapiens
accgggcacgtctcctccacttacgtggaggagctcaaggggatgtcgctgctggttcgggcagagtccgacggagatatgtcagtattgaattctcc

SEQ ID NO: 561461 - DNA, 76 bp, Homo sapiens
cgccagcaccgtcctggccacgacttatcagatgtagacttcctagatgattcttcaacggagagtttgcttctga

SEQ ID NO: 561462 - DNA, 100 bp, Homo sapiens
ggaaggcctgagaccatggaaaacttgcctgctctctacactattttccaaggagagggtggtgacttcacacgccataatggcactggtggcaagtcca

SEQ ID NO: 561463 - DNA, 71 bp, Homo sapiens
attcgagggcggatcctctctgaatttggactcatatcaagatgctctgaagaagaacaaccctttaggat

SEQ ID NO: 561464 - DNA, 75 bp, Homo sapiens
cgcgctcgttcccgtcggccggggtttatctggcaagactgaggcaaataagactacagaatttcaatgagcgcc

SEQ ID NO: 561465 - DNA, 75 bp, Homo sapiens
cgcagagtcggcacctgaaggacatggaggactgatcctttgaaatactccagccatgactaaaagagaagcaga

SEQ ID NO: 561466 - DNA, 50 bp, Homo sapiens
caaaggctattggatcagctcagcaggatttaatccagagactgacttca

SEQ ID NO: 561467 - DNA, 83 bp, Homo sapiens
agggatgagtcatgtggcagtggaaaatgcgctcgggctggaccagcagctagatacactgtcagatcctttggcatccggag

SEQ ID NO: 561468 - DNA, 76 bp, Homo sapiens
ccatttctatggtcctcctcacctatggccgctggcagtcactcctgaagccattggcttcttgtctgctgttggg

SEQ ID NO: 561469 - DNA, 100 bp, Homo sapiens
cattagagaaagagattggtccagaacagtttccggtcaatgagcactattttggattagtcaatggtccacatatagcctcagttacattagctgctta

SEQ ID NO: 561470 - DNA, 90 bp, Homo sapiens
aagtcatttctactggacttcatgcttagatacatgtataacaagtcagcctacgctgtgtccctgctgcgggagtgtgtgaagttgcgg

SEQ ID NO: 561471 - DNA, 100 bp, Homo sapiens
aggaggccgagccgggatctcaggtcctcgggggcggcggccacgccaaggacggcgtcgtctcggagatgcagccaagaaagccatcagtaaattgaca

SEQ ID NO: 561472 - DNA, 101 bp, Homo sapiens
gccggcgcgggagggctgtgtgatggcctcggagcgcccggagccggaggctgatgaattcatccgagcaaatgccaccaacaagctgacagtcatagctg

SEQ ID NO: 561473 - DNA, 98 bp, Homo sapiens
tgaaaataagcttcgagttcctcttcttgaaatactgaaatatccttacttgcttctacatgaacgtgttagctggagtgtagtggcatgatctcggc

SEQ ID NO: 561474 - DNA, 75 bp, Homo sapiens
agcgcgagagagcgcggccctcaggagcaaggcgaggctaagaatattgtacacaaagattcttgatgttcttga

SEQ ID NO: 561475 - DNA, 75 bp, Homo sapiens
gagggaggaacctggacgccggaagccgggaaatggaagctcttcgtgggcggtcttgactggagcacgacccaa

SEQ ID NO: 561476 - DNA, 98 bp, Homo sapiens
actatgcctgcgccgatggtagtgtccggaaagtgagcaagaagaacccatcaggtgattgtcaggcctctgagcccaagctaagccatcatatgccc

SEQ ID NO: 561477 - DNA, 75 bp, Homo sapiens
gtgctggttctgcctgggcagccccacgctgagagccctgaggatgatgacaggaaggtccgaaggagagaaaaa

SEQ ID NO: 561478 - DNA, 50 bp, Homo sapiens
tttaaacagcttctccgggtctcagcatgatgtgccgtttgggggtgcta

SEQ ID NO: 561479 - DNA, 100 bp, Homo sapiens
gggccgtggcccctgcagcggaaccggacccagtccctgagccgcccctacacccacagttttcggctttgtgagaaaccttaccatcaaacacgatggc

SEQ ID NO: 561480 - DNA, 80 bp, Homo sapiens
ccagtcacctctcaactgtgtgccaaagcaaacccgctggttcagaaccaacacctaagtcacgcattgcagaccttcct

SEQ ID NO: 561481 - DNA, 115 bp, Homo sapiens
ccagacctgggaggagttcagccgcgctgccgagaagctttacctcgctgaccctatgaaggccatggttgcttgttatccgggcaatggaacgggttatgtacgtcatgttgat

SEQ ID NO: 561482 - DNA, 98 bp, Homo sapiens
attcttgcaggcaaactatatttccccagacatttggatttccatgtaaagaaagaccacagcaagattctttcattcgtctcctcctagcctggggg

SEQ ID NO: 561483 - DNA, 60 bp, Homo sapiens
acaggtgagaggctcatccgagtgctgcaagttggaattaacgacctctggaaagatgcc

SEQ ID NO: 561484 - DNA, 100 bp, Homo sapiens
cctgtacacaacaagacagtttatcttgtccatgggactacacttgctgctttgaaggatgaagttgtatctgttgaaaatgaactctcagaattgcaag

SEQ ID NO: 561485 - DNA, 74 bp, Homo sapiens
agaagctaatcttgtacttcaagaggaggaatcacgctcggaaacaatggatctcctgggaggcccccgtggag

SEQ ID NO: 561486 - DNA, 75 bp, Homo sapiens
tgatgagacatctaggaggaaagctggtcatcagtttggagttacatggcggaaaatgtttcaacgtgcgcaaga

SEQ ID NO: 561487 - DNA, 75 bp, Homo sapiens
gtcaaagaagatgcctcgaactaaacaaattcatcccagaaatctaagaggccctgcatcatggaaactctttct

SEQ ID NO: 561488 - DNA, 100 bp, Homo sapiens
atattatcaaatctactactgttcatggcagaaacacagtgctctgtgcctatacagtgtacggataaaacagataaacaagaagcgctgtttaagcctc

SEQ ID NO: 561489 - DNA, 100 bp, Homo sapiens
aaagcatattttcaagacttcattgacagtggccgataaggggctaagccagctctaccataaccagagtcagggactcttatcccagctgcaaggacag

SEQ ID NO: 561490 - DNA, 98 bp, Homo sapiens
cgttaagtcccccaaagatgagatttacctgtgagatgtttcatcccaacagtgactgaaaactcctgaggcatttcctggactagaatgggtagtga

SEQ ID NO: 561491 - DNA, 89 bp, Homo sapiens
gttcgaagtggctgtgggtattgctgcggctggtgcgtcgtcgctctaggcaccaagtatagatgagaaagtagatcttcattttattg

SEQ ID NO: 561492 - DNA, 100 bp, Homo sapiens
cggagctgtggccgtgaagatgcgcgccttccagatatcaatgaatgcttggaggacaagagtgtttgccagagaggagactgcattaatactgcagggt

SEQ ID NO: 561493 - DNA, 98 bp, Homo sapiens
gcgggagcgcgaggtcgatgaggactcggagcctgagcgggaggtgcgaggtcggaagtctatgcgtcagtctacagctgagcatacacgacaaacgt

SEQ ID NO: 561494 - DNA, 98 bp, Homo sapiens
gaagagaaaatagcaaacgatccagacggcagggagtgcatcaaaggtgtgaacacaggttctggcctataggaacaagacattttcagtaatggaag

SEQ ID NO: 561495 - DNA, 100 bp, Homo sapiens
ccccccgtggtgaccatcgctccaaccaaaaccgtgaatggtgtctggaggagtgagagccggcagattcccaacttcttctggagcctggggatcggtc

SEQ ID NO: 561496 - DNA, 75 bp, Homo sapiens
gtgtaaaaacgtccgggtccaaagagagagtagatgatgagctggagatcaaggcctactatgcaggccacgtgc

SEQ ID NO: 561497 - DNA, 75 bp, Homo sapiens
aggggtagcgggagtgatgtctgtggggccgccggcggcccggcttcagactggaaagctacccttgaggagaat

SEQ ID NO: 561498 - DNA, 50 bp, Homo sapiens
ctcttcgtcaaccgctttggcaggggagttgctgagtcagcccagaccgg

SEQ ID NO: 561499 - DNA, 121 bp, Homo sapiens
cctcagcccctgccgtcggacgacacccgagtggagaacatggacatcagtgatgaggagtggttccagtggccggcgcaaggccaagaagaaatggcgaaaagacagcccatgggtgaag

SEQ ID NO: 561500 - DNA, 82 bp, Homo sapiens
gttgtattcatcaataatgaaatgctgactaaggaacaagactcagattgatggacaacttttcttaattaagcaccttttg

SEQ ID NO: 561501 - DNA, 75 bp, Homo sapiens
cgaatatcgtcatcgttagaaggtgtccgcaaatatggtaaagattttcaagctattgcagatgtaattggcaac

SEQ ID NO: 561502 - DNA, 75 bp, Homo sapiens
aacgcatcatgccagggagccaagcgtcctgcccggccgtatgaacgctgccgtccgtgccgtggtgcgcatggg

SEQ ID NO: 561503 - DNA, 100 bp, Homo sapiens
cggttggtagagggtttgagtccgcatcgccacagctgaaggctgcgagggactaagagcagaaaagttactgtggcccatgtcctaaaaactggatatg

SEQ ID NO: 561504 - DNA, 75 bp, Homo sapiens
aagttactggagccctcctctcctcagcaattttccagattattcaaagtatcaggatgggcatgtgaagtgact

SEQ ID NO: 561505 - DNA, 82 bp, Homo sapiens
ggaaaatttatccaccagaatttgccgtggagatactttttggggtaaagtccgcatggaattagagggggaaagtctgcac

SEQ ID NO: 561506 - DNA, 100 bp, Homo sapiens
cgagctgggtggtctggagaccatggagaccctcacggagctgggcgacgagctgaccctgggagacatcgacgggcgccctgcgtccggcagaggaggc

SEQ ID NO: 561507 - DNA, 76 bp, Homo sapiens
gcctcagcctgcaacacataggccggccccacagcggcattgaaaaagattgcctcaatctggataaaaacctgat

SEQ ID NO: 561508 - DNA, 90 bp, Homo sapiens
ctccttatgctgggtgaaaacaaaggcatacttttttgatgcaccagagatggaccatctcccaacaactacagctactccaaaccaaac

SEQ ID NO: 561509 - DNA, 98 bp, Homo sapiens
cagccaggaaccaagaaaacttgacctttccagctcacccccagggccttatggtcaagaaatgtatgcgtttcgatctgaggaaagattcaaatccc

SEQ ID NO: 561510 - DNA, 75 bp, Homo sapiens
cctggagacaccttacaccaactgaaactatgtgaagcaacactctggattttgaaagacatcttttcatcatgg

SEQ ID NO: 561511 - DNA, 100 bp, Homo sapiens
ggaagatcaagctgcaagtgcttgatattgcggtggtggagatgagcgatgccttccggcagccgtccttgttttaccaccttggggtgagagaaagttt

SEQ ID NO: 561512 - DNA, 96 bp, Homo sapiens
ctgggagccgttattggctgccgttaaggaccgttacgtttcccgggatacgcagctccacctggatgatgccctccggggccaggaggacctgaa

SEQ ID NO: 561513 - DNA, 96 bp, Homo sapiens
gggacgtcacatgtcattataccttcacccagcatttcatccctcgtcgaaaggattggattggcatctttagaattgctgctctctgaacactat

SEQ ID NO: 561514 - DNA, 100 bp, Homo sapiens
gcgtgaccgagagcgcgaatatcgtcatcgttagaaggcaccaaagagacagcatttatttatgctgtgatggctgcaggcctggtgcattctgtgacca

SEQ ID NO: 561515 - DNA, 98 bp, Homo sapiens
agccagcctaactgagctctggactttggggacagctgtcagtggcctaggccgcaggccagcgatctgtacatgagacccaggaattatttccaaag

SEQ ID NO: 561516 - DNA, 82 bp, Homo sapiens
atcatgaactagtgacctggaaagggggatatgagactttctactcggaatatcctgagtgttgcgtggatgtaaaacccat

SEQ ID NO: 561517 - DNA, 100 bp, Homo sapiens
aaaaaatgaatcaaaagaaaatctctaaatgcagattccagaaaaattacagcacatctcagtgaatttgcaagtgattttaccaaatgttgcaagaact

SEQ ID NO: 561518 - DNA, 100 bp, Homo sapiens
agtgcttccccttgccgagcactggaccatggcaaaagttataaccaccgtactgaagttccctgatgatcagactcagaaaattttggaaagagaagat

SEQ ID NO: 561519 - DNA, 100 bp, Homo sapiens
gcaaagcgcccagcctgccgcctcgctgtccctgcggcttctggggaattcagcttagagaactatcaacacaggacaatgcaagcccatgagctgttcc

SEQ ID NO: 561520 - DNA, 83 bp, Homo sapiens
tacagctctgccggggaggaggaggaggaggaagaggaggagaaggccaagaagcttgagagaagaaaaatttcagaaaaatt

SEQ ID NO: 561521 - DNA, 74 bp, Homo sapiens
aaagaaggtgggagcggagagcgcaggcgtgggcagctgcaatgactctccgcacggtattattgtcattgcaa

SEQ ID NO: 561522 - DNA, 100 bp, Homo sapiens
cgtttatcatgagcagcaactcggcttctgcaggaactagaacctctggttggtgaacagttgctccagttatgggaacgtcttcccttgggagaaaaaa

SEQ ID NO: 561523 - DNA, 75 bp, Homo sapiens
gtaagtcgtcgcacgctggactggatttattcagtgatccagagacaatggccccgatgggatggagcccgaagg

SEQ ID NO: 561524 - DNA, 76 bp, Homo sapiens
ggtccggcactacttggcccagtggattgagagccagccatgatcccgcccaatgacccccgcatcaagaaccaag

SEQ ID NO: 561525 - DNA, 100 bp, Homo sapiens
gaatatcctcttgtaattaatgcagtaaaacgcttccatatttatccagaggcatcagcaggactcagacctctcagcagcgtgctctgacgctgacctc

SEQ ID NO: 561526 - DNA, 98 bp, Homo sapiens
ctacgacaccatggtggaggagcagtacggccagatgtacatcaaggcctccggcagctatgcagcgaaaacagtgttacaccagaagagcagccggc

SEQ ID NO: 561527 - DNA, 75 bp, Homo sapiens
tttctcctggggctcagagtgttgctccttgagggcaggacagttcttatggctttatccgttgcgtaagcacag

SEQ ID NO: 561528 - DNA, 74 bp, Homo sapiens
tgaggagagaccttttgcactgggaatgcagtttgttttgttgcgaacacttgtggagatggggtttcaccatg

SEQ ID NO: 561529 - DNA, 82 bp, Homo sapiens
gcccatgttgcagcgggactttattaccgctttaccaggtcacgagaagagaatgccttctagatgcaaaatcacctccaaa

SEQ ID NO: 561530 - DNA, 99 bp, Homo sapiens
tctggtagaacacttgcagagggaatctggtcaaacatggaatggggggaagtttcagccccttgatcaagttgtggtggataacgtgtttccaaattg

SEQ ID NO: 561531 - DNA, 100 bp, Homo sapiens
tcagctgtgggacctcaccggattctcctatgaagacctcattccctgcgtcttgagcctccataagaagtgtcacctgtgtgccgcccgcctgtggtcc

SEQ ID NO: 561532 - DNA, 90 bp, Homo sapiens
gaggcagcagttgcagtccatcaaggggaccaaactcaccatcacccagggaacgtgttgtgggctttcacgtactgggtccaaatgctg

SEQ ID NO: 561533 - DNA, 78 bp, Homo sapiens
aaggattccattttgaggaaaaactacagtttgccttgccaggtagaagaatcagacctggaatggccaaatatcaag

SEQ ID NO: 561534 - DNA, 75 bp, Homo sapiens
tttgtcccagattttcagtctgataaccggcttccgagtggacctgccaatcaagtcggcccgctaccgtggcca

SEQ ID NO: 561535 - DNA, 100 bp, Homo sapiens
gtcagttgttgcatcaaatacttcatatttggcttcaatgtcatattttggcactttcagaccatgctgaagtctaaattgaatgtcttaacactgaaaa

SEQ ID NO: 561536 - DNA, 101 bp, Homo sapiens
cgctccgtggccttagctgtgctcgcgctactctctctttctggcctggaggctatccagcaaagatttgatcaccaggagatttttcgggacattaccaa

SEQ ID NO: 561537 - DNA, 102 bp, Homo sapiens
gagcggcctctgttagaggaagaagcatccctggggctgcggagaagatcagggagctgattttggatggatctttacagttgatccaggaaggtctcaaaa

SEQ ID NO: 561538 - DNA, 100 bp, Homo sapiens
tctcttcccgaacacgagcaccacaggcgcccgaaggccggaacagctgcgtgcccagatgcgcgacctggcacggggcatgttcgtctttggctacgac

SEQ ID NO: 561539 - DNA, 90 bp, Homo sapiens
ggaaggggtcccgaagccccctgcaggaactctacaacccaatccagcctgcctagggtagttaaaagacgagtgaatgctctcaaaaac

SEQ ID NO: 561540 - DNA, 110 bp, Homo sapiens
ctgctgtgggcgctgctggcgctctggctgtgctgcgcgacccccgcgcatggattttttatcaagcagaaatgcatcgaacaacgagaatcaagatcactgagctaaat

SEQ ID NO: 561541 - DNA, 98 bp, Homo sapiens
gctgtctaagtccaaagatttttacccaggtacatctccgttcatggatgcattaacagccaatgggacaaccaacatacagacatctgttacaggag

SEQ ID NO: 561542 - DNA, 100 bp, Homo sapiens
tccggggccctctcagcaagaacgggaacaaaactctggttatgaagacagtatggagtttccagaccatagtagacatttgctacagtgtctgagcgag

SEQ ID NO: 561543 - DNA, 131 bp, Homo sapiens
ggcggagggtctgaggcggcgcggccatggctcacctccggggatttgccaaccagcttcggaaccaaaaagaagcttcccagagccggggccaggagccccaagcgccctctagcagcaaacacagaagg

SEQ ID NO: 561544 - DNA, 100 bp, Homo sapiens
tagaggaggcagaagatttctggccagtggagagaggaattcctcaagacaccattccagtgatccagttttttgacactgccagggtggatcgtacccg

SEQ ID NO: 561545 - DNA, 80 bp, Homo sapiens
taattacttttccattggcgtggttcaaaccttgtactactcagctgatcacaagctgcttgatgggaacctactagatg

SEQ ID NO: 561546 - DNA, 75 bp, Homo sapiens
ccggcccctcagggccacggctttagcggtgtcttttgcgttttcggctttgtgagaaaccttaccatcaaacac

SEQ ID NO: 561547 - DNA, 75 bp, Homo sapiens
atgtccggcaagatcgagaaagcaggtcatcatcagatttgaaatatttaaagtggatacaaaactatttcagca

SEQ ID NO: 561548 - DNA, 75 bp, Homo sapiens
gattcgcagtggtcgcttcttctccttgagcaagctataccagagaatcagatagcaagccctccctcagaggcc

SEQ ID NO: 561549 - DNA, 95 bp, Homo sapiens
cagttgctcgaagaactcgagcgacagagacaagctgagcttgccgcacaaaaagctagagagaccaaacctggaccacccaaaaagccgaagac

SEQ ID NO: 561550 - DNA, 100 bp, Homo sapiens
accacaaccccgattgctttcgtgaagtaactctcaggagccttctccgcagttggcttcctcggtagcttccacacggagcatgcccgagagcctggac

SEQ ID NO: 561551 - DNA, 100 bp, Homo sapiens
aacatgtggatgctcaaggcagaatatatttgccctatctccaaaactggagccatctgtctgcgagcctggctgtggtgcacatggaacctgccatgaa

SEQ ID NO: 561552 - DNA, 75 bp, Homo sapiens
ctctggaccaggagaggcccgcggtgaccgaggcctgggccccgggtgctggagaatctggtaaaagcaccattg

SEQ ID NO: 561553 - DNA, 100 bp, Homo sapiens
gggaggatggagcagaggacattctagagaaaggcatcaagcagatcctgccacaccagatgaccacggcagggcccgtgctgggtgagggccggggctc

SEQ ID NO: 561554 - DNA, 90 bp, Homo sapiens
cacaagctctgtgagaggatagaggatggtagtgaaaacctttatggatatggatcaggactcagaagatgaaaaacagcagtatctccc

SEQ ID NO: 561555 - DNA, 100 bp, Homo sapiens
atttctcttccagcttcacgttacagcatggaagctgttgccaagtttgatttcactgcttcaggtactaggttttgacaagcttgcatcatgcgtgagt

SEQ ID NO: 561556 - DNA, 97 bp, Homo sapiens
gccagatctctggagcttgccgacgcggtgtgaggacgctcccacggaggccggaaagtatgctgaggccttggattaccaccgtcaggcactggtg

SEQ ID NO: 561557 - DNA, 100 bp, Homo sapiens
gtgttctttgcctcaagacccagctattgttcagcgaggccccagcttctcccagcactcaggaggccatccagggcatgctgtgcatggccaacctgca

SEQ ID NO: 561558 - DNA, 75 bp, Homo sapiens
gtttaaacaggactggctacctcatttgcagcaactcttatctaaatgcccctggaaggaatacaaatcagattc

SEQ ID NO: 561559 - DNA, 50 bp, Homo sapiens
gcctgggtttgaattgtgcggtttcaggttatcttgacgaatcagattac

SEQ ID NO: 561560 - DNA, 100 bp, Homo sapiens
tgcggaggctgcctcggcggagcagaggaaccacacgctgatcatggtactccaaagattcaggtttactcacgtcatccagcagagaatggaaagtcaa

SEQ ID NO: 561561 - DNA, 92 bp, Homo sapiens
gaggcgaacagtctcgttgctgcctctgtgtacgctgaggggggagggtgaaggttgccgaactgtccccctggctggacatgtggggtttg

SEQ ID NO: 561562 - DNA, 75 bp, Homo sapiens
gctgctcatccacatgcgagtgcactcgggcgagaagcccaacaagtgcatggtctgtttctgtcgactgtggac

SEQ ID NO: 561563 - DNA, 88 bp, Homo sapiens
gcgggcggccggtcgggcggggcggcggcgctgacaggcatttcttttgaagaagctcctgttttcttcggagaagtcttcttggcgg

SEQ ID NO: 561564 - DNA, 100 bp, Homo sapiens
cctgacttcttgaagaaagacagatcctgtgtcacccggcaactcagaaacatcaggtccaaggtgaaaggtgtagcagtcactcggcctacacccacag

SEQ ID NO: 561565 - DNA, 90 bp, Homo sapiens
tgctgctagaatgcaggaacagcaggttactcctggatggagcacctctgatagcaatccacaaagccaggtattacaagaggaaagatg

SEQ ID NO: 561566 - DNA, 82 bp, Homo sapiens
ccaaaccagaggacagatcccacagatactctactataggtgcccaaggaccaagtccttgacactgtctacctgttccata

SEQ ID NO: 561567 - DNA, 80 bp, Homo sapiens
tctgaccatttctcatgaacagaaacacctaggaagggagaactgttggtagctggcagtgttgtgatggcttttgaaga

SEQ ID NO: 561568 - DNA, 74 bp, Homo sapiens
ggatgggtgcagttcagggtgagattgggaaggttcttccgaatgatccagtctttcttgagcctcatgaagaa

SEQ ID NO: 561569 - DNA, 98 bp, Homo sapiens
tcttgcaggagatcgagagcaccgacaccgcctgtgtggggcccaccctccggatccatcagttacacaagtgacaagaaatgttccaccaggacttg

SEQ ID NO: 561570 - DNA, 75 bp, Homo sapiens
gggcctgattgaggactgccagctggcgctgcaggaagcgggagaacagcctccaggaagacagaggcagcttcg

SEQ ID NO: 561571 - DNA, 50 bp, Homo sapiens
ccccaggaattcagcgccttcttccaagttcctgttcccgacatccggac

SEQ ID NO: 561572 - DNA, 72 bp, Homo sapiens
atatgataaagacgatgaagccccctctgatgggaaatatgaaatctgatgatgatcctcctgctattccac

SEQ ID NO: 561573 - DNA, 100 bp, Homo sapiens
ggccgggcgaggcagtatacaagccctgaggagatcgacgcgcagctgcaggctgagaagcagaaggccaggtattctttctaccagcagttgcatgaac

SEQ ID NO: 561574 - DNA, 98 bp, Homo sapiens
cttcaaccccaggggaccagaggaactcagccctgattgcggtcttatatccagatggccaggctcagatgattcaccccaagcctgcagacttccgg

SEQ ID NO: 561575 - DNA, 100 bp, Homo sapiens
gatctggcacgggaccctccagcacagtgttcagcaggtcctgttggagatgataatgctgaagagtttctggcagaaggtttgcggaatgagaacctca

SEQ ID NO: 561576 - DNA, 74 bp, Homo sapiens
caagcagcagtgaggacaccaaagcaattctgtggtgttcttggtcacacatttatggagtttctgaagggcag

SEQ ID NO: 561577 - DNA, 100 bp, Homo sapiens
ggaatgaggaaaagtgaacttttcgaggcatttgacttgtttgatgttcgtgactttggaaagtttctccttggaccaagatgactgatggaaaactctc

SEQ ID NO: 561578 - DNA, 74 bp, Homo sapiens
cggtcaagtacacagagagacggcagccgctgtacagattcatcaccacggcatctgcatctgggaccgacctc

SEQ ID NO: 561579 - DNA, 90 bp, Homo sapiens
gacatgcagaagagtctgctcaggattctggtacaggtcaaagaggtcctctccaagctgagcacgctcgtggaaaccacactcaaagag

SEQ ID NO: 561580 - DNA, 100 bp, Homo sapiens
gtatgactatgaggggcaggagcatgatgagctgagcttcaaggctgtgcaccaattccagctggacatcactgtgaaaatgggacgggataaagtccga

SEQ ID NO: 561581 - DNA, 102 bp, Homo sapiens
gtttctccaggagccggacagcctctctgtctccatggcaggcaaaagaatgcatgtgcagttgtccacaagccggcttcggactgcccctggtatgggaga

SEQ ID NO: 561582 - DNA, 98 bp, Homo sapiens
gtcgctccccaaaacacttacctggacaccatcatccgcaagttcgagggccaaacctggtattaaatctgaagtaagaaaaaagctgggagaagctg

SEQ ID NO: 561583 - DNA, 100 bp, Homo sapiens
caacatctcctgctattccttgggctgcctttcctgcaggcctcccagtagcattggatgcaggaaaaaatacattgacggtgaaaaacaagccgaacca

SEQ ID NO: 561584 - DNA, 100 bp, Homo sapiens
gcacggagaaccattaatcatctctaagggaatgacagaggaagaggaagacaaacttctggcactgaaagacttcatgatgaaatctaataaagcaaag

SEQ ID NO: 561585 - DNA, 83 bp, Homo sapiens
aacaaactcgaagaacagctgtggaaagaagttgcaaaacactggacctgcctagagctggaacgttacctccagagcgagcc

SEQ ID NO: 561586 - DNA, 96 bp, Homo sapiens
cagaccctctcctttccctttgagaccgtgaagagaaagatgcaggctacagatgcacatgttgaatggagctcttctggcattgctgtttcctgt

SEQ ID NO: 561587 - DNA, 96 bp, Homo sapiens
agagagagcactttaggcaacttctggatgaaacttctgcagaaactagcagagttgttcacatcatggattttcaacgagggaaaaacttgagat

SEQ ID NO: 561588 - DNA, 97 bp, Homo sapiens
cacaaaagagttgattgaaattatctctggtgctgcagctctgacagagcgggatgccaccagcttgtccaaagggaagttccaggagctcctggtg

SEQ ID NO: 561589 - DNA, 90 bp, Homo sapiens
aaaagaaatgaaccagtattcttaaattgatttcaagtttgaacaaggtgcaatggatgagcttcatagtctggatccaagaaggcaaga

SEQ ID NO: 561590 - DNA, 100 bp, Homo sapiens
gcaacaaaaagaaagctgcgttaatgtttgcaaatgcagaggaagaatttttctatgaggatttggtgctatggagaaatttttggtagaatataagagt

SEQ ID NO: 561591 - DNA, 51 bp, Homo sapiens
gagcaatgttgaggtgtttatgaatgtctacacaaggaagtacaggatttg

SEQ ID NO: 561592 - DNA, 82 bp, Homo sapiens
cggatcgcctggagaggcactcggacctggaaatctggcattttttaaagtttgcgccccacaaagaggaaatattccaaag

SEQ ID NO: 561593 - DNA, 100 bp, Homo sapiens
cgtggccatcgcccagttcattgaaaccactaagaagaagctggaggtcctgcaggagttcaaagaaggacgcagagccagccacacagccccacaggtc

SEQ ID NO: 561594 - DNA, 75 bp, Homo sapiens
gccttccagtacacagacgagcatggggaaggtatctgtaattcttgcccaccaaacaagcctgcagaatctgtt

SEQ ID NO: 561595 - DNA, 75 bp, Homo sapiens
caggagtatctgaggatggagaactcagcactctgctgtgtgcgtgcaccagctgcctccaggccaactacacgt

SEQ ID NO: 561596 - DNA, 98 bp, Homo sapiens
ggaaaggctggattgatctccaaagactggatggtatgggctgtctggagtttgatgaggagcgagcccagttttttgctccactcaagcctgttaga

SEQ ID NO: 561597 - DNA, 75 bp, Homo sapiens
agcggctggaagcagaactggctgcgcatgagccggctattcaggagaaacaaatgacctgcacggacatcaaca

SEQ ID NO: 561598 - DNA, 100 bp, Homo sapiens
cctacctgctcaagccgctcttccccacctgcccggtgcccgaggaggcagccaagctcgtggcctgcctctgcgtgccatgctacaagtgaaaactgat

SEQ ID NO: 561599 - DNA, 50 bp, Homo sapiens
ccagtccccagctcgccagcgcaactcagcatatctgccaccaaaaatgt

SEQ ID NO: 561600 - DNA, 122 bp, Homo sapiens
ggcttcgtgacctgaagatactgggaaatccatagctaagatgccaggaccccctgaaagcctagacatggtttgagcacaaaatgaacataattagggaaaataaggatctggcatgtttc

SEQ ID NO: 561601 - DNA, 82 bp, Homo sapiens
atcatgtctgcgagccaggattcccgccacccgcgagtcggccttcgttcacgccatcgcctcggccggcgtggccttcgcc

SEQ ID NO: 561602 - DNA, 99 bp, Homo sapiens
gaggccgggcggcgcttctgtcctcctactcggacccgcaggttcgagaacttgtcttggacaattgcaaatcaaatgatggaaaaattgagggcttaa

SEQ ID NO: 561603 - DNA, 98 bp, Homo sapiens
gtgctgaaccacctgggtgccctgcccaacattgaattgacctcgccacgcatgttcacctatggtactagaaatgagaaacgcagaaagccacgtgg

SEQ ID NO: 561604 - DNA, 90 bp, Homo sapiens
aattttgtgaagacattggtgttgaacctgaaaatcataagcagtactataatggatgtagacagcacaatttccagtgggcgttcaact

SEQ ID NO: 561605 - DNA, 100 bp, Homo sapiens
acaaatatgtggaagcacaatataaagtttcatcaacttccataccgggagatggagcatttgagacagggcgattctggaggccccctggtgtgtgatg

SEQ ID NO: 561606 - DNA, 83 bp, Homo sapiens
caaggatatgcacagaccacccagaaacgcttcgttaagggactcaggcagtacgggaagaacttcttcagaattagaaagga

SEQ ID NO: 561607 - DNA, 50 bp, Homo sapiens
cgagatggcgctcgaccccgcagggttctgcagcattccagaccttgagc

SEQ ID NO: 561608 - DNA, 100 bp, Homo sapiens
cggaggggaaatggctgccgaaaacaagccggaaggtatcagtttttggaagaagcttttcaaaatcagaagggtgcaattgagaatctactggcgaaac

SEQ ID NO: 561609 - DNA, 100 bp, Homo sapiens
agtgaatgaagcaactataattaacagttcaacatcaataaaggcatacaatgttacagctgatgaaggaggcaggctgctataatggaatcacatccag

SEQ ID NO: 561610 - DNA, 75 bp, Homo sapiens
gggaagtcgcctctgtgctcgtgagtgcatggggtataagaatgaactctggaagcccagccagggacaatgcac

SEQ ID NO: 561611 - DNA, 100 bp, Homo sapiens
tgtctgtccccagagcctcagtttgtgcaggacaccgacatggaacagggactcactgggggtatcactggacaggccatggctccacggtcccggcgac

SEQ ID NO: 561612 - DNA, 97 bp, Homo sapiens
gactgggcaacatgttattcagtggatatcaaagtattgcagagtgccttagcagccatccgacatgcccgctggttcgaggaaaatgcttctcagt

SEQ ID NO: 561613 - DNA, 100 bp, Homo sapiens
ctcgggcagaggcgacctccccgcgttccatgcgcacagggacagggagaatagtgacagtggtacaggaaagaaagaaaaagaaaagaaaaacagaaag

SEQ ID NO: 561614 - DNA, 100 bp, Homo sapiens
gagaagggcagaaagatggactggaaggtgcctgagcctgagggccaaacaagtcccaagagaccctgatgctcccataagacagaaaatgccccttgat

SEQ ID NO: 561615 - DNA, 74 bp, Homo sapiens
gccggggccgcgctgagggcgcccagctgacaggggcaagtgtccgagtggtgaatcagctacttacagagatg

SEQ ID NO: 561616 - DNA, 50 bp, Homo sapiens
cgcacggagcggccgggcgggacaggatcaggagaaggtctggggaaaat

SEQ ID NO: 561617 - DNA, 101 bp, Homo sapiens
tcacagatgatacctttgatccagaacttgcagcaacaatagtggtgccaccgaacatcgcagaactgaagaatttggaggtgctcaacttttttaataac

SEQ ID NO: 561618 - DNA, 74 bp, Homo sapiens
ctagccaatgctctcaaagagaagggcagttgggctcgggatgagtttgaaggcctcttcaagcagccagcaga

SEQ ID NO: 561619 - DNA, 90 bp, Homo sapiens
gcagaagacttgccagcccaccagcacaatgtcaggcggggagacaaccccttccccaagaatgctgatgggactatatgctacgactcc

SEQ ID NO: 561620 - DNA, 90 bp, Homo sapiens
ggcatcctccttgaagtatttggctgaggagttttcaatcccagtgatgaccccacaaggaagaggtactgttgcagccgctgcagctgc

SEQ ID NO: 561621 - DNA, 100 bp, Homo sapiens
ggaccgggaccgggatcgtgaccgtggagggcaatgaatcgctccctggctaatgtgattcttggaggctatggcaccacttcaacagctggtggaaaac

SEQ ID NO: 561622 - DNA, 74 bp, Homo sapiens
acttcaagaaaaccttagaagagaagcatttagagagcatcagcaataaatgtttcatccatttgtggaccaaa

SEQ ID NO: 561623 - DNA, 82 bp, Homo sapiens
ctctacacagacgccgagatgaagtctgataatgtgaagctggactacttactactgatccacgtgtgagggaacggaagaa

SEQ ID NO: 561624 - DNA, 75 bp, Homo sapiens
ggactaagagaagttgttaccgaacatctcataaataaggccctggagagtgaatttgtttcctgccagcttcac

SEQ ID NO: 561625 - DNA, 90 bp, Homo sapiens
ctttcatgcagtgacatgttgataaaaaatgatggataaaagaatcagagtgtctcaacccttgacaagaggaccaagtgcctttattcc

SEQ ID NO: 561626 - DNA, 101 bp, Homo sapiens
atatcaggaaaggccccatcttcccttcacacctggccctagactggagctggttacagacggaagaagaagagcacagctgcctggagcaggcctcatga

SEQ ID NO: 561627 - DNA, 98 bp, Homo sapiens
tgacctggccggctatgaggcccaggtgaagatagtgatccggggagacaggaacacgggcaagacagcgctgtggcaccgcctgcagggccggccgt

SEQ ID NO: 561628 - DNA, 98 bp, Homo sapiens
cgagcgcggtcgagatcgccatgcctacccggttctccaaaaaatgtggaatcctttgcatctatgctgagacattctcctcttacacagatgggacc

SEQ ID NO: 561629 - DNA, 82 bp, Homo sapiens
gcctcccgagtacctgagattagcccagcaaggatggaacattactgtggacctggtcattggccctaaagggatccgccag

SEQ ID NO: 561630 - DNA, 100 bp, Homo sapiens
atttgggtccccactgacggaggaaggcattgcccagatataccaactgattgagtatctacacaaaaggctcacccctccagctacccctccccaccag

SEQ ID NO: 561631 - DNA, 100 bp, Homo sapiens
ctttgtctttgaggactttgtctctgatgagctgagaaacaaagccacccagccaatgaaggtgatcgccatgatcaaaggcctgcaggtgctgatgggc

SEQ ID NO: 561632 - DNA, 82 bp, Homo sapiens
caaccacaaggcagacatcagctcctggttcaacgaggccattgacttcataggtgcagcagtaccgcgtcgccatgactgc

SEQ ID NO: 561633 - DNA, 106 bp, Homo sapiens
ggacgagggcgcgtgggtgaggaaggtcaggtctaggattcactccttctccagttgcacagccacacccttcagctggccttaatgttgactttgaatctgtgtt

SEQ ID NO: 561634 - DNA, 120 bp, Homo sapiens
gggagctgcaggagctgttagccaggctaggtgcctgcaggttgaagaactgagctctatctgggagaagtgaaatgacaacctcactagatacagttgagacctttggtaccacatcct

SEQ ID NO: 561635 - DNA, 100 bp, Homo sapiens
atggcggagaaggatgacaccggagtttgacgaagaggtggtttttgagcaccatatgaaggcggagtatggaaagttagagtggacctacctgataaat

SEQ ID NO: 561636 - DNA, 100 bp, Homo sapiens
ccatcttttcctccgcctggtgggtccctccctgctgcgggacagcagctgagctcagagttctacagagtcaccactgaacaatatcagaaagctgctg

SEQ ID NO: 561637 - DNA, 84 bp, Homo sapiens
cccggctccctaggcgtcccatctcgacaatgcagatcttcgtgaagactctgactggtaagaccatcaccctcgaggttgagc

SEQ ID NO: 561638 - DNA, 80 bp, Homo sapiens
ctcctggctgtgctcatatacacctgttgctcttcaaaaaatggactcaatgctttcctcagaagctgcctgggtatcgc

SEQ ID NO: 561639 - DNA, 75 bp, Homo sapiens
tcaacctccggggccacaatagcgaggtggactttcactgctggatgtgtgggaaaaactgcaacagtgagaagc

SEQ ID NO: 561640 - DNA, 100 bp, Homo sapiens
ccgagggtcaacgagaaagagatcgctgcagcatatcgtgagtgatgagatctgtgtgcaggtgactgacctttacctggcagaaaataataatggggcc

SEQ ID NO: 561641 - DNA, 90 bp, Homo sapiens
tgaaggaaaacctccttatgctgatatacatccaatgaggcttaccaataaaactttaagcaatagcagtcagtctgagttagaaaatcg

SEQ ID NO: 561642 - DNA, 100 bp, Homo sapiens
aactgaaaggccaacgtgggagacaaagaagagcctgaaagagccaaatcttaccttctggaccatgactgaaaatattcctgtggttagaagacctgat

SEQ ID NO: 561643 - DNA, 75 bp, Homo sapiens
cagctgaggtggatcttccagagaaaggaccagggtgtgactgcacagaaaagttacaaaacaaatttgactttt

SEQ ID NO: 561644 - DNA, 50 bp, Homo sapiens
agacggtcctttccctgctgcccccagattgagaggatccagaatccaga

SEQ ID NO: 561645 - DNA, 100 bp, Homo sapiens
aaaaagcttaaagaagacatttcacagggggtacacatatctgtatataggaaactgttgtgactgaatatctaaatagtggaaatgcaaatgaggctgt

SEQ ID NO: 561646 - DNA, 75 bp, Homo sapiens
caaaggaaaggattcgttttgtgattaagaaagaacggagaccaacctgggctgaagaaagaagattaaatgctg

SEQ ID NO: 561647 - DNA, 87 bp, Homo sapiens
ccaacacgatcccggggctcaagtggcttaacaagcgcaaatctgtccaaggctgcctggggagcattggagaagaatggcacccag

SEQ ID NO: 561648 - DNA, 75 bp, Homo sapiens
caactatggcagcagcgtggcctccgccaccgtgcacatccgaatgggtcagcccttcataaacccagatgggag

SEQ ID NO: 561649 - DNA, 102 bp, Homo sapiens
agaccgcgcgcagggcctgcagcgggagctggacggcgagcgcgagcggcgcgagaaagcctccaggcccaaggtcagcatcccactgtcagccatcattga

SEQ ID NO: 561650 - DNA, 97 bp, Homo sapiens
cctcggccgccctgcccagctgcctgcccccggaggtgcccacgcagctgcctggacaagagggttctgataatgatgatgatgagggagaagaaga

SEQ ID NO: 561651 - DNA, 75 bp, Homo sapiens
attgaccaactggcatcccacagcctcctcttccagaatgcctttgcgcaggaattacatgaatgacagtcttcg

SEQ ID NO: 561652 - DNA, 100 bp, Homo sapiens
ggacgacaaagatggcggcagggaccagcagttactgggaaggtgagggcgagaaggcctccggtactatactggcaattgctggagaagattttgcaat

SEQ ID NO: 561653 - DNA, 118 bp, Homo sapiens
ggagagcctcggacgtggtgcttggcttcgccgagttggaaggtacaggtttgcagattccgccagcagcacagcaagctctacagatgagtggctctttggcatttggtgctgtggc

SEQ ID NO: 561654 - DNA, 83 bp, Homo sapiens
cagccctcgctggaccagaccatggccgcggccttcgggcagttgggtgagaagcagcttccatcttcaacctcggatgatcg

SEQ ID NO: 561655 - DNA, 82 bp, Homo sapiens
gggcagtcctcgccggcgagttcagcgtgagaagccctaccactgcaactgggacggctgcggctggaagtttgcgcgctca

SEQ ID NO: 561656 - DNA, 83 bp, Homo sapiens
cagccggcgggtacctgcggccaattcggtggaacgaggacgcggactgcgaaggcagtgtttgatgatggtgatgagcgaac

SEQ ID NO: 561657 - DNA, 98 bp, Homo sapiens
ttaaggattccaagtaactcttatttggtgacagcggcatggacatatgccccaggctttcctgctggggtccatccatgagcctgcaggtgccctca

SEQ ID NO: 561658 - DNA, 89 bp, Homo sapiens
cacgacaatccagtttcctgctaatttgcagcttcctccaggaagccaaattggcagagaatgcttgtaccctggctgacctgacagag

SEQ ID NO: 561659 - DNA, 76 bp, Homo sapiens
cgtcggacccttgccagaactggaactctaatgatccaggacaaagaagttaccctggagtatgtatcaagcctgg

SEQ ID NO: 561660 - DNA, 100 bp, Homo sapiens
tacctgcaaggacagtggccatgcaggagctagagacattgtttccattcaagagctagagatatgtctggcacaatgggtttcaatgaatttaaagaac

SEQ ID NO: 561661 - DNA, 82 bp, Homo sapiens
ccatgcggggtccgagcggggctctgtggctgctcctggctctgcgcaccgaccatgaacccgtcctgacccaggctctgac

SEQ ID NO: 561662 - DNA, 100 bp, Homo sapiens
aggtggctacccaccagctgcaccagcaaattgtggctactaatttgccccctgaagatcaagatggctctggggatgactctgacaacttctccggctc

SEQ ID NO: 561663 - DNA, 82 bp, Homo sapiens
ggctgggcgcgcccggccgcgacgcccgggacccagattgcgggttcagttcaaatctgaacatcaatgatgtactagggaa

SEQ ID NO: 561664 - DNA, 97 bp, Homo sapiens
cgtggaggtggcctggggagccgtggccctttcgggggaccttcgagacaaggctgtcagcccctaggtgtcatggagaaactccagctgggcccag

SEQ ID NO: 561665 - DNA, 96 bp, Homo sapiens
cttgccctactaagattttggaagatgttgtgggctttttggtggtgctggagttggcaagactgtactgatcatggagttaatcaacaatgtcgc

SEQ ID NO: 561666 - DNA, 90 bp, Homo sapiens
ctggcggcgctgccgctcccgggcggccgcgggcggattctttccaccatggccagacgcccccggaacagcagggcctggcacttcgtc

SEQ ID NO: 561667 - DNA, 75 bp, Homo sapiens
aattagcttgtgagattaaggttctgcacatgtgctgtaattacaacaattaaccatgatgaagtttggtttaag

SEQ ID NO: 561668 - DNA, 71 bp, Homo sapiens
tcgtggaaaccaagataaagatgcccattttccaccaccaagcaagcaggagtggtcattcactgtaacca

SEQ ID NO: 561669 - DNA, 75 bp, Homo sapiens
agtatgatcgctcctccctgcggaccctggggtcagccatccgggtgacctgcataggttcctgcggggtctcca

SEQ ID NO: 561670 - DNA, 97 bp, Homo sapiens
tgaaagctagaagaaaaggtgtacttgcaagaaacctcaggacttgagtaacagcaacatgattcgtgcgacggcgtggagtgcggcccgggcaagg

SEQ ID NO: 561671 - DNA, 98 bp, Homo sapiens
tttgccggaggagcccctcaggccaataccctctaccatctgctttggtcagggtgccgctcgaggatttaaaagcaacaagaagaaaaccaaacaat

SEQ ID NO: 561672 - DNA, 52 bp, Homo sapiens
cgacagcttcgacaacacataccagggaacaacagccgcttgcaggccgagc

SEQ ID NO: 561673 - DNA, 85 bp, Homo sapiens
ttgttggtggaggaggtggcaggcctcggcggaggcttggagtacccataatacagtgagcccaccctcgtggtccccagacatt

SEQ ID NO: 561674 - DNA, 100 bp, Homo sapiens
acgaaagtcatgttacccaacaccggaatcttctgctgactctcaacttttcctggaaaaaatggatcattcccaccatatggggatgagctatatggac

SEQ ID NO: 561675 - DNA, 75 bp, Homo sapiens
gcgcgtggctggggaggcgaggccggacgcacctctgtttgggggtcctcagtagctgctgctggtggtgacaat

SEQ ID NO: 561676 - DNA, 100 bp, Homo sapiens
ctgctgctgctgctgctcctggaaaccggaatagccaggtctggctgggtcggcacaacctgtttgagcctgaagacacaggccagagggtccctgtcag

SEQ ID NO: 561677 - DNA, 100 bp, Homo sapiens
gcgttggcagggctggcatagcagcgaaagggccttggagagagtgccaagcatgaaactgctctttgagcgcgggaaggaggccctggagtccgaattt

SEQ ID NO: 561678 - DNA, 73 bp, Homo sapiens
cccgccccgctccacccgtgaggaataagaccacagcttgccaaagagaagattgaaggatgccatatttgta

SEQ ID NO: 561679 - DNA, 83 bp, Homo sapiens
ccgaggagagctctgacgttcccagggagttgataggttaccccaccccaggaggagagaagctccagggagcccgccgctgt

SEQ ID NO: 561680 - DNA, 100 bp, Homo sapiens
tggagatcgacccgtacttgaagccctacgccgtggacttccagcgcagggcctggtggcggtaataaccggaggagcctcgggcctgggcctggccacg

SEQ ID NO: 561681 - DNA, 109 bp, Homo sapiens
gtctggccacaacttcctgcaggactccaaggtcattttcgtggagaaagccccagacaatgcagatcttcgtgaagactctgactggtaagaccatcaccctcgaggt

SEQ ID NO: 561682 - DNA, 85 bp, Homo sapiens
tgacgctttgtcggtgtggagagtctctgcaggatgttattgacaggttaccagagacagttgaactacaaacactatgatggct

SEQ ID NO: 561683 - DNA, 100 bp, Homo sapiens
ttctggccacgtgcttcaacgctctgctgcccgctgtgagggaaaagaactcccccactggaaaggattctgaaagaaatgaagtcagccctcagaaatg

SEQ ID NO: 561684 - DNA, 100 bp, Homo sapiens
gctgcgcatccccgcggacgccacagcgctggaggatctgtgggtgcgcggaggccgcatcttggacccagagaagctgttctttgaggagcggcgcgtg

SEQ ID NO: 561685 - DNA, 90 bp, Homo sapiens
agaagcgcttcaaggacccgggactagtggaccagctggtgaaggcagacagcgagtggcgacgatatgccatggacaatattaccaggc

SEQ ID NO: 561686 - DNA, 87 bp, Homo sapiens
cttcggcagtccacccaccgccgccgcctcccaggcctgacctctcgggacacacccagccctgtggacccagacaccgtggaggtg

SEQ ID NO: 561687 - DNA, 75 bp, Homo sapiens
ggaccctccaagagcactagtgtctagaaggcactaagggagcatggggtcggcctttgagcgggtagtccggag

SEQ ID NO: 561688 - DNA, 100 bp, Homo sapiens
agagcagatcaatatcctgaaggccagcaagcttttctgggagaagaggctacaaggacttagtgcatcagatgtaacagaacaaattataaaaaccatg

SEQ ID NO: 561689 - DNA, 98 bp, Homo sapiens
ctgcccacgggggctccgcggcgtcctcggcgctgaaggggttaattcaacagttcaccaccattaccggttctctacttaaaagacaatgactactg

SEQ ID NO: 561690 - DNA, 75 bp, Homo sapiens
gcattcctgaacttgtcaatcaggttttcctttggaatatggataaatacaccatgatacggaaactagaaggac

SEQ ID NO: 561691 - DNA, 107 bp, Homo sapiens
ccgagacagacattgtgctaaaaggagttacgaatttgccgcttctgtttctaccagttcatagatcccatattgactatctgctgctcactttcattctcttctgc

SEQ ID NO: 561692 - DNA, 100 bp, Homo sapiens
aagacctttaaatcctttggcttctggtcaagaatctttagaacacgatgttcttgatgataatacagagcagacagatgacaaaataccagctacagaa

SEQ ID NO: 561693 - DNA, 90 bp, Homo sapiens
tctctgcgtcctggtcgtgagcgactccaaagaaacagctacatgattcagcgcaaggagtgggacttatctgagtatagttacaaggac

SEQ ID NO: 561694 - DNA, 83 bp, Homo sapiens
gtggattcaacagcttttaggactcagtgtctgcgagattaatctctcatggccgctgcacaagaacctggcttttagctgaa

SEQ ID NO: 561695 - DNA, 90 bp, Homo sapiens
ggccaatgaggagatggaggcgctgcggcagcatggcctgtatgagaagaaaaagacctcaagaaagcaacgaaaggaacgcaagaacag

SEQ ID NO: 561696 - DNA, 98 bp, Homo sapiens
attccacccagtatttcaagagtcacttctttacttggtgcaggaaggcagtctttgctacgtacagcaaaagtaggttcagctgcagcccggaaaga

SEQ ID NO: 561697 - DNA, 102 bp, Homo sapiens
gccatgtcgggttattcgagtgaccgagaccgcggccgggaccgaggggtctcccttgatctgagaatggctacctctcgatatgagccagtggctgaaatt

SEQ ID NO: 561698 - DNA, 100 bp, Homo sapiens
gtggcccccatggggcgggaaggcgtgaccgccatgcacaagctctttgactgggccaataccagccggcgcgggatggccaggccatgttatgggatct

SEQ ID NO: 561699 - DNA, 83 bp, Homo sapiens
ccgggaccctcgcgcgcgaccgccgaatcgctcctgcagcagagcaaccatgtccaagggacctgcagttggtattgatcttg

SEQ ID NO: 561700 - DNA, 90 bp, Homo sapiens
tggctctggggaggaggaggaagaggaagaggaggatgacccacttgagatgttcgacaagcagcaggcgaacaccatcttctggagccc

SEQ ID NO: 561701 - DNA, 82 bp, Homo sapiens
gaggactaagggtgcggcagtgcctggtacatggtcagcccaaggccaaccccactgtcactctgttcccgccctcctctga

SEQ ID NO: 561702 - DNA, 75 bp, Homo sapiens
gtctccgccgctgcgggcccgctccgacgcggaaggcttataccagccagtttgtatcccttgtgatgtttgccc

SEQ ID NO: 561703 - DNA, 111 bp, Homo sapiens
ttcctgcgtgctacggccctgtgggcctgggagctgcctctgaggaacacgccgcaggccgactgcagctcccgcccactccttctggccggctatgaggatggatcggtg

SEQ ID NO: 561704 - DNA, 83 bp, Homo sapiens
gagagagcttggttaacttgggagaaagtttcatctgtggatggagtattggaatggtcctcgtccgaagtgagaatgggcag

SEQ ID NO: 561705 - DNA, 75 bp, Homo sapiens
gcagcttctctagctggccttgctgttgatgtacctgtgtggtctaagctggaatctggtcaccttccatccatg

SEQ ID NO: 561706 - DNA, 97 bp, Homo sapiens
catgtggcatttctcaaccttcagaagaaataccccatcaaaagtaggaagctactcagagtattacagagcttgatggaccagacaaataggatga

SEQ ID NO: 561707 - DNA, 100 bp, Homo sapiens
cacaggagtcatgcccagtgtgtgaagtggactgctgggacgggcccgatgggaagccggtcatctaccatggctggacgcggactaccaagatcaagtt

SEQ ID NO: 561708 - DNA, 100 bp, Homo sapiens
cagatcctgccccgtggccgcggccgtctcgtagcaccctggaggagaagaggttctgctggaacaagctggtgtagatgcaagtgaaagctttgaagat

SEQ ID NO: 561709 - DNA, 75 bp, Homo sapiens
atgaaacaacctggcccatgagatgatagctgtggaagaggagacacaccttgaagaaacaacagagagccaaca

SEQ ID NO: 561710 - DNA, 76 bp, Homo sapiens
cagggaccgttgctgggcctcatttccgcaacttttcggctccgaactgctcccctgaagaagatggccgaccgga

SEQ ID NO: 561711 - DNA, 75 bp, Homo sapiens
caggattctcatggcagcccctggcatgggtgctggagaatctggtaaaagcaccattgtgaagcagatgaggat

SEQ ID NO: 561712 - DNA, 88 bp, Homo sapiens
gagggggactccaggaaaagccgttgagaggaccatcacaacctgagcagcacagctctggcaggctgccctgagcacgctcaacccc

SEQ ID NO: 561713 - DNA, 83 bp, Homo sapiens
gaacacctgattttcatacaatcccagcatttgaactgcaagcacatgttgaccagataactgaaatggcagcagtaatgagg

SEQ ID NO: 561714 - DNA, 83 bp, Homo sapiens
taatcatctgaagaaattggtcccaagggttcaggataagtttgaggtgctgaattacacaagcattcctatctttctcccgg

SEQ ID NO: 561715 - DNA, 49 bp, Homo sapiens
aactgttttggatgatcttgaccccgagcctttgaagaagatggtggag

SEQ ID NO: 561716 - DNA, 74 bp, Homo sapiens
atggacagttagtcacccacctacatgttgagatatcaacctgaattctcctaacaaaggtctgctgtctgact

SEQ ID NO: 561717 - DNA, 96 bp, Homo sapiens
cgtcgttcgtgctcaagggggacgcgacgcacaaccaggcgatggtgcactggacgggcgagaacagcagcgttcattttccagacactgaaagag

SEQ ID NO: 561718 - DNA, 80 bp, Homo sapiens
cgggagagtgagagaaaggctggaagacgagaaagcatgtacctacatcagatctaaccttgatcccagcaatgtggatt

SEQ ID NO: 561719 - DNA, 100 bp, Homo sapiens
aatgataggaaggggtcagtcagggctctccgggctacatctggaaagaggccctccaacatgaagagggatagatcactgcgaccagaggaaattgaag

SEQ ID NO: 561720 - DNA, 100 bp, Homo sapiens
ctgaaccagaagggctacaatgtcaagtccgacgtctggagcctgggcatcaccatgaatcatctcccctgccccacaaacatgaaagaaaagacaagag

SEQ ID NO: 561721 - DNA, 83 bp, Homo sapiens
caggagtatctgaggatggagaactcagcagctgctgaatcaggaataataaaagttaaaacaattgctgcacgaaacactga

SEQ ID NO: 561722 - DNA, 100 bp, Homo sapiens
cagcggtcagttttcagagatgtcctgagggcagtggagtgtatgcagagaatatttccaaaatggtgggaagagaaaagcacttgagaaagatgaaaaa

SEQ ID NO: 561723 - DNA, 75 bp, Homo sapiens
gtggagctccagagatgattactctcgggatgattataggcgtgatgatagagtgtaggaagaatgatgatggag

SEQ ID NO: 561724 - DNA, 100 bp, Homo sapiens
acgagagccgcacctttgccgtgtacctcaatagcactggctaccggacaggatcaaaatacttgctggatggtggactcagagaccaataaaaataaac

SEQ ID NO: 561725 - DNA, 128 bp, Homo sapiens
ctgtggagacgcaagactccactctccctacgagatcaccacagaccagctacagagacttctgaagtggagagtctgcgacctcctcggttcttcaatgaagatggagttatcagaccgtacaggtt

SEQ ID NO: 561726 - DNA, 75 bp, Homo sapiens
gcggcgtcgagaggaccatcctgggtgctggccctgtgctggaggacaatctctatgggaagcagaaggcaagga

SEQ ID NO: 561727 - DNA, 101 bp, Homo sapiens
agaagagctatggacacagagaatttttccaagttacagctacctaggttcctcatggatgaagaaggaccagcccacatttaccctccgacaagttggca

SEQ ID NO: 561728 - DNA, 98 bp, Homo sapiens
ggcaaaggcggctcgggagattcagccgtgaagcaagtgcagatagatggcctttccctgctatgtggatatttggtagcaatgactgatgtggaaac

SEQ ID NO: 561729 - DNA, 75 bp, Homo sapiens
cgggagacgagaagcctgaaaagtcgcagcgagctggagccgccggagatgatgaaccaggtggaagggcagcag

SEQ ID NO: 561730 - DNA, 82 bp, Homo sapiens
cttgtgaagcatttaacatctgcctgtccaaatgtatgtcgtatatcacgacgcaggaggagggagacgcactgatgacatc

SEQ ID NO: 561731 - DNA, 97 bp, Homo sapiens
atcacacagggttcctgacagaatatgtggccacacgttggtacagggctccagaaattatgttgaattccaagtgaaactggaacgccaagctgaa

SEQ ID NO: 561732 - DNA, 100 bp, Homo sapiens
gttaagcacaagttcacgaaagcctacaaaagtgtggagaggttccttcaggaggatcagatcacaaaatttgtccaggatagacatagagctagaagaa

SEQ ID NO: 561733 - DNA, 90 bp, Homo sapiens
atctctaacctaccagctgccactttccagaatgggaatactgcccttggcattgcccggcgcctcggctacatctcagtagtggacacc

SEQ ID NO: 561734 - DNA, 75 bp, Homo sapiens
cggatatgagtgtccagtctccagcttcgtgggtgcctggaggcaggtgcggagccttagattgtaagcaaaaga

SEQ ID NO: 561735 - DNA, 96 bp, Homo sapiens
attgaacacatcagaatccacacagtcaggatctggtgattttgaagagaaaccacaacaacaaagatgaaaacccctgcttcctttacctgaggt

SEQ ID NO: 561736 - DNA, 83 bp, Homo sapiens
ccaagggacaatggtcaccgtctcttcagtgcccatgacgcttccggagacaaccctggaaacactgaagcataaaatcaacc

SEQ ID NO: 561737 - DNA, 90 bp, Homo sapiens
ctgcagctactgctgcatcagaagaaatggaacaggagtacagctgtgtagtaaagatgccttctggtgaatttgcacgtatatgccgag

SEQ ID NO: 561738 - DNA, 76 bp, Homo sapiens
gactcggacacagaggacagcggcagcgacgagaacctggatcaggggccatggcacctgcaaggtgtttctcagc

SEQ ID NO: 561739 - DNA, 130 bp, Homo sapiens
gctgtaattgctgaacttaaaaagcagtctaaacctgtgaccacccctgaagaaattgcacagacatcaactagtcaggcagtcttccgtctccagtctggcatctgccatctcttccgagaaactttaa

SEQ ID NO: 561740 - DNA, 96 bp, Homo sapiens
cagattcatgcccaccttgtccggccctatgtgggcattcatctgcgcattggctctgactggagatggggttttgccatgttgcccagactggtc

SEQ ID NO: 561741 - DNA, 51 bp, Homo sapiens
gaagagtcaagggcacgagcatcgggtgattgtgtccaggggggggcgctt

SEQ ID NO: 561742 - DNA, 51 bp, Homo sapiens
tggtttcaaagacctcttcagcatgaagccaggctgggaggcggcagaatg

SEQ ID NO: 561743 - DNA, 101 bp, Homo sapiens
agcgtcctgagactaaggaaagagcctggaaaatggagcagacctggacgagggcgatctagtgtatgttaactatgcacgaactgaagacttctttaaat

SEQ ID NO: 561744 - DNA, 129 bp, Homo sapiens
cgcccgcggccccgctgaggggccgcaaggacgaggacgcctttctgggagaccccgacaccgctgccagagtctctcctggaggcggatcttagctttctgtctctggaagttcctactccacccctg

SEQ ID NO: 561745 - DNA, 75 bp, Homo sapiens
tgtcttccaaaatcattggaattttctaagtatcatgcctaccaacaagctgtaaaatgatcaccctgaacaatc

SEQ ID NO: 561746 - DNA, 90 bp, Homo sapiens
attggactgacttttcttatgctgggatgtgccttagaggattatgggttcttccaggggacccagccccctaaccatgggagctcagga

SEQ ID NO: 561747 - DNA, 124 bp, Homo sapiens
aaatacttttgaatggcaatgtaaacttccagccatcaagcccaagactgaatttcaattggcgagtaaccagctcataaatcacatcgaacagtttttggatactaatgaaacaccgtatttt

SEQ ID NO: 561748 - DNA, 101 bp, Homo sapiens
cggccgcgcccgcggaaccagaccaggagctggtcaggctcaccatcgagaagcagggacgtccgtctccgacgagccccgtgaagcccagttcccctgcc

SEQ ID NO: 561749 - DNA, 82 bp, Homo sapiens
ccgatgcccgcggccggagagctggaggagaggttcaaccgcgccctggccctgtttgtgctcttcgtcctggcctacatcc

SEQ ID NO: 561750 - DNA, 50 bp, Homo sapiens
ggcagaggcacttatgcttgtcagttgtggagtggatgcccacacggggc

SEQ ID NO: 561751 - DNA, 75 bp, Homo sapiens
atgataaaggaatcatctataggcaatgtggagaggtggaaaagtcacaagctttgagtcagaaacacgtgggct

SEQ ID NO: 561752 - DNA, 100 bp, Homo sapiens
ataagaggcgcaaaagaaaagaatctcaaagtgaaaggaccagttcgaatgcctaccaagtaacaacatgctgtaccccaaggaagacaaggagaaccgc

SEQ ID NO: 561753 - DNA, 82 bp, Homo sapiens
gtccagttactctaacaagtctggaggaaccatgctgccagttttctgtgtggtggaacattatgaaaacgccattgaatat

SEQ ID NO: 561754 - DNA, 75 bp, Homo sapiens
cacaagtggagctccttttcctccacctaccttcccgaggtgataaaagaaaatgtggctgaagttacccgaagt

SEQ ID NO: 561755 - DNA, 80 bp, Homo sapiens
atttacgcggatgtcggcgaagagttcaaccagcaacgaaggttttgggaacagtaaaatggttcaatgtaaggaacgga

SEQ ID NO: 561756 - DNA, 75 bp, Homo sapiens
tgccagggtccctgaagagggaagacacgcggaaacagcgagaaattaggcaacagctagcagaaaaagctaaag

SEQ ID NO: 561757 - DNA, 90 bp, Homo sapiens
gtggaacaattcatcttaccagagtgcacgttcgaaggctgtgggaaacgcttttcactggacttcaatttgcgcacacatgtgcgaatc

SEQ ID NO: 561758 - DNA, 78 bp, Homo sapiens
tcgagtgcctgcaggatgtgagggaggtgatgatgaacagtctacacagatggctgcaagttgggaagatgataaagt

SEQ ID NO: 561759 - DNA, 99 bp, Homo sapiens
agtggtcttaaggttgaagtgtggttcagggccagtgcatattagtggacagcacttagtagctgtggaaagaaataacttgatgaggttatcacagag

SEQ ID NO: 561760 - DNA, 75 bp, Homo sapiens
aagagcactagtgtctagaaggcactaagggtctcaccaacggctttgggggtgcgaggagcgagcaggagccgg

SEQ ID NO: 561761 - DNA, 100 bp, Homo sapiens
cacctaatgtcagggaccttctggatattttacgggaaagaggaatgacgggacagagtttggcggctccatttaccagaaagtgaacaagaagttggag

SEQ ID NO: 561762 - DNA, 99 bp, Homo sapiens
caagaagaggattggaaccagttccgatacagcacaatgatgactttgggaaattgctgctggctgaggccctcctggagcagtgtttgaaggagaacc

SEQ ID NO: 561763 - DNA, 90 bp, Homo sapiens
ctggttctgacaccctcagacacggccagctgaccccagaagaaagacctggtcctgtagacgggaaggagcctggacacagtgacacat

SEQ ID NO: 561764 - DNA, 83 bp, Homo sapiens
atccggttccttggtgtcatccagccttagcaaaccagagattctgaaggaagatttccattaggtaatttgtttaatcagtg

SEQ ID NO: 561765 - DNA, 100 bp, Homo sapiens
cctttaggtgcttttatattcatctcaaaaacaaaattctgaactcaggacttggcaagtttgctggttggctcccgagcagacagcaggaaagaagaag

SEQ ID NO: 561766 - DNA, 82 bp, Homo sapiens
tccaacaatggaggccagtggctggtctcaggtttgcctgtaggtacctgagttgacaccgaaggtgcctaaagatgctgag

SEQ ID NO: 561767 - DNA, 101 bp, Homo sapiens
aaaaggtgtacttgcaagaaacctcaggacttgagtaacagcaacatggagccaaaaacctgtatatcatctccgtgaaggggatcaagggacggctgaac

SEQ ID NO: 561768 - DNA, 80 bp, Homo sapiens
cccctgtcccctacgtcctacatgaggcctgtttaaagaagaaaacccgtatgctagatttgaaaacaactaaagcgctc

SEQ ID NO: 561769 - DNA, 75 bp, Homo sapiens
ctggtctctgaggagcacgtggtctggccctgatgtgcgctgtgtctactgggagtttcataatagaagagcaga

SEQ ID NO: 561770 - DNA, 75 bp, Homo sapiens
ttgtctccttcgacttggagtctttgtccaggacgatgaaagccttgagggaattagacagattttctgttttga

SEQ ID NO: 561771 - DNA, 50 bp, Homo sapiens
ggtacatctgaaagccgggaaatggtagtaaacctattgatggcaatttt

SEQ ID NO: 561772 - DNA, 95 bp, Homo sapiens
gggagataaagctgtgtactgccgttgttggaggtccaaaaagctgagatctgtatctgtggacctgaatgttgatccctcgcttcagattgaca

SEQ ID NO: 561773 - DNA, 100 bp, Homo sapiens
cagtacctgctggagaagggagactacaaggacagcagcgactttggggcccgtcaccctcagtgcacgaaggcagccctctgggtgaactccatcgctg

SEQ ID NO: 561774 - DNA, 100 bp, Homo sapiens
ggtacctgtggatgtggtcgagatgaaagggcagagcggcttgggtaaatccaccttaatcaacaccctcttcaaatccaaaatcagccggaagtcggtg

SEQ ID NO: 561775 - DNA, 100 bp, Homo sapiens
atagaagaggtcaccaaaaaggggaatgaagctgtagcttccagagacctgagtgaaaacaacgaccagagacagcaggacttggactaaagtctgatga

SEQ ID NO: 561776 - DNA, 100 bp, Homo sapiens
cccgaagccccctgcaggaactctacaacccaatccaggaaagaattcagagcctgaagcagagcatagacttcatggctgacttgcagaaaactcgaaa

SEQ ID NO: 561777 - DNA, 51 bp, Homo sapiens
aagatggctactctggagttgaggtggcagtagagaagagcatcacagaag

SEQ ID NO: 561778 - DNA, 51 bp, Homo sapiens
ggcagtttgaatcggtgctgaacagaaaaggcgacggcggattgacagaag

SEQ ID NO: 561779 - DNA, 96 bp, Homo sapiens
tggtcatagcgtgccgggcatagcgctggcagggccgccgggagccagccctcactcagccaagtggtggtgaccgcggtggcttcaaaaattttg

SEQ ID NO: 561780 - DNA, 100 bp, Homo sapiens
ccgcgggcgctacgggcttgactcccccaaggccgaggtccgcggccaggtgctggcgccgctgcccctccacggagccaagaaggatcaagaaggtgga

SEQ ID NO: 561781 - DNA, 80 bp, Homo sapiens
gcccaccactgccacaaacgccgcaccaggtcttgtagcagcgcctcctcggaccgtggcaaggaggtgtacagccctga

SEQ ID NO: 561782 - DNA, 110 bp, Homo sapiens
ccgggagcgagctgggagggagccgcgcgcctttgtgcgcgcgccgagacaatgcagatcttcgtgaagactctgactggtaagaccatcaccctcgaggttgagcccag

SEQ ID NO: 561783 - DNA, 94 bp, Homo sapiens
ctagccctgcagacagaggtgtgctgacgacctgctacaacagaaattaagatgttctacgaggagcatttgcacttggacgatgagatccgct

SEQ ID NO: 561784 - DNA, 100 bp, Homo sapiens
tattgtcgaagttttctaaagaagaatctgaagtgaaatgacatcaagagacctatcaagacctgtatccaggaaaaggaagcagtcaattatagatttc

SEQ ID NO: 561785 - DNA, 89 bp, Homo sapiens
gcgggaggaggcggcggcggcgagcccacccacctttgggttcctgttggacatcgatggagtgcttgtgcggggccacagagtgatcc

SEQ ID NO: 561786 - DNA, 96 bp, Homo sapiens
gaagggtgaaatagaagattatcgtttgctgacagatattttgtaatcctaaattggagagtcagagagtaaataaaaaagtcaataatgatgcct

SEQ ID NO: 561787 - DNA, 90 bp, Homo sapiens
accgccgggaggaggaggaggagccgagaggagctgagcgagcgcggaaggtgtggatgaggtcaccattgtcaacattttgaccaaccg

SEQ ID NO: 561788 - DNA, 90 bp, Homo sapiens
acttcaaagaagagccagctgctaagtaccaagctatctttgctttccccagacatggccaacaagggtccttcctatggcatgagccgc

SEQ ID NO: 561789 - DNA, 100 bp, Homo sapiens
ctgcagcggccctggcgggtgccctggctaccatggaccatcctgctggtcagcactgcggctggttccaagaccaaagattaaattaagagaaggtaaa

SEQ ID NO: 561790 - DNA, 82 bp, Homo sapiens
ctggagagagaccagacctgcaagctctttgacacacagcagttcttgtcagctcgggttcatgacgctctcgatattcctg

SEQ ID NO: 561791 - DNA, 100 bp, Homo sapiens
ggaacagattgttcctaaaccagaagaggaggttgcccagaagaaaaaggttccagatgtggaatctcgtgaagacttaattaaaaatcactacatggca

SEQ ID NO: 561792 - DNA, 100 bp, Homo sapiens
aaacagaataattctgaaagaaagaaaacaaagaaaaacatactccagaattcctaatagaacagaaattcagttcatgaagataagaagtttcttgaca

SEQ ID NO: 561793 - DNA, 113 bp, Homo sapiens
cgaagggttatccccatctgtgctctatatgtgatttgccagttcattctaataagcagcctgccttggcctcccaaagtgccgagattgcagcctctgcccggccgccaccc

SEQ ID NO: 561794 - DNA, 100 bp, Homo sapiens
tgacaactgtgagacatgcacttgctacgaaacagaaatttcatgttgcaccctgaacttgcttgctagaaaacaaagtgcaaggcttgacaaacacaat

SEQ ID NO: 561795 - DNA, 101 bp, Homo sapiens
ccggaacctgaagcagcaagccgacatcatattcatgccgtacaattacttgttggatgccaaggtggataattactgtaccttcctcatggaaaaagttt

SEQ ID NO: 561796 - DNA, 120 bp, Homo sapiens
cgccccgcgagcacagagcctcgcctttgccgatccgccgcccgtccacacccgccgccagggggatatgagactttctactcggaatatcctgagtgttgcgtggatgtaaaacccatt

SEQ ID NO: 561797 - DNA, 113 bp, Homo sapiens
gcccggaaggatatggcttccttgaactgcgggacgtgtagctgcagctgtggggtggaccatggaaacaggatggtctggtgaagaccaacatggagaagctgaccttctat

SEQ ID NO: 561798 - DNA, 98 bp, Homo sapiens
atgagttccacctcattttagagtatcaagcaggattctgatcttcgaagtgcacttcttttggaacaggcagcacattgctttataaacatgaaaag

SEQ ID NO: 561799 - DNA, 96 bp, Homo sapiens
gcgacagcgctggggccctgtgtagaagctccatcccccttgtctttgtgcttgcctgcgtccccagactcagagcgagtaaccagctcataaatc

SEQ ID NO: 561800 - DNA, 96 bp, Homo sapiens
tcctcctgacagccgagaaaggcagacacaagagcaagcccgcacgtgtgaaggcatccactggtccatgtgaaatctgaggtccttgctgtcaag

SEQ ID NO: 561801 - DNA, 75 bp, Homo sapiens
gggcaccaggccctgactaccagtttttctttaacatcagcactgatgaccaagaaggcctttacagtctttatt

SEQ ID NO: 561802 - DNA, 100 bp, Homo sapiens
agataatgactcacctggggccacatttgaacattgtaaacttgctgggagcctgcaccaagtcagaccaagtctgtgtttgagattggactctgcagta

SEQ ID NO: 561803 - DNA, 98 bp, Homo sapiens
tcgggtgggagtgacccgattttccagctctctctccagatcggattcaaccgcacatcatgacagatgttccggctacatttacccaggctgagtgt

SEQ ID NO: 561804 - DNA, 80 bp, Homo sapiens
gcggatctcaccgccgctcagggcctggtactgtggcgctccgtgaaattagacgttatcagaagtccactgaacttctg

SEQ ID NO: 561805 - DNA, 101 bp, Homo sapiens
atatggaagaggagggcaagaagggcaagaagttgatcacagccgagttaaattgacattaaagactccttcacaagattcagactatatcaatgcaaatt

SEQ ID NO: 561806 - DNA, 95 bp, Homo sapiens
caagtagccaagggaaaataagcccaggaaggtcaaggtacgcatagctgctaaattcatcactcatgcacccccaggggaatttaatgaagtat

SEQ ID NO: 561807 - DNA, 75 bp, Homo sapiens
gcctgctctcgggccggggtctgcgcgcaccacgcggccggcagaaaggctgctgctgctgcactacaaggccag

SEQ ID NO: 561808 - DNA, 100 bp, Homo sapiens
tacaatatttcagaggtcatgtcaaaagagctggtattccctctcgagtggtttccactcaacaagcccagtgttggggactacttccacatggcctaca

SEQ ID NO: 561809 - DNA, 50 bp, Homo sapiens
tggtgcccatggaccagaaaaagcactcctgtaggaggcctgctgatggc

SEQ ID NO: 561810 - DNA, 98 bp, Homo sapiens
cagtggctatgtgcaccagcaggcccccacctatggacatggactgacctccactcaaaggtgctatgacaagcgtctgtggcctcgaatggacctga

SEQ ID NO: 561811 - DNA, 135 bp, Homo sapiens
aagatgatgagaaataaggacaaaagccaagaggaggacagttcgctacacagcaatgcatcgagggtgttgaaagcagcaggggcctagaagacattaaaccgataccacagaaatacaaaggatcattagaga

SEQ ID NO: 561812 - DNA, 101 bp, Homo sapiens
cgagcaggaagctgcggctgagtcgatggagaaactgaggcccagaaattgatgtccagaatgctttgctcttagccactgtactattatggcatatttta

SEQ ID NO: 561813 - DNA, 100 bp, Homo sapiens
agtccatggcgaatcagctgctggccaagtttgaggagagcactcggaacccctcactcatgaagcaggcccacctgccgtttgctgtcattggcagcac

SEQ ID NO: 561814 - DNA, 98 bp, Homo sapiens
tacagagacagaaatgttgatgtggtacttgaagacacctgtactgttggtaacttgcccaggagtcgtgcttaaagacaaagaggacatctatctta

SEQ ID NO: 561815 - DNA, 100 bp, Homo sapiens
atatctgtggatgctatgcatgtcttcattgatgaacatgagataatagtagcagaatttcacaaaaaaatcaaagaggcatttgaagtctttgaccatg

SEQ ID NO: 561816 - DNA, 100 bp, Homo sapiens
ttccagtgagagtgacacaggtcaggaagcagaatattccttatatggtggcgacatgtctaagaatgtgagccagtcacagatggcaaaattgaaccaa

SEQ ID NO: 561817 - DNA, 100 bp, Homo sapiens
tcaacgtggagtttgatgactctcaggacaaagcagattagcctgaggcctgctcagtcgttcctaatgaataaaaatcaagtgccaaagcttcagcccc

SEQ ID NO: 561818 - DNA, 50 bp, Homo sapiens
gatacaaccaaattctttcatgctacacagtctcaccagtggtattcttg

SEQ ID NO: 561819 - DNA, 75 bp, Homo sapiens
agagaacctaagtctgtttgcaaagcacctgaactggttcgagactataagaggcttacccccatttctgtgctg

SEQ ID NO: 561820 - DNA, 75 bp, Homo sapiens
gccacctccccaggtgatgcctgaagctcaagggactgtgtccaccctcaggaatccctttgcccacgtccagct

SEQ ID NO: 561821 - DNA, 100 bp, Homo sapiens
tgatagagaagattcttctcaacatttctgcagactgcctcaacagagtgatagctgctcctatcagtgacaaatcagcgtattagaacatgcatgctgg

SEQ ID NO: 561822 - DNA, 88 bp, Homo sapiens
aagaagggccttactccttcacagatcgtcttatgatgtaatcagcgcgatttcacttcctgaatttcgatgaattctaagacatggg

SEQ ID NO: 561823 - DNA, 98 bp, Homo sapiens
taattacaatacttcccattataacaatgacctctggcagatttttgaaaatcctgtggactggaaggatcaccagcacatatgcggccagtcagcag

SEQ ID NO: 561824 - DNA, 75 bp, Homo sapiens
ccaactagagataaaaataccagaaacatacccatttaatccccctaagctgaatgcaatatccatacatctcct

SEQ ID NO: 561825 - DNA, 96 bp, Homo sapiens
cttgcttgaaagcctggaaagaacattgccgaagtgaagaagggctaccctgagaggaatctacatgcagagaagttcaggagactgaactaacgg

SEQ ID NO: 561826 - DNA, 101 bp, Homo sapiens
aacagaagagtcgaagctctgcgagacccaatatttgccaataagaatggttatgttaattggccttggtcctcacagctccaaaaagaaacaggatctcg

SEQ ID NO: 561827 - DNA, 83 bp, Homo sapiens
caaagatgctcaggctgctcttggctctcaacttattcccttcaattcaagtaacaggaacgaatgcaggaatttgggaactg

SEQ ID NO: 561828 - DNA, 75 bp, Homo sapiens
ttttcccggtgctgagctgtctggctgtgctggcattgcagtgtcgagatggctatgaaccctgtgtaaatgaag

SEQ ID NO: 561829 - DNA, 90 bp, Homo sapiens
caagaatggaatcaacagttctgggcaaaccagaatttgacttttagtaagataacgaaggaggcccaacttcattcaataaggagcctg

SEQ ID NO: 561830 - DNA, 100 bp, Homo sapiens
aatgtcaagctggccctggacatcgagatcgccacctacaggaagctgctagagggcgaggagaaccggtaagaatgattgatgttggctgatattggag

SEQ ID NO: 561831 - DNA, 83 bp, Homo sapiens
aacgatcctctcatctcagcctccaaaagtgctggcattacagaatattatccagcaatgcaaatgaacaaactataactaca

SEQ ID NO: 561832 - DNA, 100 bp, Homo sapiens
aaacaaaagattgagctgcactgtattcctgtgagcgtgtaggagccttcactatggtctgcaaagatgcggatgaagccaaaagggtagagtcacagtt

SEQ ID NO: 561833 - DNA, 50 bp, Homo sapiens
agcggttccatcctacacttggggaggtggggaagacagggctccagcta

SEQ ID NO: 561834 - DNA, 50 bp, Homo sapiens
ctttctggacacagaagtatttgtgacagtgcacacacccagaagctatg

SEQ ID NO: 561835 - DNA, 83 bp, Homo sapiens
ctactactacgtggtgcttggaaagatttcctcctctgatgctcctcttcagcctttggtatcctctccttctctgcaagctg

SEQ ID NO: 561836 - DNA, 134 bp, Homo sapiens
gccctctccaaggagtaccggttacagtacttggcctctgaaacagtgctgaacttggcttttgcgcagaacctggatgacagtgtgttttcgaagcggcatgcaaaactggagctggatgagaagagaaggaa

SEQ ID NO: 561837 - DNA, 100 bp, Homo sapiens
atcactggaagaaaactacagctgggctctgcctgctgacctggggaggccattggctctatggaaaacactggatcttcagcctgttaaacaagaaaac

SEQ ID NO: 561838 - DNA, 110 bp, Homo sapiens
gagaggtccaagatgcagcaggtcggaggaaacagccagaccgagagcagcctgccggggcggaggtggtctttgggaagaagcttcctgcctttgccaccatccccatc

SEQ ID NO: 561839 - DNA, 126 bp, Homo sapiens
tacaggaatgtcaagagcctgattgaaccagtcaaccagtctattgttgtcagtggagagagtggtgctggaaagggcacttttccaaacacaggagccaggatcatgctgtttactggaggtccc

SEQ ID NO: 561840 - DNA, 100 bp, Homo sapiens
tgaatgcacagctagaaggttggctttcacaagtacagtctacaaaaagacctgctagagccattattgccccgctcagacaaatgacagtgactctgac

SEQ ID NO: 561841 - DNA, 74 bp, Homo sapiens
ttttctctgctttaacaaatatgtttgcagctcaccttgtgaagatgaaatatccaagaatctgtattctagat

SEQ ID NO: 561842 - DNA, 75 bp, Homo sapiens
agctcctgctgttgattgtggaaaaggacacctcttctgctgaccattacgtgacaaagaagaaattggttacag

SEQ ID NO: 561843 - DNA, 89 bp, Homo sapiens
aaaaacattcaagaatcatctgtaaacctgataacactgcatgaaatgttagagaaatgccagatctggagtaaggaatattgtcatca

SEQ ID NO: 561844 - DNA, 102 bp, Homo sapiens
tttgcgggactcagtcccatcactccaaggagagaaggtttggttgggatgttccagtaattctgagaaattcagaagagacccagttcagcacaagagttt

SEQ ID NO: 561845 - DNA, 51 bp, Homo sapiens
cgaacggctccttcagcagctccagggtaagggactgttctgaagaacctt

SEQ ID NO: 561846 - DNA, 100 bp, Homo sapiens
ttagtctaaatgatgggcagtcatggtcccagaaacgtcactatcaagaagcagtgtgtgaaagtaaagatttatctgatacagttagaacagtattaaa

SEQ ID NO: 561847 - DNA, 100 bp, Homo sapiens
ctcttgttttgaatacgtagtctgtcctgttctttcaaacccgtctggtaaacttgtccagattgaatatgctttggctgctgtagctggaggagccccg

SEQ ID NO: 561848 - DNA, 75 bp, Homo sapiens
gaggttccgtcagtgtctgatgtcagatttatctcatgctgtgcagaaaatgatgcatcctgttgccagcagtaa

SEQ ID NO: 561849 - DNA, 100 bp, Homo sapiens
tcccagaggctcttcatgattctttggctcaaaggagttgtatttagtgtgacgactgttgacctgaaaagcttctccggagtccagtggccaagagact

SEQ ID NO: 561850 - DNA, 100 bp, Homo sapiens
ggtggtgtgatagcggcagcgaggggctcggagaggtgctcggattctcgtagctgtgccggggaagaatcccactgatgcataccttgatgccatgatg

SEQ ID NO: 561851 - DNA, 98 bp, Homo sapiens
agctcctcctcctccatgcacctgcacaggcgcttcacggacctgatctgcattagtgccagcagtagttcccaagggctgtctcagccatccaccca

SEQ ID NO: 561852 - DNA, 80 bp, Homo sapiens
ctggactcggattcgttgcctgagattttctggcatccttaaatcttgtgtcaaggattggttataatataaccagaaac

SEQ ID NO: 561853 - DNA, 101 bp, Homo sapiens
agaactaacacatcctggagctgcccggagttccgctcctgcgggcttagcaggaaagggtgcctaagtcactcaagactgcttgcaactgattgcagaca

SEQ ID NO: 561854 - DNA, 106 bp, Homo sapiens
ggcaggacgaggtgtcggcgcgggagcagcacttccacagccaagtgcgggagtccacggctctctatgagaacatgctggtggagctgccctttgcaggcttctt

SEQ ID NO: 561855 - DNA, 75 bp, Homo sapiens
ctgactttcagctatggaatcggagttggggacttttcccagccagacacctctccggacaccaatggtggaggc

SEQ ID NO: 561856 - DNA, 90 bp, Homo sapiens
cgaagcgctggaggagaagctgaggaacttaactttccggaagcaggtctcgtacaggaatcattaaccaatggcaacaggaatccaagg

SEQ ID NO: 561857 - DNA, 86 bp, Homo sapiens
cctcaaactgactttgcagccacggagagggaatctaagggaggaaattatcaactgtgcacaaggaaaaaaatagatatgtgaaa

SEQ ID NO: 561858 - DNA, 75 bp, Homo sapiens
ccaaagccagcctcatcttcatcttcaccttgttcatggtgtcctgtaagggtgaagttgaacaaattgctatga

SEQ ID NO: 561859 - DNA, 109 bp, Homo sapiens
ggggggggcggcggccgaacgatgtgcgagaactgcgcagacctggtggaggtgttaaatgaaacggttgctgatgctattagaacaagccttggaccaaaaggaatgg

SEQ ID NO: 561860 - DNA, 75 bp, Homo sapiens
ccgcctcctacctccttctgcttcggtgtgaaatggcctttccccgggtcaagccagcacctgatgaaacttcct

SEQ ID NO: 561861 - DNA, 75 bp, Homo sapiens
ctgcgagggactaagagcagagtgaacctgagcaaggtgggcgagtattggtggaacgccatcctggagggagaa

SEQ ID NO: 561862 - DNA, 106 bp, Homo sapiens
ttcacacagctgcttccattggccagtatgaagtggtgaaggagtgtgtgcagcgaccattaaaaatctcaagtgacgactttgggaaactctggttatccttcgc

SEQ ID NO: 561863 - DNA, 134 bp, Homo sapiens
gccatcgaaatgccctcacaccagacctacggagggagctggaaattcctgacgttcattgatctggtctgaatttcctgctgctgttcacaaagatgctttttatctttaactttttgttttccccacttccg

SEQ ID NO: 561864 - DNA, 100 bp, Homo sapiens
cagaaggatatcgacgtcgtgatccagaagtccagagctgaggactgcctgtttgcagcttattcagctgattctgaatcatcttacactaccagacctg

SEQ ID NO: 561865 - DNA, 100 bp, Homo sapiens
aagacatcacatccagtgcacaggtcatctctgaatttgagcaatggtgaaacggaatctgtgaaaaccatgattgtccatgatgatgtagaaagtgagc

SEQ ID NO: 561866 - DNA, 82 bp, Homo sapiens
ccgacaactccaccgtggcgctcgccaaagtaatagctcttcaagtctgcaataaaaaatggcctccaacaaaactacattg

SEQ ID NO: 561867 - DNA, 83 bp, Homo sapiens
aagcagctgagaagtattatgatctggcagccaggctgaggcctaatgccatccatttacctgctgaaacaatgagaatagtg

SEQ ID NO: 561868 - DNA, 75 bp, Homo sapiens
gcagtacaggaaccggggagacccctgggctgtgatgaccatgctgactgtcatagagcagccagtacctccaac

SEQ ID NO: 561869 - DNA, 100 bp, Homo sapiens
actacaagggtcctgaagtcagttgttgcatcaaatacttcatatttggcttcaatgtcatattttgggctattgcattacctcctatagccaaatggcc

SEQ ID NO: 561870 - DNA, 82 bp, Homo sapiens
tgaagttacacccatcacagaattttcatagagctggactattggaagtttgcagaaaaaacttcagcatgtgccaggaaca

SEQ ID NO: 561871 - DNA, 83 bp, Homo sapiens
tgcaaatgaagctctcgaggctgctaagagactaaggggaaatttgcagtggtgagaaaatgtataaagaaagattctgggaa

SEQ ID NO: 561872 - DNA, 82 bp, Homo sapiens
cccctgacagggccacgcacctgatcgccgcgcgagctgcatcaagatggtgctcatgtggaccagtggtgacgccttcaag

SEQ ID NO: 561873 - DNA, 100 bp, Homo sapiens
cacagccgccccacccgcgccgctgcctcgctggggcccgggcccccttcccggtccgttctgcggggagtgtctccagccctgcctgcaggtgccatcc

SEQ ID NO: 561874 - DNA, 100 bp, Homo sapiens
cacagctgattcctgggagcacatccatttcattggcaagctccaaaaggaattcttcatttgtctcctgatgtttatcaagagatggaagccagccgcc

SEQ ID NO: 561875 - DNA, 96 bp, Homo sapiens
aaaagaaatgaattctgccaaagagaaatataaagaagctttagctaaaggaatcttctgcggcttgtccatagtgtgaataaaaactaaatcaca

SEQ ID NO: 561876 - DNA, 100 bp, Homo sapiens
gcaggactgggcacagcatgagatccaaaggcagggcaaggaaactggccacaagtcacatgtgccaatttaacgaacggtggaaagtcagaacttctga

SEQ ID NO: 561877 - DNA, 75 bp, Homo sapiens
gccactaatgctgatgtccatggtctctagcagcctgaatccagggggcagtacccaaaggaaacgctacgaaag

SEQ ID NO: 561878 - DNA, 90 bp, Homo sapiens
ccgagagcgcgaatatcgtcatcgttagaagcacaaagacattagcaggctgctggtttcatggacctgtaccacaatgacacagagaac

SEQ ID NO: 561879 - DNA, 82 bp, Homo sapiens
gacgaagagcaggccagcccggacctctggagtgcccccagcccagagcccggaatgcagtttattctactccaagagattc

SEQ ID NO: 561880 - DNA, 100 bp, Homo sapiens
ttcagctgtcatggaccccaggcgatgacaacaatagccccattacaatttataggcaagcaataaacagcaagatgtttgaggtggatatgaaaattgc

SEQ ID NO: 561881 - DNA, 75 bp, Homo sapiens
gtctgactctgactctcggactgagaaacgcaagattcccaacttcttctggagcctggggatcggtcacactgg

SEQ ID NO: 561882 - DNA, 98 bp, Homo sapiens
ggaagtagagcctcctcctaaggatgtggtaaaataccatgaagattttgaaaaaacaaaggggagaggctttactcccgtcgtggacgatcctgtga

SEQ ID NO: 561883 - DNA, 96 bp, Homo sapiens
ggcggtgggcattgttggcgccatcatcatgccccacaacatctacctgcactcggccctggtcaaggatatgctgcaggctgctagtcattatcg

SEQ ID NO: 561884 - DNA, 95 bp, Homo sapiens
cgatgcacccatgtcccaggtgtatggagcgccacatctcctgagattatttggtaattctgttccacaggatatctgctgtatggcagctgatg

SEQ ID NO: 561885 - DNA, 96 bp, Homo sapiens
gcgttggtggcgacggccgagtcagggggagtttgttgcttgtctcctgtccctattacgacaaatgacagatagacattatcaacagcttcttga

SEQ ID NO: 561886 - DNA, 82 bp, Homo sapiens
tggcgcctgtgggcacagacaaggagctcagtgacctcctggacttcagcatggtcaaaatgcagatcttcgtgaaaaccct

SEQ ID NO: 561887 - DNA, 90 bp, Homo sapiens
agtgatcctcccacctcagcttcctgagtagcttcgttccagagcccagcatgaatggatacgcggaatttccgcccagccccagtaacc

SEQ ID NO: 561888 - DNA, 83 bp, Homo sapiens
gcagacagcgccatcatgaatccagctagcaaagtaattgcactgaaaggaaaattgcctaagaattatgacccaaaagttac

SEQ ID NO: 561889 - DNA, 83 bp, Homo sapiens
gcagcaagaacagagagagaggtggacagatctgagagatactgaggtgaggtctcataattcactgcaacctacaattcctg

SEQ ID NO: 561890 - DNA, 82 bp, Homo sapiens
ggcgaacgcggagagcacgccatgaaggcctcgggcacgggggatatgagactttctactcggaatatcctgagtgttgcgt

SEQ ID NO: 561891 - DNA, 75 bp, Homo sapiens
gaaattctggaataaatttttggagaataaatccccttggaggaaaatgtttcggagcaacatcccctgtcacct

SEQ ID NO: 561892 - DNA, 82 bp, Homo sapiens
gatgaagaatccccccgaaaggaccccccagtccacctggaaggccgctgtggtggaaggatgtttgactgcagagatgtgg

SEQ ID NO: 561893 - DNA, 100 bp, Homo sapiens
gccaggccctgcaggacctgctttcggagtacatgggcaatagaaccatggagtctggcagtaccgccgccagtgaggaggcacgcagccttcgagaatg

SEQ ID NO: 561894 - DNA, 100 bp, Homo sapiens
tcacctgaggcacccgaagaagagaccatccatatttccaggctggagcattggatttgctaaaggagcttaagaatattcctatgaccctggaattact

SEQ ID NO: 561895 - DNA, 100 bp, Homo sapiens
caattatggaggaggaaaatattggtacttcaaacatgcaagttggaatgtaaaaaagcacgcttagattggaatactgatgctgcgtctttgattggag

SEQ ID NO: 561896 - DNA, 90 bp, Homo sapiens
gggcgggcggagggggcggcggcagcgacggcagcggcggcggctggactaaacaggtcacctgcaggtctcggcgcggaagatggccgg

SEQ ID NO: 561897 - DNA, 75 bp, Homo sapiens
cccaatgtgtgataaacacacagcttctgtggaaaaatcccaggagcggaccctgaggaaaccattctcaacgca

SEQ ID NO: 561898 - DNA, 100 bp, Homo sapiens
aaaggagctggcccagcaactttcccagaacgcaccgcaagctccctcctcgacaatgcagatcttcgtgaagactctgactggtaagaccatcaccctc

SEQ ID NO: 561899 - DNA, 100 bp, Homo sapiens
tgataaatgaaatcttcctaagtatagatcgtactgagaagcactccacaatgccagactcacctgtggatgtgaagacgcaatctaggctgactcctcc

SEQ ID NO: 561900 - DNA, 100 bp, Homo sapiens
tcaaaacctttgataaccttaaggagtggagtcaacatatcaatggagcaagtcacagtcgtcgatgccagcttcttcttgaaatgtaggagtttgaaat

SEQ ID NO: 561901 - DNA, 75 bp, Homo sapiens
cacctggaagataaatcggcacaaaattgtcaccgagaacaggggagctcttaagcccctgccgctgcgacggct

SEQ ID NO: 561902 - DNA, 100 bp, Homo sapiens
ctggctcagccgcaagtacccgtccatcatagtcaactgcgtggaagagaaggtggagataagtaattaacatttcgaaacaggaaatgaaaggatttat

SEQ ID NO: 561903 - DNA, 83 bp, Homo sapiens
gttcggcatgagcaagaaggagatggagcagcttctccaggcagccaccaactaccacaacgggcacacaggccagctctcag

SEQ ID NO: 561904 - DNA, 82 bp, Homo sapiens
ccaatgttttgatgattggcagagacccactgtctgaccgtgagtccatcttcttcaacagccacaacgtgtcaaagccgga

SEQ ID NO: 561905 - DNA, 100 bp, Homo sapiens
aaaggcccaacttgataggactaacatcaggggatatggatttgccacccagagatttttgcagctcaagtggcagtcctcctttccagcccatcaaaag

SEQ ID NO: 561906 - DNA, 51 bp, Homo sapiens
gaatcaggccggctggtgagggtacaggttgggaaggagaaaatgctcaag

SEQ ID NO: 561907 - DNA, 98 bp, Homo sapiens
ggccacaacttcattgctgggaaaaggcataattcttgggtcatcatttctactcagtataaacgattttctccttaaaacaagtctcaaagaaagaa

SEQ ID NO: 561908 - DNA, 90 bp, Homo sapiens
gctttctctcgatgaggataacatccctccagaagatgatatctcttgtaaatgtgtaaacacggatttgccaccaaaggggaagaacaa

SEQ ID NO: 561909 - DNA, 82 bp, Homo sapiens
gggcaggccggggcacccgggcacgcagggcgcgcctggcgagcgccccgggagcaattctgtggtgttcttggtcacacat

SEQ ID NO: 561910 - DNA, 100 bp, Homo sapiens
tgatcctattaagaattgtccaaatgttggagcatttgattgaaaaatccttcttagccattttaaagagagaactcgatgccaccgcaacggtattggc

SEQ ID NO: 561911 - DNA, 75 bp, Homo sapiens
ctggaagtacgggcagttgcagtgttggagctaaaggcatggtgctgatgtgaaatgtgtagactggcatccaac

SEQ ID NO: 561912 - DNA, 98 bp, Homo sapiens
gaaggatgcaggtgatggtgttcgatacttgctcagctgagaagcttcagcttattgatgatcagtttgcagatgcttaccctcagcgtatcaagttc

SEQ ID NO: 561913 - DNA, 82 bp, Homo sapiens
agcaccatcgagccagaagcagtatttgtcctgattggtttatcttggaagctaaagggcattgctcatcctgaagatcagc

SEQ ID NO: 561914 - DNA, 90 bp, Homo sapiens
acaagtcctgcgcttggggatcctctgtacgcccgttcactggacgtgttcctcatgatccggcgccacaagaccaccatcttcacggac

SEQ ID NO: 561915 - DNA, 82 bp, Homo sapiens
ctttgagtggtttcagagcatccgagagatcacctggaagattgacaccaagaaactaatctggattcactccctctggttg

SEQ ID NO: 561916 - DNA, 100 bp, Homo sapiens
aaaaaaaggaagagaaaaagagagaaaaggagccagaaaagccggcaaaaccacttacagctgaaaagggctgaaagacacacagaagtcttcatggata

SEQ ID NO: 561917 - DNA, 82 bp, Homo sapiens
ggagcaattgaagctgactactaaggagaataaggctcctatggatattccaggtttaaacctgagtcaacaagaatactac

SEQ ID NO: 561918 - DNA, 103 bp, Homo sapiens
cgagaggaggaggccggggctctccgggcctcccgccgcttagcctgatgctggaaggacgaagggaggtgttttttgagggggctgaaaatccctttgggct

SEQ ID NO: 561919 - DNA, 124 bp, Homo sapiens
aggtgctgtctctagcatcacctctcagcacgattttcccgagagttcacagtccagtgtgaaaaaagccagtattaaaatactgaaaaattttgatgaagcgataattgtggatgcggcaagt

SEQ ID NO: 561920 - DNA, 100 bp, Homo sapiens
ctaaagcggctcatcgcgaagagaccgcccttacaaagcctgcaggagcggggtctgctccgaggacccagtacacacagagaaaattccagaagagccg

SEQ ID NO: 561921 - DNA, 80 bp, Homo sapiens
aggccatctcctgggccgcctggcggccatcgtggctaaacaggtactgctggggtccgcaagcaggtggtgaacatccc

SEQ ID NO: 561922 - DNA, 114 bp, Homo sapiens
cctgccgtccttctccactttcgccagcccgtgccgcgagcgcggcctgcaggagtaaggtacctgccgtgggcagatctgagctttcttcttggacaccccatacccacagtc

SEQ ID NO: 561923 - DNA, 80 bp, Homo sapiens
agaattataggaacctggtctccctggcccgacggccatggaggctgaagagacgatggaatgccttcaggagttccctg

SEQ ID NO: 561924 - DNA, 100 bp, Homo sapiens
gaattctggttgtgtttcaactgctgtattgcagaacagcctcagcctgtaatttccccatgattagtgatgatttggtcaattcttatcacctgctgct

SEQ ID NO: 561925 - DNA, 98 bp, Homo sapiens
tctggggctcgccttgtatctcaacaccctgagtgcggatttctgctatgatgacaggcttatcaggagggcagacttcaaaagctactaaaaatgaa

SEQ ID NO: 561926 - DNA, 104 bp, Homo sapiens
aggaagagcatcctatggtgtgtcaaaaggcaaagtgtgttttgagatgaaggttaagacatcagaattttatagatactcccgacagctccgttacgaagttg

SEQ ID NO: 561927 - DNA, 100 bp, Homo sapiens
agtagcccttggaaccatgatgcattgtcagaccctaaaggatcaaccctctgcatacagtaaagcctcatcatccatgaaggctcctctgtctaccgca

SEQ ID NO: 561928 - DNA, 100 bp, Homo sapiens
tggaacctcctgctggactttggaaacatgattgcggatgatatgtctaactacgatgaagaaggtattgttgcagcatctggcagtgagactgaggatg

SEQ ID NO: 561929 - DNA, 88 bp, Homo sapiens
ttttgagtatttcaacactgctcctcttgcacatgacctgacatttagagacccctatggtgtagccgtgggtggaactgtggggcac

SEQ ID NO: 561930 - DNA, 100 bp, Homo sapiens
ctctgaccattctttatggatacattaagtcaaatataagagtctgactacttgacacactggctcgtgatggtcattgtcctccagagcagtgatggag

SEQ ID NO: 561931 - DNA, 82 bp, Homo sapiens
ccggccgcggccccctgttgtgttgctgcggagagacaatgcagatcttcgtgaagactctgactggtaagaccatcaccct

SEQ ID NO: 561932 - DNA, 75 bp, Homo sapiens
gacagctctgcggctcgggccctgaggtttggtgcacctcgatttggaggaagtagggcagggcccttatctgga

SEQ ID NO: 561933 - DNA, 87 bp, Homo sapiens
aagacagaagaaaaccaaggctgaaggggatcgtctaaaagaggcatataggttgctgtagatgaatgttcttagctgtcatgttta

SEQ ID NO: 561934 - DNA, 100 bp, Homo sapiens
agatacaaaccttcttctgcttgttcagattactttctatgaagacaaaaattttcaaggccgtcgctatgactgtgattgcgactgtgcagatttccac

SEQ ID NO: 561935 - DNA, 83 bp, Homo sapiens
cgagatacactctgtggagactgctggcctggggcgaccattgacgaggtggagacggacgtggtggagattgaggccaaact

SEQ ID NO: 561936 - DNA, 97 bp, Homo sapiens
cggtgcttccagtgccaaaccaaactggagctggtgcagcaggaattgggatcgtgtcgctgcgccgtgttgccgcccgctgtgctatgagcagtca

SEQ ID NO: 561937 - DNA, 90 bp, Homo sapiens
gcaattaaacacagaaggaaatacccagactgttactacaacctcgggcgtctgataacgaaggaggcccaacttcattcaataaggagc

SEQ ID NO: 561938 - DNA, 98 bp, Homo sapiens
ggactaagagaagtcacaaaacagcagatttcccaagagcagcggaaaatgatccagtcacaggagaaccaggtgcatcagcgcattgcggagctgag

SEQ ID NO: 561939 - DNA, 97 bp, Homo sapiens
ctacacatttccagcaggctgcagatacgagtggacaagtgctttacaaggccaagtacggtccaatgtggatgtcctacttagggcctcagatgca

SEQ ID NO: 561940 - DNA, 100 bp, Homo sapiens
gtttttcttccccagtcttactgtgcatttgattttgcaactatgcctcatcagctgcaagacaccttcttaaggtatggaagagttaattatgttctgg

SEQ ID NO: 561941 - DNA, 83 bp, Homo sapiens
cggagggaagacgccctggtgctcaccaagcaaggtttggttgggatgttccagtaattctgagaaattcagaagagacccag

SEQ ID NO: 561942 - DNA, 90 bp, Homo sapiens
gtactctgctcttcccagtgagatgcagacccgaatctttgacccagctccaccaggcagcagaaaggatcagttccatgacaagacccc

SEQ ID NO: 561943 - DNA, 100 bp, Homo sapiens
ggacccggccatggcgctggacttcttggctggatgcgcgggggactgtgccctgtccacggtgcctcctgcatgtcctgctgccctgagctgtcccgag

SEQ ID NO: 561944 - DNA, 75 bp, Homo sapiens
cagtcggagacccccgagccaggaagattcttacctctgaagacaatgttaggaccaagatatgatagtcaagtt

SEQ ID NO: 561945 - DNA, 100 bp, Homo sapiens
caagggtccggggcaatcgaatgaataatcaaaagtttccttgagttttactacccttggatgctgctgttgacatggaaaagattgaggaacaatttgc

SEQ ID NO: 561946 - DNA, 100 bp, Homo sapiens
aaaatttgtatcctcagatgaaatggatttgcatcttgtaatgtgtttaacaaagccacgaataacctataatgaatatgtgggcctcgctatggtgaaa

SEQ ID NO: 561947 - DNA, 75 bp, Homo sapiens
ccgactgcaactgctggattgctgcaaggctgagggacgagaacgaggatattgtacctgtggatgcatcttatg

SEQ ID NO: 561948 - DNA, 74 bp, Homo sapiens
ctctcagttgcacttctcaaaggacacaactcagatgggaagttcatcgcccgggcacagcggatagagtacga

SEQ ID NO: 561949 - DNA, 99 bp, Homo sapiens
agacggagatctctggagcagacctcaagttggcaaacatgaattgactgggcataaagtagctgtgaagatactcaatcgacagaagattcggagcct

SEQ ID NO: 561950 - DNA, 100 bp, Homo sapiens
cctgaagcctcttgtcccttcattgtcatctgcttttgaggatgaaacaagtgaagatgctaactgtcttgctttgagtggacatgataaaacagaagca

SEQ ID NO: 561951 - DNA, 90 bp, Homo sapiens
tcgcagacaacccaaccggtatacaatggcctgcaggacaagctgaacaagagggacaaagaggtgacagccttgacctcccagaccgag

SEQ ID NO: 561952 - DNA, 51 bp, Homo sapiens
agagtcataacatatcactgactgctgcagaaccttggcctgaaaatgcta

SEQ ID NO: 561953 - DNA, 98 bp, Homo sapiens
tttgctagccattgtctcatgaaccatcctgatttagcaaaagacttaacagatgaagtgtttagaggacatgagccaggtcaagcagcaaacagatc

SEQ ID NO: 561954 - DNA, 76 bp, Homo sapiens
gcggagtcggcgccgagaacatgatattaacctggctgcagagccaaaagtgaaccgaggaaaagcaggtgtgaaa

SEQ ID NO: 561955 - DNA, 91 bp, Homo sapiens
gtcagggggactgcaaaggccaatgttggtgctggcaaaaagtctgaccagtgcacaggacttcagggcttcctggtgttccacagctttg

SEQ ID NO: 561956 - DNA, 76 bp, Homo sapiens
gttggaggtggtgctgctggggaacgggagctggatgagacggaatcagtccccaatgcctggaaattcctcattg

SEQ ID NO: 561957 - DNA, 129 bp, Homo sapiens
tttttcaacagttttttcactgctattgccctgttggttttggtaggagaacagatcccaatggagactatatcaggaaacgtaaatattttcaccacgatcgattagactgggatgaacacagttctg

SEQ ID NO: 561958 - DNA, 75 bp, Homo sapiens
ggccttgcatcctgtgctgccaactccatcaatcagttccagtgtctcgccccatcctcaccctcagggttccca

SEQ ID NO: 561959 - DNA, 82 bp, Homo sapiens
cgcagagcggagctagctggatgcgtccggactcctgcaggctgaccccgcactacatctacccaccagccatcgtgcagcc

SEQ ID NO: 561960 - DNA, 75 bp, Homo sapiens
tcatcaaaaatagtgatagctttgataagtgtgttaccgagtggaatgggccaaattccaggaacgtgagaggaa

SEQ ID NO: 561961 - DNA, 83 bp, Homo sapiens
cggcggcagcggagagcgagagaggggagcaggtcaaaatgcagatcttcgtgaaaacccttaccggcaagaccatcaccctt

SEQ ID NO: 561962 - DNA, 48 bp, Homo sapiens
gggtgcctggcctcgcttctgtcccaaatttttgacagcagctgtata

SEQ ID NO: 561963 - DNA, 74 bp, Homo sapiens
cgcacagctgctcccttcgccttcgccctttccacctcgcggcagttcgatctcctgggaggcccccgtggaga

SEQ ID NO: 561964 - DNA, 100 bp, Homo sapiens
gacgacaaggagggcatgatcaacctcgtcatgtcctacgcgacaatgcagatcttcgtgaagactctgactggtaagaccatcaccctcgaggttgagc

SEQ ID NO: 561965 - DNA, 75 bp, Homo sapiens
tcctgaggagcagaattcaccagagagcagcagccatgccaatgcgatgcagcctctagaagaccagcattctcg

SEQ ID NO: 561966 - DNA, 110 bp, Homo sapiens
gccggcttctcccctacgcgctacacaagtggagctccttttcctccacctaccttcccgaacaagttggatggcttgaggactggtactaaaaggaaacgtgactggga

SEQ ID NO: 561967 - DNA, 83 bp, Homo sapiens
gcggaagatcgtcgccacctggatgctggagacctgcctagagctggaacgttacctccagagcgagccctgctatgtttcag

SEQ ID NO: 561968 - DNA, 100 bp, Homo sapiens
tcaagggtcttccgaagaaagcgagaaaggaacaggcgccttcaaaagcccacttggcgatgggttacagtaagaggatttttgaccctcgtgtggacat

SEQ ID NO: 561969 - DNA, 99 bp, Homo sapiens
ctggctaatcatttccaaagtgaaggaactccagttatgatcgttaacagcacacatgaattaggccctctggtagatttgaaaattcctgccaacaag

SEQ ID NO: 561970 - DNA, 100 bp, Homo sapiens
aactgaaagctcttggcatgaaatagcagctacatcaggtgctcatcctgagggaccctgatgctcccataagacagaaaatgccccttgatgatctgga

SEQ ID NO: 561971 - DNA, 102 bp, Homo sapiens
ccagagactgctgagcccgtccgtccgccgccaccacccactccggacacagaagtccattggaatattaagcccaggagttgctttggggatggctggaag

SEQ ID NO: 561972 - DNA, 95 bp, Homo sapiens
gaatgtgactgactagcagcttcattttgaatgaagaacttagacgctggttcattcaacaagaaatggatctccttcgatttagatttagtatt

SEQ ID NO: 561973 - DNA, 50 bp, Homo sapiens
ctctgccacaagaaccaccaaaggaaaatgtttataggaggccttagctg

SEQ ID NO: 561974 - DNA, 75 bp, Homo sapiens
atgtctatgagcagttcctgctgcagcttcagaaacattgcagcggcccgtgtggaacataaacagagaactagg

SEQ ID NO: 561975 - DNA, 83 bp, Homo sapiens
gtcaacattggacgattagaggctgttggtcagattggtccgtgtggaactcagaaacagaaggccaaccatgcataacgagg

SEQ ID NO: 561976 - DNA, 95 bp, Homo sapiens
ctcatgcagagaagaaccggctcatggagtcgagggttggatggcaagcatgtggtgtttggcaaagtgaaagaaggcatgaatattgtggaggc

SEQ ID NO: 561977 - DNA, 100 bp, Homo sapiens
atgaaggcccattggtatatattcaggaaattattcctggaggagactgttataaggtagctcgtaagctggtcatcctggagggtgagctggagagggc

SEQ ID NO: 561978 - DNA, 97 bp, Homo sapiens
cacatccccgaccacttgcggcctgagtatggaccttctggaccctgcacggtggcggatgctgatccagcagttccggtacgacaactaccgacta

SEQ ID NO: 561979 - DNA, 75 bp, Homo sapiens
tcgccatcttggatccgcgggacaagaaaattcatgcggcgggagacactatattcaatcgtgctaagctcctca

SEQ ID NO: 561980 - DNA, 88 bp, Homo sapiens
ggagattccctgggcctgcaggaagcccttccgcggaccgaaagggaagaatggacagaagctatccaggctgtagcagacagactgc

SEQ ID NO: 561981 - DNA, 59 bp, Homo sapiens
ccatgaagatgccacagggatcctaaaatctatcttttatgacctagtgcggcaaatta

SEQ ID NO: 561982 - DNA, 50 bp, Homo sapiens
ctgacgaagcttggaagttgcagaaggtggccaccgagtactaaattcac

SEQ ID NO: 561983 - DNA, 75 bp, Homo sapiens
ccggctctgagggcactggcctagttcccgacttgtttctcaggtgcggctgatgaagaggattgcagaaatgac

SEQ ID NO: 561984 - DNA, 80 bp, Homo sapiens
aaagagttttatggtgtgctttaagagccctgcagaaaaagtgctggagaatctggtaaaagcaccattgtgaagcagat

SEQ ID NO: 561985 - DNA, 82 bp, Homo sapiens
gagaggagcggggagcaatgcaggttcagccgtctgtatatctccccagatacctgaaactgaccacctgagtacgttttcc

SEQ ID NO: 561986 - DNA, 98 bp, Homo sapiens
cctcgggctgcgggagccgggctaggacgccgagcggtgactccccgccgctcccgggggccgtgacggctccaccgaggacaccgcgtccagcttgt

SEQ ID NO: 561987 - DNA, 100 bp, Homo sapiens
cacgaggttggcgacgccgccccgccgggccccagatcagatgccatggacaatattaccaggcagaaccaattctacgatacccaagtcatcaaacaag

SEQ ID NO: 561988 - DNA, 50 bp, Homo sapiens
tctcaacagacctatagtgaatgaggtaacccaggtttttctgcctttta

SEQ ID NO: 561989 - DNA, 100 bp, Homo sapiens
ggagacttgtggaactgctgatgtgatggatgtggacacactgtactaggccctgagagtggaacccttacatccataaactacccacagacctatccca

SEQ ID NO: 561990 - DNA, 75 bp, Homo sapiens
ctaggccgtccccgaccttgcctgaacaagaatggtgaggttctggagaattgatgaggattatccagtgcaagt

SEQ ID NO: 561991 - DNA, 100 bp, Homo sapiens
ctcggcgtgggtctgtgcaacaatggcttcatgcaccacgcaagaagatccatcgcagagtcctaaagaagaacccactgaaaaacttgagaatcatgtt

SEQ ID NO: 561992 - DNA, 100 bp, Homo sapiens
gagatctccgaccagtctgggggcgctggcggcctgcgcagccacctcaaggctgaagccgacgtagcttctctgaacagacgcatccagctggttgagg

SEQ ID NO: 561993 - DNA, 80 bp, Homo sapiens
tgaggagcaccaggagacgcaactcatcgggccttcctggatgctctgcagaaccaggctgaggccagcagcaagatcat

SEQ ID NO: 561994 - DNA, 75 bp, Homo sapiens
cagtcatcaccatgggccgggatcacattctgattgttgggtaaccggtaatggaaaaggactcatctacctcac

SEQ ID NO: 561995 - DNA, 90 bp, Homo sapiens
ccatcgtgcgggtcttgcaaaggaggaagttaacatccctaataggagggttctggttactggtgccactgggcttcttggcagagctgt

SEQ ID NO: 561996 - DNA, 81 bp, Homo sapiens
caacacggcttttatggacgagttcttttctgagtcagcctgggcttctgcccaccacagccctaccgggagccggaaccc

SEQ ID NO: 561997 - DNA, 98 bp, Homo sapiens
gctccagttttactacttgcaacttctgacaaaccccattccgctttgccagaagaggttctgcggcatgaggaatttgaagaaggctgcaaagctgc

SEQ ID NO: 561998 - DNA, 101 bp, Homo sapiens
cagatgaggtgatggcaacggccaacttcggcaagatccagatcgggatttacgtggagatcaagcgcagcgatggcatccttctttaaaagagaaatcca

SEQ ID NO: 561999 - DNA, 82 bp, Homo sapiens
agggcttcagcctgcacctatgggtactcagcagcctcagcctgaaggaaagacttcaggtgtgatgttagctgttgatgct

SEQ ID NO: 562000 - DNA, 83 bp, Homo sapiens
gctggctctgctgctgccgccggcgaaggaggaggcgttgccggattgtcactgctgttccaagggcacacgcagagggattt

SEQ ID NO: 562001 - DNA, 82 bp, Homo sapiens
aagggagacggcgagacgcgcagcgccggcgcccgggagacccaggaggagcccgcaggagaactacgatgacccgcacaaa

SEQ ID NO: 562002 - DNA, 100 bp, Homo sapiens
ttgaggcgcaatgatgagaggatgtggtggtctactctgatgtcaatcttgagggctagaatttggaggttttggttcagttagtggaaaaattgaaata

SEQ ID NO: 562003 - DNA, 100 bp, Homo sapiens
cgccgaagaagcatcgttaaagtctctcttcaccctgccgtcatgtctaagtcagagttaagctcaaatcttcgtcatgtgagagtatttgaaatggaca

SEQ ID NO: 562004 - DNA, 75 bp, Homo sapiens
tgcggagtcgtccggagccgctgcgcggagtttcaattactgaaaattacttggaaatagaaggaatggctaatt

SEQ ID NO: 562005 - DNA, 100 bp, Homo sapiens
aactgtgattcaccaactggacaaggctttggcaaagctggggattggccagctgactgctcaggaagtaaaatcggtctgccatcatggatgttctcgc

SEQ ID NO: 562006 - DNA, 100 bp, Homo sapiens
gcggctcagccccatcatgctgggtggagccccctgagctgcccgctgatctgcagcactggatctcctacaacgaggccagcagccagctgctccgcat

SEQ ID NO: 562007 - DNA, 97 bp, Homo sapiens
ctaatgaagatgctattaaggaggctgaaagtttagaagagaagaatatggctaaaattcatcgtggtcagctggagaagttgaaatcacagtgtga

SEQ ID NO: 562008 - DNA, 100 bp, Homo sapiens
ctggtcctcgacggggaggagatcccggtgcagaagaacatcctggcggcggccagcccgtacatcaggttggtcaaagaaaaagtgatgtatgaaaaag

SEQ ID NO: 562009 - DNA, 76 bp, Homo sapiens
cagagattgtggagcagatgggggaggtcatcaaggcttgggacattgccatagccaccatgaaggtgggggaggt

SEQ ID NO: 562010 - DNA, 87 bp, Homo sapiens
tctgctgccggaaggggtcccgaagccccctgcaggaactctacaacccaatccaggtgtgatgaatgcagactctgctaccatttt

SEQ ID NO: 562011 - DNA, 100 bp, Homo sapiens
ctcagcctggtgagggtgatgttcgggaggaggccttgtccacagggcctgtcctcccaaagccaactctaaggagaggagaggaagagcagttcttggg

SEQ ID NO: 562012 - DNA, 98 bp, Homo sapiens
atagacagcaaaagtggtattccaccttcctttataacactacagattaaagactttctgaatggaccagtatgtaaggcggccaaggctgacctggt

SEQ ID NO: 562013 - DNA, 95 bp, Homo sapiens
gcgagatccgggccgtgaacgaaagcagtgacggaggagcttgtaccaccgacaatggcgatgaccactcagaaggaggcctggtggagaaccac

SEQ ID NO: 562014 - DNA, 74 bp, Homo sapiens
gagacgctgggcctcattggctttgggcgtgatggtgggcatgggtcagaaggattcctatgtgggcgacgagg

SEQ ID NO: 562015 - DNA, 85 bp, Homo sapiens
gaatcagttgttggagaaaattaaagagccctaatttgtttagaactgtaatatgcacagttaaaacaacttgtcctctcaggac

SEQ ID NO: 562016 - DNA, 83 bp, Homo sapiens
cactgaaggaggctcagttcaaagacctgttcttaaaaaaagttgcagcaatgtgaattgggccagaagatcagagtgtaata

SEQ ID NO: 562017 - DNA, 75 bp, Homo sapiens
gaaaaataccacgacaaaaccaccctaatgagcgtgaagccgtgcagaagaagaccttcaccaagtgggtcaatt

SEQ ID NO: 562018 - DNA, 90 bp, Homo sapiens
ctcagccacgtgcaagccctgcagcacagcagcccctgtgaggcgctcacctgcaccatggaggagaacgggcctctccccctcaagtac

SEQ ID NO: 562019 - DNA, 82 bp, Homo sapiens
ctcagctggagaacgcggctaaagttctgatgatcctgtttgaccaaactcagagatcaattaaggcacagcttcagaactt

SEQ ID NO: 562020 - DNA, 50 bp, Homo sapiens
acctttgcagctgccctttgttaaagcgtcatcacgtagacataaccaag

SEQ ID NO: 562021 - DNA, 100 bp, Homo sapiens
ctacacctcagtcctaactgtagggaaggaagccttggccaaagaggtgctgaaaaaatatttggagtccaaggaggatgtggctgatgcacttctacag

SEQ ID NO: 562022 - DNA, 73 bp, Homo sapiens
ttgccagacattactacttcctaggcagaatgcttggaaaggaccagttacagaagtggatccgcggtaatgt

SEQ ID NO: 562023 - DNA, 100 bp, Homo sapiens
aagcggagctcccccaagagccggaaagtaagactttgaccccgacgcaggcttcagtgattgccgcggatcagaagcctgagcactttggctcgagaca

SEQ ID NO: 562024 - DNA, 92 bp, Homo sapiens
gttcggggaaatggctgcgagaccctagaggcctgcggcctgcgatgaggacggggacttggttgccttttccagtgacgaggaattgacaa

SEQ ID NO: 562025 - DNA, 100 bp, Homo sapiens
gaccaatggacaccttctaagagtttggcgagtcagtgactgaagcgcccgtccattccaaggctccaaccaggaatggagacgccattggatgttttgt

SEQ ID NO: 562026 - DNA, 100 bp, Homo sapiens
cgggagaagaggaggatgcggctcgtggtggatggcatggggcgctttggcagccccctacagaagctaagcagcatggacccggccatgctggagcgcc

SEQ ID NO: 562027 - DNA, 100 bp, Homo sapiens
ctattgtggaagaagcatccattaaggtcaccctcgtcgactgaaagtgaaacctgattctgaaattttagttatagaaaatggaacagctttcccattt

SEQ ID NO: 562028 - DNA, 82 bp, Homo sapiens
cggtgaccacttttggaccaaaggcctgtgtgctgcagaacccccagaccatcatagtctctggtaagaagagtgaaagcaa

SEQ ID NO: 562029 - DNA, 82 bp, Homo sapiens
gggtgccgagggcccggacgagggaaaaccagtagattcccagacatcgcgaagtgaatctgaaattgtgccaaaagttgct

SEQ ID NO: 562030 - DNA, 50 bp, Homo sapiens
cttcatcgcgataacgaagaaacctgaggcctcaggagtgcaagtagctg

SEQ ID NO: 562031 - DNA, 100 bp, Homo sapiens
cccggaagggcggacacctccacatcgccttttgccacctttccctttatttccggagttacagaatgtctgaaggggacagtgtgggagaatccgtcca

SEQ ID NO: 562032 - DNA, 74 bp, Homo sapiens
gcaagtacagcaaggccaagcgcctcatcaaggactaccagcagaagtcgttccaggggtagaggaggcatgaa

SEQ ID NO: 562033 - DNA, 74 bp, Homo sapiens
tagtctacaaaggaagacttgtaacctggagaagagcaacagccaactcagtttataaatccagaaacacctgg

SEQ ID NO: 562034 - DNA, 100 bp, Homo sapiens
cgactatgacaagaaggtgaagcaggcggccaaggagaagtcacctgcagaatccattaaggcctggaggcctaaggagttagtattgtatgaaatccct

SEQ ID NO: 562035 - DNA, 100 bp, Homo sapiens
gcagaggatgcagtggaggccatcaggggccttgataacacagagtttcaaggccatggaggaattgcaagaccaagagggctgggaatatgcttctcta

SEQ ID NO: 562036 - DNA, 87 bp, Homo sapiens
ggtctggagtgcgtgggggaccggctgttggcggctattactataacaagcgcattctgcacaagaccaaggggaaacggttcacct

SEQ ID NO: 562037 - DNA, 88 bp, Homo sapiens
gcggagccccgggccctttaaggaaagaccaagaatcgccttcagccctgtctggtgcatccttggcagaaagtgaggaggaaaacac

SEQ ID NO: 562038 - DNA, 100 bp, Homo sapiens
gagaccagagttagtggaatccacatatctcctctaccagtcaacgaaacggaatattccaatgctctttgtccggggagatggcgttgtcctggttgcc

SEQ ID NO: 562039 - DNA, 100 bp, Homo sapiens
ttgtcaacttcctcttcagtcatcagtgccaccagcccctcgggttccaagatgcagctactggagacagagttctcacacaccgtgggcgagctcatcg

SEQ ID NO: 562040 - DNA, 82 bp, Homo sapiens
ggaatgacagcggcgaggagaacgtcccgctggatctgacccgaggttctccttactatgacaatgtccgccccctctctta

SEQ ID NO: 562041 - DNA, 100 bp, Homo sapiens
ctttgagcctcatgacaaaagaggcatttccggagagttcttttgaagtcacttcagaaggatctacatgaggaaatgaactacatcactgcaataattg

SEQ ID NO: 562042 - DNA, 100 bp, Homo sapiens
gtttttttcttatgaagcttcttctggttggaaacttgtcaaatttcatcagagggtatattacctctctctggaattttacatgggccgaacattacag

SEQ ID NO: 562043 - DNA, 100 bp, Homo sapiens
cttcttctggataacactgtacaagctttcaaagtcaatagagctattgcttaccttttcccaagtggtttgtttgagaaacgagccaggccagtaatga

SEQ ID NO: 562044 - DNA, 100 bp, Homo sapiens
cctggatcatggctgccgcgccgccgctacgggaccgcctgagctttctacaccggagcgcatcagcgaggaggtggggctgctgcagctccttggggac

SEQ ID NO: 562045 - DNA, 51 bp, Homo sapiens
cccactagatttggaactacggtgccattgatttaaatctaccacccagct

SEQ ID NO: 562046 - DNA, 75 bp, Homo sapiens
aaatcaccacttgtggcagatgtgtgagcgcttggttgttgaatgttgggtcacgaagatctcaacctggccaaa

SEQ ID NO: 562047 - DNA, 90 bp, Homo sapiens
tttgttaggaccaaacctcaaagcatggctaagagtgttcagtagaaatggtgtgacaccatcgccacaacaggctcgggtctgtcctcc

SEQ ID NO: 562048 - DNA, 100 bp, Homo sapiens
ggtctgaccactctgttccccgggcagaagaggaggatctcccacctttccaagcaaggccaggaggtggaaaggctgcagaggatcctggaaggggaag

SEQ ID NO: 562049 - DNA, 50 bp, Homo sapiens
ctacaaggagatcgaggtggaagagattttctaccctagcaaggatggta

SEQ ID NO: 562050 - DNA, 100 bp, Homo sapiens
caggcaacgtgttggaccttccggagcttctcagaagacagagggttttcttttgagcccccaaatacatcaagatgtttgtactggatgaagctgacga

SEQ ID NO: 562051 - DNA, 90 bp, Homo sapiens
tgctcatccataaaactgaagatgtgaatactctgggatttactcttcaacccgactatcagactattatcaatcctacatctacagctg

SEQ ID NO: 562052 - DNA, 100 bp, Homo sapiens
cattagaaactatccagaagaagctggctgcaaaagggctaagggatccatggggccgctccataatgggagaagtaaagaacaaagacttaaggaacag

SEQ ID NO: 562053 - DNA, 74 bp, Homo sapiens
gaagaaatccgcagaagcttattaaagttaaggtctataagaaggagaaagctcgagtcatcactgaggaagag

SEQ ID NO: 562054 - DNA, 82 bp, Homo sapiens
ggagaaaacaaaggcggccggcctggtgcgcaaggccccgaacaacagagcatcctggccagaacaagccaaggagccaaga

SEQ ID NO: 562055 - DNA, 97 bp, Homo sapiens
tcttgctgctgctggccctggctgcgctgctggcctttgtgagcctcagcctgcagttctgaaagtggagaatgaggacatgaataaagaccagatc

SEQ ID NO: 562056 - DNA, 90 bp, Homo sapiens
cctgcaggaggacgcagacggatatttgataatgggctgcattaaaagtaaagaaaacaaaagtccagccattaaatacagacctgaaaa

SEQ ID NO: 562057 - DNA, 51 bp, Homo sapiens
tgcagaaacttcataaatatatgcagctcagaattctgcaaatgcagattt

SEQ ID NO: 562058 - DNA, 75 bp, Homo sapiens
cgaggagtagtcgctggagtccgcgcctccctggatgctgcagttggagaagaaacttgaacgtgaacttgagga

SEQ ID NO: 562059 - DNA, 151 bp, Homo sapiens
cttatctatctggtacctgagaagcaattattaaatgaaagaattaaaaacatgcagttcagtaacacacctggacttccaatagtagtcagacattatcatcctgtcatactatggagccatgtacatcagatgaatttttccaagccct

SEQ ID NO: 562060 - DNA, 96 bp, Homo sapiens
ctgagacagttcttacggaaacaccccaggacacaattttctgaaagtgtgaagcaaaggaatgatgtgttttaccttcaacctgagcgctcctgt

SEQ ID NO: 562061 - DNA, 100 bp, Homo sapiens
ctggcctggtttgatactgacctgtaaatcatcctttagataatgagtgtgtatatggcaactaccctgaaatacctttggaagaaatgccagatgcaga

SEQ ID NO: 562062 - DNA, 90 bp, Homo sapiens
tgctgtgtgcggtgctgctgagcttggcctcggcgtcctcggactacgtctactttgagaactcctccagcaacccatacctgatccgga

SEQ ID NO: 562063 - DNA, 96 bp, Homo sapiens
gccccacgaggtcggagactttgccatcttggtccagtctggctgcagcaaaaagcaggttttgggatttgagattgacgcggtgaactctgtcca

SEQ ID NO: 562064 - DNA, 75 bp, Homo sapiens
gccagtataatatggctggggtcaggacagaagattcaataagagattatgaagtctataggatcgggtgaacca

SEQ ID NO: 562065 - DNA, 82 bp, Homo sapiens
gcgcctgtctcttccgggctgtaggggtcgggccccggctcagtggtcccaggcagctcgggtgtcggaacccccagacagt

SEQ ID NO: 562066 - DNA, 80 bp, Homo sapiens
atatttgcagccagtactctatatgaacaatccgtctggatcacggatgtaggaagtgggcaattgaaggaacagactaa

SEQ ID NO: 562067 - DNA, 49 bp, Homo sapiens
aagtcatttcccaggctggcggagaaggtcctcaaagagggcagcgggc

SEQ ID NO: 562068 - DNA, 112 bp, Homo sapiens
tggctgtgtgtgctgcaaaccgagacaagttcaccccgaagtctgccggacgctgctgcatgctgtgctccagcaaacagaaaccttggattccctgcagggtcatttccga

SEQ ID NO: 562069 - DNA, 82 bp, Homo sapiens
aaacaggaagagggttggaggcaaagttccgaatagggatgaggcatacgtgatatctcttccaaatgcatgatgaaggagt

SEQ ID NO: 562070 - DNA, 98 bp, Homo sapiens
ccattgatcttaggaggaggtgatgtacttatggatgtttcgtctgaactcactttctgctttggcagaactggctgtgggttctcgatggtaccatg

SEQ ID NO: 562071 - DNA, 75 bp, Homo sapiens
aggcactttattatgcaggtggtctgtgaagccacacagtgtccagatacgaggaaactaatctggattcactcc

SEQ ID NO: 562072 - DNA, 83 bp, Homo sapiens
aaaaagacgaaagaagaagaagagcaaagggccttctgcaggaatcttgtcgattggcctggctgctgcctactacagcggag

SEQ ID NO: 562073 - DNA, 75 bp, Homo sapiens
ggttcttggtctcactgacttcaagaatgaagccgcggaccctcgcgagatgtggtcttgctatgttgcccaagc

SEQ ID NO: 562074 - DNA, 100 bp, Homo sapiens
gaacctggaaaggggactctgttggccattggaaattgcagaataatgtctcagttggctggatctattattggcaaaggtggtcagcggattaaacaaa

SEQ ID NO: 562075 - DNA, 96 bp, Homo sapiens
ccctatccagacggctgcccttcaagtaccagcactggtgaggtggattgatgatgaatcttctggcacacctggagcaactccagaacacagtcg

SEQ ID NO: 562076 - DNA, 74 bp, Homo sapiens
ataccttgggagcgctacatgatctagccaacagggcgaaatgaccctgaatgtgacctgtgtggtggagaccc

SEQ ID NO: 562077 - DNA, 74 bp, Homo sapiens
actaacttgtttccctgggaatttggaggcaatctataagatggtttcctctgtaatgaaaatgcctgaagatg

SEQ ID NO: 562078 - DNA, 116 bp, Homo sapiens
cccagaccctggagcctcagttggaagcagccgatccagcctgcggagcctgtggggcagatgccggaaggtccttctgaatcccttccctgttccttaggttgcactagtcgggg

SEQ ID NO: 562079 - DNA, 100 bp, Homo sapiens
ggccgagaccattccgtatggagagccgggtgtcatggagaaactccagctgggcccagagattctgcagcgggaaaatccaaggcttatttatgccagg

SEQ ID NO: 562080 - DNA, 90 bp, Homo sapiens
gaggccagatccagctttgatgagatgcttccagttgcagaggaaagtggtcgcttatggtcagaggagcagcctgctcaccctctccag

SEQ ID NO: 562081 - DNA, 85 bp, Homo sapiens
gctgctgctcgttcgagtcgcaggtttggccgtaagctgtgtctcctgggaactgtgctggtcaacgcggtgtcgggcgtgctca

SEQ ID NO: 562082 - DNA, 89 bp, Homo sapiens
tagtctctgaccatgtggaattcccagtacgacaggcagtgccggtggtggtgtgcacattgagccccggtatagacagttcccccagc

SEQ ID NO: 562083 - DNA, 100 bp, Homo sapiens
ggcttccgacatgcccgcaacgtggacagggtcctctgcagcttcaagatcaatgactcggtcacactcagttctccagagagcgggcatccagagagga

SEQ ID NO: 562084 - DNA, 83 bp, Homo sapiens
cctaaatctgtccaaagcagaggcagtggagcttgaggttgatgataattagaagcatgctttccactgaacttcccgacaac

SEQ ID NO: 562085 - DNA, 75 bp, Homo sapiens
aggacacttgtggagagctcgaattccagaatgatgaaattgtgtttgtggtaaatatgccagctctagaacaca

SEQ ID NO: 562086 - DNA, 75 bp, Homo sapiens
cggcggcgggacaggcttgctgcttcctcctcctcggcctcaccctgctgcagaagaatattttgcctgctggaa

SEQ ID NO: 562087 - DNA, 97 bp, Homo sapiens
cggagcccggaatcccgctcggagccagccagccgtcccgagctaccagcaggacagttaatgattggacgtcatccaatgagaaagcagtgatgtc

SEQ ID NO: 562088 - DNA, 50 bp, Homo sapiens
gccagtgctaccctgagaaaggtggacgtaacactcgtgaaactgctcag

SEQ ID NO: 562089 - DNA, 75 bp, Homo sapiens
taacggccgatgcagctcttccaaagctaaggctgctttgaatgctgcatcaagtgtctgggaggagtcccctac

SEQ ID NO: 562090 - DNA, 90 bp, Homo sapiens
ctgattcagatgacaactgtacagatgtcactggtgctggagaatctggtaaaagcaccattgtgaagcagatgaggatcctgcatgtta

SEQ ID NO: 562091 - DNA, 74 bp, Homo sapiens
atcttcttttatgaatggagcgtcaaactaaactggacaggagagaagcctcatcagtgccaagtctgtgggaa

SEQ ID NO: 562092 - DNA, 100 bp, Homo sapiens
actcttggactacatctttctcgggctcaggtaaccacctgctgttccaacaagtgcccatggttgaaattgacgggatgaagttggtacagacccgaag

SEQ ID NO: 562093 - DNA, 88 bp, Homo sapiens
gccaaattccgaagcaatcttcctgctaaggccattggacacagaatccgagtgttctgggaggtgatcagtgatgaacatggcatcg

SEQ ID NO: 562094 - DNA, 83 bp, Homo sapiens
acaaaatcctgggtgtacactgtctccatcacattgtgcttaatgtgctattggaatcagatgcaaagatggtgttgtctttg

SEQ ID NO: 562095 - DNA, 101 bp, Homo sapiens
tggtgcgaggagaactactccgtgacctggtacatcgccgagttctgagaccaagacacattccaccccagtggggggtcccataccactcatggatctga

SEQ ID NO: 562096 - DNA, 82 bp, Homo sapiens
gcagccttgggcctcgcgccggctatggccgtgccctggggctgagccctcagcacatgattaagtaccggtacatcccgtt

SEQ ID NO: 562097 - DNA, 88 bp, Homo sapiens
ggctgaatgaaaaattcaagctgggcctggactttcccaatggcgaggaggcttccgaggaggcagaggaggaggaggtgaccacaag

SEQ ID NO: 562098 - DNA, 100 bp, Homo sapiens
gagagagcgagctgagtggttgtgtggtcgcgtctcggaaaccggtagcgcttgcagcatgctcagcagtacaacgtaccccgtggttgtgaagatgggg

SEQ ID NO: 562099 - DNA, 99 bp, Homo sapiens
ggcagctgtactaggactgggaacggacaatgcagatcttcgtgaagactctgactggtaagaccatcaccctcgaggttgagcccagtgacaccatcg

SEQ ID NO: 562100 - DNA, 137 bp, Homo sapiens
tggatttccaccaacattcaaggaaacaaatcaactaaaaacaaaattgccagaaaatctttcctctaaagtcaaactgaacaaaatccagtctcatagcagaggagaatataatgtttacagcaccttccagagcc

SEQ ID NO: 562101 - DNA, 82 bp, Homo sapiens
tttaaagctgagctgcgaggaaaatggcggcgggagaataccgtagcagtaggcaggacagttccaattcaacaaaaacctc

SEQ ID NO: 562102 - DNA, 50 bp, Homo sapiens
atgggctcactgttgtccaggcagctcattactatactggcaattgctgg

SEQ ID NO: 562103 - DNA, 82 bp, Homo sapiens
cagactcctatttgaagtatttgacgaaaatagactgcagttggaattgatcacaccttttcagttgtacttcaatcctgaa

SEQ ID NO: 562104 - DNA, 102 bp, Homo sapiens
gtgcagacctgcacaaacccactggacaccttcgtcccctttgatccctgtgtgctgaagagaatgttggctaccagggtatttagcctagttggcaagcga

SEQ ID NO: 562105 - DNA, 75 bp, Homo sapiens
gaaagactgttccaaaaacagtggataattttgtggccttagctacaggagaggagattgaccccagcctgggcg

SEQ ID NO: 562106 - DNA, 143 bp, Homo sapiens
gctgctcaaagccatctggcacgccttcaccgcactcgaccaggaccacagcggcaaggtctccaagtcccagctcaagataacccaacagcttgagggaatctgcttacaggtcattggtactgttttacaacagcatgtct

SEQ ID NO: 562107 - DNA, 75 bp, Homo sapiens
cctgctcagggtcttcatccagaaacgagctcctgcccctcctaaagctgaagccaaagcgaaggctttaaaggc

SEQ ID NO: 562108 - DNA, 74 bp, Homo sapiens
actcctctctgcaagtgaataggcccagaaagaccaaactagagtcagaacgaatactagcatcagtggggaag

SEQ ID NO: 562109 - DNA, 80 bp, Homo sapiens
acaggcccagaaggccaagaacccccaggagcagaagtccttcttcgccaaataccgcgagcccagcattgacctgctgc

SEQ ID NO: 562110 - DNA, 100 bp, Homo sapiens
agcctttccaaccaaaactcttcaggagcatccatcccttgcctactgttgctctatatgcaatcagtgctgtctactttgctggagtgatggtgcgact

SEQ ID NO: 562111 - DNA, 82 bp, Homo sapiens
tgtgttttgggccacagcacagcagataccacctcctcaagctcctccagaagtttggcaaggtaaagcagtttgacttcct

SEQ ID NO: 562112 - DNA, 100 bp, Homo sapiens
ctctcattggcttctttgagactgaaatggcagacgcgcgcacgcccacgctggatcctgacacgatgcacgcgcgcctgcgcctgtccgccgatcgcct

SEQ ID NO: 562113 - DNA, 100 bp, Homo sapiens
tgctgactgctctggcttcctccaccaaaggacaaactaagagaaacttggcgaaaggcaaagggacaatgactcattcttcccaggacactggttcttg

SEQ ID NO: 562114 - DNA, 100 bp, Homo sapiens
aaattttggtctgatgatagcagatcctatctgttcaattcttatagccattcttatagttgtaaggttgttttggaaaccgaaataacaaataagtccg

SEQ ID NO: 562115 - DNA, 75 bp, Homo sapiens
gacaggcggcgccatcttcgaacttagacttccggaaggactttggcgagggatggtgccatgacaatggtgtga

SEQ ID NO: 562116 - DNA, 96 bp, Homo sapiens
gcggtgctgcgagggcagaacctgggtaatcctcctcttcccaatccttttggtgatcctaatttatcacaacctataatgccaattcagcagaat

SEQ ID NO: 562117 - DNA, 50 bp, Homo sapiens
ctttagcctcaggaggcagctatccaaggctgaccaactgactgaagagc

SEQ ID NO: 562118 - DNA, 100 bp, Homo sapiens
gtgatcacacgtcggctgctgggaagatctggattctcgtttcagagcatttttctcagcatttgagaagttggcagccatccagagatgatgacattct

SEQ ID NO: 562119 - DNA, 75 bp, Homo sapiens
tcacctttattctctcagcacactgcaggtatcatgatattagctggtttgacatcaagtcatttgtgagtcatc

SEQ ID NO: 562120 - DNA, 75 bp, Homo sapiens
ggggaagaggcccaccctggagtaaccctcactggagaatccagaggttggtcaaagaaaaagtgatgtatgaaa

SEQ ID NO: 562121 - DNA, 100 bp, Homo sapiens
attctctctgtgtgtggctgggcgtgtagggcccctgggtagacagacacagcttgatttcagagcagacataggcgaagaaaacatggcattgagtgtg

SEQ ID NO: 562122 - DNA, 82 bp, Homo sapiens
caccatcgactacgtggaggacggcaattcgaagttttcaagtagcccttcacatctatccaatgaaccctgaaatatggaa

SEQ ID NO: 562123 - DNA, 75 bp, Homo sapiens
tccgcggcttctcggagcttactggcattgctcgggtaccacttgctggagctgctggaggccctggggttggta

SEQ ID NO: 562124 - DNA, 100 bp, Homo sapiens
cccatgcactgcctggacgaggaaggcgatgactcagatgggtgagtgagatcattggccgagacctgagtggcttccctgcacctcctggagaagagcc

SEQ ID NO: 562125 - DNA, 100 bp, Homo sapiens
ccgagggagggagagagacagcgatcgagagagaccggagaggtggagagtgggtaattccagaattgattggccataccattgtcactgtattactgct

SEQ ID NO: 562126 - DNA, 100 bp, Homo sapiens
ggccgagttaccaagatgaacacgagttcaacgcccacctggtttgtcgcatgtgctgtatggatgatgattattctccaccgtctaagagaccaaaggc

SEQ ID NO: 562127 - DNA, 100 bp, Homo sapiens
ttcagagagcaactatcctccccaggattattacagtggtggctactatcctgcacaggacccggccctggtccccccccaggaaattgccccagatgcc

SEQ ID NO: 562128 - DNA, 90 bp, Homo sapiens
gccggcgggaggaacgctcactgtcagcgcctggaaacttgctcacggaaatcctcattgacgattcaatttgttgaaggccaatttgtg

SEQ ID NO: 562129 - DNA, 135 bp, Homo sapiens
ccatgggtcctcgacctgcagggagcagaggggacagaggcaccaaggacctccaagacagcatggcctgtatgagaagaaaaagacctcaagaaagcaacgaaaggaacgcaagaacagaatgaagaaagtcag

SEQ ID NO: 562130 - DNA, 100 bp, Homo sapiens
gtcaacgaaacctggcacggctcttgcttccgggctccgtaggcaccaactgcaaggacccctccccctgcgggcgctcccatggcacagttcgcgttcg

SEQ ID NO: 562131 - DNA, 90 bp, Homo sapiens
ttgctcacacaaagcctgtttggtggtctcttcccacggacgcgcgagacaatgaggagggctccttcacctaccaaacgcaaagaccgc

SEQ ID NO: 562132 - DNA, 50 bp, Homo sapiens
gtaggatactgaaactgacattatttgtagccggatcgagctgggagatg

SEQ ID NO: 562133 - DNA, 82 bp, Homo sapiens
tttctggtgtcctgaacctggaagttgtgctttttaaggagcttactccacgggaacagcctctagataatctgagttgttg

SEQ ID NO: 562134 - DNA, 83 bp, Homo sapiens
ggcagtaccgcctccttcccagccgcgcggcttcctccagacctctcggcgcggtgtaaacaggaacatcgataagtagtgta

SEQ ID NO: 562135 - DNA, 50 bp, Homo sapiens
gggagtactcattcctgtaatagctgtgtataagaagcatcgctcttctc

SEQ ID NO: 562136 - DNA, 83 bp, Homo sapiens
taaattcccggaaccgcgattcggcgtgtcagatgcctgtgaggagccaccaacatttgaagctatggagctcattggtaaac

SEQ ID NO: 562137 - DNA, 100 bp, Homo sapiens
gagcggagggagccccagacacggactgcgagaactacatcactctcctggagaggcggagtgaggggctgctggcctgtggcaccaacgcccggcaccc

SEQ ID NO: 562138 - DNA, 98 bp, Homo sapiens
ggaccccaagaagaccattcagatgggatctttccggatcaatccagatggcagccagtcagtggtggaggaggaaaattcttccagcgatggtctcc

SEQ ID NO: 562139 - DNA, 51 bp, Homo sapiens
tggatgaccctgagccccgagaacatttttagagaacaacttgtaatggag

SEQ ID NO: 562140 - DNA, 83 bp, Homo sapiens
agttacaggaacatcgtctgcttcatgaggaatgtttgctgggggattgaaggagatggaacaggaagaggtcctgatccacg

SEQ ID NO: 562141 - DNA, 75 bp, Homo sapiens
ctgagcacagcatcatcaaggacttcaccaagcaggttcgatacaagaggctgttttcctagcgtggcttgctgc

SEQ ID NO: 562142 - DNA, 100 bp, Homo sapiens
gagagcggggtcttgtgcgcctgggccagagagaagaagaaggaggttcctgctgtgccagaaacccttaagaaaaagcgaaggaatttcgcagagctga

SEQ ID NO: 562143 - DNA, 101 bp, Homo sapiens
ctggaaggggtcatcgacttctcggcggcccacgcagcccgtggcaagggtcctggtgcccaaaaggtgagccccaggtgtatcccagagggatccgggtg

SEQ ID NO: 562144 - DNA, 100 bp, Homo sapiens
atgtgatgccattccagcactggactcatggaggctgagcatttattcagtgtggaaattggtgaaagtgtacgtggagaggatgtctacattgttcaga

SEQ ID NO: 562145 - DNA, 96 bp, Homo sapiens
cagttttcttcagaagaaggacttcggaatgcactacaacaggaaaatcatattatagatggagtaaagaagctgcacacatacatgtaagagaag

SEQ ID NO: 562146 - DNA, 100 bp, Homo sapiens
ttgaaaaacagtattccaaagaactcggagatgcctggaatacagtaagttggattggatgctgctggcaagacaaccattctgtataaactgaagttag

SEQ ID NO: 562147 - DNA, 90 bp, Homo sapiens
cgatgactcggaaagcgctcagaagaacgcttcgcccgttggtgctatgtcttccgaccccgaactccaccggaggcaattgcactgtgt

SEQ ID NO: 562148 - DNA, 90 bp, Homo sapiens
aaggacgacaagcccatccgagggtttgtggatgcacttagatgtttgcaatgagcactgtggctggcatgccccagtgttttggatacc

SEQ ID NO: 562149 - DNA, 73 bp, Homo sapiens
tggccaggccttgatgatcctcagcagaagccttgtactacacagatgacacagccatggccagggccctggt

SEQ ID NO: 562150 - DNA, 96 bp, Homo sapiens
ttggcctctcctgggatcggcccaaggccagttctccgcaggaaaatgttgaaggaggagactgtagtcgttgcaaatccggcttcttcaatttgc

SEQ ID NO: 562151 - DNA, 76 bp, Homo sapiens
cagcttaaccctggaatgtatcagcaccggacagtcatcgctgaccaatggcacaggaccgccactacccaggaga

SEQ ID NO: 562152 - DNA, 82 bp, Homo sapiens
gcaaattcactccccagtacaaaggccctgggaggagcggggacactgaggacctctctccaaattggcctctcaactcaca

SEQ ID NO: 562153 - DNA, 80 bp, Homo sapiens
atcaacctgcgtgaggtcaacctgcgcccccagatgtcccaggagaattcgcacaaccacggggacggtgcagaggactt

SEQ ID NO: 562154 - DNA, 99 bp, Homo sapiens
cgacatgtacagccccaatgtcaagcccgagcggaaaatgaagctagaggacttcatcaagaacctccgaggtcgcacggggcaggcggttgcagttcg

SEQ ID NO: 562155 - DNA, 100 bp, Homo sapiens
agcatctaaagtcaaatctctcaagcccattgactatggtttggacagaggagccaaaggccaaatttccactttcagcagttttatttcagctgttagc

SEQ ID NO: 562156 - DNA, 101 bp, Homo sapiens
acttaatagtgagtcttccaaccagagcttgtgtagcgtcagatccttgagtgataaaggagtagaggaggaaaattcttccagcgatggtctcccactca

SEQ ID NO: 562157 - DNA, 100 bp, Homo sapiens
tttggaggcattgaagctgctgctgagcccgggagaggatgccagcccccatcagattgcgggagctgatccggaccatccggacagcccgaacccaagc

SEQ ID NO: 562158 - DNA, 130 bp, Homo sapiens
gcctatcacctctccaaaatggggtggaaggatattgtccttttggagcagggcagcccagcctgactcctggagattgtgaatagctccatccagcctgagaaacaagccgggtggctgagccaggctg

SEQ ID NO: 562159 - DNA, 98 bp, Homo sapiens
ccaggctcaagcaatcctaccatgtcagccttcccagtagctggaactacaggccctgtgcaccaaggtgccggaactgatcagaaccatcatgggct

SEQ ID NO: 562160 - DNA, 74 bp, Homo sapiens
aaagtttgtgatcgttggcggacattttggggtattccctcagcggatactacacccatccatttcaaggctat

SEQ ID NO: 562161 - DNA, 100 bp, Homo sapiens
ctgtggtgcagtttaagattaagaggcatacaccacttagtaaactaatgaaagcctattgtgaacgacagaggttggaaagaaccatgactgtattcag

SEQ ID NO: 562162 - DNA, 88 bp, Homo sapiens
ccaggctcaagcagtcctaccatgtcagccttcccagtagctgggaccacagcggagatccttccggactcgcaaaacatgcaagcga

SEQ ID NO: 562163 - DNA, 100 bp, Homo sapiens
tcgaagtgcgcaaacttgacactcaccctgaccgggtcaccagatcctcctcctcctgcaggctcaccatggcttcaaaagaattcagtgttctgcaaga

SEQ ID NO: 562164 - DNA, 82 bp, Homo sapiens
tttctctgctgcaccgacctcgacgtcttgcctgtgtcccacttgttcgcggcctataggaggctactcacagtcgaactac

SEQ ID NO: 562165 - DNA, 107 bp, Homo sapiens
tcttccatcctcccccttactcacacatcagtctatcagtgttcggctccagcctgtgaagaagttaactgagaatgcagaatctattgatcttaaacagtttttcg

SEQ ID NO: 562166 - DNA, 50 bp, Homo sapiens
cggggtgacacggatgtcagggtagagcctcccaaagtgctaggattaca

SEQ ID NO: 562167 - DNA, 98 bp, Homo sapiens
cggctgtggtttggctgcgggcggcttgggcagcccgcgggcgcctcagccctctgcccgaggagatgctcagctacgcccgggatgacacccattac

SEQ ID NO: 562168 - DNA, 74 bp, Homo sapiens
attttggaaagcagtttttaagacaagcagatgtaattgttaattctgtaaacccacatgatattacagttgga

SEQ ID NO: 562169 - DNA, 90 bp, Homo sapiens
ggaacaggactgactccagtgatgacgcaggccttaaggagaaagtttcagttaattggccttggtcctcacagctccaaaaagaaacag

SEQ ID NO: 562170 - DNA, 50 bp, Homo sapiens
agcaggcgctcaccatgttccctggagaaacacaccgaggagatcaccag

SEQ ID NO: 562171 - DNA, 96 bp, Homo sapiens
tgaaatttatgtccaggattcaaaaagtttaggactgctaagatcatatactcctatgaaaggaggaatctccaatgtatggtttgacagatttaa

SEQ ID NO: 562172 - DNA, 83 bp, Homo sapiens
gtctggactggctccccgtgtggatcaggagaagtgggcccagcgttcattcaggtggataagattgtggaccagctgcagca

SEQ ID NO: 562173 - DNA, 100 bp, Homo sapiens
ccggcaccccgcacccgggcacacaaaaaacgggtcgcccgcgattctcagggattgatcgcctcttcaggagcatattaatgaaaagtgccataaactg

SEQ ID NO: 562174 - DNA, 75 bp, Homo sapiens
agccaggggcggacgaaaccatcggtagactccacaagcttcgcagaatcaagaacggctatgtgcgtttaaaga

SEQ ID NO: 562175 - DNA, 83 bp, Homo sapiens
cgaccccgtcccgaccctggccgccccgagcggagcctggagatgaggacggggacttggttgccttttccagtgacgaggaa

SEQ ID NO: 562176 - DNA, 82 bp, Homo sapiens
ctgatcggcagcggcatgccagggaagcccaagcacctgggcgtccccaacgggcgcatggaagcgccgcggagccatcaac

SEQ ID NO: 562177 - DNA, 75 bp, Homo sapiens
cctggaggtggatctgaagaacggtgctttccaagtgccattgccagtcatgtggcagcagagtgtcccagcaag

SEQ ID NO: 562178 - DNA, 90 bp, Homo sapiens
ctatgaccccgagggcatcctgggcaccatcaactccatcgtgatggcctttttaggagttcagggaaatgcaataccttatttccagat

SEQ ID NO: 562179 - DNA, 100 bp, Homo sapiens
gccctcaccacccctatccagacggctgcccttcaagtaccagatctcaaagatttcatgagacaagctggggaagtaacgtttgcggatgcacaccgac

SEQ ID NO: 562180 - DNA, 83 bp, Homo sapiens
aatcgggctgaagcgactgagtccgcgatggaggtttttcgttggaatatacgttgcacatttatggcgattctgagtgtgag

SEQ ID NO: 562181 - DNA, 100 bp, Homo sapiens
aaatgtcttgagaagatatatcaaaagcataacccctactgtagaactaaatgcactgtgcatgaaacttggaaaaaaaccaatgtataagcctgttgac

SEQ ID NO: 562182 - DNA, 100 bp, Homo sapiens
caaataccagctcgacaaagatggggttgtcctctttaagaagctccccaggtgtgtcctggtagacaactgctcccaggagctggcatagaagcaaacc

SEQ ID NO: 562183 - DNA, 101 bp, Homo sapiens
agactttattaaaagtgaatgtttaaataatattggtgactcctctcctctgattagagccactgttggtataaatgaccaaggattgtacagagttgtgg

SEQ ID NO: 562184 - DNA, 83 bp, Homo sapiens
ggagcagaagtccttcttcgccaaatacgcagccagataagctggtggtggtatggacccgtcggaaccgacgcatctgctcc

SEQ ID NO: 562185 - DNA, 51 bp, Homo sapiens
gtccgtggtccagtgtgagatcgacgaggacagtcattttgtttactcatt

SEQ ID NO: 562186 - DNA, 99 bp, Homo sapiens
atacaagaacgctgcagagaatatcacattccatgtccatatcaggagagcaagccctggaggttcactctttcaagaagtcgtgtgctgaggtgtaat

SEQ ID NO: 562187 - DNA, 98 bp, Homo sapiens
cggcggccatggcccggctggctgactacttcatcgtggtaggctatgaccacgagaagccagggtatttgaagtataccatacaactgttttgaaaa

SEQ ID NO: 562188 - DNA, 96 bp, Homo sapiens
atgatcatgatacagttgataaaattgttggaactccatctcaggaaacttggccaggtatttcttcaaatgaggagttcaagaactacaactttc

SEQ ID NO: 562189 - DNA, 90 bp, Homo sapiens
ggctgcccgtggcgcccgcaggcggcaggaatcctcctccggcgatagctttggggccatttggatcacacgatgttttttcaagatttt

SEQ ID NO: 562190 - DNA, 75 bp, Homo sapiens
aagggttgtacaggctctttgaatatgactctgcaaagtcacatcgatcagacaacaacatggcaggaccccagg

SEQ ID NO: 562191 - DNA, 83 bp, Homo sapiens
gtgttctccacgctggttcgcaggacattcactgaacaatgccagggatacaagtgccatggatactctaccgctaaatggta

SEQ ID NO: 562192 - DNA, 98 bp, Homo sapiens
ctggggatggtggtctttgcctttgccactatcacgcctctcatgttcacaggatggccccagaagtaattttagccatggatgaaggacaatatgat

SEQ ID NO: 562193 - DNA, 97 bp, Homo sapiens
cttcaaccccgagccgctggtgctacagagacctcctgagaataggcatcaccttggcaggccatcagaagaagatcctgaacagcattcattctat

SEQ ID NO: 562194 - DNA, 100 bp, Homo sapiens
tagacccagaaccctcatcataatggtctcctctgtggtctgcttcctactgtctcctgcagcttccttcatcactggacagtcggtggatgtggatggg

SEQ ID NO: 562195 - DNA, 100 bp, Homo sapiens
ctgatacatttggtcctggagatgatgatgaaattcagtttgatgacattggagatgatgatgaagatattgatgactggtgaactatgacaatgtagtg

SEQ ID NO: 562196 - DNA, 96 bp, Homo sapiens
atagacatttacgcggatgtcggcgaagagttcaaccaggattttttatcaagcagaaatgcatcgaacaacgagaatcaagatcactgagctaaa

SEQ ID NO: 562197 - DNA, 92 bp, Homo sapiens
taagggctacgggaagatcctggaggtggatctgaagaacggtcatccgtccttggctcaggatttggagagcttgcaccaccaaaaatggc

SEQ ID NO: 562198 - DNA, 75 bp, Homo sapiens
ttcattgctgcaaggaacttccatgcctctaacactcatcttcaaaagactgcccttagagatttgtttgattcc

SEQ ID NO: 562199 - DNA, 75 bp, Homo sapiens
gagaaaggacagaaaggagaaccagcagtggttgagcctcaccaagcaatatcatttatgctggctgaaatggca

SEQ ID NO: 562200 - DNA, 74 bp, Homo sapiens
tggagatgctgctgaatgagaaagggacctgatcccaaccttgaagaaagtcctaaaagaaaaaatattacata

SEQ ID NO: 562201 - DNA, 100 bp, Homo sapiens
gtccgagcccggagcctccgcctggcatcagctccacgtagcccagcgccggcacgcgcgaggccccttcggaaccaaaaagaagcttcccagagccggg

SEQ ID NO: 562202 - DNA, 100 bp, Homo sapiens
gggagctctgcacgcgcaattccgcagtctctcccagattgtgcaagaaccatgggaggggcgtcagcttgagatcttcttagcccagagagcagtggag

SEQ ID NO: 562203 - DNA, 82 bp, Homo sapiens
tcctcttccaatggaagtgtttaagatgatgtgatgccagccacttactgtgaaattgatttagataaagaaaagagagatg

SEQ ID NO: 562204 - DNA, 100 bp, Homo sapiens
actattttctctagttccttccttaacggtcaatacaactgaatatgaggttgaagctccattcataccaaagtttagaggctctggagataccagcaac

SEQ ID NO: 562205 - DNA, 51 bp, Homo sapiens
ccctacacggtctcctgggtcaagtggttcaactcataatgacaagagaca

SEQ ID NO: 562206 - DNA, 93 bp, Homo sapiens
tgatttaataagcctgtcactcaacaggtacgacaaggttctcccatgggcaggtggtctctctggatgagctgcgccccttccaggacccag

SEQ ID NO: 562207 - DNA, 97 bp, Homo sapiens
cgctggccgactgcgccgagctgcacgtcctcgaacgcgaggccaacagccccgggtgacagaacctttctggaaggttcccacactcgtgggttag

SEQ ID NO: 562208 - DNA, 100 bp, Homo sapiens
aggactcgggccggagcgtggccggacccccacccgccgaggggcccagggaggacgcgaaatacccgcagcccaaagggcagaagaagaagaagatcgt

SEQ ID NO: 562209 - DNA, 75 bp, Homo sapiens
tggaaaaccagttattgaatatcaagaggaggagttgttggctgctcagagtgtcaacaaggcattggagcagtt

SEQ ID NO: 562210 - DNA, 100 bp, Homo sapiens
gtgcggaagggcacctccacccggagctatgaagacatgattggtgaggaggtgccatcggatcaatactactgggctcctttggcccagcatgagcgag

SEQ ID NO: 562211 - DNA, 100 bp, Homo sapiens
agccggcactccaactggaccgtcaccaacacccgcttctctgtggatgaagacttaattcagtgcacaaatgagatgaatgtgaacatcccacagttgg

SEQ ID NO: 562212 - DNA, 101 bp, Homo sapiens
tcattggagacactctgactgatgatgaaattaacatcgatatgaccacattctgaagtgggaactcttccagctggctgacctggatacataccagggaa

SEQ ID NO: 562213 - DNA, 89 bp, Homo sapiens
tgaagacacacctgcccctggctctgctcccccagactctgttggatcagaaggtcaaggttaagaatagacccaccagcatttcgtgg

SEQ ID NO: 562214 - DNA, 100 bp, Homo sapiens
caggatgaaagtgagcagtccagaaagcggcttatcgaacagagccgggagttcaagaagaacactccagaggaggatttgttggtattgaggaaaacgg

SEQ ID NO: 562215 - DNA, 100 bp, Homo sapiens
gctcagcgtgccgaagcgagccaatgatgccatgcacctcagcatgctggaagctaatgctgcctaccttgggggccaagaaatgatggaggtggtgaag

SEQ ID NO: 562216 - DNA, 83 bp, Homo sapiens
atcagcccccagcggcccaggcccacccccgtcctgcggccccgaggacgacgcccagctccagctggcccttagtttgagcc

SEQ ID NO: 562217 - DNA, 75 bp, Homo sapiens
actgaaccttgattgaagacctacagtgtggcagtccatggcctggggactgacccctcctcctgtagagagtgg

SEQ ID NO: 562218 - DNA, 90 bp, Homo sapiens
gaacaatgttttccatgaccctgttgatggtattgatgaagatgaccctactgctgatgataccagtgctgctgtaactgaagaaatgcc

SEQ ID NO: 562219 - DNA, 100 bp, Homo sapiens
taatgaggatgaagattcaccaaataagctatatactttggttacctatgtacctgttaccactttcaaaaagggtgatgagactggtgtgatggataat

SEQ ID NO: 562220 - DNA, 100 bp, Homo sapiens
tcggagccctggaagcagcagctcaccgaggacggggactcttccggcatgttcagaacaacctgatgagaaattctacaacagaaaaaatcgaaccaag

SEQ ID NO: 562221 - DNA, 100 bp, Homo sapiens
ctggttgccggggcaggggcggaggcggaggcagaggtggaggcgctttgaaagatctacgaactgcgtgtgatggagaccaaacccgacaaggcagtgt

SEQ ID NO: 562222 - DNA, 90 bp, Homo sapiens
gggcgggcggtgagcgcccatatgggggttctggagagcggggtgtgggatgccatggacaatattaccaggcagaaccaattctacgat

SEQ ID NO: 562223 - DNA, 80 bp, Homo sapiens
cttcaaccttcgtattctgtggtgactcatctcgcacgtgacccccctccctcttcaagcacttgacccctgacaagatc

SEQ ID NO: 562224 - DNA, 122 bp, Homo sapiens
caaaagcatatccgtctgtcagaaagagctgaacactctgtgcagcgagttacatgttgagccatttcaggaccctgatgctcccataagacagaaaatgccccttgatgatctggatagag

SEQ ID NO: 562225 - DNA, 102 bp, Homo sapiens
ggtccagaacagtttccggtcaatgagcactattttggattagtcaatgaggagatatttcatcaaatactccagactatgcctggaatagctacattctca

SEQ ID NO: 562226 - DNA, 82 bp, Homo sapiens
tgggcggcaccctggccaggaagcggagggcgcgcgaggtttgcccgaccatctgtaagtcacacggctgcaccgccgaagg

SEQ ID NO: 562227 - DNA, 90 bp, Homo sapiens
gaaagtcctcgctcgtcaccagcaagcttgcggggaattggattcaagtacgtggctctgggagacctcatcatcctcatcacttttggc

SEQ ID NO: 562228 - DNA, 98 bp, Homo sapiens
gcagaaatgagcagaaaggagttggggcttgatgaaggcgtggatagcctgaaggcagccattcagacagttcggcatggttttcctcatcagcccac

SEQ ID NO: 562229 - DNA, 90 bp, Homo sapiens
ggaagagcagtaagggactgagctgctggaaagtccatcagcttgataatggaggagaacaatgactccacggagaacccccaacaaggc

SEQ ID NO: 562230 - DNA, 74 bp, Homo sapiens
cagtgatgtacttgccaggtttctcagccaagaaagggtcttactacatattgcaacagaagataatattggag

SEQ ID NO: 562231 - DNA, 75 bp, Homo sapiens
gtgaagtaccttttggctaaagaccagacgaagattcccatcaagcgctcgggagctgctgggactcagggaagg

SEQ ID NO: 562232 - DNA, 98 bp, Homo sapiens
gtgctgaaccacgctgaggggctgggagccgcgcacaccaccatcacatcccagatgcagtgactggttactacctgaaccgtgctggctttgaggcc

SEQ ID NO: 562233 - DNA, 89 bp, Homo sapiens
ggcgaaaggaacggctgaaggccctacgggagaaaaccgggcgcaaggtttacccaaggtccagcctagcccctaggcaccatgtcgga

SEQ ID NO: 562234 - DNA, 101 bp, Homo sapiens
gtactcttcatttgccagtctcaacaacattatcagatgttcttgacagagtgtcaggcaccacactgtaactcgaggcatcaccaaaggcgtgaaggagg

SEQ ID NO: 562235 - DNA, 83 bp, Homo sapiens
ggaaggtggagccaccagcctctccttgttgatattcactgatggactccaaagaatcattaactcctggtagagaagaaaac

SEQ ID NO: 562236 - DNA, 100 bp, Homo sapiens
gagatgcggttttcctcgcagaacgcctttatgcagaagcactattcctgatcagagaactccagttgcttcaacacacagtatcagtagtgcagccacc

SEQ ID NO: 562237 - DNA, 100 bp, Homo sapiens
gtcttcagcttgagccccatcactaggctgcaggagaaagctgcagacaccatcgaggccctgcagaaggccgggatcaaagtctgggttctcacgggag

SEQ ID NO: 562238 - DNA, 82 bp, Homo sapiens
aggatttcacggacattcagcaagattttgccgagcaggagctccgcgtggcccagacagagtttgaccggcaagcagaagt

SEQ ID NO: 562239 - DNA, 75 bp, Homo sapiens
tctcccaggaggagctggagacgtgcatgattaaccaggccccgtgaagcttggcggggaggccgcccacctccc

SEQ ID NO: 562240 - DNA, 102 bp, Homo sapiens
caaggtcatctgggaccatctgagcaccatgtacgacatgcaggcgctggctgctccgtgaccccaccatgtcctctcctaccacgagttccctggataccc

SEQ ID NO: 562241 - DNA, 51 bp, Homo sapiens
tttgccgatttcatgactaaccagtagaatgtaactggtcactacatttcc

SEQ ID NO: 562242 - DNA, 75 bp, Homo sapiens
aaatagttacctcttttaaactcattctactggagcaaatggaaactttgatccaaaagccatgaataattttta

SEQ ID NO: 562243 - DNA, 98 bp, Homo sapiens
ccgtttgttcaggaaccaccagtgacagatcccatgaagctgaggtcttgaagcagctggctgagaaacgagagcacgagaaagaagtgcttcagaag

SEQ ID NO: 562244 - DNA, 74 bp, Homo sapiens
ctatagtggacctgctccagtacagccagaaggacctggatgcagtggttaatgacccagagactgcagtaaag

SEQ ID NO: 562245 - DNA, 99 bp, Homo sapiens
cgcagctcctcggcgcttcctcggtggcttccccgggtcgagcaaacagctttctggaagatgacagcctgtacctgctgaaggaatcagaggacaagt

SEQ ID NO: 562246 - DNA, 100 bp, Homo sapiens
ttctactggacttcatgcttagatacatgtataacaagatttcttcgcaagactatggaaaggaagtggacctctacgctttggggctaattcttgctga

SEQ ID NO: 562247 - DNA, 75 bp, Homo sapiens
gtgccgcagcgtgggcaccagctacaaatgcctctgtgatccagaactgataaatttcaaacggaagagagtggc

SEQ ID NO: 562248 - DNA, 100 bp, Homo sapiens
tacactgttgctgctgcctctacgttcaatggcttccagaggccgacgatctactatgtgatgtcagggcctgcgtgcctgccaggagtgaagaaagctt

SEQ ID NO: 562249 - DNA, 51 bp, Homo sapiens
ccttccagctgtttgaccgaacagccatgtttgaccgtgagaacaaggccg

SEQ ID NO: 562250 - DNA, 90 bp, Homo sapiens
aagtctcagatcttttctacagcttctgataatcaaccaactgttacaatcaaggtctatgaaggacctgatcccaaccttgaagaaagt

SEQ ID NO: 562251 - DNA, 75 bp, Homo sapiens
ggccaagtccgaccccatggtgcaggtctacgacgttcctccatcggtgagcaaggatgtgcccgatggcccact

SEQ ID NO: 562252 - DNA, 75 bp, Homo sapiens
tgcccttcgccaaggagatcgtctctctcatcgaggcccaaaccgccaagtaagactttgaccccgacgcaggct

SEQ ID NO: 562253 - DNA, 74 bp, Homo sapiens
ctctggaccctggagtacaccccgcagcacagccgcgacttcaaggcctggcagctgcgattcagccacctcgt

SEQ ID NO: 562254 - DNA, 100 bp, Homo sapiens
ctgccctacctccacctccagtgcctcccaaatctgaagccatctttgaacaggtactaagtgaactggagcccctatgtctggcagaacaggacttcat

SEQ ID NO: 562255 - DNA, 100 bp, Homo sapiens
gaccagaggtggggacatcttttcaaaggaagccagcagacctgcagaacttggctcccgggacccacccaccatttataactttcaacagtgaagtcaa

SEQ ID NO: 562256 - DNA, 97 bp, Homo sapiens
agtctcagcttcaggtgaagaaggcagctctcactcaggcaaagtcaccaggagactaaagtccatcaaaaacatccagaaaattaccaagtctatg

SEQ ID NO: 562257 - DNA, 75 bp, Homo sapiens
gggaccttgcggtgaggctgcgcggggccgaggccgcctccgagcgccaggaaagaccacagcaagattctttca

SEQ ID NO: 562258 - DNA, 88 bp, Homo sapiens
ggaatatatccgaagcctgaagatggttccaagtattccctatctagaataccctctaccatctgctttggtcagggtgccgctcgag

SEQ ID NO: 562259 - DNA, 74 bp, Homo sapiens
tcaatcctgccggttgcgccttcttcctggacatgaccaactggtccagcaagactatgaatctctgttccaaa

SEQ ID NO: 562260 - DNA, 100 bp, Homo sapiens
gatggcgcctgttgtgacaggcacaagcccaccgtactgttgtgtggatctgtattcacttcgtactggggagatggtcaagtccattcaatttaagaca

SEQ ID NO: 562261 - DNA, 100 bp, Homo sapiens
atgaccacctggtagagaaataccgcattcttatcacaaagtttcaccagtgatcattaaagaatgggcagcttacaaaggaaagtctcctcaaaccccg

SEQ ID NO: 562262 - DNA, 51 bp, Homo sapiens
cctgcatggacttccactatgagcccccaaatacatcaagatgtttgtact

SEQ ID NO: 562263 - DNA, 100 bp, Homo sapiens
gcaggtcgaggacggtcggactcccgcggcgggaggagcctgttcccctgagtattctaccttgtaaatactgttatttgtatatactgtaaatgatgac

SEQ ID NO: 562264 - DNA, 100 bp, Homo sapiens
tggaatctttgctgcagctcttcaggtccatcaatgacatgatgagcagcatgtcagaccagaccgtccgggtgaagggctgggtataagtaagcaagaa

SEQ ID NO: 562265 - DNA, 82 bp, Homo sapiens
cagagaagggccaggagaggagcactttgaggacatggcctccgacgaggacatccctgggcgctgcctatggcacagccaa

SEQ ID NO: 562266 - DNA, 100 bp, Homo sapiens
gttcgagacttgcatttgaaatggacagaaggcattgtcaatgaattttatgagcagaaagtggagctgttccaaaaagaaaagaccccttaacacacac

SEQ ID NO: 562267 - DNA, 73 bp, Homo sapiens
aaaagtccattcagaaaagacaagagccctgtgagttccgatgaagttaaattccgtcaagatttaatgaata

SEQ ID NO: 562268 - DNA, 95 bp, Homo sapiens
gtatatgcaaccttctttgaaatttatagtggaaaggtgtgatccctcacatccacaaatctctgattggaaagaagggacagcagaaaactgct

SEQ ID NO: 562269 - DNA, 75 bp, Homo sapiens
attccaagtaactcttatttggcattgcttcaccggcagctacccggtcattgagcccctgctgaagtactttcc

SEQ ID NO: 562270 - DNA, 75 bp, Homo sapiens
agggaagttcctttttgaagtagttccagagacctgtcggccatggagcctaatgatagtaccagtaccgctgtg

SEQ ID NO: 562271 - DNA, 90 bp, Homo sapiens
tctttttcttcaatgggcagcatatgaaagtggattatggcaacgcacctcttgctttttcctccaaagtatgttatgttaagtttcgtg

SEQ ID NO: 562272 - DNA, 88 bp, Homo sapiens
ggagtgtgggaagcccatcggctgtgactgcaagatttttcttacagagtagctgcttgtcttcctattgatgatgtattgagaattc

SEQ ID NO: 562273 - DNA, 76 bp, Homo sapiens
ctttgatgtactactataatgggaaagcgcatcctggtggggaagaagttttaagggaacaagctggaggtgacgc

SEQ ID NO: 562274 - DNA, 75 bp, Homo sapiens
tccgcgaagatggcgggccggaggctgacccgcggctgattgagtccctctcccagatgctgtccatgggcttct

SEQ ID NO: 562275 - DNA, 80 bp, Homo sapiens
atgccgtggtcaccgtccgagacgccaaacacaccaactttgtggagatcctggtggctttgagacaccttcacttcaag

SEQ ID NO: 562276 - DNA, 96 bp, Homo sapiens
gacgacgcggaggcagagaagggaacgcccggcccagccccgctgaagccgacgtagcttctctgaacagacgcatccagctggttgaggaagagt

SEQ ID NO: 562277 - DNA, 90 bp, Homo sapiens
gatcctggtgtcgccatgggccgccgccccgcccgttggaatgcatcctgtcgggcatcatgtctgtgaacgggaagaaggtgctgcaca

SEQ ID NO: 562278 - DNA, 98 bp, Homo sapiens
cggcagccgaggagaccccgcgcagtgctgccaacgccccggtggagaagctgagtacctcctaaatggctctactttgaacctgctgggcaaggaag

SEQ ID NO: 562279 - DNA, 98 bp, Homo sapiens
tggatttaagcactgctgcactttatgaggtcaaaatgcagatcttcgtgaaaacccttaccggcaagaccatcacccttgaggtggagcccagtgac

SEQ ID NO: 562280 - DNA, 75 bp, Homo sapiens
cgagcgtgctgagcaaccgcagcctccgcggccgagagtgcagcgagttttgagcaaaattttggactgtgaagc

SEQ ID NO: 562281 - DNA, 75 bp, Homo sapiens
agcgtgggaaaaagggagcggtggcggaagacggggatgagctcaggacagattcatgatgttgctatcaaaagt

SEQ ID NO: 562282 - DNA, 100 bp, Homo sapiens
atccttcctgctgctcctgccgtccatccaccagcacagccagttcccagctgtggaacacacagtcagcagtcagcagaggaccttgcccgagtacctg

SEQ ID NO: 562283 - DNA, 90 bp, Homo sapiens
ctgagcgggactacagcccctactacaagaccattgaagagctccgggacaaggacacagcattgttggttttgccatgtactattttac

SEQ ID NO: 562284 - DNA, 50 bp, Homo sapiens
gttggttgcagttgtgtagtagttaaggaggatctcctgatgcagtccag

SEQ ID NO: 562285 - DNA, 98 bp, Homo sapiens
atatgcccagttcgctagtcaaacctgtgagttcaacatgatagagcagagtggaccaccccatgaacctcgattccgggaccccaaatcccagcgga

SEQ ID NO: 562286 - DNA, 100 bp, Homo sapiens
tgccgcgactgggaggagcgccggaacgccgaggcccaggtttacacagtaaacaatgtgaatgtgatcaccaaaatacgcacagaacatctgaccgagg

SEQ ID NO: 562287 - DNA, 101 bp, Homo sapiens
tggattttgatgatgatggagaagggaacagtaaatttttgaggtgagacctggaaccccttcaaattacagtaccagctgagaaatgtacgagagcgcat

SEQ ID NO: 562288 - DNA, 83 bp, Homo sapiens
ggctgtacgaagagaaaaatctctccccaggcttcaacttcagccttacggacatccaaaaattgcttggaactgacttcatg

SEQ ID NO: 562289 - DNA, 82 bp, Homo sapiens
cagcaagcaactttgagctgcacgttgcacaagaatcttgtggaagaagaatgaagttgctgattatgaagctacaacattt

SEQ ID NO: 562290 - DNA, 75 bp, Homo sapiens
cctcgacctgctgctggagacctggatctcgcgccacaaggagatgggggggccctcagcctcttggccttgaac

SEQ ID NO: 562291 - DNA, 80 bp, Homo sapiens
tggatgaagccgtgtcccagtccacacaggaccacctcgacactggcctgtttcctgagaagccgaggaatggtgtgctg

SEQ ID NO: 562292 - DNA, 90 bp, Homo sapiens
tcctgtgtctgtgggagcactgtgaggcggccttctgatctgtttaccacgtgagcaagcagctcggttctgtgcagagataaagtcccc

SEQ ID NO: 562293 - DNA, 75 bp, Homo sapiens
ggtgttcaagtgcagggagttcccgttacaatcactagtgttgcagggtttgtggatgcacttagatgtttgcaa

SEQ ID NO: 562294 - DNA, 96 bp, Homo sapiens
gggagcgccgagcgtcgccgccgccgccgccatgaacaactcgggcgccgacgagatcgggaatactcccccagttgcaagaggcgcaggaccgtg

SEQ ID NO: 562295 - DNA, 74 bp, Homo sapiens
gggagcctttggggcaccacagagatgcgggttagtagcaaagatgaagattttcttgacctttctgttgatgt

SEQ ID NO: 562296 - DNA, 98 bp, Homo sapiens
gcacttcgcattttggcattgacatttaattttagggtcctttatatagaagggagagtagtggtttttagatcgtatggctgatgacgactggtggc

SEQ ID NO: 562297 - DNA, 99 bp, Homo sapiens
caacaatgtgaccgagatccctggcatccccggggcagctgctggtgtgctccaggatcctatgccgaaaggctacgagcaatactatagcttcacaca

SEQ ID NO: 562298 - DNA, 90 bp, Homo sapiens
ggttagtgtgctctgagggagggtccgagccagccgctgttttgccggaggagcccctcaggccgcaggtgacaaacattaccaccccag

SEQ ID NO: 562299 - DNA, 75 bp, Homo sapiens
atctgtggctgggataagagaggccctgagaggtggagaagagcgagtacttgagaaagaagaggaagaagatga

SEQ ID NO: 562300 - DNA, 75 bp, Homo sapiens
cggccgcaggtgaccccttagcccagctccagtgggcgggtggcagaagctccaccatgaggcgaggtggatgga

SEQ ID NO: 562301 - DNA, 97 bp, Homo sapiens
ctctacctgtggctctttctgctgggcctgcccttcaccctctacatgagatgagcatcaggattttatggatgagcaaaaacgactaaagaagctt

SEQ ID NO: 562302 - DNA, 100 bp, Homo sapiens
ggtgactggaagggcctgaggattacagtgaaactgaccattcagaacagacaggcccagcttccatgtaggaagcggctgtaccgatcctgagaccttc

SEQ ID NO: 562303 - DNA, 83 bp, Homo sapiens
atgacagcaacaccgatatgtttcagggtggttgagtttgcctcttatggtgacttaaagaatgctattgaaaaactttctgg

SEQ ID NO: 562304 - DNA, 100 bp, Homo sapiens
ggacattgaaagcaaaatccaaccaggttctcaacaggctgactatctccttaggtgatgcacagtccaactacctgctaaccaccgccgagaacgagct

SEQ ID NO: 562305 - DNA, 101 bp, Homo sapiens
ctcagtcagcagaatgtgagcatggacttggccacgttcatgaagctgcggacggatgcggtgctggaacctgtgaaatttgtagatttgcttggtgacca

SEQ ID NO: 562306 - DNA, 80 bp, Homo sapiens
ctggacccgggacagcacgcacctcatcaattaccagctctggctgggtcgccacaacttgtttgacgacgaaaacacag

SEQ ID NO: 562307 - DNA, 100 bp, Homo sapiens
ttccctggcacatcagattgactgagattgtgtcccagcacaactatttaagaatcactcgtattcttaaaagccttggtgagcttggatatgaaagttt

SEQ ID NO: 562308 - DNA, 100 bp, Homo sapiens
aagtgcactgactggtggtgtcaacccatggctcaactggaagcactgtggaagaagatggagggtgtggtgcagaccatgaattacgtggggcagttag

SEQ ID NO: 562309 - DNA, 100 bp, Homo sapiens
tggtggcttctggctcagagctaggaaaaaagctgaaggcaactatggatgctgggaaactgaccctaaaaagtctgccagtcgccctgggagtcgggct

SEQ ID NO: 562310 - DNA, 83 bp, Homo sapiens
ctgtgctgcgcgacccccgcgcatgcttcatggcggctgaagagatgcattggcctgtccctatgaaggccattggtgcccag

SEQ ID NO: 562311 - DNA, 90 bp, Homo sapiens
tgccttaagagaggatcgcccaatccacatgcttttccagcatcaacaacagcaacttgtgattggcggtgaccggatattcagttgcac

SEQ ID NO: 562312 - DNA, 100 bp, Homo sapiens
gggccttccacaccccctccgtgggtgtgtggacactcatgaggaccatgatacttccactgagaatacagacgagtccaaccatgaccctcagtttgag

SEQ ID NO: 562313 - DNA, 50 bp, Homo sapiens
gccgtcccagttcgcaatgagaaagtggtcaaacaccagcaacatcagag

SEQ ID NO: 562314 - DNA, 101 bp, Homo sapiens
cccagctaaagcagacggctcgcactgcgacccgaagactgtgccctgtccacggtgcctcctgcatgtcctgctgccctgagctgtcccgagctaggtga

SEQ ID NO: 562315 - DNA, 83 bp, Homo sapiens
cggctgccggctgacgtctccttgcgatggagcatatccggacgaccaagtgtactaatggtcacttgatgtgcgctggctgt

SEQ ID NO: 562316 - DNA, 100 bp, Homo sapiens
aagaggcgttgcggcgaaaggaacggctgaaggccctacgggagaaaaccgggcgcaaggtactccaaagattcaggtttactcacgtcatccagcagag

SEQ ID NO: 562317 - DNA, 88 bp, Homo sapiens
aagatgaaacttcgagctcctctggagataattttatggagaaaagctcctgaaaaactgaggaaacagagaacaaactttcaccagc

SEQ ID NO: 562318 - DNA, 100 bp, Homo sapiens
tgtgcagggcagagcaggaggccccccgagagttgtggaaagtaaaaatgtagccctaccaaaaggaactattgtactggcttctccaggctggacaacg

SEQ ID NO: 562319 - DNA, 100 bp, Homo sapiens
ttccaggacttcgacctggagccgtcccaggactgtgcaggggactctgtcacaatggaggagatgtataagaaagctcatgctgctatacgagagaatc

SEQ ID NO: 562320 - DNA, 83 bp, Homo sapiens
gcgcccggcccccggctcagcccccggagtgcggagccgaccaggaactctgcgaccttcaagtcgtttgaggaccgagttgg

SEQ ID NO: 562321 - DNA, 88 bp, Homo sapiens
tggacggccagtgggagagcgaggcctgagcctctgcgtctaggtaggaatgaattgatagccagatacatcaaactcaggacaggca

SEQ ID NO: 562322 - DNA, 96 bp, Homo sapiens
gcgctttcgcttggcgctgggcagcttcgtggaggagtacaacaacaagattttcgacaatgaagccaaagacgtggagagagaagtttgctttat

SEQ ID NO: 562323 - DNA, 83 bp, Homo sapiens
tgggaaaatcgcaaggaagccggactgtgccctgtccacggtgcctcctgcatgtcctgctgccctgagctgtcccgagctag

SEQ ID NO: 562324 - DNA, 87 bp, Homo sapiens
cgaactccaagcgtgaccagctttctgttgggaacactcaaagtgccggtggtggtgtgcacattgagccccggtatagacagttcc

SEQ ID NO: 562325 - DNA, 83 bp, Homo sapiens
tgacatcatccctacaatgaccaccatcggctctggaattggcatctttggggtgatcatgtttgagaccttcaacaccccag

SEQ ID NO: 562326 - DNA, 100 bp, Homo sapiens
ggcagttccctctgccagcacttctttgtcaccgcttcgaggccgataactctgaggaaggaaagaccacagcaagattctttcattcgtctcctcctag

SEQ ID NO: 562327 - DNA, 80 bp, Homo sapiens
cggcagagcagggcggcggcgactcgtactatactggcaattgctggagaagattttgcaattgttgcttctgatactcg

SEQ ID NO: 562328 - DNA, 50 bp, Homo sapiens
tgaagaactgagctctatctggtaagaatgattgatgttggctgatattg

SEQ ID NO: 562329 - DNA, 90 bp, Homo sapiens
ctggaagcgcagcaacagcaagctcccgggcagtgctgattcctaaagaaaagcccccaatcacggttgtgggtgatgttggaggaagga

SEQ ID NO: 562330 - DNA, 90 bp, Homo sapiens
cacaaaagagttgattgaaattatctctggtgctgcagctctgatatgttgcagtattacttgaatctgacagaggcgaatctaaaggga

SEQ ID NO: 562331 - DNA, 109 bp, Homo sapiens
aaaacttcaagccaaacatcaagcagaatgtgatttgcttgaagatatgagcctcccgcgacgatgcccctcaacgttagcttcaccaacaggaactatgacctcgact

SEQ ID NO: 562332 - DNA, 75 bp, Homo sapiens
aactgaatgggacagaagcgaaattagtgcggaaagttgccggggaaaaggtttttaatgaccacaacaagcaag

SEQ ID NO: 562333 - DNA, 85 bp, Homo sapiens
tgatatttctcttttgtctgcccctattgtaagtgcagatggaacacaacagactgtacctaaaaagcaagttgtggccaaggcc

SEQ ID NO: 562334 - DNA, 80 bp, Homo sapiens
tactcgggacgctgcacctcccgcgccgcacggtggacgaggttttaaaatcaaagatgggaaaatcggagaaaattgcc

SEQ ID NO: 562335 - DNA, 100 bp, Homo sapiens
ctcggacgctcctgctcggctgggtcttcgcccaggtggccggcgcttcaggtatctcgggggagctttgtgccttgatggatcaagttcatcatatgca

SEQ ID NO: 562336 - DNA, 100 bp, Homo sapiens
atggtgtcttggactgcccagatgggtatgacgaaggagtacattgtcaggcttcatcaaacccagaagtcatcaagataaattcaattctggatatagt

SEQ ID NO: 562337 - DNA, 75 bp, Homo sapiens
gtgaggagctgggtggtcccagcctggagctgtgccagcctgacatgggtgtgagatgcacaatgcgaaacctag

SEQ ID NO: 562338 - DNA, 75 bp, Homo sapiens
gcccaatttggccgtcgcagaacaaatttcgctaaggagtttgtgatcagtgatcggaaggagctggaggaagat

SEQ ID NO: 562339 - DNA, 82 bp, Homo sapiens
taaaggagcccatcgtgcgggtcttgcaaaggcatggaagaggagatggttcgtgttacgcagtggccgtttaactggagat

SEQ ID NO: 562340 - DNA, 75 bp, Homo sapiens
cccacaaaaccaagcgaggccaggccgctctggaccgtctcaaggtgctggctgctgtctacaaggctctgagtg

SEQ ID NO: 562341 - DNA, 98 bp, Homo sapiens
agagatgaggccggagcccaccaagttctgggaagttggtgttcgaggaagagacattgttgttcttggtgtggagaagaagtcagtggccaaactgc

SEQ ID NO: 562342 - DNA, 148 bp, Homo sapiens
ggaatcatcaagaaatgtcgcacgagcccagacgcctttgtgcagctggccctccagctggcgcactacaaggacgccttgctgagtctgggctctgtcatcgacatttcaggcctgcaacgtgctgtcaaggaggccctgtcagctg

SEQ ID NO: 562343 - DNA, 100 bp, Homo sapiens
ctttaagccaggtgtatatgcggtgtcagtcactggtcgcctgccccaagcccccattcactggggagaatagaaagaaaacaattgacaaaatcctcaa

SEQ ID NO: 562344 - DNA, 89 bp, Homo sapiens
ggccgtgtccaagggcgatgggatgcgggggctcgcggtgttcatctccgacatccggaactgtgaatacatcaagacctggaggccac

SEQ ID NO: 562345 - DNA, 88 bp, Homo sapiens
tccactgagtttgaggtgaaggagtacggctcctgggtagaactgcacttcagcaataatgggaacgggggcagcgttccagcctcgg

SEQ ID NO: 562346 - DNA, 100 bp, Homo sapiens
tttactgtcaagacatttcttcggcattctgcaacaggttctcagaggcactgtgactgacttccctggatttgatgagcgggctgatgcagaaactctt

SEQ ID NO: 562347 - DNA, 87 bp, Homo sapiens
tttcttgaacttttagaatatgaaaataagagccctgaggatccacaggtcttggataagagttggaacaaaaattgaccccacttt

SEQ ID NO: 562348 - DNA, 90 bp, Homo sapiens
ccggggcccccgccgccgccggagcgccacccacacagaatatgcctatgggtcctggagggatgaatcagagcggccctcccccacctc

SEQ ID NO: 562349 - DNA, 82 bp, Homo sapiens
caaaaagcgaagtcaatggaaggattccaggacctgcttaacatgcgtccgtacttaagagattatggcatcagaaacccac

SEQ ID NO: 562350 - DNA, 83 bp, Homo sapiens
ggtttgctgatcgccccagggatcaggagggttaatgcctcttggaagtcaggagtcttcagacagtctagctgcagagattg

SEQ ID NO: 562351 - DNA, 75 bp, Homo sapiens
tgcatgaaccaaacccacttcgttcaagacaggtgtttaagcaatttctacaagtgtgaaagaattagaaaactt

SEQ ID NO: 562352 - DNA, 80 bp, Homo sapiens
ccttagctgtgctcgcgctactctctctttctggcctggaggctatccagcttttccaagagataacttcaccaagatgt

SEQ ID NO: 562353 - DNA, 82 bp, Homo sapiens
attcgcagtggtcgcttcttctccttgccccttcatgaataagttttttccagccagctttccaaatcgacagtaccagctg

SEQ ID NO: 562354 - DNA, 75 bp, Homo sapiens
tgtgcgggatcgacgcggacagcgggctggagcctgacgagctggcgggtatttctgggaaaagccagcttctgt

SEQ ID NO: 562355 - DNA, 100 bp, Homo sapiens
cagaaggaaatacccagactgttactacaacctcgggcgtctgggatatgtggtgcctgtcataagctccagagagctgccttccacaagaccagcagaa

SEQ ID NO: 562356 - DNA, 100 bp, Homo sapiens
ccgggagacacagtgtcagaattacaaggtgagatcagccgcccggccaagctatcttctcgctagcagaaatgcacagcggtattgatgagtagatcct

SEQ ID NO: 562357 - DNA, 83 bp, Homo sapiens
cctggtcctgacgcccccctcccgcccggaaagctgcccagccaccagcaaccccccaggtattgttgcagcatctggcagtg

SEQ ID NO: 562358 - DNA, 50 bp, Homo sapiens
ttcctcccttcgctcgcaccatgaacattctagtatgccagtagaaaaaa

SEQ ID NO: 562359 - DNA, 74 bp, Homo sapiens
agaatgaggaaaatggggagcaggaggctgacaatgaggtggaacgtgtgatcaccattatgcagaatccacgc

SEQ ID NO: 562360 - DNA, 82 bp, Homo sapiens
gtaaccgggacccggtgtctgctcctgtcgccttcgcctcctaatccctagccactatgtgaaaatgcctcgtgtaaaagca

SEQ ID NO: 562361 - DNA, 75 bp, Homo sapiens
cgggactccaaatgggtcgcagtcgcagccgctctccacggagggtgaaattaaatggtggcagacatgtccaag

SEQ ID NO: 562362 - DNA, 82 bp, Homo sapiens
cacatccagatgaatgatgtcatcaccgtcatcgagggaagtgtttcacctgtctcggaaagtaacatctctggtccctgag

SEQ ID NO: 562363 - DNA, 98 bp, Homo sapiens
ttgaacttcgtgagtttcgctctaaactgcccttgaaatgaagctggacttggaggttatgaagacagtatggagtttccagaccatagtagacattt

SEQ ID NO: 562364 - DNA, 99 bp, Homo sapiens
ggccgcactgggaccccggaatcccgcgcgctgcccacgattcgcttctgagacaatgcagatcttcgtgaagactctgactggtaagaccatcaccct

SEQ ID NO: 562365 - DNA, 99 bp, Homo sapiens
caagctgtctaagtccaaagatttttacccaggtgtcatggagaaactccagctgggcccagagattctgcagcgggaaaatccaaggcttatttatgc

SEQ ID NO: 562366 - DNA, 83 bp, Homo sapiens
cagcgcagaagggacgtgagcccagccgaggtaccgctgaagaggaatcaattttgtgaagtaagaactctgctagagaggaa

SEQ ID NO: 562367 - DNA, 77 bp, Homo sapiens
ccctagaccggtttttagtccattgactatgcagcctaatggcatgtactggcattgaaaacattgacgaagctatt

SEQ ID NO: 562368 - DNA, 90 bp, Homo sapiens
tgcaccagcaagatcggcaggcgagattgcctgacccaggcctgctcggccctcacaggaaaaaagcctggagcaggagctggccagccc

SEQ ID NO: 562369 - DNA, 82 bp, Homo sapiens
gcgggcttagcaggaaagggtgcctaaggaatcaaagatcaactcccactgaggacaaatggacctgtaattccgggtgtga

SEQ ID NO: 562370 - DNA, 50 bp, Homo sapiens
aatatcgaagagctctttcaaggaatcagaaaatggctttgtaaagaagt

SEQ ID NO: 562371 - DNA, 75 bp, Homo sapiens
ggcggccagagcgccggcaagagctcggtgctcgagaacttcgtgggcaggccctgagcctgtgcaattatttcg

SEQ ID NO: 562372 - DNA, 100 bp, Homo sapiens
gaccgtgaccgagagcgtgaccgagagcgcgaatatcgtcatcgttagaagatggcagaaacggtggacacaagcgaaatggtcaacggcgctacagaac

SEQ ID NO: 562373 - DNA, 74 bp, Homo sapiens
actggattatactgtactgcccatgaaaaaggatgttgaccggacaggtagctgtgaagctcagtggctggcgc

SEQ ID NO: 562374 - DNA, 76 bp, Homo sapiens
cctactcgcccgccaccctgcgctgccgccgctctgaggagttaaaggcaccgatgaagacgccattattagcgtc

SEQ ID NO: 562375 - DNA, 87 bp, Homo sapiens
cagatatcattgctcgagagttttataatctacatcatcaagctgagggctttcatctgagtggcacagtaactgagctggccactg

SEQ ID NO: 562376 - DNA, 100 bp, Homo sapiens
cgtgaagctcaccgacagtgccctgagggccttcgagagctaccgcgccagacaggcacgtggactccctttaatccagtgactgtcaggtcgatcatat

SEQ ID NO: 562377 - DNA, 100 bp, Homo sapiens
ccagttcacccctactgggggccttggtctgaacctggccctgaacgtcaacagtaatgaaggcaagcagaaaaagcgaggaggtggtggtggatttggc

SEQ ID NO: 562378 - DNA, 98 bp, Homo sapiens
gctgacgccgcggacctccctgcgaccgtcgcggaccatgggcgacaaagggacccgatgacgtccggttgtttgccttcgtgcgcttcaccaccggg

SEQ ID NO: 562379 - DNA, 100 bp, Homo sapiens
ccttcgtgggcacgcgctcctacatggctgggtccccacggagtctggaccatggaggagcgaggtctggcccccaagttcgacaccacctttgagagcg

SEQ ID NO: 562380 - DNA, 82 bp, Homo sapiens
ggctcagcggccgcgaggccgcagctcccggtcatgatgatgggcagcgcccgagtggcggagctgctgctgctccacggcg

SEQ ID NO: 562381 - DNA, 101 bp, Homo sapiens
tctggacagtggcacacagataccgtttattaaaagagctgtggctggtgtgataggtatacagctggttgttaccatggtgatggccagtgtcatgcaga

SEQ ID NO: 562382 - DNA, 100 bp, Homo sapiens
tgggcaaggccccctccaactcagggagacccccccaactccttagccctctgctgggtgccagcctgctgggtttcccaaaccactccttatgatccag

SEQ ID NO: 562383 - DNA, 100 bp, Homo sapiens
ccgggggagcggggccttccacaccccctccgtgggtgtgtggtgagtgtgggctgctgagaactagccctagacctctgcgtgagggttcttctgccga

SEQ ID NO: 562384 - DNA, 96 bp, Homo sapiens
tgacaaggcactgctttttcatgacgcttcagctttagctgcagctgcctctgttcagccacttgcaacacaatgtttccaactctctaacatgtt

SEQ ID NO: 562385 - DNA, 98 bp, Homo sapiens
caaggaggcagccgtgtcacatgcagatgtggtatggtgtattcctgtgggcactggtgtcttctctcttctttcatgtccctgctggattactggcc

SEQ ID NO: 562386 - DNA, 71 bp, Homo sapiens
acaatgaaggcaagtgggactttgccttctcagcccaaagtcagcatggctcccgcaaagaagggtggcga

SEQ ID NO: 562387 - DNA, 100 bp, Homo sapiens
acaaattggggctcagagcttcttccacctgcccgttaacattcgaaaatgtcaagaaaaggactggacggaggaggaccgggcccgggagaaggtgctg

SEQ ID NO: 562388 - DNA, 100 bp, Homo sapiens
gtggcagaggagctggcggagagcggcctgcgggcgatcgggccgagtttttggctttcacccccaaccagtgaccaaagacttgaccactcaaagtcca

SEQ ID NO: 562389 - DNA, 83 bp, Homo sapiens
ttggcaggaagccaggttgcagggtgtccgcttcctcagcttcatcactggtccagctgtaataccagggtacttctccgttg

SEQ ID NO: 562390 - DNA, 99 bp, Homo sapiens
gatgaaagatgacggctccttctgcgtctgtgaggccaatgcaaatgaaacccttttccaaagagaaatgaagaagaaaactgtatgtaccctaaatat

SEQ ID NO: 562391 - DNA, 83 bp, Homo sapiens
cccagtgcggactcgcctccgtgaagacaatgcagatcttcgtgaagactctgactggtaagaccatcaccctcgaggttgag

SEQ ID NO: 562392 - DNA, 82 bp, Homo sapiens
ctctaacggggctttctacaagctccctagatctttagcttctactcccactgctcctaccactccagcaacgccagataat

SEQ ID NO: 562393 - DNA, 97 bp, Homo sapiens
atagaggaattcgcagagggatccaagatcaacgcgagcaagaatcagcaggatgacggagtccggcagcgtcttctcttgagggagcaatttggag

SEQ ID NO: 562394 - DNA, 90 bp, Homo sapiens
tgctatatccagaagtaattcaacaggtttttagaacttcagccataaaaatgggcagaattttccttgatcatatcggtggtacccgtc

SEQ ID NO: 562395 - DNA, 85 bp, Homo sapiens
tgtaatgacaccagcgcagctctcttgatttcacacattgtgcaatggaggagtgagatgtggatgttgcttttgcacctacggg

SEQ ID NO: 562396 - DNA, 82 bp, Homo sapiens
ctgagcccgtccgtccgccgccaccacccactccggacacaggtgtttcccattaaacactaccaggacaaaatcaggcctt

SEQ ID NO: 562397 - DNA, 82 bp, Homo sapiens
tgtcttcagatcttcacagcacagttcctgggaaggtggagccaccagcctctccttggctgaccaactgactgaagagcag

SEQ ID NO: 562398 - DNA, 100 bp, Homo sapiens
cctcctcctcctcggagaccaccagtactacgtctacttcgactctgtgcgggactgctacgaagggagacccttgtccccggccaatgtccctgctctg

SEQ ID NO: 562399 - DNA, 75 bp, Homo sapiens
agccctggtgtcacctatcagtaaaaggggatagtggtcctagaagaatgtcagcttccaaaagatattttgaaa

SEQ ID NO: 562400 - DNA, 74 bp, Homo sapiens
tgaggaagcccaactcctatgagctcctctctggcagcccgtgttcccaagaaaatcctcaagtgcaaggcagt

SEQ ID NO: 562401 - DNA, 138 bp, Homo sapiens
ggttgatgtgaactcagaagtccatgttcaggaaatggctgaagttcgtaaagatgatgttgtaacagtgactgcctagggactccacgtaccccagctgggtctcattgttccagaactgcattagttaagattacc

SEQ ID NO: 562402 - DNA, 75 bp, Homo sapiens
ggagacagacatgatgcaaggaggcgtgtacggctcaggtggagaaagatctgttcagcctgtgtgcgctgtaag

SEQ ID NO: 562403 - DNA, 96 bp, Homo sapiens
ttgacaacaggtcctatgattcattacacaggtgtcaaggagcagaagcttttgaaatccagcattctggattggcaaatggaatctttatgaaat

SEQ ID NO: 562404 - DNA, 75 bp, Homo sapiens
attcaagcaaaccaatttgattatcttgtcaaactcaagtctctctttacatgacttcaagggaaataaggctga

SEQ ID NO: 562405 - DNA, 51 bp, Homo sapiens
gatctgcagaagacgcagggctcaaggccggtctaattgaagccaacggag

SEQ ID NO: 562406 - DNA, 100 bp, Homo sapiens
actaaatcggcttcacagaaaggagtcactgccttctaacgaaagggcagtacagactttggcaggaagcaagaggctactatgagcagactggagttgg

SEQ ID NO: 562407 - DNA, 82 bp, Homo sapiens
tgggcagggcacgaggcctctgagcctagagagtgaaggtcacccgtgtgaacagaaagtgagaggttgtagcacattgcca

SEQ ID NO: 562408 - DNA, 75 bp, Homo sapiens
aactctctacatttctgaatgtctgaagaaactgcaaaaggacgatactttgatgaaatcagccaggacacgggc

SEQ ID NO: 562409 - DNA, 75 bp, Homo sapiens
ccggcctgggagaagcagcagcgcaagcggggatctgatgagcttctttcttctggcatcattaacggacctttt

SEQ ID NO: 562410 - DNA, 101 bp, Homo sapiens
tcatggaaactctcttctggagaagataacactttagtacagtcgccaactgatgtctacagccgggccagcacatggctcccagcccccatctgaccgtg

SEQ ID NO: 562411 - DNA, 75 bp, Homo sapiens
acctcccagagtgctgacattataagcatgagcagctgcaccctactagtgaactgataaatttcaaacggaaga

SEQ ID NO: 562412 - DNA, 100 bp, Homo sapiens
gaactgggtccttagcactattttacagaaagggatccatatggctttggagacagtcgagattcaaggcgtgatcgatccccaattcgaggaagtccaa

SEQ ID NO: 562413 - DNA, 143 bp, Homo sapiens
cggcaaggcagacttcgtgctgatggacaccgtctccatgcccgagttcatggccaacctcaggctcagagttgagaattatggctgcaggaaaatttgcaagccttcccagaaacatgccggtgaatcaccagttccccctg

SEQ ID NO: 562414 - DNA, 75 bp, Homo sapiens
ggtcccgcgctgcgcatccccgcggacgccacagcgctgccacccgggaccttgcccagtacgacgcagcccatc

SEQ ID NO: 562415 - DNA, 87 bp, Homo sapiens
cggtgctcgagtgcctgcaggatgtgagggagtatccatatattcctgcacatattacaaagcctaaggaacataagaagttgtttc

SEQ ID NO: 562416 - DNA, 90 bp, Homo sapiens
ccaggagccccaggcttctatccaggtgcaagccctacagaatttgggacctacggaccatgggtagcaacaagagcaagcccaaggatg

SEQ ID NO: 562417 - DNA, 100 bp, Homo sapiens
atttcttctgacttgagcctgcagtgtgctgtgagagatctaccactaggcaatgaatttccaagggaagttaaagtatcttcatggacagaaaaagaaa

SEQ ID NO: 562418 - DNA, 75 bp, Homo sapiens
aagctggtctgttctaactgaggaatcccgttctgcttccagaagtggaagtgctcacggatcggggaaatctgc

SEQ ID NO: 562419 - DNA, 96 bp, Homo sapiens
gcagtgcagacctgggacggcgtcctgctgggggagcagctgatcaccatgtcctgcacggacaagatcgccagaaaggagatgtaagattcttga

SEQ ID NO: 562420 - DNA, 75 bp, Homo sapiens
caagagggatccttcacccgtgtctgcgtgagtgcatctccatccacgttggccaggctggtgtccagattggca

SEQ ID NO: 562421 - DNA, 82 bp, Homo sapiens
aaattctgaactcaggacttggcaagtagttttgcagaagtgcaaagtcaagtctctcttgcacagtcctggagactacatc

SEQ ID NO: 562422 - DNA, 75 bp, Homo sapiens
caacagcagccggcccttgttaactacaacagaccatctgatgtcatgggaacagacatgtcttggagaggtgca

SEQ ID NO: 562423 - DNA, 75 bp, Homo sapiens
ctgacaggggggcctggccgcgcagccggctcatcagattcaagagatgtttccccaggttccataccatctggt

SEQ ID NO: 562424 - DNA, 98 bp, Homo sapiens
tccacttcagcttctttgtcaccataggagacatggacgaagccttcaaatccatcaagctcatcaaaaggctgcagcgtgtgttgcaagtcttcttg

SEQ ID NO: 562425 - DNA, 100 bp, Homo sapiens
cagcaagatcggcaggcgagattgcctgacccaggcctgctcggccctcacagggatatgtgatggcgtccagtttggagctgggataaggttcctgtag

SEQ ID NO: 562426 - DNA, 100 bp, Homo sapiens
atgacaatgtagaggatgacttctctaatcagttacggccttctggcggccgcccctggtttctcctggggggtgatgagcgggagcggctctgggccga

SEQ ID NO: 562427 - DNA, 82 bp, Homo sapiens
cttacagacgctgccagcatcgccgccgccagatcccagattacaggaatgcagtaatcgtggccaagtctccagcctcggc

SEQ ID NO: 562428 - DNA, 75 bp, Homo sapiens
gccatgggaactgctggtactgcaatcattcattttgtgccttgcagtacaaaattggacagctgtacatgatca

SEQ ID NO: 562429 - DNA, 98 bp, Homo sapiens
gtccaccaacctgaccatgacctttaacaaccagctgaccactgtccacaaccagaattcatcccacaggcatttggaatgcccttatcccaagtcat

SEQ ID NO: 562430 - DNA, 100 bp, Homo sapiens
ctggtggagccaaggaaacaggatgctgatagtctccagcgggcctggactgtgggctggtgtgtggaactgctctggcagtttggccgctggatggacg

SEQ ID NO: 562431 - DNA, 75 bp, Homo sapiens
ttcgacccaacagcatcgttcctctttccaagaaggcaagccgattttttcagttgatattcaccctgacgggac

SEQ ID NO: 562432 - DNA, 98 bp, Homo sapiens
aagacattgtttctctccctctgcccccccttccccacgcaaccccagatccatttacactttacagtgagtgtggctgtgaagtgcctgaagcccga

SEQ ID NO: 562433 - DNA, 72 bp, Homo sapiens
aacatcagcatgtatttggttaatggctccgtctctgttggatgaacccaatcccaatagtccagcaaacag

SEQ ID NO: 562434 - DNA, 83 bp, Homo sapiens
gaggcaccgaggcactcagaggagcacacggaccctgactactcggctgcctatgtcgtcatagaaactgatgcagaagatgg

SEQ ID NO: 562435 - DNA, 102 bp, Homo sapiens
tcagcctccggagtagctgggactacagggacttcactgtgactttgcttgcctgatgttccaatacttagtaaataagccttcagaagaaagggtcaggga

SEQ ID NO: 562436 - DNA, 75 bp, Homo sapiens
atccatctaaagcaccagtaaaatatggtgaactcattgtcttagggatatagtttctttggtcccacgcctgcg

SEQ ID NO: 562437 - DNA, 90 bp, Homo sapiens
aaccagatattggggataacattacgtcagcgtgatgctgaggtgactcgactaagagaattaaccagttgaagatgcccactctggact

SEQ ID NO: 562438 - DNA, 83 bp, Homo sapiens
gaggccatttacttctctgctgaaaagcaatggtgagacctggaaccccttcaaattacagtaccagctgagaaatgtacgag

SEQ ID NO: 562439 - DNA, 83 bp, Homo sapiens
gcggattcgccgaggcaccgaggcactcagaggaggctgttacaggcgctggaacgcggacgggagcgccagctgcgtccgct

SEQ ID NO: 562440 - DNA, 50 bp, Homo sapiens
cctccggagtagctgggattacagatggagtctcgctttgttgcccaggc

SEQ ID NO: 562441 - DNA, 82 bp, Homo sapiens
cgcggagccggcgctgagaggggctgcggccggagcgggcggctgagacaaaggcgacgcagaaaaatatggctcaggagac

SEQ ID NO: 562442 - DNA, 80 bp, Homo sapiens
agaagcagatggattcgtccttttagttggctggggaacagaccagggaattggtggatttggagaagagccgggaatta

SEQ ID NO: 562443 - DNA, 50 bp, Homo sapiens
ctggctggaacacacatcagtcacgggttgctcaagaggctgaaagagaa

SEQ ID NO: 562444 - DNA, 75 bp, Homo sapiens
ccggagaagcgagtttcagctggagcttccaggacatccagtgctacgagtggtctcagttgtaggagtgagcga

SEQ ID NO: 562445 - DNA, 75 bp, Homo sapiens
gcctctcggcgctgctgctgctgctgcagttctttggggtgactttcaagatggactctactctaacagcaagtg

SEQ ID NO: 562446 - DNA, 103 bp, Homo sapiens
ctttggaggaggggtgtttctggccacgtgcttcaacgctctgctgcccgctgtgagggaaaaggactcatcaagcagttctcagagaacatttatgaggcct

SEQ ID NO: 562447 - DNA, 100 bp, Homo sapiens
cgcctgccggagccgtggtggcagccccgggaggagcactggcgtctgtttccttcgaactgtgccgcataaatgaggatcagaaggtggccctggatct

SEQ ID NO: 562448 - DNA, 75 bp, Homo sapiens
caggggcagagggaccactctgacagatggatagagatctgatggtaggaaagctggaaagagacctgtacactc

SEQ ID NO: 562449 - DNA, 82 bp, Homo sapiens
ggtgtgcgtggtctccaggtttccctattacaactccctcaaggactgcctttcctgatgcttcctgaaacttggagagtgg

SEQ ID NO: 562450 - DNA, 100 bp, Homo sapiens
gtcccggacccagcagctcatatcaaggacccattaaagttgcggtatttaacgtatctgccaataccaggatgagcaacaacagtaacaatcaaactac

SEQ ID NO: 562451 - DNA, 102 bp, Homo sapiens
ctgatgaaagctctgcacattctgcggctaaagatgcgcattagcacagggcaaggcttcccagcaggttcaggagaagtggcacctggtggaggacctgtc

SEQ ID NO: 562452 - DNA, 82 bp, Homo sapiens
ttgacatcttccagtttgcaaaatggacgaatgccttttccggtgaaccatggcgccagttcagaggacaccctgctgaagg

SEQ ID NO: 562453 - DNA, 100 bp, Homo sapiens
agactttatcaaaaacatgattacagggacatctcaggcccctacaaaggcttcagagtagatatctctgccaacatgaggacagaaggactggtgcgac

SEQ ID NO: 562454 - DNA, 75 bp, Homo sapiens
ttgcgttacaagctttgtctccttcgacttggagtctttgtccaggacgggtgaccatcgggatgaggaggaaga

SEQ ID NO: 562455 - DNA, 80 bp, Homo sapiens
atcacaaaagagttgattgaaattatctctggtgctgcagctctactagatgagacaatacaggccattgccaatggaac

SEQ ID NO: 562456 - DNA, 100 bp, Homo sapiens
gccaaacccaagttggttggagatgtggattttgaagatccctgggtatcagtatgtgtcacctgaaggcaattgtatagaacatgttcagcctacttct

SEQ ID NO: 562457 - DNA, 95 bp, Homo sapiens
gagtactccacagaggataaatttcaacctccggggccacaatagcgaggtgtgggaaatgctactgcctgtgtcttacatgatgttatctacgt

SEQ ID NO: 562458 - DNA, 73 bp, Homo sapiens
aggattccaagtaactcttatttggtgctgatattcgtggcttcagtgctcctaggacatttggccttacact

SEQ ID NO: 562459 - DNA, 102 bp, Homo sapiens
cgtctgtcaggaggtgctcaaaacgcccgtgcggaccacggcctgtcagcacgttctttaacacctctgtgtgaagatgacaaccaggcacaggaaatcatt

SEQ ID NO: 562460 - DNA, 100 bp, Homo sapiens
gacccgacacaaggcagcttcccacagcaggttggacagttcacagctcaccatcatcttcaagaacttccaggagtgtgtggaccagaaggtgtaccag

SEQ ID NO: 562461 - DNA, 51 bp, Homo sapiens
gcactgactttcagctatggaatcgattgctcatttagaaagtggatgtgt

SEQ ID NO: 562462 - DNA, 97 bp, Homo sapiens
gactggagcccagcataaatgtggagcccctcaggtggtggccttgtccatgtcacctgtggatgacactttcatttctgggtctcttgataagacc

SEQ ID NO: 562463 - DNA, 90 bp, Homo sapiens
tggagaaacatgcagattatatcgcatcctatggctcaaagaaagatgattatattcatgatgttgctatcaaaagttgagaaattgtca

SEQ ID NO: 562464 - DNA, 100 bp, Homo sapiens
gctgaagaccgaagcaagagctggttcagatggtcatcatgggccagtgctactacaacgagaccatcggcttcttctataacaacagtggcaaagagct

SEQ ID NO: 562465 - DNA, 74 bp, Homo sapiens
ctccagggctcctgtctacgaccagctgcgctgagcacagacccaagtgtgctggggaagtaccgagccggctt

SEQ ID NO: 562466 - DNA, 100 bp, Homo sapiens
cccgcgtccgccgattcctcctccttggtcgccgcgtccttggctggcgtaacacaccacagccatcagcactggaatgcaaagaccagaacaaacagaa

SEQ ID NO: 562467 - DNA, 100 bp, Homo sapiens
cggatggtttccggcggagtgcgtggaggaggtccagtgtaagcccagggacagccaggcaggctaccggctctctgaccagttccacgacatcctcatt

SEQ ID NO: 562468 - DNA, 106 bp, Homo sapiens
ataaaaaggagcaaaagaaaaaagaatgggtcaaccaagaacgtcaaacactccaacgattgagagcatttaaagatgtactccaaagattcaggtttactcacgt

SEQ ID NO: 562469 - DNA, 88 bp, Homo sapiens
gtcatgagcgacagcggcgagcagaactacggcgagcgggctttacaggaagtatggtgctggcatctgcttggcttctagagagtct

SEQ ID NO: 562470 - DNA, 50 bp, Homo sapiens
tcatgcccgcctgtctgctgatgtataaggttcagattcctgaaggccga

SEQ ID NO: 562471 - DNA, 80 bp, Homo sapiens
actggagagcttcatcaaaaatagtgatagctttgataagtatggctgatggcaagcattgtacttttccacatctgcct

SEQ ID NO: 562472 - DNA, 87 bp, Homo sapiens
aaagaccttaggagagacgagcagccttcagggagcgtggagacaggaactcgaatcatttatgacagaaagtttctgttggatcgt

SEQ ID NO: 562473 - DNA, 75 bp, Homo sapiens
gtggcagtccatcaaggggacccacctcaccatcacccaggcgatttgcataaccaaatgatcaagagcatcaaa

SEQ ID NO: 562474 - DNA, 60 bp, Homo sapiens
gcctggaactctacagggagctggacctcaacagtgcccatgacgcttccggagacaacc

SEQ ID NO: 562475 - DNA, 100 bp, Homo sapiens
gctgtcaccaccgacactctccaggctccggacacgatgcaggccatcaagtgtgtggtggtgggagatggggtacctgctcttccgagacttctgcctg

SEQ ID NO: 562476 - DNA, 78 bp, Homo sapiens
gaggagcatatcagaaacataactgccatagtgaagcaacttaatcgggatatcgagagcagcccgacggccatggag

SEQ ID NO: 562477 - DNA, 51 bp, Homo sapiens
agcggcagacagaacgggacctgtgtcagagagttgaaagataaccttggc

SEQ ID NO: 562478 - DNA, 100 bp, Homo sapiens
attcttggtgttaaacaagacaacgctgaaggctcggtgcagcagccctgcaaagcttattgcaggagtgaccaggacactacctcctagaagtaatgcc

SEQ ID NO: 562479 - DNA, 82 bp, Homo sapiens
ttatctttcgggaaagctctctggggcagggtcaaatgctgcaaatactggccagatgacacagagatatataaagacatta

SEQ ID NO: 562480 - DNA, 90 bp, Homo sapiens
aactaatcctgatattaagccatcaaatgtggaacctatggaaaagctctatgttctatgatgaggatggggatctggctcacgagttct

SEQ ID NO: 562481 - DNA, 80 bp, Homo sapiens
cgagttgaatcattgttcaaataaggacaaagcccacaaacgctatctgctaatgagcattgaccagaggaaaaagatgc

SEQ ID NO: 562482 - DNA, 125 bp, Homo sapiens
actttgttgtcccggtcccagaccaccctcctccaccgtcgcctcccactgcaaaaaggcctgggtgcttgaggaatccaaagccctcgtgcgctgcaacatgaagatggagctggagcaggcca

SEQ ID NO: 562483 - DNA, 75 bp, Homo sapiens
cgcaaggtcgccctcaaggccatgatcaaaacgccacggcatatgcctccaaggacggggtcctcactgaggcca

SEQ ID NO: 562484 - DNA, 100 bp, Homo sapiens
ataccatccgtcattaccagcatgtgttggctgttgacccagaaaaggcggcccagatgaaatcccaggctttacttactgcagtaacatcacaacacat

SEQ ID NO: 562485 - DNA, 100 bp, Homo sapiens
ttttagcatcgaaactaggagaaataagaatggctgtagaggaacttcagtctataataaagagatgtttaattggccttggtcctcacagctccaaaaa

SEQ ID NO: 562486 - DNA, 116 bp, Homo sapiens
tgaagggacagggaacagccagacgagagcttcagccatcacgaggatgatttcggaacctggagaaaatgttatgcatgacatcctgggatgtaagatcacagaatccccctcca

SEQ ID NO: 562487 - DNA, 100 bp, Homo sapiens
catcatccaacaccgccatcctttcattgagtgggctcggccaccccaaccttctgcccatgacccatcgagaaactgcacctgtttcccagcctgaaaa

SEQ ID NO: 562488 - DNA, 80 bp, Homo sapiens
cccggggacggcgaggccctcatgtaccacacgacacgaagatcgattgagaagttattagaatgggaaaacaataggtt

SEQ ID NO: 562489 - DNA, 75 bp, Homo sapiens
ctaaaaattactgcggtgaacagggcgccaatgcttcggcattagagaaagagattggtccagaacagtttccgg

SEQ ID NO: 562490 - DNA, 100 bp, Homo sapiens
gaaaaccttggccgaaagggttgtagacatggcggccatcaggactgaatctggatatggatctgaatccagcttgcgtcgacatggctcaatggtgtcc

SEQ ID NO: 562491 - DNA, 50 bp, Homo sapiens
agtccggacatctgaaacttggtgggcaccatgtccttgaagcttcaggc

SEQ ID NO: 562492 - DNA, 99 bp, Homo sapiens
aagagaaattaaccctatacctctgacccaggtatggctttgtaattgctgtcaccaccattgacaatattggtgctggtgtgatccagccaggccgag

SEQ ID NO: 562493 - DNA, 75 bp, Homo sapiens
ccggcgacccctgctgctgctactgctgttgctgctgctcggccggtctaattgaagccaacggagaactcaagg

SEQ ID NO: 562494 - DNA, 75 bp, Homo sapiens
aactatgggagttcccaattaacaatgaagcagatgcagacaatctctttgaacatgaattgggggctctcaata

SEQ ID NO: 562495 - DNA, 97 bp, Homo sapiens
tgtccatatggtcactcatttcattcaggttgttgatcattatgaaaatcctagaaacgtggggtcccttgacaagacatctaaaaatgttggaact

SEQ ID NO: 562496 - DNA, 83 bp, Homo sapiens
cagggagcaaacctgagcctgatgccatttctggagcaagtgttcctgctgccagttctttcctctttaggcgtggttgagaa

SEQ ID NO: 562497 - DNA, 76 bp, Homo sapiens
gtccctgaagagggaagacacgcggaaacaggtatttgttactagcagtggaaagtacaatgaacttggatatcca

SEQ ID NO: 562498 - DNA, 99 bp, Homo sapiens
acagaggcaagacaagggtccatatcgcggcatccggctcccgcccgtcttcagattgctgctgcagaaaacaatggaaatgaatcaggtgtaagagag

SEQ ID NO: 562499 - DNA, 75 bp, Homo sapiens
atttggcgccccacgcaggaaggaaactgacccactgaatgagccggcagccagataagctggtggtggtatgga

SEQ ID NO: 562500 - DNA, 74 bp, Homo sapiens
cctatcacagcagcatccgctctctggaggttttgagaacagagtgctgttttagagctggcagcagcatctca

SEQ ID NO: 562501 - DNA, 102 bp, Homo sapiens
tgagttgacttgtctagtcacaggacatccacgtccacaggggctttgttatgcacctaaagccatattggaagctccagaagaaagagcaccccccggaag

SEQ ID NO: 562502 - DNA, 100 bp, Homo sapiens
cggatggctccgcaagtcccccccggagaaaaagttgaagcgttatgaacatcatcttcagcgggctatttcagcacagcaggtgtatggcgagaagagg

SEQ ID NO: 562503 - DNA, 100 bp, Homo sapiens
gattccttcttggggaaactcggagggaccctggcccggaggaagaaagccaaggaggggctctgggtttgcagagagccgaaatgaccatgactgccaa

SEQ ID NO: 562504 - DNA, 100 bp, Homo sapiens
tccggggacccttccgtatctgcctaggcattttgctgtctcctcctaatacgctttccagttctcagggaacaatagaaaccagtcttcaggatatcga

SEQ ID NO: 562505 - DNA, 96 bp, Homo sapiens
aatggaggaacacctctgctttatgctgtacatggaaatcatgtgaaatgtgtaaagatgctcttaggcatctatcgagctgtgcctattcgagtc

SEQ ID NO: 562506 - DNA, 133 bp, Homo sapiens
cttgggactcctctctcaagagaagctgcaagagcaacatctttcctcaccccaaggtcaacaacggttccagcctcagggatgagtgcatcacaaacctactggtgtttggcttcctccaaagctgttctga

SEQ ID NO: 562507 - DNA, 75 bp, Homo sapiens
gaacgaggcaaggagctaaagcagcgtgcgttcagccctggggtgaccctggcaaagatgagagtgcacatttcg

SEQ ID NO: 562508 - DNA, 83 bp, Homo sapiens
cacacagtggcttctgctcaccaacagatgaagacagatgcaccaacgagcatgccaatgaagatgtggaaagaatgttacta

SEQ ID NO: 562509 - DNA, 75 bp, Homo sapiens
ctgcacccacgaatctgcccacccctcctgtaacccagcctgtttcacttcttgagatcccactggcattgttgg

SEQ ID NO: 562510 - DNA, 75 bp, Homo sapiens
gcatctcctgagaagcagaagaccctgtgaaacagccctctccagggtcaccctagaatcagatctgctccccag

SEQ ID NO: 562511 - DNA, 90 bp, Homo sapiens
cggcaccgttccgcggacgtgctcgatgtgtatatctcatgattgatatggagaaactagtcatgggccaaaggtcaagatacttctctg

SEQ ID NO: 562512 - DNA, 98 bp, Homo sapiens
tcccaaggagctgggattacaggtgctgcgggaacccctggagccggccgctctccagcgtgagcttccccgtgaggtggaccaggtacacctggagg

SEQ ID NO: 562513 - DNA, 100 bp, Homo sapiens
aagacatacctgcccgctgtagatgagaaactcaggtgcccctttcggctcctccattgcccccacggccagatctgccccccaggaagcccagaaatgc

SEQ ID NO: 562514 - DNA, 121 bp, Homo sapiens
ctcttaaaagatccaaaaaatgagacttctagcaaagattatttgccttatgttatgggctatttgtgtagcagaagaatttttccgagagctcctggagaatgcagaaaagtcactaaat

SEQ ID NO: 562515 - DNA, 50 bp, Homo sapiens
tggaggccggggagccgacgcctgcaaaacaagctatcgatcagggaaga

SEQ ID NO: 562516 - DNA, 74 bp, Homo sapiens
aaggagtgaattgaaagctaaggaggggctcagtgtgaagatcattcaccgatgaagacagacccagttggatc

SEQ ID NO: 562517 - DNA, 100 bp, Homo sapiens
tgcagaaaacttaatggaggaggctgagattctgtttctggcgtctgcatacgcaagtccccaactcgctgaggagagctgttcagctatggctgctgtc

SEQ ID NO: 562518 - DNA, 100 bp, Homo sapiens
tcaagatcatcttcaaattacctaatgattctcgagtagagagacgattccacttttcacagtctctaacaggaaatgggaatgtccgtggcatcagtgt

SEQ ID NO: 562519 - DNA, 75 bp, Homo sapiens
gctgagacaagaaggaaaattagagaagatccagaccaaggcaggcagaagacgaatcccactccttcaccctga

SEQ ID NO: 562520 - DNA, 75 bp, Homo sapiens
tcggggggcggctctgcgctggccgggggcgcgggcggcggcgccggcaggaagagagcagagctgacatctgat

SEQ ID NO: 562521 - DNA, 80 bp, Homo sapiens
gacgcagccattgccaatgcttttcgacgaattctgctagctgagatgagtcagatgaagccccatgtgtatgatctgcc

SEQ ID NO: 562522 - DNA, 100 bp, Homo sapiens
tgtaaaaccctcagcgacatctttctgcttttcaagagttccgatttcatcactcgtgacttcactcagccacggagtcttgccctgtcacccaggctgg

SEQ ID NO: 562523 - DNA, 74 bp, Homo sapiens
cccagtcttgctgtccctggagcagcatcgaggcccgggaggtgcagctctgtcatttccactctgctctgctg

SEQ ID NO: 562524 - DNA, 75 bp, Homo sapiens
tcactctgctggtggactatacactccagacctcgcttagcatgaagtgtggcccccggctgtcagcagaggctg

SEQ ID NO: 562525 - DNA, 75 bp, Homo sapiens
gtcagggggactgcaaaggccaatgttggtgctggcaaaaaggcctgtctccactaactctggaccctaaaacag

SEQ ID NO: 562526 - DNA, 82 bp, Homo sapiens
ccgcgcgcctttgtgcgcgcgccgaggtgcagattcactttataggaacagcttcagcttcagtgatgaaaaactgaattct

SEQ ID NO: 562527 - DNA, 97 bp, Homo sapiens
cttcaagggcgtgctcagtatctacaaagacccaggattgccagcagtgagtatccctgttgcactctcaaaccaagggttgccaataggactgcag

SEQ ID NO: 562528 - DNA, 74 bp, Homo sapiens
gccacagacagcagcgcagtaccaccttccagagatctcctggaatgaggccgcccatgggaggccatatgcca

SEQ ID NO: 562529 - DNA, 100 bp, Homo sapiens
ttttggcttctgcatccccagcagtaggaacacttgtgaacatatctatgagtttccccagctttcggaggatgtcaatgcggtgacctgccagcacctg

SEQ ID NO: 562530 - DNA, 78 bp, Homo sapiens
actacagatactttgaagtagaagaagctgatggctatgggtacacaacgccactgactgatgcgggcaaggccttct

SEQ ID NO: 562531 - DNA, 96 bp, Homo sapiens
ccgggatctcaggtcctcgggggcggcggccacgccaaggacgggtagcagcaattgcagagacagatgaatctgcagaatcagaaggtgtaattg

SEQ ID NO: 562532 - DNA, 101 bp, Homo sapiens
cttatctggagcaaggaaaagagccctggaatatgaagcaacatgagatggtggatgaacccacaggaatccagatcttacataagatggaagtctctcac

SEQ ID NO: 562533 - DNA, 96 bp, Homo sapiens
aagagagctcgacttaacaagattactgttttatgtgatagaatatgcagcatgtgatgcaacttacaatgaaattgtcacaattgaacgtctaag

SEQ ID NO: 562534 - DNA, 97 bp, Homo sapiens
aagacgaaagtcggcacgacgcgctcgacacgcgggtgcggggcgacctcggtggcccgcaggtgatctgcaactctttcaccatctgtaatgcgga

SEQ ID NO: 562535 - DNA, 75 bp, Homo sapiens
attgtagagccatatattgcatggggggtctgcatgctgggtaaccgcaccctttcatcaagacacattgacgtt

SEQ ID NO: 562536 - DNA, 75 bp, Homo sapiens
caagatggaggcgctgattttgtcttattgccagcagttttgaagatgactcccgtgtagcctcaccgttagacc

SEQ ID NO: 562537 - DNA, 80 bp, Homo sapiens
ctccttcagcctcctggcgcccatccgcagcaaggacgtccgcagcaggaggatttgatgaagatgttaaagcgaaagtg

SEQ ID NO: 562538 - DNA, 101 bp, Homo sapiens
cacaggtagccctggacggcattcagtgttttggcttagagaagaaaacgcaggttctgcagcctgaggagaagaagactgtggcataccacgaagcaggc

SEQ ID NO: 562539 - DNA, 126 bp, Homo sapiens
cgacctgcagggactggcagacccgtagctaagacgccaggatttcctggaagcagagaaatggtgaatgaaaactttgccattgatttgatagcagagcagcccgtgagcgaggtggagactcgg

SEQ ID NO: 562540 - DNA, 83 bp, Homo sapiens
gtgcggtttactcctcatgccgagatggaccttgggcagctcagttcacaagttcaaatctgaacatcaatgatgtactaggg

SEQ ID NO: 562541 - DNA, 48 bp, Homo sapiens
tcctggatcgacaccctctacagcagatgtggggcaatcaagttgggg

SEQ ID NO: 562542 - DNA, 90 bp, Homo sapiens
ataatatagctggtattgaagagatgccatgaagtacaccattgtggtgtcggctacggcctcggatgctgccccacttcagtacctggc

SEQ ID NO: 562543 - DNA, 83 bp, Homo sapiens
ctgggcctgtctcctggatgcaccgcattcaacaatgcagatcttcgtgaagactctgactggtaagaccatcaccctcgagg

SEQ ID NO: 562544 - DNA, 82 bp, Homo sapiens
cggaagcggagagcaacagcgcgccggcgaagagaaaggcatgcaaagacaatagatatagctcaagaagaagttctgacct

SEQ ID NO: 562545 - DNA, 88 bp, Homo sapiens
gagacagcaccctctatgcgactgctggcctatgatcattcccgagaagtgttggagcaattagtaggcccaaacaaactaaagcaag

SEQ ID NO: 562546 - DNA, 50 bp, Homo sapiens
tgagaaacccggcaatgaaaatacaaactggactctcaggacaaaacgac

SEQ ID NO: 562547 - DNA, 98 bp, Homo sapiens
tgaagaaaatattaaaaagttagcagaccagtttttagaggaacaaaagatgcttgctctgtcaaggcacagcctattgtctcctttgctcagtgtga

SEQ ID NO: 562548 - DNA, 100 bp, Homo sapiens
cgacgcggaggcagagaagggaacgcccggcccagccccgttacctacctgggcaaagtctccaccactggcatgcagtttttgtcaggctgcacagaaa

SEQ ID NO: 562549 - DNA, 100 bp, Homo sapiens
gccacagcatcctccagcacctcagtcactctctgaaagagaacaaagtaattttctgaagggaagctgcagaatatggaaaacatatattggagctaca

SEQ ID NO: 562550 - DNA, 75 bp, Homo sapiens
cacagaccgaggaggtggatcacaggcttctcatcgaatgaaaactccagtcaagtacatgaccgggaccactgt

SEQ ID NO: 562551 - DNA, 100 bp, Homo sapiens
gggtggaggttcgagcgctgttctcgctccggagccgctgcacatttcggtggtttcagacaccctcacaggttttctaccatgcagcaactgaacatgg

SEQ ID NO: 562552 - DNA, 90 bp, Homo sapiens
gctgggccgggtttcggcttcggccacagggaaatcctcattgacgattcaatttgttgaaggccaatttgtggactcctacgatccaac

SEQ ID NO: 562553 - DNA, 90 bp, Homo sapiens
ggggacctcttcaatgtcaatgataactctgaatatgtggaaactattatagctgctctgttaaaagcgaaaatgaaacaattgcctgcg

SEQ ID NO: 562554 - DNA, 100 bp, Homo sapiens
agccataatttcatcaagtgatgactcttcggatgaggataaacttaaaattgctgatgaagggcttgcagcttttctatggcaagaagcagccgggaaa

SEQ ID NO: 562555 - DNA, 100 bp, Homo sapiens
gttcggccgcaagaagcagagccgcgtcacggagcaggacaaggccatcctgtctaatactagtaatgagatgaagctaccgtcactgaaggatatttat

SEQ ID NO: 562556 - DNA, 74 bp, Homo sapiens
ggactgtggccgtgggggacatcgtctgggtggtacaggagctgcagcaggccatctccaagctggaggcccgg

SEQ ID NO: 562557 - DNA, 75 bp, Homo sapiens
ctgaactggacggacataccagtggccatgggaccatagaattttttggctgattacaggaattatgttcatggg

SEQ ID NO: 562558 - DNA, 100 bp, Homo sapiens
cggcgggaggcggaggcgagggtgcgatggcgcggagcccgggacgcgcgtacgccctgctgcttctcctggtgaccaggtggcctgtaggaaaccaagg

SEQ ID NO: 562559 - DNA, 75 bp, Homo sapiens
caaacattatcactctaaaggatgtttttgaccaatatctcaattttattactttggaagatgatatgtttgtat

SEQ ID NO: 562560 - DNA, 75 bp, Homo sapiens
ccaatgcaccattccagatccggcacagtgacccagagagtgacttttatcggtggtggaagatggatatgaatt

SEQ ID NO: 562561 - DNA, 74 bp, Homo sapiens
accatagaagatgttcctccctggtacctgtgtatatttctggggctacaggtccaggttcacactagaaggcc

SEQ ID NO: 562562 - DNA, 98 bp, Homo sapiens
ccacctcctgacacaacaccactcatgagagggtccaagcctggtaagaatgtccagcttcaggagaatgaaatcagaggactgtgcttaaagtctcg

SEQ ID NO: 562563 - DNA, 82 bp, Homo sapiens
gagcctcaggcggcagcgcttctagaaaacccatatagacagctgccttgtaactgtcatggaagcatgcctggaaagacag

SEQ ID NO: 562564 - DNA, 100 bp, Homo sapiens
gacgggcacatatgtccaggaggagtctccggaagcatggccggactcccctgcatcttgctgccaataagggccatcttcctgtggtccagatcttgct

SEQ ID NO: 562565 - DNA, 80 bp, Homo sapiens
caccatggacaagctggtgcagaacattgcgcggcagttttccaagagataacttcaccaagatgtccagtgataggcaa

SEQ ID NO: 562566 - DNA, 90 bp, Homo sapiens
ggcgatgcttgtgaccctgcagctcctcaaaagttcggaatccagcattaagaagaaatttctcaagaggaaaggaaagaccgacagtcc

SEQ ID NO: 562567 - DNA, 100 bp, Homo sapiens
cgtgaccagtggccacctctgcagtgtcttccacaacctgggtgtgcaactgaggaacatggctcaagaaactaatcacagccaagtgcctatgctttgt

SEQ ID NO: 562568 - DNA, 101 bp, Homo sapiens
cctgcccccaggagcctctcaggggtgtggtggctcacgtctgtaatcccagcactttgacaggctgagcgagggagtggatcttgaggtcagcagttcga

SEQ ID NO: 562569 - DNA, 98 bp, Homo sapiens
ctaactatttagaaagcattctaatgccaaaattggaacataaggattctgaggttacctacctgggcaaagtctccaccactggcatgcagtttttg

SEQ ID NO: 562570 - DNA, 74 bp, Homo sapiens
ggcttccgagactccgggcgcaacagccattgccgaaatctaaaaaaacttgtagcaaaggcagtaaaaaggaa

SEQ ID NO: 562571 - DNA, 74 bp, Homo sapiens
atgtcttattggctaaataacttctctggatggtcgtcagatccgtgtggatcatgcaggcaagtctgctcggg

SEQ ID NO: 562572 - DNA, 75 bp, Homo sapiens
cacccagtggtgacccctgccctcgtgtgcctcagtcagctgctcaccaagcgggctgacgcacgaggcacacag

SEQ ID NO: 562573 - DNA, 82 bp, Homo sapiens
cttcttgcggcgcctcggctcctcccaggtggcctcccgcgtgctggccatgaaggtgtggatgtggaagcagccaagcggg

SEQ ID NO: 562574 - DNA, 75 bp, Homo sapiens
ggggcgcagggaaggagggcgtccgagtcaacaaccgcttcgagctggtgagcatgggtttatgcgtcttaggca

SEQ ID NO: 562575 - DNA, 82 bp, Homo sapiens
catcactgaagagcagacccgtttgggttctccacgcattctagactcccgaagagtgagacggtttaagcggaagcatctt

SEQ ID NO: 562576 - DNA, 83 bp, Homo sapiens
gtgctttgcccaaggagatggtctcattaagtcgtcattgaattttgagaagcattctgaaaactttgcatggacagagaatc

SEQ ID NO: 562577 - DNA, 98 bp, Homo sapiens
ttccctgccctgacctggaacctctgggagggctgcagagaatcgggcgcctgattgctgagtgtcatctcaaccccatcatcctgcccctgtggcat

SEQ ID NO: 562578 - DNA, 98 bp, Homo sapiens
ccgggacctgggctgggaacccgcggtggagcgggacacgaacgtgttccagggtctccctccactgctgtagtaacccgggtccggggcctcggtgg

SEQ ID NO: 562579 - DNA, 75 bp, Homo sapiens
gctacgtgatccatctggctcctccaaacttaattcagtgcacaaatgagatgaatgtgaacatcccacagttgg

SEQ ID NO: 562580 - DNA, 75 bp, Homo sapiens
aaagagcgtagtaggagatcaactcagtgaaccagccaagggaaattcctcgctgccggactgcgcccacccttg

SEQ ID NO: 562581 - DNA, 51 bp, Homo sapiens
agagacaaaactgcagtacaggtttttgagcagctaccaagggggtgccag

SEQ ID NO: 562582 - DNA, 100 bp, Homo sapiens
gccgggagccgccgccatgggggcctgcctgggagcctgctccctgctcagctgcagatcctgaaggagctagacgagtgctacgagcgcttcagtcgcg

SEQ ID NO: 562583 - DNA, 50 bp, Homo sapiens
tcgacctaaagcctgactggggcaagctggattatcaccgaggcctcttg

SEQ ID NO: 562584 - DNA, 96 bp, Homo sapiens
cggcctggctttctgcgccatcctgcaccgccaccggcccgacctcatgtcggagctcttaggcctgctgaaaacctacaactgctaccatgaggg

SEQ ID NO: 562585 - DNA, 75 bp, Homo sapiens
cgcagtggtcgcttcttctccttgctgtgttccagatcatctccctggtaatttaccccgtgaagtacacccaga

SEQ ID NO: 562586 - DNA, 100 bp, Homo sapiens
gccttcctcttctgcatcctctggtccctgctcttccacttcaaggagacaacggccacacactgtggggccacccgggaccttgcccagtacgacgcag

SEQ ID NO: 562587 - DNA, 75 bp, Homo sapiens
cccgccactccagaaatccaggagattgttgataagttgaaatggatgcagtcagaactgaatgttgaagaagtg

SEQ ID NO: 562588 - DNA, 100 bp, Homo sapiens
gtcaggtggttgcggagctggtaaggtaaaatgtcggttccaggaccttaccaggcggccactgggccttcctcagcaccatccgcacctccatcctatg

SEQ ID NO: 562589 - DNA, 98 bp, Homo sapiens
gcacgtggaattcgcgaagctgccaaagccttagacaatactaaaataggtgccattttaaattcccagacaaggaaaaaccaaggattagaaattaa

SEQ ID NO: 562590 - DNA, 82 bp, Homo sapiens
cagttgcaggagcggatggagttgctgcaggcagagggagccacagatgtgaagttcatttccaatccgccctccatggtgg

SEQ ID NO: 562591 - DNA, 49 bp, Homo sapiens
gcatgtgactccccgcagcctggacagtgctgctgctgctgggaggacg

SEQ ID NO: 562592 - DNA, 97 bp, Homo sapiens
ccgccgcagaggaaagcgggctggcaggcgagggagcccgcgtcggctgagagcccacaggcccccacaggctctccccggaggctcagccccctct

SEQ ID NO: 562593 - DNA, 101 bp, Homo sapiens
ttttctttgtcaacaatgtcattccacccaccagtgccacaatgggtcagctgtaccagaccaccgccagtcctcccaccacatccatcacccactgtcca

SEQ ID NO: 562594 - DNA, 128 bp, Homo sapiens
gaaggatatcgacgtcgtgatccagaagtccagagctgaggactgcctgtttgcagagtgatcagcagctggactgtgccttggacctaatgaggcgcctgcctccccagcaaatcgagaaaaacctc

SEQ ID NO: 562595 - DNA, 118 bp, Homo sapiens
ggattgtgggagtctccgcgtcccgctcgctgggagagaggtacctctccttttccctctccctttccctaagggcgcaccctacgacgcgcacaccaccggcatgaccggcgccatc

SEQ ID NO: 562596 - DNA, 100 bp, Homo sapiens
tttcgccagcccgtgccgcgagcgcggcctgcaggagcccgcggcgccatggctcacgtcggctcccgcaagcgctcgaggagtcgcagccggtcccggg

SEQ ID NO: 562597 - DNA, 100 bp, Homo sapiens
gcgcccggagcaagcggagctcccccaagagccggaaagcagcgatggattttgggtggggaagtcctccttgcggagttggcgccagctagctcttgaa

SEQ ID NO: 562598 - DNA, 136 bp, Homo sapiens
gctttcgcaccagtcgtcagaccccagacctccccacctcccacctgcaccagcaccaacgggaacagcctgcaaggtcctcgaggccacacgggttaatcgaagaaagagcgcactggctttgcgctgggaagca

SEQ ID NO: 562599 - DNA, 98 bp, Homo sapiens
agacatgcgcctcatcttccagaaccacagggcctcttacaaggaaccctgattgctgtccttcaacgtgttcattatgaagttattagtaatacttt

SEQ ID NO: 562600 - DNA, 50 bp, Homo sapiens
cggtcatatagagatgtcatgaaggaccgtgtttcttcgcctcgcctccc

SEQ ID NO: 562601 - DNA, 100 bp, Homo sapiens
ccgaggccttcaagtgcatgatgtgcgatgtgcggaagggcacctccacccgaacgccaatctgaattgccaacgcaaagcaaagcgagcttccccagta

SEQ ID NO: 562602 - DNA, 100 bp, Homo sapiens
cggaagacgacgaggactgctatggcaatctgtgtcagcgtgttatgatgccgtcccgtaccaacctggctactggaatccccagtagtaaagtgaaata

SEQ ID NO: 562603 - DNA, 98 bp, Homo sapiens
ggcatctaagaaatttgctgttaaataagagttccctatttcattgatttgaaaaaaccacaggatcaaggtttgaatcacacgtgtaactactacct

SEQ ID NO: 562604 - DNA, 85 bp, Homo sapiens
ctcttagcagcgcgcggagaagaacggggagccagggctgaagaagatgcagagcagcctgaagctggtggactgtatcatcgag

SEQ ID NO: 562605 - DNA, 100 bp, Homo sapiens
agaaagccattcaagaattcgtgcccgccctggaaactctttccaagaacttggacatgaaggtagtggaggacatgctagaggacgaggaagaagaaga

SEQ ID NO: 562606 - DNA, 74 bp, Homo sapiens
acttttaaagatgcagaggatgctttgcagaaacttcataaatatatgcagggaactctaatgatccaggacaa

SEQ ID NO: 562607 - DNA, 134 bp, Homo sapiens
cgggtcaataggagccagtccttcgcaggcgtcctcggcagccacgagcgggggcccaggtctccgtgaggccgggtgacgctccagaatgggagacaagccaatttgggagcagattggatccagcttcattc

SEQ ID NO: 562608 - DNA, 129 bp, Homo sapiens
tgagccacgtgcatgaaccaaacccacttcgttcaagacaggtgtttaagccatctgacgacaccaaaaagaagatgtacagctccatcctagtggtgggaggtggtttgatgtttcataaagctcaag

SEQ ID NO: 562609 - DNA, 75 bp, Homo sapiens
agtgcagctgcctcagttcttagcgcagaacactcgtgaaactgctcaggccatcaagggtatgcatatacgaaa

SEQ ID NO: 562610 - DNA, 98 bp, Homo sapiens
gtggccaaaatggggattacagagtataacaatcagtgccgagcaattgtgatgagatattctgctgagtggaagggaggtggggaagacagggctcc

SEQ ID NO: 562611 - DNA, 100 bp, Homo sapiens
ggaagcctttaccaacgccatcaccgacctcatcagtgagctgtccctgctggaggagcgcttccgggtcatcatcagatttgaaatatttaaagtggat

SEQ ID NO: 562612 - DNA, 101 bp, Homo sapiens
ccaaggtgaacccgtggactaagaacgcattgccgccggtcctgaccaccgtgaacggacagtcccccccagcagaaaaagtcctacctggagcgaagcgt

SEQ ID NO: 562613 - DNA, 100 bp, Homo sapiens
aaaaggaggacgtttgcagccagatatttcagattttgtgtcatgtatagagaactacagaagaagaggacaagagctatatgcatctttatacaaagac

SEQ ID NO: 562614 - DNA, 100 bp, Homo sapiens
attaatgaagatcaatttcaagaagcatgcacttctcctcttgcaaagacccatacatcacaggaattcctcctgatcagcagagactgatctttgctgg

SEQ ID NO: 562615 - DNA, 80 bp, Homo sapiens
ctgggcattgaaggtgccccccagttgtggtcagaaatgagaagacatgaaatgttgagggaggagctgcgacagagaag

SEQ ID NO: 562616 - DNA, 76 bp, Homo sapiens
tgtccccgcagttttcaatcatgatctgaattctacaaacacattgtgctttctggagggtctactatgtatcctg

SEQ ID NO: 562617 - DNA, 82 bp, Homo sapiens
taccatctttgtggctgtgcttgccaggcctggctccagtgtggacactgccagcggctgcagccgacttggaatgacctgg

SEQ ID NO: 562618 - DNA, 82 bp, Homo sapiens
ccccgctctgctgtgggcgctgctggcgctctggctgtgctgcgcgacccccgcgcatgcttttaggacaactggaaaacac

SEQ ID NO: 562619 - DNA, 84 bp, Homo sapiens
atgtcgggttattcgagtgaccgagaccgcggccgggaccgaggggcttgtcaatgaggcagatcagattcaggttcgacgggc

SEQ ID NO: 562620 - DNA, 74 bp, Homo sapiens
tctacaccaccgccacactcatcatagccttcacctctgcaggtacaggtttgcagattccgccagcagcacag

SEQ ID NO: 562621 - DNA, 96 bp, Homo sapiens
cgagcgggcggcttcctggcctgggcgctccggtggcggcggaggcacattcaggaccccgcgagccagcggctgacgtggaacaagtccccaaag

SEQ ID NO: 562622 - DNA, 82 bp, Homo sapiens
ggggacggccgtggccgtgttcgaggaagtgcattttcagctgagcacctcaaacttcaactccagaaggaatccctaaatg

SEQ ID NO: 562623 - DNA, 100 bp, Homo sapiens
ctcatgaagactgtgtaaataatatcaggtgcaagaaagcctttgaggtgaaggtgtatgaaagtcatcataacagatgttttccaaaaacttgtagaag

SEQ ID NO: 562624 - DNA, 100 bp, Homo sapiens
acaacagccgcaccactacgtggaacgacccgcgcgtgccctctgagggccccaagggggatatgagactttctactcggaatatcctgagtgttgcgtg

SEQ ID NO: 562625 - DNA, 74 bp, Homo sapiens
agcaccatgtacgacatgcaggcgctggaggtggtccaggccacgctggtggtcctggccttggccatggtgcc

SEQ ID NO: 562626 - DNA, 90 bp, Homo sapiens
gaaacaccatggctgcggcggcccagctctctctgacacagacccctgaatggttggacagtgattcctgccaaaagtgtgatcagcctt

SEQ ID NO: 562627 - DNA, 75 bp, Homo sapiens
ctcgtctcccgctccgccctcccttttccctgaccggaacatgaacattttgcagtactgcccctcttccgacat

SEQ ID NO: 562628 - DNA, 89 bp, Homo sapiens
ctccaggacctgggttgatgctccggcaaaaatctatcggcctccccagcccggctgccccgccttcatcatcgtcaagctgagcccgc

SEQ ID NO: 562629 - DNA, 50 bp, Homo sapiens
ctcccaaggtgctgggattacagggaagatgagtggctctcggcagcaat

SEQ ID NO: 562630 - DNA, 50 bp, Homo sapiens
ggaagacgcgctcctgcgccgaagagatcacaaaatggctcttcttcaga

SEQ ID NO: 562631 - DNA, 90 bp, Homo sapiens
gcacgaagttcagcccagaggagaaactcgctcgccttcagaagacagctccatttatcttaaagaaattggacagcatatgaagacagg

SEQ ID NO: 562632 - DNA, 95 bp, Homo sapiens
aagtgtgtgaagggacagcctcatgatcacaaacatttaatgccaacccaaattatacctggttctgtaaccccaagaaaggcatcagggttctg

SEQ ID NO: 562633 - DNA, 83 bp, Homo sapiens
ggcgtcccccagggcctcggcggccgctctgcctgcgcgctgctcctgctctgctacctggatccaaggagctggttctgctg

SEQ ID NO: 562634 - DNA, 89 bp, Homo sapiens
tcaacacttttaccttctaccattgatggctcacttatctaaagaatatgaggaggctaatttcagagctatatgtgcgagataactgc

SEQ ID NO: 562635 - DNA, 100 bp, Homo sapiens
ggcagacacatcgaggcccatcgcatcctgctggctgcgtcctgcgattacttcaggcatagaatgtcaagctaaccaggcgtccgctacttcagaagag

SEQ ID NO: 562636 - DNA, 75 bp, Homo sapiens
gcaggaaaggagtggacacagtagggtgaagttgaacaaattgctatgatgaaaccaaaaggccagactgaacac

SEQ ID NO: 562637 - DNA, 100 bp, Homo sapiens
gccgggatgttgctatagatgtggttccacctaatgtcagggaccttctggatattttacgggaaagagggcggcgactggcggcgcgatggacctgacc

SEQ ID NO: 562638 - DNA, 83 bp, Homo sapiens
cctcaaggccatgatcaaaactaagactttgaccccgacgcaggcttcagtgattgccgcggatcagaagcctgagcactttg

SEQ ID NO: 562639 - DNA, 88 bp, Homo sapiens
acagcagccggcccttgttaactacaacagaccatctgatgtgaatcccgatggagcggcccgaggaaggcaagcagtcgccgccgcc

SEQ ID NO: 562640 - DNA, 88 bp, Homo sapiens
attcaatcaattctttgtgactcctcgatcttcagttgagatccgatcacataggacagtatgcaccttaagatcctgaagaaacggc

SEQ ID NO: 562641 - DNA, 100 bp, Homo sapiens
ggtgccctgatgtctgctttcagtcctgaaaagctgaacgagattgtagaaggcatgaaacaaaaaatgtggagtattgaaaatattgccttcggttctg

SEQ ID NO: 562642 - DNA, 75 bp, Homo sapiens
ggagccaagtgtggcagcagttcgtgaagtctgtgaggagatacgtaggtaacctttccagagatgtgacagaag

SEQ ID NO: 562643 - DNA, 100 bp, Homo sapiens
ttgcatcagaaacagcccaggcggtgagagacacagccacactcagcggccccagggccgcgatgggcctcttggaacattggtgtgttcatctgcattc

SEQ ID NO: 562644 - DNA, 112 bp, Homo sapiens
ctcagatcctgtactgtcgggacacctttgaccacccgactctcatagaaaacgagagtatatgcgatgagtttggtacctatggagttgtgtataagggtagacacaaaac

SEQ ID NO: 562645 - DNA, 75 bp, Homo sapiens
ccagcgacaaatttagagaaacctcggcagattcacagtctgagaatgaggcttcaccagtaaaacggccacgac

SEQ ID NO: 562646 - DNA, 100 bp, Homo sapiens
ggagaacatgcaacagtacgttttgctggtgttgtccctcccgtggcaggtcctggacccaagccagaagcctctgcaaagcttccttccagacctgcag

SEQ ID NO: 562647 - DNA, 73 bp, Homo sapiens
ggacgagagctgggccctcaaggccatcgaggcgctttcagaataatccagaatggctactctgatctatgtt

SEQ ID NO: 562648 - DNA, 80 bp, Homo sapiens
gccgcagccccccaatgcggccgcgagaagcagcgggggggcaggcgatcgaaggcataatggttatgaaagcttctgta

SEQ ID NO: 562649 - DNA, 100 bp, Homo sapiens
gggccaggacagcgacagcgatcagctgttttacaccaagatcttcttggacccggagaagaggaaagctgccttggaagacacactggcagaaacggag

SEQ ID NO: 562650 - DNA, 50 bp, Homo sapiens
ggtgccatttgtcatgtgccacctggaggaatgccagctcctgagcaggc

SEQ ID NO: 562651 - DNA, 75 bp, Homo sapiens
agagccatactgcgttatagcggccgtgaatttggtgcttccagatgtgagttatcaggtggaatccagtgagga

SEQ ID NO: 562652 - DNA, 100 bp, Homo sapiens
gctccagccgaaggagaaggggggtcaccatcagaaaagctaagtttgctgtatagtgaggatcaggagatctgatcctgattgcagaaccttccctgat

SEQ ID NO: 562653 - DNA, 107 bp, Homo sapiens
tactggaggttttggctctgcgtgagtgtggtctacgagctgtttctcatctttatactcttccaggtcttgagtcaccacgtccgaatataattcttgggttagta

SEQ ID NO: 562654 - DNA, 75 bp, Homo sapiens
cggtgcctacaacttcccctactgcgaaggttctgtccatgacggcacagccgggccctggccatgggaagaagt

SEQ ID NO: 562655 - DNA, 101 bp, Homo sapiens
cctgacattcagatcaagcacagcagcctcatcaccccgttacaggccgtggcccagatggagctggaccttcaccagaagcatgtcgtaaactcttggga

SEQ ID NO: 562656 - DNA, 80 bp, Homo sapiens
gattcgcagtggtcgcttcttctccttggtacaatgactcttcttgcttttcacctaagttgaataagcaccctgtgcac

SEQ ID NO: 562657 - DNA, 96 bp, Homo sapiens
atgtttctctttgaaggatattttggaaccatcctctacacagacttcattagaggggtggtagactcggaggatctccctctaaacatatcccgt

SEQ ID NO: 562658 - DNA, 113 bp, Homo sapiens
taccagatggaacaacggttacagtcagggttaaaaagaacagtactacagaccaagtatatcaggactcctcctatttatggagcaggcacccaacatggctgagccccggg

SEQ ID NO: 562659 - DNA, 75 bp, Homo sapiens
gtggcaaaatcccttgttaaaggaggtctgtgccggagggttcttgttcagtttttttcaccgctcaaccctgtg

SEQ ID NO: 562660 - DNA, 95 bp, Homo sapiens
tacttttggggaaatggcagatgcgttcaaatctgattacttcaacatgccagtccattgatgatgatgatgattttgatgatgaggaagctgaa

SEQ ID NO: 562661 - DNA, 75 bp, Homo sapiens
ccgcggttccaccgctctgaaaccgatttctaacagagaggtgagatttcaatggaaaaagtgaaggtaaagcgt

SEQ ID NO: 562662 - DNA, 73 bp, Homo sapiens
ctatgaataccgcttcctggagttcacgactctgagtgctgtttcagcccaaggctatgagtatgacaatctc

SEQ ID NO: 562663 - DNA, 75 bp, Homo sapiens
cagtgacggaatgcctccatacatctccctgtgctgtcaggaatctacaggacttggctcgtatttacattcgac

SEQ ID NO: 562664 - DNA, 90 bp, Homo sapiens
atttgttaaggattccaagtaactcttatttggtggctgtacttttgatgatggtccaggggcctgtgattaccaccaggatctgtatga

SEQ ID NO: 562665 - DNA, 100 bp, Homo sapiens
aggttatgaagacaaaccagatacttcttctagcaaaaataaagacccaataacgattgttgattggaccacagaccagcagctgatccaggttattcgc

SEQ ID NO: 562666 - DNA, 74 bp, Homo sapiens
gtcgaccacagtattccaaccctcctgtgcagggagaagtgatggagcttaattggcttagtgtcgacttcaat

SEQ ID NO: 562667 - DNA, 75 bp, Homo sapiens
atttacaagaagctgagcaaaccaaaaacagtggcactgagcactggtaatagcctgcagctggtgttttgagaa

SEQ ID NO: 562668 - DNA, 100 bp, Homo sapiens
agtacatgcccagtggatactccatgtgacatggtttctccctatgttacgtggatgtttgtaacaagatcaaattcccaggggcttccctaccattgac

SEQ ID NO: 562669 - DNA, 90 bp, Homo sapiens
ccgcggcccccggtggtgggctcagccggtcgagctgcgcgggagtgttttccaagcagtgaagcacttgccgtgttgaactgaatgcac

SEQ ID NO: 562670 - DNA, 83 bp, Homo sapiens
ctacagctaagacgccaggaacccctggaagcctagaaatgcttcccttgccagacaattcctctgtcgggtgtggccaagtg

SEQ ID NO: 562671 - DNA, 100 bp, Homo sapiens
agcacatggagcaagagctgaaggcacaaggacaggagcaggaacaggaacggcagcatgctacaaccaaacaggatgtgggctctcttgatgagaagat

SEQ ID NO: 562672 - DNA, 75 bp, Homo sapiens
tgaagagggaagacacgcggaaacaggaagctgaagagggaactacccttttcattccgatcaattaatacgaga

SEQ ID NO: 562673 - DNA, 106 bp, Homo sapiens
tcagcctcctgagtacctgggattacagatgccggtgcagctgacgacagccctgcgtgtggtgggcaccagcctgtttgccctggcagtgctgggtggcatcctg

SEQ ID NO: 562674 - DNA, 101 bp, Homo sapiens
agaaagttggtttatggataaaaatgacaatgaactcctaaaattgattccattcctggagaagcttgtagaactgcaacgtgaaatcctgcatgagattc

SEQ ID NO: 562675 - DNA, 82 bp, Homo sapiens
gcccgcgcccgggaccgacccctctgctcgcggccgcgcctttgaggtgagaagccctaccactgcaactgggacggctgcg

SEQ ID NO: 562676 - DNA, 100 bp, Homo sapiens
gaaatgatacaattacctgcacgacacatggaaattggactaaattaccagaatgcagggttgaaaatgacccacatttcatcatttatctaccaaaaag

SEQ ID NO: 562677 - DNA, 96 bp, Homo sapiens
cgaagtctgtggtttatcattgtaatcagcttcttaccaaatacagaaggtttagatcctgataagcatcttgggaaaaccctggatcaaatggag

SEQ ID NO: 562678 - DNA, 100 bp, Homo sapiens
gagatggagcgggcgcactgggaggtggaacgggccgaactgcaggtggtggctaatgccgtagcggcattatctgaaatcagtgagtctcacccaaaca

SEQ ID NO: 562679 - DNA, 75 bp, Homo sapiens
gctgccgcccatgctgcagcgggtgaaggagcttgttcagattattatcaatacaacacatttggagaaatcctg

SEQ ID NO: 562680 - DNA, 75 bp, Homo sapiens
gaaaggaggcccctgccgtgtggacccgtaaaataaaatgggctgtgggtgagcgtggaggatgctcagatgcac

SEQ ID NO: 562681 - DNA, 100 bp, Homo sapiens
ctcgcctggtccgatctcttcttgatctgtttcttgatatggaagcagctacagggcaggagactggattatggacagaacttggaaatattgagaataa

SEQ ID NO: 562682 - DNA, 82 bp, Homo sapiens
cttgggcgcgcagatacccgcggtgcaccgcctgctgggagcgccgctcaaggtactccaaagattcaggtttactcacgtc

SEQ ID NO: 562683 - DNA, 74 bp, Homo sapiens
atgatgatcccttggaggcattcatggctgaagtggaggttgggagccacgtgtaccagtgtgtgttgatcttg

SEQ ID NO: 562684 - DNA, 90 bp, Homo sapiens
tggctcaatagcaagaatgtgtgcccttaatgaaggctctaattcggccacttccaagtcaacaaatgtttgaacatatgcagaagagac

SEQ ID NO: 562685 - DNA, 74 bp, Homo sapiens
aaaaatcctggatctgtatgctttgagcaaggatgtaatccctgttcattactacttaatacctccaccaacaa

SEQ ID NO: 562686 - DNA, 80 bp, Homo sapiens
cctggaggcctgggaagccaacgaccacacgcagtccagcaccatgtgctaggtcactcccagcgcgaggccacacctgg

SEQ ID NO: 562687 - DNA, 50 bp, Homo sapiens
ctgtccagcacagccccacagggctcagggcaacaaaccatggatttctc

SEQ ID NO: 562688 - DNA, 101 bp, Homo sapiens
cgggaggccccatcccgccaggtttctttcaggttaatgttgaagaaggaaaatgcggaagtcgtcatttgacaagttttataaatgagtatttgaagctc

SEQ ID NO: 562689 - DNA, 75 bp, Homo sapiens
ggggtctatttgaagaaatgaagaaaacagcaaacaacaatgctgtacagcttcttggacacttaatgattgttg

SEQ ID NO: 562690 - DNA, 75 bp, Homo sapiens
gaattctttttgaaagctgcctgcggcaaaggaccctgatgctcccataagacagaaaatgccccttgatgatct

SEQ ID NO: 562691 - DNA, 75 bp, Homo sapiens
gagagcgtgaccgagagcgcgaatatcgtcatcgttagaagctctcgtggcattatccttcagtggggctattgg

SEQ ID NO: 562692 - DNA, 75 bp, Homo sapiens
cacttgaacagactagaaattgcaccacagatatatgggttccgccgccatgatcctgctggaggtgaacaaccg

SEQ ID NO: 562693 - DNA, 89 bp, Homo sapiens
ggaatgccagtgcatcttttgcacagctgtccatggaattgtacggcggtccagttcatttaatacgggtcgaattgagcatctgtata

SEQ ID NO: 562694 - DNA, 98 bp, Homo sapiens
aaaatatcaacgatgaaagagtatttgcttgactgtagtagactctgatggagctaccaactctactactgcaaacctgacagtgaacaaagctgtgg

SEQ ID NO: 562695 - DNA, 73 bp, Homo sapiens
aattttgtctctctaaaagacattaagcatgaagaggaaccacctcagaatatgaaaccacaatcaggaaacg

SEQ ID NO: 562696 - DNA, 82 bp, Homo sapiens
aaaaccagaagaagttagaaggtatccgaccggagagcccagcccagatgatgattattctccaccgtctaagagaccaaag

SEQ ID NO: 562697 - DNA, 75 bp, Homo sapiens
agaaatacctgcagactcgggccgtggccgcctacagagatgtgataatggatcatcatgtttctaccatcaagc

SEQ ID NO: 562698 - DNA, 75 bp, Homo sapiens
tttacttctggatgccaatctgaatatcaaaatagcaggtcacgagaagagaatgccttctagatgcaaaatcac

SEQ ID NO: 562699 - DNA, 100 bp, Homo sapiens
gttgattgaatcaacaagcactatggatggagcaattgctgctgccttgctgatgtttggtgatgcaggtgctggagaatctggtaaaagcaccattgtg

SEQ ID NO: 562700 - DNA, 101 bp, Homo sapiens
ctttattccaagtggctcatgatcccgactgtggagatgtggtgcgactagatcgaacggttggaagtaagcagccttgcccaaacatccagtgcagtggc

SEQ ID NO: 562701 - DNA, 100 bp, Homo sapiens
caagccagaagaaatcaacctgctcaccggggagtctgatacacaggtttatgatgataaagactacaggagaattcggtttgtaggtcgtcagaaagag

SEQ ID NO: 562702 - DNA, 82 bp, Homo sapiens
ctccatcacccaccaacaacaccacaataatccacagccaaggaggagcaatctcagaactgttatgaagaccttcgaagtt

SEQ ID NO: 562703 - DNA, 82 bp, Homo sapiens
cggatggtgctggccacttgcttgggatcctttatcctggtcatcttctatttccaaaggtggcccagttgaaatccttccc

SEQ ID NO: 562704 - DNA, 50 bp, Homo sapiens
cggggcctcgggctccacctgtgcctccggagccagcgtggtggccatag

SEQ ID NO: 562705 - DNA, 90 bp, Homo sapiens
gcggcgcaaggaggagatagaagcgcagatcaaggccaactatgacgtgctggaaagcccaaaacctattgatgtacaagtcattacaca

SEQ ID NO: 562706 - DNA, 109 bp, Homo sapiens
gtgatgtggaggaaaacaacttcgagggcagaggggatatgagactttctactcggaatatcctgagtgttgcgtggatgtaaaacccatttcacaagagaagattgag

SEQ ID NO: 562707 - DNA, 100 bp, Homo sapiens
gaacgtctggactctagggaccctgctgaatagctggggctacaggcgtgtgtcactgcgcccaggtctccatcatcaccagttccagtagtgaaaaaca

SEQ ID NO: 562708 - DNA, 73 bp, Homo sapiens
gaaagtgaggaattttgaagtacaccgtggtgacattgtatcattggtatcaggagaacctcagtctgacgac

SEQ ID NO: 562709 - DNA, 74 bp, Homo sapiens
gccgagcgcgccgcgtagacctccgctcccccaggaagtcctgacggccacgctggatctggaggacgtccgga

SEQ ID NO: 562710 - DNA, 98 bp, Homo sapiens
gtgctttggaggttcacaagaaatatggtgactcaactggaaccacattagagccctattgctcactacaccttcacctgaaggtctctgagaatccc

SEQ ID NO: 562711 - DNA, 75 bp, Homo sapiens
actacatggacgtctggggcaaagggaccacggtcaccgtctcctcaggacacaactcagatgggaagttcatcg

SEQ ID NO: 562712 - DNA, 75 bp, Homo sapiens
acagttcgctacacagcaatgcatcgaggtcatacttacctggttgcttgcgcatctagtaatgttggatcatat

SEQ ID NO: 562713 - DNA, 82 bp, Homo sapiens
cgagaccgcggccgggaccgagggttgacatcatggacatatgtgagtccatcctggagaggaagcggcatgacagcgaaag

SEQ ID NO: 562714 - DNA, 98 bp, Homo sapiens
ggtatcaaccgggctcccagccctagaccagctcttaggctctgaacaagaaggaacacagagggtgcgacagcccagaccctgatacttcatatgtg

SEQ ID NO: 562715 - DNA, 74 bp, Homo sapiens
cggaagcgtctttgctcaaggatcccagttttctctggatgacgtggctgaccccgcactacatctacccacca

SEQ ID NO: 562716 - DNA, 80 bp, Homo sapiens
ccccggtgtgcctcggcagccttgcgctgctctaatggtccggacttccgtgtggggggccctcagcctcttggccttga

SEQ ID NO: 562717 - DNA, 82 bp, Homo sapiens
tccggatgagatcgcacttcctgcagtgggcattagccacgtccagcggaatagaagatgaactcaactgaattcaccgaag

SEQ ID NO: 562718 - DNA, 75 bp, Homo sapiens
gctgcggccgcacctggccaaggttctgtacagagtaatgagatgtgtgacggctgcaaaccaggtgtttttttc

SEQ ID NO: 562719 - DNA, 107 bp, Homo sapiens
tcgcccggctttgcagcggggacttcggcggcggcgcctcaggcacctcggcccgggtgagaagccctaccactgcaactgggacggctgcggctggaagtttgcgc

SEQ ID NO: 562720 - DNA, 75 bp, Homo sapiens
atctcctgtggtcctgggcctggatcctaagtcctgacctttcatgagggaggagctgtgcagtgagaagcaaag

SEQ ID NO: 562721 - DNA, 82 bp, Homo sapiens
tgaggttctttgtctgctggcagctaggggcgacgaggcgggacgtcatggaagtgattggtggaactccacgtcatactcc

SEQ ID NO: 562722 - DNA, 75 bp, Homo sapiens
caaggtggcctaccaggaggccaggggtgtcgccatggcactttgttttagtaaaatcggaggtgaagatggaga

SEQ ID NO: 562723 - DNA, 83 bp, Homo sapiens
gagcctgaggagtggcggggccgccaggttttggaaggaaggatgttgtagaacacttactacagatgggtgctaatgtccac

SEQ ID NO: 562724 - DNA, 110 bp, Homo sapiens
caaggtgcagggcaacacctctacaaggatctgcagccatttatattgcttaggctactggtaaggaaacaagtgggagaagatgccaggataacgcagctggaagcgac

SEQ ID NO: 562725 - DNA, 100 bp, Homo sapiens
cctgcccagacggctcacctgtgcgggatggaacaaaagtattggtaaaggttttcaaggtgtcatgaaaagatggggatttaaaggccagcctgctacg

SEQ ID NO: 562726 - DNA, 100 bp, Homo sapiens
ttcccgacgtactgggtttacaggcatgagccaccgttcccggccaagatgcctgtgaggagccaccaacatttgaagctatggagctcattggtaaacc

SEQ ID NO: 562727 - DNA, 99 bp, Homo sapiens
ttgtgcaggacaccgacatggaacagggactcactggggaccatcatggagcagttcaaccctagcctccggaacttcatcgccatggggaagaattac

SEQ ID NO: 562728 - DNA, 74 bp, Homo sapiens
gacaagaaactagagcaaataaccgttttgaaattgcagaaacgtgattatagacatactcggaagttgctgaa

SEQ ID NO: 562729 - DNA, 98 bp, Homo sapiens
aggcagctgtactaggactgggaacggccatggctctaaaaggacaagaagattatatttatcttttcaaggattcaacacatccagtggattttctg

SEQ ID NO: 562730 - DNA, 98 bp, Homo sapiens
ggagttttccggggccctctcagcaagaacgggaacaaaactctggacaaaactttcggtttgaagaataagaaaggagcaaagcaacagaagtttat

SEQ ID NO: 562731 - DNA, 104 bp, Homo sapiens
ggttccccggcccacagtgggggtgtgcaaacccgagagaactgggaatcagagatcattgatttcttcctgggggcctctctcaaggatgaggttttgaagat

SEQ ID NO: 562732 - DNA, 101 bp, Homo sapiens
gcgacttcttgggctccggggcggccatctgggtcaccatcctgtgcatggcacggctcaagacagtcctgaaatacacaagcatgagacgaagctgaagg

SEQ ID NO: 562733 - DNA, 100 bp, Homo sapiens
atgagggtcatgtttcctgtgtgaaattgcttctgtcaaaggagaactgcgacacatcaccaagctgaagccctggagcctctttgatgtacttgtggaa

SEQ ID NO: 562734 - DNA, 100 bp, Homo sapiens
agttcggcttcatcgtgggctcgcagggcgccgagggcgcgggctcaatgcgcattgggaaggattttatcctgttcaccaagaaggaagacaccatgac

SEQ ID NO: 562735 - DNA, 75 bp, Homo sapiens
aagaccaatatttggtatactgggcacaatccatctggtggcagtttttcagaagaagtgaagtcaagatgaaga

SEQ ID NO: 562736 - DNA, 88 bp, Homo sapiens
tttgcaatatgactttggaggaattctcggctggagagcagaagaccgaaaggttttaaaatcaaagatgggaaaatcggagaaaatt

SEQ ID NO: 562737 - DNA, 100 bp, Homo sapiens
ccttgtagccttgagctcgatgtcttgcatgcacattgctgctgggagtacgttgttcagtggaataaagatccagagctgtctcctgccttaagaaacc

SEQ ID NO: 562738 - DNA, 82 bp, Homo sapiens
atccacccacagctcctcacccccgtgccgtccctcgtgttcacgacaatgcagatcttcgtgaagactctgactggtaaga

SEQ ID NO: 562739 - DNA, 50 bp, Homo sapiens
agacaaagggccccttacacaccagacagactgtgaaagcactaaaccac

SEQ ID NO: 562740 - DNA, 100 bp, Homo sapiens
gaatagagggtatgcatttatcaccttctgtggaaaggaagctgcacaggaagccgtgaaactggagccttcctcgggccctgaagtgtctgaagagcag

SEQ ID NO: 562741 - DNA, 100 bp, Homo sapiens
cacaaactatggaccaaatccaagaccagtttaatgaccttgttatcagtgatggctcttctctggaagatcttgtgatcgcagacagccaaaagtcatc

SEQ ID NO: 562742 - DNA, 97 bp, Homo sapiens
cctcgctccacaactcaggaggcaggatcagcggctccattttacaggtggaaaacgaagctcattcccaacgtgcaaagccaaggcagcgacccca

SEQ ID NO: 562743 - DNA, 92 bp, Homo sapiens
aacgaggcaaggagctaaagcagcgtgcgttcagccctggggtccagcaccatgtgctaggtcactcccagcgcgaggccacacctgggccg

SEQ ID NO: 562744 - DNA, 50 bp, Homo sapiens
cataggcttcctgttcccatccatccagaagttcaccatgtctattctca

SEQ ID NO: 562745 - DNA, 100 bp, Homo sapiens
agagaatccagtttgttggggcttgtaatccccccacagaccctggaagaaagcccctctcacacaggctaaagaattacctccaaagccattgtcaaga

SEQ ID NO: 562746 - DNA, 100 bp, Homo sapiens
gaaggagttgttgtctcggcagcgcccgcggagacgtgaagagaaggggcttgttccctgcaactaccttgaaccagttgagctgcggatccaccctcag

SEQ ID NO: 562747 - DNA, 100 bp, Homo sapiens
agggctctgaaagctagaagaaaaggtgtacttgcaagaaacctcaggacttgagtaacagcaacatgaggcgttggggctgaacctctgctcccatgga

SEQ ID NO: 562748 - DNA, 76 bp, Homo sapiens
tggacaggcagagtgctgatgtgaaaaataccacgacaaaaccaccctatggccataaaatgcagtaaaaacaaat

SEQ ID NO: 562749 - DNA, 101 bp, Homo sapiens
taaaaagcaaatggcagagttggaagagaagatcttggctggaggtgctggagaatctggtaaaagcaccattgtgaagcagatgaggatcctgcatgtta

SEQ ID NO: 562750 - DNA, 98 bp, Homo sapiens
cgaagccagctctgcagctcagccaatcagtgacatcattggactacaggaatatgtggaagctgtctcttttcaacacttcatcaaaacacgatcat

SEQ ID NO: 562751 - DNA, 75 bp, Homo sapiens
tgtgacgctggagaacctggcacttatgtcctccctggaacctcaagaaggcatgaagccagcccctgcagtgcc

SEQ ID NO: 562752 - DNA, 90 bp, Homo sapiens
aaaaagtgtcatattgctgttggatctcctggcggatggcaggatgaaacctggccagatggttggactgcggtgacaagagacggaaag

SEQ ID NO: 562753 - DNA, 82 bp, Homo sapiens
tagcattcgcctactccgtgaagatccactccttataccgccgcacaggtgccagctttcagaaggcccagcaagaatttgc

SEQ ID NO: 562754 - DNA, 103 bp, Homo sapiens
cagctacgaggaggcgctgaggagaggtcaaaatgcagatcttcgtgaaaacccttaccggcaagaccatcacccttgaggtggagcccagtgacaccatcga

SEQ ID NO: 562755 - DNA, 90 bp, Homo sapiens
tacaaattggataagcgtggttcccacaaagagtataagcgagggaagtcgtgcacgaacaccaaggggaaatcagccttatggtcccac

SEQ ID NO: 562756 - DNA, 125 bp, Homo sapiens
gctgaccccggggagcgtggactacgagttggcgcccaagtccagaatccgcgcgcaccgcgatgcacacttgactgaaggaggacagggaatctgaagactccggatgacatcagagctacttt

SEQ ID NO: 562757 - DNA, 83 bp, Homo sapiens
ccagcagttgctacaggagatgaagaccctcttcttgaatactgaggtcatcatcagatttgaaatatttaaagtggatacaa

SEQ ID NO: 562758 - DNA, 83 bp, Homo sapiens
gcgggaaggcggcgccccggccgaggtggcggcggctcctcagatgagtaacccgaagcccctagaggagtggtcacctgcct

SEQ ID NO: 562759 - DNA, 100 bp, Homo sapiens
gcgaggacgaggagtgcggccgggtccgggacttcgtcgccaagctggccaacaacacgcaccaggctttcaaggatatgctgtattcagctcaggacca

SEQ ID NO: 562760 - DNA, 75 bp, Homo sapiens
atcaagtagcagtccgcagagttatcaatactctggctgaccatcatcatcgtgggactgactttggtggaagtc

SEQ ID NO: 562761 - DNA, 85 bp, Homo sapiens
aatttaggagacataagaccgttggttctgacgaggcacagcgtttcttgcaagaatgggagggtgccaaagcatgctttctgcg

SEQ ID NO: 562762 - DNA, 98 bp, Homo sapiens
accgagaccgtgaccgagagcgtgaccgagagcgcgaatatcgtcatcgttagaagaatgtttgatgtgggaggtcagagatctgagcggaagaagtg

SEQ ID NO: 562763 - DNA, 75 bp, Homo sapiens
gagcgcccccggcgcgatgcccttcaggaaaggcccagtgacgagcaccatccggaagtgaaggctgatgggtac

SEQ ID NO: 562764 - DNA, 75 bp, Homo sapiens
tgaagatcggccgcccgggctacaaaggcctatgttgtccttggccagtttctggtgctaaagaaagatgaagac

SEQ ID NO: 562765 - DNA, 100 bp, Homo sapiens
agggacatttctgaagcgagcgtcttcgatggagatgaccaggatagtgaaaagtcaaaaccagcaggctcagatggtgagcggcggggggtaaagagac

SEQ ID NO: 562766 - DNA, 50 bp, Homo sapiens
ctaaaaccttcctcaccgtgtactgtgctggcattgacggagtggaggaa

SEQ ID NO: 562767 - DNA, 96 bp, Homo sapiens
cttactggaggttttggctctgcgtgagtgtggtctacgagctgtttctcatctttatactcttccagtggttagcaggaagaagatgagccttaa

SEQ ID NO: 562768 - DNA, 88 bp, Homo sapiens
ggctatgaaaagggccaaccagatgaggagctcaagcccaagaagaaagtcttcgagaagttgcagacattcactactttcactgcct

SEQ ID NO: 562769 - DNA, 75 bp, Homo sapiens
cccagctctccctgcagatcggcgatgtggtgcgaatacaggagacgtgtggagccctgcctctttcttgtcgca

SEQ ID NO: 562770 - DNA, 100 bp, Homo sapiens
gtggtgctttcccgaatctcagaatgccttgctctatatgcaatcagtgctgtctactttgctggagtgatggtgcgactgatgttgactttgactccag

SEQ ID NO: 562771 - DNA, 82 bp, Homo sapiens
tggacacggcgcggcgctggcgctgccggagctgtcgacccggcctggcgccggactaggtctcctccgggctggggctgag

SEQ ID NO: 562772 - DNA, 100 bp, Homo sapiens
gctacagtgaccggagctcgggcgggtcctacagagacagttatgacagttacgacaatgcagatcttcgtgaagactctgactggtaagaccatcaccc

SEQ ID NO: 562773 - DNA, 82 bp, Homo sapiens
cagggggttcagctttccaagacaaagttatttgaaattacagtgcctctctctcaaggccccaaaccagtaacaatcagtt

SEQ ID NO: 562774 - DNA, 83 bp, Homo sapiens
ctctgctcctctagaagatttcacagcaatgctggactgcagtgactatgttctaggttgtttacattcagagctctatcaat

SEQ ID NO: 562775 - DNA, 50 bp, Homo sapiens
gtataataccaagaaagccccacttgttcgatatctcaatgcctatactg

SEQ ID NO: 562776 - DNA, 82 bp, Homo sapiens
cttggattttttccagtctgatccttttgttggcaataaaccacataatcctatggtaaatgctggagcaattgttgtgact

SEQ ID NO: 562777 - DNA, 75 bp, Homo sapiens
gtccccgcgtggagtctttactcaaaacaggtgtgggaaccgctgagcagaacaccctcccccagcgggaaatcc

SEQ ID NO: 562778 - DNA, 75 bp, Homo sapiens
ttcgcagtggtcgcttcttctccttggctgctgagcttcgtgcttatctgaaatctaaaggagctgagatttcag

SEQ ID NO: 562779 - DNA, 100 bp, Homo sapiens
ctggggcgccacgagcaggtggtggagcggctgctggaaacgcaagacggtgccgagaagcagctgcgagggcagcaaggagcgcttccactggcagagc

SEQ ID NO: 562780 - DNA, 89 bp, Homo sapiens
gacctatgaatatccagtttgagccatcggatctaagatccaaaagagcttactcacatagcatattggtatatcaaaatgaaatgcaa

SEQ ID NO: 562781 - DNA, 82 bp, Homo sapiens
ggccactacaacgtggctatcccctctgacgtctcccacttccgcttccatctggaaaacctcatgctggacaaagatggcc

SEQ ID NO: 562782 - DNA, 100 bp, Homo sapiens
cccacctgctttgagaagagcaatgacattgggggcctgtggaaattttcaaatgtcgaggtcttggcgagcaggagcaacacttcagagcaagaccagg

SEQ ID NO: 562783 - DNA, 99 bp, Homo sapiens
atctaaagtcacccggcggccaaaggccagtgactaccaacgtttggaccagaaggaaatggctagtgatgagctgaaagagatgcggaaaaacttgac

SEQ ID NO: 562784 - DNA, 100 bp, Homo sapiens
acgacattcgaaggatggaagaagagacgaagagacagctggatgaagtgtttgaccaggaacttgatgcactggaaattgagacagtacaaaaggagac

SEQ ID NO: 562785 - DNA, 100 bp, Homo sapiens
gggctgtgctggccgccatcctgcagctgggcaacatctgcttctcctcctcagaggcgctctgggcttggtcctgggacacccgtttgacactgtaaag

SEQ ID NO: 562786 - DNA, 74 bp, Homo sapiens
tgcgggagagcctggctgagctggagctggagctgtcggaagattttgctaaacatgttgactttctagaagcc

SEQ ID NO: 562787 - DNA, 89 bp, Homo sapiens
cttaaaaagacggacagcccatcgtgtgaactatagagtttgtggacagatttatattgaaattccgggtagatatgcctggctcaggc

SEQ ID NO: 562788 - DNA, 50 bp, Homo sapiens
tgaaacacgttctgattaaccaaggtctctagtgatccctgaaaagttcc

SEQ ID NO: 562789 - DNA, 75 bp, Homo sapiens
cgccacaccgccgccacaccgccgctgcctcagtcatgccggaattgaatgatctggcacgggaccctccagcac

SEQ ID NO: 562790 - DNA, 90 bp, Homo sapiens
gcggggcttccctgcggctggagacctgcaggctgggacaatgaaaagaaaatagctattttacatgaaaattttacaaccgtgaagccg

SEQ ID NO: 562791 - DNA, 90 bp, Homo sapiens
cagggacatggccacctgggacgaaaagacatggcccatgaacatggacatgagcatggacatcataaaatggaacttccagattataga

SEQ ID NO: 562792 - DNA, 75 bp, Homo sapiens
ccgaaagcggagagatgctgggcgtggcggccgggatgacccacaggagtggcagaagctcaactatgatatcca

SEQ ID NO: 562793 - DNA, 50 bp, Homo sapiens
gagacagaacagcagtcccggatgattttctctgtgggcagttctttttg

SEQ ID NO: 562794 - DNA, 98 bp, Homo sapiens
tggaccctcagggagcccaggagctgctggaattcaccatcagaacaacatagacgtttgtcctgaatgtggtcacctgaaacagaaacatgtccttt

SEQ ID NO: 562795 - DNA, 94 bp, Homo sapiens
gccacatactatccgtttgttcaggaaccaccagtgacagagtttccaatacttatctacaggaatcgccatgaccccagctctgagggaggca

SEQ ID NO: 562796 - DNA, 97 bp, Homo sapiens
tatgactgtgaagctgcaagcagaattggagggcatcaaaagagcatgtaccttgatattgaatgtgtcatggagaaactccagctgggcccagaga

SEQ ID NO: 562797 - DNA, 82 bp, Homo sapiens
agggccagagcgtcggggaggcaagatgatccaccagcggttccatcctacacttggacaatctgtggctccaactatccac

SEQ ID NO: 562798 - DNA, 75 bp, Homo sapiens
gcgggaaatcgggctgaagcgactgagtccgcgatggaggttcctccccgggcagaagaaatcaccattccagct

SEQ ID NO: 562799 - DNA, 76 bp, Homo sapiens
cctaaagccacagtcttcaagagcccacggacaccacctcaacgtttgacggtgagaacatgtatatgagcatgac

SEQ ID NO: 562800 - DNA, 90 bp, Homo sapiens
ggagaagacaacatctgtgtgcctgacctgcagctggaagtgtttgggagagaagatgactgaggaggaggtggagaccgttctggcagg

SEQ ID NO: 562801 - DNA, 95 bp, Homo sapiens
ggatccctggatctggtggactttgtgaggcaacatcggataccactgggtatcgcaggacttccctttcctccaccccagtgagaccagtgtcc

SEQ ID NO: 562802 - DNA, 74 bp, Homo sapiens
ggccaaggtgctggcgtccctcagtaattataaagtggactgtgcctgtcacaagggaaaccggaattgtccta

SEQ ID NO: 562803 - DNA, 89 bp, Homo sapiens
cccgtcctccttcgccgccgcgcacaaccgcacgtgcagctctgcggccgtcacgatgttctggaagtttgacttgaacaccacgtccc

SEQ ID NO: 562804 - DNA, 90 bp, Homo sapiens
ggagacccagttgagaaagctgcccaactaagacctatctccctaccaggagtttctagcactgaagatgcctgtgaggagccaccaaca

SEQ ID NO: 562805 - DNA, 75 bp, Homo sapiens
cccgcgccctgctccctctcagcacctgggcggacggtcaaaatgcagatcttcgtgaaaacccttaccggcaag

SEQ ID NO: 562806 - DNA, 75 bp, Homo sapiens
cgagcttttcctccaggcctttgagatgaagcgtgacattcaggaaaacgatgaagaggcagtgcaagtcaaaga

SEQ ID NO: 562807 - DNA, 82 bp, Homo sapiens
ccaaccagagattcatctttcatgcagtgacatgttgataaaaaatgatgatgatttgtcattaattcggaagaacagaatg

SEQ ID NO: 562808 - DNA, 83 bp, Homo sapiens
gttcagttgctgagaagcctgacataccaggactgcctgagacaagccacaagctgtgtcttctcagaaacaaccagctgaga

SEQ ID NO: 562809 - DNA, 82 bp, Homo sapiens
ccgaatcgctcctgcagcagagatgccatggacaatattaccaggcagaaccaattctacgatacccaagtcatcaaacaag

SEQ ID NO: 562810 - DNA, 100 bp, Homo sapiens
gcaggggcggaggcggaggcagaggtggaggcgctttgaaagaacgctgtccaactgggcgtacgagtttgacaagtgggccccctccgtggtgaaggtg

SEQ ID NO: 562811 - DNA, 83 bp, Homo sapiens
tggatacgtcgccatcttggatccgcgggacaagaaaattcatgcgagctggaagtcgagtgtgctactcaactcaggagatt

SEQ ID NO: 562812 - DNA, 82 bp, Homo sapiens
tctaagagctgggggcggatggaattctcctgcctgcgggtctttaaagactgaggaagctcttcgtgggcggtcttgactg

SEQ ID NO: 562813 - DNA, 100 bp, Homo sapiens
ggtggaggaagcacctatgtttccaaaccagtcagctgggctgatgaaacggatgacctggaaggagatggtgggaagactccagctccgggccctgagg

SEQ ID NO: 562814 - DNA, 83 bp, Homo sapiens
ctattttgcaacgccataggcttccagcgactgctggtgatgtttctggactgcaagatggaggaaggcgggaacctaggagg

SEQ ID NO: 562815 - DNA, 83 bp, Homo sapiens
ctcctggaccccaagatccttaagttcgtcgtcttcatcgtcgcggttctgctgccggcctgcttcggccttctgctcttctg

SEQ ID NO: 562816 - DNA, 74 bp, Homo sapiens
caagatcaccgtgacatccgaggtgcctttctccaaaagggttcccagttttccagacctgaagtgttttccaa

SEQ ID NO: 562817 - DNA, 100 bp, Homo sapiens
tggcaccgggaaaacctgtgtgttctccaccatagctttggactctcttgttcttgaaaacttaagtacccagggccattatgctgtgatgaacaacccc

SEQ ID NO: 562818 - DNA, 75 bp, Homo sapiens
ggagaactctaccctggaggagattctggggcagtatcaacggagtctccggggccatggttgcttgttatccgg

SEQ ID NO: 562819 - DNA, 100 bp, Homo sapiens
aaggccacaactctgcagtggaccacagcattcctgaaatacatccaggaaagacatggagattctcttaaaaagccttcatctcgaaattctgcctcag

SEQ ID NO: 562820 - DNA, 90 bp, Homo sapiens
tgaagttcgccgagcacctctccgcgcacatcactcccgagtggaggaagcaatacatccagtatgaggacagaatgacttggaagataa

SEQ ID NO: 562821 - DNA, 75 bp, Homo sapiens
taacaaacttcttaaaagcaaccggcttaaacatctggaagctcaaggtactagatggagtctctctgtcaccca

SEQ ID NO: 562822 - DNA, 51 bp, Homo sapiens
gaagtgttgaatgtgatacaagtttggtatttccattcaggacattttatc

SEQ ID NO: 562823 - DNA, 101 bp, Homo sapiens
gcagcggcagtcacaggcacatcagcaaagagctcttttggtacaccagaaggccagaatggaacgacttcaaagagaacttgagattcaaaagaaaaagc

SEQ ID NO: 562824 - DNA, 97 bp, Homo sapiens
ccggctcacccagtgaaaagggagatcaatgaggagatgaagatcaggatcctcatgaccagccaaagagaagaagaattaggaagcataaatcaaa

SEQ ID NO: 562825 - DNA, 99 bp, Homo sapiens
tgaccaagaaccatgcctggtggatccagacatgatcaaagccatcaaccagggcaactatggcaaatgtgccgagcttgaagaagaattgaaaactgt

SEQ ID NO: 562826 - DNA, 100 bp, Homo sapiens
gcctctgtgccactttgcatcccacgccggaggaggcattaacgagaccgggccaagtcatcaaggcatgggacattggggtggctaccatgaagaaagg

SEQ ID NO: 562827 - DNA, 101 bp, Homo sapiens
taaaatggatatgaaaagtgaagaaagtgatcataggagaaaaccatttcaggatgttaatgcaggcgagggcagtgagtttgcagacagtgggattgaag

SEQ ID NO: 562828 - DNA, 129 bp, Homo sapiens
atgagaaggaactccgaagggagatcagctatgctatcaagaatatccatggcattaggtgagggtcccgatgtcctggtgtacagcttggactttggtgggcatctgcggatgataaagcgagtgcag

SEQ ID NO: 562829 - DNA, 75 bp, Homo sapiens
cacaaagagggtcatctcttctattgtacctgcagggaccaaagcagtatccttacaataatctgtacctggaac

SEQ ID NO: 562830 - DNA, 75 bp, Homo sapiens
tgctggagggccgcttccgcatccccttcttcatgtctcaaggaggatacgaagcgttttcggcttcctgcccgg

SEQ ID NO: 562831 - DNA, 100 bp, Homo sapiens
aatgtgcatactcacagagttagagagagggatggtggtataataaaaaatggtggtgtaaaacccaatatcattccctcttattctgaattaatctatt

SEQ ID NO: 562832 - DNA, 139 bp, Homo sapiens
ggacttgctgaaccgcttcctgggggactatgtggagaacctgaacaagtcccagctgaagctgggcatctggggcgcgcgttcgttcacatagctcccagttttaacatttcgccacctactgaagacatcatttggg

SEQ ID NO: 562833 - DNA, 88 bp, Homo sapiens
tgggacttcacctatagatcatactgccactctccgcccctacctgagtgccgtgcgggccacattgcaggctgccctctgcctggag

SEQ ID NO: 562834 - DNA, 97 bp, Homo sapiens
aaatcttctcagttcctggctcccaagctcaagaaatcctggggctccaaggacactccagccaaggctctgatgaggcagcggggcactggaggag

SEQ ID NO: 562835 - DNA, 98 bp, Homo sapiens
tactatattggaaaaacctcaaaatatgatggtggttggacagtcagcatttgcagactttgtgagtgttgaaaagatagacctgaagggattatcac

SEQ ID NO: 562836 - DNA, 100 bp, Homo sapiens
cctgcctgggcaactgaatgagaccccacctcaaaaaagtgctgttctagaaacagaggtactaaggctcctccaccaagccaaggccagactcctgcaa

SEQ ID NO: 562837 - DNA, 101 bp, Homo sapiens
gcagccgcgaggaggcgcgggaggtgttcgagaacgaccccgagacgcccgttttacggagaagacttttactgtgaaattcctcggagctttcgtcacct

SEQ ID NO: 562838 - DNA, 98 bp, Homo sapiens
aaggaacgaggcaaggagctaaagcagcgtgcgttcagccctggggttttgcatgcagaaatgtgtcagtctggtgcctggcgtcacactggatttga

SEQ ID NO: 562839 - DNA, 75 bp, Homo sapiens
ccccaacggggaggccaacgtgaagaagcaggtggacacgaacaccaaaaatgtctttgggcaaccgaggttgag

SEQ ID NO: 562840 - DNA, 82 bp, Homo sapiens
taagctctctgaaaagaaggtggcagacccggtttgctgatcgccccagggatcaggaggttattaatgctgcactggcttt

SEQ ID NO: 562841 - DNA, 73 bp, Homo sapiens
tgcagccaaggaaggaggcctgcaaattcatgacaggattattgaggcaaatgtttgcagactacggctgacc

SEQ ID NO: 562842 - DNA, 111 bp, Homo sapiens
cccgccgcagacacgggacccgcttcgaggccgctttggcgccaaatcctgaggatctaaaatgtccactgaggcacaaagagttgatgacagtccaagcactagtggagg

SEQ ID NO: 562843 - DNA, 100 bp, Homo sapiens
cggaagtgaaggcagatttccctccttcgtcgctgttgctgccgccatacgcgctctccctgtttaggtcctcttcctgatggatgggaacaagccatga

SEQ ID NO: 562844 - DNA, 110 bp, Homo sapiens
cagaacgcagatcagaggtagtcggacctttcccgctggcgcgcagcctcagctaggttaaacccatccagagtaatggctgcggccttacccaggaccctgggggagtt

SEQ ID NO: 562845 - DNA, 82 bp, Homo sapiens
agatggcggacagtgcggaactaaagccctccagaatacccatcatatagcccctgaggtggcatggtgatgtctccatgag

SEQ ID NO: 562846 - DNA, 82 bp, Homo sapiens
atggattcagaaccaccatctgaaattagcttaaaaaatgatctaggtatggaaaagttgaggccactcgcatattgttaga

SEQ ID NO: 562847 - DNA, 98 bp, Homo sapiens
ggcgagcgccgaggggacaggccgagcgcggggcgccggaggcagaaacgcttcgttaagggactcaggcagtacgggaagaacttcttcagaattag

SEQ ID NO: 562848 - DNA, 100 bp, Homo sapiens
tactacaccagctgccgccacatgacaatgagtctattgcgtctgcagacatggatttcaaccagctggaggcattcttgactgctcaaaccaaaaagca

SEQ ID NO: 562849 - DNA, 100 bp, Homo sapiens
ctgtccttcgagaccatcgacaagatgcgccgcgccagctcctactcctccctcaactccctcatcggagaagagatcaactttgggaaacttatcacaa

SEQ ID NO: 562850 - DNA, 75 bp, Homo sapiens
tggggatccctgctcttcgctctcttcctggctgcgtccctagtgatcagggccaaagcggtcagtgagaaggaa

SEQ ID NO: 562851 - DNA, 83 bp, Homo sapiens
ccagaaggaagatggcggatctggaggagcagttgtctgatgaagagaagggggatatgagactttctactcggaatatcctg

SEQ ID NO: 562852 - DNA, 95 bp, Homo sapiens
ggcgccgggcactgagcaccgccaccatggggaaggggaatttgttcctgttgaagagtggctcctcttctaatttccagactccttgaggtttt

SEQ ID NO: 562853 - DNA, 75 bp, Homo sapiens
cacagctaagatgccaggaccacctggaagcctagaaatggtgtcagttgtacccgaggcgttctcagcagcagc

SEQ ID NO: 562854 - DNA, 90 bp, Homo sapiens
tgaagcgcaccgcagagagagagctgctgatgctagttcttctggagctcaacttcttgccaaccacagggaccaagctgaccaaacagc

SEQ ID NO: 562855 - DNA, 75 bp, Homo sapiens
gcagagcggagggagccccagacacggcagagcacccgggcatgaggacctacgttttggccgctgacaccttag

SEQ ID NO: 562856 - DNA, 90 bp, Homo sapiens
gacgatgatggagaaatcgatgatggggaaatagacattctgaggttgggaccaagaaggaactatctattttaaaccaaaaattttccg

SEQ ID NO: 562857 - DNA, 100 bp, Homo sapiens
agttcacataagaagttcttcgatgtatctaaacttggcaccaagtatggtgattgcccacagtgagtatcaaaagtccaaaagaatttccatctttctg

SEQ ID NO: 562858 - DNA, 49 bp, Homo sapiens
gggggcagtcctcgccggcgagttcagccgagacggtcatctgttccag

SEQ ID NO: 562859 - DNA, 75 bp, Homo sapiens
gtcgttcccgctgcgctaggggaagcgggcaggtttgctggcatgggtaatctcattaaggtgctaaccagggac

SEQ ID NO: 562860 - DNA, 90 bp, Homo sapiens
ggaaagcccagaagaaaggacagtaaatgtgagctctattcgggtgcttaatgatcaatagttggtgcactgcctatcctcatccccccc

SEQ ID NO: 562861 - DNA, 75 bp, Homo sapiens
aaagagaaaaggaattagcagaagacattatgtcaggaaaaggggaagatagtgatgtactcagtataaatgcag

SEQ ID NO: 562862 - DNA, 74 bp, Homo sapiens
accacagtcaaagcaacagaaacaaaagcaggcaaatggagtcgttgggaatcttcctgcctgacacagctcac

SEQ ID NO: 562863 - DNA, 98 bp, Homo sapiens
caaagaggctgaatatgcaggacaggccaagcaatggggctggacacaaggtcggtggcccaaaaagagtgctgaatttttgctgcacatgcttaaaa

SEQ ID NO: 562864 - DNA, 83 bp, Homo sapiens
ggagatcctgatgaagttcgagcactaatatttaagaaagaagatgttaactttcaggtatctcagcgtttgagtcagccagg

SEQ ID NO: 562865 - DNA, 74 bp, Homo sapiens
caggaatggctaaaaatgtttcaggtgaaaggtgtagcagtcactcggcctacacccacagcatcgaccttgtg

SEQ ID NO: 562866 - DNA, 97 bp, Homo sapiens
aaagacaggagccctggaatgtgaagagacatgagaccatagccaaacccccaggtgtgatccctcacatccacaaatctctgattggaaagaaggg

SEQ ID NO: 562867 - DNA, 87 bp, Homo sapiens
ctccttctgaattggcagcgaggtcgcggcaggttcgagtgtggacgaatgtggaacctcgctctgtggctgtgttcccttggcact

SEQ ID NO: 562868 - DNA, 90 bp, Homo sapiens
agcggcctggtcggacccaaaggagaggtcccaccctctcccgacgaccttccgagccgcgggttactcgccctgtccctcaagtacgtc

SEQ ID NO: 562869 - DNA, 100 bp, Homo sapiens
gcagcaaagacaagcacacaccagagaccagaatgaaagtcggggaagtccttatgcgaatcgtcagggcattagattatacccaacaagcaacccaaag

SEQ ID NO: 562870 - DNA, 90 bp, Homo sapiens
cctggccacgatcgcagactccaaccagaacatgcagtccctgcttcctgccctaagcaggctaagaaggaggcagctgaaaaggaacag

SEQ ID NO: 562871 - DNA, 74 bp, Homo sapiens
gagttaaatgccctcaagtcgacaggggatgggaccctagaggagaaggcagagcccccccaggctatgaatgc

SEQ ID NO: 562872 - DNA, 50 bp, Homo sapiens
aaatgagtcgcatcttcaacccccatcttcaggatggctaaaggtgaccc

SEQ ID NO: 562873 - DNA, 90 bp, Homo sapiens
gacaatgaaatccgagccactgacctgcctgagaggttccaggggcacgttccgctttgaaagacctgatggctcccactttgatgttcg

SEQ ID NO: 562874 - DNA, 49 bp, Homo sapiens
gattgtcactccaacctcttttcgctgggccaattcctgtccccccagc

SEQ ID NO: 562875 - DNA, 101 bp, Homo sapiens
gcagagcacgagcggatcctgcgagagatcgagagcactgacacggcctgcatcgggcccacgctcagttgcccagaagattgttgccacaaggaagaagc

SEQ ID NO: 562876 - DNA, 99 bp, Homo sapiens
ggggaaaactgggaggagaagaacattgaagatcacaaaaatcaggggagaaagctaaggtgaaaggtgtagcagtcactcggcctacacccacagcat

SEQ ID NO: 562877 - DNA, 90 bp, Homo sapiens
aattgagaaacaggcacacaagtgtgaggagttgctaaatgctcagaacattctagtatgccagtagaaaaaaatatcactttagaaagg

SEQ ID NO: 562878 - DNA, 100 bp, Homo sapiens
gatcctctgtacgcccgttcactgttgattatgagatcaatgcccacaaatactggaatgacttctacaaaatccacgaaaatgggtttttcaaggatag

SEQ ID NO: 562879 - DNA, 74 bp, Homo sapiens
gccgtgtccgcgtctggagcatcgtcggagccttttgcctcatgtgtcagttctggaggctgggaagtccaaga

SEQ ID NO: 562880 - DNA, 100 bp, Homo sapiens
tattgcgtgatcacctatatacttggagttggagacaggcacctggataaccttttgctaacaaaaacaggtgtaaaacaaaggtgtatccagataatct

SEQ ID NO: 562881 - DNA, 82 bp, Homo sapiens
accaggagaagtttttatcaacaaaggcaaaggattcggatttattaagcttgcaaagcagagagcagaggttcttcagtcc

SEQ ID NO: 562882 - DNA, 100 bp, Homo sapiens
ctgctccccgggaccatcgagaaattttagaaagagcgttttcgctacgtaaagcacattcgataaaggatatggaaaatactttgcagctggtgagaaa

SEQ ID NO: 562883 - DNA, 50 bp, Homo sapiens
ccagaccaaagaattacgctgacagccttgtcctgccaagaagttactga

SEQ ID NO: 562884 - DNA, 100 bp, Homo sapiens
tggcgcctggcagggcagccagctggccaggggggcccgtctgggccagccacctggtgtccggaggagatgttaaagtaacccatcttgcaggacgaca

SEQ ID NO: 562885 - DNA, 100 bp, Homo sapiens
cttgggcgtgcaggtgctgctggtgcacgctgccacgctcatctgccgcgggctggactacttcagcagcctgtggttgtcatggatgcactggtagaag

SEQ ID NO: 562886 - DNA, 74 bp, Homo sapiens
ttctgttccacctcctcctgcagtgaacaaggggagaagaattgccttcagctccacgtcgttactgaaaatgg

SEQ ID NO: 562887 - DNA, 82 bp, Homo sapiens
gaggtcccaatcccccactctttccgccctaatggaggtctccagtttcgacaaatttacatgtattggagaccagaccaga

SEQ ID NO: 562888 - DNA, 73 bp, Homo sapiens
ttggcagccacatgttctcctgctggcccagctgagagccagcctggaggttacccagcagcaggccacccag

SEQ ID NO: 562889 - DNA, 100 bp, Homo sapiens
aagagcccagtaccagttcagcaagtgtctctactgtcagaccacacacagagccaccagcccctcgggttccaagatgcagctactggagacagagttc

SEQ ID NO: 562890 - DNA, 75 bp, Homo sapiens
aacaggaatacatggaagtccgggagagaatacacagagccaggtgtccgcaatgttgccagtgtctgtctgcag

SEQ ID NO: 562891 - DNA, 100 bp, Homo sapiens
tacacgaggttggtcatgaaagagattccttgcagagacagctcaacacggcacttccacagcttaaattccccactcggccaaaggtgcgggttcctac

SEQ ID NO: 562892 - DNA, 98 bp, Homo sapiens
gtaaaagagggaagtacaaagaagcagagccgttgtgtaaaagagctctggaaatccgagaaaaggccaagtacctggcccagatcattgtgatgggc

SEQ ID NO: 562893 - DNA, 83 bp, Homo sapiens
ctcaacttctaccagttcctcggggtgcagcaggtcctgagggagtctaacaagttagcagaaatggaagaaccacccttgct

SEQ ID NO: 562894 - DNA, 98 bp, Homo sapiens
cgcaaacaagccaatcccaggaggaaaaacgatgccgtagggccaggtgagctgctgtgaaggactcattcttggtagccggcagttactggcaactt

SEQ ID NO: 562895 - DNA, 90 bp, Homo sapiens
taaagctctagcagaggaaaataagaacacagtggatgtcgagaacggtgcttctatggcaggatatggggacaccatcgccagcgtcaa

SEQ ID NO: 562896 - DNA, 87 bp, Homo sapiens
cgacttagaaaaaagaaccagatgtcaaaactgatttcagaaatgcatagttttatccaggactttgtgttttatgccccacgtctg

SEQ ID NO: 562897 - DNA, 138 bp, Homo sapiens
tttctgtcccatgacaaggaccagctgactaaggagctgcagcagcatgtaaagtcagtgacagccccattggctagtattcagaagcttcctgcagcctctgttctaacagacatcaactttccaatgaaaggacgg

SEQ ID NO: 562898 - DNA, 82 bp, Homo sapiens
ttgaacccattgtcacccctccggtcaaaatgcagatcttcgtgaaaacccttaccggcaagaccatcacccttgaggtgga

SEQ ID NO: 562899 - DNA, 100 bp, Homo sapiens
gagcaggcgaggtggccggagccgtgtggaccaggaggagcgctgctccataagttctacctcagaggttcattcaccaccaaacgtaggactaagacgt

SEQ ID NO: 562900 - DNA, 118 bp, Homo sapiens
caccgccgcagttgccggtacatcggggatttctggctctttcctcttcgccttaaattcgacaatgcagatcttcgtgaagactctgactggtaagaccatcaccctcgaggttgag

SEQ ID NO: 562901 - DNA, 75 bp, Homo sapiens
ggcggatccgactacaactacgagagcaaattcacggtgaccacccgtcaggtgcgtaccattgtggaagaggtc

SEQ ID NO: 562902 - DNA, 75 bp, Homo sapiens
tgccaaatagttacctcttttaaactcattctactggagcaaatgcctccagggtcgtatagacctccccctcct

SEQ ID NO: 562903 - DNA, 100 bp, Homo sapiens
tgagtatatccgcgtgcggcaggacctggaggaggcgcagaacgagcagacccgcgaactcaagctcaaccatctgtgagaaagacacactgcagtggaa

SEQ ID NO: 562904 - DNA, 100 bp, Homo sapiens
tctcattctgcagctcatcttctcaaaaacagagttgaagtattgataacaccaaggaactctatcacaatttgaaaagataagcaaaagtttgatttcc

SEQ ID NO: 562905 - DNA, 99 bp, Homo sapiens
tagctgaagcatctgctccattgtccaattcttcagaaactccagaactacaagcagctgtcgaagagatactgccaagccttaaaaaagatgatgtgt

SEQ ID NO: 562906 - DNA, 75 bp, Homo sapiens
cccactccggattcctccacaccacccacacaccagtcggcagcctccctggatccaaggagctggttctgctgg

SEQ ID NO: 562907 - DNA, 114 bp, Homo sapiens
cgagcagcgccagcggccgagcgggcggcttcctggcctgggcgctccggtggcggcggagagacaagaggagcagcagcggcaccgcccctcaccctggagggtcctgtacaa

SEQ ID NO: 562908 - DNA, 128 bp, Homo sapiens
tccggccgaggtgcgcgctgggggggagggggggccggagaggagcatgaatggagcaaaatggcggatcatgtgcagcacttgcacctcctgcgccgccgccccccatccaaggatatgccttcaag

SEQ ID NO: 562909 - DNA, 98 bp, Homo sapiens
tcttgagagatgagcaccagttacacaaggacttctttatccgagcgctggattgcatgagaaggggcataaggaaatggtggcaggcacttcctcct

SEQ ID NO: 562910 - DNA, 73 bp, Homo sapiens
aaattccccccgaagaagactcccccacatctggttttctcgtgtactgaagaatagggcctggcctactttt

SEQ ID NO: 562911 - DNA, 75 bp, Homo sapiens
gacaactgaaatgagacatgcacataatatagtttaattggttggggtcagataagaagaggagtgacaatcaag

SEQ ID NO: 562912 - DNA, 98 bp, Homo sapiens
aacctagccccggacgagaagcgcagcaacgtgcggtgggaccacgagagcactgtgccctgtccacggtgcctcctgcatgtcctgctgccctgagc

SEQ ID NO: 562913 - DNA, 100 bp, Homo sapiens
cggggaggagtttcatgaagagcccaaaacctattacgaactcaaaagtcaaccgctgaagagcagatgacttcctgaagccacagatcatcacccagcc

SEQ ID NO: 562914 - DNA, 100 bp, Homo sapiens
ccaagagaatcatttgtcctcgggagattacatgcagcaaactggaggtcaagcacatctattcttttggatgacagtggaaggataccgggttaccgcc

SEQ ID NO: 562915 - DNA, 100 bp, Homo sapiens
ggctgcgggaccccaggatgggggacaggaggctgcggggcctcaggtgtacatgtaccagctcttccgcagcttggcctacatccactcccagggcgtg

SEQ ID NO: 562916 - DNA, 100 bp, Homo sapiens
aatgccttggtttcaacactatcggaatggtgaaatgacaatggatgctctgttggctcgattgaaacttctgaatccagatgaccttagagaagaaatc

SEQ ID NO: 562917 - DNA, 101 bp, Homo sapiens
cttcatggtgtcactgaatccaggaggagacccttctacgcctggttacccaagtgtcggtgctggatccgggactccctggtcagctacatcaccaacct

SEQ ID NO: 562918 - DNA, 119 bp, Homo sapiens
cggtggtgctggtggcggcggcgctttcggcgcgggcccgggccccgagcgcccgaacagagtgcctggtgaagaatgtgatgggatcactagcatgtctgcggagagcggccctggga

SEQ ID NO: 562919 - DNA, 58 bp, Homo sapiens
tcgactcccccggctcttagactaaaaaagcttgagtctccacccccatctaccaatc

SEQ ID NO: 562920 - DNA, 100 bp, Homo sapiens
tgcgggaagaagcctggtctccggggccgctggattctgaggaccagcagatggccagtcacgagaacccagatccgaggaatgggcatgaactccccgg

SEQ ID NO: 562921 - DNA, 82 bp, Homo sapiens
ttggaaggtgcatctgcagtacaggatatgaagaaattgagggttcttgccatgtgccagcgccacagcccttcaatcattt

SEQ ID NO: 562922 - DNA, 100 bp, Homo sapiens
cctgcccagcagaatttgtatagagatgtgatgttggagaactacagaaacctggtctccctagggctccagcggggccccacagacgagcaggatgcct

SEQ ID NO: 562923 - DNA, 83 bp, Homo sapiens
gcaccttatcacccggaacctgcagatgactctgcagaatttaacctagtgaacaatgccctattaagtatatttaaaatgga

SEQ ID NO: 562924 - DNA, 74 bp, Homo sapiens
tgaggcggcttcctatgctatctctcttccgaggttctcacagagttcaggttcgtaagaagaactcgctgaag

SEQ ID NO: 562925 - DNA, 74 bp, Homo sapiens
aacagtacacctgagatgaccccaaagcacctacaggtcgatttctctcttcttcgcccttgtgacttcaggga

SEQ ID NO: 562926 - DNA, 50 bp, Homo sapiens
ggctgcggggcttccctgcggctggaggatggcacatttcctagaggcag

SEQ ID NO: 562927 - DNA, 100 bp, Homo sapiens
ctacatgaactcaggctcaagaaatgcccagtctttgggatttaagatcaacttcctttgtaagtgtgtttcacataacagcagataatcaccagaatgg

SEQ ID NO: 562928 - DNA, 83 bp, Homo sapiens
cgctgctcaaggacacggtctacaccgacttcgacgctgtgagccgtgagctttgaggcggtgggatgtgtcagcagaatgtc

SEQ ID NO: 562929 - DNA, 97 bp, Homo sapiens
gaaaaacaatcgcttcaatgatgggaaggtggatcccgccgggaggtactttgctgattcctacgagaagcaacaggcacaaggctctggtcggaaa

SEQ ID NO: 562930 - DNA, 50 bp, Homo sapiens
atcccatcagaggcaccccagacacagatattgactgggtacagacagag

SEQ ID NO: 562931 - DNA, 113 bp, Homo sapiens
ggagttcatgtgggccctgaaaaacggagacttggatgaggtgaaagactatgtggccaagatgttgtaaattttgatgacatagcttcctcagaaaacttgcttcatctcac

SEQ ID NO: 562932 - DNA, 100 bp, Homo sapiens
gcgggaataggtgcagcgggcccttggcgggggactctgagggaggagctggggacggcgaccctaggagagccgcacactcagagcctggagacgctga

SEQ ID NO: 562933 - DNA, 97 bp, Homo sapiens
cactaaaacttatcatgggactggatgggaccactcaagcctacagacctggtacctggatttttgcccgagatgattcctaccaccttactactga

SEQ ID NO: 562934 - DNA, 83 bp, Homo sapiens
gccaccgccgccgccggggccgggccccctcgccgctgccccgggaaggagggagtaccctgacttctaccggaagctctacg

SEQ ID NO: 562935 - DNA, 100 bp, Homo sapiens
gccggagaagggctgcgggttagggggccggcgcccgcggttcaggcatatcacacctgaaaaattttatgtggaagcttgtgatgatggagcagatgac

SEQ ID NO: 562936 - DNA, 78 bp, Homo sapiens
cttgtgacgccagcccaagttcagggcagatgcccagagatacagggtcttgctatgttgcccaggctggagtgaaga

SEQ ID NO: 562937 - DNA, 74 bp, Homo sapiens
gccacatactatccgtttgttcaggaaccaccagtgacagatgtgcaggatcaagacaaaaaacttcaagactt

SEQ ID NO: 562938 - DNA, 102 bp, Homo sapiens
ttgtaaatgtagccaatgtaggtgcagtcccttctggccaggataatatacacaggttggtcaaagaaaaagtgatgtatgaaaaagaggcaaaacaacaag

SEQ ID NO: 562939 - DNA, 100 bp, Homo sapiens
ctcacagtgctgggaaggaatctatccaagggagaaaaaagggcatcatccccattccgaagggtcagggaggaggaaattgaggtggattcacgagttg

SEQ ID NO: 562940 - DNA, 100 bp, Homo sapiens
ggggagggaggcttctgggtcccagggccgcaggggcagggaagtctggaggaagagcaagcaggccctgagggactataagaaggttcagatccagctg

SEQ ID NO: 562941 - DNA, 75 bp, Homo sapiens
ttccaggtgaatccaacaagatcccccgtctgaggactgacctttttccgtgccgtgagcgatgtggagatgcag

SEQ ID NO: 562942 - DNA, 51 bp, Homo sapiens
cgcgagtcggcgcgcgggacgaaggatggacaaccggaaattttctacaca

SEQ ID NO: 562943 - DNA, 75 bp, Homo sapiens
ttccgctttgacaagctcagccatgccagctctggtgcggtccctgtgcgttttattgcgacctgccggtgggaa

SEQ ID NO: 562944 - DNA, 90 bp, Homo sapiens
gcgaaagagaggcctcccggctcgacaagttcaagcagctgcttgccggccccaacacggaccttgctatctcacgtgagagggcagtgg

SEQ ID NO: 562945 - DNA, 100 bp, Homo sapiens
ccaagagttgaagatgtttcaaggagaggcccagcatatacaaaggcatggaagtatgaaaatggttttgctgttactgctcagtgtagtcacaccttga

SEQ ID NO: 562946 - DNA, 100 bp, Homo sapiens
agcggagatgccaccttccccaaagctatggacaacgtgacggtccggcagggggagagcgccaccctcagacaatgcagatcttcgtgaagactctgac

SEQ ID NO: 562947 - DNA, 80 bp, Homo sapiens
ccggataaggcggcgctgaacgcactgcagcctcctgagttcagacgtccttctatggccgcttcaggcacttcttggat

SEQ ID NO: 562948 - DNA, 80 bp, Homo sapiens
ttatatcctgacactatgaatgctacttggatgcctcttaagaatgtcacaggtagactaatggttggcctacgttggtg

SEQ ID NO: 562949 - DNA, 100 bp, Homo sapiens
ttaccaaaccatgtctggagtgaaggaggccgacttcaaggatcttgagactcaaccccatatgttctgggaggtgatcagtgatgaacatggcatcgac

SEQ ID NO: 562950 - DNA, 89 bp, Homo sapiens
ctggttcctgctggttctggcagttgtagctggggacacagtgtcaaccgggtccacggcgtggtgaccaagatgaagatgcagaggac

SEQ ID NO: 562951 - DNA, 83 bp, Homo sapiens
tttgcttttgaaggcataggagtgaaagggctattgcaagacacgaagtccgagaaattgagcagcgacatacaatggatggc

SEQ ID NO: 562952 - DNA, 108 bp, Homo sapiens
ggataagggcgacagcaacagctctgccggctggaagatatggctcgtggacagcagaaaattcagtctcagcagaaaaatgccaaaaagcaagctggacaaaagaag

SEQ ID NO: 562953 - DNA, 102 bp, Homo sapiens
ggcagcaaggtgtcggtgttccacgtgaagctcaccgacagtgccctgagggccttcgagagctaccgcgccagacagacacagctgtgatcagtccccagg

SEQ ID NO: 562954 - DNA, 114 bp, Homo sapiens
gttctcaaagagttgggtttctgcgtccatgtgaagcatcctcataaggccacggcatatgcctccaaggacggggtcctcactgaggccatgatggacgcctgtgtgcaagat

SEQ ID NO: 562955 - DNA, 74 bp, Homo sapiens
cgccaggacaatggggacccgggacgacgagtacgactacctattcaaagatctgactgcagccatgagcagca

SEQ ID NO: 562956 - DNA, 101 bp, Homo sapiens
caggctccgggagatcaaccctctgctgttcagctacgtggaggagctggtggagattcgcgagaagataagcgaggacctcagggccacactgaacgcct

SEQ ID NO: 562957 - DNA, 100 bp, Homo sapiens
tcgagtgaagcctggcccgtgagtgcctcaacaactgagatgaacgtcgactcgcttgcaggcaagttgtcaggtttgtaccagttgctggagccccgaa

SEQ ID NO: 562958 - DNA, 100 bp, Homo sapiens
acccgagacgtgaaaaaaacaggcgtattctggtaatttcgaggaggagctcgaggccatgagcagatataccagcccagtgaacccagctgtcttcccc

SEQ ID NO: 562959 - DNA, 100 bp, Homo sapiens
gatcgtgtgtctgtgatgcgtccacagccaggagacacggaccgtataatagacgctggccccaaaggaaactactctcgatttatgaatcacagctgcc

SEQ ID NO: 562960 - DNA, 100 bp, Homo sapiens
agaatgcgcccgcacagtccatcggcatacggagacagggtgaaggactttagtacgatggtcaagacaagaaccgtggagtcagaatgcctgcatgcag

SEQ ID NO: 562961 - DNA, 100 bp, Homo sapiens
tatggcgagcccagcgaagtcttcatcaaccgggaccgtggcttcggcttcatccgcttggttgaaactgataaagccactgttggatttgagagcctgg

SEQ ID NO: 562962 - DNA, 100 bp, Homo sapiens
ccagaacctgcacggcccccctggacaggctcaaggtgctcatgcagcaatagcgtttatggcagcatttagcggacacagaagcacatctgaaagtgga

SEQ ID NO: 562963 - DNA, 73 bp, Homo sapiens
tgagacatttgctacagcatcccacattaagtcaacgctgagtcagtgctgattctctcaaatagagcttgaa

SEQ ID NO: 562964 - DNA, 96 bp, Homo sapiens
atcattggaggccgtgggcacgctctttactccatgtgtgggacattcattgcggaataacatcggaggagaagcattactctactgactggcaga

SEQ ID NO: 562965 - DNA, 98 bp, Homo sapiens
aacaaaatgtcaacaaattgatgggatctgcatttactgctcaaccacatctaatttgatgtcctctgcagatttaaaatgtgtgccttcttttccgt

SEQ ID NO: 562966 - DNA, 88 bp, Homo sapiens
attggccattagcacctacgccgcctacatcgggggctacgtccactacggggactggctgaaggtcagtcattggcaccatgaactg

SEQ ID NO: 562967 - DNA, 98 bp, Homo sapiens
tgagaagcactatggtcgtgagagtcgtcagtgccctattccttcacatgtaattcagaaattagggacagtctacaaataagaaacctcgaaaatct

SEQ ID NO: 562968 - DNA, 74 bp, Homo sapiens
ctaatttcacggacactgaaagcagagaccatggagcttcttgttcaaccttcacttgactggagacatccacg

SEQ ID NO: 562969 - DNA, 83 bp, Homo sapiens
gccagggccgcactccggagactcgcggttgctacgcgcaccatggctggagacaatgcagatcttcgtgaagactctgactg

SEQ ID NO: 562970 - DNA, 101 bp, Homo sapiens
gaaaaaagaaaagaaaaaagccaaaactgtggaacagactgcaacaaccacaaacaaaaagcctggccaggcacgtgtggttctcaaatataggcattctg

SEQ ID NO: 562971 - DNA, 80 bp, Homo sapiens
cgagcatggcatggccccgcaggtcttcacccaggccctggagtgcatgcgcagaacccagtgacttgattgtaaaaatt

SEQ ID NO: 562972 - DNA, 75 bp, Homo sapiens
ccaccatcgagcagctgtgcatgttctgtggctgtggagatgagagcaggatcccagctgggacctggatatcag

SEQ ID NO: 562973 - DNA, 75 bp, Homo sapiens
gccgcccgcagagcaagcgcggggaaccaaggagacgctcctggcactgcaggccatcgaagacggcaatttgga

SEQ ID NO: 562974 - DNA, 78 bp, Homo sapiens
aaacacaaagccggctacgcgctgcgagtactatactggcaattgctggagaagattttgcaattgttgcttctgata

SEQ ID NO: 562975 - DNA, 100 bp, Homo sapiens
caggaaacatggcggcggcgggtgttgtgagcgggaaggatggctacttttctcatcggccgaaagagaaagtgcgaacagacagcaacaacgagaactc

SEQ ID NO: 562976 - DNA, 100 bp, Homo sapiens
atcagtatatcagtgttctccaaactcaggtctccatcatcaccagttccagtagtgaaaaacagaacccaacaaactcaaaatacattacatttaccac

SEQ ID NO: 562977 - DNA, 83 bp, Homo sapiens
aatatctgtcttcggtggactccttcggcagtccacccaccgccgccgcctcccaggggatcctcttggtgtatgacatcacc

SEQ ID NO: 562978 - DNA, 51 bp, Homo sapiens
ccaccctaccacagggtcagcctccccgtttgccattgtcttcaaaactcc

SEQ ID NO: 562979 - DNA, 82 bp, Homo sapiens
ccctcagatctgtggagcagatccgatggagaggctgagctgctccaggacttggggttgggttaacggcatggagaacagt

SEQ ID NO: 562980 - DNA, 89 bp, Homo sapiens
atgtggaacaggaccttaaggagaaggaagatactattaaacagaggacaagtgaggttcaggttgctgcagcaactggtcacacagta

SEQ ID NO: 562981 - DNA, 75 bp, Homo sapiens
cgcaggcacccggcacgcgccttccccgccgccacgatgcccaagaggaagatccgagtgaagcctgacaggacc

SEQ ID NO: 562982 - DNA, 100 bp, Homo sapiens
ggaagagtcaggggcacagagagatggagagagacctagttagggcctgtgaactcggagctgttcctgcgccatgttcctggatggctgcgcccacttt

SEQ ID NO: 562983 - DNA, 82 bp, Homo sapiens
gtgttgagtaaacagaccaagttggatcttcttcagcagtatcgttctgctgtgtgcaaactagacagtgtgaataaggatc

SEQ ID NO: 562984 - DNA, 74 bp, Homo sapiens
aagttctgaaggatgttcagccccgggtcactccacttgggtcctgaggacaccgtgagccagccaggcctggc

SEQ ID NO: 562985 - DNA, 83 bp, Homo sapiens
cgagaaggagcagcgccggcggctggaggtttttagaacttcagccataaaaatgggcagaattttccttgatcatatcggtg

SEQ ID NO: 562986 - DNA, 82 bp, Homo sapiens
ggcgcgtcaggccgcgacgagggcgctgagtggattgtattacacagagcatgaatatacttctttaggttacacgcatggg

SEQ ID NO: 562987 - DNA, 75 bp, Homo sapiens
gtctccagcgggcctggactgtgggctggtgtgtggaactgggcctggagaacagctggcgccagcaccgcgagg

SEQ ID NO: 562988 - DNA, 100 bp, Homo sapiens
cagcgtgttacaacgtgggactgtgaccagggcaagcactctgacagtttcaattttgtggggaaattgcttggaccaagaggaaactccttgaagaggc

SEQ ID NO: 562989 - DNA, 83 bp, Homo sapiens
caccatgccgctcctaagcctgcacagccgcggcggcagcagcagtgagaggggcggcctgagctgacacccatagcgatcat

SEQ ID NO: 562990 - DNA, 100 bp, Homo sapiens
agcatattttgaaagatgtggctacaaggtaaagaagcttgtgtaatcgcagaggaaggacataacagtttggtaactaaaagaaccagattctgcatcc

SEQ ID NO: 562991 - DNA, 74 bp, Homo sapiens
actgcgcagaccagacttcgctcgtactcgtgcgcctcgcttcggtgtgcaaccacaagcaggagtgccactgc

SEQ ID NO: 562992 - DNA, 74 bp, Homo sapiens
attacagacgacaaagtagcactggcagctgaaaaagttggatgaagatagtttaaccaaacaaccagaagaag

SEQ ID NO: 562993 - DNA, 75 bp, Homo sapiens
ccaagccgccctggatggagactcccagggcaagtgtccagagaatggctgggatgaaagtacacttgaactctt

SEQ ID NO: 562994 - DNA, 83 bp, Homo sapiens
acgcagagctcatcgtccttggggcgaggacaaccactggatctgcaagccctggaacctggcgcgcagcctggacacccacg

SEQ ID NO: 562995 - DNA, 75 bp, Homo sapiens
ccaggagcaccgccgaggactccagcacaccgagggacgcagaaaggctgcgtgctctccttcctgctgccctcc

SEQ ID NO: 562996 - DNA, 100 bp, Homo sapiens
gcgtcagtgacgtcagcgagaccgaggtgagcgtgggcgttgccagtggtgctctgtcagtgcctatgctggattttcctctacgtgcttcagtcttctc

SEQ ID NO: 562997 - DNA, 74 bp, Homo sapiens
cggaggtcgataagctggaactgatgacattgtggatatcaagcctgccaatatggaagagctaacagaggtga

SEQ ID NO: 562998 - DNA, 76 bp, Homo sapiens
cacaaatgcacaatttcctgcggaaatcagggattgtgggactttaccaaatcggtttgtaataacacctagaaga

SEQ ID NO: 562999 - DNA, 83 bp, Homo sapiens
cagatgttgtggatcttctcgtggaggatctctgctgtctcttggatcccatctgcctagatggaagaggatcctatccgaag

SEQ ID NO: 563000 - DNA, 49 bp, Homo sapiens
agggcgtcaggtccactgggaaggtgaaatctgtcatggagcagaactg

SEQ ID NO: 563001 - DNA, 96 bp, Homo sapiens
agttacttattcttttaagaggtctgcctggttctgggaaaacaacattgtctcggtgtcatttgcctatgctgtatattggattagaatatggtt

SEQ ID NO: 563002 - DNA, 82 bp, Homo sapiens
gtgacaaaggaccgggacctgttggttgtcgcccatgatctgatccggaagatgtcacctatgcctgaggaaacccagaccc

SEQ ID NO: 563003 - DNA, 75 bp, Homo sapiens
aaattcatcccagaaatctaagaggaacttgaaatgcaggctcgagctcatggactttcccttattccatccacg

SEQ ID NO: 563004 - DNA, 100 bp, Homo sapiens
cccggctggacgccccggtggactacttctaccgaccagagacccagcaccggtgaccaaaagccagccccactgtgagttgaactctttcgtgttgacc

SEQ ID NO: 563005 - DNA, 80 bp, Homo sapiens
gccccctggagggggcagtcccgggagaacctgcggcggccggagcggaacatcgtgatcaattagccactgccaaagat

SEQ ID NO: 563006 - DNA, 90 bp, Homo sapiens
cgtgaagatgtcctaacactgctgctgcctgtgatgggagattcaaagtccagcatggaggtggtgttcccactgatgaagagcaggcga

SEQ ID NO: 563007 - DNA, 90 bp, Homo sapiens
attctggccccagctacaccccaggtcacggattgctttttaaaaccaaattggagaagtctctggcctggaaagaggcccagcctgagc

SEQ ID NO: 563008 - DNA, 50 bp, Homo sapiens
ctcccagagtgttcaaaattacctgctgccggtcggtcgctgagatcaat

SEQ ID NO: 563009 - DNA, 147 bp, Homo sapiens
cagacccgtagttcctattgattcatcagattttgcattggatattcgcatgcctggggttacacctaaacagccagtcggatgatgattctgggtcagcttcaggctctggatctggttcgagttctggaagcagtagtgatggaa

SEQ ID NO: 563010 - DNA, 75 bp, Homo sapiens
caagaagggccttactccttcacagatcggagccaaggcaaagagggaccactgtgctcatggacccatcgctgc

SEQ ID NO: 563011 - DNA, 75 bp, Homo sapiens
aagagtcagtggaaggcacggcaatctatttaccagaaactgatgatggtgttgatgatctgaaaataaatcccg

SEQ ID NO: 563012 - DNA, 88 bp, Homo sapiens
gagatccaagtgcgcgccctggcgggtccggaccaagtactatactggcaattgctggagaagattttgcaattgttgcttctgatac

SEQ ID NO: 563013 - DNA, 75 bp, Homo sapiens
tttaccgcaattatggcatcctggccgatgccacggagcaagtgggccaggctgctgagcttcgtgcttatctga

SEQ ID NO: 563014 - DNA, 100 bp, Homo sapiens
gaaaagggccatgttcggagtgtatgacaacatcgggatcctggcagatgcgtagcatttgctgcatgggttaattgagaatagaaatttgcccctggca

SEQ ID NO: 563015 - DNA, 83 bp, Homo sapiens
ctgcaccagcgccttgatcgagtacttgaggggctttgaccacgacctttgaagagcttcattttgagatcaagccccacgat

SEQ ID NO: 563016 - DNA, 82 bp, Homo sapiens
aaaagatgactacaaacataggatgttttggcgagagatgtattcagtggaggaagctgatgcagagaggtgttcataaaga

SEQ ID NO: 563017 - DNA, 89 bp, Homo sapiens
ggctctactctcctggactgcctcccataaagcccaagtaaatgaccggcggattgtggatgggatgtttgctgtctgtggtgttcctg

SEQ ID NO: 563018 - DNA, 75 bp, Homo sapiens
caaactcttcaagccttcctttgatgtgaaggctctcaaaattagagagatgtgtaattgtccaccactgtctaa

SEQ ID NO: 563019 - DNA, 75 bp, Homo sapiens
ccaaatcttctccctggacctcgtgcatacgggcaagtgtccagagaatggctgggatgaaagtacacttgaact

SEQ ID NO: 563020 - DNA, 82 bp, Homo sapiens
tctcccaactggctggtctctgccgcacactgctacatcgatgacagaggattcaggtgagaagccctaccactgcaactgg

SEQ ID NO: 563021 - DNA, 50 bp, Homo sapiens
atccgccgcccgtccacacccgccgccagatctgccttctggagactgcg

SEQ ID NO: 563022 - DNA, 100 bp, Homo sapiens
cataatgattataaagtggtttctcctgctttgcgagctgtgggaaacattgtcacaggggatgatattcagacacagattctggatgaaattgaagaac

SEQ ID NO: 563023 - DNA, 51 bp, Homo sapiens
ctggaatgcactttatcgctaccgaggctggagtgcagtaacaccactgaa

SEQ ID NO: 563024 - DNA, 100 bp, Homo sapiens
tgctgcttgtgtctccctccctgtgcaggagctgaaaggcgggaaggcttattccaaggtccttctggcactcctctggtggaccgcccccatcggccac

SEQ ID NO: 563025 - DNA, 75 bp, Homo sapiens
gttcagtcagattggaccctgtaaaagctgtaaaatgataacagagggatgaaggtggctggagaagaggaccag

SEQ ID NO: 563026 - DNA, 100 bp, Homo sapiens
aacgatggcattttgaaaacagcaaaggaatcagagatcattgatttcttcctgggggcctctctcaaggatgaggttttgaagattatgccagtgcaga

SEQ ID NO: 563027 - DNA, 101 bp, Homo sapiens
cggaggtgctggcacatgagatcgagcggctgcagatggagatgaaggaggacgacgtttcttttctcatgcgctggaatcccatgggcggcttctgtgag

SEQ ID NO: 563028 - DNA, 100 bp, Homo sapiens
ctcactgcagaggtgctggagctggcagttccgcaagaaccgtgggcgacagttatggagaagcgtctgcaggaggctcagctgtacaaggaggaaggga

SEQ ID NO: 563029 - DNA, 82 bp, Homo sapiens
cttcaagggaataaaattttctaagaacccagcaagcgtagtcgaggagccctggggtccatcgccctcctgggcttggtgg

SEQ ID NO: 563030 - DNA, 89 bp, Homo sapiens
aggttatcttcagtgtgtcttggcggatgagttgtttcaggcttttatgaggaaagcgtttctgtgtagaaactggaagctgttcaggg

SEQ ID NO: 563031 - DNA, 83 bp, Homo sapiens
cgcccgactgctgcaggccggctacgagcccgagagcctgtcaggattggagctgctttccgagcacctggaccccaaactcc

SEQ ID NO: 563032 - DNA, 90 bp, Homo sapiens
ggctcaacgagaacaagctatcagcacaagctccgggtggataaggcagctgctgcagcagcggcactacaagccaaatcagatgagaag

SEQ ID NO: 563033 - DNA, 90 bp, Homo sapiens
attccaagtaactcttatttggatacaacttcagtattaaaggaggaacatgttacaacctttgaagatgaaggatcctatataattcaa

SEQ ID NO: 563034 - DNA, 50 bp, Homo sapiens
tggacatcacaaagcaacctgtggatgtgatggagctgcttgaagaagat

SEQ ID NO: 563035 - DNA, 108 bp, Homo sapiens
accattacagttccagcctctttcatgttgaggatgttggcttcacttaatcatatccgagctgggcagcggtcttaattctttttatgatcaacgagaatacatagg

SEQ ID NO: 563036 - DNA, 75 bp, Homo sapiens
aatcttccaagtccaaggatgtatacgaggaatgtctattgaccaggctttggctcagttggaattcaatgacaa

SEQ ID NO: 563037 - DNA, 98 bp, Homo sapiens
ccgagacgttgttgagtcccctgtgtcctcttctgggagcagcatttctttctattactactatctatgctgagactggttcaggttttgtagtacca

SEQ ID NO: 563038 - DNA, 98 bp, Homo sapiens
cgttgtttttgcttctccataacgagatggtgtctggagtgtacaagtccgcggagcagggggaggtgaatctacctgttactcgtattttggacaat

SEQ ID NO: 563039 - DNA, 127 bp, Homo sapiens
cccgaacttgcgacaagttgccggagccgcggggcgcgggcggcggacagattgaccttcagagcgaggatttggggtggaaggcaggcatggtcaaacccatttcactgacaggagagcagagaca

SEQ ID NO: 563040 - DNA, 96 bp, Homo sapiens
cagttgtgtgctctttgtcatagccagaatgaggacctaatttgcttcaaagatatcaaaccagcagcaactcatcattatcttgtggtgccaaag

SEQ ID NO: 563041 - DNA, 99 bp, Homo sapiens
cacacagggattttgaaaatgctgcacatcccttaatagtcatctacatagaacctatgagaaccccaaagacattaaagattgctgaaatacaggcaa

SEQ ID NO: 563042 - DNA, 75 bp, Homo sapiens
accagttgatgggcacctcccgggacggggtattgtccagtcagaagaaaaacttgtcatcagtgcatcctgggc

SEQ ID NO: 563043 - DNA, 89 bp, Homo sapiens
tcgatgtgctctgcgtgttgctggctggttcgatgcccagaactgaatgctgtgctccagctgtggcctcaccggtgctgaatagagag

SEQ ID NO: 563044 - DNA, 82 bp, Homo sapiens
tgcgagccgggaagacgcggggaagaggaggcggaaaaggacgcaaagttctccggcgagggtatttctcaagctgccagat

SEQ ID NO: 563045 - DNA, 100 bp, Homo sapiens
ggatcatggcatactgtgatgctctgagctgcctggtgatatcacagccttctcctcaggcctcttttcttccagggaaccccaagagcatccaatagaa

SEQ ID NO: 563046 - DNA, 100 bp, Homo sapiens
gcagcatctacaaccctgaagtgcttgatatcacagaggaaactctgcattctcgcttcctggagttctgggaggtgatcagtgatgaacatggcatcga

SEQ ID NO: 563047 - DNA, 50 bp, Homo sapiens
gagaaacccggagggcgccggggtcctactgctctgttggctcatgaaat

SEQ ID NO: 563048 - DNA, 76 bp, Homo sapiens
ctcagggagagcgggcagccttccaggtggacagtttctctgtttgaagaacataaggacatttctcacggcctgt

SEQ ID NO: 563049 - DNA, 83 bp, Homo sapiens
catttctatggtcctcctcacctatggccgctggcagacgttccatcctcagagcagcctgaactgttcctaaagaaacttca

SEQ ID NO: 563050 - DNA, 51 bp, Homo sapiens
gagaaggacaacacctacttaggtatagtcgtctccccctccaccacggca

SEQ ID NO: 563051 - DNA, 90 bp, Homo sapiens
attgattattcctcgcccacatctgtgccaggccctccacgcccttcaggaggagcaggccagactcaagatgaggctgtgggacctgca

SEQ ID NO: 563052 - DNA, 98 bp, Homo sapiens
gcgtatggagtggaaacgcttgtagggtttcaccagagggaagtgtaacatctcccatttttctgacatatttgctgctagagagtttaaagcccgag

SEQ ID NO: 563053 - DNA, 83 bp, Homo sapiens
ctcccactgattctacattacggagatgcagaaactaccagaggccgttcagctaattgagaaggccagcatgatgtatctag

SEQ ID NO: 563054 - DNA, 100 bp, Homo sapiens
gtctctggctccctcctcccagggccaggcgccgctcagaacgctgcggataaccgtctggtccttgtgcacaaaatccgtgtcttacatcaaatacccg

SEQ ID NO: 563055 - DNA, 74 bp, Homo sapiens
gggagcctgaaaactgtgaatggagcttactccacgggaacagcctctagataatctgagttgttgaaaatacg

SEQ ID NO: 563056 - DNA, 122 bp, Homo sapiens
atcgctgctgggcgctcttcctgtctctctgctgctacctgcgtctggtcagcgccgaggtgctggagaatctggtaaaagcaccattgtgaagcagatgaggatcctgcatgttaatgggt

SEQ ID NO: 563057 - DNA, 100 bp, Homo sapiens
agcggagctgacacagccaaattttccacacgcaggccaagcagggcgccgtgctgcaccccacctgcgtcttcgctggcagccccgaggtgctgcacgc

SEQ ID NO: 563058 - DNA, 100 bp, Homo sapiens
cttatggacagcctcccactggtccaagctctccagaaggaggtctgcccagatgcgggtctgaacctgagccctcccgtgacagccggcaggcccagcc

SEQ ID NO: 563059 - DNA, 100 bp, Homo sapiens
ggctgctgtcgcccagcgccgccccgtcgtcgtctgccttcgcttcacggcgccgagccgcggtccgagtgccctcaccaccaatggcatcaaccctgac

SEQ ID NO: 563060 - DNA, 90 bp, Homo sapiens
gaagcctaggcattttacctcctctccgcacggcgcagtacaactccaaatggctcaatggccaattagtagtatcttcagacttctgga

SEQ ID NO: 563061 - DNA, 100 bp, Homo sapiens
ccgcatcctgcagtgcattgcccaggagaaagtgatccctgcacttgcctgtctgggacaaggggcgttggagaccagggccagccctggccacacccca

SEQ ID NO: 563062 - DNA, 104 bp, Homo sapiens
caaaaagctgctttccccccacctgaacagaaaactgcatttgacaaggtgtcgtgaaaactacccctaaaagccaaaatgggaaaggaaaagactcatatcaa

SEQ ID NO: 563063 - DNA, 117 bp, Homo sapiens
cgcaagttggaacaaggagaagagctatggacacagagaatttttccaagttacagctacctagaatggagatttacagacagtcatctgggtggaggacacccttttgggatcagc

SEQ ID NO: 563064 - DNA, 74 bp, Homo sapiens
gggacctgcagttccttcttcgagaaaccaaggtgcattgacatacaacagagcaacgaggtagagaggacaca

SEQ ID NO: 563065 - DNA, 98 bp, Homo sapiens
gttgagaagcctgtacctgttttatacttgcttttgcttcagcgttctgtggttgtcaacaggtgaaacctttgtcctggggaatagtctggcccgct

SEQ ID NO: 563066 - DNA, 75 bp, Homo sapiens
gcgctctcctggctcccttctgccccagctccgtctcggcggcggcggggaaagcaggcaggatgggagagtcgc

SEQ ID NO: 563067 - DNA, 76 bp, Homo sapiens
cgaggccaggagccaggggcccagaaggtgacagagctgaatgaacctctctccaatgaagatcgaaatctcctct

SEQ ID NO: 563068 - DNA, 75 bp, Homo sapiens
ctcatacagatcctgcagctcatggccaacaggttcccaagtggggcccaggctcggaccatcctgtgtgtgaaa

SEQ ID NO: 563069 - DNA, 83 bp, Homo sapiens
ctgtcaaaaatggagttccacttctccccgcaaacctaggattgggaagttcagccatgaatatacaaatgcttttggaaaaa

SEQ ID NO: 563070 - DNA, 98 bp, Homo sapiens
tgtcatccattagagcggtaatcaagagattttaactcggctgctaagcagctgatagaatgggataagcctcctgtgccaggagttgatgctggaga

SEQ ID NO: 563071 - DNA, 100 bp, Homo sapiens
tcgaggttagagggaactgggaggcactttgctgtctgcaatcgaagttgaggtgaggaattttaaattggaacaagagcaagaaaaaaacaaaatcttg

SEQ ID NO: 563072 - DNA, 75 bp, Homo sapiens
tccgtaaccttgtggagaagaccccggcgctggtgaacggccagaagcggactcctagaagaggggagcagcaag

SEQ ID NO: 563073 - DNA, 82 bp, Homo sapiens
gcccatggagggtagatctcggttatcaatagtctggctgtctatcgtcatcgtgagactgactttggtgtaggagttcgag

SEQ ID NO: 563074 - DNA, 75 bp, Homo sapiens
ttgtaaagttcatcctgctctgaataggccccacagtatcaaatatccgcctggctggattagagtatgttctgc

SEQ ID NO: 563075 - DNA, 100 bp, Homo sapiens
agaggagtacttcgccacttactttaatgagaagatctccattcctgaggaggagcactatgttggccatggaaatgctatcaatgagctgaaattccat

SEQ ID NO: 563076 - DNA, 95 bp, Homo sapiens
ggtggcttgtggtgcggcctcaccatacaggaacagggcagacgttagcgtgagtgatcactctcaatcccggccacagcaccacaagttattgt

SEQ ID NO: 563077 - DNA, 100 bp, Homo sapiens
agattttttttttgggacgaaaagacagtcagatcaaacgtcatggcaaacgtcttaacattgaacttgtgcaacagacagggaaaaatgcattttttgt

SEQ ID NO: 563078 - DNA, 75 bp, Homo sapiens
acggaggcaccatgaagaagtcttactcagttccctgacatcgtggagttctgcgaggccatggccaacgccggg

SEQ ID NO: 563079 - DNA, 100 bp, Homo sapiens
ctggggatttacaagagtctttaaagcacggacttacacctattgtaagactttgaccccgacgcaggcttcagtgattgccgcggatcagaagcctgag

SEQ ID NO: 563080 - DNA, 101 bp, Homo sapiens
atggcggaacgcaggagacacaagaagcggatccaggctctccgtgtgaaatggtcccatctcagactgccctgggtagacctagactggctcatagacat

SEQ ID NO: 563081 - DNA, 96 bp, Homo sapiens
ttgcattgactggaaacaatggcatttacagaaagagtcaacagcagtggcaacagagttgatctctctaatgtattagatcttcatgcctttgat

SEQ ID NO: 563082 - DNA, 100 bp, Homo sapiens
cctgtacagcctgcagaactgctgcatttgatgccagaaggcaaacacaacctgcatttgcgttttgcagatgaattcaacaagttagcagaagacttcc

SEQ ID NO: 563083 - DNA, 82 bp, Homo sapiens
acgccatgaaggcctcgggcacggatcatccagcagctcgtcaacggcatcatcacgcccgccaccatccccagcctgggcc

SEQ ID NO: 563084 - DNA, 105 bp, Homo sapiens
gcagacggcgacagtggcggcggcgccatggcagggcttgcagagcatgtctgttcgatcctggcttccctcctgcggaacctgagagggcagcagcggacccgg

SEQ ID NO: 563085 - DNA, 76 bp, Homo sapiens
cgggagctcagtgagcccatggaattccagtacctgccagatacagacggtttttccaaactgcttgtgatgtccc

SEQ ID NO: 563086 - DNA, 78 bp, Homo sapiens
actgcaataagccgccttccaagatgatatcatcaagttgaatcgaaaggaagggaagaagcagaattttccaagact

SEQ ID NO: 563087 - DNA, 112 bp, Homo sapiens
atttcctgcttctccttttcatgagtgttcctgtggtctctgcacctcctttctaccattcctcaagaattttgtatccaaggcccaaaagtttgttacccaagatgatgaa

SEQ ID NO: 563088 - DNA, 49 bp, Homo sapiens
catcattgatgtggtgcgatcgatggcttcccagttacgactcttcgat

SEQ ID NO: 563089 - DNA, 74 bp, Homo sapiens
cgggatcccagcctcaggcgtgcgcggacggtgtgcggctgccactgcagagccccgccatggaagacacgccg

SEQ ID NO: 563090 - DNA, 100 bp, Homo sapiens
ggtaaagtgcaagttaagagttcagacatacaagttggagacctcatcatagtggaaaagacacagataatgtacaagtggatagagcccaaaatctgcc

SEQ ID NO: 563091 - DNA, 100 bp, Homo sapiens
tcttggtcatgtgaactgcacgataaaggaactcaggcgcctcttcttagttgatgatttagttgattctctgaaggttaaacttcagcctgtatatgaa

SEQ ID NO: 563092 - DNA, 75 bp, Homo sapiens
tggagaagatcggcatgggtcggcctggtctggcgtgctcctgatcagagttactctgatctgaagattttggcg

SEQ ID NO: 563093 - DNA, 80 bp, Homo sapiens
agaacatccacagaatagacctgaagacaaaaatccagaagtacaagcagtctgttacagcaattggaacttgcacagat

SEQ ID NO: 563094 - DNA, 100 bp, Homo sapiens
tcggccccgcgcccgcccaggggtcgctgtcgcctgctgctggctcctcactggtcgttgaggacttccacatggagattggcacaggaccagactcaag

SEQ ID NO: 563095 - DNA, 51 bp, Homo sapiens
ggaggaggttcgaagctgagtatgtgacagtctatgactttgaaagaagcc

SEQ ID NO: 563096 - DNA, 95 bp, Homo sapiens
ttttaaggttgaagagtaaacaaagtgagcctccagtaaactttattcaaagttcacaacagtaccaggaacagattataccattctctcggccc

SEQ ID NO: 563097 - DNA, 82 bp, Homo sapiens
gtgctcagggctcgcgggtgaccgaaaggatcatgaactagtgacctggaaagtgtgaagcctcagtttaggtcatctggtg

SEQ ID NO: 563098 - DNA, 75 bp, Homo sapiens
ggaaatcgcctcccgagaagaagttgaggcgctatatgtgaagttcatttccaatccgccctccatggtggcagc

SEQ ID NO: 563099 - DNA, 100 bp, Homo sapiens
agaagatccctagtgagactttgaaccgtatcctgggcgacccagaagccctgagaggtgtattgccaggaatggcccctcctatcgtacccatgataca

SEQ ID NO: 563100 - DNA, 100 bp, Homo sapiens
gaagaggtcaaagttaattggagcctaccttccgcagcctccgactgccgcagcgggaaccgcaagagcttggtggtaggaacgccctccccgaccctct

SEQ ID NO: 563101 - DNA, 100 bp, Homo sapiens
ggccgagaatcacctcaatggcaagaattcctctttgactctgactggagaggagtggagtcaacatatcaatggagcaagtcacagtcgtcgatgccag

SEQ ID NO: 563102 - DNA, 100 bp, Homo sapiens
aagaatatgaagaggaggaggaggaggactatgacgaggaggaggaagagtccagtgaagctcaccttgcagagcgccaagtcccgagtggccttctttg

SEQ ID NO: 563103 - DNA, 100 bp, Homo sapiens
cataggtattaccacacaatttcatgcatggtggcatattttaactggccttggttcctatcttcacatccttttcaggaacaagctgaaagctggatac

SEQ ID NO: 563104 - DNA, 90 bp, Homo sapiens
gcatctcggcctcctctgccaccagggagctggacgagctgatggcttcgctgtcggatttcaagccttcagggtcgaggtgtgggagac

SEQ ID NO: 563105 - DNA, 97 bp, Homo sapiens
aagggatcctcccgcttcagcctcccaaagcattgggcttacaggggtttgccaacttgttaataagatggaggagaatactggcaaggttaagcct

SEQ ID NO: 563106 - DNA, 75 bp, Homo sapiens
tatggtcaactccagcttctgggattccttagtaaactactgaaaatgtgtgtctgacatgcaagctcagtgggg

SEQ ID NO: 563107 - DNA, 74 bp, Homo sapiens
cgagcgatctggacccttcacacaccctgatttcgaaccgagcactgaagtaaaggccgaggggcaaagaaaag

SEQ ID NO: 563108 - DNA, 90 bp, Homo sapiens
cccaccatcaaagagatcagagaccagggctcctgtggctcctgctgggtttggcagttctctaccagtggaccaatcttttcatccccg

SEQ ID NO: 563109 - DNA, 100 bp, Homo sapiens
caggtgggcaagatgaaggctatcgttgagaagcttcgcttcacatacagcatactaaataagcttactcctgaaaagtttgacaagctatgccttgagc

SEQ ID NO: 563110 - DNA, 100 bp, Homo sapiens
tggacaaagctgttgtctcagggagcacagaactacaaggctttggccgaccaagtgtgtaccatgctgctattgtcatcttccttgaattctttgcgtg

SEQ ID NO: 563111 - DNA, 75 bp, Homo sapiens
tcgacggtccccactttcccctgagcctcagcacctgcttgtttggaagggctaccgacagaaggactatttcat

SEQ ID NO: 563112 - DNA, 75 bp, Homo sapiens
atgctgcttagctttcagcattctccagaggcgttccatttggtgaccaagaatatggcccaggtgaccaaagcc

SEQ ID NO: 563113 - DNA, 75 bp, Homo sapiens
tatagacagctggcagtgatggtatagccaggctggagaaaagaagctgccaccatggttgcactttcactgaag

SEQ ID NO: 563114 - DNA, 100 bp, Homo sapiens
agttactctaacaagtctggaggtgcacagcaaagtcttcttctccccccgatgaaagaatgggaaggactcaggaaggctcaacttgcaaactccccag

SEQ ID NO: 563115 - DNA, 93 bp, Homo sapiens
gcagagctggagtcgtgtgtactgctccttggccaaggtcatcatcagatttgaaatatttaaagtggatacaaaactatttcagcaatgcag

SEQ ID NO: 563116 - DNA, 88 bp, Homo sapiens
tgcggcccctctttctcaacccagagcaaattgagacgtccgggtaatggaactgctggtccatctgaataaacgtataaaaagccgc

SEQ ID NO: 563117 - DNA, 141 bp, Homo sapiens
cctggctccgtgtccgacccctggaagctgatgctgctggacgccactttccggggtgcacagcaagtgatgcaggacaagtactccaaaagtggcattgcttgtttcttaaaagaagatgacagttattgggaccccaat

SEQ ID NO: 563118 - DNA, 100 bp, Homo sapiens
tctcaggctttcctacaactcatgcccagcagcagcaagcagaaagcctgatctttgaccagatggcagtaacatttgaagatgtgactattatttttac

SEQ ID NO: 563119 - DNA, 82 bp, Homo sapiens
gtaaacggggctgctggtgggccgcgtcgaagacatggaccagggctacggagaagatggcagtgaacgtatactcaacgtc

SEQ ID NO: 563120 - DNA, 87 bp, Homo sapiens
cagcttttgtcagaagtgtattgataaatgctacaagtggaccttctagtgcagttgttcctaatacctcatctcggaaaaagaata

SEQ ID NO: 563121 - DNA, 83 bp, Homo sapiens
tcgtcagtgaggcggaaattgtggtgtacttgtaataactgaagtgaagtgatggactccgatttggagagtagtaagacgtg

SEQ ID NO: 563122 - DNA, 76 bp, Homo sapiens
ggcggaggaactgagacgtttcgaattccagggtgataaaagaaaatgtggctgaagttacccgaagttcagcttg

SEQ ID NO: 563123 - DNA, 100 bp, Homo sapiens
gctctttgcggtggcgttggtgctgtttgcggatgctgatgcagatcgttctgtacttgcgcatgtgccttgcgcacagtgcgggggtggtgcccacctc

SEQ ID NO: 563124 - DNA, 90 bp, Homo sapiens
gacttttggggggaaactaggtcgatggtcggcggcgcccggatgggcagctgagcagtggacgtcagctcagcgaggtcttcatccagc

SEQ ID NO: 563125 - DNA, 90 bp, Homo sapiens
cttccaaccaggggctgagcttctgcgctgtggagaagccaggaattgaatgatctggcacgggaccctccagcacagtgttcagcaggt

SEQ ID NO: 563126 - DNA, 99 bp, Homo sapiens
agagggaagagattcagccagcacactcctcgcgagcaaggtaggtgagctcgtgaaacaatatgaagaggagaaaatagccttttaaggaaattggcc

SEQ ID NO: 563127 - DNA, 100 bp, Homo sapiens
gtgaactatagagtttgtggacagatttatattggttatgaagacagtatggagtttccagaccatagtagacatttgctacagtgtctgagcgagcaga

SEQ ID NO: 563128 - DNA, 87 bp, Homo sapiens
gagtgtgaggagcctgtccccaaggaaaccatggaggagcactgcaagcttgagcaccagcagaccctggagaagaaggaagaagaa

SEQ ID NO: 563129 - DNA, 51 bp, Homo sapiens
gtcaaggccctgtgcgctaaggccaggatgcggaagggagagctgtttgac

SEQ ID NO: 563130 - DNA, 50 bp, Homo sapiens
agctgcgcaaccctaggaactctcggatggagtctcactctatcacccag

SEQ ID NO: 563131 - DNA, 83 bp, Homo sapiens
ccttacccgacctcagatgctcccttctgctcctgacggtctggaaaatcccgaagcagaagcccgtattcatctaggcattc

SEQ ID NO: 563132 - DNA, 89 bp, Homo sapiens
gagaactacagaaacctggtctccctaggaaaatcctgccttgcttcgttgggcctatgcaagaacaataaatgtctatcctaatttca

SEQ ID NO: 563133 - DNA, 100 bp, Homo sapiens
ggaaactgaagatgaggttgccatgggaactgctggtactgcaatcattcattttgtgccttgcaggaggatgcagcattcaaggttctatcttggaagc

SEQ ID NO: 563134 - DNA, 100 bp, Homo sapiens
ggctccctgtatgcatggtgtggggttggtgtgattagcttcgcagtctggaaagctttaggagttcacagtatgtgttcagagcaacattgttttgttg

SEQ ID NO: 563135 - DNA, 98 bp, Homo sapiens
ccgctgcagccgccgccggcgccgaacttgggctcgggaagccggcggaccgcgtcctgcgccggagcagatcatgagcgtcttgttgttcatcgagc

SEQ ID NO: 563136 - DNA, 75 bp, Homo sapiens
tcagactttgccctcaagaatccattctattccttagaaatgcctatcagtttgggacccactctggaacctgag

SEQ ID NO: 563137 - DNA, 51 bp, Homo sapiens
agtcaccaacgagatcttccgccactacgaacaaaacttacctggggtccc

SEQ ID NO: 563138 - DNA, 82 bp, Homo sapiens
gcatgtcctcaactttctgggcgttcatgatcctggccagcctgctcatcgcctactgcatctctgctttctatccgtcaag

SEQ ID NO: 563139 - DNA, 82 bp, Homo sapiens
cagagcctcgcctttgccgatccgccgcccgtccacacccgccgccagtgccctctggtggtcagaagatgctgtgctgtct

SEQ ID NO: 563140 - DNA, 100 bp, Homo sapiens
cgaaggtctccggagagtcgccggcggtgccaggactcacaccacccggcaagaactgctcactacggctccctgccccagaagtcacacggccggaccc

SEQ ID NO: 563141 - DNA, 100 bp, Homo sapiens
gggtgcaggaattcacacagaaaagtggaggccaaggcgtgagaattcctcaatgactgccctctaaaggaagaggtcacagggattatggacccagaac

SEQ ID NO: 563142 - DNA, 98 bp, Homo sapiens
ggagcgcgaggaggaggccctggcatccaagcgtttccgtgccgagcggcaggacaacaaggagaactggctgcaaggcccagcgccggccctactat

SEQ ID NO: 563143 - DNA, 75 bp, Homo sapiens
ctttgaaggaggatgctccagcaggtctggaggcggctggtggaaatccaattccccgcggagcatggctggaag

SEQ ID NO: 563144 - DNA, 100 bp, Homo sapiens
ccaggagcccagacaccagccccccaccatgccttccgggcactgcttcagatccgagccatgaggaaaaaattgggccccttgtccccaaccagcttta

SEQ ID NO: 563145 - DNA, 74 bp, Homo sapiens
cggccacttttgccttcccgggagctcatgggacacatgtagctagtatagctgctggacactttccagaagaa

SEQ ID NO: 563146 - DNA, 82 bp, Homo sapiens
acgaggactacgtgccgtcggtttcaaggagaagctggggccagcaggcccaggagtatcaagaacaaaagcaacggtcctc

SEQ ID NO: 563147 - DNA, 100 bp, Homo sapiens
gcctactggtgactcggctgcagcaaaatgatgcttcaacacccaggccaggtctctgcctcggaagtgagtgcttctgccatcgtcccctgcctgtccc

SEQ ID NO: 563148 - DNA, 51 bp, Homo sapiens
cagcacggcgtggcctctcagcctcgctgcagaaccttggcctgaaaatgc

SEQ ID NO: 563149 - DNA, 90 bp, Homo sapiens
ccggaagcagcacccctacacgttcccgggtggcagtggcactgtctttgcccggactccttctcctcccccacgtcggcgctcaccttc

SEQ ID NO: 563150 - DNA, 89 bp, Homo sapiens
ctttgtctccttcgacttggagtctttgtccaggacgactggcatccttcgaaccaactgtgtggactgtttagatcgcaccaacacag

SEQ ID NO: 563151 - DNA, 97 bp, Homo sapiens
ccgcaaacagggcaacccgcagcacttgtcccagagggagctcatcacccctgccttcctatttcaaggaaagacgccaaggtaattttgacccaga

SEQ ID NO: 563152 - DNA, 100 bp, Homo sapiens
gctcccggagggagacgcgctgccgaggagaacccagcgggccaggacagctgatggttgtggcagaaacatctcaaggtagctggtccgcccccacttc

SEQ ID NO: 563153 - DNA, 100 bp, Homo sapiens
actgccagggagtggaggggagccaggcggccgcctcagatattcctatcattccggatctggaggaagtacaggaagaagactttgttttgcaggtggc

SEQ ID NO: 563154 - DNA, 100 bp, Homo sapiens
atggcaatgtgggtgtcaacagaggctggttctgtgagaaggtgctggagaatctggtaaaagcaccattgtgaagcagatgaggatcctgcatgttaat

SEQ ID NO: 563155 - DNA, 100 bp, Homo sapiens
tcataagggtgttggccttgccagggccttcctgggtgaggcgaagaagggaaggagccgtgtaaagccagtggaatatagtcagatgtacagttatagc

SEQ ID NO: 563156 - DNA, 75 bp, Homo sapiens
tggattcaatgtcatccagagcccagagcaggaatcagagatcattgatttcttcctgggggcctctctcaagga

SEQ ID NO: 563157 - DNA, 96 bp, Homo sapiens
ccgcagtccacagacccccgctcagtgcctgcggacacagcagcaacatcagagacaagaggtggaaacatacagaagaagcaaggaaattacagt

SEQ ID NO: 563158 - DNA, 75 bp, Homo sapiens
gggctttgcgtacagctcccaggagaaggcttgccgaggtgagaagccctaccactgcaactgggacggctgcgg

SEQ ID NO: 563159 - DNA, 97 bp, Homo sapiens
atcctttcccagaagaatgagaatgaggacagagcgggatgccaccagcttgtccaaagggaagttccaggagctcctggtgggcatcgttgtggag

SEQ ID NO: 563160 - DNA, 100 bp, Homo sapiens
tcactggccattggcttctcatggatgccctcccaagcaggcaatgccttccaggagcatacagcccacatccatgccacagagtacgcggtgggtatct

SEQ ID NO: 563161 - DNA, 82 bp, Homo sapiens
atttgaagtctgtgtcaaacatccatatcataagtggaattttggagatattcaaagataatcagcaactgctgtgatgaga

SEQ ID NO: 563162 - DNA, 74 bp, Homo sapiens
gtgaaacaccactgaagcattgccaagacggagatgcggctgcaggaccagcaactggccagacagctcatgcg

SEQ ID NO: 563163 - DNA, 96 bp, Homo sapiens
ctggaaatgcgaatcctaaagcgtttcctcgcttgcattcagctcctctgtgtttgccgcctgggttatcaatactctggctgaccatcatcatcg

SEQ ID NO: 563164 - DNA, 82 bp, Homo sapiens
gcctttgttcaccgccaaccccttcgagcaagacgtgggaactgaccaacactggatgaatttgaccatttcttaggagact

SEQ ID NO: 563165 - DNA, 90 bp, Homo sapiens
gatacagcctggaaggtgcgtgtggggctgggtctcggagtgggagacgtggagtgcagcgtcactggtgtaccgcctgccccagtcgtg

SEQ ID NO: 563166 - DNA, 100 bp, Homo sapiens
agaatgtatttacatctgtaagttcaaacttctcatggaacatctggaccctgatgaagaagaagaagaaggggaggtttcagctagcacaaatgctcgg

SEQ ID NO: 563167 - DNA, 75 bp, Homo sapiens
tttgaagttgggttcaggagtgtagaattggcaaagttattgccagcttcctggaaaaccaggagagctgacgtt

SEQ ID NO: 563168 - DNA, 100 bp, Homo sapiens
tataaatttgccatctccctctgcacaacttacctttgggacgagcctgtggagtgggagacacctgacctttctcaagctgagattgagcagaagatca

SEQ ID NO: 563169 - DNA, 100 bp, Homo sapiens
aagtgactgatgaagggaaggaaatcatgtcaagcgaagccttgaaaaagctgccctgagacggtgtcccgccgaaagtacatcgggtgattcttctcgg

SEQ ID NO: 563170 - DNA, 96 bp, Homo sapiens
ctatgagtcctctgaaatgaacagcatagtggagtctcactcttgttgcccaggctggagtgcaatggcgcggtctcggctcaccccaacctccac

SEQ ID NO: 563171 - DNA, 80 bp, Homo sapiens
cccgccgcccgcctgcgcctccggggccggccctgcagcatctgggctgatgggccgtaccctgcaccgtgagccacccg

SEQ ID NO: 563172 - DNA, 103 bp, Homo sapiens
gactgggccgcaatggacaagctgaagaaggtgctgagcgggcaggacacggaggaccggagcggcctgtccgagtgacagctggagtatcagccttggaagt

SEQ ID NO: 563173 - DNA, 74 bp, Homo sapiens
aaatgacatttctattcatcatttcacatgtgatgaagagccctggcctcccacgactacatcctgaagattgt

SEQ ID NO: 563174 - DNA, 75 bp, Homo sapiens
atttgtttcctgttttgaaacttccatctgtaagaaaaagcttgtggtgaaggggggcaaaaaaaagaagcaagt

SEQ ID NO: 563175 - DNA, 83 bp, Homo sapiens
attttatattgaaatggatcctccagctccctgtgctgtcaggaatctacaggacttggctcgtatttacattcgacgcacac

SEQ ID NO: 563176 - DNA, 98 bp, Homo sapiens
cagatttgaaaattcacccttgtagagtcattcctgcctttgagcggactcccttttaagatggcccactgcgtgaccttggttcagctgtccatttc

SEQ ID NO: 563177 - DNA, 101 bp, Homo sapiens
cagccacgtgagccatgccagccaccctacctgtgaccccatctgtggccccagttatcatggagtagagctgcttttctaacccaaactgtatgtcttga

SEQ ID NO: 563178 - DNA, 75 bp, Homo sapiens
cgctcaagaaactgtgttgtaccactgacaataataagcagataatctggagctttcaaaatgtttgccaaagca

SEQ ID NO: 563179 - DNA, 75 bp, Homo sapiens
ccagactcagggatcaaagagcaaacagattcagtggcctgcattgaaggcctttgagccctacttagagatttt

SEQ ID NO: 563180 - DNA, 56 bp, Homo sapiens
ctgacactgagaatgaagagtatcacagacaacgccattattgacgagatcactcc

SEQ ID NO: 563181 - DNA, 75 bp, Homo sapiens
agcaaccccaaaaggggtttctacatcagaaatttgtccagcaccacataggccctgtgaacacctggatgggcc

SEQ ID NO: 563182 - DNA, 83 bp, Homo sapiens
cacattctgattcagcaggcctgagattctacatttgtagtttaaagaccattgtgggggccctgatccagtcggtaaagaag

SEQ ID NO: 563183 - DNA, 75 bp, Homo sapiens
ctccgtactgatcactacatcatggtgcaggtgatggtcctaccagtgtgtctgttgaggtcacccgtcctaaag

SEQ ID NO: 563184 - DNA, 112 bp, Homo sapiens
gcccggccggggcctgcgggcgcccagagccgcgccgtccgcgccgcccgttctggtgatgtgtccaatctagatcccaacttctcatttgaaggcaccaaactggatgtgg

SEQ ID NO: 563185 - DNA, 82 bp, Homo sapiens
gggtacgttcgtgccgcgtctgtcccagagctggggccgcaggagcggaggcaagagctcaccatggatgatgatatcgccg

SEQ ID NO: 563186 - DNA, 89 bp, Homo sapiens
tcctgacggcttcgaagaaacggaagatgcctgtgtgccgccggcagaggctgggcagagcggcttgggtaaatccaccttaatcaaca

SEQ ID NO: 563187 - DNA, 51 bp, Homo sapiens
agtatgattggctgtgattttaggtgaaaggtgtagcagtcactcggccta

SEQ ID NO: 563188 - DNA, 100 bp, Homo sapiens
ttagagaagaattttccaaatgaatttgcaaaacttactgtagagatgtgaagcctgataacatgctgctggataaatctggacatttgaagttagcaga

SEQ ID NO: 563189 - DNA, 88 bp, Homo sapiens
ctgctgctgcacttacccgtatgagagctgaaagcacagcaaatgcagggcagtcggacaagaattcatgatttgttcctgtagctga

SEQ ID NO: 563190 - DNA, 98 bp, Homo sapiens
tccctttcgagttgcagcttacaacaagaaaaagaagcgtatggactactatgactctgaacagaaccacgtgaatgttgagggggcgacacacaagc

SEQ ID NO: 563191 - DNA, 73 bp, Homo sapiens
ctactcggagcgctgtcgcggccatgtctgccaggtggtcattcatcatcggctggttcgtgcgaagcttcaa

SEQ ID NO: 563192 - DNA, 100 bp, Homo sapiens
tatggaggccctgtctgcaatgatcgcctccggtgtggctgtctctgatggtgtcatcaaggtgttcaacgacatgaaggtgcgtaagtcttcaacgcca

SEQ ID NO: 563193 - DNA, 157 bp, Homo sapiens
aaaagatcccatagaaatgtttcattctggacagctggtaaaagtctgtgccccaatggttcgatattcaaaatgctgtgagagaagtaaggaaatattcctcagttcataccattgagaagagctccaccagcagacctgatgcctatgaacacac

SEQ ID NO: 563194 - DNA, 75 bp, Homo sapiens
aaaaacgcatctatctaacgtttaccctagcaaaccaaatatactgatgataatgctctgattcctaagaattct

SEQ ID NO: 563195 - DNA, 100 bp, Homo sapiens
tggaatcccggcgcctagaacgtgtttttcgggagagcaaaggctgtgtctacggcagcctggggatatacatcaagatggtgctcatgtggaccagtgg

SEQ ID NO: 563196 - DNA, 80 bp, Homo sapiens
aagatgtggacgagctgagcttcaacgtgaacgaggtcattgagatcctcatggaagattccaactccacagagtgacca

SEQ ID NO: 563197 - DNA, 100 bp, Homo sapiens
cttcaggcaccatgaaagctgtgctgcgcaaggctggaggcacgggccctggggaagagaagcagttcctggagggcgtctctggccgagcctctttttg

SEQ ID NO: 563198 - DNA, 82 bp, Homo sapiens
agtaaacggggctgctggtgggccgcgtcgaagacatggaccagggctacggaggacacagcttgggctatggctttgtgaa

SEQ ID NO: 563199 - DNA, 100 bp, Homo sapiens
cagggcccatcaagattttccccttcaaatcccttcggcacctggagggttccgagtctgaggaagacataaccttgtgcctgcctgcccacctctctct

SEQ ID NO: 563200 - DNA, 90 bp, Homo sapiens
gtcgcagcgccagacccaaggcccccgagtgagcgcgggcgccgagactgaggctgatgtgaatccaaaggcctatccccttgccgatgc

SEQ ID NO: 563201 - DNA, 100 bp, Homo sapiens
cacaaaactgcggcccttgtctgcaaacagtggtatcgacttatcaaagagggagaaccgaagattacaggaggccagcatgaggttggaacaagagaat

SEQ ID NO: 563202 - DNA, 100 bp, Homo sapiens
tttgacatcctgtgtgtggtgagggacaccgtggacccagtccaggacgacctgaggaaggaggatttcagcagcatgagcgctcagttgttatacaaaa

SEQ ID NO: 563203 - DNA, 100 bp, Homo sapiens
gttgccggctcccctctcaggacaacccagatgtgcaacaaagtgcgatgtgtactaatggtcacttgatgtgcgctggctgttttatccacctactagc

SEQ ID NO: 563204 - DNA, 100 bp, Homo sapiens
gtgtgcggaggggacaacagccactgcaaagtggtcaagggcacgttcacacggtcacccaagaagcatggtttttctattgggaaagctactgatcgga

SEQ ID NO: 563205 - DNA, 122 bp, Homo sapiens
cttccccacctgcccggtgcccgaggaggcagccaagctcgtggcctgcctctgcgtgcaggtacagccccgtggtggaggccggctcggacatggtcttccggtggaccatcaacgacaag

SEQ ID NO: 563206 - DNA, 75 bp, Homo sapiens
gcagctgaacaagaagagagccatccccaatcaggaagtacatgacctgctcagtgactatgagctcaaatactg

SEQ ID NO: 563207 - DNA, 100 bp, Homo sapiens
gaaacagaggagttggagttgctactaaaaagagaggtgcctttatctgatgatgatgaaagttacacagtttttcagttatgggacaaaaatattatat

SEQ ID NO: 563208 - DNA, 96 bp, Homo sapiens
gaaacagcaacaggtgatgatggagatgaagtatttgtggaggcagaatctgaaggattttcagctgaactctcatctctcaacactggcaaatat

SEQ ID NO: 563209 - DNA, 100 bp, Homo sapiens
cggcggggaccgtccagcccagcgattctcagtcagagtgtgaacatggctacgcctcttcattcccgtccatgccgagcccccgactgcagcattcaaa

SEQ ID NO: 563210 - DNA, 100 bp, Homo sapiens
cacagaattctctacatttgtgaaagtcagtttctgaggaatttcatcagctcggtcaaggagtgtgatgactggcgagcagatggctgccttccatcca

SEQ ID NO: 563211 - DNA, 100 bp, Homo sapiens
aacagaggactaattttggcagttctaaatttgaatttgagatacacgataagaatactccatggaagtctttccttgtcattgtagatggctcgcccaa

SEQ ID NO: 563212 - DNA, 100 bp, Homo sapiens
atgtttgtaaatgtgagtggaagccatgaggccaaaggcagttgtattgttatgagttgcagaaacgaattgctgaaatggaaactcaaaaggaaaaaat

SEQ ID NO: 563213 - DNA, 98 bp, Homo sapiens
gggattttgccttttggtaatgctgtttctgcttaagttggcaagacactccaagtttggcatgaaagaagtctttggatgaggatgacctaggtcct

SEQ ID NO: 563214 - DNA, 101 bp, Homo sapiens
tggatcgctccagagatgctgagcgaagactgtaaggagaaccctgttaatccctatatcctgaagaagaacatgatcctcatgacaaatcatttctatgc

SEQ ID NO: 563215 - DNA, 100 bp, Homo sapiens
ggacggcgttctggatctcaaagcgtgttctaagaacggaagcatctgggctggatggaatttagcatcaagcagagtcccctttctgttcagagtgttg

SEQ ID NO: 563216 - DNA, 94 bp, Homo sapiens
agcattactgattcccaaatggatgatgttgaagttgtttatacaattgatgcctgaaaacttcatgcctcctgttcccatcacatcaccaatc

SEQ ID NO: 563217 - DNA, 100 bp, Homo sapiens
aacaatatttctcagaggatagcctttcacttattcatctgtccagcatgactcatccccgggagtgttgaatgtgggcgctatctccaactgtctttgc

SEQ ID NO: 563218 - DNA, 82 bp, Homo sapiens
ggcgacagtggcggcggcgccatggcagggcttgcaggtttggtgcacctcgatttggaggaagtagggcagggcccttatc

SEQ ID NO: 563219 - DNA, 73 bp, Homo sapiens
tcatgatggagaattatggaaacctggtctcactggtgctacagttgaaactccagcagcgccggacccggga

SEQ ID NO: 563220 - DNA, 74 bp, Homo sapiens
gtgggaactctttccagcttgtgtctgggaggaaataatgctggccatacagttgttgtggattctgtggaata

SEQ ID NO: 563221 - DNA, 100 bp, Homo sapiens
ggctggacctgctggtgttcgcccacgaccatggtggcttcccacacttctgactcggacgttccttccggtgtcactgaggtggtcgtgaagctctttg

SEQ ID NO: 563222 - DNA, 100 bp, Homo sapiens
cgcctcctcctctcccgcgggcaccgaggactccgctcctgcccaggatctaccatacccattgactaactatggaagattataccaaaatagagaaaat

SEQ ID NO: 563223 - DNA, 82 bp, Homo sapiens
acagccgcccacttctggaaggttccatcccctgcaggcaggtccacgagatccagtcttgcatgggacgcctggagacggc

SEQ ID NO: 563224 - DNA, 75 bp, Homo sapiens
cttaaagcagctgacttcccagcagcatgcgattcttattgaccttggtacagcagggaagaactggaaactcag

SEQ ID NO: 563225 - DNA, 75 bp, Homo sapiens
cctgaaacagaaattctggaacacctatatgaaaggcctaaagaatgtatttgacgaagcaatattggctgccct

SEQ ID NO: 563226 - DNA, 50 bp, Homo sapiens
cgggatggagaaggaggaggaatcgttggcagatgtgaatggagtcattg

SEQ ID NO: 563227 - DNA, 82 bp, Homo sapiens
aaagaacggagcttgaagcaaagctgcaggttttaaaggagccatattggattgttcttcatgatcgaattgtgagtgtcat

SEQ ID NO: 563228 - DNA, 50 bp, Homo sapiens
ctgaccgctgccgcccagcacgtccagatctgggcggaccccggcaaata

SEQ ID NO: 563229 - DNA, 75 bp, Homo sapiens
cgggccgtgaacgaaagcagtgacggaggagcttgtaccaccgagtaatgtgggccatggagtcaggccacctcc

SEQ ID NO: 563230 - DNA, 83 bp, Homo sapiens
ctggggactacgacgtccctcaaaccttgcttctaggagataaaaagaggttgacggatatattcagacgttacgacacggat

SEQ ID NO: 563231 - DNA, 100 bp, Homo sapiens
aaagaagcagttcctgatgttacaaatgaacaaggatctcccagattcaagaaatccatggtgaaaggtttggattcctatgaagaaaaggaggataaag

SEQ ID NO: 563232 - DNA, 100 bp, Homo sapiens
tttgcaccctgcttggagacggacttgcttccggactgatcctttgaaatactccagccatgactaaaagagaagcagaggagctgatagaaattgagat

SEQ ID NO: 563233 - DNA, 75 bp, Homo sapiens
aggtgtctgcaggaccaacctctcctctggatgctctagtcattccagccacagatctgtcagagcagatttcca

SEQ ID NO: 563234 - DNA, 74 bp, Homo sapiens
aagttttcacttatctcgaaagcctatcagcatagttaagccagagactgctgctactttgaaacgtacgatag

SEQ ID NO: 563235 - DNA, 76 bp, Homo sapiens
ggaaagtatttgtggtaataacccttaccgggagtttcactgaaggccgaatacatcaagcaatggtaacatcttt

SEQ ID NO: 563236 - DNA, 100 bp, Homo sapiens
gagttgtacaacaggttacctcgagctgaagtgagcaggtgcttcattggagatgggaagacccgcctcatcctgaaggctcggtgaagcagagctcgtg

SEQ ID NO: 563237 - DNA, 101 bp, Homo sapiens
ggcggagcagacacagactatgcagatgggaggagtacaagcgcaagctagccagagtttccctggtgcgcaaagaactcaggtcccggatccagagcctg

SEQ ID NO: 563238 - DNA, 97 bp, Homo sapiens
ctgggaagcaccgctttacatagtcctcaagaacactgctccctagaccatcggaaaaccagtcccacaacgtttgttccttctccatcctgtctaa

SEQ ID NO: 563239 - DNA, 88 bp, Homo sapiens
gcttttcggaaggcggctaagtcccggcagcgggaacacagagagcgaagccagactctgttccagcctcagacaggtgcctatcaga

SEQ ID NO: 563240 - DNA, 100 bp, Homo sapiens
agttcgccttcactatggactaccagttgtggttaagctcttacacccaccatcccactggcctctgataaagaaatttgcctgtaatggtactgtgatt

SEQ ID NO: 563241 - DNA, 83 bp, Homo sapiens
agaacgtccactgcgggccggcgaaagctggtgaggctattgggaaaatgcagcaacagggaattcctggaggaattttcttc

SEQ ID NO: 563242 - DNA, 96 bp, Homo sapiens
ggaagacaaccctgggcggaagatcgcggagatgcagggcaagctggccacggggtatcatcttatttcgtccttcacatctcactaacaagtttg

SEQ ID NO: 563243 - DNA, 75 bp, Homo sapiens
attgaagaatattcccaagtccttcacccggacctgcctagagctggaacgttacctccagagcgagccctgcta

SEQ ID NO: 563244 - DNA, 101 bp, Homo sapiens
cggcgtctggacttggatgcctgcaaagcgaggctgaagaaggccaaggctgcagaagccaaagccacgatgaagactggcccatttgcagagcactccaa

SEQ ID NO: 563245 - DNA, 90 bp, Homo sapiens
ttaattttagggtcctttatatagaagggagagtaggaccctgctgcaggaagactatgggttcttccgcgccatcagcctgtggccccc

SEQ ID NO: 563246 - DNA, 115 bp, Homo sapiens
aaaccctgtactcctcaacaagttcctcctcttgacatttgcagtggagccccctgagctgcccgctgatctgcagcactggatctcctacaacgaggccagcagccagctgctc

SEQ ID NO: 563247 - DNA, 75 bp, Homo sapiens
ctggctattaaccgaagcaaacaggatcataagtttttactgccagtattgagaaattcgtggaagaaatgtcag

SEQ ID NO: 563248 - DNA, 83 bp, Homo sapiens
taccaacggcaaaaatctcaagaaagaggtgggcaagatcctgtgcactgactgcggagtggagtcaacatatcaatggagca

SEQ ID NO: 563249 - DNA, 87 bp, Homo sapiens
aaaggttgccataaaggacaaacaagtgaaatacttcatacattacagtggttggaataaaaacaactgagcgattctctgacagaa

SEQ ID NO: 563250 - DNA, 74 bp, Homo sapiens
aaagaaagaagccaaagagaaaggtacctgggttcaactaaagcgccagccgagccacatcgctcagacaccat

SEQ ID NO: 563251 - DNA, 96 bp, Homo sapiens
cctgccgcagctggcgcagcccacgctcatgatcgacttcctcacccgcgcctgcgacctcggcatgtcgggccccaggcctgtggtgctgagcgg

SEQ ID NO: 563252 - DNA, 75 bp, Homo sapiens
agaggttgtctgaaggccgaggccaagatggcggtgctgtcaggccgccatggcatcagatgaaggcaaactttt

SEQ ID NO: 563253 - DNA, 51 bp, Homo sapiens
cacagtttcgaaggcacatttaccagggaaaatgtttcaacgtgcgcaaga

SEQ ID NO: 563254 - DNA, 75 bp, Homo sapiens
gaagcgctggtcggcgtctggcgtcaaaaggaccatacctcctgaactgcaggagcagctgaagaccgtaaagac

SEQ ID NO: 563255 - DNA, 75 bp, Homo sapiens
agcaatgagctcccaaagccatccaggtaccaaccaagaagctgaagaaatatgagaaagaatatcagacaatgc

SEQ ID NO: 563256 - DNA, 82 bp, Homo sapiens
cttatccccataacctgatgacatatctaactgattttgagccaattcaatgcctgggacgtggtggctttggagttgtttt

SEQ ID NO: 563257 - DNA, 82 bp, Homo sapiens
cagcgccctggcctccctcaccttggacacctcgcttgggccctgggctgcatcttgtacctgctgtgcttccggcagcacc

SEQ ID NO: 563258 - DNA, 100 bp, Homo sapiens
agaaatgtcccagctccacgggtttccacattcaggagaatgaagaaagccattacgagaattcaattcgtcataatctgtccctacacagcaagttcat

SEQ ID NO: 563259 - DNA, 82 bp, Homo sapiens
gttaatcacgatttctctcctcttgagctggaggaaagcaggaatgttcagaggcaaatgaagattctgcagaataagcaag

SEQ ID NO: 563260 - DNA, 88 bp, Homo sapiens
ctcacgcgggcgcggatcgaccggagcagagagctggcgagcaagactgtgccctgtccacggtgcctcctgcatgtcctgctgccct

SEQ ID NO: 563261 - DNA, 83 bp, Homo sapiens
tggatatcaaaggaaatcatgacaatgcagatcttcgtgaagactctgactggtaagaccatcaccctcgaggttgagcccag

SEQ ID NO: 563262 - DNA, 75 bp, Homo sapiens
gatggaaacttacttgaagaagaacattactactggatggaaatccattccgagttcctcgagcagccatattaa

SEQ ID NO: 563263 - DNA, 50 bp, Homo sapiens
gccccatcttcccttcacacctgctcagcaaaacccagcagctcagattc

SEQ ID NO: 563264 - DNA, 130 bp, Homo sapiens
ggaaatcagaagaggaagtggaaagtgatgacgagtatcttgccctccccgctcggctgacacagccatcataatgtgaagaagccgaagcagcctgtgaagaggcgctagtggaaaggaactcaggtgc

SEQ ID NO: 563265 - DNA, 75 bp, Homo sapiens
gaaaaatcgagcagaaagaatgtctttcaggaggaacatatgcagcagaaaaaagaggaggaagaagttcttaaa

SEQ ID NO: 563266 - DNA, 88 bp, Homo sapiens
cccaagcggccggagcggcgccatggaggagggggcgccgcggcaggcacgtctgagaatggtggatgtggtggagaaagaagatgtg

SEQ ID NO: 563267 - DNA, 90 bp, Homo sapiens
cttacggagcagaccgtgtctcaggcaatcttgctgccaatgatctctccccgtcccgaatagccagactacagaagatccttcacagct

SEQ ID NO: 563268 - DNA, 74 bp, Homo sapiens
aataaaaaaaattcgtcatgctttttacttggttctctgacagcagacgaagattatctgactccagaaaaaga

SEQ ID NO: 563269 - DNA, 100 bp, Homo sapiens
aaggagcggaagaatggcagtgctcaaactcaccgaccagagttcttcgtaagtacatcttaaagctgtcaagatggttctagcagaccttggaagaaaa

SEQ ID NO: 563270 - DNA, 82 bp, Homo sapiens
ccgcgggtccgtgcgcccagcgtcccagggcccaggccgagcagaattcccatttgcagaaaccctatgagattaacctgat

SEQ ID NO: 563271 - DNA, 100 bp, Homo sapiens
ctcaaggagcagccatggccccagacttgtcgcacggatgcagaaaacttaatggaggaggctgagttgcgtggaggagtacaaactggctcctgatgga

SEQ ID NO: 563272 - DNA, 83 bp, Homo sapiens
tgaggcgtgagaatggcgtcccgcggccggcgtccggagcatggcggacccccagagctggagtcagaaataccatcagagga

SEQ ID NO: 563273 - DNA, 109 bp, Homo sapiens
cgaggacggggaggacgcgccgcggccaggcagggaggagaccggcacccagacaggtggcgaaggcagaggaaacccagtgacttgattgtaaaaatttacagagcgg

SEQ ID NO: 563274 - DNA, 51 bp, Homo sapiens
cgaaggacgggagccgaagctcaaatcactttgggaagcagtgacatccaa

SEQ ID NO: 563275 - DNA, 50 bp, Homo sapiens
tccagggcttgagctcagtaatggagtgcacagtctgcgggtggaccggg

SEQ ID NO: 563276 - DNA, 100 bp, Homo sapiens
atcactgcaccttaaaaacaaaagattgagctgcactgtattcctgagcaatgggtaaccaaatgagtgttccccaaagagttgaagaccaagagaatga

SEQ ID NO: 563277 - DNA, 75 bp, Homo sapiens
agctagcagtgagcaccttttggcccaatgaatatcagcctaaacccaccaagggacgaatgcgcatccactgct

SEQ ID NO: 563278 - DNA, 75 bp, Homo sapiens
aggaggattttgtatactttatggaggatttagtagattggctttgtcttcaggatcaggttcacaagaaaccaa

SEQ ID NO: 563279 - DNA, 101 bp, Homo sapiens
cgtaggaagaacacagtacagctctccaatcctgaagtcaaaatggaatgcatctctgctcttcctctgggcatcatctaatttttttgttcttgttttcc

SEQ ID NO: 563280 - DNA, 98 bp, Homo sapiens
ttcaggctgcaacaaggagaagagccatggaaacaggaggaagaattcccaagccaaagctttccagaaatcatgagtggaggatctcaagtccacat

SEQ ID NO: 563281 - DNA, 101 bp, Homo sapiens
tttgaagtcatttcacatcgaagccatgatttaaatatcggcgttaaggatccaaactactggatacaggtgcatcgcttggaacatggagatggaggaat

SEQ ID NO: 563282 - DNA, 78 bp, Homo sapiens
gtagatgcctggatgaagagaggggccttgcgcttctatttgccttgttacatagtgatgtggacgaatgtcagcaga

SEQ ID NO: 563283 - DNA, 100 bp, Homo sapiens
ggatgatgatgagggtccagtgtccaaccagggctacatgccttatttaaacaggttcattttggaaaagtcttccgtgtgtgctaagatcgtgcagctc

SEQ ID NO: 563284 - DNA, 83 bp, Homo sapiens
tgtcccagatatagccgttggtacaaagacaggccgacggtcgcaaggtcctacggtcaagcatccgggagtttctatgcagc

SEQ ID NO: 563285 - DNA, 83 bp, Homo sapiens
gagccgtaggcaggaccccgggacaccctggaagccaggaaatgacacctagctgttgggcagaagagggtgcagaaaagagg

SEQ ID NO: 563286 - DNA, 74 bp, Homo sapiens
ctggaggattgtcactccaacctcttttcgctgaaaacttggaatataacgtggagcctcaagaaatctcacac

SEQ ID NO: 563287 - DNA, 82 bp, Homo sapiens
agtacggccgaggagacctcgtcggcgtgcttccccgggcgctgcctggacaggcctgcctgcgtgctgggacatgtctggc

SEQ ID NO: 563288 - DNA, 75 bp, Homo sapiens
tgacacttatatcctccctggcatgttggcagataaattgaacatgactccagaagaagctgaaaggtggattgt

SEQ ID NO: 563289 - DNA, 75 bp, Homo sapiens
ggatcgaagtggtatcaccccaaaaggattagtgtgccatgcggagctgaatgccatcatgaacaaaaattcgac

SEQ ID NO: 563290 - DNA, 100 bp, Homo sapiens
ctacgtgtgctttttcaagggagctgataaagaacttcttcccaaaatggtcatccgtccttggctcaggatttggagagcttgcaccaccaaaaatggc

SEQ ID NO: 563291 - DNA, 74 bp, Homo sapiens
cagaagtggatcatagacctggccatggtaaaagtgctgtttgtacgcaaccttgccaatactgtaacagaaga

SEQ ID NO: 563292 - DNA, 118 bp, Homo sapiens
taacctattcagtccagcaggattcggacagcaagcatgtggatgtacatctagttcaactaaagcacgtagacagactatgctcttttctgccacccaaactcgaaaagttgaagac

SEQ ID NO: 563293 - DNA, 75 bp, Homo sapiens
cgccagcccgtgccgcgagcgcggcctgcaggaggtgtgaacccacatccctgcccccagggccacctgcaggac

SEQ ID NO: 563294 - DNA, 90 bp, Homo sapiens
tcgttgtggtccaaaacagtttacctcttatctaacaggctgtaccagtgcaggtcctcactttaatcctctatccagaaaacacggtgg

SEQ ID NO: 563295 - DNA, 100 bp, Homo sapiens
ccgcggccagggaacggggcatcgcggttccaacggtgattttacaacgagatgctgctctccatagggatgctcatgctgtcagccacacaagtctaca

SEQ ID NO: 563296 - DNA, 100 bp, Homo sapiens
cctgggtgaactttcacggacaacctcagaggacaacgaagtgttcgccaacaagtcccaaatttggaaaagctgactcatatgaaaagctggaaaaact

SEQ ID NO: 563297 - DNA, 100 bp, Homo sapiens
ggctattggaaggaggagattctgaagataaggagatgatctcaatgccacccaccaacactgtgttttggccggttcacaacctcggtttagttccacc

SEQ ID NO: 563298 - DNA, 90 bp, Homo sapiens
tcactacctgcatgctaactgggtgttgcacagagatttggcccaagctggatggctgcaacatgattatggccacctgtctgtctacag

SEQ ID NO: 563299 - DNA, 75 bp, Homo sapiens
cctgggcctggtggtgtatctccgacactcagagttttcaggtgctccaaaccttccagtctatgttgtagattg

SEQ ID NO: 563300 - DNA, 50 bp, Homo sapiens
cctgggagaatcaagaagtcgttgtagataacaaagctgcagctcttttg

SEQ ID NO: 563301 - DNA, 101 bp, Homo sapiens
aggggcaggctttcagaagcccctttagaaaggtttgtttaagcatcttaaacacgtggcatggaagaccagaagagaagtggaatcctcagacctcaagc

SEQ ID NO: 563302 - DNA, 83 bp, Homo sapiens
ccgagcgggcggcttcctggcctgggcgctccggtggcggcggagaatatatacagccctgctctgggacacacctccattgg

SEQ ID NO: 563303 - DNA, 100 bp, Homo sapiens
cctgcccctgctggcagccctggtcctggcccaggctcctgcagctttagcagatgttctggaaggagacagctcagctgccgggcgctgctgatgaccg

SEQ ID NO: 563304 - DNA, 100 bp, Homo sapiens
caaggggcatccaaatcttgcggcaacgcccccgggacatgcatcgtcccctggactctctcaagtttttcgttggaatatacgttgcacatttatggcg

SEQ ID NO: 563305 - DNA, 98 bp, Homo sapiens
tagcaagaaggaagtgcctatccaccgtgttgcagatatatctgggagtctccgggaccattatggcagtcaagtggacgggtgggcattcttctcct

SEQ ID NO: 563306 - DNA, 76 bp, Homo sapiens
gcaggaagcctttttggtggcatggtcctcaagaagttcctaaaagagacggggtctgactgtgttacccaggctg

SEQ ID NO: 563307 - DNA, 82 bp, Homo sapiens
aggaagatactgcagagatattctactccatctcattcattgtacaggtatttaccttgctgtggattgctgactggatggt

SEQ ID NO: 563308 - DNA, 51 bp, Homo sapiens
aatctccccaagctgcctaaattgaaaaagcccaacaagcttcgaaatggc

SEQ ID NO: 563309 - DNA, 100 bp, Homo sapiens
cacaaccacagcaagagcacctggctgatcctgcaccacaaggtgtacgatttgaccaaatttctggaagagcttttctgggagaagaggctacaaggac

SEQ ID NO: 563310 - DNA, 82 bp, Homo sapiens
ctagaaatgaatgtttccatctcttcagagatgaaccaggtgaagtggaggttctggatccgaacgaccctttaggacccct

SEQ ID NO: 563311 - DNA, 76 bp, Homo sapiens
gtgaggaggatgtgattatggaagctctgcggtcatacaaccaggagttggagaaggaacgagagaaggaaattag

SEQ ID NO: 563312 - DNA, 100 bp, Homo sapiens
aaaacaggactggctgatactacatattccagatgcttctgcagaaagccgtcattacacctgattttgaaaaaaaccactgtgttccaccatatagtga

SEQ ID NO: 563313 - DNA, 135 bp, Homo sapiens
agagaaccaccagcattgccaccaccaccaccaccaccacagagtctgtggaagaggtggttcgagaaatgggacgtcggtcatcagatactgaagaagaaagcagaagcaagagaaaaaagaaacaccgtagac

SEQ ID NO: 563314 - DNA, 82 bp, Homo sapiens
gcggagccgcgcagccctcggagcacggaactgtggctgcaccatctgtcttcatcttcccgccatctgatgagcagttgaa

SEQ ID NO: 563315 - DNA, 100 bp, Homo sapiens
ggaaaatgatcagaaaaagaaagaagccaaagagaaaggtacctgggttcaactaaagcgccaggccgaacccagacccccagggctgagttaaaggaga

SEQ ID NO: 563316 - DNA, 100 bp, Homo sapiens
agaggaccccggtacatctgaaagccgggaaatggtcatcatcagatttgaaatatttaaagtggatacaaaactatttcagcaatgcagacaattaagt

SEQ ID NO: 563317 - DNA, 83 bp, Homo sapiens
gaagaaacggggggatttgcagacaggccaggagatatgaatccacattcatctcaatggaaggatcctgccttaagtcaact

SEQ ID NO: 563318 - DNA, 100 bp, Homo sapiens
tctcattgacatcactgtgcggcacatcgcagacctgtcaccaggagacaagaatgaggagaaacctgtgcaaatgatgtttaagcaatctacttttaag

SEQ ID NO: 563319 - DNA, 83 bp, Homo sapiens
tgctgagtcagtgtgacagtccatatgtaaccaaatattatggatcctatctgaagagcacagcaatggaggaaacagctata

SEQ ID NO: 563320 - DNA, 82 bp, Homo sapiens
aaacttcagaatacttcaagaatagcagaggagcaggttacaatggccaacattggaataaatggaaatcattctctggaaa

SEQ ID NO: 563321 - DNA, 89 bp, Homo sapiens
cacctatgtatggtcatggaatacgtggaagatatactatgtagtgcaaaaagactcaagttgttaatgcagcctttgagttccatcca

SEQ ID NO: 563322 - DNA, 100 bp, Homo sapiens
cgaaaacaacatcttggttagaccctcggtgcctaaacaagcagcagaagccactggaagagtgtgaagatgatggtaactacgaggtgtccatcaagtt

SEQ ID NO: 563323 - DNA, 97 bp, Homo sapiens
ataaattatgatctacctaccaatcgtgaaaactatattcacagatataatgaagatctggaacttgaagatgccattcatacagccatcttaaccc

SEQ ID NO: 563324 - DNA, 95 bp, Homo sapiens
ggtcgttttcccgtccccgagagcaaggtgggagagttcagagcacacgctgctgagtggacagccaacgtcacagccgaattcaaagaaaccag

SEQ ID NO: 563325 - DNA, 74 bp, Homo sapiens
ccattgccttcactggcactgccttctctgccgatgacatcctggtgggacacagcaggccaggaaagatttcg

SEQ ID NO: 563326 - DNA, 50 bp, Homo sapiens
cgctttctgtacagcctgcagaactcctgtgttggaacatccttccttct

SEQ ID NO: 563327 - DNA, 100 bp, Homo sapiens
gaccagtttaatgaccttgttatcagtgatggctcttctctggaagatcttgtggccactaaagatgctggccagatatctggactgaatgtgcttcggg

SEQ ID NO: 563328 - DNA, 110 bp, Homo sapiens
aagagcttctcctcatcaactggggatgattacagttcttcctaaaaaagaaccgaacaatattttgggagtccaagtgacatggcttctactgcagaaaacatcagaga

SEQ ID NO: 563329 - DNA, 101 bp, Homo sapiens
aatggctgaaacacagtcgaaaagaatactgtgaattatgcaagcacagatttgcttttacaccaagtactccaaagattcaggtttactcacgtcatcca

SEQ ID NO: 563330 - DNA, 100 bp, Homo sapiens
gtctggtgtgcaaagagaagctcattatttggaagattgctctgtcacctattactaagaagacgatcaccttctccttattatagtcgatatagatcac

SEQ ID NO: 563331 - DNA, 100 bp, Homo sapiens
gcatgggggtgatgaagacagaccctttccagccaagtacatcgtgcaagtggatggtaagatagggctgttccgaggcctgagtccccggctgatgtcc

SEQ ID NO: 563332 - DNA, 100 bp, Homo sapiens
tcttcgggccagggacacggctcaccgtgctaggtccaggagagcctcagattattttttgtagaagtgaagctgcacatcaaggagtaattacctggaa

SEQ ID NO: 563333 - DNA, 75 bp, Homo sapiens
atacctatggctttattgacctcgactcccatgcgctcaagtttccaagtctcttaaggagcgattaggcatgtc

SEQ ID NO: 563334 - DNA, 50 bp, Homo sapiens
aagatagtgcctttcagccctaccagagtccagcctctgatgaagcagga

SEQ ID NO: 563335 - DNA, 75 bp, Homo sapiens
atggaaagttcagaacattgaagatgagtacaaaaatcccaggagaaatctaagcttcatgtactggactgactg

SEQ ID NO: 563336 - DNA, 100 bp, Homo sapiens
tctggacatctgtagctgtcgtttggtttgatcttgttgactatgaggaagttctagggttccattaacttcaaatgatgatgaagatgaagataaagag

SEQ ID NO: 563337 - DNA, 51 bp, Homo sapiens
gaccagtagagcactcataacagatggcgcagttgtgtagcagttgagtaa

SEQ ID NO: 563338 - DNA, 75 bp, Homo sapiens
cctgtggtgagcactcgtgagcgttagctgctgtatttaccaggtatgaaattgaaggctgtgaagtgatttggg

SEQ ID NO: 563339 - DNA, 83 bp, Homo sapiens
acggcgatccgggcgctcgagacttaccagagccacaagtttccccctttctagggtgaggatggttctacacagccacccgg

SEQ ID NO: 563340 - DNA, 98 bp, Homo sapiens
gcgagcggcagcccgacggcacccctgggggatcgggggcggcggtggcgccggcggcgggacagagtgaccgtctccttatcaagggaggcagaatc

SEQ ID NO: 563341 - DNA, 75 bp, Homo sapiens
tgccctggggctgagaggagtcttctggtgcagtcttattttgaaaaggacatggatttgattgacatactttgg

SEQ ID NO: 563342 - DNA, 100 bp, Homo sapiens
cttctttggtcagcaatgtcagttttcagagagctcttgagaaagataccgaagttgcagaatatcattaccaacttggattaacatactggttcatggg

SEQ ID NO: 563343 - DNA, 100 bp, Homo sapiens
gctatctgaagagacaaagttggaaatcaggtagtcgggaatctgcctttgtttatgccatctcctcagctggagttgtatttgccatcaccagggcctg

SEQ ID NO: 563344 - DNA, 82 bp, Homo sapiens
agaaagtattgcaggacaagagatttaaggggctcacaacgaagtaagacagtagatgacaattctgcaaagcagactgcgc

SEQ ID NO: 563345 - DNA, 83 bp, Homo sapiens
gccctcgcgacgcgcccggcccggagcccccagcgcagcggccgcggagggtgtgaagacagagaatgaccacatcaacctga

SEQ ID NO: 563346 - DNA, 100 bp, Homo sapiens
ccaggagttcgtctcttacgtctgcggaagtgcagctgcctcagttcttagcgcaggttcaggtggaaggttataattacactggcatgggaaattccac

SEQ ID NO: 563347 - DNA, 100 bp, Homo sapiens
aacacgatcccggggctcaagtggcttaacaaggcatctggagagaccagtgggctgcaggaggcagacggagtagctgagatcttagaagccgtcacct

SEQ ID NO: 563348 - DNA, 96 bp, Homo sapiens
aacagaattaaccagagaaggtgaaacgatcatcgagctaaaatatcgtgttggccaatatacccagtagaagaattagaagaagaaagcgttgca

SEQ ID NO: 563349 - DNA, 104 bp, Homo sapiens
cgaggacggggcggacgaggccgaggcagagatcatccagctgctgaagcgagccaaggaatctgagaaaaaggggttgattgaaagaatctatatggtacagg

SEQ ID NO: 563350 - DNA, 75 bp, Homo sapiens
ggaagatgcaatgctgatgtttgataaaactaccaacaggcacagagaatcttgcctcctggaatccttcaaatc

SEQ ID NO: 563351 - DNA, 82 bp, Homo sapiens
ctcactggatgtctgagaactttgagagaccgaaaaagaaggacgtatgctctacaagacttaattcagtgcacaaatgaga

SEQ ID NO: 563352 - DNA, 100 bp, Homo sapiens
aacacagtagtggaagatgtaaagcaatatttcgagcagtttggcaagcactgccagtgaaagatgtagaagataaacctgaacaacaaaccagaacaag

SEQ ID NO: 563353 - DNA, 98 bp, Homo sapiens
tgctttttcaagggagctgataaagaacttcttcccaaaatggaacgtactcaggaaaagtggggatttccaatgtgccactatttaaaggaagagag

SEQ ID NO: 563354 - DNA, 100 bp, Homo sapiens
gccgggaccccgaggcgggagcgcgggctgggccgggctgggctacgcgcacgggctcggccgccgcccctgccgttggttgaatctggcgatgtggaac

SEQ ID NO: 563355 - DNA, 90 bp, Homo sapiens
aggatccattcagattctcatcaaggtatgactacgtggaagtcttcgatggagaaaatgaaaatggacattttaggggaaagttctgtg

SEQ ID NO: 563356 - DNA, 100 bp, Homo sapiens
ccccggcccacagtgggggtgtgcaaacccgagagaactggattgtctacaaagcctggctctgttcccagtattttgaagtcacacagtttaactgcag

SEQ ID NO: 563357 - DNA, 100 bp, Homo sapiens
agaactgttccttcagccaaagaaacaagccgtggaataggtgtatcaagtaatggtgcaaagcctgaagtacgaattttgcggttattaagaattttag

SEQ ID NO: 563358 - DNA, 99 bp, Homo sapiens
cgctacacgaagaactaagaatattattagcacaagagcaccatactttgaggtcaccttcaggccattcagaggaggaaagagaggggaatatgaagt

SEQ ID NO: 563359 - DNA, 50 bp, Homo sapiens
ctcccaaagtgctaggattacagatgagtgaccgaggaggtggcgttcct

SEQ ID NO: 563360 - DNA, 95 bp, Homo sapiens
aagaaatgcagagtgatcccatctcaggagcacctgaatgtagccacgatggaggtgatgaacctgatggagcagcctatcaaggtgactgagtg

SEQ ID NO: 563361 - DNA, 100 bp, Homo sapiens
cctcctgttccgcttctcagaggacgccttcaacaccaccttcatctccaccatcggacccggtcagcccaaggagcaggggtccagcagctctgcggag

SEQ ID NO: 563362 - DNA, 92 bp, Homo sapiens
cccgcgccccccgggacccccacgccgccgccaggttcggagatgatcgagacgcaggaggacatctacgtgggctccattgagacagaccg

SEQ ID NO: 563363 - DNA, 50 bp, Homo sapiens
gttcaaccccaaccctcatctcacccagatggagtcttgccctgtcaccc

SEQ ID NO: 563364 - DNA, 48 bp, Homo sapiens
gagaaatgcttacacacagaaatgatgctgcctggaaacattggccag

SEQ ID NO: 563365 - DNA, 100 bp, Homo sapiens
gcagcggccgccctccccagcccaccagctggccactaaacgcccgtggttgccaagatgcctgaaatgtgcagatgccccgtgtcagaagagctgtcca

SEQ ID NO: 563366 - DNA, 50 bp, Homo sapiens
cttcactgtggagaacgtggagaaggctgctggcaaaggggacgtcccaa

SEQ ID NO: 563367 - DNA, 94 bp, Homo sapiens
gagtgaaggcggcaaaatggcggaccgcttctcccgcttcaacgaagaccgagactttcagacaatgcagatcttcgtgaagactctgactggt

SEQ ID NO: 563368 - DNA, 100 bp, Homo sapiens
gagatgcaggaacactatgatgagttttttgaggaggatgaaggagaagatgactaaatagaacactgatggattccaaccttcctttttttaaattttc

SEQ ID NO: 563369 - DNA, 83 bp, Homo sapiens
cgcgaagctggccaaagcctgcccagacggctcacctgtgcgggatggaacaaaagttccagggtctccctccactgctgtag

SEQ ID NO: 563370 - DNA, 100 bp, Homo sapiens
gcgaagccttgggtttctttcttaaaggactgatttttagaactccacatttgagacatcgatgaatgtggaaatgagctcaatggaggctgtgtccatg

SEQ ID NO: 563371 - DNA, 75 bp, Homo sapiens
aagaaaactaaaatccagtttattgtatttcaatactatgtcataacagtcagatgtgtcttgctgaatcagggc

SEQ ID NO: 563372 - DNA, 80 bp, Homo sapiens
aaggtcttcagcggggcgctccaggaggcactcacagacccctttgctgatgcaagtaagggtgatgacctgcttcctgc

SEQ ID NO: 563373 - DNA, 51 bp, Homo sapiens
taagaagccggtggtgactttccaaggtctgaaggggcgtctcgattacct

SEQ ID NO: 563374 - DNA, 113 bp, Homo sapiens
gaaaaggtgtacttgcaagaaacctcaggacttgagtaacagcaacatgttgatggagtttgcactgtagcaaattgcgttggaaaagaactagctccacatgtcaagaagca

SEQ ID NO: 563375 - DNA, 75 bp, Homo sapiens
ggcggagcagacctactcgtgcattatggatccaagcctgttgagagaaagggagctgttcaaaaaacgagctct

SEQ ID NO: 563376 - DNA, 75 bp, Homo sapiens
atgcagcaggtgcgcaaggtgaaatgttcactgttaaagagacattaggtatgcatcagttaacttttgcccata

SEQ ID NO: 563377 - DNA, 82 bp, Homo sapiens
ggcgagcgcgtcgccaccatggtggtctttgggaagaagcttcctgcctttgccaccatccccatccaccagctgcagcatg

SEQ ID NO: 563378 - DNA, 82 bp, Homo sapiens
cagcggttgggctcgcggcgagcggacggggtcgagtcagtgcgttcgcgcgaggtgctggagaatctggtaaaagcaccat

SEQ ID NO: 563379 - DNA, 74 bp, Homo sapiens
ggagcagatcccccagccggctgagacaggcccattacgcagtccaggcaagaagatcccggagcatcactagg

SEQ ID NO: 563380 - DNA, 90 bp, Homo sapiens
gaaagcggagagatgctgggcgtggcggccgggatgacccacagcggggccttttccgaagtggttttagctgaagagaaggcaactggc

SEQ ID NO: 563381 - DNA, 100 bp, Homo sapiens
cccctggctcacctgcagctccccggatctcgcaagccacccgaggggactgcctggccttccagatgcgagctgggttgcttccctgagggcccccgct

SEQ ID NO: 563382 - DNA, 75 bp, Homo sapiens
ccttcctcgaggcggtgtcccacctgccgcccttcttcgcaggaggagcaatctcagaactgttatgaagacctt

SEQ ID NO: 563383 - DNA, 75 bp, Homo sapiens
tcatgagtcgcttcaagtttatcgagatggggacttgcttggggtcttgctgcccaggctggtcttgaactcgtg

SEQ ID NO: 563384 - DNA, 101 bp, Homo sapiens
gtgcaggacgggcggctggaggtctgcatccaggacactgtcattgaccacagtggcgcccgccttggtgagtatgaggacgtgtcccgggtggagaagta

SEQ ID NO: 563385 - DNA, 82 bp, Homo sapiens
ctgaaattcatcctgagatgagtgaccaagaagatgaaatggcaaaagcacttcttacctttggccctttggtagtcatagt

SEQ ID NO: 563386 - DNA, 74 bp, Homo sapiens
ccgggacacctggaagccgagaaatgaagccatttggaaatagcatcagcagatataatggggagcctgagcat

SEQ ID NO: 563387 - DNA, 75 bp, Homo sapiens
gccagctaggagcgctctgtggtgcctggggctgaacgcggctttctgaatgtcacaggtagactaatggttggc

SEQ ID NO: 563388 - DNA, 100 bp, Homo sapiens
ctcaccgaatagccagtggcgaagagaaatgagccgtcagactgctacagcattacctaccggtacctcgaagtgtccaccatcccagagggtgcctgcc

SEQ ID NO: 563389 - DNA, 74 bp, Homo sapiens
ttgtgaacctcacaggcaggctaaacaagctcggtgctgattatcacaactgtttggtgacctacttcactgac

SEQ ID NO: 563390 - DNA, 97 bp, Homo sapiens
aagtagtgatatttctcttttgtctgcccctattgtaagtgcagatggaacacaacaggtcagtcatatcatttggatcaaaaaatagaacaatcgg

SEQ ID NO: 563391 - DNA, 100 bp, Homo sapiens
cggcggcgtctgcccagggcagggctcctaaggaaggacccgcctttagctcccaaactgcctccaggagagagagaaccttcacaggaagcaggtacac

SEQ ID NO: 563392 - DNA, 100 bp, Homo sapiens
ccattgtttcttatctgagtcaaaattttataacctgggcttgggatctgacaaaggactccaacagagcaagtgattcgcctttgccagtctcatctcg

SEQ ID NO: 563393 - DNA, 99 bp, Homo sapiens
ggcacgaactggccacattttgcaccccgagtacctgcagcccctgccttccacgccggtcagccccatcgagggatgcccgctgtctgtagccccggc

SEQ ID NO: 563394 - DNA, 101 bp, Homo sapiens
attgtccgcaccttcaggattgagacccggaaggcttcaaaggctgtcgcaaggaggaagacggtgatcgttggctcctacttgattgcacacggtttctt

SEQ ID NO: 563395 - DNA, 90 bp, Homo sapiens
ctggcaaccgccccgtctgagaagtactggtagttaactctcaaggagaaatttcacggttgagcaccgaaaagaaagtggtcatgaaag

SEQ ID NO: 563396 - DNA, 90 bp, Homo sapiens
ggcaatggtcccggctgccggtcgacgaccgccccgcgtcatgcggctcctcggctggtggtgattccagatcactgtatctttgccagt

SEQ ID NO: 563397 - DNA, 75 bp, Homo sapiens
cagacatctacaaccttcgatctcctgacgaaattctcccaataatatgagcctgagtaatcaaccgggcactcc

SEQ ID NO: 563398 - DNA, 83 bp, Homo sapiens
cattactaacaggatattcctcatgacattgctgtctggttttgggacttggcttacccagaaaggtcctatgttgttgcagg

SEQ ID NO: 563399 - DNA, 100 bp, Homo sapiens
ttggaagcagttgtgattgggcgtggcccagagaccaagatcactgataagaaatgttctcgacagcaagactgaaactgttgaggagcccatggaggaa

SEQ ID NO: 563400 - DNA, 76 bp, Homo sapiens
ccgccaactacctgctctgtaccaactgccggaaagtgctgcggaaggcaacagcattattgagaaaagcccttac

SEQ ID NO: 563401 - DNA, 90 bp, Homo sapiens
cgatgccaaccacaccttctctgggatcgatgctctggccctaaaggacagcaaggtggtggagatcgttgatgagaaagttcgtaggag

SEQ ID NO: 563402 - DNA, 50 bp, Homo sapiens
tcggcggcgcccggatgggcagctgagagatctgaaactggacaatgtcc

SEQ ID NO: 563403 - DNA, 82 bp, Homo sapiens
cctccagtcaccctcgtcttgcattttcccgcgtgcgtgtaacactctgctccagccaaggtggtgagggcagctgttccta

SEQ ID NO: 563404 - DNA, 74 bp, Homo sapiens
ctgccgaggatctggaaattgaaggtgcaatttctcaagtcgcctgttgtttacatgatgatgattatgttgct

SEQ ID NO: 563405 - DNA, 98 bp, Homo sapiens
gaacatttacatgggacaaaaagcttgagatggttgtgaaatcaacaggaattttaggtggacaaggaagaacatacttcgtttcttagatgcagaac

SEQ ID NO: 563406 - DNA, 85 bp, Homo sapiens
cttccctggcaagattcttctgaattgtgctgccttggccaaaagagcggacgcccgtggtttactgtgtgaggttagccaaggc

SEQ ID NO: 563407 - DNA, 90 bp, Homo sapiens
gccaggttgcagggtgtccgcttcctcagatggagggagcgaggaaccaccggatcgaagacagtcaagtgtagactctcgccaaagccg

SEQ ID NO: 563408 - DNA, 74 bp, Homo sapiens
gagatcgcggacgggttgtgcctggaggtggaggggaagatggtcagagctgtggcccggcagctgcaggacag

SEQ ID NO: 563409 - DNA, 83 bp, Homo sapiens
agtgcgtgaggagtttaaggagctgaaagcgcgggaacccaccaagaccaacctggtcacattcttccataccgacctcagcg

SEQ ID NO: 563410 - DNA, 75 bp, Homo sapiens
atggcgaccggagcgaacgccacgccgttgggtactccaaagattcaggtttactcacgtcatccagcagagaat

SEQ ID NO: 563411 - DNA, 100 bp, Homo sapiens
gtcccggaaggtccttagggaggaccccagacaccggagactgggaaatggtgaggaaaatagcagctgaatactatgacaacctccctcactacaattc

SEQ ID NO: 563412 - DNA, 100 bp, Homo sapiens
ccgcagccgcctcagaacccgaccaacatccagaacttccagctgcccccaggttcatcatgcctagtggcgtataagaagaccccgccaccggtccctc

SEQ ID NO: 563413 - DNA, 96 bp, Homo sapiens
gctggctgtgaccagaagtatcaaggagggtgagggcaccttcagcctgcggaagctatgggccttcacggggcctggcttcctcatgagcattgc

SEQ ID NO: 563414 - DNA, 75 bp, Homo sapiens
aggcatgttgtataaatgtacaggaactgtggctgcaccatctgtcttcatcttcccgccatctgatgagcagtt

SEQ ID NO: 563415 - DNA, 75 bp, Homo sapiens
cctctgacgtctcccacttccgcttccatgaagatctcagtgagcacgtagttcagggtgatgcccttcctggac

SEQ ID NO: 563416 - DNA, 96 bp, Homo sapiens
gttccagaatgtcatgacctacctcaccagcatccccaggtgaagaagcttgtctatgtgtacctggtacgctacgctgaggagcagcaagacctg

SEQ ID NO: 563417 - DNA, 82 bp, Homo sapiens
aacactgcaaagagcacaagccgcgtaacagcctttctagatatggtccagacctgtacatgaataactttggttagtcaga

SEQ ID NO: 563418 - DNA, 98 bp, Homo sapiens
catgcaaaggcaggggaggaagccacctcgaggtgtcatggagaaactccagctgggcccagagattctgcagcgggaaaatccaaggcttatttatg

SEQ ID NO: 563419 - DNA, 100 bp, Homo sapiens
ttgcggcccactgcattgtgggacaccaacagcaagcaccagaagcaccaggcttttgaagcagagctgcatgccaacgctgaccggatccgtggggtta

SEQ ID NO: 563420 - DNA, 90 bp, Homo sapiens
cgtcagcactcagcgcgggccgccacctccccgtgcaagatcctcaagtgcaactctgagttctggagcgccacgtcgggcagccacgcc

SEQ ID NO: 563421 - DNA, 50 bp, Homo sapiens
agatgcccctggtgtgactacaggcagaagctcctcctggggtagagaca

SEQ ID NO: 563422 - DNA, 100 bp, Homo sapiens
cagagatcaaaacaagccctccaggaactcaccctttgaagaagatggtggagagaattcgcaagttccagattctcaatgatgagatcatcaccatcct

SEQ ID NO: 563423 - DNA, 51 bp, Homo sapiens
gggaagaagtagaggactgtttgcacgatctgattttctggagagatgtga

SEQ ID NO: 563424 - DNA, 100 bp, Homo sapiens
gaaagggaagagaacttagatttgacctgtgcaaggacctcagcagcttggacacagcccactgcagaggtgactctgctaatctaacctgcagagcttt

SEQ ID NO: 563425 - DNA, 75 bp, Homo sapiens
ccgtgtcccgccgtgcccgtcgcgggcggcctcgcgcctgttccgctgcagaaaaatggctacaaacttcctagc

SEQ ID NO: 563426 - DNA, 82 bp, Homo sapiens
ccactctccagcaccagcttccagttagtggatatagcacaccatccccagccagtgacgcggcgcacggcgcggatggtgg

SEQ ID NO: 563427 - DNA, 95 bp, Homo sapiens
tgatccctcaagactggtccacggagtgtatgaccacaaacagccatcaaggtccaggatacagaggctgaaactctgactggttttttgaatgg

SEQ ID NO: 563428 - DNA, 90 bp, Homo sapiens
cgacccaagcccctgcattcctgtacgggccaaagatgaagaggaagcctttctggattggagtgatgatgatgatgatgatgatgatgg

SEQ ID NO: 563429 - DNA, 75 bp, Homo sapiens
cctgtgtactttccatttgccttcctgggttacattgcaccatggagtggcaggttttattcattgtgggatact

SEQ ID NO: 563430 - DNA, 100 bp, Homo sapiens
gccgccgccgccgccccctccctccggtgggcccgggaggtagagaaaaccctgagagatggttggtgccatgtggaaggtgattgtttcgctggtcctg

SEQ ID NO: 563431 - DNA, 83 bp, Homo sapiens
ttatttagccttcaaacgtcagcagcatttaaatcaaacggtattgagatggattgggttatgaaacataatggtccaaatga

SEQ ID NO: 563432 - DNA, 75 bp, Homo sapiens
actgagattcggtaacccccttctggtccaggtccaggtgcaggtacagcagtctccgcaacaggtctcggctca

SEQ ID NO: 563433 - DNA, 50 bp, Homo sapiens
cgagattataagaagcttgggttcattgtgtaccttgaaagacttttaac

SEQ ID NO: 563434 - DNA, 100 bp, Homo sapiens
gttggggtgatggtgcttgtaatcccaattaatgcgatactgtccaccaagagtaagaccattcagctggtaggtgagtgctgtcctcggctcactttcc

SEQ ID NO: 563435 - DNA, 82 bp, Homo sapiens
aagggacgtaccaggaggatggtgcccaggagtggagtcggttcttatacaactatgggctgaaaccatgaggcgtgctgag

SEQ ID NO: 563436 - DNA, 48 bp, Homo sapiens
tccactgtcagcagctgcacacacagacatggatttgattgacatact

SEQ ID NO: 563437 - DNA, 88 bp, Homo sapiens
agaaggtcagtgtgcttgcttggagatcaggacgcaaagtatatgactctcaacccttctactaagaggaagaatactggatccccag

SEQ ID NO: 563438 - DNA, 101 bp, Homo sapiens
taaaatattacttaagagaatctcaagctgctaagttttttgaagggaaggagctaagattgaagcaggaatactttgtggtggctgcaaccttgcaagat

SEQ ID NO: 563439 - DNA, 75 bp, Homo sapiens
ccaccactgaacctaaatccagtttggttcaaacagcactgtggtgcggtacgggtcactaaaatacaaagtgaa

SEQ ID NO: 563440 - DNA, 74 bp, Homo sapiens
ccggagcacccgacccctgagctaaagtaaataatgccagcctgattggactgggttatactcagacccttcga

SEQ ID NO: 563441 - DNA, 90 bp, Homo sapiens
tcaagcgagtaacacatcttctcaaccaggacactctgactgtgagagcagaggatcagatccctaaagaagtggctgacatctttaacg

SEQ ID NO: 563442 - DNA, 83 bp, Homo sapiens
ctgagcatgaggctcccagcagtgagctaatgggaatgacagcaagaaatttaaacgagatagacctccctgttcgccttccc

SEQ ID NO: 563443 - DNA, 75 bp, Homo sapiens
gtttttccagctcacccactgccagcagaggtctcagaccagaatgacagagtggttgagtgccagctacagacc

SEQ ID NO: 563444 - DNA, 95 bp, Homo sapiens
cgccgcggacgcgtcatcgagtgtgacgtggtgaaagggcgtgatggtgggcatgggtcagaaggattcctatgtgggcgacgaggcccagagca

SEQ ID NO: 563445 - DNA, 82 bp, Homo sapiens
agactgtatgaactggacatctcgttccctcccagggcgaagctgtgctcaggcccgggctggacgcagagccagagctgtc

SEQ ID NO: 563446 - DNA, 110 bp, Homo sapiens
atgaggtttctggttgcctctgtgtgttagaagcttggagaccaataatggaggctccagagtgaaattaatgacactttgtcgatgaagatcttgattgtgacctctgt

SEQ ID NO: 563447 - DNA, 51 bp, Homo sapiens
ctgaaaagaggctttggttttgtgtcccatgagcgtgtaagcaagcgtcta

SEQ ID NO: 563448 - DNA, 100 bp, Homo sapiens
ctggtggcactaaagcccctcgggggactctgagcaggtatgaaaatgaaagtcttcagaatggaaggaagtcaactgaatttccaagaaaaatacgtga

SEQ ID NO: 563449 - DNA, 87 bp, Homo sapiens
tactcagaagaacttgtacagagatgtgatgttggagaactatagcaatctggttttcttgggttggaagctttcttagaatctata

SEQ ID NO: 563450 - DNA, 83 bp, Homo sapiens
cgaaaactccaccgtagcccttgccaaagcttgccttgcgccatggactggcagccagacgagcagggcctgcagcaggtcct

SEQ ID NO: 563451 - DNA, 100 bp, Homo sapiens
cgacgtccttctggaagaggcgaaactggtgggcaaacgcagaggcgggaacaaactagccctcaagacgggaatagtagccaagaagcagaagacggag

SEQ ID NO: 563452 - DNA, 96 bp, Homo sapiens
ctgagggaagtgggcaatgccatcctcttctgcctcctcatagagcaagctctgggcttccgttacaagatgaggtctgtgtatgctcacttcccc

SEQ ID NO: 563453 - DNA, 75 bp, Homo sapiens
cagaaagctcaatcacttaccaagttcaccggaacagcacaatccgccctggctgtgatgtgaatccctcctgcg

SEQ ID NO: 563454 - DNA, 98 bp, Homo sapiens
gtcgttccgcgacggcctggctttctgcgccatcctgcaccgccaccggcccgacctcatatagcagaccccacgttagctgaaatgggaaaaaactt

SEQ ID NO: 563455 - DNA, 75 bp, Homo sapiens
cgcaacatgacaaggtccaggagagaaggggatacgggtgatgtgttaagggatgctgtgaaaaatggggattat

SEQ ID NO: 563456 - DNA, 100 bp, Homo sapiens
tgatgtgcttggtggagcagctgcctgggagaatgttgactctactgcaggccaacgcagacccgtcagtgataaactgtctgcataacctgtcccgtcg

SEQ ID NO: 563457 - DNA, 100 bp, Homo sapiens
tcccagcgctgcgcaggacttctcctggcggcgctgcggatccagggggtcggctgccaggtacaggtccagtggcattgcagagcacggatggttgcag

SEQ ID NO: 563458 - DNA, 83 bp, Homo sapiens
aattaccttcactctgggaaaaggcactgaagttggcctttttgcaaatgtgtaacttgcctatcaaagtagtttgtagggca

SEQ ID NO: 563459 - DNA, 75 bp, Homo sapiens
gggtcattatgaccagagtattgccgcggtggaaatggagggagaaatgcctgctgcctctccagttggctttgg

SEQ ID NO: 563460 - DNA, 73 bp, Homo sapiens
acaacagaaaactcaaaaaccatctggtgctgtggattgcaaccttgaatggaaaccccaaagccacggagaa

SEQ ID NO: 563461 - DNA, 50 bp, Homo sapiens
ttccgcggtgtcattctgacctcgattttgcaagaacgaggctcaaggat

SEQ ID NO: 563462 - DNA, 102 bp, Homo sapiens
ctcaatctttgatgactttgcacattatgaaaagcgtcaagaagaggaggaagccatgcgtaggaatgagtccctggaacgccagatgcgtgaaatggaaga

SEQ ID NO: 563463 - DNA, 51 bp, Homo sapiens
ggaaggagtcattactagaacaaagtttggccggaagaatgtgctgttcgt

SEQ ID NO: 563464 - DNA, 98 bp, Homo sapiens
ttttagggtcctttatatagaagggagagtaggaccaagttttcatgattgactccaagtgtgaatctggaaaaggacgctgctctttcaaccccaac

SEQ ID NO: 563465 - DNA, 50 bp, Homo sapiens
gtgccacgtgtggtctgtaagtagcaagaggcggagtccaacctgcgcaa

SEQ ID NO: 563466 - DNA, 90 bp, Homo sapiens
gttgggatcaaatgtgagcctatggatcaaggaacttctacttgcagaaaagtgggctaaaatgaacaagctcccctttccaaagattga

SEQ ID NO: 563467 - DNA, 82 bp, Homo sapiens
tgggattaaaaagaccactgaggagcaggtgcaggtggccgtctgcccggcccagcaccatgcacacgcttgtgttcttgag

SEQ ID NO: 563468 - DNA, 90 bp, Homo sapiens
ccctgacctgcctgaagtgaaacgtgtgaaggagacgcagaagcacattagctcgggtaccatgcttgggaagattgaatttgaaggtca

SEQ ID NO: 563469 - DNA, 82 bp, Homo sapiens
ttaaaaccacgtggttcgatggctgccgcggctacgctgaggctctccgctcagtgtcactgcaaagataaaagccattgaa

SEQ ID NO: 563470 - DNA, 83 bp, Homo sapiens
taatgtttcatatgcagcgacaaagaaaacttcctgaagaacatgccagacacagcaggatgccaatgcctcttccctcttag

SEQ ID NO: 563471 - DNA, 96 bp, Homo sapiens
ggaaggggcacgggcacccccgcggtccccgggaggctagaggaagctgttttaggttatgtgaaagagatgtttcctcatctctaaggcttacca

SEQ ID NO: 563472 - DNA, 106 bp, Homo sapiens
gaagaaccatttgcttttctggggagtcctggcggtttttattaaggctgttcatgtgaaagcaatggctgccatccggaagaaactggtgattgttggtgatgga

SEQ ID NO: 563473 - DNA, 100 bp, Homo sapiens
gctgtgcgaggtgatcggaaactcgtcgtcaaggtgcacatgaatgataacagcacaaagtcactgatggtggatgagcggcagctggcccgagatgttc

SEQ ID NO: 563474 - DNA, 124 bp, Homo sapiens
cagcatatcatgaaatcctccccacttatgtttgtaaatgtgagtggaagccatgaggccaaaggcagttgtattggtcagaagccaatgacctggccctgaggctggctcgccactacacggg

SEQ ID NO: 563475 - DNA, 75 bp, Homo sapiens
tgaagagggaagacacgcggaaacagcttcataaacaagcagatatgcaagaagagaaaaaccgaatcgaaagag

SEQ ID NO: 563476 - DNA, 75 bp, Homo sapiens
tcctcccaatgttagccaaacagcaggtccagatggctgtggaggccaagtttgtccaggacaccctgaaaggag

SEQ ID NO: 563477 - DNA, 88 bp, Homo sapiens
ggagacgggagtattatgaaaagatcgtgggcaatgccgtgccaccgcccctggccaaagccattggcttggagatcaagctttgtat

SEQ ID NO: 563478 - DNA, 100 bp, Homo sapiens
actttgtggagaaagtcgtcttccacttgcacgaaagctttcctaggccaaaaagaggcatgacagcaagcgctgtggcggctttgatcctcatgacgtc

SEQ ID NO: 563479 - DNA, 100 bp, Homo sapiens
atgccattctggaaaaggtcttcactgcaattacaaaggtatgatctcgtgaaatcttgagagaaactgaatgacgaatgaaactattgttcctgtttca

SEQ ID NO: 563480 - DNA, 87 bp, Homo sapiens
aagcggaaggtgatgcccaagatggaccaggtaggtgagctcgtgaaacaatatgaagaggagaaaatagccttttaaggaaattgg

SEQ ID NO: 563481 - DNA, 97 bp, Homo sapiens
atcagatactcagctacactttttgtgcaggtggtgaagcagtattttccaatttgaagattcatttgaaggtggctcctgccacctgctaatagca

SEQ ID NO: 563482 - DNA, 108 bp, Homo sapiens
cgtagataacagcttccgccaggcggtgatgaagaatccccccgaaaggaccccccaggaacttagtgatttggcccgtgaccctccagcacaatgttctgcaggtcc

SEQ ID NO: 563483 - DNA, 83 bp, Homo sapiens
caaaccattactgatgatgtggaggttaacagctatctttctttgatattcactgatggactccaaagaatcattaactcctg

SEQ ID NO: 563484 - DNA, 97 bp, Homo sapiens
ctgtgggaagtctccatggtgaagtataggctgaggctacctgtgaacagtacgcagtgaatgttgaggatttgacagctaaggatattgaagaaat

SEQ ID NO: 563485 - DNA, 90 bp, Homo sapiens
gttcggcgcgtcgactgcccagagtccgcggccggggcgcgggagggttggggtgctggaggactgcttcaccttcctgggcatcttcct

SEQ ID NO: 563486 - DNA, 100 bp, Homo sapiens
ctgcaaggaactgatagcttatggttctccattgtgatgaaagcacatggtacaggactggttgccataaaggaagcccacgacatagagaccaggctta

SEQ ID NO: 563487 - DNA, 75 bp, Homo sapiens
accatgtctgggagatggaagcgaaaactgaccgggacctgtgcaagccgcagaaaggacccaggagcgataaca

SEQ ID NO: 563488 - DNA, 101 bp, Homo sapiens
atcatgatacagttgataaaattgttgctattgttaaccgtgatggcacccgctatgtccagaaaggagaatacagaacgaatcctgaagacatctacccc

SEQ ID NO: 563489 - DNA, 75 bp, Homo sapiens
gtcaatctgggtgacacccgagtctcctgtactgaccaagtgccaggaagaggtcagccacatccctgctgtcca

SEQ ID NO: 563490 - DNA, 99 bp, Homo sapiens
actggactcatggaggctgagcatttattcagcctgattacatcaaccccagagccgtgcagctgggctcccttctcgtccgcggcctcaccactctgg

SEQ ID NO: 563491 - DNA, 76 bp, Homo sapiens
agaaaactaaagacattcatggaaattactttggaagaggatagcattgaaagggaaacacctttgtccaagtccc

SEQ ID NO: 563492 - DNA, 100 bp, Homo sapiens
cgactatgtccaattttcatgctcaggtacatcaggaacgtctctatcaagaatacaatttcagcaaggctgagggccatctgaaacagatggagaagat

SEQ ID NO: 563493 - DNA, 108 bp, Homo sapiens
gttccttcgaagagggcccagggttgttcacctgcccaaaaattgtgtcttgagctcactgaaaactgaagctaatttggaagttttgaagtcaattcctagtgaaaa

SEQ ID NO: 563494 - DNA, 83 bp, Homo sapiens
gggtttgactcttttaagacgcctttacaggagagtgcgaccatggctgtagtaaaaggttctgtacagagtaatgagatgtg

SEQ ID NO: 563495 - DNA, 75 bp, Homo sapiens
ataaagttggccttacctcagagatcctgaactcttttgagcatgagtgagaaagatcagtctaaagaaaaggag

SEQ ID NO: 563496 - DNA, 75 bp, Homo sapiens
tccaagacatccctgctgagagagccaaggtgtcagaaactatttaaaagaagcactggtgaatataattgccgt

SEQ ID NO: 563497 - DNA, 100 bp, Homo sapiens
tgagaccagggatgttctggccaagcaaaagtccaccgtgctaaccatccctgagatcatcatcaaggtgattcgcaaggggtggctcaccatcagcaac

SEQ ID NO: 563498 - DNA, 100 bp, Homo sapiens
tgcgaagttttgctcctggatgaatccaagttaacccttaccacccagcagcagggcatcaagagaaaattgggtctcaaaaccctgggctctggaaggc

SEQ ID NO: 563499 - DNA, 98 bp, Homo sapiens
tggagtccggggtcctggtcggggtggtctgtctgctcctggcatgccctgccacagccactggtgcggccgggaacttcctgtgccccgctggcgcc

SEQ ID NO: 563500 - DNA, 82 bp, Homo sapiens
acttggaaatgacattggcatccagattatccactgcagcttctccagggaaagtgaccgaggcagtgaaagaggccattga

SEQ ID NO: 563501 - DNA, 100 bp, Homo sapiens
cttattctctcaggcctgatgggagacactgtgtatacccacttcctgtatttgaaatatctcaccaaaaaatatttgaagaagaataatctacgtgact

SEQ ID NO: 563502 - DNA, 82 bp, Homo sapiens
caggaggacacccctggtggcctgcttgcgaggaagaaaggacccggtttcaggagctgctggccagtccggcctacagagc

SEQ ID NO: 563503 - DNA, 100 bp, Homo sapiens
ccggtttcaggctgaaggctctttaaaaaaaaacgagcagaattttaaacttgcaggaattttggagagtaaaaggctgaaccttgttaaagagaaaacc

SEQ ID NO: 563504 - DNA, 95 bp, Homo sapiens
cacctccgagcgcaaggacagcgcgaggtccgcgcagcccagcgcagccatattaagtacacgggcttcagggaccggccccacgaggaacgcca

SEQ ID NO: 563505 - DNA, 100 bp, Homo sapiens
cccttctctcctggacagaaggccgtgtcctgggacttctctgatggcgagaggctgcggctgtaccaggtggcaggttcaagaaagagattgtcgttga

SEQ ID NO: 563506 - DNA, 100 bp, Homo sapiens
gggaattttcgcctgcttgcagagctttccagcccgtttgtgaatcagcgtgaatatggaggtgagaccataccaggacctgcatttaatccagcaagtc

SEQ ID NO: 563507 - DNA, 90 bp, Homo sapiens
agaagaagcagcagaaaccagaactcagggatctggtctttagcaccacaccccactctggccggagcacgccaagcagctccccatcgc

SEQ ID NO: 563508 - DNA, 74 bp, Homo sapiens
ctatagttaatcttggcgacattgacaatgatggctttgaagagagcctatctctggcagaagtagccaacgag

SEQ ID NO: 563509 - DNA, 80 bp, Homo sapiens
gtgctgatgaccctcgagggagacatcaggctggggacaagaatccttcaagaaacaggaaaaaactcctaaaacaccaa

SEQ ID NO: 563510 - DNA, 114 bp, Homo sapiens
tcctcatccctctgctggtctggatcaccacacttcccaaaattgacagtttaattggttggggtcagataagaagaggagtgacaatcaagccaacagtagatgatgactgaa

SEQ ID NO: 563511 - DNA, 75 bp, Homo sapiens
ccactttcacttaatgactagacatgtcctcatagagatttcaagtacccacaagaaactcaacgagagtcttga

SEQ ID NO: 563512 - DNA, 75 bp, Homo sapiens
aaaacatcctggaatcaaatagtgttacggcaacaagagtaaagctgctgctaaagctggatcttctaaatacca

SEQ ID NO: 563513 - DNA, 90 bp, Homo sapiens
gcggctgcgagagtggcagaggagctggcggagagcggcctgcgggcgatcgggccgaggtctgtgacagccttgggcggcgacacatgt

SEQ ID NO: 563514 - DNA, 100 bp, Homo sapiens
catccagcgcttcctgcggaccggggcggccgtcagggcgccctgcgtccggcagaggaggcgagcatcccgctcaggtgatgaggaacccctcgcgcac

SEQ ID NO: 563515 - DNA, 90 bp, Homo sapiens
atttgtgggcgcgcggcacgcagccgggaggccgaggactcggagttcacctgcagcattccccgtcggagccctttctagagaaaccag

SEQ ID NO: 563516 - DNA, 100 bp, Homo sapiens
ggcctggcggacgcggcgccatcgcagtcaggcaaaacccatttatggcggttggctgctcctggctccagatgggaccgactttgacaacccagtgcac

SEQ ID NO: 563517 - DNA, 90 bp, Homo sapiens
aggcggacgacgaccggctcaacaagtctacgccttctccgtcggcagacctgctgggtctcggggctgccccccctgcccccgcgggcc

SEQ ID NO: 563518 - DNA, 83 bp, Homo sapiens
cgggactccttcttggtggagagaggatacctggataatgtggtcaacaagcagagtgtctctcctcctatcccgcacctccg

SEQ ID NO: 563519 - DNA, 100 bp, Homo sapiens
ctgccttcgcctgaattccacgactaccaccatctcaagaaacatactggggagaaaccctttgagtgtcccaaatgtgggaagtgttactttcggaagg

SEQ ID NO: 563520 - DNA, 82 bp, Homo sapiens
cggcattctttgagggacccccattcaagttcaagttcacaattggcagttcggaatccagcattaagaagaaatttctcaa

SEQ ID NO: 563521 - DNA, 100 bp, Homo sapiens
aacaaatacagtgacagcacaggtcacagtaaggccaaaaatgtgcatactcacagagttagagagagggatggtggaaaagcaggtgatattctcagtg

SEQ ID NO: 563522 - DNA, 83 bp, Homo sapiens
ggacagctcgccctgttcgctctggggggatatgagactttctactcggaatatcctgagtgttgcgtggatgtaaaacccat

SEQ ID NO: 563523 - DNA, 75 bp, Homo sapiens
ctgcggaagtgcagctgcctcagttcttagcgcagcctggagcattggtaagcgtcacactgccaaagtgagagc

SEQ ID NO: 563524 - DNA, 100 bp, Homo sapiens
atggagcaacaaggctgactataagaggggaaggtcacggtctagatcacattctcgatccagaggaaggcgatactctcgctcacgcagcaggagcagg

SEQ ID NO: 563525 - DNA, 74 bp, Homo sapiens
gaagagtggctggacattctggagtccaccctgcacctggtgttgcgcctgcgaggtggcattattgagccttc

SEQ ID NO: 563526 - DNA, 95 bp, Homo sapiens
cgagaatggttaacagaactttttcaacaaagcaaggtcaatatgcagaaaatgctcccaggacccatggatgaaggaccagatcttgatctagg

SEQ ID NO: 563527 - DNA, 87 bp, Homo sapiens
caggaccaggatgtggacgtcaaatactttgcccaggaggctctgactgggaggagctgtgcagtgagaagcaaagcaggaaacaag

SEQ ID NO: 563528 - DNA, 101 bp, Homo sapiens
ctgcgcccccgggagcgggcgcccagaggcgcggcgctcggactataaaacacaacaaatcataaacccggcggagcagcagcggccgcgcgcgcctcccc

SEQ ID NO: 563529 - DNA, 115 bp, Homo sapiens
atccctattggatgctgccctctgatgtttgtggaatgaactgcttttgggaagcggcttttaggtgccagtgacggggtggcccgtgagctgatgacgaggactggcttttaat

SEQ ID NO: 563530 - DNA, 74 bp, Homo sapiens
cttagctgtgctcgcgctactctctctttctggcctggaggctatccagcgcgaacctgggagacctgccttcc

SEQ ID NO: 563531 - DNA, 74 bp, Homo sapiens
ccgcctgaccctgggcgccgcgccgcacgagcaccagcctagagccagatgatgataattccgaagaaggcttc

SEQ ID NO: 563532 - DNA, 100 bp, Homo sapiens
caccatcaagctgctcaccggctcctcctacaaggttgaggtgaagattaaacccagcacgctgcaggtcgagggtggccgtgactggggagagcacaac

SEQ ID NO: 563533 - DNA, 100 bp, Homo sapiens
gagaaactggaggtcacctcgaaagttctcaccactaaagttcctggtccagaactttacacagaaaaggtgctcaaaggatatttgtttaatgaatgtg

SEQ ID NO: 563534 - DNA, 80 bp, Homo sapiens
tacagacatgcgccagcacgcctgaatagcctaacatggcagaccagagacagcgctcactgtctacctctggggagtca

SEQ ID NO: 563535 - DNA, 100 bp, Homo sapiens
atgagagatgctgtttgaagtggaagagaggaagttcactgtcgtgtggttgtgtataggcggaccttgccaagtatatctgtgaaaatcaagattcgat

SEQ ID NO: 563536 - DNA, 90 bp, Homo sapiens
aagctggccgtggctctcttggcagccttcctgatttctgcagctctgtgtgaagtgatcgtccgtgccgctgactgtaagaaggtacac

SEQ ID NO: 563537 - DNA, 98 bp, Homo sapiens
tactagagcagggtttggagactcaggtgggcaatggcagaaggttatggggcttgcttaataaacaagccagagcttgttcaagacatggtgaaaca

SEQ ID NO: 563538 - DNA, 87 bp, Homo sapiens
agagcagactgtatactatgccaaagcattctctaaagacttgccaagagcctctacactctgtcaagttgaacctgtgggaagatg

SEQ ID NO: 563539 - DNA, 51 bp, Homo sapiens
ctgtccaagtgcctgggatgcaggatttgtactgtgttcgcagtgacctgg

SEQ ID NO: 563540 - DNA, 101 bp, Homo sapiens
tgggagctgggataagactttaaagggtcctgagtttgtgcgcaaacatatcttcaacaagcatgcagagaaaattgaggaagtgaaaaaggaagtcgcgt

SEQ ID NO: 563541 - DNA, 74 bp, Homo sapiens
gcagctggacccgctcaccatctacggcatccggtgagaacgtatttaccgggcagtcaaagatctattcctac

SEQ ID NO: 563542 - DNA, 95 bp, Homo sapiens
agaacctggagcaaagattagcagaggtgctaaagggaagaaggaggaaaagcaggaagctggaaaggaaggttacaggaaatacaggaggcaga

SEQ ID NO: 563543 - DNA, 50 bp, Homo sapiens
ctccttcatcagtgaagaaacgagcatacggtgaaagacagagatcacat

SEQ ID NO: 563544 - DNA, 98 bp, Homo sapiens
tccacctgtgcccaccctggcagcatcccacctcctgagtcctctcggcacccagcaaggataaaagaatcagagtgtctcaacccttgacaagagga

SEQ ID NO: 563545 - DNA, 98 bp, Homo sapiens
cctggatattcctaaaatgttggatgctgaaggcattactagagactcaaaatttactgcgcactcaggttgcaaattttaccttcaaccttggattt

SEQ ID NO: 563546 - DNA, 98 bp, Homo sapiens
gcagtcatggctttcacaaattacagcagtctgaatcgagctcagctaacctttgaatatctgcacacaaattcgtcccctcttgctgttggctgcac

SEQ ID NO: 563547 - DNA, 74 bp, Homo sapiens
atatggaccacatgttcctgagcttgagatgctaggaagacttgggtgtgatgaatgcagactctgctaccatt

SEQ ID NO: 563548 - DNA, 89 bp, Homo sapiens
gtgaatatgtatcattatctctgtcacacttaacgatgatttcagttgcagtactctttccattccttaccccagtttttgaagcatta

SEQ ID NO: 563549 - DNA, 100 bp, Homo sapiens
gctccgttctctatcaccacaccaagaacagcgagcaggcgcgcagccacctggagaaggcgacaaagatcattccactcagcctgggacgatggggagg

SEQ ID NO: 563550 - DNA, 75 bp, Homo sapiens
cgatcagctgttttacaccaagatcttcttggacccggagaagaggactgtggatattcataaggagaaagtggc

SEQ ID NO: 563551 - DNA, 75 bp, Homo sapiens
cactgatacccggaaggacgagcaggagcgttgcatcaccatcaagtcaacgtgctgctgctgcctccactgtac

SEQ ID NO: 563552 - DNA, 74 bp, Homo sapiens
cgcgcggcgccgggcgctgactgagttacagaatgtctgaaggggacagtgtgggagaatccgtccatgggaaa

SEQ ID NO: 563553 - DNA, 100 bp, Homo sapiens
tgatgattcttcctgtgcttatcatgattgctctcccctcccctagtatggaagcaactttgcctgactgcttcaaaatttgtggcgcatcttattaacc

SEQ ID NO: 563554 - DNA, 80 bp, Homo sapiens
cagtacagcaccggcaagaccaccttcatcaggttcctgcacttggccatcatccatgaagaaaaggcactgaccatgga

SEQ ID NO: 563555 - DNA, 75 bp, Homo sapiens
tcatgctctttgtagcgtggtgcttctgttgctcacagacttcgtgaagatgcatcaactgtaaaatctgcctgg

SEQ ID NO: 563556 - DNA, 99 bp, Homo sapiens
aaaaatgggtggagtacagatctctgcagttacaggaacatcgtctgcttcatgatcggattcaaccgcacatcatgacagatgttccggctacattta

SEQ ID NO: 563557 - DNA, 50 bp, Homo sapiens
ccgagctccagccgaaggagaagggggggaaagtgaacatgagttccgaa

SEQ ID NO: 563558 - DNA, 100 bp, Homo sapiens
ctccaccctgctgcagcccctcagcaacgccgtgcagctgcccatcgaccagatggactcaccctgtcacccaggttggactgcactggcctcaacctcc

SEQ ID NO: 563559 - DNA, 97 bp, Homo sapiens
tagctgctatcagtgcccgctttgttcagctgcagcatggagagatagataaacgggtgattgtgaagacaagaacggaatatcagccggaacagaa

SEQ ID NO: 563560 - DNA, 75 bp, Homo sapiens
gctgtgcgagagcctcctcacttggggcggcgactggcggcgcgatggacctgaccgggctcctgctggacgaag

SEQ ID NO: 563561 - DNA, 75 bp, Homo sapiens
ccggatccgatcccgctctgcacattccaaaggaatactcccccagttgcaagaggcgcaggaccgtggaagact

SEQ ID NO: 563562 - DNA, 114 bp, Homo sapiens
gcgcacgttggaaccgaagagagctctgttgttgcaaggatgtgaagccactgaaagcttgactcagggaaaagaaatgtgggaccatcacacacatgaaaatggctataatcc

SEQ ID NO: 563563 - DNA, 88 bp, Homo sapiens
tctttccggatcaatccagatggcagccagtcagtggtggaggtgacagagctgaatgaacctctctccaatgaagatcgaaatctcc

SEQ ID NO: 563564 - DNA, 143 bp, Homo sapiens
aggaaaggaagatgcattttctaagctgaaggagaagtttatgaatgagttgcataaaattccatgtggaaaatgaggttgatcgcagcattcagaaagtgtataagacctacaatggaaccaaccctgatgctgctagccgg

SEQ ID NO: 563565 - DNA, 100 bp, Homo sapiens
agatttacctgtgagatgtttcatcccaacacatcctaatgtcctatgatcacgtggaactcacattcaatgacatgaagaacgtgccagaagccttcaa

SEQ ID NO: 563566 - DNA, 82 bp, Homo sapiens
cccaagcattcatgttccctcaccagctgtaaatttgcaccatcctgggattgtaaacctggaatgtatgtttgaaacccca

SEQ ID NO: 563567 - DNA, 96 bp, Homo sapiens
ggagccctgggtgatggaggaagaaatgtttgggaggcactgtccagccacccaactaatttggaagaatttccacatccagtactctcttgcatg

SEQ ID NO: 563568 - DNA, 110 bp, Homo sapiens
aagaggaaacctaaccaatgactgtggaataatatggaagaagatggaaaaaacttgtttaatggtgccggtggtggtgtgcacattgagccccggtatagacagttccc

SEQ ID NO: 563569 - DNA, 100 bp, Homo sapiens
atgtcaccccaggatgatgaagcagaagaggacaatacaatggtgggtgaagagaagatgtctctaagaaaccggctgtcaaagtccagggaaaatcctg

SEQ ID NO: 563570 - DNA, 100 bp, Homo sapiens
gaccaagagaatgtgtcagccgatgcaccgagtccagcccaggaaaatggagaggtacgtgcagcactacggcctgggcagtgcctgtgacaacgtagag

SEQ ID NO: 563571 - DNA, 90 bp, Homo sapiens
actgatgttctcatgggagcagtgccgtgtctgcatgggtctttttggagttcctgagctgagtgccccagaaggatttcatattgcaca

SEQ ID NO: 563572 - DNA, 82 bp, Homo sapiens
caaagatccccgttcctggagattctgattgagtggacatcctcatcatggatgatgacgacgtccccagctggcctcccac

SEQ ID NO: 563573 - DNA, 74 bp, Homo sapiens
agaaaatcgtcttatagttgagaatttatcctcaagagtcagctggcaggtcaataactgggagatggacaaac

SEQ ID NO: 563574 - DNA, 101 bp, Homo sapiens
aggagtgtggactttttgaatttcaagaacagtaaagttggaacacagcagagggtgtgtaataaaatacagatccagacatttaatgtggatgcaccatg

SEQ ID NO: 563575 - DNA, 90 bp, Homo sapiens
caaccacagaaacaagtggtacagatcacgctgaccaccattggctacggggacaagtacccccagacctggaacggcaggctccttgcg

SEQ ID NO: 563576 - DNA, 100 bp, Homo sapiens
attctactgaccctgcagcatctaccgctcactgtagaccatctcaagcaggtaccacgaaaggcagtggtagaaaagccagctcgggcagcagagcgag

SEQ ID NO: 563577 - DNA, 96 bp, Homo sapiens
cctgaaccctgcacagagggctttatacagggccgtgatgttggagaactacaggaacctggagtctgtggggaagtcgagataacatgagtattg

SEQ ID NO: 563578 - DNA, 100 bp, Homo sapiens
cgcaacctggcccagaggccccagccctcaggcaaggttctccggcccgaggcctgacagacgcgggcagtgatgagccctgttctggagtggaaagagc

SEQ ID NO: 563579 - DNA, 98 bp, Homo sapiens
aacctcagaggacaacgaagtgttcggtggacgacatccttggagaaggcagcgacgacagcgacagcgagaagaggaggcctgaggagcaggaggag

SEQ ID NO: 563580 - DNA, 82 bp, Homo sapiens
cggcctggtgcgcaaggccccgaacaacagctacgagttccagggagctctgtcctggtgaccgtgcccgggttatgacgac

SEQ ID NO: 563581 - DNA, 50 bp, Homo sapiens
tcccgagtagctggaattacagatcactgtgtccactactatgatcttcg

SEQ ID NO: 563582 - DNA, 100 bp, Homo sapiens
gcttcaagcttaggaccacccaccatgcctatccagggactaccgcgccatcccagagctggacgcctatgaggccgagggactggctctggatgatgag

SEQ ID NO: 563583 - DNA, 96 bp, Homo sapiens
tcgacaacgcagatgagctgctggagagcttcctcgagggcttccatgacgagagcacacagaaacacaagttcctgagaagaaaaaaggaatctt

SEQ ID NO: 563584 - DNA, 101 bp, Homo sapiens
gccatacccaataaccaggtgcttggcaaaatcgagcgggccattgtcccgcagcgtggacaagcagcatgccgtcatcaactacgaccaggacagggacg

SEQ ID NO: 563585 - DNA, 83 bp, Homo sapiens
cagtatacagaaacagagccgtatcataattaccgaataacgaaggaggcccaacttcattcaataaggagcctgacggattt

SEQ ID NO: 563586 - DNA, 96 bp, Homo sapiens
cgcttctccgcctggctggagtgtgtgtgcgtggtcaccttcgacctggagctgggccaggcgctggaggacagtggggggtggacgcccatcatc

SEQ ID NO: 563587 - DNA, 100 bp, Homo sapiens
aaaagatccaaaaaatgagacttctagcaaagattatttgccttatgttatgggctatttgtgtagcagaaggagattacctggggcaattgatgttatc

SEQ ID NO: 563588 - DNA, 75 bp, Homo sapiens
ccccgggcggttcccagcatggccccttcacaggacatttcatatatatggatttcacagctacactcgatccac

SEQ ID NO: 563589 - DNA, 90 bp, Homo sapiens
caaactttatgtttgggatttagaagtagaagatcctcataaagccaaagggtttggtggacgttattctctatcatcaacccgatgaca

SEQ ID NO: 563590 - DNA, 75 bp, Homo sapiens
ctgaactcaagtcaccgtggagctccgccgccccgaaactttcaccgcgagcggcaaaatgatgcttcaacaccc

SEQ ID NO: 563591 - DNA, 75 bp, Homo sapiens
tgctgcagctctactctggacacctgcaggaattggcagcaatgaaacagattctcgttaagatgcatagtaaac

SEQ ID NO: 563592 - DNA, 100 bp, Homo sapiens
gtgttcgctgcccagaagaagggaaggcgcgagtgaggaaaggaggtactgtagattttatcatgtgggcaacctgctgcaactggttctgcctggatgg

SEQ ID NO: 563593 - DNA, 80 bp, Homo sapiens
ccgggcctatggtgtcccagtaaagccaatgacccccaaggtggtcactctctggagcaaatggaatgatgactttgaaa

SEQ ID NO: 563594 - DNA, 97 bp, Homo sapiens
taaggtctggtcggatggggcaggatggctgcgttgacacgtcttatttaatccacatcataggagccagatgaccaggatgccccagatgagcatg

SEQ ID NO: 563595 - DNA, 100 bp, Homo sapiens
ccagcttccagttagtggatatagcacaccatccccagccagccttagaaaatttacgtgtatacctgtgtgagaaaatcatagctgagagacattttga

SEQ ID NO: 563596 - DNA, 100 bp, Homo sapiens
caaaatgagtgctttcctggagcaaatcctcaagctgttccagaagggccccttcacagatgtagtcactacaaatcttaaattgcgaaatccatcggat

SEQ ID NO: 563597 - DNA, 75 bp, Homo sapiens
ggcgactggacttacgaggagcagtttaagcagggtttaactccctcgtgggtggcgtgatgggcttctccattc

SEQ ID NO: 563598 - DNA, 130 bp, Homo sapiens
ggcagtgacacagaagactgctgagcgctcctaccgggagcacattgagcagcagatccagacctaccagcgcaggtgtccctggccagtgtccttccacctgtccacaagcatggggaacatcttcgcc

SEQ ID NO: 563599 - DNA, 134 bp, Homo sapiens
ctcggagaagccgctggcggcagtcacttgtacagcgccggtcaacatcgcggtcatcaagtactaaaaatggctacaaacttcctagcacatgagaagatctggttcgacaagttcaaatatgacgacgcaga

SEQ ID NO: 563600 - DNA, 100 bp, Homo sapiens
atggcgctttacccctaggaccggacttcattgacttaactagagagaccagaccaaggacaaaagatcgcagtggactgtatgtgattgacctgacaag

SEQ ID NO: 563601 - DNA, 74 bp, Homo sapiens
ctcaggacggacaagcacagtcttcggaaggacgtagacaagtttggcaacgagatcacccagctggcccggcc

SEQ ID NO: 563602 - DNA, 74 bp, Homo sapiens
tcaggagctgaagccctttgtgactgcaatctcgaggtttggtgcacctcgatttggaggaagtagggcagggc

SEQ ID NO: 563603 - DNA, 75 bp, Homo sapiens
agtcggtcggggaaggccacccagcctacttggaggagatccagtcggtccgtcgccataccaacagcatgctgg

SEQ ID NO: 563604 - DNA, 100 bp, Homo sapiens
ggggagatgtggccatcaagctcaagttcctggaagaaaacaagatatcgatctggtggagggaaatcccaaaatcagttgacagtgaatgagctccggc

SEQ ID NO: 563605 - DNA, 75 bp, Homo sapiens
gatcaatactcagcatccagctgtcaaatcaacaccaagataaatttgcgcctcattttggtaagcggaaaaaca

SEQ ID NO: 563606 - DNA, 76 bp, Homo sapiens
gctacttcatattttggaaagcagtttttaagacaagcctcattgctacgatttcagagtaccctggtaatagctg

SEQ ID NO: 563607 - DNA, 100 bp, Homo sapiens
tgttactcacctcggagaagcagaagtacgatttactattgttgcttgcttacttactcttatcaatttctatgagagaacttgagagagatttgctggg

SEQ ID NO: 563608 - DNA, 100 bp, Homo sapiens
ccgggtgaagccaccgtcatcatgtctgaccagcttgccgggattgctgtccttgccattggactatggctccgattcgactctcagaccaagagcatct

SEQ ID NO: 563609 - DNA, 51 bp, Homo sapiens
aactggaacagaggaacattttgaaacccgtcctgtacttcctcctccaag

SEQ ID NO: 563610 - DNA, 90 bp, Homo sapiens
gtcctgcaggggcgcttgctgcaaaattacttggggcacacagcaaaaaatgctgtgatcacagtcccagcttatttcaatgactcgcag

SEQ ID NO: 563611 - DNA, 100 bp, Homo sapiens
cgtggaggagctgtgcagccgcgaggaggcgcgggaggtgttcgagaacgaccccgagacgacttaattcagtgcacaaatgagatgaatgtgaacatcc

SEQ ID NO: 563612 - DNA, 101 bp, Homo sapiens
ttctcaaatccgatatgatgctgtgaagagtaaagtaagttctcttctacgctgtatgagactggtggctgtgatatgtcacttgtgaattttgaaccagc

SEQ ID NO: 563613 - DNA, 75 bp, Homo sapiens
ctctgaacttccctggtcgaacagttttttctaatggctattcaaggaatggaagttggatacactttgtgactt

SEQ ID NO: 563614 - DNA, 74 bp, Homo sapiens
agccaaggaataaacatgcaatgaacccaaaaggtgtgaagcagtatgcagatgttgaaggattctaatgcaag

SEQ ID NO: 563615 - DNA, 100 bp, Homo sapiens
tgagtgcccgggcaggcttcactgtgaggccgcagcgtttgatgacgagtggcggcgggagacctcccgattccggcagcagcgtcccctggagtttcgg

SEQ ID NO: 563616 - DNA, 96 bp, Homo sapiens
ccggccgcgggagcctcgtggctgcgtcaccgccgcccccccagacaagatggacaccgcggaggaagctagagaccgttggatggcagcttaacc

SEQ ID NO: 563617 - DNA, 51 bp, Homo sapiens
ggaaatgtccggcaagatcgagaaagcagattgctgctaaaattgattcaa

SEQ ID NO: 563618 - DNA, 83 bp, Homo sapiens
cgctgctggaggaaacacctcaggacacggcctacaacaccaagaggtttggtgcacctcgatttggaggaagtagggcaggg

SEQ ID NO: 563619 - DNA, 100 bp, Homo sapiens
aaaaggaaggtggctgaacaggaggagcggcagggcatgaaggtccaggcgctggccagggtcacctgtctgtgtgcccagtttgaagccgtcctgcagc

SEQ ID NO: 563620 - DNA, 83 bp, Homo sapiens
ggggcaaagggaccacggtcaccgtctcctcaggtgctggagaatctggtaaaagcaccattgtgaagcagatgaggatcctg

SEQ ID NO: 563621 - DNA, 88 bp, Homo sapiens
ctgaactaggatgtcccgacatgaagggtcctgacttgtcctgggcaagccaagtccattgcttctgctcctgggaagtgccaagatt

SEQ ID NO: 563622 - DNA, 83 bp, Homo sapiens
cagctgaagagcgacaagccgctggcagccgcggatctcaccgccgctcaggcctcaggcccagagccagcacgagacatccg

SEQ ID NO: 563623 - DNA, 97 bp, Homo sapiens
acacaaagaatagagttgagcctgtgggacacttcgggccctggccaacgtcaacattgggagcctcatctgcaatgtaggggccggtggacctgct

SEQ ID NO: 563624 - DNA, 100 bp, Homo sapiens
agccctgcgtggtggcgagggatgtgacaggaagacagtgccccgagcagttcagagccccagttgcagacgacttgtcctgccaccaccatgagttctg

SEQ ID NO: 563625 - DNA, 50 bp, Homo sapiens
cgaggcttcacggaggaggtgggtttggtgcacctcgatttggaggaagt

SEQ ID NO: 563626 - DNA, 80 bp, Homo sapiens
cacagccatgtgggctacacactctcctacaaggtccgcaagcaggtggtgaacatcccgtccttcattgtccgcctgga

SEQ ID NO: 563627 - DNA, 100 bp, Homo sapiens
gcccaccagggagctcctgcaggcaactgaggagatagaggaccgggaaacgctggctctcctggcagcaaggagtgaaaacgaaggcacatcagatggg

SEQ ID NO: 563628 - DNA, 100 bp, Homo sapiens
taggctgcgctaccggaatgtcatccagcgagtgattaggtcatacttacctggttgcttgcgcatctagtaatgttggatcatattctggatgttttga

SEQ ID NO: 563629 - DNA, 100 bp, Homo sapiens
tacgcagcaaaccatccagaagtctcacagaaagttctccgctcccagacatgggtccctcggcttcctgcctcggaagcgcagcagcaggcatcgtggg

SEQ ID NO: 563630 - DNA, 90 bp, Homo sapiens
gcaagccgcacctggagaagctgaccctgggcatcacgcgcatcctagaggcggggtttcaccgtgttagccaggattgtctcgatctcc

SEQ ID NO: 563631 - DNA, 90 bp, Homo sapiens
gggacactgccaaagctgcagggccactgcaagtctataaagaacacgctcaggagcactcccgatttggaaaaacaaccaaatgaaaat

SEQ ID NO: 563632 - DNA, 88 bp, Homo sapiens
cggagttctcattccttctccagggagagtcgctgcagctctggaggctgccatcgagaacctcaatgaagccaagaactattttgca

SEQ ID NO: 563633 - DNA, 50 bp, Homo sapiens
tctagaaatgagttgttgcagaagggcctgaatccagtacctgtcagaat

SEQ ID NO: 563634 - DNA, 126 bp, Homo sapiens
gctgcagccgagatgccgggggagcggggccttccacaccccctccgtgggtgtgtgttgtcgccgtgatcctgaaggcgctgacctacgacgagaagcggggtgcctgcagcgtgggcaccaacg

SEQ ID NO: 563635 - DNA, 73 bp, Homo sapiens
ccggggtcacccgctacgggaagcaggcctcgccacaggatttccactggacaaagcggttgcctatgcaaaa

SEQ ID NO: 563636 - DNA, 111 bp, Homo sapiens
tcgcttgaaaagactgggcttgtccttgctggtgcatgcgtcgtcggcctctgggcagcaggagcgtgaggatcatccccggagaggacgggaggatcggcagcacaggga

SEQ ID NO: 563637 - DNA, 82 bp, Homo sapiens
cgggacccggtgtctgctcctgtcgccttcgcctcctaatccctagccactatgtacttcctcgcgtattgctaaaggagga

SEQ ID NO: 563638 - DNA, 100 bp, Homo sapiens
tgatctctacgaggaactgaagacctccactgccatcctgtccactggcattggcagaaactggcgatggaatatgagaggagccctctggaaagaaaag

SEQ ID NO: 563639 - DNA, 75 bp, Homo sapiens
cggccggccgacccttcctgtcgctgacggcgactgcgggaggccagggctggacatggaggaaggcaaggaagg

SEQ ID NO: 563640 - DNA, 90 bp, Homo sapiens
ttcgcctttcccgagccctggaggtggggagaaaagtctcatcggatcagatcgagcagctccatcggagatttaagcagctgagtggag

SEQ ID NO: 563641 - DNA, 98 bp, Homo sapiens
taaagcgagtcttcaagcgaaagaagcctcaacttcgtctggagaaaagtggtgacttattgagtacagcgcctgaggaggagcatgagagtccccga

SEQ ID NO: 563642 - DNA, 75 bp, Homo sapiens
tcaagaccaaggatggcgtggtggagatcaccggaattctcacactcaagaaagcaaatgaacttcttctgagca

SEQ ID NO: 563643 - DNA, 75 bp, Homo sapiens
ttaaagcagctgacttcccagcagcatgcgattcttattgaccttgatgaagaagatgactttatgtgtaagaag

SEQ ID NO: 563644 - DNA, 99 bp, Homo sapiens
tacttatcagtatcttatatgttagcttgacctatgcagatcttattccagagagagttcaagtggatggccttgaggacttgaaaagctgagatatga

SEQ ID NO: 563645 - DNA, 100 bp, Homo sapiens
cttcctaaaagaaggttttattgggaggtaaaggtcaatgcgtaggggtagagtaaggtgccgtgagcgatgtggagatgcaggaacactatgatgagtt

SEQ ID NO: 563646 - DNA, 112 bp, Homo sapiens
ctgcgatacccgtcccgaagggagcctcccccacgaagatctcggtccagaaggtatccacaagtgaaaatccacaactctgaagagaaactaccaagactcctcctgcccc

SEQ ID NO: 563647 - DNA, 82 bp, Homo sapiens
ccaagaagatgagaccgggggaggcgacgctaagttgctgatcgtggcgccttatgccagcctggaccatcttggaggcagt

SEQ ID NO: 563648 - DNA, 82 bp, Homo sapiens
ctcgctttccagcacctcaacacggactcggacacgacctgcctagagctggaacgttacctccagagcgagccctgctatg

SEQ ID NO: 563649 - DNA, 87 bp, Homo sapiens
tcgggctggttgttccgttgcgagctgcagctgcgatctctgtggtaggcccagatgtggcctcatggatgagctggtacacgactt

SEQ ID NO: 563650 - DNA, 89 bp, Homo sapiens
ggctcagcaagactctcgagcccatggtgatgatgatgcttatctgtgtattcatgaagatcagactgtgtacatccagccttcccatt

SEQ ID NO: 563651 - DNA, 82 bp, Homo sapiens
tgggcctggccaaggaccccctggagggacctggccatgggctccgacgcagagggggagaagatcaaggactccatgaagc

SEQ ID NO: 563652 - DNA, 87 bp, Homo sapiens
atttctttctcgctgatcgcctaacttctactgacgaagcttggaagttgcagaaggcatcatcgacctgtcccaagtgccacacct

SEQ ID NO: 563653 - DNA, 75 bp, Homo sapiens
ggcgcagaagaaacccgcggcgaccacagccaaagcgggcgaaactcaaggtcccatgagcccccttggtgatga

SEQ ID NO: 563654 - DNA, 154 bp, Homo sapiens
cggggattgtgcagacagaactgctgaaggagcatatggcaaaggaggaggtcctgcaggatcctgtgttgaagcagcgccaggctggtgagctggatgagtccgtgctggaactgacaagccagattctgggagccaaccctgattttgccac

SEQ ID NO: 563655 - DNA, 82 bp, Homo sapiens
tgggtcggggatcggtcgcctgagagggtttggaaatcccttgtctccaggttgctgggattgacttcttgctcaattgaaa

SEQ ID NO: 563656 - DNA, 82 bp, Homo sapiens
cgggggcagccgctgagacggtttttcacaaggcctacatacagatcacttttgtggagccctactttgatgagtatgagat

SEQ ID NO: 563657 - DNA, 100 bp, Homo sapiens
gagctcctggtcgatgaagaggatgatgtttttggtgaagacggtctggaaaatcccgaagcagaagcccgtattcatctaggcattcaagatctcgtag

SEQ ID NO: 563658 - DNA, 83 bp, Homo sapiens
attgcttgcagtgtttctttataatacattccatgggaggaggaacgtcaaggtcgtgggaaataaaaggcagttctacacag

SEQ ID NO: 563659 - DNA, 75 bp, Homo sapiens
ctgctgttgcggccgctgccccagggctgcggggacggaaagatgaatgggagggctgattttcgagagccgaat

SEQ ID NO: 563660 - DNA, 75 bp, Homo sapiens
aattttggaccattaacttaaagacgagaatacatggtagtgggcagcagtcagtgacaggtgtaacctctgtgg

SEQ ID NO: 563661 - DNA, 49 bp, Homo sapiens
agcgtgagtgatcactctcaatcccggggccgttgctccagggagaact

SEQ ID NO: 563662 - DNA, 100 bp, Homo sapiens
gagatccaagagattcagtatcactcgctcccttgatgatcttgagctgcatatccccaccgtttgaatctcttttaccttgccaatgatgtcatacaga

SEQ ID NO: 563663 - DNA, 100 bp, Homo sapiens
gatcacatagctgaaatatcagctaagcttgtagcgataatggatagcttatttgacaagctgttatctaagaatcagacacaagtttggcagaaggaag

SEQ ID NO: 563664 - DNA, 73 bp, Homo sapiens
gccctgatccagtggctggcagtgccagatgaggaagaaggactgttccctgatgtgggtggaggttatttct

SEQ ID NO: 563665 - DNA, 100 bp, Homo sapiens
ccgcgcgcgcctcgacctgctgctggagacctggatctcgcgccacaaggagatgcgccgtgccgtccctgcagtgacaccgaggtgctcctagccgtct

SEQ ID NO: 563666 - DNA, 74 bp, Homo sapiens
ctatcatttcacagctgattcctgggagcacatccatttcattggcaagctatcagaggactcctgaaacctgg

SEQ ID NO: 563667 - DNA, 102 bp, Homo sapiens
tcaccaaccactttggctccacctattcacataaggccaggctcaccgtgaatgggcttccgagtggacctgccaatcaagtcggcccgctaccgtggccag

SEQ ID NO: 563668 - DNA, 87 bp, Homo sapiens
gtggaaagatgacggatgaaaagaatgaacactgtccttcaaaacgaaacctaaaggcagacccagaagagctttttacaaaactag

SEQ ID NO: 563669 - DNA, 100 bp, Homo sapiens
cacctttcggcttctgagacggcggcagcagcggcattcagcaagagtgagccatggagctacgtgtggggaacaagtaccgcctgggacggaagatcgg

SEQ ID NO: 563670 - DNA, 100 bp, Homo sapiens
tgagtttgttctaacaacaaagaattacatccggacatgtacagatatcaagccagaatgcctcagcaccccaatcagatgaaggctctgatattgactc

SEQ ID NO: 563671 - DNA, 75 bp, Homo sapiens
aactggacatccttggggctgctgagacaggtatctcaggagattacatttcagcttgaaaaagggtcggtggaa

SEQ ID NO: 563672 - DNA, 82 bp, Homo sapiens
ggaaaaactgcgctgctccatgtcttcgccaaggactgcttccccgagaagcccttgttggatttttggactttctgaactg

SEQ ID NO: 563673 - DNA, 96 bp, Homo sapiens
ccaaagtatcttataacttctggctggaattaaggtagttaaaccagagagcaatgacaaagaaacagaagctgcgtatgaatcagatatccccga

SEQ ID NO: 563674 - DNA, 100 bp, Homo sapiens
cgagagatggagatgggcagacggattcatttagagctgcggaacaggacgccctctgatcgctcctttaccctcatcgtggaggcctgggactgggaca

SEQ ID NO: 563675 - DNA, 100 bp, Homo sapiens
gctgcctctgcaaatcgactgtctggctgcctggggtgtcatggagaaactccagctgggcccagagattctgcagcgggaaaatccaaggcttatttat

SEQ ID NO: 563676 - DNA, 100 bp, Homo sapiens
agtgacttctattcactaaaaccatgtgtctgaactgaagaagcttgggctcacttccacaaatgtcttatatccagatggccaggctcagatgattcac

SEQ ID NO: 563677 - DNA, 98 bp, Homo sapiens
gaagccatgcccctcaggctggaacttgccctgtctcctcgcagatgagagttttgccgaattgacaagcccctgtgtcacagtgaggatgagaaact

SEQ ID NO: 563678 - DNA, 75 bp, Homo sapiens
cccgctgctcagcgtcctcatgtggggggtaaaccactcgatgccagaggaacaagcattctgtgttttggtgaa

SEQ ID NO: 563679 - DNA, 82 bp, Homo sapiens
gtccacctgttgttgtgggtttttgggtgaccagcatgggtggtaaagtaccacctgctactcagaaagctaaatcagaaga

SEQ ID NO: 563680 - DNA, 100 bp, Homo sapiens
agaaaatcaagaagctgaatttccaggccttcgccgagctgtgcaggaattactccttctacgtcctcgacaaccagaacttgcagcaactgtgggactg

SEQ ID NO: 563681 - DNA, 88 bp, Homo sapiens
ggcgcgatggagcagcgaaaacgtggttgtagagttccgtgactcccagaatttcgctaaggagtttgtgatcagtgatcggaaggag

SEQ ID NO: 563682 - DNA, 100 bp, Homo sapiens
tgcaacttgggttatcccacgaagtgacagaggctggtggcaacctgagtgaattagtgccatcttacgattcagctacttttgttttagagaatttcag

SEQ ID NO: 563683 - DNA, 100 bp, Homo sapiens
agcagattcaagcagctatgggattcaagattgatggtggcatgaagcccaacacgttggtcctaggtttctacgatgacgctccaccgcaggaccattt

SEQ ID NO: 563684 - DNA, 90 bp, Homo sapiens
ccacagagcagtgcttgctgctttttctaactatttcaagatgatatttattcaccaaacaagacaggggcaagtgtccgagtggtgaat

SEQ ID NO: 563685 - DNA, 100 bp, Homo sapiens
ggacactgaaagcagagaccatggagcttcttggtgaccatgctttgggattttcatagtttgagtaattcctatgggctctaccacccagcgagttaaa

SEQ ID NO: 563686 - DNA, 87 bp, Homo sapiens
atggagaaccaggcacccgtgtggttgctaaggatgggctgaagctggggtctggaccttgagttacgatagccggaacaagcatga

SEQ ID NO: 563687 - DNA, 100 bp, Homo sapiens
ttggcaatttggagcattagatgaactaattacaacgttaacctaaggaacagtgacgaagttatacggaagcgtctcctcattgatggagatggtgctg

SEQ ID NO: 563688 - DNA, 100 bp, Homo sapiens
gagttactgatgggaatttttgaaatgggctgggaaaagccatctcctattcaggctggctacagcaaacatcattcaagatgtccagcaaagggagcag

SEQ ID NO: 563689 - DNA, 100 bp, Homo sapiens
catgccccacaacatctacctgcactcggccctggtcaaggggaaaagagtttctttttacaaacgagcccaaatccttgtagcagatacgtggagtgta

SEQ ID NO: 563690 - DNA, 140 bp, Homo sapiens
acgggaattatacaccctacaagtacaacctgaagaatttcatggttatcaactcagtggcctttgaccatgcagccaggagtggtggctcacacctgtaatcccagctctgggaggccaaggccagtggattgcttgag

SEQ ID NO: 563691 - DNA, 50 bp, Homo sapiens
caactataaacgagtgactgggacaagttttctggatatgccgcagaagg

SEQ ID NO: 563692 - DNA, 50 bp, Homo sapiens
atccagaggctgaatgagctagagggaattcggcaccggttgagaggtag

SEQ ID NO: 563693 - DNA, 100 bp, Homo sapiens
gtggagaggggcttcgggggcattacccagttcttgcctcagaaagaggctgcggtgatgtatcctgcagagttaccccagagcagccctgctgacagtg

SEQ ID NO: 563694 - DNA, 75 bp, Homo sapiens
ctggatctttgctagaaagagaggacatggcaaccacagagagagcagcccttttctttcccccttggaggcttc

SEQ ID NO: 563695 - DNA, 90 bp, Homo sapiens
tactgatgtgtttttccatcgacagccctgatagtttaggtccaggtgcaggtacagcagtctccgcaacaggtctcggctcagctctcc

SEQ ID NO: 563696 - DNA, 100 bp, Homo sapiens
aaaggactggcaccctctggcccaggacacagggactgggactgcctacattgaggtacatcaggaacgtctctatcaagaatacaatttcagcaaggct

SEQ ID NO: 563697 - DNA, 74 bp, Homo sapiens
ccggaactggtcgaatgaggcacctaaaaattgtataccgcagattcagatactgaagtactctttcccagtgg

SEQ ID NO: 563698 - DNA, 100 bp, Homo sapiens
ctgggtaccatccttcatccaggccatcactgtgcatgtccccatgccctcagcaggagtcgtggacatccccattgtggagaaggaggcgcaaggccag

SEQ ID NO: 563699 - DNA, 82 bp, Homo sapiens
gggggctatgggcccatcgactacaaacggaacttgccgcgtcgaggactgtcggatatctcttccaaatgcatgatgaagg

SEQ ID NO: 563700 - DNA, 100 bp, Homo sapiens
gacttccaagctggccgtggctctcttggcagccttcctgatttctgcagctctgtgtgaaggcgtcttcactcgaggacagctgggcctgatagacatc

SEQ ID NO: 563701 - DNA, 100 bp, Homo sapiens
tcaccagagacctggccagcatcgccagactccgcatcgcaaaggggggcgtcaatgacaatttccagcttgctaatctggacctgaactctgaaaaaca

SEQ ID NO: 563702 - DNA, 78 bp, Homo sapiens
ctggcgatgctgagctccctactggctgagggcagagactctcccgcgtccgtctccaagagagtatgaagagagtgc

SEQ ID NO: 563703 - DNA, 87 bp, Homo sapiens
ggagtgttcgttgtgccagcgactaaaaagaggctgcctctaagaatcaaacttcactcttgggagaaccaccaaaagaaattcggc

SEQ ID NO: 563704 - DNA, 98 bp, Homo sapiens
cagagataaagagaaaagagaaaaggagaaggataaagggaaggacaaggaattacataacatcaaacgtgggaggagcatattatttaatatctaga

SEQ ID NO: 563705 - DNA, 50 bp, Homo sapiens
ggacatcatctgtgtgttctcacagcctaaatgtgcacagcatgctcaag

SEQ ID NO: 563706 - DNA, 76 bp, Homo sapiens
ctatgagcgggaccaccctgggcacagcaggcatcggagacagggactgagaaacggaaatactaccatcctccag

SEQ ID NO: 563707 - DNA, 95 bp, Homo sapiens
agctgcagggcgtgcgcagccttatgagcaaccgagagttgtctgatgtcctgtgggccatgctgatgcgcgtgggcctccgcgttgacaccacc

SEQ ID NO: 563708 - DNA, 50 bp, Homo sapiens
gagctgaccctgggagacatcgacggttgggggccgtcccgctcctaagg

SEQ ID NO: 563709 - DNA, 93 bp, Homo sapiens
gccagggaaccctggtcaccgtctcctcagtgtggacgaatgtggaacctcgctctgtggctgtgttcccttggcactccttagtccccttcc

SEQ ID NO: 563710 - DNA, 112 bp, Homo sapiens
catgacgactttggaagacgtatttttaaagctagaagttgaagcagaaattgaccaagcagatctgttgtcaccgaaggtcattacaagaagatgaagaaggattctcaag

SEQ ID NO: 563711 - DNA, 88 bp, Homo sapiens
tggggatttagacaccagtttgggttacacatcattttggaatgactgtatatcatctggattacgtggctgtatgttaattgaatta

SEQ ID NO: 563712 - DNA, 50 bp, Homo sapiens
aaaacatcatggatcaatctcaaacaaagttgtggaagaaggactctggg

SEQ ID NO: 563713 - DNA, 100 bp, Homo sapiens
cagggatcctagctgacacatctatgtcctcgccttggttggagggtgaaatagtggtgaaaaataacccaaatgaatctgtaactgctaatgccgctac

SEQ ID NO: 563714 - DNA, 90 bp, Homo sapiens
accaccatctccatcacccaccaacaacaccacaataatccacagccaagacttaattcagtgcacaaatgagatgaatgtgaacatccc

SEQ ID NO: 563715 - DNA, 82 bp, Homo sapiens
gtagaatccattgatcctgtcactgtcagtataaactcatggattgaactggaagggaatttgaaggagaagaagaatatct

SEQ ID NO: 563716 - DNA, 94 bp, Homo sapiens
tcggctgcgggaaatcgggctgaagcgactgagtccgcgatggaggtattgttgcagcatctggcagtgagactgaggatgaggacagcatgga

SEQ ID NO: 563717 - DNA, 90 bp, Homo sapiens
gcaaagcccagcgcgctaaccctttactcgcgacctttcgcttcaccttcacagcagccctgcgagcactattcctgatcagagaactcc

SEQ ID NO: 563718 - DNA, 100 bp, Homo sapiens
taaaggagaagaaggaagttgtggaagaggcagattcaattttctttaaccagtctgaagtttcatttatgatacaaaagaagatgaaaatggaagtggc

SEQ ID NO: 563719 - DNA, 89 bp, Homo sapiens
gggtccctcgcccaggtccccttggacaaatgggctcagctgtcgcaggccctggaggagctgggaggccagaaacaaagagcagacat

SEQ ID NO: 563720 - DNA, 80 bp, Homo sapiens
tccttgacctgaagaagcctcctgcctccaaatgcccccatcgctatacaaaagagcacagggatcagttgtccttgttt

SEQ ID NO: 563721 - DNA, 100 bp, Homo sapiens
gtcactgcagtagaattccttgtagataagcaactggattttttaactgaagatagtgcctttcagccctaccagttttatgtgctgaaagagttggcca

SEQ ID NO: 563722 - DNA, 90 bp, Homo sapiens
agaatgttcctgaatgcccggaaggagctacagtcagacttcctcaggttctgccgtgctggagaatctggtaaaagcaccattgtgaag

SEQ ID NO: 563723 - DNA, 80 bp, Homo sapiens
gcaggacagcgccttcctcaacgacgcggacatggtcatgagctttgtgaacctggatcatggaagggaagtggttgctg

SEQ ID NO: 563724 - DNA, 100 bp, Homo sapiens
ccggagacagcccaaatatcctcggaagagcgctcccaggagaaacaagccccatcacaggtatatggaggagtgacctactataaccccgcccagcagc

SEQ ID NO: 563725 - DNA, 88 bp, Homo sapiens
aagattctgatgtcgaaggtggagaggtcctttacttggtgcattactgcggatggaatgtgagctgtgtgactggctacgtgttaat

SEQ ID NO: 563726 - DNA, 85 bp, Homo sapiens
ggaccacctggaagcctagaaatggctttgatgacagtagggaaagaaccatttcctaccatttacgtagattcacaaaaagaaa

SEQ ID NO: 563727 - DNA, 75 bp, Homo sapiens
gggtgggatattacataaggtggaatccacggatgaaaccacaggaatgtcggattgcacatcctattgtaaaat

SEQ ID NO: 563728 - DNA, 108 bp, Homo sapiens
cgcgggccgtgtctccggcatcatgtgtggaagactatgaccgtctgaggcctttatcttacccaatgaccgatgtcttccttatatgcttctcggtggtaaatccag

SEQ ID NO: 563729 - DNA, 99 bp, Homo sapiens
aaagcaggctaccaaggacagagtcagtgatttccataaattgaagcaaaagaccgtccaggctggacttgaactccttcctcggctgaagtgatcctc

SEQ ID NO: 563730 - DNA, 99 bp, Homo sapiens
ccgcgcgcagggcctgcagcgggagctggacggcgagcgcgagcggcgcgagaaagtgcatctgcagacgcagcaggaggtgaagctgcgcatgacggg

SEQ ID NO: 563731 - DNA, 74 bp, Homo sapiens
cgagttccccgacaagtttggatcctgtgttccccgtgaattttaccgggaaggccgagatgggaggaccgttt

SEQ ID NO: 563732 - DNA, 102 bp, Homo sapiens
caggaccagactcaagacacacaactcataacagttgatgaaaaattggttaaaggtgaatccttgtttcattctaagaaaatggacctgacagtaaatggg

SEQ ID NO: 563733 - DNA, 97 bp, Homo sapiens
acccgtggttgatttggccttcagtggcatcacgccttatgggtatttcttaatcagcgcttgcaaaggttgataccgtaaagcgcttgctgattaa

SEQ ID NO: 563734 - DNA, 100 bp, Homo sapiens
gaaggcctttcggctgccagacaacagaatagggaggaaattttccatcatgaatcagagcaatggtggaacaaagcggcaaaagatatcccatcaaaat

SEQ ID NO: 563735 - DNA, 97 bp, Homo sapiens
gagctgggttgctggacgcagttggggctcacttttcttcagctccttctcatctcgtccttgccaagagatgtggacgagtgtgcaacagattccc

SEQ ID NO: 563736 - DNA, 90 bp, Homo sapiens
cctgcagaaggtctctggagacatcttcagcagggtttggaaatcccttgtctccaggttgctgggattgacttcttgctcaattgaaac

SEQ ID NO: 563737 - DNA, 83 bp, Homo sapiens
gcgtctccgttgggtccggccgctctgcgggactctgaggaaaagctcgcaccagggtgcttcaaggatgaccgcatcgtctt

SEQ ID NO: 563738 - DNA, 100 bp, Homo sapiens
tggctgctccctgatgggagccagtgtggacagcaccctggctttcaacacctacgtccacttccaagagagacacatctcaattcaaaggcagcttgct

SEQ ID NO: 563739 - DNA, 100 bp, Homo sapiens
ggccgcaccgcgcggggccgctcggagtggaggccgcctgggggcaggcgggctagaggagcaggtgtctggtggcctgacatgcaccgcctggctgacc

SEQ ID NO: 563740 - DNA, 75 bp, Homo sapiens
ccctcgtcgaaaggattggattggcatctttagaattgcaggatacctatatggggtgagcccaccagataaccc

SEQ ID NO: 563741 - DNA, 101 bp, Homo sapiens
ccagccgaagccggagtcgcgcggccgggagcacgggcgccggcatagtacaatgaggcagccagcggatcttgggatcagattttattaagacctctact

SEQ ID NO: 563742 - DNA, 100 bp, Homo sapiens
ggcctccccagccatgtggaactgtttgtgtaaatcgtgaatgtgtagaatcaaggataattaaggcttcagcacatgtttgttcacaacagtgttctgg

SEQ ID NO: 563743 - DNA, 98 bp, Homo sapiens
ccaaacaagtctgcgcaaaatttgtcgaggaggtttgccgcggcagacccaacatgagtgaagtttcctgcaagaaacgggacgactatttggaatgg

SEQ ID NO: 563744 - DNA, 75 bp, Homo sapiens
gagggacctcacatcaacttctaccagctgagcactgcagtttcctcctgaaggctggctccggctctccctcaa

SEQ ID NO: 563745 - DNA, 91 bp, Homo sapiens
tcgcgctactctctctttctggcctggaggctatccagctcttcccaagggattgttgaagaaacttctgaagagggaaactctgtacctg

SEQ ID NO: 563746 - DNA, 75 bp, Homo sapiens
tataagcagcttcggaaaggagccaatgaggcatgcttttcacttccactgcatctctcgctggctcaaaacacg

SEQ ID NO: 563747 - DNA, 109 bp, Homo sapiens
aagctttgctgggagaaaccgatgcccgagagcgcgtcgcgaggttcctcctccgccaggtcctactgctctgttggctcatgaaataggttttggaagtaaagttaca

SEQ ID NO: 563748 - DNA, 98 bp, Homo sapiens
gtggacttcttgcaacaggttaacgtgtatggcgtgtgcgtgccagatggcggtgggaccccccgactgccctgtgggagggccgctgaccttccctg

SEQ ID NO: 563749 - DNA, 51 bp, Homo sapiens
ctccctgccaggctcttcatccaaggctggctacagcaaacatcattcaag

SEQ ID NO: 563750 - DNA, 90 bp, Homo sapiens
gcaacatggtgcggtcggggaataagtgccaaacatcagcctggatgtgctacagcccagttttcctgagatcttgctggaatcccacat

SEQ ID NO: 563751 - DNA, 82 bp, Homo sapiens
catcccctggatgggggaccacaagatcctcatcgacagatgctgtgggccctgagggaaaggatcacagaggcgctgagcc

SEQ ID NO: 563752 - DNA, 75 bp, Homo sapiens
caacatccacgccctgactgcccaggaaacgggctgtaaaggcagaaaaccacgtcgtgaaactaaaacaggaaa

SEQ ID NO: 563753 - DNA, 100 bp, Homo sapiens
agcatgattggccgaccgcaggagaagcccccagaaccaggcccccaactcagccatctgcggaggtcaaggtaaatggtcttaaaatggttgatgagcc

SEQ ID NO: 563754 - DNA, 95 bp, Homo sapiens
gagaacacgggacaccgcggaagccgggaaatggttgggcccgaaggcatcctgcagaacggggctgtggacgacagtgtagccaagaccagcca

SEQ ID NO: 563755 - DNA, 82 bp, Homo sapiens
catctgaagagggctccaggcatccggtcctggtccctgctggttggtgtttcccattaaacactaccaggacaaaatcagg

SEQ ID NO: 563756 - DNA, 74 bp, Homo sapiens
tcggggccccagaggccgcggacaccgacctggaggtcgtggattcacagataaagtagatcgactaaaactgg

SEQ ID NO: 563757 - DNA, 100 bp, Homo sapiens
atgagctcatccggaagattgaggcctacatggaagacaagttggatggcttgaggactggtactaaaaggaaacgtgactgggaggccattgccagcag

SEQ ID NO: 563758 - DNA, 98 bp, Homo sapiens
tcgtctacagccccggggagccgttggctgggaccgtgcgcgtgcgcctgggggcaccgctgccgttccgagggccatgctgcaccttacaaaacggt

SEQ ID NO: 563759 - DNA, 96 bp, Homo sapiens
gaggatttcgcagcccaagtcttttctccctctcccagctactccctcagcggaacggacatatctgaagagatggattaagaatgctttggatta

SEQ ID NO: 563760 - DNA, 100 bp, Homo sapiens
agaaatccaaggacttcaagaaccacgtgatcaagtaccttgagacactcctttactcacagcagcaggtgttggagcgggccggagagaagtagagtgg

SEQ ID NO: 563761 - DNA, 83 bp, Homo sapiens
gagcctcagttggaagcagccgatccagcctgcggagcctgtggggcagggagatgcacttatttacatggaaccagagaaac

SEQ ID NO: 563762 - DNA, 75 bp, Homo sapiens
acccaaccgctgtgcttgtgtttatgggttcactggtccacagtgtgaaagaggaggagcatattatttaatatc

SEQ ID NO: 563763 - DNA, 101 bp, Homo sapiens
cggtagcggggacgcagagatccaggttatccaaatgtgaaacatttttcttgggataaatacttagaagaaaccaattctttacctgctcctgcaagagc

SEQ ID NO: 563764 - DNA, 75 bp, Homo sapiens
tggtggaggtgttaaatgaaagcctttttgcaaatgtgtaacttgcctatcaaagtagtttgtagggcaaatgca

SEQ ID NO: 563765 - DNA, 95 bp, Homo sapiens
atgagattggcctggatgcagctgcccttcctggacaggtgatgctactaggaggtggagcctttgggaggtgattagttcatgaaagtggagcc

SEQ ID NO: 563766 - DNA, 75 bp, Homo sapiens
ttcctgcatgtccaaaatgggagacaggcgcctgagtaacccggggcaagaaatgggacgtcggtcatcagatac

SEQ ID NO: 563767 - DNA, 100 bp, Homo sapiens
gcactgtttgcaaaggttgcagcaaccaaaagccagatgttagtaggcaggaagaggcggagggagagctcagtgaaggagaacactggtatggaaactc

SEQ ID NO: 563768 - DNA, 100 bp, Homo sapiens
gagaacatgaacttccgtgtcttcctgcaatatgagttcacccacttgggcctggacctgtacttggagacctgttacatctgcgaggagcagggccggg

SEQ ID NO: 563769 - DNA, 140 bp, Homo sapiens
tccccccggaaaagaaacccactcagggcaaccccctgccacctcagatatttaatggcgaccgatactgtggaaattgcagaatatgtatagagtgtggcacacggtctagttctcagtggcaccacaattgcctgata

SEQ ID NO: 563770 - DNA, 90 bp, Homo sapiens
ctccgtcaccctccttgggctattcgatgccgtgtatgcatctgacaggcttatatagaattggtgataggatcacaacttctgaggtcc

SEQ ID NO: 563771 - DNA, 80 bp, Homo sapiens
aagggagttttccggggccctctcagcaagaacgggaacaaaactctgtgtacagctgcagctatcaaggctataagaga

SEQ ID NO: 563772 - DNA, 100 bp, Homo sapiens
tctttggtagactttagcaaagccctaggaaagcatcctgtttcttgcaaggaactttatattgctgttggaatatctggagccatccaacatttagctg

SEQ ID NO: 563773 - DNA, 100 bp, Homo sapiens
tgcttatggaaatgttttctctgcatttgcccgtaataaagagtctggctcttgctgattgaattcctttggtgcagtttagcatgttcctctgtgttct

SEQ ID NO: 563774 - DNA, 100 bp, Homo sapiens
attactcagcagggcacggacccgcttgttctcgccgtccagagcaaggaacaggccgagcagtggctgaagggagagcttatggatggagaccaaacat

SEQ ID NO: 563775 - DNA, 75 bp, Homo sapiens
caggcgtgcgcggacggtgtgcggtcttccaggatctcaaccagttctctcactgcagagtctggagaagcccag

SEQ ID NO: 563776 - DNA, 100 bp, Homo sapiens
atcaactcctatgatcatgcacacaagcagatggtgatggaatttcctgataatgtgttaaatctcgatggacatcagaataatggtgcacagctaaagc

SEQ ID NO: 563777 - DNA, 82 bp, Homo sapiens
gccacgcagtcacagagtgacatgtgatcctgccatgaagcagtttctgctgtacttggatgagtccaatgccctggggaag

SEQ ID NO: 563778 - DNA, 100 bp, Homo sapiens
acgggcaagcgctgttcaaacccatgaagagtcttttagtcctgctatacagctgcaccttgtacatcaagctccatgtaatgttcctccttacctctca

SEQ ID NO: 563779 - DNA, 90 bp, Homo sapiens
gtgaatttggtcctcagcaaccacctactctacctacaacacagcagtcccctcaggatgagcaggaaaagctcttggatgaagccatac

SEQ ID NO: 563780 - DNA, 110 bp, Homo sapiens
caaggggcaactgggccatgagagggaaggaaacaagccagtgagaagaagctcattacagatgcccttaataaaaatcagtttctgaaaagactggatcctcagcagat

SEQ ID NO: 563781 - DNA, 100 bp, Homo sapiens
gttaaatgccctcaagtcgacaggggatgggaccctaggtgcactttacaggtccccgatgaaccaagagaaccctccaccatatccaggccctggtcca

SEQ ID NO: 563782 - DNA, 100 bp, Homo sapiens
ctgccctcaaactcctggactgaaacgatcctctcatctcagcctccaaaagtgctggcattacagttacatccttaatgttcagtcaagcagtgatgac

SEQ ID NO: 563783 - DNA, 100 bp, Homo sapiens
aggaacacacctgtgttcagggatgacgtttgctttttcatcagccagtcaggacctaaactgccccttcctcgagggtctgtatatcacagagccaaag

SEQ ID NO: 563784 - DNA, 100 bp, Homo sapiens
gttacactgacctctacacctacccaggccataggaaaaggatacagagtagagtttcatgaacctgaaacttggtggaaatttgatcctgaagaattag

SEQ ID NO: 563785 - DNA, 71 bp, Homo sapiens
gggctgtcggcctggaccttgcagccgcaatgggttcaggataagtttgaggtgctgaattacacaagcat

SEQ ID NO: 563786 - DNA, 75 bp, Homo sapiens
cgaggaggcagccaagctcgtagcctgccactccgtgcacaaagccacagacccaagcatgtcggaacaggattg

SEQ ID NO: 563787 - DNA, 100 bp, Homo sapiens
ggtatgttgccgctgcgttgagtattctgacaagtccctgtacacccagctgtgcttttaccggtacatttttgatgcggagtgtgcactggagaaactt

SEQ ID NO: 563788 - DNA, 74 bp, Homo sapiens
ccttgctttattactcaattatcttcacgatttcctaaagctggagtgcagtggcacagtcttggctcactgca

SEQ ID NO: 563789 - DNA, 100 bp, Homo sapiens
agaaagaatgcaaagtccccagaatcttcatggccagcaagatggaaatccacactgatttgtacgtctgactgagagaaagatggtcgtctccagcaga

SEQ ID NO: 563790 - DNA, 50 bp, Homo sapiens
caggcgactgcctcatcttcaagtttggaaattttagcattcaggtgcca

SEQ ID NO: 563791 - DNA, 75 bp, Homo sapiens
tccaccttgcacctggtactccgtctcagaggtggaatacatgttggtatcttttgatcatgaaaataaaaaagt

SEQ ID NO: 563792 - DNA, 98 bp, Homo sapiens
atgaatgggacactgaaccccttcaagtctttgtggtgcctcattcccataacgacccaggcagtggatataacttcttgtggaaactttgctgtaat

SEQ ID NO: 563793 - DNA, 100 bp, Homo sapiens
cgggttgggctgtgacgctgctgctggggtcaggacatggatttgattgacatactttggaggcaagatatagatcttggagtaagtcgagaagtatttg

SEQ ID NO: 563794 - DNA, 98 bp, Homo sapiens
caatatgccttcatccactggaagttactggaattggagctctgccgaagattatacaaattgcattttcaattgctgcttctgttccaggcctactg

SEQ ID NO: 563795 - DNA, 100 bp, Homo sapiens
ccctcctctatcagctcagcgggggaccccctcgcttcctgctcgacctgcggcagtacttggggccaattcctgtccccccagcagcatggcatcgtgt

SEQ ID NO: 563796 - DNA, 74 bp, Homo sapiens
acccacaaaactagcatcctcctggaggagctcgggagtctactcttcatcttgtgttgagacttcgtggtggt

SEQ ID NO: 563797 - DNA, 96 bp, Homo sapiens
atgaagaatccccccgaaaggaccccccagcaaacatgtctgacaaagagctaaagaagctacgtaataaacaaagaagagctcaaaagaaagccc

SEQ ID NO: 563798 - DNA, 75 bp, Homo sapiens
cctggatttacctgttttctgggagcttcgaaggtacagcggaccttcctggcatcagaaaaaggcctccagaaa

SEQ ID NO: 563799 - DNA, 96 bp, Homo sapiens
tatcagttgcaacaggactgtgacctgagctgtcagatcaccattcccaaaggtgctggagaatctggtaaaagcaccattgtgaagcagatgagg

SEQ ID NO: 563800 - DNA, 75 bp, Homo sapiens
caggatggaggagggggatcccagcaaaggcttctcacggcattcagcagcagcgttgctgtaaccgacaaagac

SEQ ID NO: 563801 - DNA, 90 bp, Homo sapiens
cactagttggaccccatcctcgtgctggaggaacaggtgaatggaggcattgagaacacattagagaaggaggtgatgcagtatgactac

SEQ ID NO: 563802 - DNA, 100 bp, Homo sapiens
tcgtgcctccctgaaccactccactgcctttaaccctcagcctcagagtcagatgcaggacaggcaaatgtacactggggaccaccatgttcacgtgaca

SEQ ID NO: 563803 - DNA, 75 bp, Homo sapiens
tttattgttccatcagttgtcaaagtgacaaagcataaatcatggacaccagagaataaggtggacctcaggaat

SEQ ID NO: 563804 - DNA, 75 bp, Homo sapiens
ggactgcgagacggcccggctgcagcgagcgctggacggagaggaaagcgcaactgagccagttttggtatagtc

SEQ ID NO: 563805 - DNA, 91 bp, Homo sapiens
caatatctgtcttcggtggactccttcggcagtccacccaccgccgccgcctcccagctgcggttggatttctcacgatgtccagtgttat

SEQ ID NO: 563806 - DNA, 100 bp, Homo sapiens
cagcgcttcctgtattccttgtatcgacatacacactgggtacgctgtgccaagacatcggcagaaactagatgatcagaccaagcccgggagcttgtcc

SEQ ID NO: 563807 - DNA, 100 bp, Homo sapiens
gtgaaggttggcctgacaaattatgctgcagcatattgtactggcctgctgctggcccgcaggttcttctcaccactaaatccaatacgagttcatattg

SEQ ID NO: 563808 - DNA, 100 bp, Homo sapiens
gaagtttcatctctataaccttgttcctggtataccaacaatggaacactttcatcagttttactggccatgtttatgagtggactaagtgaaagcaaac

SEQ ID NO: 563809 - DNA, 98 bp, Homo sapiens
gtcgaggtcagtcatcgttacccgcagcggcgccattttgcccaaaccggtgaaaatttggagcaagaggtggtggtggccttcccccgaagaaattt

SEQ ID NO: 563810 - DNA, 74 bp, Homo sapiens
atacctttgatccagaacttgcagcaacaatagcctccacaaatgggaagtgttcctgtaatgacgcaaccaac

SEQ ID NO: 563811 - DNA, 75 bp, Homo sapiens
cgcggctcttttctaaaagtgtttacccaaggtccagcctagcccctaggcaccatgtcggacagtgatctaggt

SEQ ID NO: 563812 - DNA, 82 bp, Homo sapiens
aatctcttgacaaagatggcactggacaaatccaggtgaacatccaggaggttttgggatttgagattgacgcggtgaactc

SEQ ID NO: 563813 - DNA, 74 bp, Homo sapiens
ccaggtgggagcctggagggcaaagcgtggtgcgagcaggattgctgtggaaactgcagcgacagcgaggaaga

SEQ ID NO: 563814 - DNA, 100 bp, Homo sapiens
cgcggagcgccagctcaatgaacgatctagggcagccctgcagaggtacctgttctactgtaatcgctatatgaaccacatgcagagcctgcgctttgag

SEQ ID NO: 563815 - DNA, 96 bp, Homo sapiens
gaactatagcaatctggttttcttgggcataatggttatgaaagcttctgtagatgatgacgattcaggatgggagctcagtatgccagaaaaaat

SEQ ID NO: 563816 - DNA, 96 bp, Homo sapiens
tagcacaccatccccagccaggcgaactttctgaccaagtatacaactacccagagggcctaggagaagtgctgtatagagagcagttcgacttca

SEQ ID NO: 563817 - DNA, 75 bp, Homo sapiens
ttaaggatgctttcaaatcaaatgactcacagcagcacaacattctgaaattttttggttattgtaatgatgttg

SEQ ID NO: 563818 - DNA, 98 bp, Homo sapiens
tttatgtcagccaactggggaaagtggaattgaaatcccataaaggtgaccaagaatatggcccaggtgaccaaagccctggacaaggccctgagcac

SEQ ID NO: 563819 - DNA, 98 bp, Homo sapiens
acggtcaagttcctgctgcttttctacctgaagaagatagcagtcctttcccctcatcaattccacatgccttccagatcaactttaatagtttgtac

SEQ ID NO: 563820 - DNA, 97 bp, Homo sapiens
catagaccgcaaggagctagagcctttggaacgtctggtcctaaccagtgagcactggttagtactggtccccttctgggcaacatggccctaccag

SEQ ID NO: 563821 - DNA, 100 bp, Homo sapiens
gtggaaatcccagtatgttccatatgatggaatcccatttgttaatgcagataacaacgaacttgatgcaagtgataggtttgccaaggtcagacctctc

SEQ ID NO: 563822 - DNA, 75 bp, Homo sapiens
tgcagcttatgaccatcaatatgtttgcagtacacaactcccagctgaaagctcggtcaaggagtgtgatgactg

SEQ ID NO: 563823 - DNA, 74 bp, Homo sapiens
ctcatcaactggggatgattacagttcttcctaaaaaagggatatcccagagaaggaaggaaataccctttgcc

SEQ ID NO: 563824 - DNA, 100 bp, Homo sapiens
acgctggctgcagggacccggtgacagcgtgagagaaaggtgtgtaagggagcagaaaagcctgttccccctcgtctcctgacagaagaagaatatcgga

SEQ ID NO: 563825 - DNA, 100 bp, Homo sapiens
gaaatattgaacacaaaacttgcagaagcatcagatggtgaaggagaaggagacacagaagtgatgcagcaggagacagttccagttcctgtaccttcag

SEQ ID NO: 563826 - DNA, 75 bp, Homo sapiens
cagacgcatcactggccgagcccactggggctcacaccacgcagcgctgctttacatttatggaccgagggtatg

SEQ ID NO: 563827 - DNA, 83 bp, Homo sapiens
cggtgctgcagacggcgagacctcctgcacagaaactagatgatggccatttaaacaactctttgagctctccagttcaagcg

SEQ ID NO: 563828 - DNA, 75 bp, Homo sapiens
ctgaagagcgacaagccgctggcagccgcggatctcaccgccgctcagggttttgacctgtagcagagaaccaat

SEQ ID NO: 563829 - DNA, 50 bp, Homo sapiens
cgagctttgcgggaaagcagcgggaagtgccagacacagcttcagaatgt

SEQ ID NO: 563830 - DNA, 100 bp, Homo sapiens
agaagccagagaagtgacagttaccaccgaggcagaagttataatcggcggtccaggaggccgatgctgcagtgaactgtgattgttccactacagtcca

SEQ ID NO: 563831 - DNA, 95 bp, Homo sapiens
tgggaaacccaaattataatcaagagatttcttggatattattgctggattcctatataccattttaatcttagctgtcttctatccatttgtgg

SEQ ID NO: 563832 - DNA, 90 bp, Homo sapiens
cacgagatgccccctcacatctatgccatcacagacaccgcctacaggagtatgatgcaaggtaaacgccctgcagaagatatggaagag

SEQ ID NO: 563833 - DNA, 100 bp, Homo sapiens
ttttctcaggtgaaaggagcagtagatgatgatgtagcagaaggtgaaccactgtctaccagagaagattgtggtgtaccgtgatggagtgtctgatggc

SEQ ID NO: 563834 - DNA, 87 bp, Homo sapiens
gaagcacaccctgtcctatgtggacgttggcactgggaagtgttctacgcagaaatagaagagctgaaactggtgtatccttatcac

SEQ ID NO: 563835 - DNA, 83 bp, Homo sapiens
agcccagctcattgggaaatttgaggcgaaagggaagatcagttttcctgccatccaggctgctccctccttcagcaactcat

SEQ ID NO: 563836 - DNA, 75 bp, Homo sapiens
ttctccgtcagtcaattgtgggagcagaagttgagtacagttgtgaatttggctccgcgaagtattatgcactgt

SEQ ID NO: 563837 - DNA, 100 bp, Homo sapiens
aatttattcaagtcaattaccatcctttaccagggctaggcagctggaagagaaagaccgagtgctaaagaagcaggatgcattctacaaagaacagctg

SEQ ID NO: 563838 - DNA, 74 bp, Homo sapiens
gacattgccgtcgacggcgagcccttgggccgcgtctcctttgagctggctggaggcgtgatcctgggtgtggc

SEQ ID NO: 563839 - DNA, 87 bp, Homo sapiens
ttgataaaaagagatgtggggggattctcgacctgctaacagaactggaccttttcgatccttcttagaaattcctaaggctcaatg

SEQ ID NO: 563840 - DNA, 83 bp, Homo sapiens
tctggcctggaggctatccagcaaaaatggctacaaacttcctagcacatgagaagatctggttcgacaagttcaaatatgac

SEQ ID NO: 563841 - DNA, 98 bp, Homo sapiens
cagcatcaattgcatgtaattcttaaggagctccgaaaagcaagaaatcaaataacacagttggaatccttgagactttagaagacagctttccatcg

SEQ ID NO: 563842 - DNA, 100 bp, Homo sapiens
ttcacctgaatgacatctacctccatcaggaccccagatgtctgacagccctgtgtgacaccaagataagtaacgcaccagagagcgtccttgccgagca

SEQ ID NO: 563843 - DNA, 100 bp, Homo sapiens
gacatttacgcggatgtcggcgaagagttcaaccaggaccgtatccttgatgagcttgacaaagacgatagtacccatgagtctctgtctcaagaatcag

SEQ ID NO: 563844 - DNA, 75 bp, Homo sapiens
ctagaattggctttgcagaaaaggttgctgcaaaagtggctgcacttacagagagtaaaacttgtctcggcacag

SEQ ID NO: 563845 - DNA, 75 bp, Homo sapiens
ctgatggtgatggagattttgatgtggatgatgccaaagttttattagggatgagtgccacctctcgtaaacgga

SEQ ID NO: 563846 - DNA, 98 bp, Homo sapiens
aagtcggcggatgtggagaattggttgaatctggcgatgtggaacccatggatatggagggctgactatatacaccatgttttttcctggcacatcac

SEQ ID NO: 563847 - DNA, 80 bp, Homo sapiens
aatatctgtcttcggtggactccttcggcagtccacccaccgccgccgcctcccaggcatccgtgggctctgagaagctc

SEQ ID NO: 563848 - DNA, 100 bp, Homo sapiens
aagaagaggacctgtgcagggcagagcaggaggccccccgaggtatccgttacagcactgatgtgagtgtagatgaagtaaaagctttggcttctctgat

SEQ ID NO: 563849 - DNA, 75 bp, Homo sapiens
cccatctaccgcaactctcagttcgagagtaaaggtggtgatgatgtccagcaactctgtgaagcaggagaagag

SEQ ID NO: 563850 - DNA, 75 bp, Homo sapiens
gttaaagtaacagatgatttagttgtgagctgtcagggagaaatgtcgaaacaggtcaagagatgttctgctcag

SEQ ID NO: 563851 - DNA, 98 bp, Homo sapiens
cccaggctcatgtgactaatttctgattcagacacagggagtccttcaataatgttaaacagtggctgcaggaaatagatcgttatgccagtgaaaat

SEQ ID NO: 563852 - DNA, 100 bp, Homo sapiens
aagagagcaaacattttacacggagagaagacgatctgcacttcgcattttggcattgacatttaattttagggtcctttatatagaagggagagtaggt

SEQ ID NO: 563853 - DNA, 100 bp, Homo sapiens
cacactctgtgtcgctacaacctgcccgagagcgccccggtttttcgttggaatatacgttgcacatttatggcgattctgagtgtgagggcagacttct

SEQ ID NO: 563854 - DNA, 101 bp, Homo sapiens
ccatgctgaagcggaggcggccgctgctcgagatttttgcagctcaagtggcagtcctcctttccagcccatcaaaagccacgtaaccattccaacagccc

SEQ ID NO: 563855 - DNA, 83 bp, Homo sapiens
agttcctcctggggaacccgttcagcacaccagtggggcagtgcctcgtgtttgtggagaaggtgctgcagagactttttcct

SEQ ID NO: 563856 - DNA, 100 bp, Homo sapiens
tttggctaaagaccagacgaagattcccatcaagcgctcggcattgctgctggaggtgtaatggacgttaatactgctttacaagaggttctgaagactg

SEQ ID NO: 563857 - DNA, 82 bp, Homo sapiens
ctacgcagagctcatcgtccttggaaaatatatgcagatgatgaacattcttaagccaattgcctttgatgttattcatttc

SEQ ID NO: 563858 - DNA, 75 bp, Homo sapiens
gacgcggggcaagattctgctgtgcacaggcaccaccttccatggtcaataatgaacaacgccagcatgcagagc

SEQ ID NO: 563859 - DNA, 100 bp, Homo sapiens
ggctgacagtcgggaggagaaaggctggaatgataaaaagtgataatgaagagtatttcattgaacccttggaaagaggtaaacagatggaggaagaaaa

SEQ ID NO: 563860 - DNA, 75 bp, Homo sapiens
cgtccgcttcccgacgctgagggcagccccgtccagggatggcatcaggcagggcacgctgcacccgaaaactcc

SEQ ID NO: 563861 - DNA, 90 bp, Homo sapiens
ggcgacgcggggccatgtgcaggaccctaacgacaggcgcctccggcccatttacggcaagttaggaaatcaacattgaatcccaatgca

SEQ ID NO: 563862 - DNA, 50 bp, Homo sapiens
aagttctcgtggagtcagacaatgagggccggtgcataaacttctcccga

SEQ ID NO: 563863 - DNA, 100 bp, Homo sapiens
tgtatcaaagactgtttgttcaacatatctacaatctcggtactacagatatttgtagagcaattgaattattggaaaaactacaaaggagtggagaagt

SEQ ID NO: 563864 - DNA, 74 bp, Homo sapiens
gttaagagactcatcagattctgagctgctgcgggatattttgcacaaggctttcggacagtcctttctccagc

SEQ ID NO: 563865 - DNA, 100 bp, Homo sapiens
cgcttcccaggcgccggcggctgcaggatgaagatgagctggattcccacaccatggtgaagactagtgtggagagtgtgggcaccatgcgggccacaag

SEQ ID NO: 563866 - DNA, 104 bp, Homo sapiens
tgcctggaaaggaattgttttggcctaggatcatccagggcctgccttaagtgtgaaagtaatgactgatgaaagtggaaaatccaaaggatttggatttgtaa

SEQ ID NO: 563867 - DNA, 83 bp, Homo sapiens
ggcaggaggaggaggaggggctccggctggtctgtggtgaggtgtctttccgatagccgttcctggtgagacatcctctttat

SEQ ID NO: 563868 - DNA, 97 bp, Homo sapiens
tggaacatcccggggctgcgggggtaggcggtgtgaagcgaattatgtaaagagcactaagtcaggagattggaaaagcaaatgcttttacacaaca

SEQ ID NO: 563869 - DNA, 100 bp, Homo sapiens
cacctactgcaacctcacctcctggggggagctgatgaagtccaagtactcagacatcaccatcatgtttgagttctctattcagaaacttgaacctttc

SEQ ID NO: 563870 - DNA, 90 bp, Homo sapiens
ctggtgatgaacttagcagcagctccactgaacagataaggcagagaccacgcagaggctgcctttggatcaagtccaggaagtgcttcc

SEQ ID NO: 563871 - DNA, 100 bp, Homo sapiens
tcccgtaaagaggatgacttcaaacaaaagcaaccaagcaagaaaaagaggatcatctatgattcaggtgcccctgggcgctgggattgctctagcctgt

SEQ ID NO: 563872 - DNA, 90 bp, Homo sapiens
gcaaagagtttcaagatgcaggtgaacaggtttatctggcaagactgaggcaaataagactacagaatttcaatgagcgccaacagatta

SEQ ID NO: 563873 - DNA, 49 bp, Homo sapiens
gcattaccgggttcgctaggctcacaggattattgaacatggggaagga

SEQ ID NO: 563874 - DNA, 95 bp, Homo sapiens
ggcaaatcaacagtgctttcactcctgctgaggttgtacgaccctgcttctggggaacaccaacacgaatgttcccacaccactccataactgag

SEQ ID NO: 563875 - DNA, 83 bp, Homo sapiens
accccttcatgcagcagcttcctgtggctatctcaacatagcagagcagctatcaatggtgtaataccacaggaaaatggcat

SEQ ID NO: 563876 - DNA, 75 bp, Homo sapiens
aattacaatctcttcattgaatggatggcaggaagaagagggatccagcagtgagatcaggcaggttctgtgttg

SEQ ID NO: 563877 - DNA, 82 bp, Homo sapiens
gacaacatcaccgtgaggcagggggacacagccatcctcagactttttaaaactgtggacttaaatgttctgcaaagtctta

SEQ ID NO: 563878 - DNA, 88 bp, Homo sapiens
caaaaccagtcatgaccactagacccacagctgttaaagcaacaggctacagcaactggacgaggagaacagtgaactccggtcctgc

SEQ ID NO: 563879 - DNA, 75 bp, Homo sapiens
agggttgtatcgaggctataaaagcacagttttaagagagggctattgagtggccagacttccccaacaaatgcc

SEQ ID NO: 563880 - DNA, 123 bp, Homo sapiens
acccatctggactaccaaggagaagctatagactacttctactccaccaggaagctggcagagaggctgatgacatcgtgaactggctgaagaagcgcacgggcccggctgccaccaccctgc

SEQ ID NO: 563881 - DNA, 75 bp, Homo sapiens
tgcagctgcgattttcgccctacgttttcaacggagggagcatggggaagtgattgactgtgtgcaggagctgag

SEQ ID NO: 563882 - DNA, 82 bp, Homo sapiens
tcccattgggggttgatacagcagagacgtcatacttggaaatggctgcaggttcagaatcctgtggtattgtggaaattcc

SEQ ID NO: 563883 - DNA, 122 bp, Homo sapiens
tgctagaattacctggaacttcatcatcatctacttcacaggaattgccatttgtttttcgttggaatatacgttgcacatttatggcgattctgagtgtgagggcagacttctgccaggct

SEQ ID NO: 563884 - DNA, 100 bp, Homo sapiens
acttatcatctattccaccgtgttctgggcataatcaccagcaacacccgggacaataatacgggggccacctacccccacctgaacttcagcattccca

SEQ ID NO: 563885 - DNA, 82 bp, Homo sapiens
ctcaactctgcctggacaggctgcagctggaggctattcataagatgatgggaagctgtccttggaggaattccagctcttc

SEQ ID NO: 563886 - DNA, 100 bp, Homo sapiens
gttttgccctcaattgtaattctggctctaagcgaaagacatgaggcctcagcctgaaatgaggttgttttgaggtcatctgatttctgactagaaggtg

SEQ ID NO: 563887 - DNA, 101 bp, Homo sapiens
tcctgaagaattatggagagaacccagaagcctacaatgaagaactgaagaagctggagttgctcagacaggaccctgatgcttggtgtgacctgagtaaa

SEQ ID NO: 563888 - DNA, 50 bp, Homo sapiens
ggacggcgctgcggtacatccaggggctaaactgcacggtcaagaatagt

SEQ ID NO: 563889 - DNA, 50 bp, Homo sapiens
aagtagaaacaggaatgtccactcaggcagcgtctatcccagactaccgg

SEQ ID NO: 563890 - DNA, 76 bp, Homo sapiens
gttccagaactgctggaagctgaggtacagctggataacttgccaggaatgagtctcgtggctgggaaagcactta

SEQ ID NO: 563891 - DNA, 75 bp, Homo sapiens
tcatgctgcgcggccttcccatcaccatcacagagagcgatgtggttatcactaggctaaaactggacaaagacc

SEQ ID NO: 563892 - DNA, 100 bp, Homo sapiens
atggcacaggcgactgcttaattgctggggaccaccaaggaaatatttatgtttttgacttacatggaaacagtgccaacaatatgcccaagcaggtgga

SEQ ID NO: 563893 - DNA, 76 bp, Homo sapiens
agtgaaacacggaaactgagtatgggatctgatgatgctgcctacacacaagggttacacatcattttggaatgac

SEQ ID NO: 563894 - DNA, 82 bp, Homo sapiens
cacaaaacagatgagatgcacactgccttaatggaggcctgcatggttcgatacaagaggctgttttcctagcgtggcttgc

SEQ ID NO: 563895 - DNA, 75 bp, Homo sapiens
ttcggaagcggcagctggtggaggacaggaacctgctggtgtggaagatagatgataagcctgtaaaaattgaca

SEQ ID NO: 563896 - DNA, 74 bp, Homo sapiens
agcccccagaaccaggcccccaactcagccatctgcggaggtcaaggtcagaccgggaagctgatgtatgtgat

SEQ ID NO: 563897 - DNA, 51 bp, Homo sapiens
ctgctattgtatatcacactaaaggtacagtagcagagggagctcccatta

SEQ ID NO: 563898 - DNA, 100 bp, Homo sapiens
agaaaatccatgctggcgatgaagtgattcaagttaatcatcagactgtggtgaaccatctgaaaagaccagtcagtggagtgggggacgctccaggcac

SEQ ID NO: 563899 - DNA, 83 bp, Homo sapiens
tggatgtagcaaggaagaaattgttcagttcttctcaggtggcctgccatgggtatccatggtgacaagagtcaacaagagcg

SEQ ID NO: 563900 - DNA, 50 bp, Homo sapiens
cttccagagccttctcaaagccacaggacctttattgggcttgaggtcac

SEQ ID NO: 563901 - DNA, 100 bp, Homo sapiens
gttcaaattactgagcttcaaacaaaccactgccagaggtactcaagacaattgacgagggagatgccgatgaggtgacgaagcagaggattcatgatgg

SEQ ID NO: 563902 - DNA, 98 bp, Homo sapiens
tcctgaatttgaaccaccgtttccatcgtctcgtagtccgacgcctggggcgatggatccgtttacggagcaacagaagaaccttgaaggctatgtgg

SEQ ID NO: 563903 - DNA, 74 bp, Homo sapiens
aggcttcaggcgacccgtactgggcctactctggctgcagatcaaattacgaagctgtataatctcttcctgaa

SEQ ID NO: 563904 - DNA, 75 bp, Homo sapiens
tgctgcggcgcggggaccgctgtgctctcgcagccttggaagtggagtttactctccccttgaggaagctgaagg

SEQ ID NO: 563905 - DNA, 90 bp, Homo sapiens
cccgggacggcagcggcctggggacccagcaaggctgtccatctctgccgtggtgatgtcctatctgcagaatcctcagcccatgacgcc

SEQ ID NO: 563906 - DNA, 104 bp, Homo sapiens
ctcgctgggagagaggtacctctccttttccctctccctttccctaagacctgcctagagctggaacgttacctccagagcgagccctgctatgtttcagcctc

SEQ ID NO: 563907 - DNA, 50 bp, Homo sapiens
ccgggagatgcagccagtttacagctccttccgcttccagccgttcgagt

SEQ ID NO: 563908 - DNA, 88 bp, Homo sapiens
atgttggagcaaggaaaggaaccatgggcactgcagggtgagaggccacgtcagagctgcccagctggagctccgttactctcatggg

SEQ ID NO: 563909 - DNA, 97 bp, Homo sapiens
ccggcaccaaatggctgtgaagaccaatggcacaggctctggaatgggcactctccttatcagcaagatccgagaagaataccctgatcgcatcatg

SEQ ID NO: 563910 - DNA, 100 bp, Homo sapiens
gaaatagaaatgatgaagttaatgggatttgcctcctttgactccacaaaaactctgatgccagtatggactggagatgatgggagccagttggatagcc

SEQ ID NO: 563911 - DNA, 100 bp, Homo sapiens
tctgatgggaagggaactggaatatctagaggaggtacctccaggaaatgtgctagtcactcaagactgcttgcaactgattgcagacagtgaaacacca

SEQ ID NO: 563912 - DNA, 75 bp, Homo sapiens
ggctggcctggaattgacgatggctcacaggcagaaggaattttccttgtcttggatgagacttttgacttggac

SEQ ID NO: 563913 - DNA, 51 bp, Homo sapiens
aagactgcatctgttcatatgaggtggaatgaggtaccatctactgtctcc

SEQ ID NO: 563914 - DNA, 83 bp, Homo sapiens
caggtgcatttcacagcactctgggcgaaaattggatgtgaaaatgaagccagaccgagtcgtcattgaattttgagaagcat

SEQ ID NO: 563915 - DNA, 75 bp, Homo sapiens
gttcaagacaggtgtttaagcgtacaccaggggttggaaaaaccacactaggcaaagaacttgcgtcaaaatcag

SEQ ID NO: 563916 - DNA, 100 bp, Homo sapiens
gggccgtggctctagcaggctccactaactggggctacgactctgatgggcaggcatgccagaggaacagagagaagggctccaggaagaactgattgac

SEQ ID NO: 563917 - DNA, 82 bp, Homo sapiens
ggatcgctgtgatcgtcacttgcttccccgggcgctgcctggacaggcctgcctgcgtgctgggacatgtctggcctccaag

SEQ ID NO: 563918 - DNA, 101 bp, Homo sapiens
ctttcttctatttcttgtggatattatggctaataacacaacaagtttagggagtccatggccagaaaacttttggggaactttatattgctgttggaata

SEQ ID NO: 563919 - DNA, 100 bp, Homo sapiens
cttttgcttcattggatgcctgaagacatcaatgccaagtgagtacacctatgtgaaactgagaagtgattgctcgaggccttccctgcaatggtacacc

SEQ ID NO: 563920 - DNA, 99 bp, Homo sapiens
aatgctgatgatatggatagaattatgacgctaggccacaaaaatctgagattacgtactataggtgaacttttagctcctgcagctccttttgacaag

SEQ ID NO: 563921 - DNA, 50 bp, Homo sapiens
acattcagtgaagcttgcctgatgtttgatggtgacagtgcctacgtggg

SEQ ID NO: 563922 - DNA, 90 bp, Homo sapiens
aggctctgttcctctcccggcatttcctccctgaagcctccagaatgaaatacgtgactgatgttggtgtcctgcagcgccacgtttccc

SEQ ID NO: 563923 - DNA, 101 bp, Homo sapiens
gtgcacaactgtttaattggctctggaaacctcctacctccgttgaaaggagagccagttactaacttagctccagagattatattggggttgccattttg

SEQ ID NO: 563924 - DNA, 87 bp, Homo sapiens
ggccgtggcccctgcagcggaaccggacccagtccctgagccgcccctacacccacaggtcaccttccgcaaccctgtcattgagag

SEQ ID NO: 563925 - DNA, 100 bp, Homo sapiens
cgatggttctgcttaacaagcagagagctcacctaccacaaacagccagcggagattctggagctggctggcaatgcagcgagagacaacaagaagggac

SEQ ID NO: 563926 - DNA, 100 bp, Homo sapiens
ggaaacagtcagagccaccagccaatgatcttttcaatgctgcgaaagctgccaaaagtgacatgcaggcagcggaggaggagaaagagatggacctccc

SEQ ID NO: 563927 - DNA, 90 bp, Homo sapiens
tggcaggtcaccgagccgtcaagcaagaatctgtgggagcagatctgcaaggaaactcgcattgtctactggatcaaggacagacagctc

SEQ ID NO: 563928 - DNA, 50 bp, Homo sapiens
ggaaccgccacagcactcaaagagaaaaggaacagttccgtaagctcttt

SEQ ID NO: 563929 - DNA, 100 bp, Homo sapiens
aagctgcacttgaggcccagaatgcactgcacaatattaaaactttacctggggtaaagaggatgaatatccaaagaagcccttggggcagcttccacct

SEQ ID NO: 563930 - DNA, 100 bp, Homo sapiens
ggattacagctgggccaagggaaaaatttactgcagctgaggaatggaagttggatacactttgtgacttgtacgagacactgaccattacacaggctgt

SEQ ID NO: 563931 - DNA, 100 bp, Homo sapiens
cctgtattcacatgtggagcctgggaggctgacgagctcactcacagagcctgaggaaatgcttccagactgcacacttttacttagaggacagtacatc

SEQ ID NO: 563932 - DNA, 74 bp, Homo sapiens
gtttccgatttaaagctgagctgcgaggaaaatggcggcgggagataggaaccaaggctttagccttctcaact

SEQ ID NO: 563933 - DNA, 75 bp, Homo sapiens
tcaaaaactaaacctggcaaactcagaaactgatatgcctacaaagagggtactggttttctatccacgttctat

SEQ ID NO: 563934 - DNA, 100 bp, Homo sapiens
ggcagcggaagcggcgcggcggtcggagaagtggcctaaaacttcggcgttgggtgaaacgtcggtctcgccgcagccaggtgggcttccagcaagtcgg

SEQ ID NO: 563935 - DNA, 100 bp, Homo sapiens
agcttcctggagcagctgcgtaaaacatacaggccggagcttatcaaagccctgcatgaattccccaatgacatcttcacaaacgaggatagaagacaag

SEQ ID NO: 563936 - DNA, 101 bp, Homo sapiens
aggcaggggaggaagccacctcgagggttacgactcactgattaaaaagagggactttttcaaatactttgcacttttgattgtgtattatggataccaag

SEQ ID NO: 563937 - DNA, 101 bp, Homo sapiens
ggacaacattgagacagccaacagttttgctgtaacaaacgccttgatgcagaagaccacaagcctttgaaaaaaggaagtcgaactccttcagacaggac

SEQ ID NO: 563938 - DNA, 97 bp, Homo sapiens
acgctttcttgttgttgcggaataattccatccaaaaccggcagctgttagccgagcaacaagtaactggcagaagttttggtgataaagattttcg

SEQ ID NO: 563939 - DNA, 100 bp, Homo sapiens
ttttagtcgctggtgatcgcagaattccagctcacagggcttccgttacaagatgaggtctgtgtatgctcacttccccatcaacgttgttatccaggag

SEQ ID NO: 563940 - DNA, 98 bp, Homo sapiens
atgatcccaatttccagatgccttgttcaacagggcaccatgccggtggaaaggatgcgcatgcgcccgtggctggaggagcagataaactccaacac

SEQ ID NO: 563941 - DNA, 100 bp, Homo sapiens
gcatccgaggcccccgggtgcgtacggctgcgcatgagtgggctgtaatcgggtgtctgggggcgctttgctctgtccaccaagattcctgacaccaaag

SEQ ID NO: 563942 - DNA, 95 bp, Homo sapiens
gactctgccttcaggccttcccaaacccaggatttgaagcctagcaacattgttgtgaaatcagactgcaccctgaagatccttgactttggcct

SEQ ID NO: 563943 - DNA, 75 bp, Homo sapiens
gctttgcctttctggacacagaagtatttgtgacagcacacagagccgctgaaaacgactgaagagagcaaggga

SEQ ID NO: 563944 - DNA, 83 bp, Homo sapiens
gtcttcggtggactccttcggcagtccacccaccgccgccgcctcccaggctgtggaaaatctctgttctcacaaagtctccc

SEQ ID NO: 563945 - DNA, 75 bp, Homo sapiens
gatacaaccatcaatgagatcgaagacactttccggtgacctggaactcccctcggtactgacatgatgacagtg

SEQ ID NO: 563946 - DNA, 100 bp, Homo sapiens
cgatggacatcaacaaccctcgggactttattgattgcttcctgatcaaaatggagaagatgacctgagaattaatttatggcacttagaaatcacagat

SEQ ID NO: 563947 - DNA, 96 bp, Homo sapiens
cacttgtccgcttcacactccgccgccatcatggtgaagctcgcgaagccttatgccagcctggaccatcttggaggcagtgtaggatcatggaag

SEQ ID NO: 563948 - DNA, 100 bp, Homo sapiens
atagctcccctcctctgttgtagctgttcctctggcaatacaaactttctgctttcagtcgtcaaagtcctacattttagctttcagtgctgaacttcct

SEQ ID NO: 563949 - DNA, 100 bp, Homo sapiens
ccgatcatggcggatggcccccggtgcaagaggcgcaaacaagccaatcccaggaggaaaaacggataaaagaatcagagtgtctcaacccttgacaaga

SEQ ID NO: 563950 - DNA, 110 bp, Homo sapiens
gagaacattcaacgaccaaccagcctccccctgaagattctgccgctgattgctatcacttctgcagaatccagtgggatttacttaaatccattgtttcaagaatgaaa

SEQ ID NO: 563951 - DNA, 97 bp, Homo sapiens
ggaagagtacgctactcctgctgctgactggcaagctgacaccggtaccacgaaaggcagtggtagaaaagccagctcgggcagcagagcgagaggc

SEQ ID NO: 563952 - DNA, 72 bp, Homo sapiens
agccccagccccctgtggctgaggctacaccccggagccaggaggcgccgtgccgtccctgcagtgacaccg

SEQ ID NO: 563953 - DNA, 100 bp, Homo sapiens
atgatgaggactttgctgggggaatggacacaggtctgaaggggcgtctcgattacctgagctctctgaaggtgaagggccttgtgctgggtccaattca

SEQ ID NO: 563954 - DNA, 95 bp, Homo sapiens
gacatgaatgtgaggagggtggaaagcatttcggctcagctggaggaggccagctctacaggcggctgctctttggcgtaaattgcaatcgatta

SEQ ID NO: 563955 - DNA, 98 bp, Homo sapiens
gtaagaagcaacaacctctcctcttcgtctccgccatcagctcggcagtcgcgaagcagcaaccatggccaccgagatcatcctggagattaagaagg

SEQ ID NO: 563956 - DNA, 75 bp, Homo sapiens
aacagacagccctatgctgtcagtgaattagcagaaactccccaacttttaaatcatttgaagaaaaggtcgaaa

SEQ ID NO: 563957 - DNA, 75 bp, Homo sapiens
gaccaccttcgtcaatgtcatcgcgagataaaagcaacagtgtttgatgactgcaagaaagaaggcgaatggaag

SEQ ID NO: 563958 - DNA, 75 bp, Homo sapiens
ggtggtggaaaagcagaaccttagcaaagaggagctgatagcggagctgcagattgatgctttgacagaagtggt

SEQ ID NO: 563959 - DNA, 82 bp, Homo sapiens
tggggccagggaaccctggtcaccgtctcctcaggcataatcaccagcaacacccgggacaataatacgggggccacctacc

SEQ ID NO: 563960 - DNA, 100 bp, Homo sapiens
cggagcggccggggcctggggctgcctgccgggcggccgggcgcggcgagcccaggctgctgagaactagccctagacctctgcgtgagggttcttctgc

SEQ ID NO: 563961 - DNA, 98 bp, Homo sapiens
gaagatcccccggaccaggggcgagggctacccgctctttgccgtgacaacaccgttcccccagccgggctgatggggacccagagcctgctcttggg

SEQ ID NO: 563962 - DNA, 88 bp, Homo sapiens
tcttcatcaatttcatagccatttattaccatgcttcaagagccattccttttggaacaatggagcttcagtttcagcgactcacccg

SEQ ID NO: 563963 - DNA, 98 bp, Homo sapiens
gggtaggcaagacctgcctcctgttccgcttctcagaggacgccttcaacaccaccttcatctccaccatcggcacgtgtggttctcaaatataggca

SEQ ID NO: 563964 - DNA, 82 bp, Homo sapiens
aataacaaggggagtgctgcttggatggcacctgaagtttttgaaggaagtatatattcaagcccaggactgtatagtaaaa

SEQ ID NO: 563965 - DNA, 48 bp, Homo sapiens
ctggaggtggatctgaagaacggaaactggcgatggaatatgagagga

SEQ ID NO: 563966 - DNA, 101 bp, Homo sapiens
cgctggcagcctgaagagagtcgctggccgtggtcgccgctaggggagaccctgcagcgtcatggtgctggagctggtggcacccgcaacatctcaggcac

SEQ ID NO: 563967 - DNA, 75 bp, Homo sapiens
ggggagagtttcgagaagcagccgcgctgcgccttccacactgtgcgctgtctcctctgagcctccggcctccat

SEQ ID NO: 563968 - DNA, 75 bp, Homo sapiens
tgcggtaggaacatggcggatcggctcacgcagcttcaggacgctgtgaattcgtctgaagatgatgagaaactg

SEQ ID NO: 563969 - DNA, 100 bp, Homo sapiens
acagtttgctctgctcttccaacaccagtggaagatgatcacatcccagattttaggtgatgggcaagtcagaaagtcagatggatataactgatatcaa

SEQ ID NO: 563970 - DNA, 75 bp, Homo sapiens
gtgagatctacgatgaactttaagattggaggtgtgacagaacgcatgccaccgtgctggtatagaggactctaa

SEQ ID NO: 563971 - DNA, 75 bp, Homo sapiens
tcaagatggaggagtacgcgcgagagccttggtgaccattgtgaggtagatattttgttctaattttccagatga

SEQ ID NO: 563972 - DNA, 75 bp, Homo sapiens
atgagagtcccatcttcagcagaggagcgagaacccgagcagcgccatgagcaacactaccgtcgtccccagcac

SEQ ID NO: 563973 - DNA, 83 bp, Homo sapiens
gcctgtcatcctcacctaccatgacatcggcatgaaccaggagaatttgcgctttggcttgatggagatctctaccatggaag

SEQ ID NO: 563974 - DNA, 100 bp, Homo sapiens
caaaggtagaacatggaggatcgtcaggctctaaacaaaattctgacttcatctgcagagagaaagagacgattacctgtgtggtttgccaaaggaagtg

SEQ ID NO: 563975 - DNA, 100 bp, Homo sapiens
aattaacggcaaaaaatggtggagcagtgggtgggttaggagtacagaagatgctgtggactattcagacatcaatgaggtggcagaagatgaaagccga

SEQ ID NO: 563976 - DNA, 96 bp, Homo sapiens
acaaccaacggctcaagaatttcaagaacaaaggccgcgacttggagtgttgaaaatgagcccatgagcacaagtcagaaaaaggaaaatgtactt

SEQ ID NO: 563977 - DNA, 82 bp, Homo sapiens
ggaaggcagctattctcaggatatgacaggggtaacacccttccagatgatttttgaggcatataaaacctttgctaaccga

SEQ ID NO: 563978 - DNA, 75 bp, Homo sapiens
gggctacgctcctccatcacgtgactggtcgaattgacaaatcttaccctacagtatgtggccacacaggaccag

SEQ ID NO: 563979 - DNA, 104 bp, Homo sapiens
gcgtgttcgcgggtgtgtgctgcgttcacaggtgtttctgcggcagacaatgcagatcttcgtgaagactctgactggtaagaccatcaccctcgaggttgagc

SEQ ID NO: 563980 - DNA, 74 bp, Homo sapiens
aggagggaaagagctcccgcggttgccccattgcaaagtggaaatgaagctgttgtcatttctggaaggaaact

SEQ ID NO: 563981 - DNA, 101 bp, Homo sapiens
cgaccccacccgacaggccagagatttcagggctgaagatgcccagaggcatcgccatcgactgggtggccggaaacgtgtactggaccgactcgggccga

SEQ ID NO: 563982 - DNA, 126 bp, Homo sapiens
cgccgcgttgaccgcgctcctcgccgccgccgctgctggcggagatgccccgccgggcaaaatcggtgctggagaatctggtaaaagcaccattgtgaagcagatgaggatcctgcatgttaatgg

SEQ ID NO: 563983 - DNA, 98 bp, Homo sapiens
ttgactggcctgcttggcaaggcaagtagcggcggcgcttcaagtgcttagcgaatgccacagacggcgtgcggctagcagcccgcatcgtggacaca

SEQ ID NO: 563984 - DNA, 80 bp, Homo sapiens
gagaacgtgcgggaagagaagatcatcgagcatttcaaacggatattgactgggtacagacagagaagcacgtgtttgag

SEQ ID NO: 563985 - DNA, 75 bp, Homo sapiens
tgttgatatagccagagcccgaaaagaagattactctgcaacagctaaagtccctgtgttcccaagagaattaca

SEQ ID NO: 563986 - DNA, 80 bp, Homo sapiens
gacctccggatgacccgggcttcggcccccaccagagactcggttaccataccacggtcttcggtgtgttcagtgactgt

SEQ ID NO: 563987 - DNA, 98 bp, Homo sapiens
cctacagagccatggatgttggcaagtctttacaatggcagtgtgtgtgtttggaatcatgaaacacagttggttaccacagagaagcgcttcctcaa

SEQ ID NO: 563988 - DNA, 89 bp, Homo sapiens
attctttgtcaggcaaccggacgattcagtggaaagggaatagcatttcaaggttcagtggaggagaaccccaagagcaccaaaatgga

SEQ ID NO: 563989 - DNA, 51 bp, Homo sapiens
gaagctcaagcagagcttacagtgcaagtaaaaggcaatcgcaaatgtgag

SEQ ID NO: 563990 - DNA, 75 bp, Homo sapiens
catcttgggggaccagcagttggaccaagaggaaatctggacgttggaacttgccaggaatccagcaatgatgca

SEQ ID NO: 563991 - DNA, 50 bp, Homo sapiens
cacgggctcggccgccgcccctgccggtggaatacatgttggtatctttt

SEQ ID NO: 563992 - DNA, 83 bp, Homo sapiens
ctttcatgcagtgacatgttgataaaaaatgatgtgggtaattccagaattgattggccataccattgtcactgtattactgc

SEQ ID NO: 563993 - DNA, 100 bp, Homo sapiens
gaggggaatagactccatctatccatatgaggcgcatattaaatttcctattgactacccctattcaccacctaccttcagattcttgaccaaaatgtgg

SEQ ID NO: 563994 - DNA, 98 bp, Homo sapiens
tcagcctcccgagtggctgggactacaggctttaatgactgatgaaacaatatccaatgtgccaatccttatcttgggtaacaaaattgacagaacag

SEQ ID NO: 563995 - DNA, 121 bp, Homo sapiens
gtgctcgccctggtcttcgggctgtcgctcgtctacttcctcagcagcaccttcaagcaggtgatggagccaatgatgtcagcatgatccaggtggcagatgtgggtgtgggaatctccgg

SEQ ID NO: 563996 - DNA, 100 bp, Homo sapiens
tcttgccagagggacaggagccatggctcagaaaatggactgtggtgcgggcctcctcggcttccagttgcacctggacttgatatgaaagtaaccatca

SEQ ID NO: 563997 - DNA, 98 bp, Homo sapiens
attttagaagaggaagaagaagaagaacagaaaattggaaaagttgttcatcaaccagaggaggtgtctgcaaggatagttcaagtagtcactgctga

SEQ ID NO: 563998 - DNA, 75 bp, Homo sapiens
ctgaagtcggtgtttggagaaaaggactcagattcaagatggaaaaggtgatgtaaccattacaaatgatggtgc

SEQ ID NO: 563999 - DNA, 76 bp, Homo sapiens
gtcatcccacctgagaaccatgctcaccgaccctctgctcagatggaagataaaaagccctttatcctgtcttcca

SEQ ID NO: 564000 - DNA, 83 bp, Homo sapiens
ccaagatctatgtgagcccaaaggacttgattggagttgtgccgctggctatggaaataccacacacatttattacagtttga

SEQ ID NO: 564001 - DNA, 82 bp, Homo sapiens
ctctcattgacatcactgtgcggcacatcgcagacctgtcaccaggagacaagtgtggacgaatgtggaacctcgctctgtg

SEQ ID NO: 564002 - DNA, 100 bp, Homo sapiens
gcgtgtggaaaatggaatctatattcagaaaagttgaaacagactggcacatgctataataataggcggagtcgatctggaacatacagctcgagatcaa

SEQ ID NO: 564003 - DNA, 100 bp, Homo sapiens
ggagtcctgttccaccttcagagcgtcacggcgtacgccctcatggggaaaatctccccggtgactttcagacggagtctcgctctgtcccccaggctgg

SEQ ID NO: 564004 - DNA, 74 bp, Homo sapiens
ctcgggacttcggcctgacccagcccccatggcttcagaagaggcaaaagtcaacaactctagcttaattggag

SEQ ID NO: 564005 - DNA, 75 bp, Homo sapiens
atgattgacaatcccagttaccaggagttggtggtgaccccgcccagttggcccagaggatctcttctaacatcc

SEQ ID NO: 564006 - DNA, 96 bp, Homo sapiens
attggcttctccttgcctgattgtttgcaggttgtcagagaagtacaggctgaagacaatgagaacttcaagacaatagtggagtttgagtgccgg

SEQ ID NO: 564007 - DNA, 100 bp, Homo sapiens
caaccacagaaacaagtggtacagctggcaatcctttggtccagcaaggtggacagccactcatcctgacccagaatccagccccaggtctgggcacaat

SEQ ID NO: 564008 - DNA, 82 bp, Homo sapiens
aagaagcgccgcgcacggacttcggcagaggcctccggtgtggctgtctctgatggtgtcatcaaggtgttcaacgacatga

SEQ ID NO: 564009 - DNA, 82 bp, Homo sapiens
gagaatgagaagaactttagatgatgatgtatttatgcccttatatcccaaaaatttttggtgttgagccagacttgaccag

SEQ ID NO: 564010 - DNA, 110 bp, Homo sapiens
gcctgctacccagagaagaccacccgaagaatgtacaacctcttctggaggcacttccgccactcagagaagtttgtgaagcctggagctgagaattcaagagactaccc

SEQ ID NO: 564011 - DNA, 83 bp, Homo sapiens
tcagaaactggagagcttggaggacgatgatgttctgcattaccttctacaattggtccaggactctgcagacagtgggccca

SEQ ID NO: 564012 - DNA, 83 bp, Homo sapiens
agctcaagcaggcactggaagtactggtggctgggagcagctgctggagccagttctgcttctcggcaaggagcgatttgctg

SEQ ID NO: 564013 - DNA, 75 bp, Homo sapiens
gaggaatgtctttcctaccatctaaaatacgaaggtttctggctggatatttgaatggtggtacttccataagca

SEQ ID NO: 564014 - DNA, 90 bp, Homo sapiens
ctctggcctttgtgggcaccaaaagtggcaagctgaagaagagcatgcttgagaagggaggataaaaactttcagaatgagcaaaacacc

SEQ ID NO: 564015 - DNA, 98 bp, Homo sapiens
ctggcgctaggcaggcgttgaggaagaagccacccgagcggactcccgagggaacacgggtctggctgagagaaaatggccagcattttccaagtact

SEQ ID NO: 564016 - DNA, 90 bp, Homo sapiens
atgaagagtgacttgtttctggatgattctaagaggtggccaatggcatcgaggtctacagtaccaaaatcaactccaaggtgacctccc

SEQ ID NO: 564017 - DNA, 96 bp, Homo sapiens
ctgataatgaagaattattttgcaccactggatgttgtttactggatttaagtgccctgtatgctcaaaatttgtatcctcagatgaaatggattt

SEQ ID NO: 564018 - DNA, 125 bp, Homo sapiens
ctcgtcgacatgagtgatgtggaggaaaacaacttcgagggcagagctggcgcccatgcggctctacacgctctccaagcgccactttgtcctcgtgtttgtcgtcttcttcatctgctttggcc

SEQ ID NO: 564019 - DNA, 83 bp, Homo sapiens
ccagagtctgctggacgcccaggcggacgaggccgtgttaggatggctggctgtggtgaaattgatcattcaataaacatgct

SEQ ID NO: 564020 - DNA, 76 bp, Homo sapiens
gtcggggcggtaaaaggccggcagaagggaggcacttgagatcttcttcagcagtatcgttctgctgtgtgcaaac

SEQ ID NO: 564021 - DNA, 50 bp, Homo sapiens
ttgaaatctaatgaaccgaaactttgggtccagtggcattgcagagcacg

SEQ ID NO: 564022 - DNA, 100 bp, Homo sapiens
tataggctccctcctgctgtcaggctacatcagcaaaggggggctcttggctttgggcctcagtgcaagtccattggaaaaggcagctgcaacaatctag

SEQ ID NO: 564023 - DNA, 75 bp, Homo sapiens
tgtctagatgtaattaatcaaacttggacagctctctatgcaaaatcaccaggacagccaatacaagtggtttat

SEQ ID NO: 564024 - DNA, 75 bp, Homo sapiens
cgcctttgccctggcaaacactggaatcctactttttctgaaactctttatacagtgaaacaggaggaaagaaaa

SEQ ID NO: 564025 - DNA, 83 bp, Homo sapiens
cttgtacagcgccggtcaacatcgcggtcatcaagtactggcgtgatggtgggcatgggtcagaaggattcctatgtgggcga

SEQ ID NO: 564026 - DNA, 100 bp, Homo sapiens
cgctgctcaaggacacggtctacaccgacttcgacgatgtggacgagtgctcactagcagaaaaaacctgtgtgaggaaaaacgaaaactgctacaatac

SEQ ID NO: 564027 - DNA, 100 bp, Homo sapiens
ggaggacctcacttccccggggtgtaataatgttaactgaggagtaccgggcgtcaaagcagaacgctttgaagaaggaatgacggtaaagcactgtgca

SEQ ID NO: 564028 - DNA, 90 bp, Homo sapiens
gatctctctctcgttcaaggaagcgcaggctgagtccagagctggcttccatgacaacacgctttacagatgagctgatggagcaaggat

SEQ ID NO: 564029 - DNA, 77 bp, Homo sapiens
ggacacagcaatatctctgggctttcacaggccaagaaagcagagaactcatcaaatgaggaggaaacgtcaagtga

SEQ ID NO: 564030 - DNA, 100 bp, Homo sapiens
tggatatatcctgacgcatccggaactcaggctgctgcaatccctctgtgagagcgagcgggcacgagtccgggctgcacggaagcacatcctggtgtgg

SEQ ID NO: 564031 - DNA, 100 bp, Homo sapiens
attcgtccccgctctgcctcacccaggagacggtggctcagggagtaaaggaaggccagttgagcaaacagaagtgttcctctgcatttcaaaaccttct

SEQ ID NO: 564032 - DNA, 90 bp, Homo sapiens
catgcgccatgagattgagggcacggggctgccgcaggcccagctgctctggcgcaagatggagaaggatgaaactgtgagtgactgctc

SEQ ID NO: 564033 - DNA, 83 bp, Homo sapiens
ggatccccagcaggagcaggagcgggagcggatgtggaaacaacttctgtgcatctcatcgttatgcagaaactcatggctgt

SEQ ID NO: 564034 - DNA, 75 bp, Homo sapiens
gaaggagtatcaggagaccattgaccagatagaggaaacaagcctccaggtctgcttccccgcaaaggactatac

SEQ ID NO: 564035 - DNA, 74 bp, Homo sapiens
agcaactgccggacgccctatcgcaagcagatatcattgaaatggattccaagcgtgtgcctcgagacaagctg

SEQ ID NO: 564036 - DNA, 75 bp, Homo sapiens
agctctacaccgtggccgtctcctgcctcctgcttgcaaccaagaaggatcaagaaggtggagaagaaaagaaat

SEQ ID NO: 564037 - DNA, 96 bp, Homo sapiens
ctcacctgatgcagtcgtctctccgtcttccgctttcttaaggtctggaaaaaggccacagtgaaggccgactccttagtttcttggaacagtctg

SEQ ID NO: 564038 - DNA, 83 bp, Homo sapiens
tttccggtcccggcgcccggcgagggcgcgcggctggtgtccgccccgcccgaaaggtgagaagccctaccactgcaactggg

SEQ ID NO: 564039 - DNA, 51 bp, Homo sapiens
gcgcctcttctaccggggcaagcaggaattatccagactgccttgccacta

SEQ ID NO: 564040 - DNA, 75 bp, Homo sapiens
ggaagagattgtgcccaatctggagccagagggcagggacctgctcatgcaggttcaggagaagtggcacctggt

SEQ ID NO: 564041 - DNA, 50 bp, Homo sapiens
gcctagttcccgacttgtttctcaggcctaaagatccctcctggctgtga

SEQ ID NO: 564042 - DNA, 100 bp, Homo sapiens
tggctcaccacaacctccgcctcctgggttcaagtgatctcctgcctcagcctccccagtagccgggattacagcgagttcctggggaaaaccccagggc

SEQ ID NO: 564043 - DNA, 75 bp, Homo sapiens
ccgggggcctggctaaggaaaccctattacctccagagcccacgcttccttccaggatctgctcctcggcccctt

SEQ ID NO: 564044 - DNA, 100 bp, Homo sapiens
ggaagaacatggcatcaagtttataagacagttcgtaccaattaaaggtggagagattcaaccagttagcgtgaaagttggagataaagttcttctccca

SEQ ID NO: 564045 - DNA, 100 bp, Homo sapiens
cgcgcagatagcagagccatccttggggctctgacgcccgctctgcggcttcggtgtttgaacaggccacagtccaggagcgcttacattcaggagctcc

SEQ ID NO: 564046 - DNA, 82 bp, Homo sapiens
aaagccatctccagtatccattctttatggcagaaagacctggtggaagaggaggctgaggaggctggagtggctttgagaa

SEQ ID NO: 564047 - DNA, 83 bp, Homo sapiens
gtcgtggaagcaggactgcgccgcgtcttcctcaaggtattagaaaactactcggatgctccaatgacaccaaaacagattct

SEQ ID NO: 564048 - DNA, 74 bp, Homo sapiens
caaggaagaagaacaccaaagtggttttttctctgctttaacaaatatggtccctacagttcagtccccccgcc

SEQ ID NO: 564049 - DNA, 100 bp, Homo sapiens
actcttcaaggatttctggcagcaattccttgacagtttaaaagccttggcagtcaaggtaaaaagaacgtattctcatggtacttacagagctggccca

SEQ ID NO: 564050 - DNA, 100 bp, Homo sapiens
ggtgactgagcggagcccggtgacaggatggtgtcctgtttgccggtactgtcaaacgcccgagccagtagaagaaaataagtgttttgagtgtggtgtt

SEQ ID NO: 564051 - DNA, 50 bp, Homo sapiens
cggcaagctaatgagaagctagataaggatcaagtttgtggttctagcag

SEQ ID NO: 564052 - DNA, 50 bp, Homo sapiens
tgcgggcggctccgtgagaaaggcgggtgctggagaatctggtaaaagca

SEQ ID NO: 564053 - DNA, 75 bp, Homo sapiens
aaactggatccagaactccattatttgctcccattcatgctgaggctccagagttcatggaaatgagtgttgagc

SEQ ID NO: 564054 - DNA, 95 bp, Homo sapiens
cagagtcctttgctgtcgcactctgccacctcgcagagctacacgcggagcaggttctcccatgggcaggtggtctctctggatgagctgcgccc

SEQ ID NO: 564055 - DNA, 88 bp, Homo sapiens
agttatgggctctgtcgccgtgggaagtttggggctcaagggtcacgacttactggagcaggatggggaggctgcacagtatcaatgg

SEQ ID NO: 564056 - DNA, 101 bp, Homo sapiens
aagagcatgcattgtgggttactggaggaacccgacatggattccacaggggagctgctgttgccccaggagacgactgtggagctgagctgtggagtggg

SEQ ID NO: 564057 - DNA, 100 bp, Homo sapiens
tgggactccggcgcagcggcaagtcctccatccagaagttgttaacaggcctttatagagacactcagacgtccattactgacagctgtgctgtatacag

SEQ ID NO: 564058 - DNA, 75 bp, Homo sapiens
caacaaatggacgtacttgagggcttgaatgtcttggtgacaatatctgatggagtctagctctgtcgcccaggc

SEQ ID NO: 564059 - DNA, 76 bp, Homo sapiens
ccctgaagagaacagccaggcctggacctggaggaacttgctttgtaccagatccagctgctgaaggacctcagac

SEQ ID NO: 564060 - DNA, 73 bp, Homo sapiens
cgcgcccgggatgtattcgtccccgctctgcctcacccaggtatggacctgtctgccaatcaggacgaggaga

SEQ ID NO: 564061 - DNA, 90 bp, Homo sapiens
cagccgcgcagctgggcgagaagctgctccggcctagcctggcggagctccacgacgagctggaaaagagcctggagaaagttcttgtgg

SEQ ID NO: 564062 - DNA, 90 bp, Homo sapiens
cgtttcctgttttaatgttagcgttgttaatactacctgcttttggatagaatgtaaaggtctcagccaatttcttctccagtcatcctc

SEQ ID NO: 564063 - DNA, 100 bp, Homo sapiens
cccgggcggcgcgctgcccgaggggagcaaggacagggcccggcgagcagccaaggaggccaaggaggcccctgcccagcccgcgcctgagaaggtcaag

SEQ ID NO: 564064 - DNA, 101 bp, Homo sapiens
cacttgaactctgccgaattcctgtgccacctcctcctttagaaaactgatcttaatacagtggacagaggactgcagaaaatcaacctatcctccttcag

SEQ ID NO: 564065 - DNA, 50 bp, Homo sapiens
cggagctcccccaagagccggaaaggtccacgccatccctctgcgctcct

SEQ ID NO: 564066 - DNA, 98 bp, Homo sapiens
aggaaggaacttggttccccctccctcagcttccgccccaaaaggcatcaagcatgatggaaccatgtgtgatacctgccgccagcaaccaatcattg

SEQ ID NO: 564067 - DNA, 74 bp, Homo sapiens
atgagcccctgtggaggtgaagacattgtgggattccggagtttgaatccacctttgacaattgtccgaaagac

SEQ ID NO: 564068 - DNA, 80 bp, Homo sapiens
ctatggtgtggcatcctgtgaggcctgcaaagccttcttcaagaggaccatccagggatactccagccggagagtccaga

SEQ ID NO: 564069 - DNA, 50 bp, Homo sapiens
ctcggcctctgccggagaaacaggtcgccactgggacactgtgaaccagg

SEQ ID NO: 564070 - DNA, 97 bp, Homo sapiens
tggaggtctgacattcaaggatatttatctaaaaattcttcttttgagtgccagtaaagaggcggggtttcaccatgttgcccagactggtcttgaa

SEQ ID NO: 564071 - DNA, 73 bp, Homo sapiens
ttcgcttcttccttcgtcatgaacgcccccctggcagggacattgaactgcctttttgttgagcacagaaaac

SEQ ID NO: 564072 - DNA, 75 bp, Homo sapiens
cagttctcccggtgtggccacgagtcggcaatcccacagagtattgatgaggaaactgaagtttggagcgatcac

SEQ ID NO: 564073 - DNA, 75 bp, Homo sapiens
tggggtgatcaaaagaaagctcatcaagccagagctggagtatctcaggctaaagaacgtgccaatggaatggag

SEQ ID NO: 564074 - DNA, 90 bp, Homo sapiens
cggccgcttctgtgaacactgccccacctgttatacagcctgcaaggaaaactgatcataatatcaatctagtgtcaatggaagtaacag

SEQ ID NO: 564075 - DNA, 75 bp, Homo sapiens
gtttagtgccctcctgagtgactgcgtcaggcatctcaatcatgatggcttcgtgcccctgggcaccctcctgca

SEQ ID NO: 564076 - DNA, 83 bp, Homo sapiens
ctgagcccggcgcaggtgaccggcgcgcgggagcgctacggccccaacgagacggtctcgccacattgcccagactggtctga

SEQ ID NO: 564077 - DNA, 90 bp, Homo sapiens
gcgagaggtgcggcgaaggaggcagaggcacttatgcttgtcagacaatgcagatcttcgtgaagactctgactggtaagaccatcaccc

SEQ ID NO: 564078 - DNA, 100 bp, Homo sapiens
agcagccttcgccttatcccagatgatctatccctcctgaaactctaccctccaggggatgaggaagggaaatgtttcaacgtgcgcaagcgttgcggcg

SEQ ID NO: 564079 - DNA, 100 bp, Homo sapiens
ctgacttccagttccagcgtacgagtatcaccttttgccatgatagcatttctttcattggacagttccttacaagggctccactcagtgtctgtctgta

SEQ ID NO: 564080 - DNA, 95 bp, Homo sapiens
atcactggatctgctgccagcattagcctggctcaatatctaatcaatgtcaggttgcctacaaagctgattataaacatgatattgtcgactac

SEQ ID NO: 564081 - DNA, 100 bp, Homo sapiens
acagctatctctgggccactccactatgccccttaccacaggagctctgcacagagtacccaaaggcaagtggaacagctctaatggggttgaagaaaag

SEQ ID NO: 564082 - DNA, 87 bp, Homo sapiens
gagtccagggcagagcctcagttagggtgatggaggacgaggagaaggcagtggagatcttgggcaacacggaagctgctcatcctc

SEQ ID NO: 564083 - DNA, 83 bp, Homo sapiens
attatatcgcatcctatggctcaaagaaagatgattatgttctaagaattttagatccagttacctgcaaagagagttcacct

SEQ ID NO: 564084 - DNA, 100 bp, Homo sapiens
gggtgatttctgcatttccaactgagtatctttcagaataaacagcgaagacttcttgctggaagcgcaagtgagggatcagccacgctggctcctggtc

SEQ ID NO: 564085 - DNA, 97 bp, Homo sapiens
tgatgagctaaggatttccttggggatgccagtaggaccactacgagagtacaaggtagtgggtcgctgcctgcccacccccaaatgccacacgccg

SEQ ID NO: 564086 - DNA, 98 bp, Homo sapiens
tgcagccagcccctgaaactggacacgagtttcaagatcctggaccgtgtcaccatccaggaactcacaggtaaaaaagctcacacatttgacttgga

SEQ ID NO: 564087 - DNA, 98 bp, Homo sapiens
ttcatcgtgggctcgcagggcgccgagggcgcatgggactgagtatgggctgagtgaagctgacatggaggcctcctacgccacagtgaagagcatgg

SEQ ID NO: 564088 - DNA, 83 bp, Homo sapiens
ggaaggggcagtacaagcttacgtctctgctcttcagtacaatcctaagtctggaacgttttttcttagagttccagaattga

SEQ ID NO: 564089 - DNA, 88 bp, Homo sapiens
aggaaccatggttggtgcagacatactagcagggagggaagacaattcagattcgagtggtgaatgcatttcgtagttctttatatga

SEQ ID NO: 564090 - DNA, 101 bp, Homo sapiens
acaaaaaaattcctggaaaaagaagtccaagaagcaaaaaagggactgctaagaagataccaccaggttgctgaaaagccaggagtcaaaatgactgagcg

SEQ ID NO: 564091 - DNA, 49 bp, Homo sapiens
gaaccaccaaaagtccattatgaaactgagcctggcccaactagagaat

SEQ ID NO: 564092 - DNA, 82 bp, Homo sapiens
tgggctgtgggctgaggaagaggggaacccagtgcacctaagctcgaagggcagatgggagaggatggaaactctattaaag

SEQ ID NO: 564093 - DNA, 51 bp, Homo sapiens
catttgtctttagtcttggcaaagtcagtactgctccccagcctaaaccag

SEQ ID NO: 564094 - DNA, 100 bp, Homo sapiens
gcggtgacggtggcgccgcccggggcgaggcagggccagcagcaggcgggagtgtacaccttaaacaatgagaagcagtggataaataaggctgttggag

SEQ ID NO: 564095 - DNA, 98 bp, Homo sapiens
cgcagcaccatggcgaccaccgtcagcactcagcgcgggccgggaaaccatctttgtatggcagcctgacttgtcaaggaattggcctagatggcatc

SEQ ID NO: 564096 - DNA, 100 bp, Homo sapiens
agaatcaggggaggcatgcttcagtggatgtttccaaggattgtcttcagtcatggccttgggattaaagtgcttccgcatggtccaccctacctttcgc

SEQ ID NO: 564097 - DNA, 75 bp, Homo sapiens
aaagtcctccaaaaatgagcaaggaggagctttcatctcctgaagaaaaatgaaaagctacttagagaacttagg

SEQ ID NO: 564098 - DNA, 100 bp, Homo sapiens
tgttaaaggaacctctacaacgaaggtgaagccacggaagataagacaaaagtcaactactgctgaggcatgggcttaataaatgttgactaaaatatcc

SEQ ID NO: 564099 - DNA, 75 bp, Homo sapiens
aatctaatggtgagcacagaaccattggctctcactgaaacaggacagaatctggatagtatgcttcatggcact

SEQ ID NO: 564100 - DNA, 90 bp, Homo sapiens
cttatgtccaacaggatgctacagctcagcagcctccagggtcgtatagacctccccctcctatgggcaaaccaccaggttcaattgtaa

SEQ ID NO: 564101 - DNA, 75 bp, Homo sapiens
caaggagggcaaagcgtcctgcggcataatcaccagcaacacccgggacaataatacgggggccacctaccccca

SEQ ID NO: 564102 - DNA, 110 bp, Homo sapiens
tttcacaaatttggaatctgccttctactccatcgtgggactcagcagccttggtgctcaggtgccagatgcaaagaggaaccagactagcatttctcagtgggttccag

SEQ ID NO: 564103 - DNA, 98 bp, Homo sapiens
gatgagcaggccctgctctcttccatccttgccaagacagccaggcgcattggagtgactgtctggcatcaccaagatgacactccacgccacccggg

SEQ ID NO: 564104 - DNA, 75 bp, Homo sapiens
gcttcctggcctgggcgctccggtggcggcggagatgtccagctcgccgctgtccaagaaacgtcgcgtgtccgg

SEQ ID NO: 564105 - DNA, 51 bp, Homo sapiens
ccatccttggctgttcaagtgtagaggctcccagccaacctctgataaacc

SEQ ID NO: 564106 - DNA, 80 bp, Homo sapiens
gaagaaaccagccgaacttcagggtttccaccgttcgttcaagataggagaaagaattcgagtcatcttggacatggaag

SEQ ID NO: 564107 - DNA, 83 bp, Homo sapiens
tggagaaggacattgatgaaaatgcatatgcaaaggtctgcctttatctcaccaggatgccaagcccctggaggtgtacagcg

SEQ ID NO: 564108 - DNA, 100 bp, Homo sapiens
tgcatatgcagcatggatatactggacaaagcggtgattcataccctaggcgggacagagcacgatgatggagtcttgctctgtcccccaggctggagtg

SEQ ID NO: 564109 - DNA, 98 bp, Homo sapiens
tgccatgagaactgcacccaggggatcccttggttccagtaccccattatctatgacattcgggccagacctcgaaaaatctcctcccctacaggctc

SEQ ID NO: 564110 - DNA, 98 bp, Homo sapiens
ccagggcaacgtgtacggccagatcaccgtacgcatgcacacccggcaggttggatggcaagcatgtggtgtttggcaaagtgaaagaaggcatgaat

SEQ ID NO: 564111 - DNA, 75 bp, Homo sapiens
actaagattcaacaaactatttttgaatgaagatggtgagccgttctccaaccctttggcccccgatggccacga

SEQ ID NO: 564112 - DNA, 74 bp, Homo sapiens
ctgtgctgtggaagagcacccagtaggatctggtgaagaatcatctgatgtatgctgtgagagaggaggtggag

SEQ ID NO: 564113 - DNA, 100 bp, Homo sapiens
gaaaaagttggatgtcagttaaggggttacacatcattttggaatgactgtatatcatctggattacgtggctgtatgttaattgaattagcattgagag

SEQ ID NO: 564114 - DNA, 100 bp, Homo sapiens
gtaaagaagttcctcgagcgatctggacccttcacacaccctgatttcgaaccgagcactgaagtgaatcccagaccttgctggcagcagcagttgagag

SEQ ID NO: 564115 - DNA, 75 bp, Homo sapiens
actctcgttctgcgacttataaaggaccagacaaatcaaattagtggttttgagctttatttacaagaaacattt

SEQ ID NO: 564116 - DNA, 100 bp, Homo sapiens
agactgaaatgggggcgaccattcttaggaggactgacaaatggtagtggtcgatatatctctgcagcacctggagcagaagcaaaatatcgaagtgctt

SEQ ID NO: 564117 - DNA, 100 bp, Homo sapiens
ttgaaattggccctatttacacacagaatgagctgaaaagacttcgctgttattaaaccttcaagaatgttctcgcgtcttggctccggagaaagctgcg

SEQ ID NO: 564118 - DNA, 75 bp, Homo sapiens
cgaactaagcagggcggtcgggggtgccggggacacgggcggcaagccgtccacgcggggcggtgaccctgcagc

SEQ ID NO: 564119 - DNA, 90 bp, Homo sapiens
acctcttatgtcagcatttcgcaagttgtggacatcggatacccaaggagacgaagctgaagcaggagaaggaggggaaaattaaccggc

SEQ ID NO: 564120 - DNA, 127 bp, Homo sapiens
gctgcaggccggtgctcttgcaactgacgcagtcactgcagcactggtggaacttgaggtcttaaagaaagtgcagaagagatggtcaaaaacaaattggaaggaaaggataaactgaccccttggg

SEQ ID NO: 564121 - DNA, 75 bp, Homo sapiens
cttgatcaccacccttgtcaaggagctcaatctaggacgaagagaggagtacgatgttttggacaagagacgtgg

SEQ ID NO: 564122 - DNA, 101 bp, Homo sapiens
ccgagagatgaggccggagcccaccaagttctgggaatatatgccatccgcgaggcagccaccagcaacctgaagaagctagtggaaaagtttgggaagga

SEQ ID NO: 564123 - DNA, 96 bp, Homo sapiens
gtggaggacgaggggctccgggtcttccagagcgtgaagatcaagatcgctcccctcccacccggtcactccgtccagcaagcacgcagacagcaa

SEQ ID NO: 564124 - DNA, 98 bp, Homo sapiens
gcctcatcacccggctgctggagggggatatcattttcaatgcccaatacccagaactgcctcccgattttatctttggagaagatgctgaattcctg

SEQ ID NO: 564125 - DNA, 50 bp, Homo sapiens
ccaggcgcggatggcgaggccagcaggtcctgaacgaggctgtgggggcc

SEQ ID NO: 564126 - DNA, 90 bp, Homo sapiens
cgtttgttcaggaaccaccagtgacagaggaactctaatgatccaggacaaagaagttaccctggagtatgtatcaagcctggatttttg

SEQ ID NO: 564127 - DNA, 100 bp, Homo sapiens
aaaagttagatctcatcacaagtgatatggcagactggatgttgaatttgttctctcagcacctatttctgaatggaatggcaaacagggacatatttca

SEQ ID NO: 564128 - DNA, 91 bp, Homo sapiens
gtatttttcagaagttgaattatatgcttttggcaaaacgtcttcaggaggagaaggagaaaggttatcactgtgaatataagatgcggac

SEQ ID NO: 564129 - DNA, 100 bp, Homo sapiens
actgcagaggtgctggagctggcaggaccgtataatagacgctggccccaaaggaaactactctcgatttatgaatcacagctgccagcccaactgtgag

SEQ ID NO: 564130 - DNA, 100 bp, Homo sapiens
gctcagggctctggtgaacaagctgtagcctctgaagagccaatccattcaggatgggaaaccacgcaggcaaacgagaattaaatgccgagaaggccag

SEQ ID NO: 564131 - DNA, 75 bp, Homo sapiens
cctgaagcctcaaagtttcatgtgcacgatctgattttctggagagatgtgaagaagactgggtttgtctttggc

SEQ ID NO: 564132 - DNA, 139 bp, Homo sapiens
gccaaagaaccccatggtagagttgttctatggcagattcctggctgtgggagtacttgaagttcacacaaaagatgttggacaatttctacaattttgcttcatcatttgctgtctctcaggcccagatgacaccaag

SEQ ID NO: 564133 - DNA, 73 bp, Homo sapiens
agaaagagattgggtacttaatggacatgatccacatcgcggacaccaaggtcgccaggcgttatggggattt

SEQ ID NO: 564134 - DNA, 75 bp, Homo sapiens
agaagagaaagccagttatccacggactggaagatcaaaagaggaccccttatccctctggacagaatgcaggtc

SEQ ID NO: 564135 - DNA, 96 bp, Homo sapiens
ggtcggagcccatctgatgaatacaaagacaacctgcaccagccctgtgtctaggtcgtttgggaaacgccttggagagtcaagaataaatttgca

SEQ ID NO: 564136 - DNA, 99 bp, Homo sapiens
cagcctcctaagtagctgggattacaggaaataatgcaaaaggtgtcccaaggctcctgaccagtgaacaaagatttgagaaagacagccaagctcatg

SEQ ID NO: 564137 - DNA, 100 bp, Homo sapiens
tccatcccgtgccctcgctctgagctgcgcctggacctggttctgccttctggacaatctttccggaccaactgttgccaatcctgagctgttccgcaag

SEQ ID NO: 564138 - DNA, 89 bp, Homo sapiens
cttgggaacgaggggtgaagcggcccaggtgagggatgaatctggttatagatggacaagagacgatcattctgcaagcaggcaacctg

SEQ ID NO: 564139 - DNA, 75 bp, Homo sapiens
ggagctgcgcgcggaaccgtgctgccccgccccgctccacccgtgaggcattgtcccagatatagccgttggtac

SEQ ID NO: 564140 - DNA, 90 bp, Homo sapiens
ggagacctggtcatggacacagtccctgaaaagggtatcagctctgtgataacagcgtgggggtgctcttcaatgactcaacacgcctca

SEQ ID NO: 564141 - DNA, 75 bp, Homo sapiens
gagaagaagagctgctgatgaggactgggacagtcaacgaaacggaatattccaatgctctttgtccggggagat

SEQ ID NO: 564142 - DNA, 83 bp, Homo sapiens
agaagatcttcgagttcaaagagaccctcggaacgtaatcattaccaaatgaggaggaaaggacgatgtcatcgaggctctgc

SEQ ID NO: 564143 - DNA, 100 bp, Homo sapiens
cagtttgcgtcaggagacacaggccataggaaaaggatacagagtagagtttcatgaacctgaaacttggtggaaatttgatcctgaagaattagaaaag

SEQ ID NO: 564144 - DNA, 82 bp, Homo sapiens
acccccaggagcagaagtccttcttcgccaaataccacggggtcactctggtgcccattgaggagttcagcccggagttcgt

SEQ ID NO: 564145 - DNA, 98 bp, Homo sapiens
acatcgcggacaccaaggtcgccaggcgttatggggatttcttcatccgtcagatccacaaatttgaggaggttgctacaagatcaccacggttttca

SEQ ID NO: 564146 - DNA, 90 bp, Homo sapiens
tacacactcgtgatgtagttcatcttgatttgaagagcttagaaaccaagatagccaagtggaacctgcaatcaagaatgaataagaatg

SEQ ID NO: 564147 - DNA, 89 bp, Homo sapiens
aagaagagtgtgtggacactccaaagatatttggaaactggacgtttggaacgctggtattcaccgtgatggtgttcacagttacacta

SEQ ID NO: 564148 - DNA, 101 bp, Homo sapiens
attcagatgggatctttccggatcaatccagatggcagccagtcagtggtggagaaccacaccttcatcaagcggtccgaggtggaagaagtggattttgc

SEQ ID NO: 564149 - DNA, 75 bp, Homo sapiens
aaggacaagaaacacgtctggctaggagaaactatcaatgctggcagccaggcttggtccagcatagtttatcag

SEQ ID NO: 564150 - DNA, 99 bp, Homo sapiens
cagtgcattgctgaaaatgatgttggaaatgcacaagctggagcccaactgataatccttgaacatggcatccgcatgctggacggcgatgtcacagat

SEQ ID NO: 564151 - DNA, 75 bp, Homo sapiens
gccgccgcctgtgcgcctctgctgagtcaggagaaggcagagcccccccaggctatgaatgccctgatgcggttg

SEQ ID NO: 564152 - DNA, 86 bp, Homo sapiens
ctcaacgtgaccttatcaagtgaggacacattcagctaacgtattttagcaggtggagtgaggttgaagattcctgtgacagcgat

SEQ ID NO: 564153 - DNA, 74 bp, Homo sapiens
actacgagactgtctcagcccatccctacaagtaagccaagatgggtgcatacaagtacatccaggagctatgg

SEQ ID NO: 564154 - DNA, 100 bp, Homo sapiens
aacagcagaagagaaagccagttatccacggactggaagatcaaaagaggggttctccaaaaaatgtggaatcctttgcatctatgctgagacattctcc

SEQ ID NO: 564155 - DNA, 100 bp, Homo sapiens
atgtggagcgcttctttaagggctacgggaagatcctggaggtggatctgaagaacgggatcaactcactatcctgaaggtccattctcccaagaagagg

SEQ ID NO: 564156 - DNA, 98 bp, Homo sapiens
gggatcccagcctcaggcctgcacggacggtgttggttgggcccatagatgagagcagccagatgagtgacctccctgtcaaagtgactcacacagaa

SEQ ID NO: 564157 - DNA, 74 bp, Homo sapiens
ttactttctgacaatgcagcttctcttgcagtgcagtgagaaagatcagtctaaagaaaaggagaagaaagtga

SEQ ID NO: 564158 - DNA, 97 bp, Homo sapiens
agcctgttatagtgcccatgtatgcagcaggattgttgactaagataacacgcacaggtccttcagcttgggaaaccaaaaagattcttgctgtttc

SEQ ID NO: 564159 - DNA, 98 bp, Homo sapiens
gtttaaagtggattacaaccggctaggctacacacacctgtactcttccactcagcaactttcatcctttgaaacgtgtgctgaaaaagaagaatcag

SEQ ID NO: 564160 - DNA, 75 bp, Homo sapiens
ttatatctggaatgggagaattacacctggaaatctatgctcaggtcaaagattctaaactgcctgcatataagg

SEQ ID NO: 564161 - DNA, 82 bp, Homo sapiens
cctcctgcgaggcctcccgggctccgggaaaactacactggccaggccctgggctgcatcttgtacctgctgtgcttccggc

SEQ ID NO: 564162 - DNA, 100 bp, Homo sapiens
gttcactcgtctgccaccatcccattggatgaccccactttgctctttgccaatgcaggcatgaaccaggtgtgatccctcacatccacaaatctctgat

SEQ ID NO: 564163 - DNA, 113 bp, Homo sapiens
cttggacctggaaacatcaaaaaagctgtcgaagaagctgaaagactctctgaaagccttaaattaagtgccggtggtggtgtgcacattgagccccggtatagacagttccc

SEQ ID NO: 564164 - DNA, 74 bp, Homo sapiens
agccatggaggacgagatgcccaagactctacacgtcaagttcttgaggagctgactgagttgcctgtgatggt

SEQ ID NO: 564165 - DNA, 75 bp, Homo sapiens
tttttaactgaagatagtgcctttcagccctaccagtggatgattcaacagccacacaaagcagcaacatttttt

SEQ ID NO: 564166 - DNA, 90 bp, Homo sapiens
cggagtgaaaagaaggcacggaagctctattaccaggttttaaacttcgccatgatcgtgtcttctgcactcatgatatggaaaggcttg

SEQ ID NO: 564167 - DNA, 75 bp, Homo sapiens
gaacgttcgagatctcgtgggtcgaaatcaagagtacagtccctgacatcacacactgcagagatggataaccaa

SEQ ID NO: 564168 - DNA, 98 bp, Homo sapiens
agcagtccagaaagcggcttatcgaacagagccgggagttcaagaagaacactccagagagaaacttgcccaggccaaagaagagaacgtgggcttac

SEQ ID NO: 564169 - DNA, 101 bp, Homo sapiens
ggcgggctaggctgcgcggtgcggaccccggcgcgcggtccgggttgctggggcggcgcgtgtcctcagaatggttggaatgaccctccagctttgaacag

SEQ ID NO: 564170 - DNA, 100 bp, Homo sapiens
atcacccaacattaaatgaaagatatttattacttcatctgcttggtagaggtggctttagtgaagtgtataaggcctttagatgttgttctggaaaaac

SEQ ID NO: 564171 - DNA, 50 bp, Homo sapiens
ccgctcccccgatcctattcccagtcgtgagcgcctggaccatgctgctg

SEQ ID NO: 564172 - DNA, 98 bp, Homo sapiens
ctgggcaatggctccctggccatctatggcactgttgtcatgccctgaccacagctgcccttcaggaggctggcacggagccacctggggccattggg

SEQ ID NO: 564173 - DNA, 95 bp, Homo sapiens
tgtggaacctggaaatcagtggtttgttactggatctgctgacagaactataaagaattggcagagggggtcgatttgggaggaaaggtgtggct

SEQ ID NO: 564174 - DNA, 83 bp, Homo sapiens
ttcctgtacagcctgcagaactgagcatcagatccatgctgctgctgactcggagccccacagcttggcacaggctctctcag

SEQ ID NO: 564175 - DNA, 100 bp, Homo sapiens
gccccaccgagtggacggccctgccgaccttggcgagagccccctcgcctttctcaccagcaacccaggtttttctattgggaaagctactgatcggatg

SEQ ID NO: 564176 - DNA, 103 bp, Homo sapiens
cggacttgaagctcagtgacagtgacattcctgggagctctgaggaatcgccgcaggtggaaggcaacagcccccaggggagcaaccagggagtcaaaatcac

SEQ ID NO: 564177 - DNA, 97 bp, Homo sapiens
tagagattgtgaagaagaatttcgatctccgccctggggtcattgtcagatattgatgatgttaagaagttcaaaccgggttacctggaagctactc

SEQ ID NO: 564178 - DNA, 75 bp, Homo sapiens
tgaggaaggggaagtgggcaaagcagatgacagcatattaaagtgagtgaccctgcgacccactctttggaccag

SEQ ID NO: 564179 - DNA, 82 bp, Homo sapiens
attcagaaggagctagctgaaataacccttgatcctcctcctaattgcaggtacaagaaaattccccaggacacagagctgg

SEQ ID NO: 564180 - DNA, 100 bp, Homo sapiens
tcgagtcagggttgccaaatgccagatgctggtcacctgcttctttatcttggtaacaggggcaccaccacgaggcgatttgtgggccataccaaggatg

SEQ ID NO: 564181 - DNA, 100 bp, Homo sapiens
ctgagcccccaggggactgtgcgaactgcaggtgcagtagacattgttgcaatcatgatcggcaatctgaaaggcacaaaaattctgcaatctattcaaa

SEQ ID NO: 564182 - DNA, 100 bp, Homo sapiens
cagacggcagggagtgcatcaaaggtgtgaacacagtacctggagtagaacagaaaaattattatgtctgtgttcccttgggactcattggaaattgtac

SEQ ID NO: 564183 - DNA, 100 bp, Homo sapiens
cccggagctgctggtttcattcgaggtttcgggccggcctgttacatgaacagaatatggcaaaaatgagactacttacttttatgggaatggcagtaga

SEQ ID NO: 564184 - DNA, 100 bp, Homo sapiens
cagcagtcaaggtctccatggactggctaagactcagacccagggtctttcaggaggcagtggtggatgaaagacagtatgtcttcattggctgctctgg

SEQ ID NO: 564185 - DNA, 51 bp, Homo sapiens
tggaaggaggagattctgaagataaggagggtcaaatagaaattgacgatc

SEQ ID NO: 564186 - DNA, 50 bp, Homo sapiens
ttgaacgatctgtgtatagtgacagattgccagtagaaagccaacagacg

SEQ ID NO: 564187 - DNA, 100 bp, Homo sapiens
agtgcagagccgcctttccagcatgcaggggctgctcaggcagaggtggaggagacactgaagcgactgcagagccagaagggagtgcagggaatcatcg

SEQ ID NO: 564188 - DNA, 74 bp, Homo sapiens
tttctctgctctgccaacactagtggaatatgatcacatcccaggcggttcagctgctgaagccagagggtgtg

SEQ ID NO: 564189 - DNA, 100 bp, Homo sapiens
agtggaacttctacccgacacttacatgccatggccttctacgttgtgaaaatgattgccaccaaggagccaatgaatcccattaaacaatatgtaaagg

SEQ ID NO: 564190 - DNA, 100 bp, Homo sapiens
ttgaaacacaaatggtttttgctggagatggagctgaagatgctgaagtctcagtccagctctgccgaacagagcttcctgttctccagggaggaggcgg

SEQ ID NO: 564191 - DNA, 90 bp, Homo sapiens
agataccaccggtaactttcatcaatgaagttgctctatatgcaatcagtgctgtctactttgctggagtgatggtgcgactgatgttga

SEQ ID NO: 564192 - DNA, 100 bp, Homo sapiens
cttcctcgacctgcggctctatgacacggaggaatcctatccatcttcttcaccgatatggtttgtggattctgaagacccaaatctgacatcagttctg

SEQ ID NO: 564193 - DNA, 75 bp, Homo sapiens
ccggccgcgggcgcgaccggaggcagggtaagcttgatgattaccaggaacgaatgaacaaaggggaaaggctta

SEQ ID NO: 564194 - DNA, 74 bp, Homo sapiens
agacctccagaactacctgtaaattatgtgaaacctccaaatgtgggataccatacttgcagagctccttcaga

SEQ ID NO: 564195 - DNA, 90 bp, Homo sapiens
gtcttcccaggcgtcgcggagagcagggagtatattaccaaattggtgatgttgtttctgtgattgatgaacaagatggaaagccctact

SEQ ID NO: 564196 - DNA, 75 bp, Homo sapiens
cagcgtgcctttgggtgataagggcgtatccagtatgccaagaccgactcagatatcattgccaagatgaaaggc

SEQ ID NO: 564197 - DNA, 75 bp, Homo sapiens
cgatgaggccggggacgggagctgagcgtggaggcctcatggtggttttacgcacgacgagctgctgaaggtgtg

SEQ ID NO: 564198 - DNA, 75 bp, Homo sapiens
cgaggcatgggggtccacactgcaatgtttttgtggaacatgaaaaaaccgggaagatcctgacggagttcctcc

SEQ ID NO: 564199 - DNA, 96 bp, Homo sapiens
acccaaggtctcagagcagctgctcaagcttgatgaacaagggatcctctgccttgtcaatgttagtcacaatggtgtgagtgaatcagaactgat

SEQ ID NO: 564200 - DNA, 96 bp, Homo sapiens
agccaatgatcttttcaatgctgcgaaagctgccaaaagtgacatgcagacacgatgaggcgagtggtacgacagagcaagtttcggcatgtattt

SEQ ID NO: 564201 - DNA, 91 bp, Homo sapiens
tgcgggtggcggtggtgtgctcgagcaaccagaaccggagcatggaggcgcacaacatcctcaggcactatgtcgtccgaggcccagagat

SEQ ID NO: 564202 - DNA, 88 bp, Homo sapiens
cagcacctagtcgtggccggaggagtctcagagctgtcagaaagtctgcgctcctcagaccaccggcaggtgaacagcctgatgcaga

SEQ ID NO: 564203 - DNA, 90 bp, Homo sapiens
aaatgagtcttctccgaggtacaagagaaggacccattactgagattcttgtagacactgtttgggctctgtcatacttgacagatggag

SEQ ID NO: 564204 - DNA, 100 bp, Homo sapiens
cctggaccccaactcagccttcctgcataccctggaccagcagaaacctagagtgtctttaaaccagaggagttacgccaggccctcatgccaaccctag

SEQ ID NO: 564205 - DNA, 98 bp, Homo sapiens
tcagcaatgaaatcctgctttcttttcctcagaactactatattcagtggctaaatggctccctgattcatgctgccactggtgacatgccaacttac

SEQ ID NO: 564206 - DNA, 136 bp, Homo sapiens
cgcaagggcagtttagctgatgttgttgacaccttgaagcagaggaaaatggaagagctcatcaaaaacgagccggaagtttaatcccatggaatcaatcaaattaaatcatcatgactacattgattccccatcg

SEQ ID NO: 564207 - DNA, 100 bp, Homo sapiens
aaggttcacagtatatataacagacttctggcaattgaggatattgaccctaccttgaatttgaaagacatattggctgacctgatacctaaggagcagg

SEQ ID NO: 564208 - DNA, 100 bp, Homo sapiens
catgggagcaggacctccacctcagtttaaccggatggaagaaatggagccatgtgttcacatgtcatgtggaccagtatttaactgtggaaaccgcggg

SEQ ID NO: 564209 - DNA, 50 bp, Homo sapiens
catggaggaggcggccgcagctccgaaatgcattgacattctaattgaga

SEQ ID NO: 564210 - DNA, 90 bp, Homo sapiens
gctgccgccatacgcgctctccctgtttaggcctgccagtgagcttctaccatcatggacctattgttcgggcgccggaagacgccagag

SEQ ID NO: 564211 - DNA, 75 bp, Homo sapiens
cagaacttttggaactagtgccggcggctctccaccccccagtttgcagaaaaaacttcagcatgtgccaggaac

SEQ ID NO: 564212 - DNA, 90 bp, Homo sapiens
cctgtccttactccctctttaagattgcgtacccactgcagagtgctgaagacggggtagccacgaggcttctgaatgcttatgatgaac

SEQ ID NO: 564213 - DNA, 96 bp, Homo sapiens
cggcctcctcagtgcgaagaagctgcagccgcacctggccaagggtggaatttccagaggcccggatcttcgaggagaccctgaacatcctcatct

SEQ ID NO: 564214 - DNA, 130 bp, Homo sapiens
cgggccgcacctttgtcaagctgagagccaccaagaggaggcagcgtaacctgcggacctacaacctgcggcccttcatgctgctgccgcccctcatggagtggatgcgcgtggccatcacctacgcaga

SEQ ID NO: 564215 - DNA, 87 bp, Homo sapiens
ccggctgggccggaagatcggcagcggctccttcggagacatctatctcgcacccaagaaaacctcatttggctcgctgaaggatga

SEQ ID NO: 564216 - DNA, 83 bp, Homo sapiens
attcttcagaaagtgaacttggcattttagatctaattcaagtaatactgcattgcatgattgtgcagaatctggaagtttgg

SEQ ID NO: 564217 - DNA, 75 bp, Homo sapiens
gaaccaaggagacgctcctggcactgcagttcaggacctcaaggggctcggctatgagaaggggaagcctgtggg

SEQ ID NO: 564218 - DNA, 90 bp, Homo sapiens
gcctcttcggccatggaagctgccggcagccctgcggctacggagacaggctgcggagacttttgatggtggaagtggtgaaacccaaac

SEQ ID NO: 564219 - DNA, 100 bp, Homo sapiens
ctaccatgtcagccttcccagtagctggaactacagacttcctcttcaaattcctggtgattggcagtgcaggaactggcaaatcatgtctccttcatca

SEQ ID NO: 564220 - DNA, 75 bp, Homo sapiens
ctggagtacccccgggggaagaggaagaagggctccaccatggagcgctgctcaccatggatgatgatatcgccg

SEQ ID NO: 564221 - DNA, 75 bp, Homo sapiens
gtgataatgtgaagcgtcagaggtccctgtttgataggctccgtgcctgcagggcgggcgggccagcgggctggg

SEQ ID NO: 564222 - DNA, 100 bp, Homo sapiens
gggaagtcaaaagcatgcaagcctacagaaaagcattgagaaagctaaaattggccgatgtgaaacggctgcaggccaacttcaccatccgggaagatgc

SEQ ID NO: 564223 - DNA, 75 bp, Homo sapiens
aggcaagtggtgtgtggcacaaaatgcaacacgatgctgggctcttgcactgtttggtggaaatggtgagacagg

SEQ ID NO: 564224 - DNA, 75 bp, Homo sapiens
ggcacatggcccaggcagaccttgcagtcaaaacggcaatggacgtgatgcagttcagcaaggaggaagttcggg

SEQ ID NO: 564225 - DNA, 100 bp, Homo sapiens
tgcttgatcaggtggaacagattcagaaggagcaggattaccaaaggagtaatcaagtcagaggattatatgacttttatctgcctagagaagaactatg

SEQ ID NO: 564226 - DNA, 75 bp, Homo sapiens
gcgggcgcagtttctcacgacgggccgagcctgccactgtccaggggcaagttcatcctactctcgagtctaatg

SEQ ID NO: 564227 - DNA, 100 bp, Homo sapiens
agaacattacgctgaaccccggctttggtgggcctgtgttttcctggagggaccaagctgtgctgcggcaggacgggaagctggagaagcttcgagagaa

SEQ ID NO: 564228 - DNA, 100 bp, Homo sapiens
cagggaccccgagatcgagctctttgtgaaggcatgtactggcattgaaaacattgacgaagctattacattgcttgaacaaaataattgggacttagtg

SEQ ID NO: 564229 - DNA, 100 bp, Homo sapiens
ctcacatccgatgcaccctttttgtcagattatcaggatgaggttggtgcttcccgtgctgctgttgatgctggctttgttcccaatgacatgcaagttg

SEQ ID NO: 564230 - DNA, 83 bp, Homo sapiens
aacaaaaagaaccctcaattgatgaaaggaggatgctgaggtgaccaaagcttttgaagaagatatagagaccccaccaacaa

SEQ ID NO: 564231 - DNA, 127 bp, Homo sapiens
ctcccttccctatccccgacgaccggatcctgaggaggcagctgcggtggcagctgctgagttctcggtgaagaaaccaaggtgtatgttggtaacctgggaactggcgctggcaaaggagagttag

SEQ ID NO: 564232 - DNA, 76 bp, Homo sapiens
gtcgacctgacttcttttgagcagttggcactacccgtcttgaggaattattctaccttgtaaatactgttatttg

SEQ ID NO: 564233 - DNA, 82 bp, Homo sapiens
aaacaaggtcaagaggacatcctgcatgtatggggcaaactgctatagactttggctgagcaaaacactaagaatcctaaaa

SEQ ID NO: 564234 - DNA, 100 bp, Homo sapiens
aaaaagatcccatagaaatgtttcattctggacagctggtaaaagtctgtgccccaatggttcgatattcaaagcctacacaagtgaaatggcagctgat

SEQ ID NO: 564235 - DNA, 100 bp, Homo sapiens
gcatctgaagcagtggccgacatcaagttttcctctgcagcagcccccacaacctgccagacacccctgagttggaagaaacctcagagaacagttgtgt

SEQ ID NO: 564236 - DNA, 98 bp, Homo sapiens
aaccattgacgccatgtcgggttattcgagtgaccgagaccgcggccgggaccgagggatgaaacaggcgcctatttaatcgacagagaccccaccta

SEQ ID NO: 564237 - DNA, 74 bp, Homo sapiens
caaagagatcagagaccagggctcctgtggctcctgctgggactcgctcagcagcagcctgaaaacttgctaca

SEQ ID NO: 564238 - DNA, 82 bp, Homo sapiens
atggacccagggattttccctcgaggaaccactcgttttgactattattttatcactctttgtgaaacttcacaatgttcgg

SEQ ID NO: 564239 - DNA, 100 bp, Homo sapiens
gttacaagttgctgccaccttatcttagagttattcaaggggatggagtagatattaataccttacaagaggttcagcagctggacatggagaaccaacg

SEQ ID NO: 564240 - DNA, 83 bp, Homo sapiens
cggccttcatcgacatcagtgaagaagatcaggagccttcacgtaaatgggtccagtcatgcctcccagtaagaagccagaaa

SEQ ID NO: 564241 - DNA, 92 bp, Homo sapiens
ctgggctgggatccggagcaagcgggcgagggcagcgccctaagcaggtgagaagccctaccactgcaactgggacggctgcggctggaagt

SEQ ID NO: 564242 - DNA, 50 bp, Homo sapiens
ctctggtcagaagactcctgcgaatctgatggagtctcatgctggagtga

SEQ ID NO: 564243 - DNA, 100 bp, Homo sapiens
gcgcgtttctatcgggacgtcctggggatgaaggtctatgttaacaatgaatgggcaaccagtgttggggaaggagggagctttggagaacttgctttga

SEQ ID NO: 564244 - DNA, 83 bp, Homo sapiens
gaaatagcaagaactgaggagcaccaggagacgcaactcatcgggagtcagtggatcggtggggaaaatgctgcttaccctgg

SEQ ID NO: 564245 - DNA, 75 bp, Homo sapiens
gtggaaaaatacgagaaacagatcaagcactttggctagatgaactgcagaagcaactacaagaagacataaggc

SEQ ID NO: 564246 - DNA, 75 bp, Homo sapiens
ctccatccaggcgggcatctaccttctagctccggacattcgacatgaaagaaatgtgattttgcagtgtgttcg

SEQ ID NO: 564247 - DNA, 75 bp, Homo sapiens
catctgcaaggtccgcttcaccaggtggccagagcaggccggtttggcaccaagggcttggctatcacatttgtg

SEQ ID NO: 564248 - DNA, 75 bp, Homo sapiens
gcgccggcctttggtcgcctccgtgggcctcaatgtgaaaatgcctcgtgtaaaagcagctcaagctggaagaca

SEQ ID NO: 564249 - DNA, 90 bp, Homo sapiens
caaaagcctctgctctgcctccggggacaagaaactagagcaaataaccgttttgaaattgtactactgagcgagtgtgcttgatccagg

SEQ ID NO: 564250 - DNA, 100 bp, Homo sapiens
aaggctacctggtgaaggtggatgacagcagtgaagatgaagcagacaatgatccaacaggggaagcagcagctaatacccagcagacacttactttcta

SEQ ID NO: 564251 - DNA, 75 bp, Homo sapiens
tcagctactgcaagctcagtaccacaggaactcaccacattgcctgtcctctacctgtgcgagttctgcctcaag

SEQ ID NO: 564252 - DNA, 75 bp, Homo sapiens
gtgtctgctgcgttcacggcaggattcggttagcaattaccagctctggctgggtcgccacaacttgtttgacga

SEQ ID NO: 564253 - DNA, 97 bp, Homo sapiens
atgccatgtcacggctcgccaggctggctcctgtctacctgtatgtattcggaaggaagtgacattgtacctcagagtaatgagacagctctccact

SEQ ID NO: 564254 - DNA, 87 bp, Homo sapiens
ccgccgccttgctgctgctcaaagctgctgccgccccttgggctaaaagaattaaacaaccaccatgtcgagcaaaaaggcaaagac

SEQ ID NO: 564255 - DNA, 73 bp, Homo sapiens
ctcctacctccaaagtttatactatcagaccttattttcctaaggatgaggtttattcttcagtccaaggaag

SEQ ID NO: 564256 - DNA, 50 bp, Homo sapiens
ttgggagttacttcagcgaagccgagaggagccttcaggggaagtagagg

SEQ ID NO: 564257 - DNA, 98 bp, Homo sapiens
gatgaagataagacactttctcagttacagagagagtgcctggtgaagaatgtgatgggatcactagcatgtctgcggagagcggccctgggacgaga

SEQ ID NO: 564258 - DNA, 100 bp, Homo sapiens
ggtcttcagcccgtcagcaagtggcaagcctatggactcaaaggctatcctgagttttaagttgaatgtagacagtcattgtgctctcaaggaagctgtg

SEQ ID NO: 564259 - DNA, 75 bp, Homo sapiens
gcggtgccagaagccgtgggacgaggagctcgaggccatgagcagatataccagcccagtgaacccagctgtctt

SEQ ID NO: 564260 - DNA, 100 bp, Homo sapiens
aaactgaaggcacagctgggtcctgatgaaagcaaacagaaatttgtgctcaaaacccccaagtgccggtggtggtgtgcacattgagccccggtataga

SEQ ID NO: 564261 - DNA, 100 bp, Homo sapiens
gcgggccctgtgtcttgcaggagtaccagcagttcaggacagagcgggatgccaccagcttgtccaaagggaagttccaggagctcctggtgggcatcgt

SEQ ID NO: 564262 - DNA, 91 bp, Homo sapiens
gtgacttcgggctgtgggctcgctcgcggctcttcggccatgaagaggactgtcagaaggacgtagaaggcacggttttactgtgaggagc

SEQ ID NO: 564263 - DNA, 82 bp, Homo sapiens
gtgccgcgagcgcggcctgcaggagcctaggaaagctgagcctcatagcttccgggagaaggttttccggaagaaacctcca

SEQ ID NO: 564264 - DNA, 96 bp, Homo sapiens
gctctgttcattagtaccctgctctacaagccagatggtttgtgcttgtcggaatcagaaacagtcaacaaagagcgagcgaacagttacaaaaat

SEQ ID NO: 564265 - DNA, 82 bp, Homo sapiens
attccaagtaactcttatttgatgatcagtagaattgaatatgtgcatacaaagaattttatacacagagacattaaaccag

SEQ ID NO: 564266 - DNA, 75 bp, Homo sapiens
cctgcgtttagataatgaccagagggagttctatctctcagactctgacttccaagatatctttgggaaatccaa

SEQ ID NO: 564267 - DNA, 98 bp, Homo sapiens
ttggtgacacttcgggtctctcacagaggaaggatgctgatatgctaactggtgatgagcaagtatggaaggaagttcaagaatccctgaaaaaaatt

SEQ ID NO: 564268 - DNA, 100 bp, Homo sapiens
ggagctgctgcgcctcaaagccaagcagagtttccctgcagaagctttctcttgcctgccgccgtgtgagatgtgcttttgctctttcttcatcttccac

SEQ ID NO: 564269 - DNA, 50 bp, Homo sapiens
ggggagaagcatcatggttcaacattctggctgtgactcagtcactgaca

SEQ ID NO: 564270 - DNA, 88 bp, Homo sapiens
cgcggccaggagaccgaggcgtctcggaagggtgctgacctggaccgggagaagaaggctgccgagtgcaaggtggacagcatcggga

SEQ ID NO: 564271 - DNA, 100 bp, Homo sapiens
gccagatccgctgatctagtgcttctcgaaaaaaaccttcaggcggcccatggggaagtcgagacaacatgagtgtgattttgatctgttttccaaatgc

SEQ ID NO: 564272 - DNA, 82 bp, Homo sapiens
actgcgggccggcgaaagctggtgtccttaagtttgctcgcttggtcaagtcctacgaagcccaggatcctgagatcgccag

SEQ ID NO: 564273 - DNA, 75 bp, Homo sapiens
taggctttggaagtggtcatttcagatgtgattcatctaagcgagatgcgagaacacttttggctaaaaatctcc

SEQ ID NO: 564274 - DNA, 98 bp, Homo sapiens
gagcatcgcggagcttgacccgtccatcgctgtggagacactgtcggacattcgggaaggtgcgccgctaggggtccacctgccttttgtgggctact

SEQ ID NO: 564275 - DNA, 75 bp, Homo sapiens
ctgaaggagaagtttatgaatgagttgcataaaattccatctggttatattctgggcactaaatgaaggcgtttc

SEQ ID NO: 564276 - DNA, 50 bp, Homo sapiens
catggggcccaagaaaaagcacctggactaaaagcttcactggcctgagc

SEQ ID NO: 564277 - DNA, 118 bp, Homo sapiens
aagccttttccgttgccggtgccggcctagcgtcctggaattacttcaatcaagtgcaagctggcccaggccaatggttggggcgtcatggtgtctcatcgttcgggggagactgaag

SEQ ID NO: 564278 - DNA, 75 bp, Homo sapiens
ggatattggagagtttgaacccgatggatgcttaaagattattggtttcctatcctgggagcaggagagtgtgcc

SEQ ID NO: 564279 - DNA, 101 bp, Homo sapiens
catcgcgacgctgctcaaaacctcgctccggaaaggggacacctggaactttatattgctgttggaatatctggagccatccaacatttagctgggatgaa

SEQ ID NO: 564280 - DNA, 100 bp, Homo sapiens
ccctcaccgagtacgaagcgggcgtttgcgaagatgcagacagacatgctgaactatctggaagtccactgaaaagcaaaagcactaggaagcctttggc

SEQ ID NO: 564281 - DNA, 75 bp, Homo sapiens
tgtagctgccctttccgtttccagggttccgaccagattgttaaaggaaatgggctggcaggaagacagtgaaaa

SEQ ID NO: 564282 - DNA, 90 bp, Homo sapiens
gtgccaggaggctggctggaataaagggccagctcttccgaggctccagcctgcttttccgccgggtgtcatcaggatcatgctttgccc

SEQ ID NO: 564283 - DNA, 76 bp, Homo sapiens
ggggataacttctatgtgattgatcaaggagagacggatgatgagagccactcagagtgggtgtcttgtgtccgct

SEQ ID NO: 564284 - DNA, 90 bp, Homo sapiens
gcagatggcggatgccctgcagtacctgcagaaggtctctggagacatcttcagcagagagctggcggtcaccatggcaatgcgggagct

SEQ ID NO: 564285 - DNA, 98 bp, Homo sapiens
tgagatttacctgtgagatgtttcatcccaacatttgtggggacattcatggacaattctttgatttgatgaagctctttgaagtcgggggatctcct

SEQ ID NO: 564286 - DNA, 83 bp, Homo sapiens
cgcttctcatcctggacatctgagctgcctggagttcagcctcagaatccaggagttcattgaactcatccggcagaataaga

SEQ ID NO: 564287 - DNA, 83 bp, Homo sapiens
actctttctgttcaggccagaccctctgggagcttctcagccattttccacagatcaggtctggcggcttctctgttgacaac

SEQ ID NO: 564288 - DNA, 83 bp, Homo sapiens
tttgtcacaggtgctactccactgtcacaccttgctcctggagaaggaagatcctgtgaagccacctggcagctctttacaag

SEQ ID NO: 564289 - DNA, 80 bp, Homo sapiens
cgcagaggagccgtggaaaaaccaactatctaactccactcaggaggaaatctctgacatcaaagaggaggggaacctag

SEQ ID NO: 564290 - DNA, 97 bp, Homo sapiens
ctcttccgccagtacctgcgtatccgcactgtccagcccaagcctgactatggcatagcgcgctggctaggactccagtaccgtgaagggaggcagt

SEQ ID NO: 564291 - DNA, 90 bp, Homo sapiens
ttcttctgtgtggcccgcctgcagatatgaattgagaattcgttatttgccaaaaggatttctaaaccagtttactgaagataagccaac

SEQ ID NO: 564292 - DNA, 100 bp, Homo sapiens
ccctggtagcggcgctgttgctgggctcggcgtgctgcggggatcccaacaagccctcaggattcagaagtgttaaagctcctgtcactaaagtggctgc

SEQ ID NO: 564293 - DNA, 100 bp, Homo sapiens
agacggccaagatggacacgacggcgaccggggggacagcggagaggaaggatgcttaaatggcagaggccaagcccagactccagacggacatgcggat

SEQ ID NO: 564294 - DNA, 100 bp, Homo sapiens
gtgaattatgcaagcacagatttgcttttacaccaagtggaatttccagaggcccggatcttcgaggagaccctgaacatcctcatctacgagactcccc

SEQ ID NO: 564295 - DNA, 50 bp, Homo sapiens
cgcctcctcctcggccagcaacagcgagtgccgtggaggtcccagccccc

SEQ ID NO: 564296 - DNA, 100 bp, Homo sapiens
gccggagcccagcggctggcgaccactctgcttcatttttgggagaaaacttctcacactatggcagccatccatgagagtttcaaaggttatcaaccat

SEQ ID NO: 564297 - DNA, 75 bp, Homo sapiens
gacaatgcttcccaggctcgagttgatgcccacaggtttggagagaagatggcttttatccctcagaacctgttt

SEQ ID NO: 564298 - DNA, 100 bp, Homo sapiens
ttctggtggggagatgaacccaacctagtgggtgtaatacatcatgaactgcagggagcaatttacagcaatgagggatttatacatgaaaaatggacaa

SEQ ID NO: 564299 - DNA, 75 bp, Homo sapiens
gtgggcagcattggcgaccagcgcttcacgtctggagggcagtatgagctttttgctgtgattgcgcacgtggga

SEQ ID NO: 564300 - DNA, 101 bp, Homo sapiens
atgctgtatgaatttattctggaaaggagaatgactttaactgatagcattgaacgctgcctgaaaaaaggcatttcagaagatggacacaaagaagaagg

SEQ ID NO: 564301 - DNA, 99 bp, Homo sapiens
aaatacaaatcacacgcataatggatgaaaggaaccgacagtatgaatctgatgaacaagaaaagagtgcctatcaagagtatgacagtgacagtgatg

SEQ ID NO: 564302 - DNA, 80 bp, Homo sapiens
gacttcccgtccgcggcgtggaggtcgtggcattcctggtggctttccatcagaacaagcagctcatcggtgacaggggg

SEQ ID NO: 564303 - DNA, 82 bp, Homo sapiens
ctccagtagacggtacagcgaaggcagagagttcagtacctggagtagaacagaaaaattattatgtctgtgttcccttggg

SEQ ID NO: 564304 - DNA, 89 bp, Homo sapiens
gcggtaacaccgttcacagagctagccggacgtcctccgactcaagaaattccatgagtgaaaccgtcagactggtcagtggaatgcag

SEQ ID NO: 564305 - DNA, 82 bp, Homo sapiens
acgggatccagagcgccgcgcacttcgtcatgttcttcgcgccctgacgttggacctctcgaacaaccagctgagcgagatc

SEQ ID NO: 564306 - DNA, 110 bp, Homo sapiens
cccgggagacctaaccgccgaatgcgttcggagcctcgaagcggaggatccctgtgtcccagccgggcatggccgacccccaccagcttttcgatgacacaagttcagcc

SEQ ID NO: 564307 - DNA, 74 bp, Homo sapiens
ccgaaaagcgtttccgcagacagaagtggggagaagcggaggctttacaggaagtatggtgctggcatctgctt

SEQ ID NO: 564308 - DNA, 82 bp, Homo sapiens
atggcgaagcacgagcagatcctggtcctcgatccgcccacagacctcaaattcaaaggtgacttaagagattaaaattaat

SEQ ID NO: 564309 - DNA, 74 bp, Homo sapiens
gtgcccgtggaccacaggccctcgttgcccagatgtaaaatgtcggttccaggaccttaccaggcggccactgg

SEQ ID NO: 564310 - DNA, 51 bp, Homo sapiens
cagaaccttagtcccgggaaagacctggaatggccaaatatcaaggtgaag

SEQ ID NO: 564311 - DNA, 101 bp, Homo sapiens
atattgtggctggagacatgagcaagaaaagcctctgggagcagaagggaggctccaagacctcatcaacaattaaggggtccagattttatggaaatgag

SEQ ID NO: 564312 - DNA, 100 bp, Homo sapiens
gaggagactctgtccttcatccgagacagcctggagaagagcgaccagctcactaagaacatgggcacagcccagcgcctgcagagcctgggaacggaga

SEQ ID NO: 564313 - DNA, 74 bp, Homo sapiens
aggtgctaatccagtggaaatcaggagaggtcctatcagcagtatcctggtgaataaatatggaagtcgtatag

SEQ ID NO: 564314 - DNA, 75 bp, Homo sapiens
aaactccaagtactgccgtttcaaccaggacccagaagcagtgtggtttattgacaatcatttacaatgccgaag

SEQ ID NO: 564315 - DNA, 90 bp, Homo sapiens
cgcggggccaggaagtcggagtttgagccccggaggcagagcggctgccatgactccgtgggaaggaggcttgtttaaactacggatgct

SEQ ID NO: 564316 - DNA, 100 bp, Homo sapiens
cagagaccatatagctgccctcagctgcactgtggcaaggcttttgcttccaaatacaagctgtataggtttgaggaactactggccaacctactaaatg

SEQ ID NO: 564317 - DNA, 95 bp, Homo sapiens
gacgcggcctcagtcctgcgcgggaatcccttggcaccatgtcctgtgtgcattataaattttcctctaaactcaactatgataccgtcaccttt

SEQ ID NO: 564318 - DNA, 100 bp, Homo sapiens
cgagataaaactctaaaaagaggctactttcagaagattgagtttgtgacgggcaccaaaaaaggcaccacgaccaacgccacgtccaccaccactacca

SEQ ID NO: 564319 - DNA, 74 bp, Homo sapiens
agaaaatgaagacaaggttaataaagctgccaaggaaatgagtggcttatactctcctgtcagtgaggatagca

SEQ ID NO: 564320 - DNA, 98 bp, Homo sapiens
ctcaccatcatcaagacggaaaaagtcgatctggagcttttcccctccccggaagcatcagatggtgaaggagaaggagacacagaagtgatgcagca

SEQ ID NO: 564321 - DNA, 80 bp, Homo sapiens
tgccagatttctgctgaagcgtggtttaagatcatccgtccttggctcaggatttggagagcttgcaccaccaaaaatgg

SEQ ID NO: 564322 - DNA, 80 bp, Homo sapiens
agaagtgcttaaggaagagtgatgaagattcatgatgttgctatcaaaagttgagaaattgtcagaagaaatcatggaga

SEQ ID NO: 564323 - DNA, 88 bp, Homo sapiens
aaaatcacgttataatcagattttgaccaagcattttgtaaggaaaaccagtagattcccagacatcgcgaagtgaatctgaaattgt

SEQ ID NO: 564324 - DNA, 100 bp, Homo sapiens
cgcgccgccgacgacccagcagccgccatggctctgctccgaggccaactacacagacccccagagcaaactgcggttcagcaccattgaagagttttcc

SEQ ID NO: 564325 - DNA, 89 bp, Homo sapiens
gaagccctggggtcctctattggagtgcagagtgccatcactggtgcaagctatatttaacggagatcctgatgaagttcgagcactaa

SEQ ID NO: 564326 - DNA, 100 bp, Homo sapiens
ccaagagggccgagagctgcttacccggccagagatcaccgtggtggagattctcttcaggggaagagtccacatcccacctcatcatgtcccgaagaag

SEQ ID NO: 564327 - DNA, 98 bp, Homo sapiens
atttatgaattagaggaacataaaattgaaacatggagggggagatatacttcccaattcatcagattataagtcctcactcatagcactgactgctc

SEQ ID NO: 564328 - DNA, 100 bp, Homo sapiens
tgctcatagcagccaccttcattccccaagggctcgctcagccagactaagaaaaatggctttgtcagcccaacagatacccagatggtttaactcagtt

SEQ ID NO: 564329 - DNA, 80 bp, Homo sapiens
gtgaggttgccggggccgtgcgcgctgggcccccagatgccgacggccctctctacctcccctacaagacgctggtctcc

SEQ ID NO: 564330 - DNA, 51 bp, Homo sapiens
cctgggccacccctcctttcaggtcaagggcagcgggtggcatgagacgtg

SEQ ID NO: 564331 - DNA, 84 bp, Homo sapiens
acccgctgcaaggagaagctgcacgacgtggacttctacaaggcccgcatggaggctgatcagctgaccgaagaacagattgct

SEQ ID NO: 564332 - DNA, 90 bp, Homo sapiens
tgtgcttaaggatccttccctctcaacctccaaggtagctgagactacagggaaatgatcttcattggttagcatgtgccttatatgtgg

SEQ ID NO: 564333 - DNA, 100 bp, Homo sapiens
cacgacggggcgcctctgcaactcacatgctttctcctgctcaagacagccacacgaacacggatctccccccagtgtcagagcagatcatgcagactct

SEQ ID NO: 564334 - DNA, 75 bp, Homo sapiens
cgggtggccccgcgctgcgcccgccctcgcctcacctggcgcaggttcttgattattacagacctctttctgaaa

SEQ ID NO: 564335 - DNA, 50 bp, Homo sapiens
ctcctcctccacaggggagacagagataacaacgaacttgatgcaagtga

SEQ ID NO: 564336 - DNA, 101 bp, Homo sapiens
ccagtacaggaaatgatccatttgccaatatataggcatctccgaagatttattttgtcagtgatatgaagcaacagcatgtcatagaaaccttgattggc

SEQ ID NO: 564337 - DNA, 100 bp, Homo sapiens
gccccagacctgtcggcgaaaggagatgtgaatacagctgtgatggagttgctcatcatggcttacgcactgaagactgcctgtgccaggaacattattg

SEQ ID NO: 564338 - DNA, 75 bp, Homo sapiens
tgaagaagcagttctacaaggcgagccaggtacaatggcttggtgaccggcacgagggctaagggcatcattgcc

SEQ ID NO: 564339 - DNA, 100 bp, Homo sapiens
gacccttcctgtcgctgacggcgactgcgggaggccagggtctcagtctgttgcccaggctggagtgcagtggcaagattgcagctcattgcagccttga

SEQ ID NO: 564340 - DNA, 100 bp, Homo sapiens
ggggaggcggcgggggctcggcggggttcctggagcctcccgccgcgctccctccgccgccgcgcaacggaggcaggtggaagtcatcataaagtttctg

SEQ ID NO: 564341 - DNA, 100 bp, Homo sapiens
ttcctgcggcgcgggcgcgatgcagctggcccggggtgaagaactcccccactggaaaggattctgaaagaaatgaagtcagccctcagaaatgaagttg

SEQ ID NO: 564342 - DNA, 83 bp, Homo sapiens
cccagccctgcgtgaggccgcggagcgccagctcaatgaagcttcaacggaccacaccaaaatgccatctcaaatggaacacg

SEQ ID NO: 564343 - DNA, 100 bp, Homo sapiens
ggatcgggtggagtgtaggtcatatcgccgcgacagctttattaaaccgcctggagcgaattttcgaagcatgttttccttccatacttgtccctgatgc

SEQ ID NO: 564344 - DNA, 75 bp, Homo sapiens
ctcgtgcggacgctcgtgcacagatacgcaaagcgaaggctggagctaggagaaagcggtcatcagtacctctca

SEQ ID NO: 564345 - DNA, 100 bp, Homo sapiens
ctgttggcttgcgagacaaatatgcagatagcagtggggtcggaaagggtgacctgcagtccacgttgctggaagggcatggcacagctccacctgacct

SEQ ID NO: 564346 - DNA, 75 bp, Homo sapiens
ccgcttctcagcaacctcgatgaaggaaagaccacagcaagattctttcattcgtctcctcctagcctgggggac

SEQ ID NO: 564347 - DNA, 51 bp, Homo sapiens
caagaggccttgaaacgtcccatcaagaatctacctgttactcgtattttg

SEQ ID NO: 564348 - DNA, 100 bp, Homo sapiens
aggagcaagagcaagatcaccgtgacatccgaggtgcctttctccaaaaggtatgtgaaagcaagaacagagctaacatgggattatggctatgaagctg

SEQ ID NO: 564349 - DNA, 73 bp, Homo sapiens
gcgcctagacctggtcgagtcccgagttcaggttgaaggtcgaggagctggaaggcgagcggagtcggctgga

SEQ ID NO: 564350 - DNA, 82 bp, Homo sapiens
ggccccgctcccgggttcctctgaggattggaattctagggactggtgattgcagctggaagtgcccatgaccgagctggcg

SEQ ID NO: 564351 - DNA, 83 bp, Homo sapiens
cttgcaagaaagcagccccagagacaatgcagatcttcgtgaagactctgactggtaagaccatcaccctcgaggttgagccc

SEQ ID NO: 564352 - DNA, 83 bp, Homo sapiens
ggatctggcagtcggtcatccacctgctgcagatggggcaggtgtggagggcatagtggggaacctgtctagcgggaagtcag

SEQ ID NO: 564353 - DNA, 100 bp, Homo sapiens
cgtcacactacgacagtgagaaaggaggtacatgtgctccctgtcattgttccactattctgaatacttggtgacagcagtcaataatcccaaaagtctg

SEQ ID NO: 564354 - DNA, 80 bp, Homo sapiens
cccacctgcccggtgcccgaggaggcagccaagctcgtggcctgcctctgcgtgcgtgacgcggcgcacggcgcggatgg

SEQ ID NO: 564355 - DNA, 100 bp, Homo sapiens
acaccgcgccctgccgagcgggggcccccagtgcggcttttcaccgaggaggagctggcccgctatggcggggaggaggagacatggtctcaaagtaccg

SEQ ID NO: 564356 - DNA, 101 bp, Homo sapiens
agaaacagcgtggtttgcttttaaggttgcagcaagaaaaggctccgagctctgtccagtggtgggagtattacatcccctcctctttctccagcattgcc

SEQ ID NO: 564357 - DNA, 100 bp, Homo sapiens
gctttcacaattgcagcagatgaagatccattggtaaattgatcaggatttttggcctaccctccaaagaaaagacaaatttacatgtattggagaccag

SEQ ID NO: 564358 - DNA, 88 bp, Homo sapiens
tgtgccctagcaccccgagaaccgtcagtttgagccagatggtgcagtagacattgttgcaatcatgatcggcaatctgaaaggcaca

SEQ ID NO: 564359 - DNA, 50 bp, Homo sapiens
cctccgccagatccacgccaaccacgagcgggctgacgcacgaggcacac

SEQ ID NO: 564360 - DNA, 75 bp, Homo sapiens
gaaaaggcattgaggaactcaatcaaaccagtattcttttcacacagatttcagatcagaaccacagctacccaa

SEQ ID NO: 564361 - DNA, 98 bp, Homo sapiens
aagaatggcccttgtggataagcacaaagtcaagagacagcgattggacagaatttgtgaaggtgaatgaaaactttgccattgatttgatagcagag

SEQ ID NO: 564362 - DNA, 74 bp, Homo sapiens
gtctccattatttgagatgagttacatcttggagcatctacttgtttccaaagttatttgggtcagcattttcc

SEQ ID NO: 564363 - DNA, 75 bp, Homo sapiens
agcgcgtcgacctttaccagcaggcctccgcccccgccgcggaccctccgcggtacacctttgcacccagcgtct

SEQ ID NO: 564364 - DNA, 82 bp, Homo sapiens
tctaccccgccgcagcggctgggacgtacggagcccgcaagtcccggcccgaggagcaggccgggctctcgccatgggtcac

SEQ ID NO: 564365 - DNA, 100 bp, Homo sapiens
cggcgttcttccgctggctcagccgcaagtacccgtccatcatagtcaactgcgtggaagagaagatgcattgctgtttgctcccttggggtctggatat

SEQ ID NO: 564366 - DNA, 74 bp, Homo sapiens
tgcctaagtaccgatgcagcagccccacagaccatggtcatgccagatacactctgtgcagttttagagagaga

SEQ ID NO: 564367 - DNA, 83 bp, Homo sapiens
cgggtggcggctcgggacggaggacgcgctagtagctgacatcgcgctgatcggattggccgtcatgggccagaacttaattc

SEQ ID NO: 564368 - DNA, 100 bp, Homo sapiens
ctgacaaaggatttgacaaagccacttttgaaagtcagatgtctgtgatgaggggtcaggagatcatgaatcagacagataaaaatcaacaagaaatccc

SEQ ID NO: 564369 - DNA, 75 bp, Homo sapiens
ccagagactggcaggcctcggcctaaaggtctgggaggggctgaacgtggtgaagacaggccgagtgatgcttgg

SEQ ID NO: 564370 - DNA, 100 bp, Homo sapiens
cagccaagctcgtagcctgccactccgtgcattgtctccagctttaagaccacgacatcgagagctgcctgccagctcgtgaaggagtacatcggccacc

SEQ ID NO: 564371 - DNA, 98 bp, Homo sapiens
caagacttgattaaagtaattgaggattttccagcaaagaaacgttcagtgcctgtagccactgtagaactggaagaaaagaggttcagaactctgcc

SEQ ID NO: 564372 - DNA, 75 bp, Homo sapiens
atcggcccaaggccagttctccgcaggagagattaaacagattctagaaaatgaacttcagatacctgtgtccaa

SEQ ID NO: 564373 - DNA, 83 bp, Homo sapiens
ccggtgaccacttttggaccaaaggcctgtgtgctgcagaacccccagaccatcatggctcttccgtgggcggcggcttcgcg

SEQ ID NO: 564374 - DNA, 75 bp, Homo sapiens
ccccaactctacttccctctgctccttcccagtctgcatgaagaaatcagtgatttttatgaatacatgtctcca

SEQ ID NO: 564375 - DNA, 90 bp, Homo sapiens
tgagccagaagaaagagttggtggtccagatagcaggccgccatggcatcagatgaaggcaaactttttgttggagggctgagttttgac

SEQ ID NO: 564376 - DNA, 100 bp, Homo sapiens
cgggacccaaatgtcaaactaccaaatgggcgagacacacctgcactcttcaacttcaccactcaagcttctagaattcctctccagagctactctcaag

SEQ ID NO: 564377 - DNA, 101 bp, Homo sapiens
aaaagttcatctccttctgcatccttaactgagaatgaggacactgcccatctctaagataagaacctggaaaggggactctgttggccattggaaattgc

SEQ ID NO: 564378 - DNA, 98 bp, Homo sapiens
ttattgttattttcccaatttttgctatactcctgttctggggacagtttggtattaaaagtattatagctgcaaatgtccttgtattctgtttatgg

SEQ ID NO: 564379 - DNA, 50 bp, Homo sapiens
caggaatgcccggtgctgacggacccccgtgcctccatatctgggacctg

SEQ ID NO: 564380 - DNA, 90 bp, Homo sapiens
accagctgctggacatgtcctaatatacgagaacgccatgattgctgctggacttgttgacgaccctagggccatggtgggccgcttgaa

SEQ ID NO: 564381 - DNA, 100 bp, Homo sapiens
tcctactggacaagaatatgctgccaaaattatcaacaccaaaaagctttctgctaggggtattgcagttggacacatatattttttcttggaagatgta

SEQ ID NO: 564382 - DNA, 97 bp, Homo sapiens
agagccgcctttccagcatgcaggggctgctcagatgccttcaattaagttgcagagttctgatggagagatatttgaagttgatgtggaaattgcc

SEQ ID NO: 564383 - DNA, 83 bp, Homo sapiens
agcagttcctaccggagttacaaaagtcacagcaattctgtggtgttcttggtcacacatttatggagtttctgaagggcagt

SEQ ID NO: 564384 - DNA, 100 bp, Homo sapiens
tttccagaaaatccaagtccggctagtacgcgaattggagaaaaagttcagtgggaagcatgtcgtctttatcgctcagctctggattaatcgaattaca

SEQ ID NO: 564385 - DNA, 75 bp, Homo sapiens
cccacgtctgtctggtgataccaggggcagagggaccactctgacagtactaaggctcgtacgtctgcatcgatt

SEQ ID NO: 564386 - DNA, 74 bp, Homo sapiens
ccgaagcctaaattccaggaggcaggagcgagaacccgagcagcgccatgagcaacactaccgtcgtccccagc

SEQ ID NO: 564387 - DNA, 75 bp, Homo sapiens
caaacaggacctgcctaattaccttcaaacctgactaccaaaaggaagcgtggctacattaaaaataagctggtt

SEQ ID NO: 564388 - DNA, 90 bp, Homo sapiens
gtactctatatgaacaatccgtctggatcacggatgtaggaagtggtccaacgagcgctcctccaagcggagccttggagggcacggccg

SEQ ID NO: 564389 - DNA, 101 bp, Homo sapiens
tcaccttctatgcaggccccaatggcagccagtttggattttcactggacttccacaaggacagccatgggaggtgctggagaatctggtaaaagcaccat

SEQ ID NO: 564390 - DNA, 75 bp, Homo sapiens
gggccccgcggccctcgatgaggaattacatgaacgacagccttcgcaccgacgtcttcgtgcggttccagccag

SEQ ID NO: 564391 - DNA, 82 bp, Homo sapiens
agaccctggagcctcagttggaagcagccgatccagcctgcggagcctgtggggcagtgtcttctcagaaacaaccagctga

SEQ ID NO: 564392 - DNA, 82 bp, Homo sapiens
aatcacacctgagccagcagtcagtaatacagaagttgttgaaatggatgaaaacaacggacttttgcttttagaactgaat

SEQ ID NO: 564393 - DNA, 83 bp, Homo sapiens
ccgcgtccgaggctcgcgggcggcgggcccggccagagactgctgctactttgaaacgtacgatagaggccctgatggacaga

SEQ ID NO: 564394 - DNA, 100 bp, Homo sapiens
gatgggatctttccggatcaatccagatggcagccagtcagtggtggaggaactccttgcctttgccgattggaagcattaacaatttcatcctttctac

SEQ ID NO: 564395 - DNA, 100 bp, Homo sapiens
caactccgcaaacgaaaaagaacgacatgatgcaatcttcaggaaagtaagaggtgagaaagatcagtctaaagaaaaggagaagaaagtgaaaaaaaca

SEQ ID NO: 564396 - DNA, 75 bp, Homo sapiens
atgatgatgtctcatatgtctcaggcttccatgcagcctgccttaccggaccgtgtttcttcgcctcgcctccct

SEQ ID NO: 564397 - DNA, 75 bp, Homo sapiens
cccgcttcaaccccaggggaccagaggaactcagccctgattgcgacaatgcagatcttcgtgaagactctgact

SEQ ID NO: 564398 - DNA, 96 bp, Homo sapiens
gcgtagtgagcaacctgctctattaccagaccaactacctggtggtggctgccatgatgatttccattgtgggaaactggcagacctttcacttcg

SEQ ID NO: 564399 - DNA, 75 bp, Homo sapiens
cgttgcctgctcccggagggagacgcgctgccgaggagaacccagcgggccagctgcgggccgtccagcggctgt

SEQ ID NO: 564400 - DNA, 74 bp, Homo sapiens
gcatcctgcagtattgccaagaaggtcctgaggacaccgtgagccagccaggcctggccgctgggcctgaccgg

SEQ ID NO: 564401 - DNA, 97 bp, Homo sapiens
ggagcggcacctggaagatgcgcccattggctggtggtctagcacataccgctccaagggctttgacgtcacagtgaagtacacacaaggaagctgg

SEQ ID NO: 564402 - DNA, 100 bp, Homo sapiens
ttataatttcgtacagcaacttgcggagagatttgtgaggtccagaggtgtccttctaaagctggtagaggtttcacgagtcatcagggacccagaaccc

SEQ ID NO: 564403 - DNA, 100 bp, Homo sapiens
tcttaacccagaagtagctgaatgtgttactccattgctgaggagtgccaagaaggatcaagaaggtggagaagaaaagaaatctgtgcaaaagaaaaaa

SEQ ID NO: 564404 - DNA, 100 bp, Homo sapiens
gagaatggttaacagaactttttcaacaaagcaaggtcaatatgcagaaaatgctcccagtgccctatagaatggttccattatggctgcgttggattga

SEQ ID NO: 564405 - DNA, 50 bp, Homo sapiens
aacccatagaactcgtggaaactggtggtatgcaagattacaattatgtg

SEQ ID NO: 564406 - DNA, 100 bp, Homo sapiens
ccaccatcaacatggagaacaagaccacgtggaccatcatggagcagttcaaccctagcctccggaacttcatcgccatggggaagaattacgagaaggc

SEQ ID NO: 564407 - DNA, 82 bp, Homo sapiens
agaaagttttttggagacaagtgtacaagggagaagaagccacattccaaatctcaggcctccagaccaacacagactacag

SEQ ID NO: 564408 - DNA, 82 bp, Homo sapiens
cgctgagtggtttttcggatcatgtctggtggctccgcggattataacagaaatgcactcggtgatggaaagagagccacta

SEQ ID NO: 564409 - DNA, 50 bp, Homo sapiens
gcactttggtgataaagcaggtgacttatcagatgccctggtcatcttcc

SEQ ID NO: 564410 - DNA, 96 bp, Homo sapiens
gacaagcgggcagaaggctggtgacaaggctcctggcgacctccctgctgcagggggccctcccagcggggccatgcccttctacaaccctgctca

SEQ ID NO: 564411 - DNA, 50 bp, Homo sapiens
ctgggcgccggcgcttacagcatgaggtggtgagatctgctgaggaagcg

SEQ ID NO: 564412 - DNA, 51 bp, Homo sapiens
tccgggcaccaggagcatatcaaggaatacagtgagtaacctgatcatgat

SEQ ID NO: 564413 - DNA, 104 bp, Homo sapiens
ataacgaagaccaggaggcagacggggaagaggacgaaggaaccagctcttctgtccagagagcagtaatctgtaagtcagatgctccaacaggggatgttctt

SEQ ID NO: 564414 - DNA, 100 bp, Homo sapiens
cagatgtctgacagccctgtgtgacaccaagataagtaacagcctggctagccgtctcaaggaaaacatggagaagctgactgaggagcgggatcagcgc

SEQ ID NO: 564415 - DNA, 75 bp, Homo sapiens
tgaaccacatgcccagcacgggcgaggattaaatccaccacacagggtgaaatctatctccatgacaacattcac

SEQ ID NO: 564416 - DNA, 100 bp, Homo sapiens
cagctacatgccttaccaagcttgtatcacgcacaaacaaccccctaccattggaacagcgaatagatattcgcattcaaaagtgcggcagaagagtgag

SEQ ID NO: 564417 - DNA, 96 bp, Homo sapiens
tggtcgcgcctctcgctcctggctccgaagacaactttgccaggtctgagaaagaaccccagtttaagtttatctacttcaaccacatgaatctcg

SEQ ID NO: 564418 - DNA, 95 bp, Homo sapiens
cagctaccgctcatcgggtgcgtgctcctcctcattgccctggtggtttcgctcatcatcctctctgcattcatccgggtcgtgggctcggagtt

SEQ ID NO: 564419 - DNA, 75 bp, Homo sapiens
aactagagcaaataaccgttttgaaattgttctgggaacactttttatttatgtcttatttatggttgaggaatt

SEQ ID NO: 564420 - DNA, 75 bp, Homo sapiens
aggctgcatcaggatgaatgatgacccaagtatggaaatcgaaagctgctttgcgtcgcagttggagcagcaccc

SEQ ID NO: 564421 - DNA, 90 bp, Homo sapiens
ctccgctgaggtggacgtgtacaacccgacgaggaacgaatgggacaagatcccgtccatgaatcagaacggcatcatcactggcgtgta

SEQ ID NO: 564422 - DNA, 84 bp, Homo sapiens
tgtagcgaggaggaacgcgctaaggcaaagcacctggtatctcagatgaagacatcatcaacattactcttcctactggagtcc

SEQ ID NO: 564423 - DNA, 82 bp, Homo sapiens
ccggcgtgttcatgcccccggggtggacgcggatctgtcaacatgggtaaaggagaccccaacaagccgcggggcaaaatgt

SEQ ID NO: 564424 - DNA, 83 bp, Homo sapiens
cggactcctgatggcatgcctgtaaagaacttgcagttgaaggagtataacacaggatgtaatccctgttcattactacttaa

SEQ ID NO: 564425 - DNA, 75 bp, Homo sapiens
ccgtacaggtagccccgccgccgcgcacctgccttcgctcccgcaccgtttttcagttatgggacaaaaatatta

SEQ ID NO: 564426 - DNA, 75 bp, Homo sapiens
tccccagaggagctcaaaatggagttgccggagagacagcccaggagcgagaacccgagcagcgccatgagcaac

SEQ ID NO: 564427 - DNA, 100 bp, Homo sapiens
ggtgaatatggccgtgatcgtgcccaaagaggagggcgtcatcagcgtctccgaggacagataaccgtctcctcaggaggaatgttggttcagaaactga

SEQ ID NO: 564428 - DNA, 97 bp, Homo sapiens
tgtgactgccacccctccccccacccgggctcggcgggggagcgactcatggagctgccgtaagtttcatgatcaacatgggagactcccacgtgga

SEQ ID NO: 564429 - DNA, 100 bp, Homo sapiens
tatttttccagggatataacagtccactttggaaagaagatttctcagatacaaagggttctgctggaattggaaatgaaaaatattcaggatgttcttg

SEQ ID NO: 564430 - DNA, 100 bp, Homo sapiens
cagagcaaggtcgtgcggtgtgtgtagaagactcagggtttgggcactgctctgaagatcttattttctgagaaattgatagcaaatatgccagaaagtg

SEQ ID NO: 564431 - DNA, 100 bp, Homo sapiens
gaagtgactggccacgcccacgtgctcttggctgcctttgaaaagattgatgtggacatcttcgagccccaggggatcagcaagctggatgcccaggcct

SEQ ID NO: 564432 - DNA, 88 bp, Homo sapiens
tccccttgtgacaagtggggatgagatacaaggtctcgctgttctacctaggctgttctagaactcctaatgtcaagctatcctcctg

SEQ ID NO: 564433 - DNA, 100 bp, Homo sapiens
agtgctaaaagtcttcgagggagagattctacccgcaaacaggatgcttcagagaagggtgaacgtgggctgcgggccagccgaggagcgggtgctgctg

SEQ ID NO: 564434 - DNA, 51 bp, Homo sapiens
ccgcccgcgccctccgccggccctcagcaaaagctggcaggctgacagagg

SEQ ID NO: 564435 - DNA, 97 bp, Homo sapiens
gagcctatgaggagacatgaaatggtagccaaacccccagatcactgtgtccactactatgatcttcgtaacactaaacagccaatcatggtattca

SEQ ID NO: 564436 - DNA, 75 bp, Homo sapiens
tgttaggcctgttacattaaatatgaacgtggctatgccttcatggttgcagatatcaagaaagtcaacaacttc

SEQ ID NO: 564437 - DNA, 100 bp, Homo sapiens
gcaggccttaaggagaaagtttcagggcatccgcttcgatcctgaaattccgcaaacactacgactagagtttgctaaggcaaacacgaagatggccaag

SEQ ID NO: 564438 - DNA, 98 bp, Homo sapiens
tcactgttctcagagatgtcagcctggtggtgtttgcagctccccaaactgagaggaacattcctttcacacatctggacaacatcctcaagagtgga

SEQ ID NO: 564439 - DNA, 90 bp, Homo sapiens
cgtgcgcggagccgtctgcctgcatctgctgctgaccctcgtgccacccacacagaatatgcctatgggtcctggagggatgaatcagag

SEQ ID NO: 564440 - DNA, 75 bp, Homo sapiens
ggtggtggcgtgggcgacattctccgcaagccctccaaagatgaggagctcaagcacttcgaagccaaaatcgag

SEQ ID NO: 564441 - DNA, 83 bp, Homo sapiens
tagctgcccaggaagtgctgaagctgaccatgccactgcctcggtacggctccgggcagcagccactgatcctgccccagtct

SEQ ID NO: 564442 - DNA, 83 bp, Homo sapiens
caacagcttcatatggacagatggacttcaaatgctgtttgtattccagagactagtatttaggtcagttaacgtccatacca

SEQ ID NO: 564443 - DNA, 75 bp, Homo sapiens
atgagctctacattgcaacagttttcaaaagttatagatgaggatctcaaagatttcatgagacaagctggggaa

SEQ ID NO: 564444 - DNA, 100 bp, Homo sapiens
gactggaaactgattggaaactctttgggaaagccactcgaaaaggttttgcacactagggaccaagaagccctcggggacactgctgagaaaagactgc

SEQ ID NO: 564445 - DNA, 100 bp, Homo sapiens
ctgccctcctgggtgctggacgacctgtgccgcaacatggacgcgctcagcgagtgggactggatggagttcgggcctgcttccgcgaggccaacatccc

SEQ ID NO: 564446 - DNA, 100 bp, Homo sapiens
tgccaccaaagacctgcgactttgctcagtaagcccagaggtctccaccccacgggaggaaggctgaggccaagaccccggaagagatggaccgcgtgac

SEQ ID NO: 564447 - DNA, 96 bp, Homo sapiens
cctcacggcaacgggctgctctacgccggcttcaaccaggaccacggtgtcagttgtacccgaggcgttctcagcagcagcaagtacctgtggtgg

SEQ ID NO: 564448 - DNA, 101 bp, Homo sapiens
cccaaacccataaaataacaaaaccaacccgcagtggccgaccggagatagctaagatgccgcgcaggagaaccacatgccctgggaagaaccagcaggtg

SEQ ID NO: 564449 - DNA, 100 bp, Homo sapiens
gtgatccagcaaggtcggcagagcaaggggcttacgcagaaggacctggccacgatacgcaggcttctggagaccctgggtggacgccggaggcaagaaa

SEQ ID NO: 564450 - DNA, 75 bp, Homo sapiens
acagagcctatttacccagaagtagtccatatggtgttggggatgtcctttgcactgaccctgaactgccagatt

SEQ ID NO: 564451 - DNA, 75 bp, Homo sapiens
gaggaacagaagcggaacagccacagcagcctcccaaggagtctgcaagttgatacgtgcttttcaacatgcctt

SEQ ID NO: 564452 - DNA, 50 bp, Homo sapiens
tagcagagtacgatactcaggtcaaagctgtcacaagatgaaggtagagg

SEQ ID NO: 564453 - DNA, 90 bp, Homo sapiens
cgcggagggagccgcgggatggaccgcagccctgttcgtcttctgtaccaagagccgacgtgctgagcgttactggcagaagacgctgct

SEQ ID NO: 564454 - DNA, 113 bp, Homo sapiens
gaaccaggccgtgtgccatgactacgacatccacttctaccccaccttccgggtgagaagccctaccactgcaactgggacggctgcggctggaagtttgcgcgctcagacga

SEQ ID NO: 564455 - DNA, 98 bp, Homo sapiens
cctgtgtggtggactgtggcacgggtgtttgccagctctgagcctgtgccaggattccagggggataccctgcagctagcattcattgacctcagaca

SEQ ID NO: 564456 - DNA, 51 bp, Homo sapiens
ggctggcggtgcctggacgtacaatgaatatatcttggacctactggaaag

SEQ ID NO: 564457 - DNA, 74 bp, Homo sapiens
gcgagaatctcctcagctggctgagctatgttaccagggagagcccactgctaaaaaaggcctagtcaaatcct

SEQ ID NO: 564458 - DNA, 50 bp, Homo sapiens
gaagagggcacgatctgtagaacgggtcatgtttactggtgaaaatattc

SEQ ID NO: 564459 - DNA, 90 bp, Homo sapiens
ggaagaggaaaccatcgtatgtaacactgtccagaatgggaggctgtggagcactttctggaggccctgaacatgcagaggaaaagccgg

SEQ ID NO: 564460 - DNA, 82 bp, Homo sapiens
cgcgagggcacactagcactttcctacaatgcagatcttcgtgaagactctgactggtaagaccatcaccctcgaggttgag

SEQ ID NO: 564461 - DNA, 100 bp, Homo sapiens
cttaatgaagaacaaagaaaacagttacaggacatagcaactctggctgatcaaagaagagcagcccatggttcctgcttggctcgagtttgagtttaca

SEQ ID NO: 564462 - DNA, 82 bp, Homo sapiens
caaaggaaagatggatccagacaagaattatgatctagcccttaagtatttccagaaagctgctgaacaaggctgggtggat

SEQ ID NO: 564463 - DNA, 100 bp, Homo sapiens
ggagaaaagctctacactggactaagagaagttgttaccgaacatctcataaataaggttcatctgcagaagccagcggacgcctctgttcaacttgtgg

SEQ ID NO: 564464 - DNA, 88 bp, Homo sapiens
ctgggagtgggaggatgcgcaggggttttctgcacttctacactcagttgagtcagcagatactggagttatttgaaacatgtcagca

SEQ ID NO: 564465 - DNA, 88 bp, Homo sapiens
tttgaacatggtgcggactaaagcagacagtgttccaggcacttacagaaaaggtgctggagaatctggtaaaagcaccattgtgaag

SEQ ID NO: 564466 - DNA, 75 bp, Homo sapiens
ttcacgttcatgggcgagggaacagatgagaaacccggcaatgaaagtcagcaatctgaagatggtcttacggag

SEQ ID NO: 564467 - DNA, 125 bp, Homo sapiens
ctcgctccgtggccttagctgtgctcgcgctactctctctttctggcctggaggctatccagccccagccctggggagcccctgtggaagtggagtccttcctggtccaccccggtgacctgctg

SEQ ID NO: 564468 - DNA, 100 bp, Homo sapiens
gccaaatgtttgtccactgagctgatctcctctctggagcaccggggccaccaggagggaggcatagaatgtcaagctaaccaggcgtccgctacttcag

SEQ ID NO: 564469 - DNA, 74 bp, Homo sapiens
ccgtgcagcggggcatcatcaagatggttactcactataaacaatatccacccaacacaagcaaagtttattcc

SEQ ID NO: 564470 - DNA, 78 bp, Homo sapiens
agcggtctgcgcgccgggagcgggggcgcgctggccgcgggtgtggaaacaggaagagaactagaactggaagtaaag

SEQ ID NO: 564471 - DNA, 101 bp, Homo sapiens
tttttggcaccatatactactttttccagaattcatacaaagagtgaggacatgaaccttaacgaagagaaaaaagctcctttacgaaacaaagactttac

SEQ ID NO: 564472 - DNA, 100 bp, Homo sapiens
ctcattaccgtcgccagcggagcgaacccgagagcgtggagcgggctgggccaggcttctcgtcagtgcctcgcaggatggtaaacttatcatctgggac

SEQ ID NO: 564473 - DNA, 82 bp, Homo sapiens
tggacaaccaacggctcaagaatttcaagaacaaaggccgcgacttggagggcagctttggaagaagtagaaggtgatgtgg

SEQ ID NO: 564474 - DNA, 90 bp, Homo sapiens
gccgtcgcatcgttcctggccagttcttagctgtggatcccaaagggcgagccgttatgattagtcagatgtaccaacagtaccagcaac

SEQ ID NO: 564475 - DNA, 100 bp, Homo sapiens
tgaagctgtttcgggccagcgacccgctgctcagcgtcctcatgtggggggtaaaccactcgctggaagaagaaagatctgtgctcaataatcagttgtt

SEQ ID NO: 564476 - DNA, 100 bp, Homo sapiens
tcctgagtagctggtattacagtggtagtcgctcttctaaaacttttaaaccaaagaagaacattccagagggttctcaccagtatgagctcttaaaaca

SEQ ID NO: 564477 - DNA, 50 bp, Homo sapiens
cgatcgtggactatctgggcttccatcagtgaaggagaacgacctgctca

SEQ ID NO: 564478 - DNA, 90 bp, Homo sapiens
gaagcggaaaccagtggccacagcatctttgtctagccccagtgcagatgagctgagctggacaactaaaagcacctgtagcagttctcc

SEQ ID NO: 564479 - DNA, 75 bp, Homo sapiens
tgtccttctgctattgatcctgaaggtttctgagtcccttcaacatgatcctgggaggaatcgtggtggtgctgg

SEQ ID NO: 564480 - DNA, 95 bp, Homo sapiens
ctggttagtgtgctctgagggagggtccgagccagccgctgttttgccggaggagcccctcaggccgtgaaaccagcccagagaagttacgggat

SEQ ID NO: 564481 - DNA, 82 bp, Homo sapiens
tgctggcggcgctcctcagcctccgtcttggctcagacgctcatgcagcccctgtcaaagggaacaggaagcagtccacgga

SEQ ID NO: 564482 - DNA, 83 bp, Homo sapiens
aattcagaaggagctggcggacatcactttagaccctccacctaattgcagggaagtggtggaatacatggtccagcatttca

SEQ ID NO: 564483 - DNA, 100 bp, Homo sapiens
ggaagtcaactcccaggtctacagccggctcacagcacgaggtctatcatttggcaagtgtacgcttacgtgatctatgtctaaaactggatgtttcaaa

SEQ ID NO: 564484 - DNA, 83 bp, Homo sapiens
ccagtggtaaatgtcagctacaggccagcttatgaccaggcactgccgccctgcactgtagcagatgcctaaataaagtgtgg

SEQ ID NO: 564485 - DNA, 80 bp, Homo sapiens
cctggcactacttgtccaagacgtactggtggcgaggtaactaggatttctacctcaaccgcgagacctatgcaaggacg

SEQ ID NO: 564486 - DNA, 90 bp, Homo sapiens
ggatttgttaaggattccaagtaactcttatttgcccagctccatgaccttctccagctgaggcaggagaatgcctacctgaccaccatc

SEQ ID NO: 564487 - DNA, 75 bp, Homo sapiens
agaaaaagaaggtgacaggcgttgagaccaccgaagggaacccatggctaggaagaagaggaaaggctatgaaga

SEQ ID NO: 564488 - DNA, 101 bp, Homo sapiens
agcaccttggcgaagccttgggtttctttcttaaaggactgatttttagaactccacatttgaggccgaggacgatgatcccgccgggggagtgcacgtac

SEQ ID NO: 564489 - DNA, 100 bp, Homo sapiens
cgtcctttcgctatgaagagagcgacctggagcggggatacacggtggtatggtcaggaaaaagactacaatgtactagtcatggatcttctgggaccta

SEQ ID NO: 564490 - DNA, 50 bp, Homo sapiens
tacctacgttggcggccccagaaggtcgtcccattccacctacatcctcg

SEQ ID NO: 564491 - DNA, 130 bp, Homo sapiens
ccgtggcctccgtgggacatggagtgttccttccgctagtgatcctttgcaccctgcttggagacggacttgcttccgatgccttcaattaagttgcagagttctgatggagagatatttgaagttgatg

SEQ ID NO: 564492 - DNA, 90 bp, Homo sapiens
gtcagcatgagcaaaaactccaaactcctctccaccagcgccaagagtttctccttggaccaagatgactgatggaaaactctccacctc

SEQ ID NO: 564493 - DNA, 52 bp, Homo sapiens
ctcgcgcggggcagccaagagacgagacccaacatgagtgaagtttcctgca

SEQ ID NO: 564494 - DNA, 50 bp, Homo sapiens
cgggacaccgcggaagccgggaaatgtccacaggtcctggctaccctggg

SEQ ID NO: 564495 - DNA, 113 bp, Homo sapiens
cagccgcagaggatggcgcctgtgggcacagacaaggagctcagtgacctcctggacttcagcatggggaacgcccttttgcttgtgactggcagggctgcgacaagaagttc

SEQ ID NO: 564496 - DNA, 101 bp, Homo sapiens
ccctgcgccatgtggatgccagcttcttcttggggaaggtgtgtttcctcgccacaggtggaaattcagttcatgaagataagaagtttcttgacaaatac

SEQ ID NO: 564497 - DNA, 100 bp, Homo sapiens
tacagacctcaagcctgaaaatattctgtttgtgaattcagactatgagctcacctacaacctagagaagacggtgccgggctgaccccccatcatgcca

SEQ ID NO: 564498 - DNA, 83 bp, Homo sapiens
catgccatggtgatcctgctgacgctgggcccgcctcgagtaagactttgaccccgacgcaggcttcagtgattgccgcggat

SEQ ID NO: 564499 - DNA, 98 bp, Homo sapiens
ggagctgcggcagaagtacaatgtccgctccatgcccatccgcaaggacgacgaggtccagctccagagaaagagacacattggaaatgacatcgtgg

SEQ ID NO: 564500 - DNA, 98 bp, Homo sapiens
ccgcgctcagcgacaaacaaaataattgaacccctgacctctagatgttcaaaattccgcttcaagcctctgtcagataaaattcaacagcagcgatt

SEQ ID NO: 564501 - DNA, 96 bp, Homo sapiens
gagttcgggggatggcacagaatggggtcccgaggaggtagaaatcaagtgccccttgaatcacattgcttgccttggtaccaacaaatgtgttca

SEQ ID NO: 564502 - DNA, 99 bp, Homo sapiens
gtcctgggcccagagccgagatgagcagaacctgctgcagcagaagagacaatgagttacaaggcactaatagttctggatccttgggtggtcttgatg

SEQ ID NO: 564503 - DNA, 100 bp, Homo sapiens
ccagcctgcggagcctgtggggcaggatccacctcagaaaaagatggaatgcaccatactgtcaccaagcacagaggtataattacactctacaggcacc

SEQ ID NO: 564504 - DNA, 100 bp, Homo sapiens
tcccgcggcctcagccctgggcgctggggctcctgctctttctccttcctgggagcctgggcgcagagaatggcatcatttcctggtggtcaacatgaag

SEQ ID NO: 564505 - DNA, 100 bp, Homo sapiens
tcactccctccccgcggggcgcgcagctcgcgggtctttggacaccaccggtcctgagtccgcgagtatgcggttgaaattgattgcaaataatacaaca

SEQ ID NO: 564506 - DNA, 100 bp, Homo sapiens
gcgagaatggcagtggggcaccctatggggtgagcccctccagactccgaataggagatcaagagtttgattcattgcctgctttactggaattctacaa

SEQ ID NO: 564507 - DNA, 119 bp, Homo sapiens
agccatggactctaccaagtctgaacccctgaagggatcaccagaggctcacagaacatttcctgcctgttgctcacactctgttgtccacagcatacccgcaccctagatggctgact

SEQ ID NO: 564508 - DNA, 90 bp, Homo sapiens
ccaccctgggcacagcaggcatcggagtctgtagatggacggcagatccgagtagaccaggcaggcaagtcgtcagacaaccgatcccgt

SEQ ID NO: 564509 - DNA, 100 bp, Homo sapiens
tcagactgaagattggggccagttcatgcacatctgtgacataattaacactacccaggatgggtctcagcatcagaggagcccaggaggaggaccctcc

SEQ ID NO: 564510 - DNA, 101 bp, Homo sapiens
ggaggaaggaacgaggcaaggagctaaagcagcgtgcgttcagccctggggactcctccgtcttgctcatgactgggtcccctgggcagagccaggtcctg

SEQ ID NO: 564511 - DNA, 100 bp, Homo sapiens
caggaggaaggaaattgaacccataagaatggagtgggatacagaaggcaacgccaaaccaaacaggaagcttacttttctctacctagccaatgatgtc

SEQ ID NO: 564512 - DNA, 74 bp, Homo sapiens
cagttacttcatcgtctccatcctctacctcaagtatgagccagtcatctgcaagcagcagaccccggagctgg

SEQ ID NO: 564513 - DNA, 100 bp, Homo sapiens
ctgagtatcccatctatgaggagaccaaaataaaactaacagtctatgatgtcaaggataagtctcatgacaccaaatgcactcggtgatggaaagagag

SEQ ID NO: 564514 - DNA, 101 bp, Homo sapiens
cctcaatttgctggatttaagcactgctgcactttatgaggccgaatacatcaagcaatggtaacatctttaaatgaagataatgaaagtgtaactgttga

SEQ ID NO: 564515 - DNA, 101 bp, Homo sapiens
aggaaagcaggaggaggtggcggcggcgggaagatgctgtcctggaggaccacagtcagatgaggcagatggagctcgaaatcagacctttgttcctcgta

SEQ ID NO: 564516 - DNA, 75 bp, Homo sapiens
ctgaaggtgaaacagattgagccagaaggaagacaatgctggacagtcattttgtttactcattcagccctgttg

SEQ ID NO: 564517 - DNA, 100 bp, Homo sapiens
caatatctcgcccatggcaagctggatccctgtggattactttggctcccagtaccagccttgcaagagaacttttcttcactgttgggagtattgaaag

SEQ ID NO: 564518 - DNA, 83 bp, Homo sapiens
ggttctggcgggagacagcgtccacagcctgctcagcatcctggacatcatcaccgaaagatgaatgggagggctgattttcg

SEQ ID NO: 564519 - DNA, 100 bp, Homo sapiens
gtgtgaaactgatcctcatgaacccagagggccggaaggaaagccaagaactcatagtgcagacagatgaagaccgagttcatgatcaagtgttgcccac

SEQ ID NO: 564520 - DNA, 100 bp, Homo sapiens
agcatcaacaacagcaacttgtgattggcggtgaccggatattcagttgcacatccccacatcaatgcactgccaatgaaaagcagcatctgttatagca

SEQ ID NO: 564521 - DNA, 100 bp, Homo sapiens
aagggatccagcagtccaaagcctcttacagcctggggagtgcgagagaaacccagccgaagcatttaaaagttggtaggaggacagtttgatctggaaa

SEQ ID NO: 564522 - DNA, 75 bp, Homo sapiens
ggcttggctactcactcttctgttaacagggtcctggcagctgccactgcagagccccgccatggaagacacgcc

SEQ ID NO: 564523 - DNA, 90 bp, Homo sapiens
gacggattggttgttttttcctgtatgaagcggttggcaccactgaagtgaccgaatgaggagtttgggaaaaaacagtcaacacagaag

SEQ ID NO: 564524 - DNA, 101 bp, Homo sapiens
tggtgatgcaagaagtttctaggaaaggccggacaccagatctgttacctaaagcaataaaaaatggccagaggatcagtgtccgatgaggaaatgatgga

SEQ ID NO: 564525 - DNA, 90 bp, Homo sapiens
agctcctggactggtttaaaacggtcactgaaggaggaatatggaaggagactgtccctctgactggaaaacagactctacatgtaggat

SEQ ID NO: 564526 - DNA, 100 bp, Homo sapiens
gtccagcatgggagagtacatgagacgatgaagcaaagggagaaacttattcgtcttcagcatgagaataagatgttaaagcttaaccaagaaggttcgg

SEQ ID NO: 564527 - DNA, 106 bp, Homo sapiens
gaagatcgcaccgcggacgcccgctgagcttggcgcacgggccgaccaggccgccatggcatcagatgaaggcaaactttttgttggagggctgagttttgacacc

SEQ ID NO: 564528 - DNA, 88 bp, Homo sapiens
gctggtcagccagttccgctcctgtcaggtgaatctggattgggaaagtcgacattaatcaactcattattcctcacagatttgtatt

SEQ ID NO: 564529 - DNA, 100 bp, Homo sapiens
caggaagagtacaaaatcttacaagagctgtaccaatttaagaaacctggcaccaacctaacagagatgcaaccttaaaatcagtgacaagaaacattcc

SEQ ID NO: 564530 - DNA, 108 bp, Homo sapiens
gctctgtgacctgctggcattgaatgatttatagctaagactccaggacacccctgaagccgagaaatggtgttgacttcaaaatcaaaactgtagagctaagaggaa

SEQ ID NO: 564531 - DNA, 83 bp, Homo sapiens
acttggatacagaaatttcctgggctaaagtcatgaatgaaaaacttcagcactgcatggaactaacagatctaatgcggaat

SEQ ID NO: 564532 - DNA, 98 bp, Homo sapiens
cgggctcagcggctctgactctggaggaggagctgcaggaagcgatccggagggcgcaggttcccgtgtcagtggctatgatgacacctcaagttatc

SEQ ID NO: 564533 - DNA, 90 bp, Homo sapiens
agatgcagtacgccacggggccgctgctcaagttccagatttgaaaagtagcagctctgaatccttaagtgacaaaggctctgaattgaa

SEQ ID NO: 564534 - DNA, 149 bp, Homo sapiens
gaaaggagaagcagatgacgaagatgatgatgaagatgggcaagacaatcagggcacagtgactgaaggaggtctgcggaagagggagctgctgaaggagctgctaccagtcatcgggcagaacctccgattccagcgcctcttcaccg

SEQ ID NO: 564535 - DNA, 151 bp, Homo sapiens
ataaccatttggctctgagctatgacaagagaggaaacaaaaagttaaacaagcaagcctgccataagtgagaagctaaaagatggcggcaaggcagcccaggcaaatgtaagaataggcgatgtggttctcagcattgatggaataaatg

SEQ ID NO: 564536 - DNA, 100 bp, Homo sapiens
gtcagcatctggccaagtgtctggatgaacgacagcatgcacaaaggaatgtgggggagagaagtcctgaccagctggctgagagtgactttgcctctac

SEQ ID NO: 564537 - DNA, 100 bp, Homo sapiens
ccgggattcccagccatggcagattcctccgggcagcaggagtcctccctgctgctgtgtggacgacacgtgggcacaggcagaagtgggccctgtgacc

SEQ ID NO: 564538 - DNA, 82 bp, Homo sapiens
ggccgtacgcggtgctgcgagggcagaacctgggagagaagatgactgaggaggaggtggagaccgttctggcaggacacga

SEQ ID NO: 564539 - DNA, 100 bp, Homo sapiens
actttaccaaaggaaagctattttgcgaactatcttctccagcggagatggccaattctccttatatacatttgacaaagccaaacagtgtattggcaca

SEQ ID NO: 564540 - DNA, 75 bp, Homo sapiens
cttctgggctcctggggccctgcccaccacaagtactacgacgtccccatcgccaccctggacttctcctcgctg

SEQ ID NO: 564541 - DNA, 75 bp, Homo sapiens
gaggaaggtagcagccgtctgtctccgccccacagtccacgagccaagagtcgaagctaaaccagaagttcaatc

SEQ ID NO: 564542 - DNA, 73 bp, Homo sapiens
gttgattgccctttcaatagacagtgttgaggaccatcttgcctggagcaagcccaaggagctggatccctct

SEQ ID NO: 564543 - DNA, 101 bp, Homo sapiens
aggagatggaagtgatgtaccatcatgggtagcctttgataaacagatgtgaaggaatggacaagagttgagcagcctttctgctgattatcacacatcat

SEQ ID NO: 564544 - DNA, 90 bp, Homo sapiens
tgtggtgctggaaggggccagtctggagacagtcaagaaaactgtaaccatttcagaccatggcactgtgacatataatggaagcatttg

SEQ ID NO: 564545 - DNA, 97 bp, Homo sapiens
ttccgggaagccatagctctgcatggtgccaggggagagcaagaaacagtggaaaccagccctggttgtgctgactgagaaagaccttttaatctat

SEQ ID NO: 564546 - DNA, 100 bp, Homo sapiens
gggtgagacagcttgagccccatcgtggattccaagacatccctgctgagagagccaaggtctccacaccctggcaacctcctactgtgctcctgggtca

SEQ ID NO: 564547 - DNA, 83 bp, Homo sapiens
ggctccgcagcaagatggcggacgagaaggacagggaaggtgtggacactgccagcggctgcagccgacttggaatgacctgg

SEQ ID NO: 564548 - DNA, 82 bp, Homo sapiens
cagaaggtctctggagacatcttcagcagctggagaagaagcaggcgctccctccattccagccacagatcacagacgacta

SEQ ID NO: 564549 - DNA, 100 bp, Homo sapiens
cgcaggtgcaggtgtctcttctcgccctggcggggaaggtcaatgagctgaaggagaaaggcaacaaggccctgagcgtgggtaacatcgatgatgcctt

SEQ ID NO: 564550 - DNA, 101 bp, Homo sapiens
gctctgagcagtaccagatgcctcagtctccctctccctgcagtccaccacagatgccacagcagtactcaggccactgcagaacaaattagacttgcaca

SEQ ID NO: 564551 - DNA, 82 bp, Homo sapiens
tttgaatggttgcgatttcttgataaagtcttggttgctgccaacaagctgtccagaccaaaacgaagaagacgttagccaa

SEQ ID NO: 564552 - DNA, 100 bp, Homo sapiens
cctgtgtaagcagagtgctgagccatcactgtttcaggtcgcagcagttgtggtagaaatttctgggttagtggactctcttctacaaccagagctacag

SEQ ID NO: 564553 - DNA, 100 bp, Homo sapiens
aaacatctggtgatgggggatattccagcagctgtcaatgcattccaggaagcagctagtcttttgattaaactgcaaatatctcatgaagctgctgcct

SEQ ID NO: 564554 - DNA, 90 bp, Homo sapiens
ttccttacctgtttttccagctcacccactgccagcagagcgatgacaaaaagtgatctccagccacctaattactacgaggtaatggag

SEQ ID NO: 564555 - DNA, 82 bp, Homo sapiens
gtttttcttgtgagttgaggtgaacatctgaatcccctcggggaactgaggaagaggcgcttcagcgggcacgtgaggaaga

SEQ ID NO: 564556 - DNA, 100 bp, Homo sapiens
ctacactgaactgctagtactgaaggctcatcatgatattgtacgatttctggtacagttagatgactacagtgttttagagcactttgctgcaagggac

SEQ ID NO: 564557 - DNA, 82 bp, Homo sapiens
ccggcttcaatatcttcacccagcatgcagcagctgtcgattcggcagaccgaagtcctcggcccacttctgcacctgccat

SEQ ID NO: 564558 - DNA, 90 bp, Homo sapiens
gaacgattgggctgagcagaggacgacatgttgcttttcgtggaggatcaccattaacaaggacaccaaggtacccaatgcctgtttatt

SEQ ID NO: 564559 - DNA, 95 bp, Homo sapiens
ggccgtggctctagcaggctccactaactggggctacgactctgatgggcagtgagaaagatcagtctaaagaaaaggagaagaaagtgaaaaaa

SEQ ID NO: 564560 - DNA, 51 bp, Homo sapiens
cagaacgtgccatggagacgcttaacgtactgccaaatctgtcgaaaggga

SEQ ID NO: 564561 - DNA, 100 bp, Homo sapiens
gagaggtacctctccttttccctctccctttccctaagtgtctgcgagattaatctctcatggccgctgcacaagaacctggcttttagctgaactaagg

SEQ ID NO: 564562 - DNA, 100 bp, Homo sapiens
aggatctcgggctcggaacgagactgcacggcactacaagggcccccagggatggagaagtaccaggagtggattataatttcatttccgttgaacagtt

SEQ ID NO: 564563 - DNA, 100 bp, Homo sapiens
accttctttgaaatttatagtggaaagattaccacgatggagagcaacctgaagaccatcgaagaggagaacaaagtgattgagcagcagaacgagtctc

SEQ ID NO: 564564 - DNA, 75 bp, Homo sapiens
gggagaaccagccgactggagcaggcagcagcccagcaattaccagctctggctgggtcgccacaacttgtttga

SEQ ID NO: 564565 - DNA, 76 bp, Homo sapiens
tggttctggaatcctcagttcaaggtggaacggccgccttctccattctccatggccccacaagcttcccttcccc

SEQ ID NO: 564566 - DNA, 98 bp, Homo sapiens
agcgccttcccacggagcagcactcttcaccctgcacagccttgttaggtaagaatgattgatgttggctgatattggagtgctcattcacatgaagt

SEQ ID NO: 564567 - DNA, 75 bp, Homo sapiens
agaagacctgcacgacgttcatagttgactccacagatccgggatgcgctcagtaaccagctgcgcctcgccatg

SEQ ID NO: 564568 - DNA, 96 bp, Homo sapiens
tttggaaccctgaggaagcaggaggtggatttgcagcagctcatcagagactctgccgagagttactccacaggatccgctgaacataggatgttg

SEQ ID NO: 564569 - DNA, 100 bp, Homo sapiens
aagaggtcatctcgctcggagcttcgctcggaagggtctttgttccctgcagccctcccacgtaagactttgaccccgacgcaggcttcagtgattgccg

SEQ ID NO: 564570 - DNA, 100 bp, Homo sapiens
gcgttcctgctgctctgcctgctccacaagcggcgccgcgccctcggcctgcacgggaaaaccaattctgtgtcctcggaggaccacagcccagttgggc

SEQ ID NO: 564571 - DNA, 107 bp, Homo sapiens
gcggagagcggcctgcgggcgatcgggccgaggacacagcttgggctatggctttgtgaactacgtgaccgcgaaggatgcagagagagcgatcaacacgctgaacg

SEQ ID NO: 564572 - DNA, 82 bp, Homo sapiens
gaggcagctgtcccatgctctgctgagcacggtgttcactgattaccaaagctatgtcatccatggctgcctggagaataat

SEQ ID NO: 564573 - DNA, 101 bp, Homo sapiens
tgctcccctagcaacgctcgccacacccttgttttgagatcctctctaagggaagatcagttttcctgccatccaggctgctccctccttcagcaactcat

SEQ ID NO: 564574 - DNA, 129 bp, Homo sapiens
ggattgtgggagtctccgcgtcccgctcgctgggagagaggtacctctccttttccctctccctttccctaaggtgtccctggccagtgtccttccacctgtccacaagcatggggaacatcttcgcca

SEQ ID NO: 564575 - DNA, 100 bp, Homo sapiens
gaattccagtcacttttcacagaaggactgaagagtctgacaggtgttacacataatattgcattacttcgagaggtgataatcaactcacgctttgtaa

SEQ ID NO: 564576 - DNA, 96 bp, Homo sapiens
tggcgtgtccctgcagcgaaggatcctggtctcagcatcagaggagcccaggaggaggaccctcccgatccccagctaatgagactggacaatatg

SEQ ID NO: 564577 - DNA, 100 bp, Homo sapiens
gctttgctgtgaggctcgtcttccaggacttcgacctggagccgtcccaggactgtgcaggggactctgtcacagataccatacttgcagagctccttca

SEQ ID NO: 564578 - DNA, 83 bp, Homo sapiens
agtaacaacagcgaggaagaagaggacgacgacgacgaggaagaggaggtttctgaggaattgaatgatctggcacgggaccc

SEQ ID NO: 564579 - DNA, 76 bp, Homo sapiens
cctccccagccatgtgaaactgtctaacttcaaacttgtggctgttaattcaaaactctatgccatcggagggcag

SEQ ID NO: 564580 - DNA, 75 bp, Homo sapiens
tgacaaccggtatattgcaaataccgtagaggtaacacgtacacagacctctcggccggaatctccagggatgac

SEQ ID NO: 564581 - DNA, 75 bp, Homo sapiens
cgaccgcccgctcgtactgctgctgcacctgctgcaacttgggccccttttcagaggaggcgaccaccgcgtgga

SEQ ID NO: 564582 - DNA, 82 bp, Homo sapiens
cctccgtttagagaatgtaccggcgcctagccgagcaggccatccgtgtgttagggcttttaggggctttggatccttacaa

SEQ ID NO: 564583 - DNA, 76 bp, Homo sapiens
cggtgtagaagtggcagcacggcaggtttgatctgtggatgaaatgaatcatgattttcaagctcttgcattagaa

SEQ ID NO: 564584 - DNA, 75 bp, Homo sapiens
ccccgagcagtgggtgggggccacctgccagctggggaaggtgctgagctactggtgcttcagtcccggccacag

SEQ ID NO: 564585 - DNA, 90 bp, Homo sapiens
aaaaactagttgagaggcttcatatggaacaagagttgaatgctcgagcccgggccctccaagctgcatctgcttcatgttcatttcggc

SEQ ID NO: 564586 - DNA, 130 bp, Homo sapiens
ctgtggatggtttctaaaatgatcattgaaaacttcgaggcactcaagtcctggctcagcaagactctcgagcccatgaagagagaagggcacagttacctaagtatcaacgtaatcttcctcggccagg

SEQ ID NO: 564587 - DNA, 82 bp, Homo sapiens
aaggacaaacccaaggtcatcattgtccaggcctgcagaggtgtccacactcgctgtgaggaggacaatggcggctgctccc

SEQ ID NO: 564588 - DNA, 100 bp, Homo sapiens
tagtaaggcgctccacaatgggacactgagctttgtggaagcatttggcggcataccaccctgcactgtgagctagccgatggcggagtctcttctcttc

SEQ ID NO: 564589 - DNA, 99 bp, Homo sapiens
ctctctccctgctctacaacgtgcctgcagtggccgaggagattcaggatgaagttgacaagttggatggcttgaggactggtactaaaaggaaacgtg

SEQ ID NO: 564590 - DNA, 88 bp, Homo sapiens
ctattcagacacccctgaaatctgccaaaaattagtgacaagagctggggttaggatccggttggactctgacatcggatgccctcaa

SEQ ID NO: 564591 - DNA, 50 bp, Homo sapiens
agacggagttcctagtgcaaatgcaaggaacaggatctggacttggcaca

SEQ ID NO: 564592 - DNA, 82 bp, Homo sapiens
gttggcgtcccttctccctctccgagtgctgctcctgtcattgtggccatggacgggtgacgagaacaagtcagtgcgcgac

SEQ ID NO: 564593 - DNA, 155 bp, Homo sapiens
caggagcttcctactatggagaacaaactctacactacattgcaacaaatggagaaagtgctgtagtgcaattacagacctacagagttgaaacagtgaaacctggaaagattgtctggcaggaagaccctcgtttacaagacagcagttcagaa

SEQ ID NO: 564594 - DNA, 75 bp, Homo sapiens
ctccgccatcagctcggcagtcgcgaagcagcaaccatggcctgagaactgggaggaagctggagaaaagatgcc

SEQ ID NO: 564595 - DNA, 90 bp, Homo sapiens
attcttccctctttatgtttttcaagggacggatacaacgactagaggacggggaggtttactgcatcgacgcgcggttctacgggaacg

SEQ ID NO: 564596 - DNA, 98 bp, Homo sapiens
gccgaccttgagctccaggagttcgtctcttacgtctgcggaagtgcagctgcctcagttcttagcgcagatcatccagacttgaaacatatcgaccc

SEQ ID NO: 564597 - DNA, 75 bp, Homo sapiens
aagtggatgagttccacctcattttagagtatcaagcagaaatacaggtatcaggatgaagatacacctcctcaa

SEQ ID NO: 564598 - DNA, 83 bp, Homo sapiens
cttcggcagtccacccaccgccgccgcctcccagattagtgatgatgaaccaggttatgaccttgatttattttgcataccta

SEQ ID NO: 564599 - DNA, 90 bp, Homo sapiens
gcttcacccttggagcggcttttgtctacttggctgacctcctgatgcctcacttgcacaaacgtgcagatatctgatagccctttccgt

SEQ ID NO: 564600 - DNA, 74 bp, Homo sapiens
aaaacctggccctcttcaatttctgacaaaaggtggcagagagcctccagctggtgacagtacaccagagtgag

SEQ ID NO: 564601 - DNA, 100 bp, Homo sapiens
catcaccgtactgcatgtgaagctcaccgagacggcgatccgggcgctcgagacttaccagagccacaaggtgcctcgagtctttattggtaaagattgt

SEQ ID NO: 564602 - DNA, 75 bp, Homo sapiens
tgttgctgtcgcgccgctgctggttgctgtccctgtgggaagatgtaaatgctgctgcctgtgacctcgccaggg

SEQ ID NO: 564603 - DNA, 92 bp, Homo sapiens
gaggcctacacgccgccgcttgtgctgcagccatgtctcgtccctttggagtagcattattatttggaggagttgatgagaaaggaccccag

SEQ ID NO: 564604 - DNA, 101 bp, Homo sapiens
tttgaatttgctagtaacgtcatggaggatgaacgacaggccttataatgggactaattttacgatatgctacagcaccaactgatattgaaagtggaact

SEQ ID NO: 564605 - DNA, 75 bp, Homo sapiens
cacggacgcaacacttttggaacttagacgctaggggatatgagactttctactcggaatatcctgagtgttgcg

SEQ ID NO: 564606 - DNA, 82 bp, Homo sapiens
gggcaggagctctagccatctgtgactcagtggcatttgaggatgtggctataaacttcacctgtgaggagtgggctttgct

SEQ ID NO: 564607 - DNA, 51 bp, Homo sapiens
ggtgcctggggctgaacgcggctttctgctgtgttggggtggaagaggagg

SEQ ID NO: 564608 - DNA, 74 bp, Homo sapiens
ttaaaatcctgctctggccggattccagactcgtgggggaaaggctgatcaaggacagacacaacggcaacatt

SEQ ID NO: 564609 - DNA, 80 bp, Homo sapiens
cgccgcgcacttcgtcatgttcttcgcgccctgacgaagttatacggaagcgtctcctcattgatggagatggtgctgga

SEQ ID NO: 564610 - DNA, 98 bp, Homo sapiens
taaagcaaagagaaaggaagcaggcccgttggaagtggttgtgaattgattcggaaggccatgcagctaactttgtagaaacagaacaaattgtgcac

SEQ ID NO: 564611 - DNA, 100 bp, Homo sapiens
ttccctcctcaaactgactttgcagccacggagaggtggagccgccaccaaaatgcagattttcgtgaaaacccttacggggaagaccatcaccctcgag

SEQ ID NO: 564612 - DNA, 108 bp, Homo sapiens
tatggggctgttactagtccaacctctacccttgaaagcagagatagtggcatcattgggtgaaaatcctatttataagagtgccgtaacaactgtggtcaatccgaa

SEQ ID NO: 564613 - DNA, 100 bp, Homo sapiens
gctgacgctgggcaagctggagcaggtccgcagcctgtctgccatctacctggagaatgtttggcatgcagaacaatctggcccccagcttgaccaccct

SEQ ID NO: 564614 - DNA, 88 bp, Homo sapiens
tgtgggttagacttgtgcaaccagggcaactctgctccttgacctgtttatggtttgggattggtctacttacctagctgattatggg

SEQ ID NO: 564615 - DNA, 115 bp, Homo sapiens
catcggcaagggcaacttcgcggtggtcaagcgggccacgcacctcgtcaccaaggccaagctcaacatcctggtggatacaggcagcagtaactttgcagtgggtgctgccccc

SEQ ID NO: 564616 - DNA, 75 bp, Homo sapiens
gctcctgcctcccagagaggggagccggcgaggatcaaaatcttcgaaggaggatgcagtggcagaacgtggagc

SEQ ID NO: 564617 - DNA, 75 bp, Homo sapiens
tcaggatgtccggaagagagtgcaggagagaagatgactgaggaggaggtggagaccgttctggcaggacacgag

SEQ ID NO: 564618 - DNA, 75 bp, Homo sapiens
ggattccagcatggacgtcttccacctggagggcatgactacatctgtcatggaacttgctactaccagcaccat

SEQ ID NO: 564619 - DNA, 100 bp, Homo sapiens
ttcttcagaagaaggacttcggaatgcactacaacaggaaaatcatattatagatggagtaaaggtccggtttatcactaaaatatggcatcctaatatt

SEQ ID NO: 564620 - DNA, 90 bp, Homo sapiens
tgcctgaacattatgtggaaggatcaacagtcaattgtgtactagcattccaagaaaagagtctcatcgtggaaggcaagagggaaaaga

SEQ ID NO: 564621 - DNA, 106 bp, Homo sapiens
gcaagttggacagacgggaaaaatagtagcaccagcttcattccagcgctccaatagtcatgacaaagtaaggagaatagttgcagaggagggtcgtacagcaaga

SEQ ID NO: 564622 - DNA, 99 bp, Homo sapiens
ctaaactttatttcctcccagaagacactccccagggcagaaatagcgaccatggcgaggttctgcctgcaaagaagattgtgacatattgctggttgc

SEQ ID NO: 564623 - DNA, 101 bp, Homo sapiens
tatgccaccagcatttattaacttcagtatcagacacagcacagcagccatctgaagagcaaagcaagtctcttgaaaaaccgaaacaaaaaaagaatcgc

SEQ ID NO: 564624 - DNA, 83 bp, Homo sapiens
ctccgcaacagaaccatctcaagtgatgtgtccaatctagatcccaacttctcatttgaaggcaccaaactggatgtggggaa

SEQ ID NO: 564625 - DNA, 98 bp, Homo sapiens
aaaaaagatcacaagcaactctggatgggattgcaaaatgtatgactatgaatatgatgaaaatggtgacagagtcgttttaggaaaaggcacttatg

SEQ ID NO: 564626 - DNA, 99 bp, Homo sapiens
cggagacggcaaatggcggacttcgacacctacgacgatcgggcctacagcagcttcggcggcggcagagggaatactcccccagttgcaagaggcgca

SEQ ID NO: 564627 - DNA, 51 bp, Homo sapiens
aagagtatcatcaacgggaagtgagagggcaaagcccaacaccttccccca

SEQ ID NO: 564628 - DNA, 95 bp, Homo sapiens
ttggaactgttgaatgggctgatcctatagaagatcctgatcctgaggttatggcaaagtggctagaagtgaccccaggatttttttattatcaa

SEQ ID NO: 564629 - DNA, 87 bp, Homo sapiens
gatcaggtgttttcaggttaaccgtcagctgcagaagaaagatcagcaactggagcctaaaaaaagtaccagccctaaaaaagctgc

SEQ ID NO: 564630 - DNA, 87 bp, Homo sapiens
aatgtcgacctgccggagtcgaggattccagggtcgaacactcgattctacgattaggactgaaaatgagcaggcctgtgaggacat

SEQ ID NO: 564631 - DNA, 80 bp, Homo sapiens
gccgccagagaggcccgcccaccagttcgcccgtccccctgccccgttcacaatacatgggaaagcggaaccaccaaaag

SEQ ID NO: 564632 - DNA, 75 bp, Homo sapiens
cagcctccccagtagctgggattacaggccccttcacagatgtagtcactacaaatcttaaattgcgaaatccat

SEQ ID NO: 564633 - DNA, 116 bp, Homo sapiens
tcctctcccggccctctcgcgctgcactgtctctccgacgcaagactgtcccggcccggacaatgcagatcttcgtgaagactctgactggtaagaccatcaccctcgaggttgag

SEQ ID NO: 564634 - DNA, 74 bp, Homo sapiens
aaagtcagcatgattttcgaaccccggagtttgaggagacatcacagctttcccagatcgggaggaaaaatatg

SEQ ID NO: 564635 - DNA, 75 bp, Homo sapiens
tgccgggtgacaaggccgccgaggaacagggtggccaaacaggagaagaagaagaagaagacaggtcgggctaag

SEQ ID NO: 564636 - DNA, 50 bp, Homo sapiens
catgtttcaagtggctgtgccaaaggtcagcccaaggccaaccccactgt

SEQ ID NO: 564637 - DNA, 74 bp, Homo sapiens
aagggcattttgcatctgaaaccatacgggacttgaaagaggagattgatattcgactctccagggttcaggat

SEQ ID NO: 564638 - DNA, 99 bp, Homo sapiens
cggcctcctcagtgcgaagaagctgcagccgcacctggccaagggtgtgtgtaactggtgtgtgcaccgtttcgaccatcactgtgtttgggtgaacaa

SEQ ID NO: 564639 - DNA, 75 bp, Homo sapiens
aaaccacataaatacaaaacaagtctgcttcttcaaaattctgctgggcatcttgacccagccgaaaaagttgaa

SEQ ID NO: 564640 - DNA, 100 bp, Homo sapiens
tcatccacaatgatttctccagtgctcatcttgttctcgagttttctctgccatgttgctattgcaggacggagatgacaaaagatgtgagtggatctat

SEQ ID NO: 564641 - DNA, 50 bp, Homo sapiens
tgagaagcagggacccatggagtccaggtttgacaactattcagccaatg

SEQ ID NO: 564642 - DNA, 83 bp, Homo sapiens
caaggagatcgtctctctcatcgaggcccaaaccgccaagcgacgagtagaacagcccctctatggtttagatggcagtgctg

SEQ ID NO: 564643 - DNA, 100 bp, Homo sapiens
ggcctcatctacttcttcgtccaggtgatgaccagtggctgggagacggtggacatgacgcttcggcggaacgggctcgggcagctgggcttccacgtga

SEQ ID NO: 564644 - DNA, 74 bp, Homo sapiens
aagaactcaagagcagaatctccggtcaaaatgcagatcttcgtgaaaacccttaccggcaagaccatcaccct

SEQ ID NO: 564645 - DNA, 100 bp, Homo sapiens
cctcaagaatctcgtgctcaccggtttctcccacatcgacctggagaaggagaggaacgcgcggaggaagaagaagaaagcgccggcggcggccagcgag

SEQ ID NO: 564646 - DNA, 100 bp, Homo sapiens
ccatagtacctacagcagcactccagtggaagagaaagccaatacccacctcctcttgggcatgtgcttagacgcctgtgctcgctaccttctgttctcc

SEQ ID NO: 564647 - DNA, 100 bp, Homo sapiens
cgcagacggcgtcacttgcttggggcggtgtccgtgtcctccatgtctgagttccagcgtctaatggacatctcccccttcctgcctgagaagggcctgc

SEQ ID NO: 564648 - DNA, 75 bp, Homo sapiens
ccactccacaaaagtttgtggcgagtaaccagctcataaatcacatcgaacagtttttggatactaatgaaacac

SEQ ID NO: 564649 - DNA, 100 bp, Homo sapiens
gcagctgttccttctcccgagggcgagcccccccacagcaggtggtggctattgatgtggacatggccttttttgaacctaaaatgagggaaatccttga

SEQ ID NO: 564650 - DNA, 50 bp, Homo sapiens
gggagaagtgaccctcctgcgcctggtaaataccatgatttagaatgcca

SEQ ID NO: 564651 - DNA, 100 bp, Homo sapiens
attgagggcacctacattgacaagaaatgccccttcactggtaatgtgtccattcgagggcggatcctctctggtgtcattccacacatccacaaatctc

SEQ ID NO: 564652 - DNA, 50 bp, Homo sapiens
tttccctcgggcttgtggttctctcaaaatggcagaaacggtggacacaa

SEQ ID NO: 564653 - DNA, 75 bp, Homo sapiens
atgaagaaagtcagggggactgcaaaggccaatgttggtgctggcaaaaagtgagtatgagagaatgggacgtgg

SEQ ID NO: 564654 - DNA, 96 bp, Homo sapiens
ggacggtaggagcctccgtgcggagaccactgttcaaggccacagacatccacgacagcgatggcagttccagcagcagccaccagagcctcaaga

SEQ ID NO: 564655 - DNA, 97 bp, Homo sapiens
aacaaagagacagttatatctggaatgggagaattacacctggaaatctatgctcaggaactaagcgtcttgtagaaggaactattaatccaggaga

SEQ ID NO: 564656 - DNA, 100 bp, Homo sapiens
gcgcctctgccctgcacgtggctgctgccaagggctacattgaggtgatgagcttcatcgaggacaatgagattggctccatctctaagaatgccctcag

SEQ ID NO: 564657 - DNA, 101 bp, Homo sapiens
gtcttccatgtcagtgctgagaggaaaacttcagcttgtgggcactgctgctatgctgttagcctctttgccagtactgctaaatatatgaagaatactcc

SEQ ID NO: 564658 - DNA, 82 bp, Homo sapiens
tggcagagttgccaaccccagagctgccgagcaaggatgcctgagaattgccaccacccgccggctcaccgtgcactttaac

SEQ ID NO: 564659 - DNA, 75 bp, Homo sapiens
ttggaatcactgcctgcctttctcaggtttctgacgtagaagagcttacccctccagagcatctttctgatcttc

SEQ ID NO: 564660 - DNA, 83 bp, Homo sapiens
cagcctcggcaccgtcctttcctttctccctcgcgttaggaggctactcacagtcgaactacaactccccggggtccggccag

SEQ ID NO: 564661 - DNA, 74 bp, Homo sapiens
gtgatgtgttttcatgtaaatggaattgtacagggaattaagttcaaacgaataggtgttccttctgcaacaga

SEQ ID NO: 564662 - DNA, 100 bp, Homo sapiens
ctctgttggtgtagaagccaaaatcagggatcctcaaagtctggacccaccagaagtcagcaatgcaaaacttcagtatgcaggatggggccctaaaggc

SEQ ID NO: 564663 - DNA, 121 bp, Homo sapiens
ggacattttggtctttgtccgcgggtcagtacggcccctgggtccacgtggcgcgaaagtaggagaaataagaatgtctaagcccctggaggccgagaagcaaggtctggactccccatca

SEQ ID NO: 564664 - DNA, 75 bp, Homo sapiens
gatatatgtgggccatcgattcccaagataatgggattggaaggagagcaggtggtgaaggcatttgtggtcctg

SEQ ID NO: 564665 - DNA, 75 bp, Homo sapiens
ctccgtcgcacccaccatgatggaagacgacgggcagccccggactctcctgccacagtgactcaggtcactcaa

SEQ ID NO: 564666 - DNA, 75 bp, Homo sapiens
cgggaggaaggaacgaggcaaggagctaaagcagcgtgcgttcagccctgggaatggtcctagtgccagatcgtg

SEQ ID NO: 564667 - DNA, 100 bp, Homo sapiens
tggcaggacgtgaaggggaagaggcccaccctggagtaaccctcactggagaatccagagacctggaatggccaaatatcaaggtgaagttcaaagtttg

SEQ ID NO: 564668 - DNA, 100 bp, Homo sapiens
tctcctctgccaaaacccagggctggaagatgtggcagccggccacggagcgcctgcagttggaggacgagtaagtcgtgaattaaattatactcgccag

SEQ ID NO: 564669 - DNA, 82 bp, Homo sapiens
cccggcaccgcgcctgctgccgggttgcgctccgtgcacctcttgcggagcatctgctgcacccaagcctgagccggttcct

SEQ ID NO: 564670 - DNA, 74 bp, Homo sapiens
ttcggtcctgctgttgcggccgctgccccagggctgcggggacgggcagtcagggcgacagcaagaatgccaag

SEQ ID NO: 564671 - DNA, 100 bp, Homo sapiens
cagaaaggagccctgaacggtcaaggagccctaaacagccaggaggaagaagaagtcattgtcacagagggtaagaatgattgatgttggctgatattgg

SEQ ID NO: 564672 - DNA, 83 bp, Homo sapiens
agtgaagccacaaacagatcaggcactgaaggatagcacagaagtagaaattgtggatgagaaaatgagaaaaaagatagaac

SEQ ID NO: 564673 - DNA, 100 bp, Homo sapiens
ggaaactttgacttcggagtatttccagatttgcaaggaggtcagtcctctcagcagccatcaaactactgaatgcagcaacagtaaatcaaagactgag

SEQ ID NO: 564674 - DNA, 74 bp, Homo sapiens
gcggctcctgctcttcctggactcctgagcagagagaaagcttcttgctatctacctccaccatgatgaaagtg

SEQ ID NO: 564675 - DNA, 75 bp, Homo sapiens
ccgccacagaacttacctgcctcttcatgcagttctccatcgtgccaacatgcgtcgggatgtccaggaaatttt

SEQ ID NO: 564676 - DNA, 100 bp, Homo sapiens
ctgcgcatctacttcctggaggagcgcatgcaacagaagtatgaggccagccgggaggacatctacaagcgggaatactttcaagtcatcccaaatatgg

SEQ ID NO: 564677 - DNA, 100 bp, Homo sapiens
ttcattggaggtatcaactgtaagaagaggaaagacttgtctcagtcatatttgatcagaaattggatgaaccttcgggatgctgagacagggaagatac

SEQ ID NO: 564678 - DNA, 90 bp, Homo sapiens
ctttattgaagctcacctttgtctaaataaaaaaatccagttacactcttaaaggaattgtcagtgataaagtctcgatatcaaactttg

SEQ ID NO: 564679 - DNA, 90 bp, Homo sapiens
agatgctatagtctggtatcaaaagaagatcttgtgcctcaagcagccattgagtatggcaggatcctgacccgcctcacccaccacccc

SEQ ID NO: 564680 - DNA, 75 bp, Homo sapiens
gccctaatggaggtctccagtttcgatgctgagtttgtgtgtgaacggacactgaaatattttctaggaattgcg

SEQ ID NO: 564681 - DNA, 100 bp, Homo sapiens
ttacaagactacggagcataggaggaaaattcatcatctggttggatggcaagcatgtggtgtttggcaaagtgaaagaaggcatgaatattgtggaggc

SEQ ID NO: 564682 - DNA, 101 bp, Homo sapiens
cgcagccccgggcacggcggaggcagcggagccctgggccatcgttgcattaaaatcctcccctactgaaagaaacggaggccaggataactgtagagcag

SEQ ID NO: 564683 - DNA, 100 bp, Homo sapiens
aggaagttgcccagggaggaagaagaagaggaggaggacgatgacgaggaggaaaaggcccctgtgacctaagctgaacatggttatgcctccatgttac

SEQ ID NO: 564684 - DNA, 97 bp, Homo sapiens
tgacagattacgccccctatcctatccgcaaacaatgacagagcacgtagatcgccacgaaaacttcctacttcattaaaaaaaggagaaaggaaat

SEQ ID NO: 564685 - DNA, 100 bp, Homo sapiens
ataaacatgcaatgaacccaaaagggcaactcatgcagcaattccagaaccccgacttcccacccgaagtagaggaacaggatgccagcaccctgcctgt

SEQ ID NO: 564686 - DNA, 75 bp, Homo sapiens
aatatcaaaaatgactttactgaagaggaggaagcccaggtggagaacgaccaggagcggttcctgagtgacctg

SEQ ID NO: 564687 - DNA, 100 bp, Homo sapiens
ggatcctactgagatagaggccctgagtcatctgaagagggtgaagaccaagaacatgaagatgatggtgaagatgaagatgatgaagatgatgatgatg

SEQ ID NO: 564688 - DNA, 98 bp, Homo sapiens
ggcgcggtcggtcggcgcctgttctcgggctgtttggcggtgcatgcaagagatgggaaatggaaaggcaaaccgactttatgaagcctatcttcctg

SEQ ID NO: 564689 - DNA, 75 bp, Homo sapiens
aagcatccccgaggaggaagacgaatcgttaaacatcttaggtcagtttgttagctttaggactgaagcattttg

SEQ ID NO: 564690 - DNA, 75 bp, Homo sapiens
ttctgcggcacgggatggcggaggcgcctcctgtctcagatggatggagtggaaccctggcttccccttgagcat

SEQ ID NO: 564691 - DNA, 83 bp, Homo sapiens
tttgagactgaacagatggctcatgcagtacgagagaaagctgacatcgaggcaaagaactgtggctgcaccatctgtcttca

SEQ ID NO: 564692 - DNA, 142 bp, Homo sapiens
caaaaactcaaggaacatctgttgagaagaaaaacgctttttgcatacaagcaggaaaatgagatgttatccagatggagtcgggtggtacagttttgagtaccaactggtctgatgtaggtaaaaggaaagttgaaatcaa

SEQ ID NO: 564693 - DNA, 121 bp, Homo sapiens
acaatttgactgaagaacagaaggcgatcaaggccaagtatccgccagtcaataggaagtacgagtgtgtcatggagaaactccagctgggcccagagattctgcagcgggaaaatccaag

SEQ ID NO: 564694 - DNA, 74 bp, Homo sapiens
cacacattgaatgggccaaggaaaaatcgagcagaaagaatgtctttcaggacaaggacacactcagcattcac

SEQ ID NO: 564695 - DNA, 83 bp, Homo sapiens
gacaccgggcgcaggagggcagcaccagaggccagtggcactcccagctcgatgggtgttcctgataaagaagggttaccaag

SEQ ID NO: 564696 - DNA, 74 bp, Homo sapiens
cgctctgccgcgaggcgcgcgccgcgcaagtcttcttcctcaaaggtcctggacccaagccagaagcctctgca

SEQ ID NO: 564697 - DNA, 88 bp, Homo sapiens
cgcagcccgggccacctccaggagggaaggaagccatcggtatcagattctacccctgcattctcagattcctcgagaggaacagcgc

SEQ ID NO: 564698 - DNA, 51 bp, Homo sapiens
aggacagacagatggacactgaggctgctgcatctgaagcctcccaggatg

SEQ ID NO: 564699 - DNA, 80 bp, Homo sapiens
gaaactaaaaacgcatctatctaacgtttaccctagcaaaccagagccctctggcacaaatggaagaagaaagaagggag

SEQ ID NO: 564700 - DNA, 73 bp, Homo sapiens
agcatggtcagtgccgtttaacctttattgtggtggagtccaccccgctgtgtgcacgatctgattttctgga

SEQ ID NO: 564701 - DNA, 100 bp, Homo sapiens
tctcctgtccctggacctcatgcaccatattcacatgttgaggcggggtttcaccatgttgcccagactggtcttgaactcctgagcttaagcaatccac

SEQ ID NO: 564702 - DNA, 111 bp, Homo sapiens
caggaagatggattatctgtggaacaaaagagattgtctccaccagctcctggccgggttcgaggacaagtcagcctatgcgctctgcacgtttgcactcagcaccgggga

SEQ ID NO: 564703 - DNA, 51 bp, Homo sapiens
caagctcttcaagaataatctgcttccagaggaggctgcggaggaggagga

SEQ ID NO: 564704 - DNA, 100 bp, Homo sapiens
ttggtcctagcacccactcgagaattggctcagcaggttcaacagagtttggaaaagatttctaaactggagcaggaaaaagaacattggatgttggaag

SEQ ID NO: 564705 - DNA, 129 bp, Homo sapiens
tttgaatgaaagctctacaagatggcggcggtcggggccgaggcgcgaggagacagcccacctgaggatattgaccataaggactcatatctcattacaagaagcatcatggccgagccagactacata

SEQ ID NO: 564706 - DNA, 100 bp, Homo sapiens
aggggacactctgaagattattgagcggctggaccacctggagaatgtcatcaagcagcacattcaagtggaaagacaaatggggacccagattgtgaag

SEQ ID NO: 564707 - DNA, 75 bp, Homo sapiens
agaccaggagcgctctctgtcgctgagtaacgtcaaaggtccctagctgttggtagtaagtccggttataaattt

SEQ ID NO: 564708 - DNA, 97 bp, Homo sapiens
caactgctgtattgcagaacagcctcagcctgtttgaaggagaagttctgaaggactctgactagagcaagtttcatgttcacgagagcaaacctca

SEQ ID NO: 564709 - DNA, 107 bp, Homo sapiens
tttgttattggagaaacatgcagattatatcgcatcctatggctcaaagaaagatgattatattcctgacattcagacaactgacttgtaactgacttataactgac

SEQ ID NO: 564710 - DNA, 100 bp, Homo sapiens
cctgctgactcgtcagagttgctcatggaggtgcacggaaatgggaagaggcccagtccagagagattggaggtggacacaaaggaagaggcagccagac

SEQ ID NO: 564711 - DNA, 100 bp, Homo sapiens
ggaactaatgtcaaagccatgtctattgaagaatcttccaatgggagtctctcagtagaatttcgacatttgctggttatattctgggcactaaatgaag

SEQ ID NO: 564712 - DNA, 100 bp, Homo sapiens
aaaagatgctactaacactggaataaaggtatcaacctggacaaagcaatatcaagctgcagctcatcaggacatccctgccatgcaacagctatcggag

SEQ ID NO: 564713 - DNA, 50 bp, Homo sapiens
cccagaatatgccaagtatctaaagatgacgtagctttgccaaagactta

SEQ ID NO: 564714 - DNA, 89 bp, Homo sapiens
caggacttcgatcctgtgcagcgttataagatgctcatcccgcagctgaaggagagtctacaggtgcaaacagctgcacagcaagtggc

SEQ ID NO: 564715 - DNA, 125 bp, Homo sapiens
tgctgcccggtttggcactgctcctgctggccgcctggacggctcgggcgctggagatccaaaacgctaacgatgtattaattgcaccacttgagaaatttcgaaaagaacagataggtgcagca

SEQ ID NO: 564716 - DNA, 50 bp, Homo sapiens
cacctcttcaataggtgacattcaatgaatgatgataattccgaagaagg

SEQ ID NO: 564717 - DNA, 82 bp, Homo sapiens
ttaagtagctacaggggaaaatattctgaggaatctacggcggatccggaagtgtcaacgtggtcgagagcagcaggaaaag

SEQ ID NO: 564718 - DNA, 80 bp, Homo sapiens
taaaaagattcccaggatgtgagcaacacgggaccgggaactctaatgatccaggacaaagaagttaccctggagtatgt

SEQ ID NO: 564719 - DNA, 75 bp, Homo sapiens
tgcctactgaagagcttatcagagctctacttgggaaaattttattgtcaagatatccgagcttatgacatttta

SEQ ID NO: 564720 - DNA, 75 bp, Homo sapiens
cagccgcaactgcgagggctggaggcttaaatcaagtgatgcttacaaaaaagcctggggcaataatcaggacgg

SEQ ID NO: 564721 - DNA, 106 bp, Homo sapiens
gctttggtgagccagttttatttgctgccaaaagggaagcaaagcatctcaaagagatgtacagtcttactacgtctttgtgagctcatggatgatgaaaatggaa

SEQ ID NO: 564722 - DNA, 82 bp, Homo sapiens
ttcccggggcagatccaggttcagttggaatcgaagcctcttaaaatggcagatgacttggacttcgagacaggagatgcag

SEQ ID NO: 564723 - DNA, 99 bp, Homo sapiens
ggctctgatccgcacagccctggacatcaagattgccaaggggattgtggtccatcaggagtctgtgtgtgccacctatggaagtggcttaagcagcac

SEQ ID NO: 564724 - DNA, 51 bp, Homo sapiens
cttagctcagcaattcttaccttcattttgaaagcgaagcagaagccgtag

SEQ ID NO: 564725 - DNA, 100 bp, Homo sapiens
ggttatgcagcaagttcttaatattatttcccttctgtggaaactctctaaacaacaggatgaaacccataaattgacggtctggaaaatcccgaagcag

SEQ ID NO: 564726 - DNA, 97 bp, Homo sapiens
cccgggccctggggcaggagcacgacatcaccctcttcgtcaagaaatgcactcggtgatggaaagagagccactattctgaagaacacttggccaa

SEQ ID NO: 564727 - DNA, 83 bp, Homo sapiens
ggaatcgtatcgtatgtccgctatccagaacctccactctttcgagttgcatgctgagaatttgaaaaatgaagatgatgtag

SEQ ID NO: 564728 - DNA, 82 bp, Homo sapiens
aaagaagacaatgctgaggacaaagtagatggcctccagaaacaaacgtgtaaacaggaacatcgataagtagtgtaaaaac

SEQ ID NO: 564729 - DNA, 98 bp, Homo sapiens
agtggatgactccttggttaaggaggaaccagggaaaatgtgtagagggcatggtggagatcttcgacatgctgctggctacatcatctcggttccgc

SEQ ID NO: 564730 - DNA, 101 bp, Homo sapiens
tgtttggtcactctcatcttgcaaaccaggttatgatgtgattgctcaagcccaatctgggactgggaaaacggccacatttgccatatcgattctgcagc

SEQ ID NO: 564731 - DNA, 100 bp, Homo sapiens
acggctccctgctgttcgagtacctgcccagaggggcccactcgctgtcccaaggaacccagccagccggcggaatgcaagcagcagtaggaagcggagg

SEQ ID NO: 564732 - DNA, 76 bp, Homo sapiens
cgtcatcttccagcgggaaccagaggttggtcaaagaaaaagtgatgtatgaaaaagaggcaaaacaacaagaaga

SEQ ID NO: 564733 - DNA, 75 bp, Homo sapiens
atgcccccatcgctatacaaaataatctatgccagcaattatgacaatgttagcagaccatgcagctcgtcagct

SEQ ID NO: 564734 - DNA, 98 bp, Homo sapiens
gacggggctgcagctgcaggggctgagctggctgggcaagcgcgggccgcggaggaggtctcagggcctcatggcggtccgagcttcgttcgagaaca

SEQ ID NO: 564735 - DNA, 74 bp, Homo sapiens
ccgagagcgtgaccgagagcgcgaatatcgtcatcgttagaagggcacagtcagtggtgtgctgctagttacac

SEQ ID NO: 564736 - DNA, 100 bp, Homo sapiens
acacactgggaaacatcattaaatcgtgaccagaagtcagcagcttcccagaagccccgaagccggggcatcctccactcactcttctgctgtgtctgcc

SEQ ID NO: 564737 - DNA, 51 bp, Homo sapiens
ggtttgggaaacaaggcttccagtgccaagcaacccagactactacggact

SEQ ID NO: 564738 - DNA, 102 bp, Homo sapiens
tggagaaaaagaagaaaatgttaaaaagaacagatacaaggacatactgccatgcctgatcaaccccgtataaccaaagatgtaatttgttttcatgctgaa

SEQ ID NO: 564739 - DNA, 75 bp, Homo sapiens
tgaaaaacggagacttggatgaggtgaaagactatgtggccaagggtcgagctgtgcagttttagcgggtacaag

SEQ ID NO: 564740 - DNA, 100 bp, Homo sapiens
gtgtgtgagccctgctacgagcagctgaacaggtggcacaagaatggctcaactctccaaatagagagaatttctatcagttgcaagtacgaaaatttcc

SEQ ID NO: 564741 - DNA, 75 bp, Homo sapiens
tgctgtttgtatgcacgacttgaagacacgcacttatcattcagtggactgttcgccatggatttccctatcaac

SEQ ID NO: 564742 - DNA, 101 bp, Homo sapiens
gcgcagagccaaacagccaggcaggttgttggcatggaggggaagatgaggcagcaccttctaagcagagcacgtgtatacatatatacaaagaccaggga

SEQ ID NO: 564743 - DNA, 83 bp, Homo sapiens
aacctctcccccggctccatcgacctcaaggacatcaacttccggccgcagatgtcccagggtggcccagttgaaatccttcc

SEQ ID NO: 564744 - DNA, 76 bp, Homo sapiens
caaaacatgaaaagtgatacttttcaagagactgcttttcaggaagccttggacgctgcaggtgataaacttgtag

SEQ ID NO: 564745 - DNA, 100 bp, Homo sapiens
gaggctctttccaacgctgtaaaaaaggacagaggctgttccctatggcaggtgccaaagatgtacaatgggaatttgtacatggtttacttgaaaatgc

SEQ ID NO: 564746 - DNA, 134 bp, Homo sapiens
tacagtaagcggtcaggaaagccccgtggctatgccttcatcgagtacgaacacgagcgagacatgcactgataagcacattgaagaagtgcggaagaacaaagaatccaaagaccctgctgacgagactgaag

SEQ ID NO: 564747 - DNA, 80 bp, Homo sapiens
tgtctttcctaccatctaaaatacgaaggtttctggctggggcttcctgaggctgcggtggtcacgcttcgcccgtgtcc

SEQ ID NO: 564748 - DNA, 95 bp, Homo sapiens
tgcccgaagacacaaacaacaagggcagcccctatacaaggacagttggctcctaagggagggactaaatcaaatacttccctggacaagaaagc

SEQ ID NO: 564749 - DNA, 87 bp, Homo sapiens
tgctgccaaattatctgagactggataagatgaccttcagtgtgctgctcaaaaacaggtgcagattcactttataggaacagcttc

SEQ ID NO: 564750 - DNA, 100 bp, Homo sapiens
ccattggtctaaacttgatccaaagacaatgaaggacttcatagacctcacgttgtcgaagactcaacgaaagactccaaccgttattcataaacattac

SEQ ID NO: 564751 - DNA, 100 bp, Homo sapiens
tttggagaaaattggagatttgataacactggagatcagcaccaaatcccacagaggcatctgagctatcatggtgaacttacttcagattgtgcgggac

SEQ ID NO: 564752 - DNA, 74 bp, Homo sapiens
tttgggtggtgagatgctgaggcctgagggtttctaggagccatgtggctagaaatcctcctcacttcagtgct

SEQ ID NO: 564753 - DNA, 100 bp, Homo sapiens
ggaagcgatggcttcagacagcatatttgagtcatttccttcgtacccacagtgcttcatgagagtgatggaatggggagaagatattaaagcagtttca

SEQ ID NO: 564754 - DNA, 100 bp, Homo sapiens
catagcccaggcccggaagctggtggaacagctacgcatagaagccgggattgagcgcatcaagggacttccttccccgcggttcaggaatcgtcacccg

SEQ ID NO: 564755 - DNA, 137 bp, Homo sapiens
gtgtatccctaagaaggcgctgaagggcaaggaaagcagcatagagaatgagatagccgtcctgagaaaaccattcccggagtaataaatccagttggagcagcagtgatgagaagaggggatcgacacgttccgat

SEQ ID NO: 564756 - DNA, 90 bp, Homo sapiens
cctgtccagcatccgaccaccgaggctggagggggagaacacccaggaaaatgtttataggaggccttagctgggacactacaaagaaag

SEQ ID NO: 564757 - DNA, 50 bp, Homo sapiens
gaaccgaccatcagcttatacaagactcaactattgttactccaattatt

SEQ ID NO: 564758 - DNA, 90 bp, Homo sapiens
gctgctccagggcaaggccctcttcccgggaagcgactcacggatgataccatcggggaccttaagaagctgattgcagcccaaactggt

SEQ ID NO: 564759 - DNA, 75 bp, Homo sapiens
gccgctggagcgcgaggacagtgggaccttcagcttaaagaaagtggttattgtacaggtcatgaaccagattcc

SEQ ID NO: 564760 - DNA, 100 bp, Homo sapiens
gacgaagagctgcagctcctcctgtgcgggaagccatcggtatcagattctacccctgcattctcagattcctcgagaggaacagcgcaaagtgtttgat

SEQ ID NO: 564761 - DNA, 100 bp, Homo sapiens
gtgggcttttccgcaggccaagtccagcttatagacccaatcaaaaaagaaactagcaaactttttaatgaggaaaattaaacaaccaccatgtcgagca

SEQ ID NO: 564762 - DNA, 96 bp, Homo sapiens
tcgaggatgctgtccaggtgggcggccgcgggcgcgatgcggcactgcagatttccgtgagggtggaagaaaatcataccatatcagatgcctcgc

SEQ ID NO: 564763 - DNA, 50 bp, Homo sapiens
gagggggcgctgagctgttgggattgcagagggaatggcatacatcgagc

SEQ ID NO: 564764 - DNA, 98 bp, Homo sapiens
tcaaaagtcaaccgctgaagagcagagtgtgaacatggctacgcctcttcattcccgtccatgccgagcccccgactgcagcattcaaagcccccacg

SEQ ID NO: 564765 - DNA, 100 bp, Homo sapiens
ctttcttccagatggccaccatgtctgggagatggaagcgaaaactgaccgggacctgtgcaagccgtgcctccggagccagcgtggtggccatagacaa

SEQ ID NO: 564766 - DNA, 90 bp, Homo sapiens
agcggatccctgagctcgtcaagcagctgtcggccaagctcatcgccaacgagtgtgaacatggctacgcctcttcattcccgtccatgc

SEQ ID NO: 564767 - DNA, 100 bp, Homo sapiens
tcctttgaggatggtcagcctgtgcagctggaagatggcagcatggcttacatacaccgcacacccagaggcggccatcgtgagaatcatgaagatgagg

SEQ ID NO: 564768 - DNA, 100 bp, Homo sapiens
gaagaagaccttgaaatgcatccgctggtcgctgccggaaatggccaggtggaggcaatgcccagagctgtggcagccaccttgcagccgtgaagcacca

SEQ ID NO: 564769 - DNA, 111 bp, Homo sapiens
tcacgttgacgtccatttaccagtcttccctggcaagattcttctgaattgtgctgccttggccaaaagagacagaaccaagttgtattgttagacacactggaacaagag

SEQ ID NO: 564770 - DNA, 82 bp, Homo sapiens
ccaagctgtcatcacaaaagagttgattgaaattatctctggtgctgcagctctattgctctggaagcagccaaagcactgg

SEQ ID NO: 564771 - DNA, 75 bp, Homo sapiens
attccaagtaactcttatttggcccacccttcctccattctgagcacataaaaaccccacactcagccagactca

SEQ ID NO: 564772 - DNA, 95 bp, Homo sapiens
agaagatgcgctggagggaagagaacggagcgtcggacaccagaaaaactttgggggattcgggcttcgggctcagaatcaggttctgaaaaaag

SEQ ID NO: 564773 - DNA, 101 bp, Homo sapiens
gttccacgttcccaaggttgtgagtgcttatggccacattcctgcatcagctcagccatcgcgttgggccatatggtgctcttcccagtctggttcctgta

SEQ ID NO: 564774 - DNA, 82 bp, Homo sapiens
ccgagtcctgtactggactgcatcaggccgcgtctcctcaggggggatatgagactttctactcggaatatcctgagtgttg

SEQ ID NO: 564775 - DNA, 75 bp, Homo sapiens
gggcccacgctaccgggagctggtcaagaactggtgcgcgcggagccatggttatcatgtcggagttcagcgcgg

SEQ ID NO: 564776 - DNA, 97 bp, Homo sapiens
gccggggccaccctggcaatggtggacagtcccgccgtgcagcgcttcctggtctcccgggtcaccagaatggaggctccagagtgaaattaatgac

SEQ ID NO: 564777 - DNA, 118 bp, Homo sapiens
ctggcagtttgcacacctgtaaactgaagctgcaggaggaccggcgacagcaagagagtcttttccaaatgatcttcagttcaatattctaatgagatttacagttgatcagacccag

SEQ ID NO: 564778 - DNA, 87 bp, Homo sapiens
tggatatagcacaccatccccagccagtcctagcagaagatgtgactcagactgcctctgggtggggctggctggcccacagatcct

SEQ ID NO: 564779 - DNA, 98 bp, Homo sapiens
aactctttggatgattctgccaaaaaggagatctattgggaaactgattataaccactcgggcaccatcgatgcccacgagatgaggacagccctcag

SEQ ID NO: 564780 - DNA, 83 bp, Homo sapiens
gtggactcaacagtttgtggcaagacaagctcagaactgagaagctgtcaccacaggtaattttttctgcaggatgaattaag

SEQ ID NO: 564781 - DNA, 75 bp, Homo sapiens
aagaaacttccacgccttctaccaacattgtcgtggaagttctccgaatcctggttttgattggtcagattcttt

SEQ ID NO: 564782 - DNA, 98 bp, Homo sapiens
aacaagaagaagaggagaggaaaaaggaagagagcactgcagccagtgaaaccactgaggactccctggaggaaaagcggaagcggcagcggtctgaa

SEQ ID NO: 564783 - DNA, 98 bp, Homo sapiens
caagtattggtcttaaaacagtaattggagaacttcctccagcttccagtggtaacttacgacctatttctccgtggcgttggctgttttctgttgtt

SEQ ID NO: 564784 - DNA, 49 bp, Homo sapiens
gcagcatgtgcctcttcatcgccgtactgccttccccaggccctgccct

SEQ ID NO: 564785 - DNA, 95 bp, Homo sapiens
aaaccgccccagcgatggaagaggatcaggagctggagaggaatgtcgttgtctgctgggtcttcccctcttcattcccccaagattactccaca

SEQ ID NO: 564786 - DNA, 75 bp, Homo sapiens
gaagacaccaaaccattactggcttctaagtttggatttaggtggcgagtagaaaaagaagtaatttcaggaaaa

SEQ ID NO: 564787 - DNA, 75 bp, Homo sapiens
gggaaagggaagcttagcccgccgctgccgcctccgagcagcccgccaggcacggatgggcagaagcctttgcag

SEQ ID NO: 564788 - DNA, 90 bp, Homo sapiens
cggagcagcttccccccgcgcctctcttcgcctcgcctcgggacccgcggtccccgctcttgctgaaagaagatgctgatatgctacaac

SEQ ID NO: 564789 - DNA, 102 bp, Homo sapiens
cgcggcgtggacctcgaccagctgctggacatgtcctagtccgcgggagagctgtggggcttggtgagtgtttcgtggcctctcgggttggtcagcaccccc

SEQ ID NO: 564790 - DNA, 74 bp, Homo sapiens
agaattgtgccaaggggcaggacagaaggaggagtcagcccccggagcagttcgaagcattcagcaaacaatgg

SEQ ID NO: 564791 - DNA, 101 bp, Homo sapiens
tgctgctgctcggagtcttcgccgccgccgccgcggccccgccagacttcacatgtatcattctccgagcctgatattccgtcctcaaaaagtactgagtt

SEQ ID NO: 564792 - DNA, 78 bp, Homo sapiens
ggcagccgcagccactgggaatggtgatatattgatgcgcttcctgccaagcaaagagattgttctgaagaccgtgct

SEQ ID NO: 564793 - DNA, 83 bp, Homo sapiens
tgtggatcgctgtgatcgtcacttgccctgggcgctgcctatggcacagccaagagcggtaccggcattgcggccatgtctgt

SEQ ID NO: 564794 - DNA, 100 bp, Homo sapiens
gaagaacttgtacagagatgtgatgttggagaactatagcaatctggttttcttgggtggtggtcaccaatacaattccacatgaagtccagaagctcca

SEQ ID NO: 564795 - DNA, 75 bp, Homo sapiens
gcccttttctactttgccagcaaactggtgctcaaggaggtggtccaggccacgctggtggtcctggccttggcc

SEQ ID NO: 564796 - DNA, 74 bp, Homo sapiens
gcggccatgagctggtgtgcagccgcccaggagggagtcctccctgctgctgtgtggacgacacgtgggcacag

SEQ ID NO: 564797 - DNA, 75 bp, Homo sapiens
gcagaacgtgagggtgtaacttacaaaaagggtggctacggaccacaacatggataacacgtcaactgtgctgcg

SEQ ID NO: 564798 - DNA, 100 bp, Homo sapiens
acctctacaacgaaggtgaagccacggaagataaggagcaatttacagcaatgagggatttatacatgaaaaatggacaaggatttgcattagtttattc

SEQ ID NO: 564799 - DNA, 75 bp, Homo sapiens
gttttataaactgcctggccgaatcagccttttcacgctcaaggccataggaaaaggatacagagtagagtttca

SEQ ID NO: 564800 - DNA, 95 bp, Homo sapiens
ttggaataactggactcttttacactcaactaattggcatcatcacaaaatttaaaagcctgttgattcaagaactttctaaagtatttccggaa

SEQ ID NO: 564801 - DNA, 75 bp, Homo sapiens
gttctctgctgtttaaaaagtatccctgtgggaaagcgctctagcgagtgctgatttagaagaagaaattcacca

SEQ ID NO: 564802 - DNA, 51 bp, Homo sapiens
tgctatatccagaagtaattcaacagtgtttgctttcacaaccaaagttct

SEQ ID NO: 564803 - DNA, 101 bp, Homo sapiens
cctgtggaggctgtgctgcagctccaggactgcagcatcttcatcaagatcattgacagaataatttcttcaggttgaattacctagaagtttgtcactga

SEQ ID NO: 564804 - DNA, 100 bp, Homo sapiens
ttcaataaattgatggccagacctgcagttgctctacactttcagctactacccacagatggcatgatccgaaaacactctcatgtcaagatagggcgtt

SEQ ID NO: 564805 - DNA, 74 bp, Homo sapiens
gacgagaaacacgggagactcccggtaacccccaacttgccgggtggcccagttgaaatccttcccttcctcta

SEQ ID NO: 564806 - DNA, 87 bp, Homo sapiens
gacgtcgtgatccagaagtccagagctgaggactgcctgtttgcagatgggacccaggtgagcccgggtgcccactactgcagcccc

SEQ ID NO: 564807 - DNA, 50 bp, Homo sapiens
tgattcggaactttggaaaaactgtgagggtcttgctctgttgcccaagc

SEQ ID NO: 564808 - DNA, 75 bp, Homo sapiens
attcccctctacatagacgacaccctgacgtggaagatagatgataagcctgtaaaaattgacaagtgggatgga

SEQ ID NO: 564809 - DNA, 101 bp, Homo sapiens
agagcaattaaattcattgtctcagttcaagagtgaatatagcaacttatgtgaacctgagcagtttgtggttgtggaggaagaaggcacctacgatcaaa

SEQ ID NO: 564810 - DNA, 75 bp, Homo sapiens
gcccagccccttgtcagccagggctgaacccccgcaggcatgtggagaccccaaggcaaaaccatcctatcttat

SEQ ID NO: 564811 - DNA, 75 bp, Homo sapiens
gaccgaattaaaatttatacttcgcaaaactcagcaattttttgatgagatttcaggtatgctgctgaaagtggg

SEQ ID NO: 564812 - DNA, 74 bp, Homo sapiens
gccgacttcgatgatcgtgtgtcggatgaggagaagaacccagcgggtgccgcttctccacccgaggcttccac

SEQ ID NO: 564813 - DNA, 100 bp, Homo sapiens
actgccccgtctgtcaggaggtgctcaaaacgcccgtgcggaccacggcctgtcagcacgtaggctgaggggatctggcggtggagcgctaggatcagac

SEQ ID NO: 564814 - DNA, 101 bp, Homo sapiens
ctcacagaaactatatgccaccatggagaagcataaagagcctggatctaaaaaatcagcaaatggatcagatgataaagccagctgcaaggaatcaaaga

SEQ ID NO: 564815 - DNA, 74 bp, Homo sapiens
acgctgccagtttgcacagcagcagatgatttgtcattaattcggaagaacagaatggctctctttcaacaatt

SEQ ID NO: 564816 - DNA, 125 bp, Homo sapiens
cttgcattaactttaagacctcctccactggcaaagagtcacctaaagttaggcggcactccagccccagctcggcctatatgaacccaatagcaatggcgagatcaaggggtccaatccagtct

SEQ ID NO: 564817 - DNA, 107 bp, Homo sapiens
ctgcccggcgctgatctacaagaaaatccacaagaacgcactttcctcccaggtttggtgcacctcgatttggaggaagtagggcagggcccttatctggaaagaag

SEQ ID NO: 564818 - DNA, 98 bp, Homo sapiens
gaagttccacatgaagacacttggaggtaccaatcttgggaaaaagaagcaacacatttgtcatataccaggatgtggtaaagtctatgggaagacct

SEQ ID NO: 564819 - DNA, 88 bp, Homo sapiens
tgctgctgctcaaagctgctgccgccccttgggctaaaagccctagaaaacaatctcctggtccaaggtgcttgagtgggccgatcca

SEQ ID NO: 564820 - DNA, 75 bp, Homo sapiens
gcgcaggcctggtgcaaacagactcaagaggctcggagaaccagcttggaatatactgatgataatgctctgatt

SEQ ID NO: 564821 - DNA, 75 bp, Homo sapiens
gaggtcaacaaggttctggacaagatgaagtctttctgccagaggctgacccgcggctgattgagtccctctccc

SEQ ID NO: 564822 - DNA, 83 bp, Homo sapiens
cgcgcgcatctggctgcagctctgcggggcgcaggaggcggtgcacagcgccaagcgacatcaccccgcccggagagcctgtg

SEQ ID NO: 564823 - DNA, 100 bp, Homo sapiens
atcctcacctatgcaaagaaagggaagctattgctgggattttgaggaggtggttattaacttggtgatgcttttggctgaaatgaaaatacaggaccgc

SEQ ID NO: 564824 - DNA, 75 bp, Homo sapiens
agtttcgtgcagagcgcggaggagccgcgagcgctgaggtgtcaaatcaacagtgccttgacatctttccacact

SEQ ID NO: 564825 - DNA, 99 bp, Homo sapiens
agctgagcggcggaacccttcgctggcgggagcgcggttcggggccgcagaggtacttaaagctttcaccaaaacacccagaatcaaatactgctggaa

SEQ ID NO: 564826 - DNA, 50 bp, Homo sapiens
attctgttacatcaatcaaaaggttggcacagttaattatatgccaccag

SEQ ID NO: 564827 - DNA, 100 bp, Homo sapiens
agtcagacccatgctgctagttgatgatcgggcactacctgatttcaaagagtaaacgctcagcaatttttaaagacctagaagcaactaaaagtaagac

SEQ ID NO: 564828 - DNA, 82 bp, Homo sapiens
ccgaacaagaccgaaatccagactctttttaagaggcttcgcgcagttccaaccaacaagggtggcccagttgaaatccttc

SEQ ID NO: 564829 - DNA, 82 bp, Homo sapiens
cgcgctccagatgaagtgtgagcactgcacgcgcaaggttttaaaatcaaagatgggaaaatcggagaaaattgcccttccc

SEQ ID NO: 564830 - DNA, 100 bp, Homo sapiens
cctttctattttaaagagccaagcctcagagagatagccgtcttctggaaaaatctttgtatacatttacaaatcctgtacttctcctgctttgttttta

SEQ ID NO: 564831 - DNA, 100 bp, Homo sapiens
caggaaaggctgtgcctgggatcattgatgaggaaagcagtggaaacaatgcccagtacggtggcgccccccaggccctcaccctgaagctcccagtgac

SEQ ID NO: 564832 - DNA, 83 bp, Homo sapiens
cttcgagtgacccgggtgccgaggagcgggaagagttgctgggtgcacgtgccggaaggacatggtcaagatctccatggacg

SEQ ID NO: 564833 - DNA, 83 bp, Homo sapiens
ttcataaatgccttggaaaagaattgccaagtgacaagtttacattcagccttgattagagacggggtttcgccatgttggcc

SEQ ID NO: 564834 - DNA, 75 bp, Homo sapiens
ccatcccggaggtctccgccggctcccgggctttcaacagacctcacatctttcttcttatgaaattataactcc

SEQ ID NO: 564835 - DNA, 143 bp, Homo sapiens
gcaggcggggcttctccgtgtccgtggagagtgcctgctccaactacgccaccactgtgcaagtgaaagagttgatatgggaagtctggatgccttttgttcgaaatattgtcacccagtggcagccaaggaactgtgacccg

SEQ ID NO: 564836 - DNA, 51 bp, Homo sapiens
catgacctacagaatcaacggctgccggatggatagctcccagttgatcca

SEQ ID NO: 564837 - DNA, 100 bp, Homo sapiens
tgacttcccggacgctgggaaatggtcattgacgagactctggatgttaaggaaatgattttcaatgccgagagagttggaggcctcgaggaagagcggg

SEQ ID NO: 564838 - DNA, 100 bp, Homo sapiens
cttttggtaatgctgtttctgcttaagttggcaagacactccaagtttggcatgaaagttcctggtccagaactttacacagaaaaggtgctcaaaggat

SEQ ID NO: 564839 - DNA, 80 bp, Homo sapiens
ctcctttagaaaactgatcttaatacagggagtgcatccgccccaacccttttccccctcgtctcctgtgagaattcccc

SEQ ID NO: 564840 - DNA, 98 bp, Homo sapiens
cttccgactccgggcccaacagtttgtggtaaaacatggctaaaagcttacggagtaagtggaaaagaaagatgcgtgctgaaaagagaaaaaagaat

SEQ ID NO: 564841 - DNA, 100 bp, Homo sapiens
aagcgggccacgcacctcgtcaccaaggccaaggaaaacatttaaagttgatgatatgttatcaaaagtagagaaaatgaaaggagagcaagaatctcat

SEQ ID NO: 564842 - DNA, 83 bp, Homo sapiens
cgagctgagtggttgtgtggtcgcgtctcggaaaccggtagcgcttgcagcatggtacgccatcccaccagagcacggcaagc

SEQ ID NO: 564843 - DNA, 100 bp, Homo sapiens
acagacctatcaacatgaagaagatgaagaggacttctatcaaggggttgtggaaaccagaacttcgcctggagaacagagtgcaaccagtgtaaggccc

SEQ ID NO: 564844 - DNA, 100 bp, Homo sapiens
cctagttggaagaagtggtaagcccacgaacacaaatgcaggagggagaggtgccaagaagcagcggtacacctctggcagaattcacagaggcagatga

SEQ ID NO: 564845 - DNA, 74 bp, Homo sapiens
tgctgccgcctatgggcacaggcagtgtctggaattgggaagcagctcgagagtgtcgtagaaagaagaaagaa

SEQ ID NO: 564846 - DNA, 50 bp, Homo sapiens
aatactgaaattgatagcagtttgaatgtgcgatgtatgatgtatggctt

SEQ ID NO: 564847 - DNA, 75 bp, Homo sapiens
gagactcatcagattctgagctgctgcgggatattttgcacaaggttctgggccggagaaggggcgacgttcggg

SEQ ID NO: 564848 - DNA, 74 bp, Homo sapiens
gcagtggtcgcttcttctccttgatcggcttcaccaccgaccctcggatggcccgctcctccccctaccccact

SEQ ID NO: 564849 - DNA, 96 bp, Homo sapiens
cttcactcactggctgcaggaagctgagaattatccttggacttacataaagcattttggactttatcaacatgtcatggtttagtggcctcctgg

SEQ ID NO: 564850 - DNA, 74 bp, Homo sapiens
ccccattcaaaacaacttattggatatgtattcgctgctgaatgagaaagatcagtctaaagaaaaggagaaga

SEQ ID NO: 564851 - DNA, 95 bp, Homo sapiens
ggcgctgccgctcccgggcggccgcgggcggaacccttaggagaaatcttgagagtggacagcaattgtgaagatcgccagagagttctgtgttt

SEQ ID NO: 564852 - DNA, 100 bp, Homo sapiens
gggacctttcctattcggttcctgaaggaccctggtggaggaagaaaggtgctggagaatctggtaaaagcaccattgtgaagcagatgaggatcctgca

SEQ ID NO: 564853 - DNA, 75 bp, Homo sapiens
cgagaatcaaagggccgggagcgatgagatcctgaaggagctagacgagtgctacgagcgcttcagtcgcgagac

SEQ ID NO: 564854 - DNA, 87 bp, Homo sapiens
ctccgagcgcaaggacagcgcgaggtccgcgcagcccagcgcagccatgatgaatttcatcctttcatcgaagcacttctgccccac

SEQ ID NO: 564855 - DNA, 82 bp, Homo sapiens
ctgaggagcgccgctgcctcgcctcgctgtttttggaaggaagaaagatggaaagcggtgcagttctgctggaatccaaatc

SEQ ID NO: 564856 - DNA, 95 bp, Homo sapiens
ttattacttcatctgcttggtagaggtggctttagtgaagtgtataaggaagaagaagaattttcagttcttgccagctgcctgggacttctgcc

SEQ ID NO: 564857 - DNA, 90 bp, Homo sapiens
gaaataccgtgccctgaggttggacgtggggaatttctcctggggctcagagttcaaggcggataagaaggcggcacaagaaaagatgat

SEQ ID NO: 564858 - DNA, 97 bp, Homo sapiens
gcccagttggcccagaggatctcttctaacatccagaagatcacacagtgttagtaaaagcttttagaactttacaagaagctctcaagtgtaacta

SEQ ID NO: 564859 - DNA, 117 bp, Homo sapiens
atctccagcaccctcatcgccctggccgacaagcacgcaagaggatttgatgaagatgttaaagcgaaagtggagaaccttctcgggatttccagcctggaaaaaacggaccctgtt

SEQ ID NO: 564860 - DNA, 78 bp, Homo sapiens
gcacttcctggcaatgatagatacatcagtgtgggaagccaagcagatacaagccctaaaccagttgtttgagaaaat

SEQ ID NO: 564861 - DNA, 76 bp, Homo sapiens
taacagtacaaaagtccagaggtgagaaagatcagtctaaagaaaaggagaagaaagtgaaaaaaacaattccttc

SEQ ID NO: 564862 - DNA, 98 bp, Homo sapiens
tgaaatggattcgacctcaaaccaggctgggcggggagcgtcggaccagaagagaatcacgccaggaaagcgacccggaggatgatgatgttaaaaag

SEQ ID NO: 564863 - DNA, 90 bp, Homo sapiens
gcctgatcaagctactccagcagccttggtattacagggtcttcatgcactctgtcaagctgagattgctcgctgtaagcagctcatctg

SEQ ID NO: 564864 - DNA, 101 bp, Homo sapiens
tgcggctgctggacgacagcgagtacacctgcaccatccaggagctgacatggacccaaatcctcgggccgccctggagcgccagcagctccgccttcggg

SEQ ID NO: 564865 - DNA, 75 bp, Homo sapiens
ctgcggcagcaggggactagcgtgagaggtgctgggcggcggagagccccgagaaggaggaggagagagagccag

SEQ ID NO: 564866 - DNA, 100 bp, Homo sapiens
gtcttcatagaccagaaccttagtcccgggaaaggtagacgttacatccaagaggaaataatccaggcaaggaagcacaagctgatcaagatgtgtagtt

SEQ ID NO: 564867 - DNA, 101 bp, Homo sapiens
tatattcatctcaaaaacaaaattctgaactcaggacttggcaagtaactgcgtcattgattggctggtatccaaccagtctgttaggaatcgccaggaag

SEQ ID NO: 564868 - DNA, 100 bp, Homo sapiens
acggaggaaaaaaagagttgcgggaggctgtcggctaataacggtgtatgtggaatttgatgatcttgaatgggataaacgagagtgggttaaagtttat

SEQ ID NO: 564869 - DNA, 100 bp, Homo sapiens
tgctgccatctttccaggaggctttggagcggctaaaaacctacctcctgccccccgaggtctgcagtctcctgaacccagcagccatctacgccaacaa

SEQ ID NO: 564870 - DNA, 76 bp, Homo sapiens
gcacagagaccgtgaagattccaagttcaggagaactcgaccgtaggttcagctgcagcccggaaagaaatcataa

SEQ ID NO: 564871 - DNA, 89 bp, Homo sapiens
ctcttccaaagaatgccacagaatcaggggaggcatgcttcagcctcgatgacttacgagccctcaaggggaagcattttctcctggac

SEQ ID NO: 564872 - DNA, 98 bp, Homo sapiens
cgtccctggatcgggtgaaggtactggtgttgggagactcagttccgcagaaagggaaccttctcatttacaccgagtttggcaagatgcttgtacag

SEQ ID NO: 564873 - DNA, 84 bp, Homo sapiens
attttttattcgttactatgtggatgttccacaggaagaagtgccattcaggacaattccttcggcgaggggaggtgttttggg

SEQ ID NO: 564874 - DNA, 101 bp, Homo sapiens
ggctgaacataacttctttttttcaaagttccctgtgttgtgaactgagcttgggtgaagtgaaatctttgaggtctgctcaccaggtggccagataccgc

SEQ ID NO: 564875 - DNA, 83 bp, Homo sapiens
gggtaaagtcgagtatctggtgaagtggaaaggatggcccccaaagctccataaaaatacagactcaccagttcctgctttga

SEQ ID NO: 564876 - DNA, 100 bp, Homo sapiens
gtgaccgtgctgggagacctggagcagctgctcttcagccagatgctgggtccccgcggaagccgcggtgtcggcgccatggcggagctgacggctcttg

SEQ ID NO: 564877 - DNA, 78 bp, Homo sapiens
acagcttcgacttagccctgctccaggaatgggacctcgagtcactgtggagcccatgaaatcaagagcaccacagct

SEQ ID NO: 564878 - DNA, 88 bp, Homo sapiens
gaagtatgaggtggtgaaactcaagatccccatggacaacaaggaggagatcctgctgggccgtggcttcaccttttggcagtggttt

SEQ ID NO: 564879 - DNA, 98 bp, Homo sapiens
ggacctgtcccacctggcggccatcgtcatcctgctgctgaagatctggaagacgcgctcctgcgccggaagacataggccaaggagccagacttcct

SEQ ID NO: 564880 - DNA, 75 bp, Homo sapiens
aattgaagagccatccctggagccagattcaactttcacgtatcaaaccaccctgggtggttaaaggtcagccca

SEQ ID NO: 564881 - DNA, 100 bp, Homo sapiens
cagacggcgacagtggcggcggcgccatggcagggcttgcaggtgctttacaaggccaagtacggtccaatgtggatgtcctacttagggcctcagatgc

SEQ ID NO: 564882 - DNA, 89 bp, Homo sapiens
tccttgaatgttgaagatgtccttaccagctttgacaatacaggaaatgtttgttgtaaacatgttaaaggcatcctgttatatggacc

SEQ ID NO: 564883 - DNA, 74 bp, Homo sapiens
gagatgggcgatgagagcgaggagttcctgcaggtgtttgatcagtatgtaaagaccagggcagaggaagaacg

SEQ ID NO: 564884 - DNA, 100 bp, Homo sapiens
acgtgaaaaaaaagacctgctttgccctgggaaatagtaaccctgccaaatacatcagcttgtaggagacagaggcatgactgggatcctccagacagaa

SEQ ID NO: 564885 - DNA, 89 bp, Homo sapiens
ctatggcccgggctcactggggctgctgcccctggctggtcctcctctgtgaatatggacggagccttgaagatgacattcgctctgac

SEQ ID NO: 564886 - DNA, 76 bp, Homo sapiens
cagctgcggagcagtgcgtcagagtttcagaaacaaagggtcatcctttctagaaagagaaccgctgtgctatcag

SEQ ID NO: 564887 - DNA, 100 bp, Homo sapiens
ctgtgcatacaggacgggtccatccatcgcataagagcaaagaatactattgttgccacaggtgagaaagatcagtctaaagaaaaggagaagaaagtga

SEQ ID NO: 564888 - DNA, 100 bp, Homo sapiens
gacaaggttaataaagctgccaaggaagcggtttgacagggctgaagcagagtacattgcagcaaagctagatatacagcgcaagactgagataaaagag

SEQ ID NO: 564889 - DNA, 100 bp, Homo sapiens
tcaactccaggcacgaggccagcctgaagttgtacaagatccgatcacataggacagtatgcaccttaagatcctgaagaaacggcacaaaatgttcaag

SEQ ID NO: 564890 - DNA, 75 bp, Homo sapiens
agttcaaattatgaagatgctttgccacccccatatcatcaggctctaccaggtcaatgtgacggtggactacat

SEQ ID NO: 564891 - DNA, 76 bp, Homo sapiens
tcaggagaggctcagggagactgagggtatctcctctgagggtgatgctgacccagatggcgggctcgacctggag

SEQ ID NO: 564892 - DNA, 75 bp, Homo sapiens
cgccacagaaacatccggcccagacatgactatcaagagtatgccaagatggaaggaagcctcatacagtgagat

SEQ ID NO: 564893 - DNA, 50 bp, Homo sapiens
tctggagtttgcatacacaggacagtcaggccttgaaaagaggatagacc

SEQ ID NO: 564894 - DNA, 75 bp, Homo sapiens
aactggcagacggatatttactgaatgtatcctgtcaggtataatgtcagtgaatggcaagaaagttcttcatat

SEQ ID NO: 564895 - DNA, 75 bp, Homo sapiens
ggagataacgcggccttgggctctgaacatccagtcatggataaaaatgagctggttcagaaggccaaactggcc

SEQ ID NO: 564896 - DNA, 100 bp, Homo sapiens
ctggggacagtttggtattaaaagtactccaaagattcaggtttactcacgtcatccagcagagaatggaaagtcaaatttcctgaattgctatgtgtct

SEQ ID NO: 564897 - DNA, 134 bp, Homo sapiens
gctctcgcggcgcacggcggcgaaggggtcgagcagggagcagcgcagcgcgcgcagagcgtcgtccagccctcaagggaacaaagccgatgacagccggatgagcttgttgggaaaactggtctccatggcgg

SEQ ID NO: 564898 - DNA, 75 bp, Homo sapiens
ttgaaattatctctggtgctgcagctctgtaccaggtcatcagtacaccatctgatattttcatggtgatggaat

SEQ ID NO: 564899 - DNA, 50 bp, Homo sapiens
cgagggcaccccaaccctgtcggtgcccaggagctggtgcggatggacag

SEQ ID NO: 564900 - DNA, 75 bp, Homo sapiens
aatgccacagaagaaatgctgcagcagcttattaaaagacatgctgaccctgaagggtcaaattgaaaagctgga

SEQ ID NO: 564901 - DNA, 51 bp, Homo sapiens
tccgacacctccagcccggaggccgcagaggagaggagacgccgtgagcgg

SEQ ID NO: 564902 - DNA, 82 bp, Homo sapiens
gccaactgctgtatccgcatcgcccttcctgcccctcgaggctcaggaactgggtggcacctgtggaaatgaaacggagaaa

SEQ ID NO: 564903 - DNA, 87 bp, Homo sapiens
ttcagaagagttaagaccagaagtactggaatcatacttcctttcagggacttgccatgaggtgttgaagccttgtttcactgagtt

SEQ ID NO: 564904 - DNA, 111 bp, Homo sapiens
tcgctggtgcagcgatattcccaggacagcttcagcaaacactacaagtccacggtgggagaaataggaaggttgttgattactcacagtttcaggaatctgatgatgcag

SEQ ID NO: 564905 - DNA, 98 bp, Homo sapiens
tggattcggatgaaagtcagtttgttttcgctctggctggaattgtcacgagtgccgtgagcgatgtggagatgcaggaacactatgatgagtttttt

SEQ ID NO: 564906 - DNA, 80 bp, Homo sapiens
cttaccaagaattattatactgtgctgcacatcattgactcctgggcccaactgtgaccgatttaaactgcacataccat

SEQ ID NO: 564907 - DNA, 100 bp, Homo sapiens
tacttcccaaaacatcctggaatatccctcagcctggtgagggtgatgttcgggaggaggccttgtccacaggtgcaattgctggtatagttgatcagcc

SEQ ID NO: 564908 - DNA, 100 bp, Homo sapiens
gctcgctccgctcgtcccgctcgtcatggcctacccgggatacggaggaggggttactataacaacagtaccaaggtggctgtgaaaaccctgaagccag

SEQ ID NO: 564909 - DNA, 90 bp, Homo sapiens
tgctcgcgctactctctctttctggcctggaggctatccagcacgctctgcacaaaagccaccatgcagacggtccgggccgccgacacc

SEQ ID NO: 564910 - DNA, 74 bp, Homo sapiens
ggcgggtcatggagccgctcactgccagccgtctgcaggaaccaggctggagaatgcttacagagcttttgtgc

SEQ ID NO: 564911 - DNA, 116 bp, Homo sapiens
cgcaatggtgctaccctggttgctgctcgagactgcgcgcagggcggtcctcgggtccgcggaggctgcgctctgcggttgactttggatttgcgaagaaaatagggtctggacag

SEQ ID NO: 564912 - DNA, 75 bp, Homo sapiens
agtgggatggatcagctgtgaaaaactctttggatgattctgccaaaaagattgcaacacctgctcggtataccg

SEQ ID NO: 564913 - DNA, 100 bp, Homo sapiens
aataatgaagttaaaagagcagcactccaaggtaaagtgttgagagaggagaaccagtgcattgctcctgtggtttccagccgcgtgagtccagggacaa

SEQ ID NO: 564914 - DNA, 73 bp, Homo sapiens
cttgattgagttaatgaacttcacgcctcagcgtccagacatgcggcgggatgtgcaggagatcttccgcctg

SEQ ID NO: 564915 - DNA, 100 bp, Homo sapiens
cttctccactggttcctgggcaccgaaaggttctattattgtcaaggtcccatcttcacttcaagctcatttacagttatcagggaaagaggttgatgtg

SEQ ID NO: 564916 - DNA, 100 bp, Homo sapiens
cgggaaagcaggaagggtgtcactgaccccaaagaactgaaattctgcgttcaaggcacaagtgatccttatgtgaaatttaagctgaatgggaagacgc

SEQ ID NO: 564917 - DNA, 74 bp, Homo sapiens
gggaagctcattgaagcagaggacaacatgaactgccaggaagattttcagtcaatgacttatggatttaaaat

SEQ ID NO: 564918 - DNA, 80 bp, Homo sapiens
gtcatgaccactagacccacagctgttaaagcaacaggatgtgaagtgatagctgtgaatacccgctccacgagtcaaac

SEQ ID NO: 564919 - DNA, 75 bp, Homo sapiens
tcagaaaaagcatccccgaggaggaagacgaatcgttaaacatcttaggtcagattttgaagacattttggctac

SEQ ID NO: 564920 - DNA, 90 bp, Homo sapiens
agaatgacagcaagaggcaaaacttcggacatagaggccaaccaacctttggagatcctgataacttaagtgactctctcttttccggtg

SEQ ID NO: 564921 - DNA, 75 bp, Homo sapiens
atttttagaactccacatttgagcagtccagagcgtgagtccattcacatcctgagtgttgatgagaagaacaag

SEQ ID NO: 564922 - DNA, 100 bp, Homo sapiens
cggcagcggaagatggtgttgctgagagtgttaattctgctcctctcctgggcggcggggatgggagggaaagcaggcaggatgggagagtcgccgatag

SEQ ID NO: 564923 - DNA, 90 bp, Homo sapiens
ggcctactcgcccgccaccctgcgctgccgccgctctgaggagttaaaggaccatggccaacctggagcgcaccttcatcgccatcaagc

SEQ ID NO: 564924 - DNA, 100 bp, Homo sapiens
aaaaggatcccagaaagtttcaggcaaagggcgttgtgaatacagctgtgtctgcagcagtccaagctgttcggggcagaggaagaggaactctaacaag

SEQ ID NO: 564925 - DNA, 100 bp, Homo sapiens
tcaactaagaccaagtcctcgctggactgctcagggtgccagacctcatcgtgccgtgagcgatgtggagatgcaggaacactatgatgagttttttgag

SEQ ID NO: 564926 - DNA, 75 bp, Homo sapiens
gatgagcctgtggatatgagtgctagacggagtgctgttgggacattcgccagagccctggattgcagcagttct

SEQ ID NO: 564927 - DNA, 101 bp, Homo sapiens
cgagcggccgcgagcagagccgcccagccctgccagctgcgccgggacgaggcaaaatcagtaaaggcttggaggatttaaaacgtgttagtccagtagga

SEQ ID NO: 564928 - DNA, 80 bp, Homo sapiens
gcggccgccgcgggggctgcggccgcgggcgatgccaaaaacggagatgttacagcccagatagctcttcagcctgcact

SEQ ID NO: 564929 - DNA, 100 bp, Homo sapiens
ctcccgggtcgtctttcgtgtggccgcgagtttttcacagcatatggtcctgattatgtgctggaaatcacgccaagctgccggccagaccgcaatgagc

SEQ ID NO: 564930 - DNA, 83 bp, Homo sapiens
gtacctctccttttccctctccctttccctaagcttattgcaggagtgaccaggacactacctcctagaagtaatgcccacag

SEQ ID NO: 564931 - DNA, 90 bp, Homo sapiens
gcagcggaggccctacgtttcctatgtgaacaacagcatcgcccgggtaggtgcacgtctcatcgcacatgctggcagcctcaccaacct

SEQ ID NO: 564932 - DNA, 76 bp, Homo sapiens
atgagtcctgccaagtgcaagatctgtttccctgatcgcgaagtaaatggcattggcctggccctctgcaagcggc

SEQ ID NO: 564933 - DNA, 97 bp, Homo sapiens
gctccttggtgagaagaccaccacagcggcaggtgtgttgaggctcctggaacacggggaggagtacgtattcaccctgcctagtgcctacgcccgg

SEQ ID NO: 564934 - DNA, 75 bp, Homo sapiens
ccctcagccagttcgtgattcacaggagcctctgtatcagcaccatgcagcagaactattcactggctgaacttg

SEQ ID NO: 564935 - DNA, 76 bp, Homo sapiens
gaaaccctctctgagttcttgggcacgttcatcttgattagcactacaaacaccactggtttcccgaaaagccgtc

SEQ ID NO: 564936 - DNA, 122 bp, Homo sapiens
catcaggtgatggataggagcaaccctgtaaaaccagccttagactatttttcaaacatgctcaacaggaaccttggattatattttacaacgctgtcagttggctctgcagaatgtctgtg

SEQ ID NO: 564937 - DNA, 75 bp, Homo sapiens
atcttgtatccctatcgtttcaccaaaggaatgattcattcaatgcagctcgagaggagaatgtggccactttcc

SEQ ID NO: 564938 - DNA, 98 bp, Homo sapiens
cctaccatgtcagccttcccagtagctgggaccacaggctgggaagagatgctgatttctgcgataaaatcagtaggtacattttttggaatgttcgc

SEQ ID NO: 564939 - DNA, 75 bp, Homo sapiens
cagaaggattccgggagcacagttccgccgaactgtgccctgtccacggtgcctcctgcatgtcctgctgccctg

SEQ ID NO: 564940 - DNA, 82 bp, Homo sapiens
tgacgccatgtcgggttattcgagtgaccgagaccgcggccgggaccgagggacacattcagctaacgtattttagcaggtg

SEQ ID NO: 564941 - DNA, 82 bp, Homo sapiens
gcgtgccctacttcaaggataagggcgacagcaacagctctgccggctggaaggatggataaggtgggggatgccctggagg

SEQ ID NO: 564942 - DNA, 75 bp, Homo sapiens
gcgggactgagagcgcctggaggctcgagcggagggttttcctcctccaccaggcgctccacctccatctcttat

SEQ ID NO: 564943 - DNA, 96 bp, Homo sapiens
atgtcatccacgccagcgactccgtggagggggcccagcgggagatccagctgtggttccagagcagtgagctggccgccatggcatcagatgaag

SEQ ID NO: 564944 - DNA, 74 bp, Homo sapiens
ttgaagccgcctctgtattacttaccaggtggttctgccatgtggacgatgacaactatgtgaacccaagggcg

SEQ ID NO: 564945 - DNA, 98 bp, Homo sapiens
gagcccactctaggagccccaatagcccaggagcttgggtgtgctgacgagcagggtgatggtgcacacgcttgccagcaacggggccaactccatct

SEQ ID NO: 564946 - DNA, 75 bp, Homo sapiens
ggtccctgaagagggaagacacgcggaaacaggtccttgaatgggcaagagggcacatgaagtacggcgtcctcc

SEQ ID NO: 564947 - DNA, 100 bp, Homo sapiens
gcaaatctgagcgttctcaacttggttattgtaaaaaaagcgtgcatcgcttcaaggccgggacagtgtggccgagcagatggctatgtgctagagggca

SEQ ID NO: 564948 - DNA, 83 bp, Homo sapiens
aaggccatggcagtaatagcgtgtttatctgacacggacgagatgagctgccctgtgacatgcggatcccatctgacaagcag

SEQ ID NO: 564949 - DNA, 80 bp, Homo sapiens
atttgatgttgcaagtatcatcctgggctccaaggagaggaatgccttccctgtgtctggtcaactctatacaacacacc

SEQ ID NO: 564950 - DNA, 85 bp, Homo sapiens
acaatgactgcggagactacagtgatgagacacacgccaactgcaccaaccagggtgtctgcctgtatcccagtgttcaggctgg

SEQ ID NO: 564951 - DNA, 100 bp, Homo sapiens
cagcgaagaagtagacatggcgagcgactccccggctcgaagcctggatgaaatagatctctcggctctgagggctgaagccgacgtagcttctctgaac

SEQ ID NO: 564952 - DNA, 76 bp, Homo sapiens
aatagctgaacgtttgatgcatttgacctctgaagaactgaatcaagctatagaagtggtctggagtcaccagcct

SEQ ID NO: 564953 - DNA, 101 bp, Homo sapiens
cctctacagaaggaagcacaaaaagggacagtcgatcaacaacccctccccgtcgtaaacgctgaggaatgatgtggcaagaatgccatgatgttctttaa

SEQ ID NO: 564954 - DNA, 98 bp, Homo sapiens
ggcgacgaaggccgtgtgcgtgctgaagggcgacggcccagtgcagggcatcatcaatttcgagcagaagattgcaggatacctatatggggtgagcc

SEQ ID NO: 564955 - DNA, 96 bp, Homo sapiens
catcaacccactcaatggtagtgtctgtgaaaggcctgggcttcgtgggacacatatgcaacatgcctatgatttttacaagcctgatatgctatc

SEQ ID NO: 564956 - DNA, 96 bp, Homo sapiens
ctcagcctcccgagtagccgggattatagaactaagttcagaaaatcttagaacttgctttaagatcatcaatggttatatctttttatcatcaac

SEQ ID NO: 564957 - DNA, 75 bp, Homo sapiens
gcgcttcgtacccagccagcactatgtatcgagaaccttccctgcgaacttcagaggaacttccagctgatgcga

SEQ ID NO: 564958 - DNA, 74 bp, Homo sapiens
cggagtggcgcccggcgaggtagcgccaggcgagattcttcagcttgtctctaaccgaggaagcattgattggg

SEQ ID NO: 564959 - DNA, 95 bp, Homo sapiens
tcaccactggacctccaaggaagccacgtgcagacatctacaaccttcgatctcctgacgagtatatgaatgacctaaaggtacaaataaagacg

SEQ ID NO: 564960 - DNA, 82 bp, Homo sapiens
gaacgaccggctcctgctcaagatctcagagaaggaggaggtgaccacgcgcgagaaagaagatgctgatatgctacaacac

SEQ ID NO: 564961 - DNA, 100 bp, Homo sapiens
ttcagacagcatatttgagtcatttccttcgtacccacagtgcttcatgagaggtggaaccgtcccaaaatgtcccttgctcagaagaaggatcgggtag

SEQ ID NO: 564962 - DNA, 90 bp, Homo sapiens
ccgctatgacgtgctgggggtcatcgacagctgcaaggaggccgtcaccttcaaggccgtcagacaagggagttctgggaaatcgttcat

SEQ ID NO: 564963 - DNA, 75 bp, Homo sapiens
ctcactctgagtacggtctcacagacaacgttgagtccacggtcgcggaccctctacctccgactgcaaagcagg

SEQ ID NO: 564964 - DNA, 100 bp, Homo sapiens
gtgacccggcgagaggcggcgccgctcccaagatgtcgcagacggccatgtccgaaacctacgacagttcgtggaagttatggctagtgctctgactggt

SEQ ID NO: 564965 - DNA, 100 bp, Homo sapiens
ttgccgctgtggctgcggctaactgtgtcaatatccccatgatgcgacagcagccctgaaagcagcagatctcacctgcattggaggatgagacgccaca

SEQ ID NO: 564966 - DNA, 100 bp, Homo sapiens
actctgagtacggtctcacagacaacgttgaggtggtcctggctctgccatatgacacccccgtgcccggctacatgaataacactgtcaacaccatgcg

SEQ ID NO: 564967 - DNA, 74 bp, Homo sapiens
aagaattttgataaaatcagagtgtggctgcaaagtgaaaagcttgaacgtctcctctgagcctccggcctcca

SEQ ID NO: 564968 - DNA, 83 bp, Homo sapiens
cggccccctggagggggcagtcccgggagaacctgcggcggccggagcgatgccttcaattaagttgcagagttctgatggag

SEQ ID NO: 564969 - DNA, 99 bp, Homo sapiens
aacggctcgcagctggctgtggccgctggcgggtccggccgcgcgcggggcgccgacacctgtggctggaggggagcatttcctgaagacgtagtcatg

SEQ ID NO: 564970 - DNA, 75 bp, Homo sapiens
cccacacctcccagcatcctgcccagccgacgtggggggacctgatttcccatcgccttctgtccccctaaaggc

SEQ ID NO: 564971 - DNA, 97 bp, Homo sapiens
tccgctgctgctgaggagaggagcgtcaacagcagcaccatgggtctggagcccggcactgtggtcataacagagcaggcagtggatacctgcttca

SEQ ID NO: 564972 - DNA, 52 bp, Homo sapiens
atccaggagtcagtttattactggaaaagggtcctccgcggaagggcagctg

SEQ ID NO: 564973 - DNA, 90 bp, Homo sapiens
tgtaggctcaaagctgaaaatgctggagaggaaggggtggctggctccctccccaggcgtggtgtgtgatcctgtaaaattaaatcttcc

SEQ ID NO: 564974 - DNA, 98 bp, Homo sapiens
accagctctttctccaagtttgatggctgatcttgaaggtttacacttgtcaacttcctcttcagtcatcagtctgttgcagctaattgcaaaatccc

SEQ ID NO: 564975 - DNA, 75 bp, Homo sapiens
tggagctttgggatgagcccagcgtggaggtcacatacctcaagaagcaggatggccaggccatgttatgggatc

SEQ ID NO: 564976 - DNA, 98 bp, Homo sapiens
cggccgcggccatggcgtacgcctatctcttcaagtacatcataatcggcgacacagatacttgccagaactaatacagctgatgaaatacctgacct

SEQ ID NO: 564977 - DNA, 99 bp, Homo sapiens
ggcactgtattctttacctgcttcccaatcccactgatgaggatcagcccatggaactgtctatcttgaccatgcaggtgccaccttgttctcccagag

SEQ ID NO: 564978 - DNA, 100 bp, Homo sapiens
atgacatccttctttttagagatcgttttgatggatatatcttccttgacagcaaaggctttggtgtcaggatgatgctggcttcataaaatgagttacg

SEQ ID NO: 564979 - DNA, 80 bp, Homo sapiens
actgggatttcaacctgaaagtggaggctgcgaaaatagagggtcttacagacgtcattttataccaccaaccggatgac

SEQ ID NO: 564980 - DNA, 75 bp, Homo sapiens
agagctctccgggttccccggctcgcggggcccggcgaagggcagaacccagtgacttgattgtaaaaatttaca

SEQ ID NO: 564981 - DNA, 75 bp, Homo sapiens
cctggtgtcacctatcagtaaaagctccagtcagtctcagtcatcctacatcatcaggaatccacagcagaggcg

SEQ ID NO: 564982 - DNA, 100 bp, Homo sapiens
ccgagagcgcgaatatcgtcatcgttagaaggtgctgcgacaagagactttggacaaaaattgacttgagtaggtgtaaggccattgtgccccaggccct

SEQ ID NO: 564983 - DNA, 86 bp, Homo sapiens
ggagaccgggcagctccccaaagacaggagcacagatcttactgtgccgagatcgctcacaatgtttcctccaagaaccgcaaagc

SEQ ID NO: 564984 - DNA, 100 bp, Homo sapiens
cgggagtcggcgtccaggctcggagcgcgacacggagactaggtggcaggccctgggaggagcggggacactgaggacctctctccaaattggcctctca

SEQ ID NO: 564985 - DNA, 75 bp, Homo sapiens
caagtatgcgcccagcggattctacattgcctccggaggtggtcctgccatcatggctgtcctctgcaaaggtct

SEQ ID NO: 564986 - DNA, 74 bp, Homo sapiens
gcgactcttctgacctccgcgcgacgtacccgccgccgccgttggctggagaggtcctatacgttgcttgtgga

SEQ ID NO: 564987 - DNA, 96 bp, Homo sapiens
agatttttgctgtctctggcctcatttctgatcgggaagcctcatctagcccagaggatcggaatgacagatcaataggcgaatatgaagacctta

SEQ ID NO: 564988 - DNA, 90 bp, Homo sapiens
gtagccctcgtccagacgccccaaacaaacaaattaaacaaccaccatgtcgagcaaaaaggcaaagaccaagaccaccaagaagcgccc

SEQ ID NO: 564989 - DNA, 100 bp, Homo sapiens
cctggaatccctgtctgggtgcggactcggagaagccctcgagcatccccacaggatcagatttgcaagtatgtctccctaagggcccaacatgctgctc

SEQ ID NO: 564990 - DNA, 80 bp, Homo sapiens
cctcccacagtgctgggattacagcatttgctcttgcggaattaattgacaattcattgtctgctacttctcgtaacatt

SEQ ID NO: 564991 - DNA, 87 bp, Homo sapiens
atttgttaaggattccaagtaactcttatttggccttgtttgtatgaagtccagcacatctgtggttgagcttgttatgctgctttg

SEQ ID NO: 564992 - DNA, 82 bp, Homo sapiens
tttctgctgctgaagtaatgcaatggtctcaatctctggaaaaacttcttgccaaccaaaaattcaattcgtcataatctgt

SEQ ID NO: 564993 - DNA, 100 bp, Homo sapiens
ctgccggccgtctgtcccagtgatggatgcacctggaaggggaccctgaaagaatacgaggccttgctgcagcacacgtctgagcaggaggagatgcggg

SEQ ID NO: 564994 - DNA, 100 bp, Homo sapiens
ctccagcggcccccagccgcaacccctgctgcctgtgctggtgctgctgctgtagctgctcctgtaactctctgtcctggtatggtggggaatcctacat

SEQ ID NO: 564995 - DNA, 100 bp, Homo sapiens
accgccacatccaggactccttccacagaggcttgcattgatgacaatgttgatatggtgaagtttctggtagaaaatggagcaaatattaatcaacctg

SEQ ID NO: 564996 - DNA, 82 bp, Homo sapiens
cccgctcaaagatcttgtctcgctggcctgcgacccagccagccagcaacctggaccggattttttatcaagcagaaatgca

SEQ ID NO: 564997 - DNA, 83 bp, Homo sapiens
tccttcggcagtccacccaccgccgccgcctcccaggttggccgactgcgatgtgagtgacagcagctgcagcagcctcgccg

SEQ ID NO: 564998 - DNA, 82 bp, Homo sapiens
cggcgctcgccatggccgacgaaaagcccaaggtgagaagccctaccactgcaactgggacggctgcggctggaagtttgcg

SEQ ID NO: 564999 - DNA, 101 bp, Homo sapiens
cgcgcgggcaccctgcagcgcgagctggaccacgagaggaagctgagggagaccgtgacagagctgaatgaacctctctccaatgaagatcgaaatctcct

SEQ ID NO: 565000 - DNA, 71 bp, Homo sapiens
taagatctccaggtgaagtagatttttattgctgagtcatcactagagagtgggaagggcagcagcagcag

SEQ ID NO: 565001 - DNA, 90 bp, Homo sapiens
cccgcgtccggcttggatatcttcggggacctgaagaagatgaacaagcgccaggtatctttcagatgaaggcattgaagcttgcacaag

SEQ ID NO: 565002 - DNA, 80 bp, Homo sapiens
taccccgcagttcccggacatgatcctctccgcctctcgagacaatgcagatcttcgtgaagactctgactggtaagacc

SEQ ID NO: 565003 - DNA, 51 bp, Homo sapiens
gcgatacatacctcacccatgactctgaaggaccatgaaaaagctgaattt

SEQ ID NO: 565004 - DNA, 74 bp, Homo sapiens
gtccggggtagccccgttacagcttttatcaaaatacaactcaaacctagctactccaatagcaattaaagcag

SEQ ID NO: 565005 - DNA, 74 bp, Homo sapiens
ctaggatgacttcagtgactagatcagagatcatagatgttatctccagaagaagaagagaaaaggagaatccg

SEQ ID NO: 565006 - DNA, 50 bp, Homo sapiens
gcagcaccagaagctgtgggaagctgctacaggagctgagagaccctacc

SEQ ID NO: 565007 - DNA, 100 bp, Homo sapiens
gaggaattcgccgtgcccgagaatagctccgtccagcagggccaggagctgactatccgccagatctccctgctgggcttccgagacctagtcttgctga

SEQ ID NO: 565008 - DNA, 100 bp, Homo sapiens
tcaagcgaagccttgaaaaagctgccctgagacggtgtcccgccgaaaggtgcctaatggataagaacttcgttaggattgggaaatggtttgtccgacc

SEQ ID NO: 565009 - DNA, 76 bp, Homo sapiens
gtcgaccattccaaaaaaatcggtttctactacacttagcggacaaaactggtggcataattgtgacaaatgataa

SEQ ID NO: 565010 - DNA, 96 bp, Homo sapiens
tggaagatggcgtctcccacagacgatttggcagctgatcggaagctctttcgtcttgtctccaatgactccttcatctctattcagccttcctta

SEQ ID NO: 565011 - DNA, 100 bp, Homo sapiens
gcccgggggtcaccaatgaacagtctctgctggatgaaccgaatcctaacagtccagccaatagccaggcagcacagctttatcaggaaaacaaacgaga

SEQ ID NO: 565012 - DNA, 83 bp, Homo sapiens
gggaccaaggtggaaatcaaaccccctgtccctgccttacccagcaagcttcccacgtttggagccccggaacagttagtgga

SEQ ID NO: 565013 - DNA, 82 bp, Homo sapiens
tgaaaacagggaagtgcctcaagactttgccagctcactcggatccagtctcggccgcattgaagttgatatcgatgtggag

SEQ ID NO: 565014 - DNA, 100 bp, Homo sapiens
aggaaatccaggagtttgtgaaagatgtcttttcacctataggggagagactgggctgggaccccaaacctggagaaggctggagtgcaatggcgggatc

SEQ ID NO: 565015 - DNA, 100 bp, Homo sapiens
gaggaggaagatggcgggacggctgccggcctgtgtggtggactgtggcacggggcattgtggtgtgacttcattatatcacaggataagtctgaaaagg

SEQ ID NO: 565016 - DNA, 100 bp, Homo sapiens
cggaggccgtccatcgcccctcgggccgacgccatgaagatcaaagatgccaagaaaccctaggaggccagataaccatgtcagccacagttgtagatgc

SEQ ID NO: 565017 - DNA, 100 bp, Homo sapiens
taggcatcgacgaggggcagtttggacacttgacattcagggacgtggccatagaattctctcaggaggagtggaaatgcctggaccctgtgcagaaggc

SEQ ID NO: 565018 - DNA, 107 bp, Homo sapiens
caagtggccaatacaatgacagcttgcaggcctatgcagccggtgtggtggaggctgctgtgtcggaggaggtttcaagacaacagatgaattgtgaaagagagcag

SEQ ID NO: 565019 - DNA, 82 bp, Homo sapiens
cctgaacaacagcacactgaaggaggctcagttcaaagacctgttcttaaaaaaagcatgctacaagtgaaaactgatgaga

SEQ ID NO: 565020 - DNA, 75 bp, Homo sapiens
ttaccagagataattgataacaccctgtaacagctgagtgggaggaggagctcgccaagcgcatgaaccttcaga

SEQ ID NO: 565021 - DNA, 96 bp, Homo sapiens
cgccagtgagggagatggagaccaatcacccacccagtgtgcggtgaacagccccccctcccagcccccccagcccgtcgtccctgctaagcccgt

SEQ ID NO: 565022 - DNA, 74 bp, Homo sapiens
atatggatacggagtacaaaaacggcccttggatgatggagcaattctgtggtgttcttggtcacacatttatg

SEQ ID NO: 565023 - DNA, 83 bp, Homo sapiens
ctcggagcgcggcacggagacggcggcagcgctggactaggtggcagggggatatgagactttctactcggaatatcctgagt

SEQ ID NO: 565024 - DNA, 75 bp, Homo sapiens
agtgagagatggaacccgaagaagaaaggattcgttacagccagagattggtctaacttcaaacttgtggctgtt

SEQ ID NO: 565025 - DNA, 75 bp, Homo sapiens
gaaaagactgctgctccctcgccgtcactgttgtataaattcggtcctgaccgccagcctgtcgtacatggtggg

SEQ ID NO: 565026 - DNA, 100 bp, Homo sapiens
atacaaagaagtgatgctggagaattacaggaatcttctctcattggaaggcagacggtaacaagtactccttgctggattgaacttcatctgaatggac

SEQ ID NO: 565027 - DNA, 108 bp, Homo sapiens
gtcggcttcaaagagaaaaggcaacatcctgtcacaggccatgctctggcaaaaacagactctgacctgtttttgttggacacccgtgtagtatgggcctcagaagaa

SEQ ID NO: 565028 - DNA, 124 bp, Homo sapiens
cctgtgatcgaggacataaggaactagtcacagtgttgctgcaacatagagctgacattaactgtcagttggtgatggagttttgtggtgctggctctgtcaccgacctgatcaagaacacaaa

SEQ ID NO: 565029 - DNA, 75 bp, Homo sapiens
catacaaagtaagctggaaagcagatggtactcggaaagttatatcacagatgatattggaatatcgacttggaa

SEQ ID NO: 565030 - DNA, 74 bp, Homo sapiens
tccacaacccctgcaaacttggattcaggggaaaaaagttgttccatgtagacatgactggcatcagactggag

SEQ ID NO: 565031 - DNA, 83 bp, Homo sapiens
cggcgggctcctgcgagaagcaagcggaacttcctgaggaagtgcccaccgcgtgccccgattggagaggggaccttctgcag

SEQ ID NO: 565032 - DNA, 99 bp, Homo sapiens
tcagttctaagggatggcacgctgtgcttgagaccaacctgacgggtaccttctacatgtgcaaagcaggtttacaaccaggcactgactacaagatct

SEQ ID NO: 565033 - DNA, 100 bp, Homo sapiens
ctacagctttcactatggggtggagacgtggtactcagcaagctcgagttaaagttggatgtgctggaacaggtgttgttgaagtgtacagggtaaccaa

SEQ ID NO: 565034 - DNA, 100 bp, Homo sapiens
gagagccaggaccggcaactgaaaatcgtcgtgctgggggacggcgcctccgggaagttcatcagagaagatatgaaatataaagatgctactaataaac

SEQ ID NO: 565035 - DNA, 100 bp, Homo sapiens
ctggctcagaatgaacgctgcctacacatgttcctgcaagaggaggcaattgacaggaactacgtcccggggaagaatgtgacagtgatgataacatggg

SEQ ID NO: 565036 - DNA, 74 bp, Homo sapiens
cagttcaaatattctggtcctgaagatgatgctgctatcagcctgttttttgctccactcaagcctgttagaat

SEQ ID NO: 565037 - DNA, 90 bp, Homo sapiens
ggggctgggattggaactgtgtttgggagcctcatcattggttatgccaggagttgttcctttggccacatatatgcgaatctataagaa

SEQ ID NO: 565038 - DNA, 75 bp, Homo sapiens
tactcagcaagctcgagttaaagttggatgtgctggaacaggtatgtcgagagtaccaacgtggcaattgcaacc

SEQ ID NO: 565039 - DNA, 83 bp, Homo sapiens
acatcggcctctgcaggcttgccgaagaagggagggtatttgaagtataccatacaactgttttgaaaatccagcgtggacaa

SEQ ID NO: 565040 - DNA, 82 bp, Homo sapiens
gctgctccgtggagatcgtcccgcgcctgccgggcgtgatggtgggcatgggtcagaaggattcctatgtgggcgacgaggc

SEQ ID NO: 565041 - DNA, 83 bp, Homo sapiens
ccgagtgcggcccggaggcggcggagggcaccccgggcgggcggcggctgcttgcagagcagagcgggcggaggaccccgggc

SEQ ID NO: 565042 - DNA, 75 bp, Homo sapiens
gcatggacacaagaagcataacctcacctccacccgcgacaacccagtcccctgaaagcactatggatacctcac

SEQ ID NO: 565043 - DNA, 100 bp, Homo sapiens
cagagtggaccaccccatgaacctcggttttgatggtacagtccaggtctatgatgccacatcttgggatggaacacggagccaagatggaacacggagc

SEQ ID NO: 565044 - DNA, 96 bp, Homo sapiens
caagtcgtaaaaacaggtcaagtgtgatcagggccaaagcggtcagtgagaaggaagtggactctggaaacgacatttatggcaaccctatcaaga

SEQ ID NO: 565045 - DNA, 77 bp, Homo sapiens
ggcctactcgcccgccaccctgcgctgccgccgctctgaggagttaaagcattccaaaatatgcccggtgctatccg

SEQ ID NO: 565046 - DNA, 50 bp, Homo sapiens
agaggaccatgtgatgcacctgctccagggcttccgttacaagatgaggt

SEQ ID NO: 565047 - DNA, 75 bp, Homo sapiens
agactggaaaattataagagcactctctgagggtggagagattcaaccagttagcgtgaaagttggagataaagt

SEQ ID NO: 565048 - DNA, 75 bp, Homo sapiens
tccctgtggtggagtttttgacacttttgttcaagtacacatttcatcaggttactcactataaacaatatccac

SEQ ID NO: 565049 - DNA, 100 bp, Homo sapiens
ctcctagttgcagtcaggcttcatacgctattgtcctgcccgtttgtccgatatgtgcctcgatgccctggggagaccccaactaccgcagcgccaactt

SEQ ID NO: 565050 - DNA, 100 bp, Homo sapiens
tgggaactgcatcaatggtgacgactgcatgttttcccacgaccctctgaccgaagagacgagggagctcttggataagtgaaacaaagagtcctcttcg

SEQ ID NO: 565051 - DNA, 83 bp, Homo sapiens
ggtcaggagtccactcctggaattgttccagatgtttcaccagtgatcattaaagaatgggcagcttacaaaggaaagtctcc

SEQ ID NO: 565052 - DNA, 75 bp, Homo sapiens
tgaccagagagcccaacgcctggtgctcaagactttctccgaggccgccatggcatcagatgaaggcaaactttt

SEQ ID NO: 565053 - DNA, 100 bp, Homo sapiens
gagcaagtgccacaataaataggattacaccttcgtatttcaaccgattcgcttcaagctcagcttatcaatatgggtgttattcctaccttagtgaaat

SEQ ID NO: 565054 - DNA, 95 bp, Homo sapiens
gaggaggaaggagagaaaatggcgtccacggagagctgtctagaactcgagaatcatggcaccacagacgtgaaatggcatctgtcatctttagc

SEQ ID NO: 565055 - DNA, 75 bp, Homo sapiens
cccaaatctgcttgttatctacagaactcaaagttgtcaatacgtagaggcaatactgaacactgcgcagcttgc

SEQ ID NO: 565056 - DNA, 100 bp, Homo sapiens
tgaagatgaggatgaggatgaaggttgctccttgagggcaggacagttcttatggctttatccgttgcgtaagcacagagaggtctgcgaggtcaaaact

SEQ ID NO: 565057 - DNA, 97 bp, Homo sapiens
tgtgtgctggacgctggacagggggcaaaagcacctgctcggcagtcatggatcaggtaatgcagtttgttgagccaagtcggcagtttgtaaagga

SEQ ID NO: 565058 - DNA, 101 bp, Homo sapiens
tggacagtcaacacgggcaccatgaagcacttcctgagtggtggctgaatacattttggaagagagtttttcatcttagagattggtgaacaagtgtgagg

SEQ ID NO: 565059 - DNA, 74 bp, Homo sapiens
aggaccagaaaatcgaagctgcagagtgtctggaggagagctcttcgatttcctggcccagaaggagtcactga

SEQ ID NO: 565060 - DNA, 50 bp, Homo sapiens
tcagcctcctgcgtagctgggattacaggttgttgcttgtgaacttgacc

SEQ ID NO: 565061 - DNA, 48 bp, Homo sapiens
ctgaagatggctactctggagttgagggacccaagggagacactggcc

SEQ ID NO: 565062 - DNA, 90 bp, Homo sapiens
cagagatagagcgtttggaagatctggatacctgtatggtgcagaccatgaattacgtggggcagttagccggccaggtgtttgtcaccg

SEQ ID NO: 565063 - DNA, 113 bp, Homo sapiens
catgccagtaaaactactcatgtcagctgttctgcaggatcccatgagaagatgtggccgtcttgtatatcatcttggtttgcctttttccttcctaactttcccatatgtag

SEQ ID NO: 565064 - DNA, 100 bp, Homo sapiens
ttctcaagtatacagaatataatgaacctcatgaaagcagaaccaactcggatattgttgaggtcaaaatgcagatcttcgtgaaaacccttaccggcaa

SEQ ID NO: 565065 - DNA, 109 bp, Homo sapiens
cgggtggtcaccgagaagtccccgaccgactggtctcagtggcccttagcagcagctccattcgtgtggccatgctggaggaaaatggggagcgcgtcctcatggaagg

SEQ ID NO: 565066 - DNA, 74 bp, Homo sapiens
ggcaacatgacagaggaccatgtgatgcacctgctccaggaagttggaaatctgtatgacatgttccacactcg

SEQ ID NO: 565067 - DNA, 100 bp, Homo sapiens
cttactgttgcgtggttcgttattaacagatggagtgaaggtacctgagcgcaggaaccatggtcttcattgctgcctcagcattagcggaagtgccacg

SEQ ID NO: 565068 - DNA, 134 bp, Homo sapiens
ctacggctacggcccgggcagcctgcgcgagctgcgggcgcgcgagttcagccgcctggcagttccagggtcacccccgagaggacaacaggcatctggaagtgctctctcgccactctgggtgctttactgtc

SEQ ID NO: 565069 - DNA, 95 bp, Homo sapiens
cccagggcccgggatcgccgagcccgacctcgggcgccccgccggtcacctccgcgcggacaccaggttcctcatgagagtgctggactcctacg

SEQ ID NO: 565070 - DNA, 49 bp, Homo sapiens
ccaggtgccaagaactatgaacaggcatattattccacagtaatggaac

SEQ ID NO: 565071 - DNA, 74 bp, Homo sapiens
tgtgtgttaaagtaacagatgatttagttgctggagtgcatagcacgtgatgctgagctggtagataagtcggt

SEQ ID NO: 565072 - DNA, 74 bp, Homo sapiens
gccggttaccgatcggactaagttccaggaataatttttactctagccaaggaatagtggatgacagcggatcc

SEQ ID NO: 565073 - DNA, 74 bp, Homo sapiens
aaggaaaaggagagtattgccagagcaagagctggatctcgtctttctgcctttgaagacctcagcaaactaat

SEQ ID NO: 565074 - DNA, 76 bp, Homo sapiens
tgaagaagaattggagagaactattcattcttatcaagggcaggttcacaatctatacagttgcataaaagtagca

SEQ ID NO: 565075 - DNA, 75 bp, Homo sapiens
gaaactggcaacatctggacccatctgcttgattgagaggatccagaatccagatctctggaatagctaccaggc

SEQ ID NO: 565076 - DNA, 72 bp, Homo sapiens
gcgcagcttcatcccctccctggtggagaaggagaagtgtgttcgagggcgagctctccgataccatccccg

SEQ ID NO: 565077 - DNA, 90 bp, Homo sapiens
agacccacgtcctgcaggtgaatgagtccgatgggtggtccttttattcctgctgctcctgtcaaaactgccttgcctgctggcccccag

SEQ ID NO: 565078 - DNA, 75 bp, Homo sapiens
tgcaataatgcttcttaataccgatctacatggccacgcagctgaaaaagttggatgaagatagtttaaccaaac

SEQ ID NO: 565079 - DNA, 100 bp, Homo sapiens
cacatctcggcgaataggatgcccaagacccaactgaatttcagaaactgtggaggagtgtcactgtagattccatggacgaggagaaaattgaagaata

SEQ ID NO: 565080 - DNA, 87 bp, Homo sapiens
caaattgaaggcacaggaatatccatgtcggcttgtagagagattgcaagtaattccctcctggtcccagacagtctaagaggcaca

SEQ ID NO: 565081 - DNA, 82 bp, Homo sapiens
ggattttgtcagcttgtcgtcaaggtacctagtcgatagtcgctggttcaaacagtggaaaaaatatgttggctttgacagt

SEQ ID NO: 565082 - DNA, 101 bp, Homo sapiens
cggaacggcggcgacaagggtgttcccgaactagagtggataatctgcaaaatggcttcaatgctgagtaagagtaccgttgaacgcctgctactcccccg

SEQ ID NO: 565083 - DNA, 100 bp, Homo sapiens
cgcccccgggagcgggcgcccagagactgcttttcaggaagccttggacgctgcaggtgataaacttgtagtagttgacttctcagccacgtggtgtggg

SEQ ID NO: 565084 - DNA, 100 bp, Homo sapiens
agagctggagaagctgggattggagattccacccaaacttgctggtcactgggagttgcctgtgtccctggagtgttacacagtgcctcctgaagacaac

SEQ ID NO: 565085 - DNA, 123 bp, Homo sapiens
gggagccgcaccacctaacgctggccgacaacagcctggcgtccgccacggaggaggttcgagtgaagatcaaagacttgaatgaacacattgtttgctgcctatgcgccggctacttcgtgg

SEQ ID NO: 565086 - DNA, 76 bp, Homo sapiens
tggctgacctggcaatccagcggcagaggagtgagaggactgtgccaggatgatctgtctgctgtgcgtccggacc

SEQ ID NO: 565087 - DNA, 76 bp, Homo sapiens
ttgcctttcattactacgttcagatctgtgcaggactttctgggacaagtgttttgtacattgggagagatcgttg

SEQ ID NO: 565088 - DNA, 75 bp, Homo sapiens
ccttgaaagaagaagatggagaagaaatagttacctatgatcgttgctgctaacactccaagtatgtactctcag

SEQ ID NO: 565089 - DNA, 101 bp, Homo sapiens
gcgcgaatatcgtcatcgttagaagatatgggattttcctgggcaaatggacttttttgacccaacctttgactatgagatgatcttcaggggaacaggag

SEQ ID NO: 565090 - DNA, 100 bp, Homo sapiens
ccaaaaaagaagattcgggacacacagaaatataaacctttcaagagtcaagtaaagacgattgcctacagcattttatgggacttgaagtttttgatga

SEQ ID NO: 565091 - DNA, 100 bp, Homo sapiens
ccgcgacgattctgaaaatgagctctctgccaagctggtggagctgtctaaggctcaagatatagaagcaggagatggcaccacatcagtagtcatcatt

SEQ ID NO: 565092 - DNA, 100 bp, Homo sapiens
ggttgtacaatatactagctctctagaatcaggaaacccaggcccaacggcaggtggatgcaagaagaaatgttccccaaaacgacccagtgacagtggt

SEQ ID NO: 565093 - DNA, 99 bp, Homo sapiens
ggaggtcggctgcccctgggaaaccagagagtcggagggagtccatctggagcggccaacatgtgcagtctttgccaacaaaaaaaattaccaagaaac

SEQ ID NO: 565094 - DNA, 74 bp, Homo sapiens
tccgggtacacgatgaattccagcaacatttcctgtgttacatctgcaaggaatacgtagaggatctggccaaa

SEQ ID NO: 565095 - DNA, 96 bp, Homo sapiens
cagctgtcggccaagctcatcgccaacgggaacagaaagaacagcttcaaaagatgaaagacttcgggtctgagccacagatggctgaccatctac

SEQ ID NO: 565096 - DNA, 82 bp, Homo sapiens
gcatgatcggcatgtccaccaaggcaggtgccaagtcctgccctgccaacttcttggcagctgccgacgacaaactcagtgg

SEQ ID NO: 565097 - DNA, 75 bp, Homo sapiens
cttcttcccgctggccgccatctgctgcagactggagcctgagagcagctatgtggtggtaatgcctaaaaagag

SEQ ID NO: 565098 - DNA, 100 bp, Homo sapiens
actttttgtatctcgacactctgcaagattctctcctgaagtcccagccatcgactacagtgacagcgccatgctccaagctcagcagctgctcctgggg

SEQ ID NO: 565099 - DNA, 100 bp, Homo sapiens
ggagaaactgccacatgaaaaacaccacaatcaaccttattgtggcattgcgccgtacattcgagagtttgagatggaaattccttcttccagcattata

SEQ ID NO: 565100 - DNA, 150 bp, Homo sapiens
tgaaggctggctacactctggggatctgggccagctggacggtctgggtttcctctatgtcaccggccacatcaaaggtggcttcccacacttctgactcggacgttccttccggtgtcactgaggtggtcgtgaagctctttgactctg

SEQ ID NO: 565101 - DNA, 98 bp, Homo sapiens
gacccggcaccacctcccggtccgccctccaggagtggaagctggacacactatgtgacttgtatgaaaccctgaccatcacccaggcagtcatcttc

SEQ ID NO: 565102 - DNA, 144 bp, Homo sapiens
ggctttaatgaattctcatctttgaaggattttgtcaagcattttgcaaatcagcctttgattggaagcgagacaggcctcatgcgctcacgggttcggggggccgatgctgcccaagccaaggtcctgaccttcctggacagt

SEQ ID NO: 565103 - DNA, 90 bp, Homo sapiens
gacgtgaaaaaaacaggcgtattctggtaatttcgaggaggctttatcctgtggataaacgcagagtgaacgagtttggggagtcctacg

SEQ ID NO: 565104 - DNA, 75 bp, Homo sapiens
cccgcagctcggcttgctgcggtctcaggtggacgacatccttggagaaggcagcgacgacagcgacagcgagaa

SEQ ID NO: 565105 - DNA, 82 bp, Homo sapiens
agaaagcaggcgaacccgcggcgcaataacgaaatgaagctgttgtcatttctggaaggaaactggcccagcagatcaagca

SEQ ID NO: 565106 - DNA, 100 bp, Homo sapiens
tgaaagttttccttcttacagagatgtgactctgtttgagattagcctgaggcctgctcagtcgttcctaatgaataaaaatcaagtgccaaagcttcag

SEQ ID NO: 565107 - DNA, 100 bp, Homo sapiens
ctcaggtttatttgtacaaatagcacaggaggcccccaagaagctgatccgatacatcgacaaccaggtagtgagcaccaaaggggagcgattcaaagat

SEQ ID NO: 565108 - DNA, 90 bp, Homo sapiens
tagccaacccaaattaccttaattattagaaatgatatttgccaaatttgatgaagtgcaaagttcaggcggtatgattttgagtgtctg

SEQ ID NO: 565109 - DNA, 87 bp, Homo sapiens
ttacagttaatgatcaattcacatccaaactacacagagtcaagattcaaacagcggccctccaggcactgaagcgtaagaagaggt

SEQ ID NO: 565110 - DNA, 100 bp, Homo sapiens
aagccctgcacccggtctttgacatgcaagggaactgtccaggtttattgctgccgggagactacactgcaaaatagataaagtgaatgaaatagtagaa

SEQ ID NO: 565111 - DNA, 83 bp, Homo sapiens
ccagtatgtagaagccagtctctgcaggcggccagcggaaccgggctgtgggtcggcccaaggggaagctgggcccggcctcc

SEQ ID NO: 565112 - DNA, 90 bp, Homo sapiens
cccccctgaatcagaaaataaggagcagctcgaggccaggaggcctccagggtcgtatagacctccccctcctatgggcaaaccaccagg

SEQ ID NO: 565113 - DNA, 74 bp, Homo sapiens
catcattgatgtggtgcgatcggcattccccctggacttgtgcacagacagcttcttcacaagcagacgcccag

SEQ ID NO: 565114 - DNA, 83 bp, Homo sapiens
tggactccttcggcagtccacccaccgccgccgcctcccagctgtttttggaaggaagaaagatggaaagcggtgcagttctg

SEQ ID NO: 565115 - DNA, 98 bp, Homo sapiens
agaacatctgaagcagaagtacccccaccacgcctctgcaatcatgggtcaccaagagaggctgagagaccagggtcctaacctgattataaaacaac

SEQ ID NO: 565116 - DNA, 129 bp, Homo sapiens
gcggacgcgactcgagggtgacgctcgctccgctcgtcccgctcgtcatggcctacccgggatacggaggaggggctggttgtggtgactcatgcccataatcccaacactttgcgaggctgaggcagg

SEQ ID NO: 565117 - DNA, 78 bp, Homo sapiens
gagccctaccttactggacagtcaaatcagatgtcagtattgaatatggtggtgaggcgtgaccctggcaacactgaa

SEQ ID NO: 565118 - DNA, 78 bp, Homo sapiens
cagtataaaaacacagctcgacagtacgcctacttctataaagtcatccagaatctacctgttactcgtattttggac

SEQ ID NO: 565119 - DNA, 100 bp, Homo sapiens
cccaagatgtcggagacacggtggaaacgcttatgaaccttctgaggaaaggaggccatacagaaattgaacctcagcacttctgtcaagctttccacag

SEQ ID NO: 565120 - DNA, 74 bp, Homo sapiens
ttcaagagaaatggagcccttctccaagagtttatgtggccgaggcagacaagtggaattaggccttgctgcag

SEQ ID NO: 565121 - DNA, 98 bp, Homo sapiens
aaagacatccacagcagtgtttctcgggttggaaaagccattgataagggctgaagctgccctcgaggacctggtctccaccattcgagtctgaagat

SEQ ID NO: 565122 - DNA, 133 bp, Homo sapiens
tgacatcagacttcatgggtcatcagttactccagcttttgttgaatttgacacatcacttgaagggtttggcatgaagaaagcagtgtcactgataaatgcaatagatacaggaagatttccacggttgctc

SEQ ID NO: 565123 - DNA, 75 bp, Homo sapiens
cgggcaaggatggtggaggcgagaacactgaggaggtgttcacggccctggcactggtgcgaatgctcattcttc

SEQ ID NO: 565124 - DNA, 123 bp, Homo sapiens
agctggccaaagcctgcccagacggctcacctgtgcgggatggaacaaaagaccaagatcactccatggatgaaatgacagctgtggtgaaaattgaaaaaggagttggtggcaataatgggg

SEQ ID NO: 565125 - DNA, 114 bp, Homo sapiens
gctgaaggtgcctgcagaggagcccgccaatgagctgcccatgaatgagattgaggcgtggaaggctgcggaaaagacgagggaactgagctgtcaaaactaagtgacttgatt

SEQ ID NO: 565126 - DNA, 95 bp, Homo sapiens
ccacatagacatttacgcggatgtcggcgaagagttcaaccagggggatatgagactttctactcggaatatcctgagtgttgcgtggatgtaaa

SEQ ID NO: 565127 - DNA, 87 bp, Homo sapiens
ggctgctgggcggcgcgggcgcgcagtactccagcgaccggtgcagctggaaggggagacaatgcagatcttcgtgaagactctgac

SEQ ID NO: 565128 - DNA, 75 bp, Homo sapiens
tagagagataacaaaagctgctcagagtctcaatgaacttgggaagacaaaggcgctttggctaagctggtggaa

SEQ ID NO: 565129 - DNA, 80 bp, Homo sapiens
tcgatccagcaccatggggaagcgggacaatcgggtgtacctggagtagaacagaaaaattattatgtctgtgttccctt

SEQ ID NO: 565130 - DNA, 73 bp, Homo sapiens
aaaggagattgacagtcacaattttgtaataagagctttgaaaggagttttgcgagtgggagtattggcaaaa

SEQ ID NO: 565131 - DNA, 75 bp, Homo sapiens
ccaaaatggggtggaaggatattgtccttttggagcagggcagattatccagccaagaagatgaaaactacagag

SEQ ID NO: 565132 - DNA, 75 bp, Homo sapiens
cgacttgttctctatcgaacaaaagtagaggtttatggttggctgtgggagatgtgatgactggtttcatggtga

SEQ ID NO: 565133 - DNA, 82 bp, Homo sapiens
gaagattttgcatgcagcaggtgcgcaaggtgaaatgttcactgttaaagagctcgacatggattacagagtcttggaaaag

SEQ ID NO: 565134 - DNA, 100 bp, Homo sapiens
ggcaagaccgaattcagaaggatatcgacgtcgtgatccagaagtccagagctgaggactgcctgtttgcaggtggtgctggctagagtgtatacgtttg

SEQ ID NO: 565135 - DNA, 80 bp, Homo sapiens
catcaaaaatagtgatagctttgataaatggttccatgggaagatttccaaacaggaagcttataatttactaatgacag

SEQ ID NO: 565136 - DNA, 149 bp, Homo sapiens
tgctggagcaccagtttctagtccagaatacaccaaaaaaatagaaaacctatgtgctatgggctttgataggggcttccgttacaagatgaggtctgtgtatgctcacttccccatcaacgttgttatccaggagaatgggtctcttg

SEQ ID NO: 565137 - DNA, 97 bp, Homo sapiens
aaaaaactgcgcccagggggagggctctatggccaagaaggtgtgcgcctgccaggtgcgggccacaggtaagatgtatgcctgcaagaagctagag

SEQ ID NO: 565138 - DNA, 106 bp, Homo sapiens
aaaagcatccccgaggaggaagacgaatcgttaaacatctgaaagggtcagcgtccgtctccaagagagtatgaagagagtgcgtctgtagggcagggaagatggc

SEQ ID NO: 565139 - DNA, 101 bp, Homo sapiens
aagcgatggcttcagacagcatatttgagtcatttccttcgtacccacagtgcttcatgagaggtgcaggagaacccggggaggaggcccaggctctgctg

SEQ ID NO: 565140 - DNA, 90 bp, Homo sapiens
tcccaaaagaccatcctgctctcaactacaacatcgtttcaggatatggaacccattcacatggactttttaagaagcttggaattccag

SEQ ID NO: 565141 - DNA, 90 bp, Homo sapiens
cctggacatcgatggacgcattcagaaggagacagggtctggctatgttgcccaggttggagtgcagtgatgcagttatagctccctgta

SEQ ID NO: 565142 - DNA, 100 bp, Homo sapiens
caccgccatgcccaagaataaagctttcccagtgcctccagcagccctcctcaaggacccctgtgaggccaggcagaaatggcgtggcaggggacccagc

SEQ ID NO: 565143 - DNA, 90 bp, Homo sapiens
agctgggcgagaagctgctccggcctagcctggcggagctccacgacgagctggaaaaggttgtgaagatgagaaaagaagtgaagagaa

SEQ ID NO: 565144 - DNA, 80 bp, Homo sapiens
ggggcggcgtgcggcctagcgtctcagctgtcccctttcctccaacccaacggcttactttcaaggaagtatttgagaat

SEQ ID NO: 565145 - DNA, 100 bp, Homo sapiens
gtgtttgggaatgattctgatgatgatgatgagggacagagcagaatgggctgatatagatccggtgccgcagaatgatggccccaatcccgtggtccag

SEQ ID NO: 565146 - DNA, 110 bp, Homo sapiens
ccgcaacttttgagctaagtgatgatggccgctttgaggtgtggaatgcgatgactcggtcttggcctatattctccagcgggagatccaggagcccgagtgcaggcacc

SEQ ID NO: 565147 - DNA, 75 bp, Homo sapiens
ccgcgtctgccactgcaactgtggccgtgagccgaacctgctcgtccgtgcctgcaaccagttgggccagtttct

SEQ ID NO: 565148 - DNA, 100 bp, Homo sapiens
cgagcaggtgcacctggcagctgggccggcctgcctccgagtccccacatcaccacactgccccggactttgaacatgtcggggatcgccctcagcagac

SEQ ID NO: 565149 - DNA, 97 bp, Homo sapiens
ggacagattagcaagcaatgtggcaaaacgaaaaagctcaatgcctcagaaattcattgtgaaccctgcggcttcgaggcgacctacctggagctgg

SEQ ID NO: 565150 - DNA, 100 bp, Homo sapiens
ccgccacagctttaggaaacacctctacctcctgcgaggcctcccgggctccgggaaaactacactggccagggtgagaactctgtctcagtcgacggga

SEQ ID NO: 565151 - DNA, 82 bp, Homo sapiens
cagcatggacatgagggtccccgctcagctcctggggctcctgctgctctggttcccagaccttaactgatgtaagaaatct

SEQ ID NO: 565152 - DNA, 100 bp, Homo sapiens
gcggacccgcgagtatttctactacgtggaccaccagggccaggccagcactccttgcccgaggacagagatggcgagcgcccggattggggatgagtat

SEQ ID NO: 565153 - DNA, 101 bp, Homo sapiens
taaaccaatgtttgtcatcaatgagatgcggcaaaccatcatagcctttgcctgggaaccaaatggaagtaagtttgctgtgctgcacggagaggctccgc

SEQ ID NO: 565154 - DNA, 80 bp, Homo sapiens
cagttcattgaagctatcactgtcagtgctgcaccgacgagagtgctggggaataaaaaggggatcttcactcggcagag

SEQ ID NO: 565155 - DNA, 100 bp, Homo sapiens
tggagcgacgacggccgctgcctaagctggaaagctacattattggaattttgaagtcatgaaaacatcagatgaaccaacctgcaacaccttggattca

SEQ ID NO: 565156 - DNA, 100 bp, Homo sapiens
attcgcagtggtcgcttcttctccttgcgccctctttggattgatataccgccccagggactttgcttcctacatgctgggcatcttcatctgtaacctt

SEQ ID NO: 565157 - DNA, 100 bp, Homo sapiens
gactgcgtgaccctgcactgcggcctcaacgagcacaaccaccacctcatcaacgacttcaccgtcaagcaggtgatggaaaaccccagcccggccgccg

SEQ ID NO: 565158 - DNA, 100 bp, Homo sapiens
caaactgggaagaggaccctcaccaggaaccacatctgccagcaccttgatcttgaacttctcagcctccagaacggcgttcgtggcattcagggatgtg

SEQ ID NO: 565159 - DNA, 99 bp, Homo sapiens
gcgccggcggtctgcggccggcggtgtagacgccccttcgccgggacctggcacccgaatccggcctgccggatttctacctggacaaggactggtact

SEQ ID NO: 565160 - DNA, 80 bp, Homo sapiens
tttggtgggatgtgtatgaccttcacctcattaacacgatgccctcctagctagccgtcacgggatggagggcttcatgg

SEQ ID NO: 565161 - DNA, 100 bp, Homo sapiens
tcttctcagattggcttcaactgcagttggtgtagtaaacttcaaaggcgaacagctgcttggagaactacaagtgaagaaaagaaagcattagatcagg

SEQ ID NO: 565162 - DNA, 88 bp, Homo sapiens
acccttggagaatgtgggctcatatccttttcagactacattttcctcacaactgttctttccatccaatatcagatggaaatgatgc

SEQ ID NO: 565163 - DNA, 75 bp, Homo sapiens
ggctactctgcctcggggacgaaagcagacttgggaagatccccatgaaaaagataagagcacgaactgctttgg

SEQ ID NO: 565164 - DNA, 78 bp, Homo sapiens
cactagcagccagttccggcccgaggacaccgactaccagcagcaggttacgggcaggacttgagtggcttcggacag

SEQ ID NO: 565165 - DNA, 75 bp, Homo sapiens
gctgtggcctatgcagtcaactcctggaccactagtgagagaagtggatgggccctatacctccagccgtgaatg

SEQ ID NO: 565166 - DNA, 100 bp, Homo sapiens
gtgttcatggtggtgagattactcaacttctagttccacctgaaaactgtagttggccacagatgtctttaattccaaaaacctggccgttcaggcacaa

SEQ ID NO: 565167 - DNA, 50 bp, Homo sapiens
ctcgcagaacgccatcaaccagctttcctgtgccttaagaacattagaac

SEQ ID NO: 565168 - DNA, 51 bp, Homo sapiens
ccgggatccacgggaggcggcggtattgttgcagcatctggcagtgagact

SEQ ID NO: 565169 - DNA, 51 bp, Homo sapiens
ggaggcctcccgctttgcccaggagaatgctgctacaggagctgagagacc

SEQ ID NO: 565170 - DNA, 83 bp, Homo sapiens
aaggcgtccgttggccttcgtacccgtcttgattgaggttatgatgtgattgctcaagcccaatctgggactgggaaaacggc

SEQ ID NO: 565171 - DNA, 100 bp, Homo sapiens
ctacgctactgccatgataataacataattcacagggatgtgaaggaatctaggtaaaaatggcttatctaacagtagcattttgttggataaatgtcca

SEQ ID NO: 565172 - DNA, 82 bp, Homo sapiens
gggacagccgcccctggtgcacacaccctcgtattctcctgcccttccccagtacctggagtagaacagaaaaattattatg

SEQ ID NO: 565173 - DNA, 75 bp, Homo sapiens
gccacacgttggtacagggctccagaaattatgttgaattccaaggttttcagctgctactaaagataatgagca

SEQ ID NO: 565174 - DNA, 75 bp, Homo sapiens
cggcctccaggacctgcacatccactcccggcaggagatgatccaggccatccaggtgctgcggttccacctgct

SEQ ID NO: 565175 - DNA, 100 bp, Homo sapiens
cagcagcaccagcggcctgtcctgagcttccatgtggatccctatgtttgcaacccctccccagctacatctggtaccttggctggcattatgggaatga

SEQ ID NO: 565176 - DNA, 83 bp, Homo sapiens
cagaagccagaagagaaaacaaaagaccaacccttgagggaagagaattatctctaagacagcacccaagaaaacctcatttg

SEQ ID NO: 565177 - DNA, 75 bp, Homo sapiens
tggcccagacgggcagcttgggacgcgtgccaagttggaggccgccattgccgaggctgaggagcgtggggagct

SEQ ID NO: 565178 - DNA, 98 bp, Homo sapiens
gaaggaagactgtctgccgagttctcacgtgcccatcagtgacagcaagtccattcagaatgagtgagatcattggccgagacctgagtggcttccct

SEQ ID NO: 565179 - DNA, 97 bp, Homo sapiens
tgcaaaccgagacaagttcaccccgaagtctgccgggaaaggggctgtttgccacacagctcatccggaagggggagaccatcttcgtagaacggcc

SEQ ID NO: 565180 - DNA, 96 bp, Homo sapiens
gaagaataatggaagcccctgaataccttgatttggatgaaattgactttagtgatgacatatcttgaggcccacagtaattgaaactgatgttta

SEQ ID NO: 565181 - DNA, 101 bp, Homo sapiens
tgctctgcctggcgctgctgcccgcgctcgccgcacgaggccacccagaggagaaggccaccccgcctggaggcacaggccatgaggggctctcaggaggt

SEQ ID NO: 565182 - DNA, 123 bp, Homo sapiens
tgatgatgttcactggaaggaaaatgggacattagttcaagtagcaactatatcagcagatataatttctacagtagaatttaatcattctggagaattactagcaacaggagataaaggtgg

SEQ ID NO: 565183 - DNA, 100 bp, Homo sapiens
ctttgcacatgtaacatccctgggacttgatgacacgtaccttcgctgcattgagctgcacagccacacccttattcagctggagaggtgtttcacagct

SEQ ID NO: 565184 - DNA, 83 bp, Homo sapiens
cgacagattatcggaccatttcagaggttcaccgccatcattggacccaatggctctggggccaaaccagtgctcctgccacc

SEQ ID NO: 565185 - DNA, 74 bp, Homo sapiens
ccctggactccctggagaagcagatggaaaaggagtcgttcacgcctactgaggagcatgtgttggtggtgcgc

SEQ ID NO: 565186 - DNA, 83 bp, Homo sapiens
ggatagtatcttggccagggaactcaaacagcagatgcaggaaactaaatatattttgccaactttggaaaaagaattattct

SEQ ID NO: 565187 - DNA, 75 bp, Homo sapiens
ggcggcggcgacggcggccctggcagaacaccaatcagggtcttcaggcctggaagattgaagacattccagcca

SEQ ID NO: 565188 - DNA, 50 bp, Homo sapiens
gtcagaagctcaaagagtccgtgggactcggtgaaatacctggagtgctc

SEQ ID NO: 565189 - DNA, 49 bp, Homo sapiens
ggcggcggtggcggcgaaggccgaggcgaataccaagctgctattttac

SEQ ID NO: 565190 - DNA, 101 bp, Homo sapiens
ggactttcaaacatctgaagatgacaatttattagatggtgacactgcagttggcttatgcaagcaaagatctggaggagcagttacggtctgtgtccagt

SEQ ID NO: 565191 - DNA, 75 bp, Homo sapiens
ccgcgccgtgcaactgctcatcctggcctacgtcatcgggtcaaaatgcagatcttcgtgaaaacccttaccggc

SEQ ID NO: 565192 - DNA, 90 bp, Homo sapiens
gaacaggctctattagggctaaatccaaatgctgattcagactttagacaaaggaaagtgactgagaccgaagatgatagtgatagtgac

SEQ ID NO: 565193 - DNA, 90 bp, Homo sapiens
tgggcacgctctttactccatgtgtgggacattcattgcggaataacatcggaggagaagacacgaagatcgattgagaagttattagaa

SEQ ID NO: 565194 - DNA, 93 bp, Homo sapiens
cccgggctaagcgtcggcaagttctgtagagaaactcgggcaacctttgacaatgcagatcttcgtgaagactctgactggtaagaccatcac

SEQ ID NO: 565195 - DNA, 74 bp, Homo sapiens
gcccttttctactttgccagcaaactggtgctcaaggatgtgcagaacaagttaaaggagtcagcacagtgcgt

SEQ ID NO: 565196 - DNA, 49 bp, Homo sapiens
gggctccaccccgtcgcctcgacagggctattgagtggccagacttccc

SEQ ID NO: 565197 - DNA, 82 bp, Homo sapiens
cggagtgagaagcaagaaggccctggacacagcaatatctctgggctttcacaggtttatcaccagatcttcaatctatgga

SEQ ID NO: 565198 - DNA, 82 bp, Homo sapiens
cgccggcccgcgggtctacttcctcaaagtcctgtgcctcctgattgctgagtgttcacctggaccttctgactaccttccc

SEQ ID NO: 565199 - DNA, 100 bp, Homo sapiens
tgtgcagagctgaacaggcgttccaggcgagtcagatcaaggagaatgagctgaggagaagcatggaggtagagtggaacccccagctattagaggtccc

SEQ ID NO: 565200 - DNA, 100 bp, Homo sapiens
agcttcgtggaggagtacaacaacaaggttccttctgaccaaggggacatggctctgaagatgatgagactggtgactcagcaagaataggatggatggg

SEQ ID NO: 565201 - DNA, 98 bp, Homo sapiens
agcttcgctgtcctgatggccctgaccagccaggctcagcttgtcaatcggaaacagaaattagagtctgtggaactttctagccaatcagaaattca

SEQ ID NO: 565202 - DNA, 82 bp, Homo sapiens
tgtgtccggacaacggctgcggcgacaattttggcgtgatggtgggcatgggtcagaaggattcctatgtgggcgacgaggc

SEQ ID NO: 565203 - DNA, 82 bp, Homo sapiens
gcattccttattggtcttgctgtcatcattgtgatatcctttctgaggctcttgttgagagagacatctccccatacatttc

SEQ ID NO: 565204 - DNA, 74 bp, Homo sapiens
agctgtgggccgcccacgcccatgaaggagggcgtgtgaagacctggaagcgccggtggttcatcctgaccgat

SEQ ID NO: 565205 - DNA, 109 bp, Homo sapiens
ctgcgaacacagtagtggaagatgtaaagcaatatttcgagcagtttggcaaggtcaaaatgcagatcttcgtgaaaacccttaccggcaagaccatcacccttgaggt

SEQ ID NO: 565206 - DNA, 87 bp, Homo sapiens
ggattcgtggcgccacaagctcattcactgtgtagatttgaacatggaattcaatccttcagatcatcctcgggccagcacaatatt

SEQ ID NO: 565207 - DNA, 75 bp, Homo sapiens
ggcggccgggggctcagagatccaagtgcgcgccctggcgggtccggaccaaggccaagaataaggagacgggtg

SEQ ID NO: 565208 - DNA, 80 bp, Homo sapiens
tacattgagtttgtggcagacagacttatgctggaactgggttttagcaaggacatggatttgattgacatactttggag

SEQ ID NO: 565209 - DNA, 98 bp, Homo sapiens
cacggccgctgggcccccggtggaggagcgtttccgccagctgcacctacgaaagcaggtgtcttacagaacatgaaaggctcccggagcagcgctga

SEQ ID NO: 565210 - DNA, 83 bp, Homo sapiens
gccatctgtgccatcatcgtggtagttattgtaagtaaagagaaatgtgtatgaccttacaagtatccccgttcgccaccaat

SEQ ID NO: 565211 - DNA, 100 bp, Homo sapiens
tgccaaccgcctgtccaaggacgcccaccgctacgggatgcgaggcatgtcagcggaccctgaggagtatgacctggttatattcccagaggatgtcagt

SEQ ID NO: 565212 - DNA, 82 bp, Homo sapiens
agcgctcgcccagctagccgcaggtgtcttcaaaaacaaacatatttaaaagattttacttctcatctccaggaagaaccag

SEQ ID NO: 565213 - DNA, 100 bp, Homo sapiens
gacgaccataagttgcagcggtacgcgcttaaccgcatcacggtgtggaggagcaggaatctttctgaacctgtcatgacctatagacttcacaaagagc

SEQ ID NO: 565214 - DNA, 90 bp, Homo sapiens
gtacctccaggccctgaacgcggactggcacgcagactgcttcagtacagaacctgctaaggccatcaaacctattgatcggaagtcagt

SEQ ID NO: 565215 - DNA, 85 bp, Homo sapiens
agggctgacgctgctgctgtgtgcggtgctgctgagcttggcctcggcgtcctcggatgacacccccaaccatggttgtgaagat

SEQ ID NO: 565216 - DNA, 101 bp, Homo sapiens
accgtgggctgcagtacctgctggagaagggagactacaaggacagcagcgactttggggcccgtcaccctcagtttcatgatcaacatgggagactccca

SEQ ID NO: 565217 - DNA, 98 bp, Homo sapiens
tccccgtcccggagctgccggcggcatgatccgacacgccggggcgcccgcgcgcggggaccccacgggaacccttaggagaaatcttgagagtggac

SEQ ID NO: 565218 - DNA, 83 bp, Homo sapiens
gataattaaagagtaaagttgtgctcaacggaaataatgcaaaaggtgtcccaaggctcctgaccagtgaacaaagatttgag

SEQ ID NO: 565219 - DNA, 90 bp, Homo sapiens
cggcgaacgctcccgggccagcaggtgtcccgacccaggctaagcttgagcatggctgagcaggagcccacagccgagcagctggcccag

SEQ ID NO: 565220 - DNA, 100 bp, Homo sapiens
ctcggctcctgtcgtccgttctctcaggctcccgttcagcattttgaaagcgaagcagaagccgtagaatcagcggcgagcctgttgaaagaacccacag

SEQ ID NO: 565221 - DNA, 50 bp, Homo sapiens
ctgggaaaacaacattgtctcgctcctctggtgcaagtgtggtagctatt

SEQ ID NO: 565222 - DNA, 82 bp, Homo sapiens
ggccgagtagccacagcggcagctccagcccggcccggcagcgacatggaagacctaatctgggagcctgcaagtgacaaca

SEQ ID NO: 565223 - DNA, 83 bp, Homo sapiens
gttttaaggagaaaatatttattgctttagcatggatgcccaaagctacagtacagaacaccaatcagggtcttcaggcctgg

SEQ ID NO: 565224 - DNA, 97 bp, Homo sapiens
agcaactacaggaaatggctttgggagttccaatatcagtctatcttttattcaacgctgagatctgtatctgtggacctgaatgttgatccctcgc

SEQ ID NO: 565225 - DNA, 88 bp, Homo sapiens
gtttgacgcacacggcaccaaacttagactatgccagttactaccagggcctatgggattgccatggtgaccagccagatgaactgtc

SEQ ID NO: 565226 - DNA, 87 bp, Homo sapiens
gctcccccgatcctattcccagtcgttgccagaacagataaagcccagtgtaagccagcctcagcctgccaactctaataacggcac

SEQ ID NO: 565227 - DNA, 82 bp, Homo sapiens
ctaccctgactacgggagttgggaggacccgggacaccgcacagccgggaaatgtaatagctcttcaagtctgcaataaaaa

SEQ ID NO: 565228 - DNA, 78 bp, Homo sapiens
gaatggctgccactcagaaacttgttaaagacattattggtgatgcagtttggacggattgatggcagtgcgtacatt

SEQ ID NO: 565229 - DNA, 129 bp, Homo sapiens
gaaattttgagtcctcgagtgaatgggcggatctcatatcttcacttggcaaactcaacaaggaagccttatcagttgtgagtgaggaccagtcgttgtttgagtgtgcctacggaacgccacacctgg

SEQ ID NO: 565230 - DNA, 87 bp, Homo sapiens
tggatatctgtgataaagttggtcagtctcgcactgggccaactgtgatttgagacggcagattgatgaacagcaaaagatgctaga

SEQ ID NO: 565231 - DNA, 100 bp, Homo sapiens
aaatccaggcacagatagatcgatttcctatcggagatcgagaaggagaatggcagaccatgatacaaaattcttcaggagagaataccatgggtaccac

SEQ ID NO: 565232 - DNA, 50 bp, Homo sapiens
caggcatggaaccagcaaggatttaagttcttcacacacccccattcggc

SEQ ID NO: 565233 - DNA, 83 bp, Homo sapiens
ggctcaacgaggaactcaaagtggatgaggaaagattttttatcaagcagaaatgcatcgaacaacgagaatcaagatcactg

SEQ ID NO: 565234 - DNA, 49 bp, Homo sapiens
ggacctgaaatattctttcacccggaggatgtgctgatggagctccttg

SEQ ID NO: 565235 - DNA, 96 bp, Homo sapiens
gcaaaatggcggaccgcttctcccgcttcaacgaagaccgagactttcagtctgcgggccaggcatcgacatccgcaacgactatcagcagctgaa

SEQ ID NO: 565236 - DNA, 74 bp, Homo sapiens
tccaccctacaagtactgaaaaggcacaggcaaaagatgtgattgaagagcatggtccttcagaaaaggcaata

SEQ ID NO: 565237 - DNA, 98 bp, Homo sapiens
gcgccttggaccccgcctccctcccgcgcgtgctgcgggtctgctcgggggtctacttcgaggtgtggacgaatgtggaacctcgctctgtggctgtg

SEQ ID NO: 565238 - DNA, 99 bp, Homo sapiens
ttgtatagagatgtgatgttggagaactatagcaacttggtatcactaggaagctgaagtcttcagcagaaccctgacctaggtagggagtctcaatgg

SEQ ID NO: 565239 - DNA, 99 bp, Homo sapiens
aaagaaggaagagatcacatagcagtgcccaggagaacaagcgctgcaaatacaatcactctaaaatgtgtgatagaccgcaacagatgaccaaggaag

SEQ ID NO: 565240 - DNA, 98 bp, Homo sapiens
gtgaaggggaagaggcccaccctggagtaaccctcactggagaatccagagtgtcacatttgaagacgagcactgaggatgaggaaccaactgaagaa

SEQ ID NO: 565241 - DNA, 98 bp, Homo sapiens
cccagctcttcttgcagccactggaagctgatcacctggagtgaagacctcacacggatcagtgtccttcagggatgtggctatcgatttcagcagag

SEQ ID NO: 565242 - DNA, 96 bp, Homo sapiens
caggcgccgccctacagcatggcgcccgccatggtgaacagctcggcagatcacaaaatttgtccaggatagacatagagctagaagaaacagact

SEQ ID NO: 565243 - DNA, 76 bp, Homo sapiens
gcctcctgactactccttctccaagaggtcacggtctagatcacattctcgatccagaggaaggcgatactctcgc

SEQ ID NO: 565244 - DNA, 90 bp, Homo sapiens
ttttctcacatgtttgatggacgatttattccacttgctcgcccggaggtgaaatggacgtgtcagagatggctttggattccccgttct

SEQ ID NO: 565245 - DNA, 83 bp, Homo sapiens
ctaacactgaaaccaatggtgaatttggtgctgatagtctgcagcacaggtttagctgggattatgctgctcaactaccagca

SEQ ID NO: 565246 - DNA, 100 bp, Homo sapiens
tgaggatgacttggactgggccattggcagcagaattcctgccaaagcattaattccagactctgatcacacgccagacgctgcatccaggtagtacaca

SEQ ID NO: 565247 - DNA, 90 bp, Homo sapiens
acatgggggcctcaaacgtggagatcaactcctctctgttaatggagtggaaccacgtgaatgttgagggggcgacacacaagcaggtgg

SEQ ID NO: 565248 - DNA, 80 bp, Homo sapiens
cggaccgagcgcctcgacctcggtctgagctatgaaatggccacctcacggggcatcatgggaatcaaagtgtctgcagg

SEQ ID NO: 565249 - DNA, 75 bp, Homo sapiens
gaggaggaggaggattcagggaataggagctggggagcccttctgcgccacagtatgcaaccgaggatggactta

SEQ ID NO: 565250 - DNA, 83 bp, Homo sapiens
attggatttaaaagacagtcctcgtcagcactgactttcagctatggaatcggacaatcatatcctgattcagcccttcctcc

SEQ ID NO: 565251 - DNA, 100 bp, Homo sapiens
gctaactcggctacaacatttggcagaggagatgtcctcagatgcttcacttccaggggatccagaggcctatcctgctgctgtgtcaagcggtggagcc

SEQ ID NO: 565252 - DNA, 100 bp, Homo sapiens
cgctcctaagcctgcacagccgcggcggcagcagcagtgagaggtccctgtgcgttttattgcgacctgccggtgggaactttgtctccgagtcggagca

SEQ ID NO: 565253 - DNA, 101 bp, Homo sapiens
ctgtgacttcagagacactgccaagcagccttagccctagtgtagaggccgactgcagcagtggcccagggcaaagagtgtgcgtcatcgatgagattggg

SEQ ID NO: 565254 - DNA, 105 bp, Homo sapiens
cagtgctatggagaaggggaaattgcacaagccaggaaaggacgcgtcgaagcgcgggcggcagcagcctgccttggcctcccaaagtgccgagattgcagcctc

SEQ ID NO: 565255 - DNA, 100 bp, Homo sapiens
gacacagcaggctgagcagctgcaaacccccgaaaaaggactttgcctcccgggccaaactggcagttcaaaaactagtacagaaagttggattttttgg

SEQ ID NO: 565256 - DNA, 95 bp, Homo sapiens
tggagctgatcttagaaacctctgcacagaagcatccgtgtcattctggaccttactcccaactaccggggtgagaactcgtggttctccactca

SEQ ID NO: 565257 - DNA, 83 bp, Homo sapiens
cagatgagcagattggttagtgaagttgttgacctcctgtactggagagacattaagaagactggagtggtgtttggtgccag

SEQ ID NO: 565258 - DNA, 100 bp, Homo sapiens
cgagccctcagatactattatgtaaagaccccatatcatgtgaacctcctcctggctggctatgatgagcatgaagggccagcgctgtattacatggact

SEQ ID NO: 565259 - DNA, 96 bp, Homo sapiens
cgctgctcctgcttctcgggctgctggtgctgtgcgcgaggctcctcactgcagcgaaggacttcaaatctcaacctgagccatccccagttctta

SEQ ID NO: 565260 - DNA, 96 bp, Homo sapiens
acgacctgatcgagcgcatcgaggatttggcgctgcagaaccagatccgggagcacgtcatctccatcgaggaagatggcagtgaacgtatactca

SEQ ID NO: 565261 - DNA, 50 bp, Homo sapiens
cgggctggagccggacgagctgtcggctcaatagtggcataccagccagc

SEQ ID NO: 565262 - DNA, 75 bp, Homo sapiens
ggaggagctgcgctcggagaacgactatctcaaggtgaaaattagttctgctgtgcttaaagctgcggcccatca

SEQ ID NO: 565263 - DNA, 76 bp, Homo sapiens
actctgagtacggtctcacagacaacgttgagggaactctaatgatccaggacaaagaagttaccctggagtatgt

SEQ ID NO: 565264 - DNA, 82 bp, Homo sapiens
atctgaatcgacagtttcttttccggccctgggatgtcacggtgaatctggattgggaaagtcgacattaatcaactcatta

SEQ ID NO: 565265 - DNA, 74 bp, Homo sapiens
cccatggtcatcagcagcatcgtgcagctttaccgatttgttacaactcaagcaagggccagcagaaattctct

SEQ ID NO: 565266 - DNA, 100 bp, Homo sapiens
tttggcttcaagattttgtgccaaccaggcccgccatgttcatagaggataaagcagtagacaccctggcttacctcagtgacggtgacgcccgagctgg

SEQ ID NO: 565267 - DNA, 75 bp, Homo sapiens
tctacatgatgaagaatttcctcagccaggtgcttcaaggctggagtatagtggcatgatcatagatcactgcag

SEQ ID NO: 565268 - DNA, 50 bp, Homo sapiens
cgcatcttcgccgtctggaaaggcataatcaccagcaacacccgggacaa

SEQ ID NO: 565269 - DNA, 102 bp, Homo sapiens
agagttttcctgatagatctcaacagtagggatgttggaaattactattatggacaaggccacccaatgaagcctcaccgaatccgcatgactcataatttg

SEQ ID NO: 565270 - DNA, 100 bp, Homo sapiens
ctttcccgcggctgatttgccttaaactccctaaaatctccgcagctctggttcctgttgcggccgaccagcatctcagacatgtcgaaaaagatgtttt

SEQ ID NO: 565271 - DNA, 100 bp, Homo sapiens
tgtattatacgctgcattctcgttgtctttcagaatgtggccccgtcccagagcaccacccgagacatcaggagcccatcgtgggctagggaagatcctc

SEQ ID NO: 565272 - DNA, 100 bp, Homo sapiens
actcacccgtgcctggcggccgccacccaaacgggcaagctggaagctgaggctgtgttccgtgccatcaccattgccagccaaaccaattgccctctct

SEQ ID NO: 565273 - DNA, 50 bp, Homo sapiens
tggacctccagatttccttactgttggtccaggcgcaatgttcagcgtat

SEQ ID NO: 565274 - DNA, 83 bp, Homo sapiens
aaagaactacgtgttttatccaacaggttatggaggttttgatgactatggtggctataataattacggctatgggaatgatg

SEQ ID NO: 565275 - DNA, 82 bp, Homo sapiens
ggaagagagattcctatagttcaccgagtcttgaagattcatgaaaaactcaccccacacagaccgcgtttctctccagtgt

SEQ ID NO: 565276 - DNA, 93 bp, Homo sapiens
ttctgggcaaagaatgtagtcaatttagtaattacaagtagtggctacagccccagatcagcacatcagtattccccacagctgtatccttcc

SEQ ID NO: 565277 - DNA, 98 bp, Homo sapiens
caggggccttgataacacagagtttcaaggtgatttgatgaaggctgctgcaggagagttcgcagatgatccctgctcttctgtgaagcgaggcaaca

SEQ ID NO: 565278 - DNA, 75 bp, Homo sapiens
tccccacgcaaccccagatccatttacactttacaggattttatattggaagacatggatcttgctgccaacgag

SEQ ID NO: 565279 - DNA, 100 bp, Homo sapiens
cctgtggctttagcagaaggcctagacattaaactgaatacagcagtgcgacaggttcgctacacggcttcaggttggccttggggaggcactattagag

SEQ ID NO: 565280 - DNA, 87 bp, Homo sapiens
tttgtagaggaacctagtaaaaagggagcacttaaggaagagttatcaatactctggctgaccatcatcatcgtgggactgactttg

SEQ ID NO: 565281 - DNA, 100 bp, Homo sapiens
ggcgttccgagcggcggcggaggtacggttcctggagcagcagaacaagatgctggagaccaagtggagcctcctgcagcagcagaagacggctcgaagc

SEQ ID NO: 565282 - DNA, 82 bp, Homo sapiens
gccgagacatccgctccttgcccgagaacatccagtttgatgtttactacaagggtctgacatttcaggaggtggagaactt

SEQ ID NO: 565283 - DNA, 82 bp, Homo sapiens
ttcggtggactccttcggcagtccacccaccgccgccgcctcccaggcgtcacaatgtagcagggaccccaggcgtcgtgct

SEQ ID NO: 565284 - DNA, 75 bp, Homo sapiens
cgccgaggcaccgaggcactcagaggagaacatacggtccctaatgagcacagagaagaccaagggcttctgcca

SEQ ID NO: 565285 - DNA, 75 bp, Homo sapiens
tgtcttcctcttgtaggaaggccaaggtggactccaaggccacgctgggcctcggcggggtggccgtggtcctgg

SEQ ID NO: 565286 - DNA, 100 bp, Homo sapiens
ggccaatctacatcaaggactatgtgacactctatgtgaaaaacatcagagagctcgtactggcaaatcaggaaacccaggcccaacggcaggtggatgc

SEQ ID NO: 565287 - DNA, 100 bp, Homo sapiens
cacaattataaaatgtcagcttttaagggtttattccctgctgtcctgaatcttgcttctaatgctcttatcacgaccaatgcaacatgtggagaaaaag

SEQ ID NO: 565288 - DNA, 75 bp, Homo sapiens
aaccaaattgtcgccattaagaaagaactgtggctgcaccatctgtcttcatcttcccgccatctgatgagcagt

SEQ ID NO: 565289 - DNA, 82 bp, Homo sapiens
cgcggacctgcggactagcgaacccggaggtctcctctgagcctccggcctccataagacccaaaacagatgacacctcttc

SEQ ID NO: 565290 - DNA, 98 bp, Homo sapiens
gctcatctcatagaacttctctgtagtccttcagtgaatctacagacctattttctcaggagctcagcctggccttacttcagtgataaaaggaggaa

SEQ ID NO: 565291 - DNA, 50 bp, Homo sapiens
actgtggagatgtggtgcgactaggagctagagttaatgccaaagacagc

SEQ ID NO: 565292 - DNA, 100 bp, Homo sapiens
gaaaccatcttcaagttagcagcgtttattttacagattgggtggatcacaagaactaatctttcatgatttggaaaccggaaggaaagaagcacttttg

SEQ ID NO: 565293 - DNA, 90 bp, Homo sapiens
ggccgtgaagcacctgcacatccacactccgctgctcgacagatggtttatgggagaaatattagccagtgtcttcacatgctcattgat

SEQ ID NO: 565294 - DNA, 100 bp, Homo sapiens
ggcggttcagcgcgaccacgaaggccgctactccgaggcggtgttttattacaagctcagattggtcctccagaagtacatttagaagctgaagataagg

SEQ ID NO: 565295 - DNA, 78 bp, Homo sapiens
aatggcaaggctaaagaaattaatgacaataatggatagtatgaatgatcaagatcagtacttgatatttggtgccga

SEQ ID NO: 565296 - DNA, 74 bp, Homo sapiens
gctgctcgagctgctgctggattgaactcagagaagccgggactataatgtaactgcaaactccaagctggtca

SEQ ID NO: 565297 - DNA, 98 bp, Homo sapiens
gtggacaaagctgttgtctcagggagcacagaagtggtcttggaggcattgggatgggacttggtccgggtggacagcctattagtgccagccagttg

SEQ ID NO: 565298 - DNA, 100 bp, Homo sapiens
gggggcccgtactgcacatcgtggtggtcggatttcaccacaagaagggctgccagctcaagcttcacctgtggtctggcaggggccctggcctcaaacc

SEQ ID NO: 565299 - DNA, 100 bp, Homo sapiens
ataaaaactggagaatggttctatgaggaacgagccaagaaatttccaactggaggaatgtatcctgtcaggtataatgtcagtgaatggcaagaaagtt

SEQ ID NO: 565300 - DNA, 50 bp, Homo sapiens
ttctggagcagtatttcatgaaggacaaactctgcctgggcgagtccttt

SEQ ID NO: 565301 - DNA, 83 bp, Homo sapiens
tgggactccacgatgtatccatcaaccacttcctccagggaatggatttgtaaactcaagagcttctccaaatttgattggag

SEQ ID NO: 565302 - DNA, 83 bp, Homo sapiens
actttgtggagaaagtcgtcttccacttgcacgaaagctttcctaggccaaaaagagatcacctctgcagcctgcacagccgg

SEQ ID NO: 565303 - DNA, 100 bp, Homo sapiens
ccgaggctgagactcaccggaggaagcggcgcgagcgccccgccatcgtcccgtttcaccagtgatcattaaagaatgggcagcttacaaaggaaagtct

SEQ ID NO: 565304 - DNA, 98 bp, Homo sapiens
tggattcgtggcgccacaagctcattcactgtgtagattctggctgtgactcagtcactgacactgagcctgaggacgagaaggttgtttcctactcg

SEQ ID NO: 565305 - DNA, 75 bp, Homo sapiens
aaggaacagattgttcctaaaccagaagaggaggttgcccagaagaaaaaggaaagtatgtgatggtgatgggag

SEQ ID NO: 565306 - DNA, 101 bp, Homo sapiens
accgacagttggaggtatacacaagcggaggaaggccaggagaatgtcgagatcctcccctctggggagcgaccgcaggccaaccagaagcgaatcaccac

SEQ ID NO: 565307 - DNA, 75 bp, Homo sapiens
agttaatcctcaatttaagcctgatctaacccctagaaacagaatgcactgctgcctgcaggcctgaggcagaag

SEQ ID NO: 565308 - DNA, 95 bp, Homo sapiens
ccgccctactacggaaactcggtcagggccacggtgcagaggtaccctccgacccaccacggcctcccagaagttcctgccgaatcgtcttcgtc

SEQ ID NO: 565309 - DNA, 100 bp, Homo sapiens
tccagtcccctgaggtgatggcagatagggatgaggaagaaatgaccaaacgagatgacaaaagagatatcaacagatactgcaaggagaggccctctaa

SEQ ID NO: 565310 - DNA, 99 bp, Homo sapiens
gggtcagtccgccgctcaccccgcggccgcaccttcccgccttctcagaggctgaggggatctggcggtggagcgctaggatcagacgcccccgcgatg

SEQ ID NO: 565311 - DNA, 100 bp, Homo sapiens
gagctgccattggaaatggaagcccagtcctctcctgttcttatttgctttatatatcatgtgtgttcctcactcaggtcacagggattatggacccaga

SEQ ID NO: 565312 - DNA, 88 bp, Homo sapiens
ccgtcgtggaagcaggactgcgccgcgtcttcctcaagcaaaatgatgcttcaacacccaggccaggtctctgcctcggaagtgagtg

SEQ ID NO: 565313 - DNA, 90 bp, Homo sapiens
gttggctgtgcagattaaccaggacaagaattttgcctttttggagccgaggcctgcctggagccccagatcaccccttcctactacacc

SEQ ID NO: 565314 - DNA, 98 bp, Homo sapiens
gatgcccaaatccaagcgcgacaagaaagaaatttccatcgtgaagcctttaatcatcttacccaaggctctaacaacctgggtaaactaaagatgtg

SEQ ID NO: 565315 - DNA, 100 bp, Homo sapiens
gttccggcgaggggggagcctcagcaggattgctgtgtgaaaaccgagctgctgggagaagactacgcgtttgttcacatggagaaggaagcagatgcca

SEQ ID NO: 565316 - DNA, 74 bp, Homo sapiens
gttgagggcacgagtcgggtcctgagaccaggtgatccgcaggggctggctgaccatcaacaacatcagcctga

SEQ ID NO: 565317 - DNA, 100 bp, Homo sapiens
gcctcaagaagcagttccataaagccactcaggtaaagtccggagaagaagctggtgagaaagagacaggagccagatgctgaatgacggtaaatcgaat

SEQ ID NO: 565318 - DNA, 100 bp, Homo sapiens
gttccagtttgaatgtgacagtgagagccccactgtgcagcttcgttcagccaatggctactacctatcccaggtcagatgatacaaaaggacatccaag

SEQ ID NO: 565319 - DNA, 100 bp, Homo sapiens
gtcaagacctttgagccgcctgagcgactaactcctgcgcccctgaggggagtgcatccgccccaacccttttccccctcgtctcctgtgagaattcccc

SEQ ID NO: 565320 - DNA, 96 bp, Homo sapiens
gagaactacaggaacgtggtctccctggcctttccgctgtgcccattgccattactcctgcaacatatctggctctctgaagcggcactacaacag

SEQ ID NO: 565321 - DNA, 113 bp, Homo sapiens
actcatccgacagcataggctcctcacagaaagcccacgggatcctagcacggcgcccatcttacagattgtggaacagcaccgcttaaggatgtgttgcaagggtctcggat

SEQ ID NO: 565322 - DNA, 100 bp, Homo sapiens
ggggcggcggcgacgcggacctgcggactagcgaacccggagatccataatgagatggcatcaacatcagataaaggtgcccaaggaagaaatgacaaga

SEQ ID NO: 565323 - DNA, 51 bp, Homo sapiens
cgtcgccgctcccgaagcttttccaggttcaagggcagacggggtttttga

SEQ ID NO: 565324 - DNA, 74 bp, Homo sapiens
gaaagtctgggatgtaagagtgaacaaattactacagcattaccaagctgttaagaagaaatcctgaacggcgc

SEQ ID NO: 565325 - DNA, 100 bp, Homo sapiens
caagtttaacgacaagcacatcaccactctgcaggtcacgagaagagaatgccttctagatgcaaaatcacctccaaaccagaccacttttcttgacttg

SEQ ID NO: 565326 - DNA, 49 bp, Homo sapiens
cagcggcgcgggaggccgtgcgggtcgccatgggctactcacactcctt

SEQ ID NO: 565327 - DNA, 100 bp, Homo sapiens
gacaatgggcagaacgaattcagtgatatcattaagtccagatctgatgatgaaacatgcttggaataattataaaggttatgcctggggattaaatgaa

SEQ ID NO: 565328 - DNA, 100 bp, Homo sapiens
catcgccaagtttcagggagaagacacggtcgtgatcgcgggcccagcactagaagatttcagtcatctgccaccagaacagagacgtaaaaaactacag

SEQ ID NO: 565329 - DNA, 75 bp, Homo sapiens
aggaggaggagggggaagcggcggcggcaaagggatatctatagagaaatggggtttggtcactatgaagaagaa

SEQ ID NO: 565330 - DNA, 98 bp, Homo sapiens
aaaacattcctgctctgaaagctcttcttgaaaaatgcaaagatgtagatgagagaaatgaggcaactcatgcagcaattccagaaccccgacttccc

SEQ ID NO: 565331 - DNA, 100 bp, Homo sapiens
caagaaggccctggacacagcaatatctctgggctttcacagggccaattcctgtccccccagcagcatggcatcgtgtgctgaaccctctgagccctct

SEQ ID NO: 565332 - DNA, 75 bp, Homo sapiens
ctgaagcgactgagtccgcgatggaggtacatcgagtgaaagcattcctcaaactgccacacaaccagccatttc

SEQ ID NO: 565333 - DNA, 100 bp, Homo sapiens
ggtggctgctgtgacaaagggaaattgtgcttttccagcatgcttactgaccctgatttacctcaggagtttgaaaggctttacaggaagtatggtgctg

SEQ ID NO: 565334 - DNA, 83 bp, Homo sapiens
acgccggcttcaaccaggaccacggtgcacattcaggttcccgagcacaaacatcaagataacgttcactgccctgtccagcg

SEQ ID NO: 565335 - DNA, 97 bp, Homo sapiens
actctgggtagccggctgcgcgtggctggggaggcgaggccggacgcacctctgtttgggggtcctcagctggagcagttcaagaaggacaacgagg

SEQ ID NO: 565336 - DNA, 51 bp, Homo sapiens
gccgagcaggaggcgccatcatgctatcatggtgaacttacttcagattgt

SEQ ID NO: 565337 - DNA, 83 bp, Homo sapiens
gtgggcttctacggggccttctacagtgacggggagatcagcatttgcatggaacacatgtgccggatggagtgctgtgatgt

SEQ ID NO: 565338 - DNA, 100 bp, Homo sapiens
ctctccgcctccatgtgccggatagcgggagcgctgcggaccctgctgccgctgctggcggccctgcttcaggaccctgtggcctgtgaggatgttgctg

SEQ ID NO: 565339 - DNA, 82 bp, Homo sapiens
tgcggctcggacgccagcggacacgcgggcgaggctccagggagttccacgctgtccagttctctctgccgtgataaacctc

SEQ ID NO: 565340 - DNA, 82 bp, Homo sapiens
cgggaggaggagagcttcacctgtcggcttggagagatccagatcattgagaagcagccaggccacattcggagcagggttt

SEQ ID NO: 565341 - DNA, 82 bp, Homo sapiens
ctggtgcagggcctgattgaggactgccagctggcgctgcagagattccttcagtcgaatgagccttcgcaaaatggatctc

SEQ ID NO: 565342 - DNA, 100 bp, Homo sapiens
tttgtcttgcaaagtgttggaggacagacattaacagtatttactgagagctcatcagtgctgctcacggccgtgaactgctacagcgtgaaggccgcca

SEQ ID NO: 565343 - DNA, 98 bp, Homo sapiens
gccgtcaacaatcccaagaagcaggaatgaaagtggcgctttctccgccccaggcttccatctgtatcacaagttgcccacaatagtgcctgagagct

SEQ ID NO: 565344 - DNA, 100 bp, Homo sapiens
actaacaattcctgttttcgccaggtcttagaaaaataccccaatacacccatgagtcataaagaaattcttcaagttatccagagagaaggactaaaag

SEQ ID NO: 565345 - DNA, 75 bp, Homo sapiens
tttggattgaagccgcctctgtattacttaccaggagcaggccgggctctcgccatgggtcactgtcgcctctgc

SEQ ID NO: 565346 - DNA, 75 bp, Homo sapiens
ttgggagatccacagctaagacgccgggactccctggaaacctagaaatgatgctattaactgagtacttggata

SEQ ID NO: 565347 - DNA, 116 bp, Homo sapiens
ctagttatttactttcctccgcttcagaaggtttttcagactgagagcctaagcatactgggaaccttaatctcatctttaaaataaggagaattactgagtgacctgaaggaccc

SEQ ID NO: 565348 - DNA, 100 bp, Homo sapiens
gaaaaagagcaggaagtcattacatgagccccacagtcttcgttataacctcacggtgctgtcctgggatggatctgtgcagtcagggtttcttgctgag

SEQ ID NO: 565349 - DNA, 100 bp, Homo sapiens
gcccgcggggtctacgtgctgcccatcggcgacgcggacgcggctgcagcagtgaccacgtcgtacaggacttgagaccaggagacgtatccagcaagcg

SEQ ID NO: 565350 - DNA, 75 bp, Homo sapiens
tgcaagctctttgacacacagcagttcttgtcaggcgggaaaaccctcatgatgctgttgtctttcacccaaaat

SEQ ID NO: 565351 - DNA, 90 bp, Homo sapiens
ctggatggaagttgaaagatgagagcccatctgtggagatgtaatcagtgtagagaaaaccgtgaagagatgccttttggacactttcaa

SEQ ID NO: 565352 - DNA, 131 bp, Homo sapiens
acgttctttcgcttttttacctgccaatcaaactgctacaagacaacaccctgatctggcatggacattcctgacgtgaactacgaggagctggcccgctgcacagatgacttcaatggggcccagtgcaa

SEQ ID NO: 565353 - DNA, 113 bp, Homo sapiens
ggaaagcatgttgtggctgttccaatcgctcctgtttgtcttctgctttggcccagaactcccccactggaaaggattctgaaagaaatgaagtcagccctcagaaatgaagt

SEQ ID NO: 565354 - DNA, 98 bp, Homo sapiens
gagacaactggaagagtatcaggggatcttgctggcaagggtgtacaactatgagcctttgacacagctcaagaatgtcagagcaaattactatggaa

SEQ ID NO: 565355 - DNA, 51 bp, Homo sapiens
tctgctgtagagtgtatcgcagtgttggacaaagcacagttgcttctagac

SEQ ID NO: 565356 - DNA, 82 bp, Homo sapiens
atcgcttgggagagctcctgggccacccctcctttcaggtcaaggcccagcgcttgagaagtcggaggccaaggccgggccg

SEQ ID NO: 565357 - DNA, 51 bp, Homo sapiens
ctcggaaccttgtttactaatttactatgcaggatgacatttttattctcc

SEQ ID NO: 565358 - DNA, 75 bp, Homo sapiens
attactgtcccgtttgattttggagaaaagcaaaaaaatgctcttggagatgtctctgagttgacgggatttcct

SEQ ID NO: 565359 - DNA, 97 bp, Homo sapiens
ctcattggttgagtcagtgagttgcgtgtctgcaagagagcatcctatctggttatcaatactctggctgaccatcatcatcgtgggactgactttg

SEQ ID NO: 565360 - DNA, 100 bp, Homo sapiens
tgggaaccaaaccctgactttagctttagtctggcagctgatgagaagggcccatctggttagacaatctccactgtactggcaacgaggcgacccttgc

SEQ ID NO: 565361 - DNA, 74 bp, Homo sapiens
tggacaggttaagggactcccaggaatatcagaagcatcagatggtgaaggagaaggagacacagaagtgatgc

SEQ ID NO: 565362 - DNA, 98 bp, Homo sapiens
tcggccctgcgccgcgacaagtacgtggccgagttcctcgagtgggggaagatggagagttggaagaaggtgaattggaagatgatggggcagaggag

SEQ ID NO: 565363 - DNA, 98 bp, Homo sapiens
tccttgtgcctccattcccgggaggggggagcggcgttggaggccaccgtttccagcctccaccaggcggtgtgaagatgcctaatgtacccaataca

SEQ ID NO: 565364 - DNA, 125 bp, Homo sapiens
ggcacccgagcagcgccagcggccgagcgggcggcttcctggcctgggcgctccggtggcggcggaggtgtcgtgaaaactacccctaaaagccaaaatgggaaaggaaaagactcatatcaaca

SEQ ID NO: 565365 - DNA, 72 bp, Homo sapiens
gggcttctgcagcgccgatggctccgacccgctctgggtatatgaatgacctaaaggtacaaataaagacgg

SEQ ID NO: 565366 - DNA, 82 bp, Homo sapiens
cttggtttcgggatctcggtgctgcagacggcgagacctcctgcacaggtgtaatctagctcctgtggtggagtttgctgca

SEQ ID NO: 565367 - DNA, 75 bp, Homo sapiens
acaagaacttcgagatggattccaacatcctgctagacttgttaaggttcctcatgggtgcctcctgtggcgggg

SEQ ID NO: 565368 - DNA, 104 bp, Homo sapiens
agaggatggaacacttcagtgcattcaaggtttcagtgttgactggtgggctcttggagtgctcatgtttgagatgatggcaggaaggtctccatttgatattg

SEQ ID NO: 565369 - DNA, 100 bp, Homo sapiens
gccatcccgagtcctcactctgcctttctctccttttcaaggctgcaatgatccccccgccacagtcctcaggtctcctctgagcctccggcctccataa

SEQ ID NO: 565370 - DNA, 100 bp, Homo sapiens
accatggcacctgctggacgcccgggggccaagaaggaccaagaagctgataattgatgtgatccggaaccagccagggaacacattgacagaaatctta

SEQ ID NO: 565371 - DNA, 98 bp, Homo sapiens
aagaacccagaggaggcagaactagaagacacactcaatcaagtgctctccacacaaggagatgcaagtcaggtgattgggcctcttactgaaggaca

SEQ ID NO: 565372 - DNA, 119 bp, Homo sapiens
gcctaaaatactctttagctactggaaactggggtgatcaaaagaaagctcatcaagccagagctggagtatctcagggccgcctttttgcctatcctgacactcaccgccatcgcctg

SEQ ID NO: 565373 - DNA, 83 bp, Homo sapiens
ctcgtcagcactgactttcagctatggaatcggcaaatcgaagggagagtggttgagatttccagactccaagagatattcac

SEQ ID NO: 565374 - DNA, 89 bp, Homo sapiens
aagcagatcctgcccttcccactcgagccagcccctacccttggcctcttcagcaactacagcaccctgcggttggatttctcacgatg

SEQ ID NO: 565375 - DNA, 49 bp, Homo sapiens
tgcaaccgcctccgcctattacagagagtggtgagatcaagtcggtaga

SEQ ID NO: 565376 - DNA, 100 bp, Homo sapiens
agagacagcagtagtccctggcagtgcccagtttgcaggggtgtatgtacaaagacttttgaagaggtgtgggagcacacatgatttaaaggaaaacaaa

SEQ ID NO: 565377 - DNA, 75 bp, Homo sapiens
caagtggaggcgccgctctagcggccgggactctgaactatggcggaaaactttattctcaagagatttctcatt

SEQ ID NO: 565378 - DNA, 100 bp, Homo sapiens
tttgctggatttaagcactgctgcactttatgaggagatcatgaatcagacagataaaaatcaacaagaaatcccatcataccttaatgatgaaccacca

SEQ ID NO: 565379 - DNA, 82 bp, Homo sapiens
ttggacctgaaacagaaattctggaacacctatatggtgtaatggataggtaacagagaagacctcgtcccttcctagtcag

SEQ ID NO: 565380 - DNA, 83 bp, Homo sapiens
tggcccagccgagcccagcaccaccatcttcacccagctcgccaccatggccgccttcccctggtaggtgagtgctgtcctcg

SEQ ID NO: 565381 - DNA, 100 bp, Homo sapiens
tcaagctgttactttcctatggagcctccagaaatgctgtggtgagcagggcagcatttccttctcccactgctgctgagatggcagaaattagtcgaat

SEQ ID NO: 565382 - DNA, 60 bp, Homo sapiens
tatgcactctatgaagaattggaggcaaagggacctgatatacaagcagctgcagcaggc

SEQ ID NO: 565383 - DNA, 100 bp, Homo sapiens
aggaggaagaggacgaggacgacgaggaggaggaggaggaggaaaaaggctggtgcagtggtgtcatcttggctcagtgcagcctcgacttcctgggatc

SEQ ID NO: 565384 - DNA, 100 bp, Homo sapiens
agatctgcctcttctccaagaaactcaaccactagtgacaatgaccagcctcctgactactccttctccaagagatctcattcgtcggttcggatccaag

SEQ ID NO: 565385 - DNA, 75 bp, Homo sapiens
cttggctagtgcaagccttgtttattttcctcaccactgaatctacaggagtgaaagctggacattgaagaagcc

SEQ ID NO: 565386 - DNA, 50 bp, Homo sapiens
catccattgtggagcagccttttgggatattgtcttcatgcgaacttggt

SEQ ID NO: 565387 - DNA, 100 bp, Homo sapiens
cagacctcaagtgacttggtttagagaagggcacaagattattccaagcaacagaataatgcaggctcaacagtaccagcagcagcgtcgaaaatttgca

SEQ ID NO: 565388 - DNA, 73 bp, Homo sapiens
aaaactcccatcgcgtcgtggaggagtactttgtggcccccccagggagacgtacgaggaggaccgggagtac

SEQ ID NO: 565389 - DNA, 96 bp, Homo sapiens
ctcaaatccgtggactacgaggtgttcggaagagtgcagggactgatcctttgaaatactccagccatgactaaaagagaagcagaggagctgata

SEQ ID NO: 565390 - DNA, 101 bp, Homo sapiens
agcagaggctcagagcttggagacagacggcccagcagcaaagaaacctggataacatcgtcttgcaacaacccagaataggtagcaagaggaaatctaag

SEQ ID NO: 565391 - DNA, 100 bp, Homo sapiens
aagaggcattgaggactttccttacctgtttttccagctcacccactgccagcagagagctgagctcaatgtgcagcaatggatgacgacagcctggatg

SEQ ID NO: 565392 - DNA, 76 bp, Homo sapiens
gggtccgggtgcagtggctcacgcagtaatcctagcaatttgggaggccaagacggagtcttgctctgtcgcccag

SEQ ID NO: 565393 - DNA, 75 bp, Homo sapiens
taagtctttcctttgatcctaaggacatctttctggaactgcaagcacatgttgaccagataactgaaatggcag

SEQ ID NO: 565394 - DNA, 101 bp, Homo sapiens
tcggattcggcttccaccgcttcttagtggtccgggcccaccagctggtcttgccaccttgcgacgtagtgatcaaagccgttgctgactatgtacgcaac

SEQ ID NO: 565395 - DNA, 83 bp, Homo sapiens
ctagaagtcactttggaagaagtatatgcaggaaattttgtggaagctaacagagaccctgatgctggaattgatgaagctca

SEQ ID NO: 565396 - DNA, 91 bp, Homo sapiens
aagagaaaaagcccaggcataaaatcatctccatattctcaggcacagagaaagctgcatccagatctcattatgcatcagaaaaatgaaa

SEQ ID NO: 565397 - DNA, 100 bp, Homo sapiens
gagagaaacaataggacggaaacgccgaggaacccggctgaggcggcaggaaccctaaggactctgcaatatgaataattccctagagaacaccatctcc

SEQ ID NO: 565398 - DNA, 75 bp, Homo sapiens
cttcagcatcatgcagccgccgccgaggaagtacctggagtagaacagaaaaattattatgtctgtgttcccttg

SEQ ID NO: 565399 - DNA, 95 bp, Homo sapiens
gcgtgaggtgtgggtgttcgtttctcaggtggagccgccaccaaaatgcagattttcgtgaaaacccttacggggaagaccatcaccctcgaggt

SEQ ID NO: 565400 - DNA, 82 bp, Homo sapiens
ggcgcgatgcgtcaagtacactgaaattcatcctgagatgaggtttttctatatgagtggagaagacagctgttaccaggga

SEQ ID NO: 565401 - DNA, 99 bp, Homo sapiens
ggacaagaacccggatgagggcgagaagagtgatcagcagctggactgtgccttggacctaatgaggcgcctgcctccccagcaaatcgagaaaaacct

SEQ ID NO: 565402 - DNA, 100 bp, Homo sapiens
cagccattcccaaatgccccaaggatgaagaacggagacggttatgtgcagagtctgattagacgagttgtaaataatgtaaacattgtgataaataatc

SEQ ID NO: 565403 - DNA, 129 bp, Homo sapiens
gtcttctgctgagtgctgccgccccttcccaggacagcggaggtggaacttcgtcgcgctgcaacccccggctcggacaagttggatggcttgaggactggtactaaaaggaaacgtgactgggaggcc

SEQ ID NO: 565404 - DNA, 75 bp, Homo sapiens
caagatgctgcttactggtgggaaatcaagtcgtaaaaacaggtcaagtggaacaagatcactcaaggtgaagga

SEQ ID NO: 565405 - DNA, 75 bp, Homo sapiens
ggaaagtactgtccaaatgaattatgtcagcaacgtatccaaggcaatgaatcgctccctggctaatgtgattct

SEQ ID NO: 565406 - DNA, 80 bp, Homo sapiens
ttggccgtgtacccgaaaaactgattgactgggctggcgttaactgtgcggaggcagatgtctttggtggacttgggaaa

SEQ ID NO: 565407 - DNA, 100 bp, Homo sapiens
cgtggccttagctgtgctcgcgctactctctctttctggcctggaggctatccagcgtatggacctgtctgccaatcaggacgaggagaccgaccaggag

SEQ ID NO: 565408 - DNA, 75 bp, Homo sapiens
aagtgaagccacaaacagatcagttggccttggcagaattgtatgaagatgaagtgaagtgcaaatcttccaagt

SEQ ID NO: 565409 - DNA, 97 bp, Homo sapiens
gttcgctgcgcgtgcacattccggaatgagtagcgacagtgacattgaatgtgacactgagaatgaggagcaggaagagcataccagtgtgggcggg

SEQ ID NO: 565410 - DNA, 75 bp, Homo sapiens
cggaaggcctcctccataaccgagtccgaaagggcagaatctatgggggtgatgctgcattaccgctcagacctg

SEQ ID NO: 565411 - DNA, 90 bp, Homo sapiens
aaggcatggaaagttccagccggttcgagagctaggtttaggagacgcgtggggacagccgagccgcgccgggcccctggacggcgtcgc

SEQ ID NO: 565412 - DNA, 82 bp, Homo sapiens
cacggttctgacagtatttcatgacagagagaacattgaaagtattctctaagctatttgaagagagtgactaaatgcacct

SEQ ID NO: 565413 - DNA, 74 bp, Homo sapiens
cagtccctcgtccagccacccccaggtatggacctgtctgccaatcaggacgaggagaccgaccaggagacctt

SEQ ID NO: 565414 - DNA, 90 bp, Homo sapiens
gtctcacttggcaataaaagatgacaagaagcaccacgatgcagagcaccacagagtggttctcaccattcaggaagcccttcagctcac

SEQ ID NO: 565415 - DNA, 55 bp, Homo sapiens
ggatagataccgaattcttatcacaaaggctgaaaatgatgagaatggacaagca

SEQ ID NO: 565416 - DNA, 83 bp, Homo sapiens
cgcgtgcagccggtgaaggacactgcccacgactttcggagttttgctcttgttgcccaggctggagtgcaatggcacgatct

SEQ ID NO: 565417 - DNA, 101 bp, Homo sapiens
ttctcgatgccaatctctgcttgaaaggagaagacttggattctcaggatgtgatcttcgtggtggaaagctaaattttaaaaccaccccaatggatgcag

SEQ ID NO: 565418 - DNA, 75 bp, Homo sapiens
acacagtatggtagccacacccccagacctgcttttttaaaggctgcagaaaacttcactcttttggttaagaac

SEQ ID NO: 565419 - DNA, 82 bp, Homo sapiens
ggcgttggctatgtgcccatcacagcggagctggagtttgttcagatcatcatcatcgtggtggtgatgatggtgatggtgg

SEQ ID NO: 565420 - DNA, 83 bp, Homo sapiens
ctgaagtttccatcaataaatcatgactgatcttgtagcagtgcttcatgttggcggaaccattgtattgttgcttagtgaag

SEQ ID NO: 565421 - DNA, 87 bp, Homo sapiens
ccctcaggaggtctgctaccaaatgcactgcccagtgcaatgcaggcagcttctcaagcaggaggaataaacatggtgtgtctcgaa

SEQ ID NO: 565422 - DNA, 83 bp, Homo sapiens
catgaaacagcatctcagacttctttcccagatgtttataatgagggcacacagttgagccccatatgggggttggcaggcag

SEQ ID NO: 565423 - DNA, 83 bp, Homo sapiens
agagattccggtacattatgcagacaatgcagatcttcgtgaagactctgactggtaagaccatcaccctcgaggttgagccc

SEQ ID NO: 565424 - DNA, 100 bp, Homo sapiens
cttgtctgctgccatgtgagacgtgcctttgaccttctgccatgattgtgaggcctccccagccacgtgaaactgaccgtataatagacgctggccccaa

SEQ ID NO: 565425 - DNA, 100 bp, Homo sapiens
gacgggcctgcgagggttgaagattgtgaagcaatagcctaagcattcacagctctgatggagggcaaaatcaataagcagctgaaaaaagttctgaaga

SEQ ID NO: 565426 - DNA, 96 bp, Homo sapiens
gttctaagcactggacatttgaaaaggaagagtttaaagaacgctgtactcagtgtgctgctgtctcatggggtcttactgatgaaggcaaatatt

SEQ ID NO: 565427 - DNA, 100 bp, Homo sapiens
agagaggatttctgtaactagagaagaactctataaaatgttagcgcatgaggagaaaattcagatccagttaacacaatcatttgagaaagaagagaag

SEQ ID NO: 565428 - DNA, 75 bp, Homo sapiens
agtgtcttcgatctgcttctgatgaagatttgaagcattcattaccatctggacttggtctctcagaaacccaaa

SEQ ID NO: 565429 - DNA, 80 bp, Homo sapiens
tctccacgcacgtgccctccaggtccctgtgcgttttattgcgacctgccggtgggaactttgtctccgagtcggagcag

SEQ ID NO: 565430 - DNA, 82 bp, Homo sapiens
gcttccgtttgttggtggaggaggtggcaggcctcggcgggttatgatgatggctacgggggtgaatatgatgaccagacct

SEQ ID NO: 565431 - DNA, 101 bp, Homo sapiens
ggaacgagcaatgggaattcacgctggatagacaaattattgatcgctttattcgtactcactgtgacactaacaaaaagaagaaatgaaaagggaaaata

SEQ ID NO: 565432 - DNA, 82 bp, Homo sapiens
caaagatgtgagagagaaaagtgagtttattctgaagagcatccagcgccatcatgaccgggtcctataacaacttcttcag

SEQ ID NO: 565433 - DNA, 83 bp, Homo sapiens
gaggtcccaatcccccactctttccgccctaatggaggtctccagtttcgggactggtgattgcagctggaagtgcccatgac

SEQ ID NO: 565434 - DNA, 90 bp, Homo sapiens
ggggacggggaccagcagctgtcgccgccgctctcagccagagactgctgctactttgaaacgtacgatagaggccctgatggacagagg

SEQ ID NO: 565435 - DNA, 98 bp, Homo sapiens
tggattctgaggaccggaggagccgccactgcccgtacctggacaccattaacaggcccctggccccaacatggcccgtcgctctcagagctcctcgc

SEQ ID NO: 565436 - DNA, 75 bp, Homo sapiens
cgactgtgtctgccaacctggcttcacagatgactgtccaagtgcctccaaagtgtacaaagcatcagattcagc

SEQ ID NO: 565437 - DNA, 100 bp, Homo sapiens
gtgtaaccaggattacactggctggaataaaccaagagtgcccctttcctctcaccaacagcagcaactgcagggtgatttcctaaataaaaaccaagag

SEQ ID NO: 565438 - DNA, 88 bp, Homo sapiens
gctgaggagaaggaggagcgggccgtggaggcttcgccgcctagaaaacatcctgggatggcacgggtccaagtcacattccacagag

SEQ ID NO: 565439 - DNA, 97 bp, Homo sapiens
aagggaaggcaacttgattctgtgggaagggctgtagctgatccatccgttgtctagccgtgctggtatagaggactctaagaagtggggcatgctg

SEQ ID NO: 565440 - DNA, 97 bp, Homo sapiens
cgaggcatggctccagggcatctcggaagatccaggtcccaactggaagctgaagatcctaagtgtgaacgtgaagtccccagccctgctgctgagc

SEQ ID NO: 565441 - DNA, 100 bp, Homo sapiens
gcaggatgaagttcgccgagcacctctccgcgcacatcactcccgagtggaggaagcaatacatccagtatgaggaggcaaaaccttcaactgaggactt

SEQ ID NO: 565442 - DNA, 100 bp, Homo sapiens
ccttccgagcagcagacaggagcaagtcctcctccgcctcctcctctctgcatgcgcgtcagagcccgtgccaagaacaagcagcagtcctgaactcgag

SEQ ID NO: 565443 - DNA, 104 bp, Homo sapiens
acaatgttcagcacactcaggttctttgaaggattttgcctggctggaatcattctcaccttgtatgctttacattacttctctaacaggatcaccagtttgct

SEQ ID NO: 565444 - DNA, 75 bp, Homo sapiens
atattgtgtgatgctgaggtttggggttccttgtagcttggaatactgggatgaactccagaaggtttttgttgc

SEQ ID NO: 565445 - DNA, 100 bp, Homo sapiens
ccgaacccgctccaggttaccgctatcgtcaagtactgtgctgtgtttacctggacaaatttgttggtggttgtggttgagctggatgggtcggaacaag

SEQ ID NO: 565446 - DNA, 90 bp, Homo sapiens
tccagcgacagcaacggccatgaggactcacgccggaggagagccaggcggggtttcaccatgttgcccagactggtcttgaactcctga

SEQ ID NO: 565447 - DNA, 83 bp, Homo sapiens
cttgtttgtggatcgctgtgatcgtcacttgatgatatcatcaagttgaatcgaaaggaagggaagaagcagaattttccaag

SEQ ID NO: 565448 - DNA, 75 bp, Homo sapiens
ctaacgcgaccccgacttcagccgacttaaccttgtgtgctatgatttgggcgcagcatacttccagcaaggctc

SEQ ID NO: 565449 - DNA, 50 bp, Homo sapiens
tgtgcacctgcacacgcccccggcacctgatccaggatgggggccccgtt

SEQ ID NO: 565450 - DNA, 82 bp, Homo sapiens
acggagctgaatctgccgcagctagaaatgctcaagaaccagctggaccaggcgaggcggctttgcacaaggtggacattcc

SEQ ID NO: 565451 - DNA, 100 bp, Homo sapiens
cagggaccgttgctgggcctcatttccgcaacttttcggctccgaactgctattgggaaaatgaggtacgttagtgttcgcgattttaaaggcaaagtgc

SEQ ID NO: 565452 - DNA, 80 bp, Homo sapiens
tgtaccgcggcgagaagccccagctgcactacgcgcctgatcctgcctgaagatggtgccactggtggctgtggtatcag

SEQ ID NO: 565453 - DNA, 100 bp, Homo sapiens
agggtctctggaaatttgacacagagtgctataaaaagtatggaaaaatgtggggaaacagattgtctcagtttacctagctttgaaaatgccataccca

SEQ ID NO: 565454 - DNA, 96 bp, Homo sapiens
cagccggcgagtctaaacccaagagcggtgtcatggagaaactccagctgggcccagagattctgcagcgggaaaatccaaggcttatttatgcca

SEQ ID NO: 565455 - DNA, 100 bp, Homo sapiens
gtcgcagttcttgtttgtggatcgctgtgatcgtcacttgcttgctgagcgagagcgagaagcggcccttcgtggaggaggcagagcgccttcgcgtgca

SEQ ID NO: 565456 - DNA, 91 bp, Homo sapiens
ctcctgtgtggcgatggtcttcctgctggggctcatgtttgagcctcccgcgacgatgcccctcaacgttagcttcaccaacaggaactat

SEQ ID NO: 565457 - DNA, 83 bp, Homo sapiens
cagagcgccgcgcacttcgtcatgttcttcgcgccctgccacacccactcgcccgggtctatggccacggtcggagagtggtc

SEQ ID NO: 565458 - DNA, 100 bp, Homo sapiens
tgctctgggacctgcaggtcccggaaggtccttagggaggaccccagacaccggagactgggaaatggtgtcatggagaaactccagctgggcccagaga

SEQ ID NO: 565459 - DNA, 90 bp, Homo sapiens
tggaggatgcggacgcggaggccgcctggggtagcggcggcgggagtcctggcgctctgcaggtcacaaacaaacagaggcgagaacagc

SEQ ID NO: 565460 - DNA, 100 bp, Homo sapiens
cagaaagtggagccctgcaacgaccacgtgagagccaagctgtcctgggctaagaaaaatggctacaaacttcctagcacatgagaagatctggttcgac

SEQ ID NO: 565461 - DNA, 98 bp, Homo sapiens
cgggctgcagatgctgcggaccattggcgtggggaagtatgagttcaccgacccggggcaccccagagatattgaagcacagattcgagaaattcaag

SEQ ID NO: 565462 - DNA, 100 bp, Homo sapiens
ctcgctgatcgcctaacttctactgacgaagcttggaagttgcagaaggtggtcgtgtgatggtaacagatgctgacaggtcaatactatctccaggtgg

SEQ ID NO: 565463 - DNA, 50 bp, Homo sapiens
gaagagggaagacacgcggaaacagctcctgacccctgaggattaccagc

SEQ ID NO: 565464 - DNA, 100 bp, Homo sapiens
tggagaggaagattgagtcgctggaggaggagatccggttcttgaggaagatccacgaggagatggccaaatgtgatgcttgtaagcgacagggtaaact

SEQ ID NO: 565465 - DNA, 100 bp, Homo sapiens
tagaaaacccttcacaaggaaatgaatgtgagaaagatcagtctaaagaaaaggagaagaaagtgaaaaaaacaattccttcctgggctaccctttctgc

SEQ ID NO: 565466 - DNA, 74 bp, Homo sapiens
gctgatgtgaaaaataccacgacaaaaccaccctagaatcagtgacattcgaagacgttgccgtggttttcaca

SEQ ID NO: 565467 - DNA, 78 bp, Homo sapiens
gtggacttttggaaaaagacttccaaaaagtagcccactttattcacagagagagaaggactttcaaaattcaacaag

SEQ ID NO: 565468 - DNA, 100 bp, Homo sapiens
gctgtacagattcatcaccacgttggctgattgcaattctggcccaactcaaccctctctttggaccgcaattgaaaaatgaaaccatctggtatctgaa

SEQ ID NO: 565469 - DNA, 75 bp, Homo sapiens
tcactgcagaggtgctggagctggcaggaaaaaagaaggggcatggctggagcagaatgggaacgagaacgcaga

SEQ ID NO: 565470 - DNA, 100 bp, Homo sapiens
cacagagatacccagacaacaggatcgtctcgtccaaggcacagtatgaaaacccaccacatatctatgcccttgcagataatatgtacagaaacatgat

SEQ ID NO: 565471 - DNA, 100 bp, Homo sapiens
aacaagaagtgcagtcggggctacgagcccaacgaggatggcacagcctgcgtggtgaccaagatctgcgcccagtgtgagatggagcacagtgctgacg

SEQ ID NO: 565472 - DNA, 82 bp, Homo sapiens
gcggcagggccagctgaccggccggggcctggtccgggcggtgcaggtacttacactgtgaaattttatgatggagtagttc

SEQ ID NO: 565473 - DNA, 50 bp, Homo sapiens
gtgctccaggctgccccataataaatgtccagaaggcttcttgggggaat

SEQ ID NO: 565474 - DNA, 73 bp, Homo sapiens
ccggaccgagcgcctcgacctcggtctgagagatgccctgtatccaagcccaatatgggacaccagcaccgag

SEQ ID NO: 565475 - DNA, 100 bp, Homo sapiens
aaagagccccagcaccgcccctcctggaagaaggaagaggacattggctccctggattatcaagagtttgtagttgacattgaatccaggctgaggatgg

SEQ ID NO: 565476 - DNA, 50 bp, Homo sapiens
agatgttgttgaagataaagacaaggcaccttctaaaaatgaacaagagc

SEQ ID NO: 565477 - DNA, 51 bp, Homo sapiens
acatcctggaagctgggaaaggccctgaccctctattctgcaccctgtgag

SEQ ID NO: 565478 - DNA, 76 bp, Homo sapiens
attttgcacttgtgcagaccgggcgagcagagtaagaagcagcacttgcacctcctgcgccgccgccccccatcca

SEQ ID NO: 565479 - DNA, 49 bp, Homo sapiens
caaagtgttgggattacagggatctcacttccctgctaaccggtgggcg

SEQ ID NO: 565480 - DNA, 100 bp, Homo sapiens
gatgccgctgccggttcaggtgtttaacttgcagccagctgaggtgggtgtcctggttggcaaagaccggtcaagtttttacgtgaatgggctgacactt

SEQ ID NO: 565481 - DNA, 100 bp, Homo sapiens
gttcccgctggcggcgggcatcttcttcgtgaggctgctcttcgagcgactggtcttctgaggacctctgccctctacacagcggcctcttcaggtgcag

SEQ ID NO: 565482 - DNA, 100 bp, Homo sapiens
ggagaagggagactacaaggacagcagcgactttggggcccgtcaccctcaggctgcctgggtctcagccatttgggtccccattggcccctgtgggcaa

SEQ ID NO: 565483 - DNA, 83 bp, Homo sapiens
ctgaacgagtgcaagcagctgtccgagtcccaggtcaagagcctctgcgagaaggtgatttgatgaaggctgctgcaggagag

SEQ ID NO: 565484 - DNA, 90 bp, Homo sapiens
tcagctcagcaacagggtgatcagtccataaggactagacagtcatcagaatgtgaaccaaccggtgagccctctcctaagagacccagg

SEQ ID NO: 565485 - DNA, 100 bp, Homo sapiens
tagttctggggagcgcctcgtcgacatgagtgatgtggaggaaaacaacttcgagggcagaaattcctagaggacctgtgcaacaacctcttgaggatcg

SEQ ID NO: 565486 - DNA, 93 bp, Homo sapiens
agctgtgcagccgcgaggaggcgcgggaggtgttcgagaacgaccccgagacgctgcatcttcctcccgtgaggctggccgagctccacgctg

SEQ ID NO: 565487 - DNA, 100 bp, Homo sapiens
gacatcagctgggccgccttcaacatcatagaagtgatgagtgcctccaagttcaccttcaaggccctgccctgggagaagccctgccacacgtcgtgcc

SEQ ID NO: 565488 - DNA, 90 bp, Homo sapiens
cagagatcccgctgcccatgctgcctctggcggacaccgagaagctgatccgcgagaaagacgaagagggggggccctcagcctcttggc

SEQ ID NO: 565489 - DNA, 51 bp, Homo sapiens
gtgaacttgggaagtgtgttgctggaaaagaagtatcgatatcaagatgag

SEQ ID NO: 565490 - DNA, 101 bp, Homo sapiens
ttgtaatggccatcgctggaaacaagtgcgacctctcagatattagagagacaagagagacacctccaacttcgacaaagagttcaccagacagcctgtgg

SEQ ID NO: 565491 - DNA, 100 bp, Homo sapiens
gagagattatattctcttcttagtcagtgtatctaccgtcatcgtaaagattatgacaaatcacaacttgtagaggttttagctaaagaagatactgagg

SEQ ID NO: 565492 - DNA, 87 bp, Homo sapiens
ggagctgaacgtggacagcctcatcacccggctgctggaggctgctctgttaaaagcgaaaatgaaacaattgcctgcggcaacagt

SEQ ID NO: 565493 - DNA, 90 bp, Homo sapiens
ccatggacctgcatgtcttccatgccctgcgccagccagacgcaagccacccgaggggactgcctggccttccagatgcgagctgggttg

SEQ ID NO: 565494 - DNA, 75 bp, Homo sapiens
ttcggaatttgcctctgcgccgtctttttttgcctgttacctgtgacgtccttgacaggatttcaccatgttgcc

SEQ ID NO: 565495 - DNA, 75 bp, Homo sapiens
actagccaggtggagatcaagctgagcctgaaggcctgccagggccatccaggtgaccgtgtccaacccctacca

SEQ ID NO: 565496 - DNA, 101 bp, Homo sapiens
tgaaattgccaagaatctcatcttggcaggagtgaaaggactgaccatgctggatcacgaacagatgaaatcgtggacactttgggtgaaggagcctttgg

SEQ ID NO: 565497 - DNA, 50 bp, Homo sapiens
attcatactcttcttaaagaaggaggcaggtggaagtcatcataaagttt

SEQ ID NO: 565498 - DNA, 98 bp, Homo sapiens
catcctcttggcgcacaaacagtctagccagccagctgaaacggactccatgaactatctcagggaggttgtatgagctcatttcgatggaacagagg

SEQ ID NO: 565499 - DNA, 100 bp, Homo sapiens
catgaaggtgttcgtcacccgcaggatacccgccgagggtagggtcgcgctcgcccgggcggcagactgtctgagtggtggctcaagaccgcctacctcc

SEQ ID NO: 565500 - DNA, 75 bp, Homo sapiens
cccttcgccaaactcttcattttctctcggacaaggcaaaatctcagcaagttcggacctctagtacaataaggc

SEQ ID NO: 565501 - DNA, 90 bp, Homo sapiens
catactaaagaacacatctggaagccggaagtcggtgcagcccacctcagaggagcgcatccccaagaccatcgagatcaagtccatcac

SEQ ID NO: 565502 - DNA, 98 bp, Homo sapiens
gggcacagggcaaggcggcggacggctgcgtcgcccgaggcgaggaggagcgctggcggtccagagccaaacccgtcactgaccccccagcccaggcg

SEQ ID NO: 565503 - DNA, 83 bp, Homo sapiens
agtatgtggagtgttctgcacttacacaggctgatgaattcatccgagcaaatgccaccaacaagctgacagtcatagctgag

SEQ ID NO: 565504 - DNA, 90 bp, Homo sapiens
ccagcagctgctgaagcgggtgctcgtccgccagtccgagagtcttgatcagatccccaacaatgtggcccatgctacagagggcaaaat

SEQ ID NO: 565505 - DNA, 96 bp, Homo sapiens
attttcctaacctgtgtggtctttgtgggaggaataacccagactaggaatgccagcatctgccaagcaatacctttgtctggatatggaggaaca

SEQ ID NO: 565506 - DNA, 82 bp, Homo sapiens
ggaaccctggtcaccgtctcctcagaagtctgggccaacggtcacaaaagttgtcactgttgtgacaaccaaaaaagcagtt

SEQ ID NO: 565507 - DNA, 100 bp, Homo sapiens
atgtgcgctgcagtcagaggccacctctttctttgtgggccggatgggtccttgagtctctgtgacctgcctgctgcctccctcaacgaccagttgcccc

SEQ ID NO: 565508 - DNA, 98 bp, Homo sapiens
ctccatcaagctgcaggaggaggagagagaaaggagagacaattatgttcctgaggtacaataagaacatgtcagaagttcctaattcagtacaacag

SEQ ID NO: 565509 - DNA, 98 bp, Homo sapiens
caccaccatcgagcgggagttcgaagagttggatactcagcgtcgctggcagccgctgtacttgaactgtcagaccttcagcagcctcagctgcctga

SEQ ID NO: 565510 - DNA, 75 bp, Homo sapiens
atgctgaaagaagtacagctcatgaatagactctcccatcccaacatccttaggaggtgaatcaactctgggctg

SEQ ID NO: 565511 - DNA, 83 bp, Homo sapiens
ggagcttatactcctcccagtgacgggtctggagtgcgtgggggaccggctgttggcggcatcccagccatcactcttccacc

SEQ ID NO: 565512 - DNA, 75 bp, Homo sapiens
caagtttgtcgtcgtcggggtcctgctgcagacgccctcctgcaaaacggcccaactacgttaagcttggcactc

SEQ ID NO: 565513 - DNA, 103 bp, Homo sapiens
tgactgagtctaagttctctaagtactctgaaatgagtgaggaaaaacgagccaaacttcgtgaaattgagttctacaaggcctggagctgatacgaaaaacc

SEQ ID NO: 565514 - DNA, 100 bp, Homo sapiens
gccagttctccgcgtggtacccgttcttccgaggcgttaccatcaagaggcttccagctggtctttttaccctttgctgatgataaaaggaagatgccct

SEQ ID NO: 565515 - DNA, 100 bp, Homo sapiens
tcagcctcttcagatccaaccaggtctgcttgcccagcaggaagaagatgagccttaggtctgaacgccgaggaattcatgtggatcctgtgcaagaaag

SEQ ID NO: 565516 - DNA, 98 bp, Homo sapiens
tgcgtccgctacagtatgtcaatcgcttgccccagcacaggctgaacgagcgcgaccgcctgatcaagaggctgggccggaagacgcccccgacgctg

SEQ ID NO: 565517 - DNA, 90 bp, Homo sapiens
gcttggttaaaacctgacacttttaacaggtattatagctgcaaatgtccttgtattctgtttatggagagtaccttctctgcagcggac

SEQ ID NO: 565518 - DNA, 87 bp, Homo sapiens
aggtggtcagacatgtcatcaactcagctgcccagctcaacattggcaatgtgctccctgtgggcaccatgcctgagggtacaatcg

SEQ ID NO: 565519 - DNA, 74 bp, Homo sapiens
cggcgagcctattcagacgtttcactttcagagtacaggggctcaggtccaggtggcaggggatatgctaccca

SEQ ID NO: 565520 - DNA, 75 bp, Homo sapiens
ttcactcattgccttatagttaagtgtacagcagatattttgcttcctggagaagagcccattggaagagtggaa

SEQ ID NO: 565521 - DNA, 97 bp, Homo sapiens
agatggaacagaggaagctgagtgaccaagccaacactctggtggacctttccaaggtgaagctttgttctaagaatatttgtttcatctagtttat

SEQ ID NO: 565522 - DNA, 120 bp, Homo sapiens
gtcagtaatgaagttgacctggatgaactcatccttcaaaccgacgcatactcaggagcagaggcatttcggccgtggaaccccaggctcggaggactgggtgtgagcgctgcccgggag

SEQ ID NO: 565523 - DNA, 100 bp, Homo sapiens
atggcagatacgaccccgaacggcccccaaggggcgggcgctgtgctgtggaggaagatgcagagtcagaagatgaagaggaggaggatgtgaaactctt

SEQ ID NO: 565524 - DNA, 82 bp, Homo sapiens
gagctcggaggcggcgaggagcgcctgcctgaggagagcagtgcccatgacgcttccggagacaaccctggaaacactgaag

SEQ ID NO: 565525 - DNA, 123 bp, Homo sapiens
ctgaggtggaggcaggctgcggcagacggcgacagtggcggcggcgccatggcagggcttgcagagcctagacatggaggagaaggactacagtgaggccgatggcctttcggagaggaccac

SEQ ID NO: 565526 - DNA, 98 bp, Homo sapiens
gacgcgactcgagggtgacgctcgctccgctcgtcccgctcgtcatggcctacccgggatacggaggaggggtcgatccagtgtttacaagggaagtg

SEQ ID NO: 565527 - DNA, 101 bp, Homo sapiens
tccctgtgggctggtgttccttgactggagacaacctgcagcctcctggcaccaaaggttttatggcaattggatatattccgacgaagcttgcgggtttt

SEQ ID NO: 565528 - DNA, 100 bp, Homo sapiens
gcccactccagaagtagcatggaaatggagggcatcttcaaccacaaagggaaatcctcattgacgattcaatttgttgaaggccaatttgtggactcct

SEQ ID NO: 565529 - DNA, 82 bp, Homo sapiens
tggataaagatgcgcctctgcgatttgcagtcatctgcaagcagcagaccccggagctggagccagccgccaccatgccacc

SEQ ID NO: 565530 - DNA, 74 bp, Homo sapiens
tggtattaaacctaccatccaaatcaaacaggagtcagcaaaagatgatggaagcattgctgttgcccttggtt

SEQ ID NO: 565531 - DNA, 82 bp, Homo sapiens
gggcccatcttccgcacgacctcagcaaggcagtgagaagccctaccactgcaactgggacggctgcggctggaagtttgcg

SEQ ID NO: 565532 - DNA, 100 bp, Homo sapiens
attgctgaacaactagcaaaacttgcccaaggaatcagtcagttggacagagaactacacttacaggctgggacacatgaagagctcctgaagaaaggcg

SEQ ID NO: 565533 - DNA, 100 bp, Homo sapiens
gcttccgtttgttggtggaggaggtggcaggcctcggcggtgtcctcatgacttctcttgtggaccatgtccgtgatcttttttgcctgcgtggtacggg

SEQ ID NO: 565534 - DNA, 82 bp, Homo sapiens
cgcgagcccatccgtctcaagactgtgaaaccaggtcagcccaaggccaaccccactgtcactctgttcccgccctcctctg

SEQ ID NO: 565535 - DNA, 103 bp, Homo sapiens
cttggagaagatcaataaaaactgctggaggatcaagaagggcttcgtgcccaacatgcaggtgacagagctgaatgaacctctctccaatgaagatcgaaat

SEQ ID NO: 565536 - DNA, 74 bp, Homo sapiens
cggtttctcccacatcgacctgttgtcatttacgtgctgaagcatattgacttgaggaaaacgccttccttgga

SEQ ID NO: 565537 - DNA, 82 bp, Homo sapiens
tgtgacggtcgagcttgagcctggcgggccgcggagcgttcacctgcggccgggaggtctcggcgcggaagatggccggcgg

SEQ ID NO: 565538 - DNA, 75 bp, Homo sapiens
acaacctcaaggagcgttactactcagggctcatctacatggagagacagatttccacaagcaagatgggaaggc

SEQ ID NO: 565539 - DNA, 75 bp, Homo sapiens
acatagacatttacgcggatgtcggcgaagagttcaaccagtaatctatgccagcaattatgacaatgttagcag

SEQ ID NO: 565540 - DNA, 76 bp, Homo sapiens
ctggttcggaaaataattgggggagtggattacaagtcatcttgcagctgtggcacacaaaacactacaaataaaa

SEQ ID NO: 565541 - DNA, 96 bp, Homo sapiens
ccgggacggcgggcgggctggccaccacgggacaggaaggtttgccaataggattatcctgctgccatcatgtcttggtttgttgatcttgctgga

SEQ ID NO: 565542 - DNA, 75 bp, Homo sapiens
tatttcccagtaacaaaagaaaatgatcaagtcccagattactgattttgggcactccaagattttgggagagac

SEQ ID NO: 565543 - DNA, 100 bp, Homo sapiens
ccttattgaagagataggaactcttggttgggataagtctgtttatgatggtgaagaacatggacgtttcatggagaagcttgaaactcgtatccgtaat

SEQ ID NO: 565544 - DNA, 82 bp, Homo sapiens
ctcacatctatgccatcacagacaccgcctacaggagtatgatgcaaggacacaatgtttgcacgaggactgaagaggaaat

SEQ ID NO: 565545 - DNA, 82 bp, Homo sapiens
ttactgtatgtggcactatcaaatctagatgcagctacttatcagggggattcccgaagtcttccgttttctgagaatgtga

SEQ ID NO: 565546 - DNA, 75 bp, Homo sapiens
cagacgctctggtcatactaaagaacacatctggaaggtatagatccggatttgctggtttttgaacaatctccc

SEQ ID NO: 565547 - DNA, 80 bp, Homo sapiens
gtgctccaagccgggtgtcatcttcctaaccaagcgaagccggcaggtctgtgctgaccccagtgaggagtgggtccaga

SEQ ID NO: 565548 - DNA, 75 bp, Homo sapiens
gtaacttgttcttgattctgctcatgatggatttcaacactacacttgcacaatgtctttgaaaccaagagtagt

SEQ ID NO: 565549 - DNA, 101 bp, Homo sapiens
gtgacctttgcatctgcctgtccagccagcatggaaccaaagcggatcagagagggctaccttgtgaagaaggagttgtaagacgttcatcgccgtgttat

SEQ ID NO: 565550 - DNA, 100 bp, Homo sapiens
tagtctcctcctcggcgggagccctcgcgacgcgcccggcccggagcccccagcgcagcggccgcggtggcctcagccccgagtccaagaagatcctgac

SEQ ID NO: 565551 - DNA, 102 bp, Homo sapiens
ttcaacccaggacacaagaaactccttcacatctggaagaacttgaagaaaaatatgtcgtaactgcaagtgtggccaagaagagcatgatgtcctcttgag

SEQ ID NO: 565552 - DNA, 75 bp, Homo sapiens
gctagtgctaggccacttcatagcttcggggatggtcaatcagaactctgcagccattctttgaaggattattac

SEQ ID NO: 565553 - DNA, 80 bp, Homo sapiens
gccgggagggcctcgggggactgactggaagccagttgagggaagttctccatgaatgtacgtcacaatgatgatgaccg

SEQ ID NO: 565554 - DNA, 83 bp, Homo sapiens
atcatgttctcaaagaccttggtcttggaggctttgatgcggcctggaagaattgatagaatcatctatgtgcctttaccgga

SEQ ID NO: 565555 - DNA, 109 bp, Homo sapiens
acattcaggggaaccgcctcaccgttctgcccccagaactagatggtctgtcttctgctgatcccaactctgattggaatgcaccagcagaagagtggggcaattgggt

SEQ ID NO: 565556 - DNA, 83 bp, Homo sapiens
ctggaggatgcagtgaaagaaacttcctcagtaaagcctcttgcaagcttaggatatgaaaagagctgtgtgttgttcaattg

SEQ ID NO: 565557 - DNA, 50 bp, Homo sapiens
actgattatggctcaggctaccccaatgacatggatgggtgcaaaaaaga

SEQ ID NO: 565558 - DNA, 96 bp, Homo sapiens
tgaacggtgcagcagtgatggatgcagctcttctgttgataggaaaaaagggttgctcattttgggtatcactggagtctgatggaaagagatagg

SEQ ID NO: 565559 - DNA, 100 bp, Homo sapiens
atcttctccgtgcggtcctgcaacgtttggcaactgtggatctggctgagtacatagtactctgaatcaatggagaaatggatattcacctatatgtaag

SEQ ID NO: 565560 - DNA, 51 bp, Homo sapiens
tgaagtatttgacgaaaatagactgggtactatttttctgcctggaaataa

SEQ ID NO: 565561 - DNA, 82 bp, Homo sapiens
agtgctgctgcagcttcccgagacatcaccttgcttcctgcctgacacagctcacttcaagaagtgcacaatgtcagaacgt

SEQ ID NO: 565562 - DNA, 98 bp, Homo sapiens
agcaaacaagtgtctgtgcacaggagtcagagagggggaaccgccgtcccaacatcacaaaaaggtcccaaaatggtagaagtccagaatcaacagtt

SEQ ID NO: 565563 - DNA, 80 bp, Homo sapiens
ttgggtcttcctagagcgtctaaaagctttgtgtgcaacacgtgccctgaaaagtggatcaatttccaacggaagtgcta

SEQ ID NO: 565564 - DNA, 74 bp, Homo sapiens
ctggaagtagcaggccgcatgcttggaggtgtggtatgacattcaaagctaccagaagcatcatggtccccaga

SEQ ID NO: 565565 - DNA, 87 bp, Homo sapiens
cttctctgctggcttggtggatggtcacgatgtagttatagggaatgtcactagtgcatctgggtctcagatggcaagcggcatcag

SEQ ID NO: 565566 - DNA, 100 bp, Homo sapiens
agaggctgcagttcaaggtcgtggacctggagcagacaaacctggatgaagatgtgaggtccagagatatatccagagaggagtggaagggctcggagac

SEQ ID NO: 565567 - DNA, 75 bp, Homo sapiens
cgataatggaatgctttacctggaatggattcctagcctccagcttggtgtataatatttcggatggtcagttta

SEQ ID NO: 565568 - DNA, 74 bp, Homo sapiens
tatagcaatctggttttcttggaaggtcagtgcaccagatattctgaaacctctcaatcaagaggatcccaaat

SEQ ID NO: 565569 - DNA, 89 bp, Homo sapiens
cctgaggcacccgaagaagagaccatccatatttccagattagaagcccaggacccaggaaggagacacaggaaatttattcaaagtcc

SEQ ID NO: 565570 - DNA, 95 bp, Homo sapiens
ggcaacggcgaccgcctctgcttcaatgtgggccgggagctgtacttctatatctacaagggggtccgcaaggagcctcacagtctactcagaga

SEQ ID NO: 565571 - DNA, 98 bp, Homo sapiens
gacattctccacctcctgggaggccagccattcccaaatgccccaaggatgaagaacggagacgtatcgtcagtgaagcaggagcatcaatctacagt

SEQ ID NO: 565572 - DNA, 83 bp, Homo sapiens
ctccgtcccccgcgggtctgctctgtgtgccatggacggattgcagccaaaattggaggcgatgctgccacgacagtgaataa

SEQ ID NO: 565573 - DNA, 98 bp, Homo sapiens
ggaggaggaataatatttatggagcatatattatggaacacagtgctggagaatctggtaaaagcaccattgtgaagcagatgaggatcctgcatgtt

SEQ ID NO: 565574 - DNA, 83 bp, Homo sapiens
agcacgggcaaggcggagagtgacggagtcggcgagcccccgcggcgacagtatcagatgtagaaggtggtgatggactgcag

SEQ ID NO: 565575 - DNA, 100 bp, Homo sapiens
gaagcccacccgtgaggagccagctgccgcgacgttggttgaatctggcgatgtggaacccatggatatggagggctgactatatacaccatgttttttc

SEQ ID NO: 565576 - DNA, 100 bp, Homo sapiens
gccacattaaccctttcattttgtttggaagatggaccaaagcgatacagaactcattatacaatgacaaatggaggcagcattaacagttctacacatt

SEQ ID NO: 565577 - DNA, 100 bp, Homo sapiens
atagaaaggttaaaacaagaaattgataatgccagagaactacaagaacagagggattctttgactcagaaactacagcctccaccaggcggtgtgaaga

SEQ ID NO: 565578 - DNA, 51 bp, Homo sapiens
actgcgactcagcatgcagaagcttcttctgcacggtacctgagatcctgg

SEQ ID NO: 565579 - DNA, 98 bp, Homo sapiens
cttggaagaaagtatcacgtctgctgagtccagcaagctaaaagtacagaaggtggagccctggaacagcgtgcgtgtgacattcaacatcccccggg

SEQ ID NO: 565580 - DNA, 100 bp, Homo sapiens
tgggccaactccagcacgggctgcgggacagagagatcaaccagctttcactcctagtggaatattaactcctcatgccttgggttcaagaaattcacca

SEQ ID NO: 565581 - DNA, 100 bp, Homo sapiens
tctgatcccttgctcccatccctgcagcatgaacaagaaaatcgcgctgcaactcaaagccacgctggagaacatcaccaacctccggcccgtgggcgag

SEQ ID NO: 565582 - DNA, 100 bp, Homo sapiens
ttttccgcaggccaagtccagcttatagacccaatcaaaaaagaaactagcaaactttttaatgaggaatgccccttctgcccttccagtctgcagcccc

SEQ ID NO: 565583 - DNA, 99 bp, Homo sapiens
cagagaacaagaggagagttgaagagagcaatggacatcttttcagcagctggacaatccagatgagcaagcagcccagatcagacgagagctggatgg

SEQ ID NO: 565584 - DNA, 73 bp, Homo sapiens
cgtgaccgagagcgtgaccgagagcgcgaatatcgtcatcgttagaaggtggatccctgcatcctcaacaaca

SEQ ID NO: 565585 - DNA, 99 bp, Homo sapiens
gaggatgagactgaaacaaatgaagttcaaggatttctctttgggaaactaaagtgaccaagaatatggcccaggtgaccaaagccctggacaaggccc

SEQ ID NO: 565586 - DNA, 74 bp, Homo sapiens
atagctttgaggcctggccaggaatcgtttgcttctctgagggggatcaagccgtggtccttcagcatatctct

SEQ ID NO: 565587 - DNA, 100 bp, Homo sapiens
atttcaacagaagagtgagagatggaacccgaagaagaaaggattcgttacagccagagattgtatgctattgcggcagcacctcccgagatgtgttatg

SEQ ID NO: 565588 - DNA, 75 bp, Homo sapiens
ggagccatcacgcccagctagccatcttctaattttcattccttcaaagcttggctgaagaggaaataaaaacag

SEQ ID NO: 565589 - DNA, 100 bp, Homo sapiens
ccttgtcctccctctgcacaaggaatgaatctgaagtctgctgcagtaaaacacagaaggctttaaaatgttttcttgcataaaattcaaaacttttaag

SEQ ID NO: 565590 - DNA, 100 bp, Homo sapiens
gctctctgctctccacagggctccccgccccacccggcctgataaagcgcgccgactgggctacaaggccaagcaaggtcgtagatttaaaggaaaagga

SEQ ID NO: 565591 - DNA, 89 bp, Homo sapiens
cgtccagcgagttgcagatctacacttgactttgaagattatccaatgagaattttatatgaccttcattcagaagttcagactctaaa

SEQ ID NO: 565592 - DNA, 84 bp, Homo sapiens
agtaagttggagaagaaactcttttattcaacctttgccactggaatgggtactgttcaaaaaggaatgccccacaagtgttac

SEQ ID NO: 565593 - DNA, 100 bp, Homo sapiens
tccttcccccagcgagcaagaagaagaacttcctctgggtgaggctagtatgttcaacacaccaggaatgcagagcttgttgcaacaaataactgaaaac

SEQ ID NO: 565594 - DNA, 82 bp, Homo sapiens
cgatctttacacaattcgaatgagacttgttaatcgattttacaggttatcttggaagatgttgcaatgttgcatatcaaac

SEQ ID NO: 565595 - DNA, 116 bp, Homo sapiens
cgcggctgcagctcgggacttcggcctgacccagcccccatggcttcagaagaggtgctggagaatctggtaaaagcaccattgtgaagcagatgaggatcctgcatgttaatggg

SEQ ID NO: 565596 - DNA, 100 bp, Homo sapiens
agaaactcattcctgattggctttctcttacaattgaactgcttcagaaagcacagttcatccagagcagcttcctccgaggccatggattacattaaaa

SEQ ID NO: 565597 - DNA, 121 bp, Homo sapiens
ggcctgaggagcgggcacagggcaaggcggcggacggctgcgtcgcccgaggcgaggaggagcgctggcgaaacagaagcctatcagttgctgaagaaggccacccttcaggataatacaa

SEQ ID NO: 565598 - DNA, 80 bp, Homo sapiens
ggatgtgactggggccttggaagatgcccttgccaaggttttaaaatcaaagatgggaaaatcggagaaaattgcccttc

SEQ ID NO: 565599 - DNA, 95 bp, Homo sapiens
ggcgattccagagagcggcggaaaggataagcctcgacttagaagctaccgagttaccctaagaaaggttgcttagccagacaatgaaggatcat

SEQ ID NO: 565600 - DNA, 51 bp, Homo sapiens
ttggattcagacgccgattcgcccaggatgtcacatgtacttcagtttgag

SEQ ID NO: 565601 - DNA, 100 bp, Homo sapiens
ctcaaactcttggacacaagaaatcctccctctcagcatcctgagtagctaagactataggtatggcaacagcactaggagctatgctgttagggttgga

SEQ ID NO: 565602 - DNA, 50 bp, Homo sapiens
gtcagctgtgctgatgacatcagataaggaacaggagtacagctgtgtag

SEQ ID NO: 565603 - DNA, 100 bp, Homo sapiens
ctgtagggagcatagctgctacactgaagatgaagcaaggcccaatgacccaggcggattgcttcacggtggaaggagaagatttgagacatgactttga

SEQ ID NO: 565604 - DNA, 100 bp, Homo sapiens
ggaatacatggaagtccgggagagaatacacagagccaatttgggaatggatgatgaaggagatgatgacccagttcctctaccaaatgtgaatgcagca

SEQ ID NO: 565605 - DNA, 88 bp, Homo sapiens
ggagcccgcgcgccgagccccacttccagggccctgcgaaccagaagacctcatcgacgggatcatctttgctgccaattacctgggg

SEQ ID NO: 565606 - DNA, 82 bp, Homo sapiens
cctttttgctgacgtgtcatttctaagtactttctcctactccataaagacttcaaatggtcagcaagaggatgaagccagt

SEQ ID NO: 565607 - DNA, 75 bp, Homo sapiens
aagtatttctgagtaatctggaagaaacctgccccatgacatgtattctcggtaccaggatttctatgcattcga

SEQ ID NO: 565608 - DNA, 100 bp, Homo sapiens
tgagccaccgcgtgtggcctctgggcaccttttgaaggtaatcattaccaaatgaggaggaaaggacgatgtcatcgaggctctgcagcgaggcatcctt

SEQ ID NO: 565609 - DNA, 100 bp, Homo sapiens
caagaagctgaatcagctgcgcgcaagcgagcctggcctggctcagctgctggtggatcagaggctgtggccaggccagctgggctcggggagcgccagc

SEQ ID NO: 565610 - DNA, 74 bp, Homo sapiens
cctgagcgcctcaccaagttcctcatcacccagctgtggaataatggcaacagaaagactggctaactacaccg

SEQ ID NO: 565611 - DNA, 100 bp, Homo sapiens
cttccacttcctgaaatgctgcaacaccaccaaatgcaacgagggcccaaacccccgccagcaactggccaccagctccttcctcctcttcttgctgacg

SEQ ID NO: 565612 - DNA, 101 bp, Homo sapiens
atttctatggtgtccaatcacatttgcaatcactccccacactcagggccgctacctggtggcgctgggccacgcgtaccacccggaggagtttgtgtgta

SEQ ID NO: 565613 - DNA, 117 bp, Homo sapiens
ttatcgcagtttgactctggagccactcaggtttttcctaagctcaactctagccagctaggttcctggtgctttggggacccaacatgagtgaagtttcctgcaagaaacgggacg

SEQ ID NO: 565614 - DNA, 75 bp, Homo sapiens
gtcccctctgcagcctctctgacaagtgatggcagaaacggtggacacaagcgaaatggtcaacggcgctacaga

SEQ ID NO: 565615 - DNA, 88 bp, Homo sapiens
gcaacttgcgcggtggaggtgttcgggctcctggaggacgagtgtgccggtccaacaaaagcccttgggtctgtttgacttgttcaag

SEQ ID NO: 565616 - DNA, 100 bp, Homo sapiens
cagcacttcagtcggaaagttggaacctctgacaagaccaagtactaccttcaaggtatggttccgaccggcgtttagccgagctctctgattaccgccg

SEQ ID NO: 565617 - DNA, 98 bp, Homo sapiens
tcgcgatgagtggtctcggcaggctcttcgggaaggatcctacaagcaatggggaagtcctatcatccaggctgtttccgatgcattgtttgcaacaa

SEQ ID NO: 565618 - DNA, 75 bp, Homo sapiens
tcctgatggtgaacatgccaggagagcaatgcaaaaggaggaggagaacggggctgaggaggaagaagaagaaac

SEQ ID NO: 565619 - DNA, 90 bp, Homo sapiens
gttcaagatcaaagtgccagcagattcagtgtcatgtgaggacgtgcttcctgcttcatagataagagaggtgctgatactcaaagaagg

SEQ ID NO: 565620 - DNA, 99 bp, Homo sapiens
ttgggaccttgaacaaggcaaatatggttttggttaccccacagcctatccagcagctgcccctgcctacaatcccagcctgtaccccaccaatagtcc

SEQ ID NO: 565621 - DNA, 90 bp, Homo sapiens
ctatcttctccagcggagatggccaattttggcgggggctgtgagcttgccatgatgtgtgatatcatctatgccggtgagaaggcccag

SEQ ID NO: 565622 - DNA, 75 bp, Homo sapiens
cccggatctcctggaagtgttggcggaggaagatattgatgagtgtgcagctaagatgcattactgtcatgccaa

SEQ ID NO: 565623 - DNA, 82 bp, Homo sapiens
ctttcttcccaatgatgcttcctacttcctttccgtgcataagaagccgaatgcaaattgtggctactaatttgccccctga

SEQ ID NO: 565624 - DNA, 100 bp, Homo sapiens
caaacccctcagacaatgaattcacaacctcaaacccgttctccggtgggtcctacgtgtatgaactcagcgcagtcctcatacacagaggagtgagtgc

SEQ ID NO: 565625 - DNA, 75 bp, Homo sapiens
ttaggttgcagtatgtggccagttatttgcctcagtaaaagagtcaaaatgcagatcttcgtgaaaacccttacc

SEQ ID NO: 565626 - DNA, 90 bp, Homo sapiens
ggaggaggacgaggcgggcgagaaactggcgatggaatatgagaggagccctctggaaagaaaaggacagaccctgtgctttcatgaaag

SEQ ID NO: 565627 - DNA, 120 bp, Homo sapiens
gttttcttcagaagaaggacttcggaatgcactacaacaggaaaatcatattatagatggagtaaaggtggaaccgtcccaaaatgtcccttgctcagaagaaggatcgggtagctcaaa

SEQ ID NO: 565628 - DNA, 83 bp, Homo sapiens
gacgacaaggagggcatgatcaacctcgtcatgtcctacgcgagcccaaatcttgtgacaaaactcacacatgcccaccgtgc

SEQ ID NO: 565629 - DNA, 100 bp, Homo sapiens
ggccgatcctcgcgtgagacagatcaagatcaagaccggcgtggtgaagcggagagtgggcgctccctttctcttcctggaagatcagtcccacccccca

SEQ ID NO: 565630 - DNA, 117 bp, Homo sapiens
ctctgaggtagatcatgaaagagatcctggacctatgaatatccagtttgagccatcggatctaagatccaaaagttaacccagtatccactccagttgcacttcccacaccagctc

SEQ ID NO: 565631 - DNA, 100 bp, Homo sapiens
aggatggctactatttcaccaatctgctccttcagctagattttgactttgaaaaaattcctttggaaaaacatgatgaagagtatcgaagtgaagatat

SEQ ID NO: 565632 - DNA, 83 bp, Homo sapiens
gtcctttcaggaaggagccattatttatgtcatcaagaagaatgacgatggtgccagcgagatttcagattcctgtaaacctc

SEQ ID NO: 565633 - DNA, 98 bp, Homo sapiens
gcaaggagctaaagcagcgtgcgttcagccctggggcatgctggaagatggactgccctccaatggtgtgccccgatctacagccccaggtggaatac

SEQ ID NO: 565634 - DNA, 82 bp, Homo sapiens
ccatgaagaagaacaggaaaggaaacgcatgcaagctaaggcagctgagttaggatccatcaaagaagcagaactactttgt

SEQ ID NO: 565635 - DNA, 87 bp, Homo sapiens
aggaaggaacttggttccccctccctcagcttccgccccaaaagcaataagagctaactgccatcaagagccatcagtatgtcttca

SEQ ID NO: 565636 - DNA, 100 bp, Homo sapiens
caggactccaaaatggcgtcagttggtgagtgtccggccccaggtgtgatgaatgcagactctgctaccattttggctgtttggatcctcctttgaaaaa

SEQ ID NO: 565637 - DNA, 82 bp, Homo sapiens
attgaggaggaggctgcacaccatagtcaccagcaagacagagcgggatgccaccagcttgtccaaagggaagttccaggag

SEQ ID NO: 565638 - DNA, 90 bp, Homo sapiens
cagactatgctgggcttattgcagaaaccactaatactagcctcttgcaggtgcaactggaatgcagtttacataataaagtgtgtcagc

SEQ ID NO: 565639 - DNA, 100 bp, Homo sapiens
accattgtttgaattgtatgacaatgcaccaggatatggacccatcatttctagtctccctcagctgttgagcagtgacttttttgaacgaaccattctg

SEQ ID NO: 565640 - DNA, 100 bp, Homo sapiens
gcgcggggagccagcgagcgcgccttcggcattggccgccgcgatgtcagctcagtgctgtgcgggccaggtacaccaggggttggaaaaaccacactag

SEQ ID NO: 565641 - DNA, 136 bp, Homo sapiens
cctggagaagggggagctggatgacaatggagacctcaagaaggagatcaatgagcggctgcttactgctcgacagactgctctctacggcccagctgcccactggaggtcgctgctgcacccaaactttgcaagg

SEQ ID NO: 565642 - DNA, 75 bp, Homo sapiens
ccaaggatctggggatcttcgcactatcccaaggtacaggagtctaaagcactttaattatgacatctgccaaag

SEQ ID NO: 565643 - DNA, 80 bp, Homo sapiens
tatgaggcaagcgcagggggacggggaccagcagctgtcgccgccgctctcagagtattgggaaagggtcgttgtggtgc

SEQ ID NO: 565644 - DNA, 80 bp, Homo sapiens
gttcgggtccaagatgatgccgccctgaaggatggctgccatattgggagacaccatcatggtggctaaaggccttgtca

SEQ ID NO: 565645 - DNA, 98 bp, Homo sapiens
tcagccctaggagctgaggataactataccttggtcagccacctcattgctacaggcttgatggtgtcaggctatgctgtgactggggctgtcctggg

SEQ ID NO: 565646 - DNA, 90 bp, Homo sapiens
agctcgtggcctgcctctgcgtgcaacccagtgacttgattgtaaaaatttacagagcggaatcatatgctggtctccaagagtttaaag

SEQ ID NO: 565647 - DNA, 89 bp, Homo sapiens
cacggaccagtttcagttcgccgatgggaaacccggagaccaaatccttggtattaccagagaaacggagtctgaaactcttgaagagc

SEQ ID NO: 565648 - DNA, 75 bp, Homo sapiens
tggcctgtcgttggaagagtacaagctgatcctgtccacagaacattaaccaggtggtatttgttggaaatttct

SEQ ID NO: 565649 - DNA, 73 bp, Homo sapiens
cagcagtccaggaatgcagtcagtctgttgatgaaactatgatgaaaactttcggaagagaaagttgcctgtg

SEQ ID NO: 565650 - DNA, 101 bp, Homo sapiens
acgggggctccgcggcgtcctcggcgctgaaggggttaattcaacagttcaccaccattaccggtgtgaagatgccttaagaaaaaataagagcttaattg

SEQ ID NO: 565651 - DNA, 100 bp, Homo sapiens
cgggagaggaggcatctctggatacacattaaggttgtgtaaaatggataatgggtggttctcttcccaaagtggaagccaaattcatcaattatgtgaa

SEQ ID NO: 565652 - DNA, 75 bp, Homo sapiens
ctcgactggcagcgcgggaaacgtcaaactcgagaaagagaactgccgtcctgatggaagagaacttggtgaatt

SEQ ID NO: 565653 - DNA, 50 bp, Homo sapiens
gtccccagcacataataacttggatcatgagcgtcttgttgttcatcgag

SEQ ID NO: 565654 - DNA, 100 bp, Homo sapiens
caactctttgatgatgcatccagcatgattatgatatgagggtggatgatttccttcgtcgcacacaagctgttgtcagtggccggagaagtagaccccg

SEQ ID NO: 565655 - DNA, 85 bp, Homo sapiens
caaaggctccaggcctgggggcctttagaaggaagtttattcaggaagagagaagggcacagttacctaagtatcaacgtaatct

SEQ ID NO: 565656 - DNA, 96 bp, Homo sapiens
ttactgtaccgttagaagtttttgactctaagcgaaagacatgaggcctcagcctgaaatgaggttgttttgaggtcatctgatttctgactagaa

SEQ ID NO: 565657 - DNA, 75 bp, Homo sapiens
ctctgtcgacggctatgacagttctgagctgagctcaatgtgcagcaatggatgacgacagcctggatgagcttg

SEQ ID NO: 565658 - DNA, 100 bp, Homo sapiens
gtaaagccagaaaagactgctgctccctcgccgtcactgttgtataaatttactaaaccaaggagatttaactgaaagacggacatgagcgtgggtgctg

SEQ ID NO: 565659 - DNA, 75 bp, Homo sapiens
tcacctggacccgcgcgtgttcgtggacggcctgtgccgggattgaatatgatgcatatcgcactgatttggaag

SEQ ID NO: 565660 - DNA, 75 bp, Homo sapiens
gctcggtattccccttcctgctagtcctggtggatctgcagtacgaaggtcaaaatgcagatcttcgtgaaaacc

SEQ ID NO: 565661 - DNA, 100 bp, Homo sapiens
agagcctgaggagccattttgagcaatggggaacgctcacggactgtgtgataatctcaggagacactgaagaagggaggctctgtggacagaggagcag

SEQ ID NO: 565662 - DNA, 100 bp, Homo sapiens
cgggcgctttggagccggccccaggcagcgtgtgtcggtcgcctagtctggagaactagtcctcgactcacgactttaccagaatgcaggacatcccgga

SEQ ID NO: 565663 - DNA, 75 bp, Homo sapiens
ctgctggcacagagactcagccggacctgcttccgccagtggagacaacaggtcttggtgaagagtaacaacctg

SEQ ID NO: 565664 - DNA, 96 bp, Homo sapiens
gtgggggagccgggccctcccctcaggaacgtgtcccggggccgacccggcccgtagtgtggaagcagcttcagggtagtcagcagagtgcacaca

SEQ ID NO: 565665 - DNA, 75 bp, Homo sapiens
ctccgggttccccggctcgcggggcccggcgaagggcagtaaaatgtttattggaggcttgagctgggatacaag

SEQ ID NO: 565666 - DNA, 101 bp, Homo sapiens
ggctgactcaagcggaggcgcgcggaacagtcgccgaggcgattcccgcccaggcataatcaccagcaacacccgggacaataatacgggggccacctacc

SEQ ID NO: 565667 - DNA, 100 bp, Homo sapiens
gaacagccaggatctcacataggttcatcatgcctagtggcgtataagaagaccccgccaccggtccctccacgcaccacttcaaagccgttcatctcag

SEQ ID NO: 565668 - DNA, 82 bp, Homo sapiens
ccaatttaccagagataattgataacaccctgtaacagctgatgataatatgcagcatgcatactgggaactgaagagagaa

SEQ ID NO: 565669 - DNA, 100 bp, Homo sapiens
caggagccatctgctggtactagttctctggctgttcaagggaggagtctgctactagtcttatcagctcttaaaaacagaaactcatctgtccaagttc

SEQ ID NO: 565670 - DNA, 100 bp, Homo sapiens
tgtcagcatctggaatcctatcctactctggcagcccatcccggtgcacacagttcctctttctgaagatcagttttgtttggctatgccaccacagtca

SEQ ID NO: 565671 - DNA, 73 bp, Homo sapiens
ggaggatgatgaagaggaggacgaagaggaagaagcagcagcagactagatgagacaatacaggccattgcca

SEQ ID NO: 565672 - DNA, 98 bp, Homo sapiens
gctccttgaagttcgtggaaggctgtatgagcttctaactcattgtattcctcctgagataataatgaaggatgtggatgtagaagaggcagttctgg

SEQ ID NO: 565673 - DNA, 100 bp, Homo sapiens
tgatggtgctgagctccccactggctttggctggggacacccgacaaagcccgcgtcctccgctcaaaatcactgtgtcacgatgagatcgagaacctcc

SEQ ID NO: 565674 - DNA, 78 bp, Homo sapiens
gacaagccgctggcagccgcggatctcaccgccgctcaggagttgcatgctgagaatttgaaaaatgaagatgatgta

SEQ ID NO: 565675 - DNA, 100 bp, Homo sapiens
gtgaataaaactgaccatagccagagaacagccctccatcttgcagcccagaaggaccatcagcacgtgcccatcgacatccagaccagcaagctgctcg

SEQ ID NO: 565676 - DNA, 82 bp, Homo sapiens
gagccgggagtcgctgggtgcgtggggctgcctcgccgcgtctcgccacggagacagggtctggctatgttgcccaggttgg

SEQ ID NO: 565677 - DNA, 100 bp, Homo sapiens
ccaacacacggtccacagctcatcatgatggacttggagctgccgccgccgggactcccgtcccagcagatatggagtctggagaacggttaccatcctc

SEQ ID NO: 565678 - DNA, 75 bp, Homo sapiens
cacagggaagaaagcgatttcctccgcctcttccaaagcgcttttctgggagaagaggctacaaggacttagtgc

SEQ ID NO: 565679 - DNA, 112 bp, Homo sapiens
gacagattctagccgctactttgtaatccggatccaggatggtactgggttatgtaccgaaggactctaccgtgtcagcgggaataaaactgaccaagacaatattcaaaag

SEQ ID NO: 565680 - DNA, 90 bp, Homo sapiens
ggccggggtccgcaaggccggagaaggccgccgggcccgggcatggtggtctggggcaacgcggaaggttgaaaggattgttgacaaaag

SEQ ID NO: 565681 - DNA, 80 bp, Homo sapiens
gcgggaatggagctcggaggcggcgaggagcgcctgcctgaggagagcagacaatgcagatcttcgtgaagactctgact

SEQ ID NO: 565682 - DNA, 100 bp, Homo sapiens
cgaggctgaggcgagaaacgagatgactgtccaagtgcctccaaagtgtacaaagcatcagattcagcagaagcaattgaggcttttcaactaactcctc

SEQ ID NO: 565683 - DNA, 75 bp, Homo sapiens
agatcaacctggagctctacgcctcctacgtttacctgtccatggtccggcgccagctgccagtcgaggaaccga

SEQ ID NO: 565684 - DNA, 82 bp, Homo sapiens
ggtagcgaaggtcgccgaacccgcctggctagccggcgagttgagtggcgaggggaaatttgcagtggtgagaaaatgtata

SEQ ID NO: 565685 - DNA, 90 bp, Homo sapiens
ttaagagcttggaggcggcccgcgggtgatttgatgaaggctgctgcaggagagttcgcagatgatccctgctcttctgtgaagcgaggc

SEQ ID NO: 565686 - DNA, 101 bp, Homo sapiens
tgaagtgatgcacaccaccaacattcttggcattacgcaggccagcaactcccagctcaatgcaatgcctacaacacagcagtcccctcaggatgagcagg

SEQ ID NO: 565687 - DNA, 111 bp, Homo sapiens
ctggacatggagatcgatgggcagaagctgcgagacgccttcacctggaacatgaatgagctgttgcgcagccattggtacctgtattggggaaacatagcatacaagcaa

SEQ ID NO: 565688 - DNA, 75 bp, Homo sapiens
ttttgaaacacgttctgattaaccaaggacatatctgaagagatggattaagaatgctttggattaaggattgtg

SEQ ID NO: 565689 - DNA, 88 bp, Homo sapiens
actgtacatgctttttattacaagactacggagcataggaggaaaattcatcatctgaatttacctcctattcgaaatgggaatttta

SEQ ID NO: 565690 - DNA, 50 bp, Homo sapiens
tctgtagaattcgacagtatggtggaataacactcccatggatgaagcac

SEQ ID NO: 565691 - DNA, 100 bp, Homo sapiens
aagggtctttgttccctgcagccctcccacgtgaatggataccacgcatcagggaccccagcgcaccctccagagactgcccacatgagtgtccgaaaat

SEQ ID NO: 565692 - DNA, 75 bp, Homo sapiens
aaactaggtcgatggtcggcggcgcccggatgggcagctgagaccatatactccttgacgacagggactaccacc

SEQ ID NO: 565693 - DNA, 82 bp, Homo sapiens
gcagcggcaacccccagcggcttaagccatggcgcgggctgcatgctgttcccccacatctccccctgtgaggtgcgcgtgc

SEQ ID NO: 565694 - DNA, 88 bp, Homo sapiens
ggaagagattcagccagcacactcctcgcgagcaagaacaaccccgtgccgcgcagccgacgcgaggttcccccccagctgcagccac

SEQ ID NO: 565695 - DNA, 80 bp, Homo sapiens
tcaaagatcttgtctcgctggcctgcgacccagccagccagcaacctggaccgggactggtgattgcagctggaagtgcc

SEQ ID NO: 565696 - DNA, 75 bp, Homo sapiens
acagcagtggtgaaacagttggatctggagttgacttgctggtgaaggtgggggaggttgtggacaagctctttg

SEQ ID NO: 565697 - DNA, 73 bp, Homo sapiens
tccagaactggattgaattacttagtggtatttctttaaatccagaacaatggagccagctgaaggaacagat

SEQ ID NO: 565698 - DNA, 100 bp, Homo sapiens
gcgcgggcacagggtgccgctgaccgatttatgaagtactgagtgtgatccgggatattggcgccatagcccaagtccacgcagaaaatggcgacatcat

SEQ ID NO: 565699 - DNA, 100 bp, Homo sapiens
aaaaaaggaggccaaagactttgtacagtgaaggtgaaattcgatttaatttaatggccattgtgtctgacagaaaaatgatatatgagcagaagatagc

SEQ ID NO: 565700 - DNA, 75 bp, Homo sapiens
gaaatagcatggatttcatccattatgctggctgttatgtacgcaggaggcttctcacggcattcagcagcagcg

SEQ ID NO: 565701 - DNA, 75 bp, Homo sapiens
cgctgctcagcgtcctcatgtggggggtaaaccactcgaactaaatccggattctggggctggaggacagataaa

SEQ ID NO: 565702 - DNA, 100 bp, Homo sapiens
gcggggccttccacaccccctccgtgggtgtgtgttggcccgccacaataaactgttgcagcagatgctcaaaccaggatcggatccagatgaaggagat

SEQ ID NO: 565703 - DNA, 73 bp, Homo sapiens
tggggccgtcttcccggcgagtccgcgacggtcgccgcccacggcgaggcctctcttctgtggaaactctgaa

SEQ ID NO: 565704 - DNA, 100 bp, Homo sapiens
acgttgaaacacccacagactgccaagtgggacaactttctggcttttgaaaggctccttcttcagaatgttgtaccatctttgggtaggcagacttccc

SEQ ID NO: 565705 - DNA, 100 bp, Homo sapiens
tgcctttgattattgcttttggtccatggatgaatctaacactacaaaatacgctgaaaagagtctcatcgtggaaggcaagagggaaaagaaaaaagta

SEQ ID NO: 565706 - DNA, 75 bp, Homo sapiens
acgctccctgtctgggaccttctccctgcctggacccctactattgcaacaagatgccttcaattaagttgcaga

SEQ ID NO: 565707 - DNA, 90 bp, Homo sapiens
tttctggacaggaacacacctgtgttcagggatgacgtttgctttttcatcagccagtcaggtggagtgcaactcaaaattggacccaac

SEQ ID NO: 565708 - DNA, 51 bp, Homo sapiens
cagaagaatctgaaatcatttcgaaatctatgacaagttcaagcagagtac

SEQ ID NO: 565709 - DNA, 101 bp, Homo sapiens
catcatctgaagatatctggagaaactactccttggatgaaattgagaggaacttttgtctacaaggcaggagcgatttggcaacatgacccgagtatact

SEQ ID NO: 565710 - DNA, 100 bp, Homo sapiens
gacggacagtgcagggaagcaactgcagaggtgtctttcctgaagactatcttcccgtctcaaaatggacatgatggatccacggatgtacagcagagag

SEQ ID NO: 565711 - DNA, 111 bp, Homo sapiens
caatatctgtcttcggtggactccttcggcagtccacccaccgccgccgcctcccagcaaacggggattcagcgtccgatcctttggaacagggactcacgtgaagcttcc

SEQ ID NO: 565712 - DNA, 101 bp, Homo sapiens
agctgtccgagtcccaggtcaagagcctctgcgagaagttcttcgtgccatgaaggaggacagtgaaaaagttccgagcttgttaactgattatattctga

SEQ ID NO: 565713 - DNA, 90 bp, Homo sapiens
gaacaggtgaccataactctgccaaatatagaagaattactcaaggtgatgaggacaattgatgacagaatagtacatgaattaaacact

SEQ ID NO: 565714 - DNA, 83 bp, Homo sapiens
cgagcctgctgcgcgccccctcccagagctcacctggtgccaggtaacagacaatgcagatcttcgtgaagactctgactggt

SEQ ID NO: 565715 - DNA, 83 bp, Homo sapiens
cactctgtgctagtgatgtgagcaaatgcctcattcagggggatatgagactttctactcggaatatcctgagtgttgcgtgg

SEQ ID NO: 565716 - DNA, 98 bp, Homo sapiens
cttcccagagtgctgggattacaggttattatcaacccttactttgctaagcaagaaactgaactgttacaagattacccttgaatgtctaccacaaa

SEQ ID NO: 565717 - DNA, 51 bp, Homo sapiens
aaatatatctgcccgcatgcgaactggaaattagtgaacacatgaaggaac

SEQ ID NO: 565718 - DNA, 50 bp, Homo sapiens
ttgccaggtgtttgttaccttgaatgagagaagacagtgctagagtctat

SEQ ID NO: 565719 - DNA, 75 bp, Homo sapiens
cagagcagttttacaaatatgcagtacaacccacaccagttatcctattgaaagaggggactgatagctcccaag

SEQ ID NO: 565720 - DNA, 100 bp, Homo sapiens
aggacactaacaaagctgcctcaaatgtcaaaagaccacgtggccttaaaccaactgctgcaactctgtgtgcaggatgattctgtgggcccaagtcacc

SEQ ID NO: 565721 - DNA, 137 bp, Homo sapiens
tctggggatggcataatgatgtccacatatttgacacaaagacacagacttggtttcaaccagaaattaaaggccacgactgcttcccggtgctgttcacctatgacgccgccgcggggatgctgagcttcggcggg

SEQ ID NO: 565722 - DNA, 96 bp, Homo sapiens
agggtttctcaatctctgcagatggccgtacgtgtgaaggtatgagaaagtgccagtcatcttggttgggaacaaagtggacctggaaagtgagag

SEQ ID NO: 565723 - DNA, 100 bp, Homo sapiens
gggatccgcaggttccctacacggtctcctgggtcaagtaccttaaggcaggttctatgaaagatcctctgctagatgaccatggtgattttattagaat

SEQ ID NO: 565724 - DNA, 75 bp, Homo sapiens
tctgaagaactagatacaatttgtcccaaagctcccaaattagaggaaagctttgatgaccatgacccagctgtg

SEQ ID NO: 565725 - DNA, 91 bp, Homo sapiens
tcatttctgatcgggaagcctcatctagcccagaggatcggaatgacagatcaagcgatccccctccaagaccatcccaggcctccccaga

SEQ ID NO: 565726 - DNA, 100 bp, Homo sapiens
tgactatgcaaccataccttaccactaaatgtagttgttctggacttggtgcctctttctgttatatgctttcctatttagttgggagaccagttgtata

SEQ ID NO: 565727 - DNA, 75 bp, Homo sapiens
cagcccaagatggccgacttcgatgatcgtgtgtcggatgaggagaagggatttcagtcataatcggttgtctaa

SEQ ID NO: 565728 - DNA, 100 bp, Homo sapiens
ctcttccaacaccagtggaagatgatcacatcccagttggttaccacagagaagcgcttcctcaaagacagtttgtacaatgaaggaatcctaattgtat

SEQ ID NO: 565729 - DNA, 88 bp, Homo sapiens
ggggaaccgcagcgcagtgacagtgcagaaccccggcgcggcccttggtcctgggaactccaacaagggagcaaatcagagaaatgaa

SEQ ID NO: 565730 - DNA, 75 bp, Homo sapiens
catctcagaatactgtggagagtggcatggcagagagaaatgctaattttgaagcccttcctgaggattggagag

SEQ ID NO: 565731 - DNA, 98 bp, Homo sapiens
aatgctgggattacaggtataagccactgtgcctggccaaagaagaaggtagataatgactataatgcccttcgagaaagactcagcaccttgcctga

SEQ ID NO: 565732 - DNA, 88 bp, Homo sapiens
cgtcatcttcataggctcgctgctcggttgctgcttttgctcagaggacatccatgaccctaatggtctttttgttcaagataaagtg

SEQ ID NO: 565733 - DNA, 100 bp, Homo sapiens
cattgaggactctgtagttgaagattataattcagtggataaaactaccacagatgccgctcctacgaggactgctgtggctccaggtgctgtgtgcggg

SEQ ID NO: 565734 - DNA, 75 bp, Homo sapiens
ctcactccccggtgcagtcgggcctgcccggcatgcagttcccactagtggctgacttgtttcatgatgacaagg

SEQ ID NO: 565735 - DNA, 99 bp, Homo sapiens
ctcttcatccgcagggacctcatctggttctgctcaggtatctcaggagattacatttcagcttgaaaaagggtcggtggaatttaaaagaagaggaac

SEQ ID NO: 565736 - DNA, 83 bp, Homo sapiens
cagccagtcttctatgtttccacatcggtcagaaaaagatgagtggagtcggttcttatacaactatgggctgaaaccatgag

SEQ ID NO: 565737 - DNA, 100 bp, Homo sapiens
ggtggagccgccaccaaaatgcagattttcgtgaaaacccttacggggaagaccatcaccctcgaggtccagccctctcctggtggccgcgtttggcgcc

SEQ ID NO: 565738 - DNA, 75 bp, Homo sapiens
cccagactccactccccagctgtgaaagggctggtgctcaggaagcccctatcaagaagaagcgcccccctgtga

SEQ ID NO: 565739 - DNA, 75 bp, Homo sapiens
cgggaaaaggctaatggcacaactgtccacgtaggcattcaccccagcaagcaattgtaccagacgttaacagac

SEQ ID NO: 565740 - DNA, 100 bp, Homo sapiens
atttaccggttcgttcggacactgttcagtgctgctcagctgacggctgaatgtgccatcgtcaccctggtcaaagctcagattcacagttgcataagcc

SEQ ID NO: 565741 - DNA, 83 bp, Homo sapiens
cccgcggtgaccgaggcctgggccccggctctggagcctcccagctcaattgcctgggatttatacaagataaaattacagtg

SEQ ID NO: 565742 - DNA, 98 bp, Homo sapiens
ccgcccggaaagctgcccagccaccagcaaccccccaggtcatttggatccaggattcctagcaagtgacaaaacatctggcaatgcgccactcaatg

SEQ ID NO: 565743 - DNA, 101 bp, Homo sapiens
ctacaacaacaaaatgccactttcaacacataatgagtaacgaaagaggctttgaaaatgtagaactgggagtcataggaaaaaagaagaaagtcccaagg

SEQ ID NO: 565744 - DNA, 100 bp, Homo sapiens
gccgctgcctcagtcatgccgatccctgccagaaccaccactgcaaacacggcaaggtgtgcgagctggatgagaacaacacccccatgtgcgtgtgcca

SEQ ID NO: 565745 - DNA, 73 bp, Homo sapiens
tgaaatgatgctggagaagtaagcaggtggaagaactcagtaaaatactccaacgtgggagaaatgaagataa

SEQ ID NO: 565746 - DNA, 82 bp, Homo sapiens
gccatacccaataaccaggtgcttggcaaaatcgagcgggccattgctgtggcggggccttcgtgggcccgcgatgccagga

SEQ ID NO: 565747 - DNA, 90 bp, Homo sapiens
ccaccttcagagcgtcacggcgtacgccctcatggggaaaatctccccggtgactttcaggtggatccataaagaacccagccaacccgc

SEQ ID NO: 565748 - DNA, 97 bp, Homo sapiens
ttttttttcaagaactgccgtcttctttgcctgcactaatgtttggcagtaatcagtccaaaccagagttcacagtggacctcaagggggcaacaat

SEQ ID NO: 565749 - DNA, 100 bp, Homo sapiens
aagtagcaaaggcaagaaggcaacgacgttccatctgtggaaggacctaccaaccaggttctactggaaggactacatcatcaaagacccaaacgttatt

SEQ ID NO: 565750 - DNA, 90 bp, Homo sapiens
aaagtgggtcataaatcctagtggtggactgatttcaaagggacacccactaggcgctacaggattcactccttctccagttgcacagcc

SEQ ID NO: 565751 - DNA, 100 bp, Homo sapiens
tccgacctgggcgctcagcccccggatcagcctgcctctggacctgcctagagctggaacgttacctccagagcgagccctgctatgtttcagcctcaga

SEQ ID NO: 565752 - DNA, 75 bp, Homo sapiens
gctttaaaaagcagtgggctctggaacaacacggtgttcatcttttctacaggtgctggagaatctggtaaaagc

SEQ ID NO: 565753 - DNA, 74 bp, Homo sapiens
tatttgaatggccatggctaagcaattctcacttggtgctgattggcgcagttgtgtagcagttgagtaatgct

SEQ ID NO: 565754 - DNA, 100 bp, Homo sapiens
tacgggaagaagtacgaggcggacatgtgcgtgaggaaatggtgtttgcaagtgtcgtgtgtgtgagtgcaaccccaactacactggcagtgcatgtgac

SEQ ID NO: 565755 - DNA, 82 bp, Homo sapiens
gggactacgacgtccctcaaaccttgcttctaggagataaaaagcctcccgcgacgatgcccctcaacgttagcttcaccaa

SEQ ID NO: 565756 - DNA, 75 bp, Homo sapiens
cagtagatgatgatgtagcagaaggcgtggagctatttcctatgacagttctgatcagactgcattatacattcg

SEQ ID NO: 565757 - DNA, 75 bp, Homo sapiens
ccatttggactccagtggtagctatgtggactgctgggacgggcccgatgggaagccggtcatctaccatggctg

SEQ ID NO: 565758 - DNA, 100 bp, Homo sapiens
caaaatgccagtcaactccagtggacctgattgggtaactgtgattcccaggagaataaaagaatacttcagagagtcagagttgtgccagaagtctctt

SEQ ID NO: 565759 - DNA, 74 bp, Homo sapiens
tacgcgaattggagaaaaagttcagtgggaagcatgtcgtctttatcgctcagatgctggagagcatgatcaag

SEQ ID NO: 565760 - DNA, 75 bp, Homo sapiens
taattgaatatataaagcaggtgcacctaggaagctgaatatggtgggcatgatcagatagatttgtatgacgat

SEQ ID NO: 565761 - DNA, 90 bp, Homo sapiens
cacggagccggcagcggcgcgggaggccgtgcgggtcacacagcggcagtgataaagagcacagggatgtggagagatctcaagaacaag

SEQ ID NO: 565762 - DNA, 90 bp, Homo sapiens
gaggggccgtgaggtgagagagtccgggagcccgagcttgaggaagccagcagacctgcagaacttggctcccgggacccacccaccatt

SEQ ID NO: 565763 - DNA, 75 bp, Homo sapiens
tcaagggcaacaggggtttccctgggttaatgggtgaagatggcattaagactcagattgatggacaacttttct

SEQ ID NO: 565764 - DNA, 100 bp, Homo sapiens
tgctggtgggactcaatgttctcgatgccaatctctgcttgaaaggagaagacttggattctcagatgttcatgagagcgcagtttgactatgatcccaa

SEQ ID NO: 565765 - DNA, 100 bp, Homo sapiens
ggccctgcgcctcgtccagcctaggttccacccttttctgggaacgtgagtatcaaccaaggacataagcagctctatgaccaatagcacagctgccagt

SEQ ID NO: 565766 - DNA, 88 bp, Homo sapiens
ttctctcagtttgcacaagggaggcgacagagacagcagcaggcaacagcattattgagaaaagcccttacagaagagtgtggccgta

SEQ ID NO: 565767 - DNA, 75 bp, Homo sapiens
ttttccttggcttctaaacctttatcttctaagaaaacttaattcagtgcacaaatgagatgaatgtgaacatcc

SEQ ID NO: 565768 - DNA, 98 bp, Homo sapiens
aaggctccaaatccttagctcagagctggaggatgaaggatcggtttgtgaatagcacaatggaagaagctggactttgtgggttaagagagaaagca

SEQ ID NO: 565769 - DNA, 139 bp, Homo sapiens
cacatggaaggatttattcggaagtgacttgcttttttgaccatgttactcatagagtccgactataccacatacagggagtttatgaatttgtacctgtggaacaaggtgatggatttcggttacagataaatgctca

SEQ ID NO: 565770 - DNA, 51 bp, Homo sapiens
gctgtactaggactgggaacggacctccaatggaagtccgggcacatggcg

SEQ ID NO: 565771 - DNA, 83 bp, Homo sapiens
ctacaagggatcaagatcagctccaggcctgggaaagtgaaggagcatctttccttgaagaagtacattattgacattgtggt

SEQ ID NO: 565772 - DNA, 75 bp, Homo sapiens
ttctacccactgagaccagagttagtggaatccacatatctcctctaccaggacagtctcatcgaactcaaggaa

SEQ ID NO: 565773 - DNA, 100 bp, Homo sapiens
gggatatcatgtccatttataaggagcctcctccaggaatgttcgttgtacctgatactgttgacatgactaagccccattgacaaaccttcagattctc

SEQ ID NO: 565774 - DNA, 75 bp, Homo sapiens
taatgactttggtgccctcaacatctctcagagacgaaaggaggaataaacatggtgtgtctcgaaagaagattg

SEQ ID NO: 565775 - DNA, 90 bp, Homo sapiens
gccgcgggctccgcgcccggccggacccgggcccgagatggtcatcatgggccagtgctactacaacgagaccatcggcttcttctataa

SEQ ID NO: 565776 - DNA, 100 bp, Homo sapiens
cggccccctgagtgagtccggtctcccggcgaaagtgagcgaggtttgcccggagcgcgcacgaggccaccataccatttacatcggagtccatgtgccg

SEQ ID NO: 565777 - DNA, 74 bp, Homo sapiens
aagcctattgagttaacacctctgccgctgctaaaaggactttgtgttttatgccccacgtctgagaatcaaca

SEQ ID NO: 565778 - DNA, 75 bp, Homo sapiens
ctggagcctcagttggaagcagccgatccagcctgcggagcctgtggggcaggaacatggcgctgctctgggggc

SEQ ID NO: 565779 - DNA, 82 bp, Homo sapiens
cctgctggacgggcggcgggtgaagctgcagctctgacagagatgcggaacgagaccgtcgtagtggcctgcgtgaatgctg

SEQ ID NO: 565780 - DNA, 100 bp, Homo sapiens
ccaaggcgtgagaattcctcaatgactgccctctaaaggaagagaaattgagggtgctgcaaaggaagcttgaggaacacgaagaatccttggtgggccg

SEQ ID NO: 565781 - DNA, 100 bp, Homo sapiens
aaacaaccctgccatgttgcaagttcttctacagccccagttatgtggacgagctgttaaaccagattgggctaatggatactacagacaacagagaaaa

SEQ ID NO: 565782 - DNA, 97 bp, Homo sapiens
gcagccacaggccaaaatcattgtattgacacatcgttcatgtacatgatcgccggactctgcatgctgaagctctaccagaagcggcacccggaca

SEQ ID NO: 565783 - DNA, 89 bp, Homo sapiens
ctcaggtcctcgggggcggcggccacgccaaggacggccccagcatgagaccagatgtaagctctcctccatccagctcctcaacagca

SEQ ID NO: 565784 - DNA, 75 bp, Homo sapiens
gctcaaagccctgggtcgcttggaagaagccaagactggcccagatggaaaggactaatgggtcttttctcactg

SEQ ID NO: 565785 - DNA, 75 bp, Homo sapiens
gggttttccttgttgctattataaaaggttttaaaatcaaagatgggaaaatcggagaaaattgcccttccccat

SEQ ID NO: 565786 - DNA, 82 bp, Homo sapiens
catgaagagttagcctggcctggcataatggctatccagtcagttcgctgctattcccatgggtcacaggagacagatgagg

SEQ ID NO: 565787 - DNA, 149 bp, Homo sapiens
ttaaggatgatatagcaacagagttgccctgtcaccatttctttcacaaaccttgtgtctcaatttggctacaaaagggacaaactctgcctgggcgagtccttttcctgcgttatgtcgttcagaccctagaagatgactttcagcag

SEQ ID NO: 565788 - DNA, 98 bp, Homo sapiens
cagaggcctgcacgcggggcgcgggccccgaaggctctccatcgaaggcaacattgattgttgatccatttcagatacttgtggcagcaaacaaagca

SEQ ID NO: 565789 - DNA, 98 bp, Homo sapiens
ggaaaccgcactctcacactggccttgatttggcagctaatgagaaggtttgcctgcaatgagatttcattctctacatttaaaggacatcctttctg

SEQ ID NO: 565790 - DNA, 75 bp, Homo sapiens
cagcttaatagatccagacacttcattaagtgaattgcggtttcagtacaaaacggttcgattcatcaaaaagat

SEQ ID NO: 565791 - DNA, 100 bp, Homo sapiens
acaaaggtggctgctacggaggccattaccatgtatatattaaagatgttgatcatttgggaaactggcagtttcaagctgtacaggaagcatggctggg

SEQ ID NO: 565792 - DNA, 82 bp, Homo sapiens
cccaaggattctgggggaggcctcaggtatcatgatattagctggtttgacatcaagtcatttgtgagtcatcagatcttct

SEQ ID NO: 565793 - DNA, 75 bp, Homo sapiens
cgggtgtgcagctgcaggacaacggcaggacgtgtaaggcagggcagctggtggaatttttgaagaaaatggaat

SEQ ID NO: 565794 - DNA, 83 bp, Homo sapiens
acatttcaggaaaacagagaaagaagtgataggagggctctgtagaatgattacggacctgaagccaaagaacaagatgcgct

SEQ ID NO: 565795 - DNA, 75 bp, Homo sapiens
ggacgtcccaacgaagagaccacctgtccttcgagcagacctcctgccccccgaggtctgcagtctcctgaaccc

SEQ ID NO: 565796 - DNA, 75 bp, Homo sapiens
aaaacttcgaggcactcaagtcctggctcagcaagactctcgagcccatgtgaaaggtgtagcagtcactcggcc

SEQ ID NO: 565797 - DNA, 75 bp, Homo sapiens
gaaaggcggaagcaggaagaattgttacgcaaacaggaaactaaatatattttgccaactttggaaaaagaatta

SEQ ID NO: 565798 - DNA, 100 bp, Homo sapiens
cagcctgcaggatgcctgggactacgtgcaggctcagaggatggcattccctgtggatatgctggaaaattgcagccatgaggaattggaaaattctgct

SEQ ID NO: 565799 - DNA, 75 bp, Homo sapiens
cgcttcgaggccgctttggcgccaaatcctgaggaaataatgcaaaaggtgtcccaaggctcctgaccagtgaac

SEQ ID NO: 565800 - DNA, 97 bp, Homo sapiens
gcttatgaggatggctgcaagactgtcgacctaaagcctgactggggcaaggagattgaccccagcctgggcgtggcggagctgcctgacgagttct

SEQ ID NO: 565801 - DNA, 100 bp, Homo sapiens
ctgcagaggagatggatgagaggaggcggcagaacattgcttatgaatatctgtgccacttagaggaagccaaaagttggcctttaccagagtttgatcc

SEQ ID NO: 565802 - DNA, 101 bp, Homo sapiens
gctcggagatcatttgggagatccaagagattcagtatcactcgctcccttgatgatcttgaggtgagcacctgcggatctgtccccagggctacacctgc

SEQ ID NO: 565803 - DNA, 98 bp, Homo sapiens
gatccctcaagactggtccacggagtgtatgaccacaaacagccatcaaggctatgactttgcagccgtcctggagtggttcgcggagcgtgtggacc

SEQ ID NO: 565804 - DNA, 116 bp, Homo sapiens
aatgtatctaacgacctctcacagaaactatatgccaccatggagaagcataaagaggttggcatggatcctattagctgtgtaatactggaattatcaatgatatgcactggtgg

SEQ ID NO: 565805 - DNA, 98 bp, Homo sapiens
ttcgcctcctaatccctagccactatgaaaatggacccaagtggggtcaaagtgctggaaacagcagaggacatccaggagaggcggcagcaggtcct

SEQ ID NO: 565806 - DNA, 78 bp, Homo sapiens
cagaaagctgggagccctgcgtggaggaggaagttaagtcttcagagcctactgaggatgtggagcccaaagaggctg

SEQ ID NO: 565807 - DNA, 101 bp, Homo sapiens
tgacattcagaaagcctggagtgattacttgcaagagaaaagcctacctattctttccaaggggcataatcaacccatttcctgcttcaaaaggaatcaga

SEQ ID NO: 565808 - DNA, 83 bp, Homo sapiens
ctgaaaggtctcctaaccgctgcagagagtgctttcttccagaggatgtacagttacccagcacgtgtacctcctcctcctcc

SEQ ID NO: 565809 - DNA, 83 bp, Homo sapiens
gccagttctgtgatgttcgacttcaggaaacaagtttcagccactaaggccgaagcagaaaaggatggagtgaaggtccccac

SEQ ID NO: 565810 - DNA, 98 bp, Homo sapiens
ctcaaagtgggacaatatcctctgtggagaacacccccccatggaggcgagggccggcaaattgaatatatagatatagaacggccttcaactggagg

SEQ ID NO: 565811 - DNA, 88 bp, Homo sapiens
agatctctccctcatataacggatgtttcttggcgcttggaatatcagataaagcatcacctatgccttcatggtgctggtgaccatg

SEQ ID NO: 565812 - DNA, 96 bp, Homo sapiens
aggattgtgcctctactcctgcttgtacagactgcttttccagcagcatggacacaagaagcataataaactcatcctgaaagtcgctgttgttct

SEQ ID NO: 565813 - DNA, 50 bp, Homo sapiens
gccgccgccaccatgcccaagagaaaggtgtgggctaagctggtggcccc

SEQ ID NO: 565814 - DNA, 98 bp, Homo sapiens
cagaacctgagtatctgcaaaagttgcacaaatacctaataaccagaacagaaagaaatgttgcagtatatggttagagcagccagcgggtacagaat

SEQ ID NO: 565815 - DNA, 98 bp, Homo sapiens
ggccctgcagaaggatctcagcctctctggacaaattgatggccaggagatcactgccaccgccgtgctggccccctggcctaggccaccccccagga

SEQ ID NO: 565816 - DNA, 90 bp, Homo sapiens
ggaagatttacacagatggaaccagaaaagatacgaggctctaggagagtcctggatataagccatttttaaacatcattaagccacaac

SEQ ID NO: 565817 - DNA, 83 bp, Homo sapiens
ctcctgcagtgaccagtaatggcactttacactcggcagaagtcaattcatctggaaagactatctctgagtcagacttaaac

SEQ ID NO: 565818 - DNA, 83 bp, Homo sapiens
ggaaccgccacagcactcaaaagtccattggaatattaagcccaggagttgctttggggatggctggaagtgcaatgtcttcc

SEQ ID NO: 565819 - DNA, 74 bp, Homo sapiens
tatgctgccaaaattatcaacaccaaaaagctttctgctagggagctatttatgaagaaattgatgctcaccag

SEQ ID NO: 565820 - DNA, 50 bp, Homo sapiens
cgcggctcccagccacaccaagttcagcaagtgttcgcgtcccccagtaa

SEQ ID NO: 565821 - DNA, 83 bp, Homo sapiens
cgggcgagaagccctacgagtgcaacatctgcaaggtccgcttcaccagatgaggacggggacttggttgccttttccagtga

SEQ ID NO: 565822 - DNA, 50 bp, Homo sapiens
ttcctgtacagcctgcagaactgcacttccgttccggcgcccctccggtc

SEQ ID NO: 565823 - DNA, 101 bp, Homo sapiens
gagcaatccgtcaacaggaccctggggcagctttggggaagcagtactctctgacaaggcaatttgaatcaacccatagaagtgacagcgctgtattcatt

SEQ ID NO: 565824 - DNA, 96 bp, Homo sapiens
cccgttgcttgtcattcccctagagatggggaccatgctgcgctcagaagctcgatgcattctatttctcatcatttggctcataactggaggaag

SEQ ID NO: 565825 - DNA, 100 bp, Homo sapiens
agcttggaccatgggcgcccgcggtctggacaagcgaggaagtttctttaagtgtttgaaagatgtatggtgatcttgaaacctccagacacaagaaaac

SEQ ID NO: 565826 - DNA, 100 bp, Homo sapiens
taatgcgtgaaaagaaaaaactgaagaaaaaacttgtcaggtctgaagaaaacatctcagaattcgaatttagagtttaatttctcagagcattctctcc

SEQ ID NO: 565827 - DNA, 82 bp, Homo sapiens
cgccgccactgtgacttgcagtcatcatccattaccacaaaattagcacatcatgcagcgaattcagaggcttcaggctgac

SEQ ID NO: 565828 - DNA, 95 bp, Homo sapiens
ctcccgcccggaaagctgcccagccaccagcaaccccccagctgggattctgtccctgaccgtcttcacagtccaggtgatcttgactactgctt

SEQ ID NO: 565829 - DNA, 100 bp, Homo sapiens
ctttggagtacagcttcaagtgaagttaatctgaggtgaagcaaacagaaaattgtggaggttttgttggtattggccatgtcaagccgctcatggttga

SEQ ID NO: 565830 - DNA, 100 bp, Homo sapiens
ccattagcgggggcctttcctgaggacggcgtacggagtgtgggttgtcttttggaaatgcaggtttaaggacaaattatctgcttaagctagaagatgg

SEQ ID NO: 565831 - DNA, 75 bp, Homo sapiens
cagacggcgacagtggcggcggcgccatggcagggcttgcaggaagctcttcgtgggcggtcttgactggagcac

SEQ ID NO: 565832 - DNA, 100 bp, Homo sapiens
gagtgggcactgtgctcctgttctggcttgtgctttttcccatgatgggcagatgctagtctcagggtgcagcggaactgctgcctgacgctctgcaact

SEQ ID NO: 565833 - DNA, 100 bp, Homo sapiens
ttttaggtaatatggcctgtttccaggagatatgtgtgtccatcagcagtgataaaaatcttgggaggtgttggaattggccttctccatcctgtatgac

SEQ ID NO: 565834 - DNA, 97 bp, Homo sapiens
ttctttcataaagctctcatgaggaccaaataagaagcctgcgggaggggtcatttttgaggtatcattccttggaatgctttccccggaaaaatat

SEQ ID NO: 565835 - DNA, 95 bp, Homo sapiens
cagttcgctacacagcaatgcatcgagattttgtggaagtataatactttgtcattatgagatgtcgtctctcggtgcctcctttgtgcaaatta

SEQ ID NO: 565836 - DNA, 50 bp, Homo sapiens
gaagctctcgaggctgctaagagactaattgcccagaagattgttgccac

SEQ ID NO: 565837 - DNA, 75 bp, Homo sapiens
gagcagaggcggcggctggaggagattgagaggatccagaatccagatctctggaatagctaccaggcaaagaaa

SEQ ID NO: 565838 - DNA, 75 bp, Homo sapiens
cactgggcgactctgtgcctcgctgaggatgggaaagggctccttcaagtatgcctgggtcttggataaactgaa

SEQ ID NO: 565839 - DNA, 90 bp, Homo sapiens
ggggaagtatttgatttcagaggaatgagattagattggtttaggttacagatgcctgtgaggagccaccaacatttgaagctatggagc

SEQ ID NO: 565840 - DNA, 110 bp, Homo sapiens
catgtcctaatatgttgatggcattccagaatatctcagatgagcagatggataatcaaatagtggtttctgactatgcccagatggaccgagtgctgcgagaagagaga

SEQ ID NO: 565841 - DNA, 75 bp, Homo sapiens
ttgaaagatgtattgagtacattgaagccacaggtggaattctactaagtatcagtcggccctacaagacaaagc

SEQ ID NO: 565842 - DNA, 83 bp, Homo sapiens
catggccagcaagcactatctcagtgccactgacatgttggcaccagaagtcatcagaatgcaagataaaaatccatacagct

SEQ ID NO: 565843 - DNA, 76 bp, Homo sapiens
atagagagaagggtgatgaatcagagttcctcagtttgaaactacatgtaattacgtagaagctacactcgaagag

SEQ ID NO: 565844 - DNA, 76 bp, Homo sapiens
ctcccaaagtgttaggattacaggacatggatttgattgacatactttggaggcaagatatagatcttggagtaag

SEQ ID NO: 565845 - DNA, 101 bp, Homo sapiens
gccaggagatggttcgggcctagcggagccgggactggaggtgcagctaaatcaagtccagcagctaaaccaggatccacaccttctcgaccctcatcagc

SEQ ID NO: 565846 - DNA, 80 bp, Homo sapiens
cgagaaggccttttggctgagcgttcacgggccccgagcaggagccaccatgttggtgataccccccggactgagcgagg

SEQ ID NO: 565847 - DNA, 100 bp, Homo sapiens
tggatttagcgtttcagaattgcaattccaaaatgtgtaagacgggatattctcttctgtgctgtcaaggagattcgtcagcgaactgcagctcaaagaa

SEQ ID NO: 565848 - DNA, 100 bp, Homo sapiens
tcagcctcccgagtggctgggattacaggattggaggctgttgtcattggagaagttcatgagaatgttactctgcactgtggcaacatctcgggactga

SEQ ID NO: 565849 - DNA, 75 bp, Homo sapiens
ctgcagcagctgagaaaggagctcggggactcccccaaagacaagcaaaagcgaaagcttcggatctacatttcc

SEQ ID NO: 565850 - DNA, 90 bp, Homo sapiens
acaaagttcaagagaatctgttggctaatggaggtctgccacctcttccttccatgcctccccgaaacttacctggcattgcacctctcc

SEQ ID NO: 565851 - DNA, 100 bp, Homo sapiens
aatacggactcaccttgcttgtaactactgatcttgagctcataaaatacctaaataatgtggtggaacaactgaaaggaccaggaactaccaagacgac

SEQ ID NO: 565852 - DNA, 97 bp, Homo sapiens
atgttggagaactacagaaacctcgtctccctggaagttttcatgggctgagctgctgagttcagcctgggaactgaggccaacaagggagtctcct

SEQ ID NO: 565853 - DNA, 100 bp, Homo sapiens
acactcggcgctctggttttcggtgggtgtgccctgcacctgcctcttcccccattctcaaatttcgctaaggagtttgtgatcagtgatcggaaggagc

SEQ ID NO: 565854 - DNA, 75 bp, Homo sapiens
aggtcgccctcaaggccatgatcaaaacgtatgaaaatgaaagtcttcagaatggaaggaagtcaactgaatttc

SEQ ID NO: 565855 - DNA, 100 bp, Homo sapiens
gggaccccgagcaccgggccctctgcgacctggggccctgggtgaagtgctccgccgcccttgcctccagagagtatgaagcccgcttggaaaggtacag

SEQ ID NO: 565856 - DNA, 100 bp, Homo sapiens
aaggatatcatgacccctctggttgcgctgctaaaagagtataaggttcagattcctgaaggccgagccagccagggcgtgttgcgtctcctggttcaag

SEQ ID NO: 565857 - DNA, 75 bp, Homo sapiens
ccaccgccgcctccgccgctgcctcaggagcggaacaacgtcggcgagcgggaatttcgctaaggagtttgtgat

SEQ ID NO: 565858 - DNA, 108 bp, Homo sapiens
gcacctcctcgccagcagccgtccggagccagccaacgagcggtactccaaagattcaggtttactcacgtcatccagcagagaatggaaagtcaaatttcctgaatt

SEQ ID NO: 565859 - DNA, 76 bp, Homo sapiens
gcgaaggaggcgggagcggagacctcgctgcgctcatggcgtcgcccgggttgctgcttttgctcagaggacatcc

SEQ ID NO: 565860 - DNA, 83 bp, Homo sapiens
gcgggacgcaccctggaccgccagcagcagtgagaagatttgagttttgtcaccggctcccacgtcggagagctgatcatctg

SEQ ID NO: 565861 - DNA, 101 bp, Homo sapiens
atggcggatggcccccggtgcaagaggcgcaaacaagccaatcccaggaggaaaaacgggacagaatgatgctgctgaaattggaacaagaaattttagat

SEQ ID NO: 565862 - DNA, 83 bp, Homo sapiens
cgcggccgagactctggcctgcagtcgccgccgccgccgccaggtggctgagaacaacctgtgcagccagtatgaggagaagg

SEQ ID NO: 565863 - DNA, 76 bp, Homo sapiens
cacagtttgaggcacaggctcggaaacgtgagtgtgtccgagtcccaagaggggcaatctgcacatcgtgctgcca

SEQ ID NO: 565864 - DNA, 83 bp, Homo sapiens
cggcgggaccgccagcgcgggggctgcgggcccaggggccgccaccaaggctgtgacgaagtgcctccggagccagcgtggtg

SEQ ID NO: 565865 - DNA, 75 bp, Homo sapiens
ccgcccccaacgtccatgcctgagtcaaaatgcagatcttcgtgaaaacccttaccggcaagaccatcacccttg

SEQ ID NO: 565866 - DNA, 100 bp, Homo sapiens
aataaaatgcataactatactgattggatgctgctcaaaatcagcctacatgccatctttggctggacaccaaccagttccaggaccccgtgatggagct

SEQ ID NO: 565867 - DNA, 75 bp, Homo sapiens
gaactcgactcagacgtggataaagataatcccggtcgcgtggggcaggcagtggcgctgcgggccaaggccttc

SEQ ID NO: 565868 - DNA, 75 bp, Homo sapiens
gcggcagcagccgctctgagggcgcctgctcaggcgttggagaccagggccagccctggccacaccccaggctgt

SEQ ID NO: 565869 - DNA, 75 bp, Homo sapiens
aaaagccaaaatagattttatactgacctaaatgggtaccagggtgctccagctgatgaacctaacagattctcg

SEQ ID NO: 565870 - DNA, 90 bp, Homo sapiens
cagaacccaaattggcgtttgtcatcagaatcagagggtgctggagaatctggtaaaagcaccattgtgaagcagatgaggatcctgcat

SEQ ID NO: 565871 - DNA, 48 bp, Homo sapiens
tgaagaacgagattcagacacaggtgtggatgaggtcaccattgtcaa

SEQ ID NO: 565872 - DNA, 82 bp, Homo sapiens
attcgcaccgtcatggtcacagaaagatcaactgaaatcggcaaacttctgagttcctacttgcaaaagaaaagtgacgtgg

SEQ ID NO: 565873 - DNA, 90 bp, Homo sapiens
atgatgaacagcagctcaagaggctcttcccctaccagggtactcgatgaaggcaaggagtcgatagcagcagttggtgacgagatggca

SEQ ID NO: 565874 - DNA, 90 bp, Homo sapiens
caaatacccctttgaattaattatggctgtattgttgcagcatctggcagtgagactgaggatgaggacagcatggacattcccttggac

SEQ ID NO: 565875 - DNA, 83 bp, Homo sapiens
tttggatcgcttgatagaattaaaagagcatcctgctcatgaacgagtactacagaaatgttcttttggggccagagtctggg

SEQ ID NO: 565876 - DNA, 100 bp, Homo sapiens
gaggaagcaattcgtacgcttgatcaggtaatgattgatgaatccctttcatccgatgaccctgattcatatgtgacattgacggttgtccggtccccag

SEQ ID NO: 565877 - DNA, 83 bp, Homo sapiens
ccggggacaagaaactagagcaaataaccgttttgaaattatcaatgagctgagcaatgttcctgttcctgtcatgctaatgc

SEQ ID NO: 565878 - DNA, 98 bp, Homo sapiens
agaagcctcccttccagtcaggggtgacaactgttgatagatttcaaggtcaacagaatgactatattcttctttctctggtacgaaccagggcagtg

SEQ ID NO: 565879 - DNA, 75 bp, Homo sapiens
ttttggcatctaacctcctgtggataagggctcagaatagcaccattgctgaaatttctgaataaattggcagaa

SEQ ID NO: 565880 - DNA, 100 bp, Homo sapiens
gaagccgaaaacaccctgcaatctttcagacagatgcacccactgggcctatgtaataacaatgacgaagaggacttgtatgaatatggctgggtaggag

SEQ ID NO: 565881 - DNA, 98 bp, Homo sapiens
ccatcgtggctaaacaggtactgctggctgcccaggaggcccgcaacaagttcgaggaggccgagcggtcgctgaaggacatggaggagtccatcagg

SEQ ID NO: 565882 - DNA, 75 bp, Homo sapiens
cccatctgtaacgaggtgttgagacgagcatgcagcagaactgattaaaacagtggcatctcgctatgatgaata

SEQ ID NO: 565883 - DNA, 145 bp, Homo sapiens
caatgataaagggctctgaaagctagaagaaaaggtgtacttgcaagaaacctcaggacttgagtaacagcaacatggatgtgatcttcgtggtggaaagctaaattttaaaaccaccccaatggatgcagacagtgatgttgca

SEQ ID NO: 565884 - DNA, 98 bp, Homo sapiens
gccgtggcggcgccatgcccgggccggagtgagtgcgcgcgggcgaaaatggcgtacatccagctctcatgggaggttgaatggagcagctgaacttg

SEQ ID NO: 565885 - DNA, 82 bp, Homo sapiens
aatggtctcaatctctggaaaaacttcttgccaaccaaaagcccatggatttcagaaaattatctacattcagagaaagttt

SEQ ID NO: 565886 - DNA, 90 bp, Homo sapiens
cctttatatagaagggagagtaggcactggtgaggtggattgatgatgaatcttctggcacacctggagcaactccagaacacagtcgtg

SEQ ID NO: 565887 - DNA, 97 bp, Homo sapiens
agcggacgccggtctctgttccgcaggatgagagaactcgatgccaccgcaacggtattggcgaaccggcaggatgaaagtgagcagtccagaaagc

SEQ ID NO: 565888 - DNA, 83 bp, Homo sapiens
cttggactgagtcctgcaggacacaggtgaaaaaccatacaagtgtcaaatttgcaatcagtcttttagaattaagaaaacat

SEQ ID NO: 565889 - DNA, 90 bp, Homo sapiens
ggtagcggtagcgatggacactctggatcgagtagtgtcccacacttacagggaaagcatcacccgaaagtgagaatgcctagaggcagg

SEQ ID NO: 565890 - DNA, 90 bp, Homo sapiens
ggccagggcagagggcacctgagcggctggagagcctgttggagaaacacaaagagacagccaccgcactgtgttcctgacacgtacagc

SEQ ID NO: 565891 - DNA, 90 bp, Homo sapiens
tcgacgtcgtgatccagaagtccagagctgaggactgcctgtttgcaggagcgatctctctttgagtcggcatggaagaaggagaaggac

SEQ ID NO: 565892 - DNA, 50 bp, Homo sapiens
ccacagacacttctgatagtgaagaaagggctattgcaagacacgaagtc

SEQ ID NO: 565893 - DNA, 83 bp, Homo sapiens
gaagctactactacgtggtgcttggaaagcagcctcccgcgacgatgcccctcaacgttagcttcaccaacaggaactatgac

SEQ ID NO: 565894 - DNA, 90 bp, Homo sapiens
caaaaaacgggtcgcccgcgattctcagggattgatcgcctcttcaggtcaccgacgatgagggcgcacctgctgtcctggagcttccga

SEQ ID NO: 565895 - DNA, 75 bp, Homo sapiens
caccaggccgggaagcccatcgggtctgagttcactgacaccatcctgtccgtgcacccctctgatgtgctggac

SEQ ID NO: 565896 - DNA, 82 bp, Homo sapiens
agacagctcaggctgcccagatggtggctcccggagtccagggtcccctggaagtgacgctgactcagccagtgaggagcgg

SEQ ID NO: 565897 - DNA, 75 bp, Homo sapiens
gcaaagctgaagcatctgctactctgactgttcaaggatgcagaatagaaaactgtgattcttgctttagcaaag

SEQ ID NO: 565898 - DNA, 101 bp, Homo sapiens
tcagacagcatatttgagtcatttccttcgtacccacagtgcttcatgagaggtatcgatgtacgtttcggtgtggactgcacccagctggcagatgtctt

SEQ ID NO: 565899 - DNA, 100 bp, Homo sapiens
gaacctgattgctgagctagaagaaaagaagaaaatgattgaaaatgaaaagctgacaatggaactgactggagggggtccctcccttctctctgagccc

SEQ ID NO: 565900 - DNA, 75 bp, Homo sapiens
aggccttagtggagggggtgaaagccatccagattgatacctggctacagtgtctctctttcaacgctatcatgg

SEQ ID NO: 565901 - DNA, 96 bp, Homo sapiens
tttgccaatgcaggcatgaaccagagacccttccaggcctgcaagcgatttgacagccatccctcagtgccaactaaacctcctgggcagcctgac

SEQ ID NO: 565902 - DNA, 95 bp, Homo sapiens
aatgaagttgatggaattacactgtgatacgactgactatggatctgtctgtagaaactctgttcagcttcatgcaggagcgccagaaaagatac

SEQ ID NO: 565903 - DNA, 82 bp, Homo sapiens
gcccctcggcctcggagcaacgagcgcagcgccgatggccaccatgtctgggagatggaagcgaaaactgaccgggacctgt

SEQ ID NO: 565904 - DNA, 100 bp, Homo sapiens
gagtcttcggagcgaccccggcaggtatggcacagtcacaagggtgggtgaaaagatacatcaaggccttttgtaaaggcttctttgtggcggtgcctgt

SEQ ID NO: 565905 - DNA, 100 bp, Homo sapiens
ctggagatgtgtctgcacttcgaaggttatcaagttatacccaaccagcagcaaaactaccaaggaatagttggagttcagcaaccccagagtcagagcc

SEQ ID NO: 565906 - DNA, 101 bp, Homo sapiens
atttttgagaccaaattaatcagcacattgatttataagatggccgccctgctcccccaatgaaaggccagcttcgaagaaaagctgaaagggagacgttt

SEQ ID NO: 565907 - DNA, 96 bp, Homo sapiens
atgagacgctcaagtttgtggcccgcaactacctggaacctgtcttaggaaaagtcctcagtgctgtgggcagtgcccagctactgatgtcccaga

SEQ ID NO: 565908 - DNA, 100 bp, Homo sapiens
gttgttgcaagaggtcttctttcaggcaatcctgcttgctgtgtgcttaatcatttctgcatgtgcaaggtctcttgcagctgaatggggtaaatatgga

SEQ ID NO: 565909 - DNA, 100 bp, Homo sapiens
cgcgactctggcctctgaaacactaccactgctggcgctgaccttcatcacagacaacagcctggtggcagcggtcatacttacctggttgcttgcgcat

SEQ ID NO: 565910 - DNA, 74 bp, Homo sapiens
ctacatcagtttggtttcactcagaccgacaccaactctacaacattacctgtcatatactgaagaatctcttc

SEQ ID NO: 565911 - DNA, 100 bp, Homo sapiens
ctcagccgtgatgcaggcgcttaagtatttccacaagcgtttcccggagcacagggcagcggagatccgcttcagaagggaggaaaacacagaagacgag

SEQ ID NO: 565912 - DNA, 82 bp, Homo sapiens
gtagcgagtcggcaacccggaggaggaataaacatggtgtgtctcgaaagaagattgctcagatgttggatcgttatgaata

SEQ ID NO: 565913 - DNA, 100 bp, Homo sapiens
ctttacactgatgaagtgttagacatcgagatcaatgaacctttagatgaatttacagaatcactagatttgatctacttggcgactttggaaggtttaa

SEQ ID NO: 565914 - DNA, 101 bp, Homo sapiens
tttcccaaagtagccacaaatatcatgagggcgtggctgttccagcatctaacagtgctggagaatctggtaaaagcaccattgtgaagcagatgaggatc

SEQ ID NO: 565915 - DNA, 75 bp, Homo sapiens
tggagaatgacaagagcttccgcggtgtcattctgacctcggccctgtctctgcccctggtggtcatcgtccatg

SEQ ID NO: 565916 - DNA, 100 bp, Homo sapiens
tatttggaaccgttatttttgctggatggttacacatcattttggaatgactgtatatcatctggattacgtggctgtatgttaattgaattagcattga

SEQ ID NO: 565917 - DNA, 75 bp, Homo sapiens
cgggcatgggcggcaactctttgatgtactactataatgggaaagcggttttaaaatcaaagatgggaaaatcgg

SEQ ID NO: 565918 - DNA, 75 bp, Homo sapiens
catcaaacatcttccaccacagcttagaggtgaaatgacaatggatgctctgttggctcgattgaaacttctgaa

SEQ ID NO: 565919 - DNA, 100 bp, Homo sapiens
ttccccatctgtaacgaggtgttgagacgagaatataacaccagcaatcctgacttgttgctagtcatatttcaagtgacaggcatcagcctcctgccac

SEQ ID NO: 565920 - DNA, 100 bp, Homo sapiens
gaggattttcagacaggtctatctttgatctaaagcatgtgccacataccaggagaatccagctttggcggttgcaattaaaacatgtaaaaactgtact

SEQ ID NO: 565921 - DNA, 101 bp, Homo sapiens
cgatgcgtcagtagggtgagcacataaaaaatccatgtcttgcacctgtattttagcgtactatgcaggtgcaatggatgagcttcatagtctggatccaa

SEQ ID NO: 565922 - DNA, 75 bp, Homo sapiens
gtgcccatcttcatagagttgctcagctcagagtttgaagatgtccaggaacagtactactataattccttgacc

SEQ ID NO: 565923 - DNA, 75 bp, Homo sapiens
gcaggattaagtaaagttcaagcagcagaacatactctgagactgctgatcttggacttgatattggtgcccagg

SEQ ID NO: 565924 - DNA, 88 bp, Homo sapiens
ctgcacgtcttcaccttcggcagccggctgtacgcacacaccatcgcaggcatcaagcatgatggaaccatgtgtgatacctgccgcc

SEQ ID NO: 565925 - DNA, 139 bp, Homo sapiens
gcaaatcaaggaaggctgctggtgatcatgctaagggtcttcatataccacgattaacagagactttgccaaccccaatgcattgcacctctcattgcatgtgaatgatggctcctgttctattctctcaccttccaac

SEQ ID NO: 565926 - DNA, 137 bp, Homo sapiens
ctccaactcagtgatcagggtcccaagctggaccacctcctcagaacccttgatgacacggctgttcctccttttggagtcaggaatggagagaagggtaatggttttacctcttattgtggaaacctgttgagatc

SEQ ID NO: 565927 - DNA, 82 bp, Homo sapiens
tggccgcgttaatcccaattcccgctctgcgggcgttctccctccaggctgcctgctgtttcccggggagatcatgaaacga

SEQ ID NO: 565928 - DNA, 100 bp, Homo sapiens
ggcctataaccgacttcagagttttccagcaagtgtgccacctgggcttgaaggcatgaaggaacaggacctgtgcaacaagataatggctaaaattcta

SEQ ID NO: 565929 - DNA, 98 bp, Homo sapiens
gcctcatgaagtggatcagtttctaaacttctctcctaaagaagatgaggaaactgaggcttggtgaagttacgaaacttgtccaaaatcacacaact

SEQ ID NO: 565930 - DNA, 95 bp, Homo sapiens
ctgcctggtgcagaggatcctggaggcctgggaagccaacgaccacacgcagatgcagcaccgaggcttcctcctcctcaccctcctcgccctgc

SEQ ID NO: 565931 - DNA, 90 bp, Homo sapiens
acgtcaggtgtgcctcctccatcagtcactcccctcaggcaaagcagtgacctgcaacagagccagctaaaagatggcggcaaggcagcc

SEQ ID NO: 565932 - DNA, 75 bp, Homo sapiens
gacaagaccatcgagctcatgaaatatggctacacacacctttctgcaggagagctgcttcgtgatgaaaggaag

SEQ ID NO: 565933 - DNA, 75 bp, Homo sapiens
gcgggtttgtgtgaacaggcacgcagctgcaggaactgtggctgcaccatctgtcttcatcttcccgccatctga

SEQ ID NO: 565934 - DNA, 100 bp, Homo sapiens
gcaacctgcagcacatcagcgaccgggagaacatagacggtgaccaaaagccagccccactgtgagttgaactctttcgtgttgaccggccactctccgt

SEQ ID NO: 565935 - DNA, 100 bp, Homo sapiens
tgtgttcaccaaggaggacctcactgagatcagggacatgttgctggccaataaggagcatattaatgaaaagtgccataaactgaaaaaccaaacatga

SEQ ID NO: 565936 - DNA, 98 bp, Homo sapiens
gactatggcgctcaacaagaatcactcggagggcggcggagtgatcgtcaataacaccgagagctaccagagattcactgactgctataagtgcttct

SEQ ID NO: 565937 - DNA, 83 bp, Homo sapiens
gggaaagtagccaccagtccaactcgggtcgcccccaccattatttcggtcaaaatgcagatcttcgtgaaaacccttaccgg

SEQ ID NO: 565938 - DNA, 84 bp, Homo sapiens
tgcagatcttcaacaagaggacccaggagaaattcgccctcaaaatgaggacggggacttggttgccttttccagtgacgagga

SEQ ID NO: 565939 - DNA, 90 bp, Homo sapiens
tggaagtcattcaacgggaattgaataggttgaaccatgattccggtgacagagctccgctactttgcggacacgcagccagcataccgg

SEQ ID NO: 565940 - DNA, 83 bp, Homo sapiens
ctggagcgttgcgagcgcgaatggcacgagctggagggagaatttcaagaactgcaggatgaccgagtgggagacagcagcac

SEQ ID NO: 565941 - DNA, 73 bp, Homo sapiens
gcagtggtcgcttcttctccttgattactcttgtctctgctgctcctgggaaagtgatttgtgaaatgaaagt

SEQ ID NO: 565942 - DNA, 75 bp, Homo sapiens
gcagtcctcctgcctcagtctcccaaagtgctggaattacagggatgagacaccaattattgcggtgatggtggc

SEQ ID NO: 565943 - DNA, 100 bp, Homo sapiens
ggaaaagcgaggcaaggcaggcgggtaaaaagaacgtattctcatggtacttacagagctggcccaatgagacaaataagcttggtgggagcagttgatg

SEQ ID NO: 565944 - DNA, 100 bp, Homo sapiens
tcacaaagtacagctcagaatttgacttcagagtatgtatgtaactgctctgtggttggaagcctgaatgtgaatcgctgcaaccagaccacagggcagt

SEQ ID NO: 565945 - DNA, 101 bp, Homo sapiens
cgttctgcattttgattcatctcgggccctgtacagtctttgcccgctgcctgatttttcctctcatcgtgacgggccagcgagaggcagccaggatccac

SEQ ID NO: 565946 - DNA, 100 bp, Homo sapiens
gatggtcacagggggcccctggcctaccagacccgggaagaaggtaaggccttactccggcaaatcctacagcttcggaaccaaggcgagactcctacca

SEQ ID NO: 565947 - DNA, 98 bp, Homo sapiens
cctacgtcagtaacagccaccaaggttcgaattacgttaatgaaatttctaccaagcgttttcatggatgctatgagagacaatcctgaagctgctgt

SEQ ID NO: 565948 - DNA, 50 bp, Homo sapiens
ctcctgcagttataccagtggggatgcacttttgtcttcctggccagtgt

SEQ ID NO: 565949 - DNA, 75 bp, Homo sapiens
ttcacttgaaataccggatgattttggaggatgttgccttatggctgtttagcaacaggagatcgctctggcctc

SEQ ID NO: 565950 - DNA, 98 bp, Homo sapiens
cggcctcaccatacaggaacagggcagacgttagcgtgagtgatcactctcaatcccgggccaagtcctgtatctgccatgtctgtggcgtccacctc

SEQ ID NO: 565951 - DNA, 50 bp, Homo sapiens
atggtgttgctgctgtactccttctccgagctgaagaagcaggtggagag

SEQ ID NO: 565952 - DNA, 80 bp, Homo sapiens
caaggaagcagctggccgaatgtcaaaagcaccttggacaaattgaaaacacggatgataccatcggggaccttaagaag

SEQ ID NO: 565953 - DNA, 82 bp, Homo sapiens
aagtcatttgcactgaaatacgacttggcgaatcaggaccatatggcagactgccagattcacttacagccccagctaattc

SEQ ID NO: 565954 - DNA, 82 bp, Homo sapiens
ccgcggacgcccgctgagcttggcgcacgggccgaccaggattcctaccggaagcaggtggtcattgatggggagacgtgcc

SEQ ID NO: 565955 - DNA, 98 bp, Homo sapiens
actagcctaaagccgggcggactgcgggatttgtcttggctgttactatgacacgggaagcaattgatgaatttcggcgttttcagcgtgacaaggaa

SEQ ID NO: 565956 - DNA, 90 bp, Homo sapiens
tcccctctccatccccaccaaccgcctcacccagcgcatcatccccaggacagagcgggatgccaccagcttgtccaaagggaagttcca

SEQ ID NO: 565957 - DNA, 50 bp, Homo sapiens
tggaataccggctctcagcggctgcatgcccaagagaatcgtaaatgcaa

SEQ ID NO: 565958 - DNA, 73 bp, Homo sapiens
tgcagtgtgctgtgagagatctaccactaggatttgaagcattcattaccatctggacttggtctctcagaaa

SEQ ID NO: 565959 - DNA, 75 bp, Homo sapiens
gagaagggcagtggctgtagctgccctttccgtttccagggttccgaccaggtctgtttatgatggtgaagaaca

SEQ ID NO: 565960 - DNA, 95 bp, Homo sapiens
gtccccagccctgcctctccctgggctctggtacaggtttgcagattccgccagcagcacagcaagctctacagatgagtggctctttggcattt

SEQ ID NO: 565961 - DNA, 74 bp, Homo sapiens
agggctgcacacctttctgctttatctggttctgtcagtgtgtgtggaagaagaaaacataattccttacatca

SEQ ID NO: 565962 - DNA, 75 bp, Homo sapiens
agcctttctggacagaccaacctgtcagtgctgcaaatggagtcatcagaacccactgtgaggaagtgacttctc

SEQ ID NO: 565963 - DNA, 90 bp, Homo sapiens
ccgaagatgggggatttctacgacccggagcacccgacccctgagatcaagattataggaccggcccaagtgaggagaaacccagcaggc

SEQ ID NO: 565964 - DNA, 100 bp, Homo sapiens
aaggtgctgaaattaataaaagccttttagcactcaaggttgaaaatctttctaaacgatacgaagaaatttatcttaaaaataaagatctagatgcaag

SEQ ID NO: 565965 - DNA, 74 bp, Homo sapiens
ggaagattcacactgtaacattattcacactgaggaaatctgaaatagagtactatgctatgttggctaaaact

SEQ ID NO: 565966 - DNA, 102 bp, Homo sapiens
tgagatcaaatggcacttcattggccacctacagaaacaaaatgtcaacaaattgatggcactgccagtgaaagatgtagaagataaacctgaacaacaaac

SEQ ID NO: 565967 - DNA, 82 bp, Homo sapiens
gctatatccagaagtaattcaacagcttgcagaccaggattctataaagcttttgctgggaacacaaaatgttctaaatgtc

SEQ ID NO: 565968 - DNA, 100 bp, Homo sapiens
ctcacaacatgcacagcctggcgacggctgcggaacaagactgccaatggagactgccgcagagacccccgggagcggagccgcagccccatcgagcgcg

SEQ ID NO: 565969 - DNA, 50 bp, Homo sapiens
tgacgcagatccacctcctgcccggccagacgggaagatttctgggggag

SEQ ID NO: 565970 - DNA, 83 bp, Homo sapiens
ttggcggcctttctgctcctcgcggcccaggtgctgggtttgtgcggagccgcttaccggcccacggaggagatcgatctgcg

SEQ ID NO: 565971 - DNA, 90 bp, Homo sapiens
gtcggtcctgcggggccagccctttggggccgccgtgtcgactgccggggaagtggtggtgaaatagggccttctaaacctgtggagaag

SEQ ID NO: 565972 - DNA, 73 bp, Homo sapiens
cttcatcgagctgcctttacaggacgaaagttttaaccgtgattggagataccacaaagaagaacgagtatgg

SEQ ID NO: 565973 - DNA, 101 bp, Homo sapiens
tttgctgtgaatgtgaagaatcagaaatctttactgattccaatacctctgtgagtgaaagccttcagagggaagctgctaagaagcaggccatgaaacag

SEQ ID NO: 565974 - DNA, 87 bp, Homo sapiens
tcgtctcttacgtctgcggaagtgcagctgcctcagttcttagcgcagtaacaacatgctgtaccccaaggaagacaaggagaaccg

SEQ ID NO: 565975 - DNA, 75 bp, Homo sapiens
ccgcagtgggtcccggacaaggagatggactcaccctgtcacccaggttggactgcactggcctcaacctcctga

SEQ ID NO: 565976 - DNA, 110 bp, Homo sapiens
ttccaggatcctgagatccggagcagccggggtcggagcgggcaaagcgaaggctggagctaggagaaagcggtcatcagtacctctcagatggtttaaaaacccccaag

SEQ ID NO: 565977 - DNA, 50 bp, Homo sapiens
aaggattccaagtaactcttatttggatcttactcagtgtgttacatgcc

SEQ ID NO: 565978 - DNA, 100 bp, Homo sapiens
tcaaagctgtgatcaccctgatgtcaccgaatggccacagcttgtaaaaggtctcctgcaagcgcaaaatcttctaacgcaactacctcagcaaagccaa

SEQ ID NO: 565979 - DNA, 90 bp, Homo sapiens
gggcattgggtggaggagcagaatttactacagcatgtgatttcaggttgactttggcagaatatcatgaacaggaagaaattttcaaac

SEQ ID NO: 565980 - DNA, 82 bp, Homo sapiens
aggccagaacttcagcaccctggctgagaagatcctggtgaagtccatgctgaggaagcgttcctttgggaacccgtttgag

SEQ ID NO: 565981 - DNA, 75 bp, Homo sapiens
tggaagtgatgagaaactctcaggaaactctgttaaccattgtagaggcatcctctggtatcacgattccaaaac

SEQ ID NO: 565982 - DNA, 99 bp, Homo sapiens
gaaaagttccaaatcccaccaaatgctgagctgaaatatgaattacacctcaagagttttgaaaaggccaaggagctccgtcttgccagaattaccccg

SEQ ID NO: 565983 - DNA, 100 bp, Homo sapiens
aagagggtggaaaagtcattcaactcaagcagatcaaagttgttttgaggagccagcaccgctctttgaccttgccatgcttgccttagatagtccagag

SEQ ID NO: 565984 - DNA, 83 bp, Homo sapiens
gtggacagtgacagcgatgctgaggatcgaggaacgttgtctgtgtactaatggtcacttgatgtgcgctggctgttttatcc

SEQ ID NO: 565985 - DNA, 96 bp, Homo sapiens
ccacgcgcccggacggcctggggttgctgcccgtcagtctcgaaagataactatgttcatcgactggttgcaagtaaaacagatggaaaaatagta

SEQ ID NO: 565986 - DNA, 91 bp, Homo sapiens
gctgctcaaggacacggtctacaccgacttcgacgcttccccgggcgctgcctggacaggcctgcctgcgtgctgggacatgtctggcctc

SEQ ID NO: 565987 - DNA, 89 bp, Homo sapiens
caaatcaaagatgaaagaacaacctgtcttggagcgcttgcagatgcagttcgaacattaagcaatgccgaggactatctcgatgatga

SEQ ID NO: 565988 - DNA, 100 bp, Homo sapiens
ctcggggacattattgcgcgtggaacggctgcttttggaaggaacctctttcaggagctataaaagaaagggaggaatcatgtccacaattgcagctttc

SEQ ID NO: 565989 - DNA, 100 bp, Homo sapiens
catcagggcttccatcgatttctaggcatcccgtactcccacgaccagaaagtcctacctccatctccgtgggccccagcaccagccgacggcccgcagc

SEQ ID NO: 565990 - DNA, 100 bp, Homo sapiens
attcctctattgctgcaaaaaatgcagaactagaacaggagcttatgattacatctcgtttagcagatgtgttcaaccaaaggtgtgaggtgaaccgaag

SEQ ID NO: 565991 - DNA, 100 bp, Homo sapiens
tgggtggggcttcaggtgccagccagctgaaggatggccacccctgtggtcaccaagacagcctggaagttgcgatctgcatctccaatggatactgagg

SEQ ID NO: 565992 - DNA, 74 bp, Homo sapiens
agggagacgacgctgctgggtccgctgagcggggcgacccgaggagggtgcatctgcccggaagactcagactc

SEQ ID NO: 565993 - DNA, 100 bp, Homo sapiens
ggtctggggcttcgcgctcttcttcttcttccagggactcagcacctggcaggactccagtgggggtgactcatgtgcttctgaggaggaaccaaccttt

SEQ ID NO: 565994 - DNA, 51 bp, Homo sapiens
accacaggccctcgttgcccagatgtggtggtgaagtttattaagaaggag

SEQ ID NO: 565995 - DNA, 100 bp, Homo sapiens
cgtggaataggtgtatcaagtaatggtgcaaagcctgaagatagaatttttgcggcatttgaagagctttttccagattatgtttaaaattgaaaccaag

SEQ ID NO: 565996 - DNA, 100 bp, Homo sapiens
aagaatctcgtgctcaccggtttctcccacatcgacctgggcgtctctggccgagcctctttttgtggaaaacgacagcagcagcagtggcctggaagac

SEQ ID NO: 565997 - DNA, 100 bp, Homo sapiens
ggaagagattgaacagatgctcgtcaatgatcaggtcaatgagctgaaggagaaaggcaacaaggccctgagcgtgggtaacatcgatgatgccttacag

SEQ ID NO: 565998 - DNA, 74 bp, Homo sapiens
ggagccgctgtcctccccgccaccaccggtgccgggcaccagacatgtatgaccaggtgctgaagtttggagcc

SEQ ID NO: 565999 - DNA, 92 bp, Homo sapiens
ttcctttccctcagcacacagaggatgatgctgactttgatgaagaaggacagaataacgggctcccagattcacaagccccaccaagagga

SEQ ID NO: 566000 - DNA, 73 bp, Homo sapiens
tgtcatattgctgttggatctcctggtaactatggtggtggtgggaactataatgattttggaaattatagtg

SEQ ID NO: 566001 - DNA, 88 bp, Homo sapiens
aacaaagcatttattccacctaaggaaaaaccaattgtgaaacctaaggaagctcctgcccctcctaaagctgaagccaaagcgaagg

SEQ ID NO: 566002 - DNA, 102 bp, Homo sapiens
tggtcatacaccagtactaccaaggacagcttttttcctgcaagaatagctctccagacccccagctggccatgtggtgagttcagggcccaaatcaagtag

SEQ ID NO: 566003 - DNA, 100 bp, Homo sapiens
gctttatattgtgtttgtcataaatctacgtattctcctctaccagatgactataattgggcatttgacactcttgcaaaagcattgaatcctggagaga

SEQ ID NO: 566004 - DNA, 51 bp, Homo sapiens
aatggctgcatcaactatgaagagctcgtccgcatggtgctgaatggctga

SEQ ID NO: 566005 - DNA, 74 bp, Homo sapiens
cttccaggactttgagccagtccagaccctgctgctgtcttcaaagaaggaactggagaacctgaacaagtggg

SEQ ID NO: 566006 - DNA, 96 bp, Homo sapiens
aagacatcatttgggaccaagctgatgagcccttgaagcacagcagaccattcctcaagaattttgtatccaaggcccaaaagtttgttacccaag

SEQ ID NO: 566007 - DNA, 96 bp, Homo sapiens
aaggagttagcgacctactgggccttcatcacggcggcttggattgtcctgtgccaactgtcacaccacaactaccaccttatggcgcagaaacgc

SEQ ID NO: 566008 - DNA, 100 bp, Homo sapiens
ccgggatcgtgaccgagaccgtgaccgagagcgtgaccgagagcgcgaatatcgtcatcgttagaaggatcaccaaagatgaggcagagaccccctcctc

SEQ ID NO: 566009 - DNA, 74 bp, Homo sapiens
tgcgagagcctcctcacttgggttatgaagacagtatggagtttccagaccatagtagacatttgctacagtgt

SEQ ID NO: 566010 - DNA, 50 bp, Homo sapiens
tcgcgaagctgccaaagccttagacaaccccatggctgggggttatggag

SEQ ID NO: 566011 - DNA, 75 bp, Homo sapiens
tggccagtaggcaatcacctgaaggatctgacttccagaaggaggtgaggagcgcctctttccggccgccatcac

SEQ ID NO: 566012 - DNA, 74 bp, Homo sapiens
aggaatccattatggtgtcattacatgtgaaggctgcaaggacctcagcagccatgtcgaagccccatagtgaa

SEQ ID NO: 566013 - DNA, 100 bp, Homo sapiens
cccacggagcctccggggctgggtcctcactgagcagcgagtcgtcccccgtgtcctctccggccaccaaccacagctcccccgccagcacacccaagcg

SEQ ID NO: 566014 - DNA, 100 bp, Homo sapiens
tccatatacaacaatgggcacttactgaaggccgtcttaaagttacgttgttagaatgtagcagtcgaggattactggtttgaaacaaagatgtcagccc

SEQ ID NO: 566015 - DNA, 88 bp, Homo sapiens
cgagtttgcgactcgcggaccggcgtccccggcgcgaagaggctggactcggattcgttgcctgagtgtaaggcaaacattggtgggc

SEQ ID NO: 566016 - DNA, 82 bp, Homo sapiens
aagtttgcagatcgggagcgcaaggtcgccctcaaggccatgatcaaaacgggccaaaccagtgctcctgccacctctctgg

SEQ ID NO: 566017 - DNA, 74 bp, Homo sapiens
aaagagataccaaagtcgggactatcgatgatggtacaactccaaaaggagacattggagaagaaccaagctgg

SEQ ID NO: 566018 - DNA, 49 bp, Homo sapiens
atcaaaacccaccatgccccagggtacagccaaagaccggagctttgga

SEQ ID NO: 566019 - DNA, 90 bp, Homo sapiens
ggggcctccggtatgttgccgctgcgttgagttgacgaaggatcagagattggtgtattcgggcagactgcttcccgatcatctgcagct

SEQ ID NO: 566020 - DNA, 80 bp, Homo sapiens
cttcgaacttttgacacggctttggaaacgacgtcatgtgttagttttagaaagagcgttttcgctacgtaaagcacatt

SEQ ID NO: 566021 - DNA, 98 bp, Homo sapiens
cctggatggcagatggggggaccccggtacggacctgtgcaggtgaggacaggccagcaggcttatggctatgggccatacggtggtgcgtacccgcc

SEQ ID NO: 566022 - DNA, 100 bp, Homo sapiens
agtggaagttcaccatcacaccacctacagcccaggtggttggcgtgcttaagattcagacatcacttagtgctcttacccagctgatgaaaaagatgcc

SEQ ID NO: 566023 - DNA, 89 bp, Homo sapiens
cgtgcacatccaggctggtcagtgtggcaaccagatcggtgccaagggagagacaaaggcagcgctgccctcgggggagtattggccct

SEQ ID NO: 566024 - DNA, 93 bp, Homo sapiens
tgctaaaaggctccttcagtgagcaaggcatcaacgagtttctcagcatcatggcagaacaggatgtggaaaacgatcttttggattacgatg

SEQ ID NO: 566025 - DNA, 83 bp, Homo sapiens
tggaccacggcgcagacgcgggcgagctgcggctcggacgccagcggacacgcgggcgaggcccctggccccaacatggcccg

SEQ ID NO: 566026 - DNA, 51 bp, Homo sapiens
caaatggtgtgcttctatttataccaagctctggattaatcgaattacagc

SEQ ID NO: 566027 - DNA, 82 bp, Homo sapiens
gtggtggactcccgagccactggcaggttccgcggcaccgagcccgagccccgagacggttcagattctggagatgccctcc

SEQ ID NO: 566028 - DNA, 74 bp, Homo sapiens
caggattgagacccggaaggcttcaaaggctgtcgcaaggaggaagatcatcacttaccgggactacctgcccc

SEQ ID NO: 566029 - DNA, 91 bp, Homo sapiens
ctccacatcgccttttgccacctttccctttatttccggagagggagacgtggtgggcggtccttcctgtgacacgacccttgagtgacag

SEQ ID NO: 566030 - DNA, 75 bp, Homo sapiens
ggacaaactcaagcttgataaggcccaccgtttccatggtcgaaggtcagggcgagaagaacgtgaccttctggg

SEQ ID NO: 566031 - DNA, 89 bp, Homo sapiens
aatcatcctgaatgaatttagagccaaactgtccaaggctttggcagtgatgaaacttatcaggacatatttcgtgatttttcccaaat

SEQ ID NO: 566032 - DNA, 50 bp, Homo sapiens
gccgtggaggcagaggtggcatggggtgaacttcacggtagaccagatcc

SEQ ID NO: 566033 - DNA, 75 bp, Homo sapiens
gaattggagaacttgttggagtgctggtgaatcatttcaagagcacagaagagatccccttgaagattttagctc

SEQ ID NO: 566034 - DNA, 85 bp, Homo sapiens
ttcatcttgtgaaagcagtccttgttcctatggcctaatgaacaacttccagggtgctcaggaacggatagatagcttgcgtcga

SEQ ID NO: 566035 - DNA, 90 bp, Homo sapiens
gcgggaccggaagtgacgcagagaagtttccgggactggtaggtggagagttttcaaacactgttatcggccagatgaagaaatttggaa

SEQ ID NO: 566036 - DNA, 100 bp, Homo sapiens
cacgaatctgcccacccctcctgtaacccagcctgtttcacttcttgggtttctattgcctgggctggagtgtagtggcatgatcatggctcactatagc

SEQ ID NO: 566037 - DNA, 90 bp, Homo sapiens
ctgcgttaagccggctctggagacagagttcctgagttggaggtagaagaagaaacccaagttcaagagatgactttagatgagtggaaa

SEQ ID NO: 566038 - DNA, 75 bp, Homo sapiens
tggagctgaacaagatccctaccgtgcgcgccttccttttgaaactggcgatggaatatgagaggagccctctgg

SEQ ID NO: 566039 - DNA, 100 bp, Homo sapiens
gcgcagggtcgcgatgctgcccggtttggcactgctcctgctggccgcctggacggctcgggcgctggagacagatgcttccagaatcaatcaccgaatg

SEQ ID NO: 566040 - DNA, 101 bp, Homo sapiens
ggcttctaccctcggctgtcctgctgcctgcggagtgacagcccggggctagggcgcctggagaataaggatttggagtggatcagttacgagatgacaat

SEQ ID NO: 566041 - DNA, 100 bp, Homo sapiens
gcgggcgcggctggccgagcaggcggagcgctacgacgacatggcctccgctatgaaggcggtgaagtattacaacgccgagagttacgaagtggaacgc

SEQ ID NO: 566042 - DNA, 100 bp, Homo sapiens
ttacaagatggacagggatgataattgggcctccaagaattctgtttctggcgtctgcatacgcaagtccccaactcgctgaggagagctgttcagctat

SEQ ID NO: 566043 - DNA, 75 bp, Homo sapiens
acagctaagatgccaggacatcctggaagctgggaaaagtgttaaccttgatgcctgaaagaactggaaattatg

SEQ ID NO: 566044 - DNA, 100 bp, Homo sapiens
attccgcgccgcttagattgggaggggaaagagcaccgaagaagcttcgaggatctggtccacgctgcttttatgagctgtaacactcaccgcgaagatc

SEQ ID NO: 566045 - DNA, 76 bp, Homo sapiens
agagaattctggcactgcactgggtaggaaaaaggttagtggatgacagatgtgtggtgcacccagaggccgggga

SEQ ID NO: 566046 - DNA, 50 bp, Homo sapiens
gttcagcatccccaagcagggggagggtgaaaagttcggaccctttgctg

SEQ ID NO: 566047 - DNA, 83 bp, Homo sapiens
cttgagttggtcgggggcagcggcagatatttgatcctgatgacctttattcaggggtcaatttctccaaggtactgagtact

SEQ ID NO: 566048 - DNA, 140 bp, Homo sapiens
caggaccaagatagaccccagcgccttggtgcagaagctggagctggacgtgaggagtgtcacttccgtcaggagaggcatgaacgctgctgtccgggctgtgacgcgcatgggcatttatgtgggtgccaaagtcttcc

SEQ ID NO: 566049 - DNA, 100 bp, Homo sapiens
cagagccgcggccctcagggcgtggaagacggggacaggtctcctaaagcgtgcttttcaaaagtcggcatcagtccggaatattctcaggcctgtcggg

SEQ ID NO: 566050 - DNA, 101 bp, Homo sapiens
tggacgtgggggagacggccatggtcactgctgactccaagtactgctacggcccccaaggcagctatgtggtggtaatgcctaaaaagagacaagcactg

SEQ ID NO: 566051 - DNA, 98 bp, Homo sapiens
cgtctgcaaccttgatgaacagctcaaggtctttgtgtcccgacactctgccaccttctccagcattgtgaaaggtgctggagaatctggtaaaagca

SEQ ID NO: 566052 - DNA, 100 bp, Homo sapiens
aagactggggctgctcccatcattgatgtggtgcgatcggacctgaaggagaagaaggagaaggtggaggagaaggcaagccggaaagagcgaaagaaag

SEQ ID NO: 566053 - DNA, 100 bp, Homo sapiens
tgaatgatggtcacttcatgcctgtcctgggatttggcacctatgcgcctgcagaggtgctgccagtgggtactgaacttccagcaggtactctacccag

SEQ ID NO: 566054 - DNA, 90 bp, Homo sapiens
cgctgaatatcttcaggaaaatgggttccatgagaagtgacatcctcctcgaatcaaaagtggaaattaatctcactaatgactaccgtg

SEQ ID NO: 566055 - DNA, 75 bp, Homo sapiens
ggccgccgaatctccggccgaagagcggcggcggcagcggcggtgtggatgaggtcaccattgtcaacattttga

SEQ ID NO: 566056 - DNA, 100 bp, Homo sapiens
agccctcccgcgtccaccaccgcagcgtcaagcatcaggcctacgagttccagtttggcgcagcctacgcctggatgatgtgcgtcttcacggtggtcat

SEQ ID NO: 566057 - DNA, 49 bp, Homo sapiens
gatgtttgcctggtctatagttggtctgctgagaacagacccagtccct

SEQ ID NO: 566058 - DNA, 75 bp, Homo sapiens
tgcaagccgggcttcactggactcacctacgccaacccgcagggctgccaccataccacgaggaacccgaggccc

SEQ ID NO: 566059 - DNA, 82 bp, Homo sapiens
tcattaatgaagtaaagcccacagagatctacaaccttggagcccagagccacgtcaaacacctttggggagttgaagacgg

SEQ ID NO: 566060 - DNA, 75 bp, Homo sapiens
tgatcctgtggataaaatcgtatgggaggtagacatgtagcagtaaaaatagttaaaaatgtggatagatactgt

SEQ ID NO: 566061 - DNA, 51 bp, Homo sapiens
gaaataactcagctgaagcatcaggatgacagtgatgggattccgtggtca

SEQ ID NO: 566062 - DNA, 100 bp, Homo sapiens
cctttgttagaccaaatttaccacaactaataacaagcctttgtattcatttgaagataatgcagactatgtttatgatgttatgtggtcacctacccac

SEQ ID NO: 566063 - DNA, 100 bp, Homo sapiens
agatggaagtgatgtaccatcatgggtagcctttgataaacagggaaggacgtgcagctctcgttacctccttttgcatgtttaagtacatggctctgta

SEQ ID NO: 566064 - DNA, 100 bp, Homo sapiens
tatggcggaggcggaaggggaaagcctggagtcctggctcagtttttcgttggaatatacgttgcacatttatggcgattctgagtgtgagggcagactt

SEQ ID NO: 566065 - DNA, 83 bp, Homo sapiens
accgcgcgcagggcctgcagcgggagctggacggcgagcgcgagcggcgcgagaaagcaacatgagtgagaatgaggaagagg

SEQ ID NO: 566066 - DNA, 74 bp, Homo sapiens
cggattgctctgaggccaggaggggaaggtgtggctcattgactttaatccatttggtgaagtcacagattcac

SEQ ID NO: 566067 - DNA, 100 bp, Homo sapiens
ataggtgttcttcagcaccactgacaacacggttctgacagtatttcatgacagttcaagttctttcttcaaagagtcatcagaataacatggattgaag

SEQ ID NO: 566068 - DNA, 83 bp, Homo sapiens
gctgcccagatcatcctgaactgtttcctatgttattcgagatgaagtggagaagtacaaccgaaatggagtcaatgctctgc

SEQ ID NO: 566069 - DNA, 96 bp, Homo sapiens
gactaccgtggagagatcataatttggggttcaagattccagacagccagctaaaggtgtggatgagcaaatacggctggagtgccgacgagtcgg

SEQ ID NO: 566070 - DNA, 96 bp, Homo sapiens
ccgtagtatgggatgtggtatgataccagcaactggtctattatatcatttaaaccacatggctatctaaagaggcaaaattgaagaagtagttct

SEQ ID NO: 566071 - DNA, 90 bp, Homo sapiens
atgacggagggccgccgatgtcaagtacatcttcttgatgacaggaagctggaactcctagtacagaacgtgttttacccacaatccccc

SEQ ID NO: 566072 - DNA, 98 bp, Homo sapiens
cgaatcggaaccgtcgggccgcagccgccggcaatgccgcgaaggaaggtctcggcgcggaagatggccggcggcgtggacggccccatcgggatccc

SEQ ID NO: 566073 - DNA, 74 bp, Homo sapiens
gaaggtgtactcctttctattttaaagagccaagcctcagagagagtaaacatggaagtactaacttcattcca

SEQ ID NO: 566074 - DNA, 100 bp, Homo sapiens
tggtcgcctgggtccctctgagccccggggcatctatgccagtgagaggcccaagtccctagcttcagcgcctgctcctggtcatcactaaccagattta

SEQ ID NO: 566075 - DNA, 49 bp, Homo sapiens
gaaagattacctccaaagatatcgtccagttacaacacagggatcacaa

SEQ ID NO: 566076 - DNA, 100 bp, Homo sapiens
cgtggcggtgaagcgtgaggccggcatcgtctttccgtcctctgaggcgacggccgcggctgcacagaatcactgagcttcagctcaaacttgagagtgc

SEQ ID NO: 566077 - DNA, 96 bp, Homo sapiens
ttcatgggcctcaaccttatgacacggatcctctacaccttgggaggtgataacctttatgatggtattgaggacatgattggctatcggcccggg

SEQ ID NO: 566078 - DNA, 101 bp, Homo sapiens
agtgagcagtccagaaagcggcttatcgaacagagccgggagttcaagaagaacactccagaggaaccagattttattgatgatatagaagaaaaaactcc

SEQ ID NO: 566079 - DNA, 75 bp, Homo sapiens
gcggagcagctggcgcagggggctcaggaaatcatcgagttccccatcctaaagctaaatggccggaccatggag

SEQ ID NO: 566080 - DNA, 100 bp, Homo sapiens
cggggaagcagcagcggccaggatgaatcccaggtgctctggagctggatggtgaagaacattgaaattgatagtccctatgaaatcagccgtgccccag

SEQ ID NO: 566081 - DNA, 100 bp, Homo sapiens
gctcaaagaaagatgattataacgtgttacgagtcagtttttagtgaaaaaacattgagctaggagccaagacccatctcttcactattttggtattgtg

SEQ ID NO: 566082 - DNA, 75 bp, Homo sapiens
ttgactgcaggaagaacgtgctgggtcacatgcagcaggaccctgatgctcccataagacagaaaatgccccttg

SEQ ID NO: 566083 - DNA, 76 bp, Homo sapiens
cagagctgtaccagtacacggcccacgttgccagaaatcaactgatgagccttctgagaaggatgctctgcaacca

SEQ ID NO: 566084 - DNA, 83 bp, Homo sapiens
tgaagatccaacccagtgctttctgctttttgccaaccagtgcttacttttctggtgcagaaagattgttgggaacagacagg

SEQ ID NO: 566085 - DNA, 101 bp, Homo sapiens
aagccagaagaaatcaacctgctcaccggggagtctgatacacagaaaccagcctggacaccaagtctgtgtcagaaggccacctcaagaggaacatcgtg

SEQ ID NO: 566086 - DNA, 100 bp, Homo sapiens
cctgtccccagcctgcacctcaagctcctcagcgtggtgcccgtccctgaaggacatatccctgggcagccagtcaccccgcactgggtcctggatggac

SEQ ID NO: 566087 - DNA, 100 bp, Homo sapiens
cctcaggacttgagtaacagcaacatggctaagaaatggcatttcaaaaggcagtgaaagggacgattcttgttggaggaggtgctcttgcaactgtttt

SEQ ID NO: 566088 - DNA, 50 bp, Homo sapiens
caaggacgagccggggcgctgaagaagcttctgtcggaagagaggtttgt

SEQ ID NO: 566089 - DNA, 74 bp, Homo sapiens
agaaggatgtaaaggatggaaaatacagccaggtcctggtgcttgatggtcgaggccatctcctgggccgcctg

SEQ ID NO: 566090 - DNA, 90 bp, Homo sapiens
aagagcaagcctaactcaagccattggcacacaggttggatggcaagcatgtggtgtttggcaaagtgaaagaaggcatgaatattgtgg

SEQ ID NO: 566091 - DNA, 83 bp, Homo sapiens
cgtcggtgggcgcaggacgagcaagccgctgccatggcccagacactgcagatggagatcccgaacttcggcaacagcatcct

SEQ ID NO: 566092 - DNA, 75 bp, Homo sapiens
tcaagacttttcctttaaagctggccagtggaatttatcatggcatccagcattgaccactacaagtaaaatgcg

SEQ ID NO: 566093 - DNA, 75 bp, Homo sapiens
gatgtctcatatgtctcaggcttccatgcagcctgccttaccgatcacaaacaacatcgacccagtgggaagaat

SEQ ID NO: 566094 - DNA, 100 bp, Homo sapiens
gttaaatttggtcaacaaaatccacgtcaggaaagaccacagcaagattctttcattcgtctcctcctagcctgggggaccaggctcgaactgaccctgg

SEQ ID NO: 566095 - DNA, 90 bp, Homo sapiens
gtgttggaccttccggagcttctcagaagacagagggttttcttttgagccctactgccaataaagggaaaataagagatgctcatcgac

SEQ ID NO: 566096 - DNA, 101 bp, Homo sapiens
cccaaagccctaacctgtccagccagagcatgcgtctcagcagagctgtcttcccaagcctttgatgacaaaccagacatctacgagaacctggacctccg

SEQ ID NO: 566097 - DNA, 100 bp, Homo sapiens
cagcattctatcatggaaggaggagatgaagggcaagggccaaaatgatgttccctgaatgtggtttctacggaatgtatgataagatcctgctttttcg

SEQ ID NO: 566098 - DNA, 120 bp, Homo sapiens
acagggctgaggaaccatgtctccatccccgaccgccctcttctgtcttgaaaccagactgtgatgactgggagagcgggctgaatgcaatggagtgtgcattacatttggaaaaaaatg

SEQ ID NO: 566099 - DNA, 51 bp, Homo sapiens
ggcccggtcaggccccatactcagattcttggtgccaccattgagaactcc

SEQ ID NO: 566100 - DNA, 100 bp, Homo sapiens
caaagataacaatcagtttgccagtgcctctttggacaggactatcaagaggctgggaggcggcagaatgcagccagaggagggcacaggctggctgctg

SEQ ID NO: 566101 - DNA, 100 bp, Homo sapiens
atgctgcctctcttctgacctccgctaagaaacagggagatcattacatcctcaatggctccaagggtgtgaataactttgtgcagtacaaatttagtca

SEQ ID NO: 566102 - DNA, 76 bp, Homo sapiens
gataatggtaacaatctgttgccatttcagtttgctgacctctctgaggctgccaaccggaacaatgacgccctgc

SEQ ID NO: 566103 - DNA, 96 bp, Homo sapiens
gcagcggcacctacggcgacgtctacaaggtagtaaacctattgatggcaattttgctgactgtggaagtgactcatccaaactccatgccagctg

SEQ ID NO: 566104 - DNA, 90 bp, Homo sapiens
ggctgctgaggccttgaaggccacttctgcttttctgaggccaggagtggtggctcacacctgtaatcccagctctgggaggccaaggcc

SEQ ID NO: 566105 - DNA, 90 bp, Homo sapiens
tacttggagctgttagaaaagcagaggctatactttaagactgtgaaagagttcaaggagtttgcagaaaaaacttcagcatgtgccagg

SEQ ID NO: 566106 - DNA, 100 bp, Homo sapiens
cacgatgcacttaatgaccctaaaaatggcgattctgcaaccaagcacctgaaacagcaggaatctcttgatgaagttactataaaagacactttggaag

SEQ ID NO: 566107 - DNA, 100 bp, Homo sapiens
gaacaagttaccatgctggtgtagcagtgccacgggtcggagacagcacggaaggagagacaagccttacagagacaacgtccagcgccggacaggacgt

SEQ ID NO: 566108 - DNA, 98 bp, Homo sapiens
caggagttcatctacccggagaagcaggagccctactcggcagtacacctccagcatgagagccaaatacctcgccacgagccagcctcgccctgact

SEQ ID NO: 566109 - DNA, 100 bp, Homo sapiens
cgaggtggccgaatcttccttcaggatatcaagttggttgaatctggcgatgtggaacccatggatatggagggctgactatatacaccatgttttttcc

SEQ ID NO: 566110 - DNA, 90 bp, Homo sapiens
tgctcgggaagagggagagcaaacttggctcagcccacaattaatggatgcctcgaagttgacgtacatatatattcagaaatgttttgc

SEQ ID NO: 566111 - DNA, 75 bp, Homo sapiens
gcttgagagaagccaaggacccgactcagaaacccaggctcagctatgtgaaccatgcagaggacctggcctcca

SEQ ID NO: 566112 - DNA, 100 bp, Homo sapiens
gacttgttaaaaagatcaatagattgcctacccccattgcaggactggtctccaattgagaaacatggcactgtttttcctgcactctacccacctattg

SEQ ID NO: 566113 - DNA, 80 bp, Homo sapiens
cggagccgcccgaagcgcccgcgagccgccggccgggagggatccgggtcctgaagcaattctgtggtgttcttggtcac

SEQ ID NO: 566114 - DNA, 75 bp, Homo sapiens
aaaattggaaaagttgttcatcaaccagaaatcatatggaagagggactcagtgaaagtaaagaatatgatcaat

SEQ ID NO: 566115 - DNA, 100 bp, Homo sapiens
tggtgttcgccaagatgaagggctacccacactggccggcccgggttctgggccggagaaggggcgacgttcgggcaccccccgaatggacaatctttcc

SEQ ID NO: 566116 - DNA, 75 bp, Homo sapiens
ctgctgtttaccttggcgaggcctttcaccaagtccatgccaagccctataccaagtcctgttttggggcgaaag

SEQ ID NO: 566117 - DNA, 140 bp, Homo sapiens
agaaacacccacatacaggagacaccaaagaagagaaagacaaggatgaccaggaatgggaaagccccagacatatgtagagtgtgtcggtcagaaggaacacctgagaaaccgctttatcatccttgtgtatgtactgg

SEQ ID NO: 566118 - DNA, 50 bp, Homo sapiens
caagagaatagttcggatcattcagttcctctttagagagcaaagaccac

SEQ ID NO: 566119 - DNA, 99 bp, Homo sapiens
gcttagtgaatatgatcaagttctcgtggagtcagacaatgagatgttcttaatagttgctcctctttctgtcctctacaactggaaggatgaattgga

SEQ ID NO: 566120 - DNA, 100 bp, Homo sapiens
atggaagaaccattgttagtgaacgtggacaaagctgttgtctcagggagcacagaaaaaagtcctccatacattttctccccaattccattccttgggc

SEQ ID NO: 566121 - DNA, 50 bp, Homo sapiens
aagaagaactcgcaaaagctcagagggttatacattggctcttcaaagac

SEQ ID NO: 566122 - DNA, 82 bp, Homo sapiens
ttctaactcattgtattcctcctgagataataatgaagatgggcggaagccatttccaattaaccatggtgaaactagtgat

SEQ ID NO: 566123 - DNA, 74 bp, Homo sapiens
tggatccttatcccatgggcaaacctcctttgcctagaggctatcacacgtacttcctcctgtgctggttccaa

SEQ ID NO: 566124 - DNA, 75 bp, Homo sapiens
cccggcccacagtgggggtgtgcaaacccgagagaactgggtaacatttgtcgatcacccattgcagaagcagtt

SEQ ID NO: 566125 - DNA, 90 bp, Homo sapiens
tgaactcaacttctgaaatttacagaaacaaactacatctcagggtaagtttgttcctgtcaattgggaaccccctcaaccacttccatt

SEQ ID NO: 566126 - DNA, 83 bp, Homo sapiens
cggcgggaggataaagaccaccacgaggaagatggatggccgagagtacccagacgcacagggctttgctgctgatgtccggc

SEQ ID NO: 566127 - DNA, 100 bp, Homo sapiens
atttcttggattccagggaagctccccgggacatccaggcacgaatgcgaatccacaacaacagggtggggcgccagggcaagtgtccagagaatggctg

SEQ ID NO: 566128 - DNA, 109 bp, Homo sapiens
aaagatgagaaaggagacccagtgccttacagtatcatcaataattacttttccattggcgtgtggcttttcatggcctgccactgaaaatcaagaaagaaccccacag

SEQ ID NO: 566129 - DNA, 101 bp, Homo sapiens
ggcggcaggggccggagggcccacaacccgcagagacttctactggctgcgctcctttctggccggagggaactgggaacagccaggtgccccaaagcaaa

SEQ ID NO: 566130 - DNA, 85 bp, Homo sapiens
gtgccatccattgaatgggttgaacttttcacaggcccagcagcaaagaaacctggataacatcgtcttgcaacaacccagaata

SEQ ID NO: 566131 - DNA, 75 bp, Homo sapiens
atcaggctgcaggaagaagaagggacacctttcacagctatcagggaagcttgataaagatgacatggtatacat

SEQ ID NO: 566132 - DNA, 50 bp, Homo sapiens
actcgctcccttgatgatcttgagaattagagcccattgggaacgatgcc

SEQ ID NO: 566133 - DNA, 50 bp, Homo sapiens
tatgtctttattactggagttcattggcgacagcgatgaggaaaagaaag

SEQ ID NO: 566134 - DNA, 76 bp, Homo sapiens
gtatgcgaaaacagccaaaagaaaggccagcacctgaagaattgatgatatccttggaacagaagatcttattgtg

SEQ ID NO: 566135 - DNA, 75 bp, Homo sapiens
atcgcggcgccggagttgcataagggagatggacagcttaatgaagacaaactgaaggggaaactgagatcctta

SEQ ID NO: 566136 - DNA, 98 bp, Homo sapiens
gtgtgactgaggtgaccatcatagaaaagcctcctgctgaacgtcatatgatttcttcctgggaacaagtgattgatatgcccgagcacaaccctggc

SEQ ID NO: 566137 - DNA, 100 bp, Homo sapiens
gaagctattcagacacccctgaaatctgccaaaagactactgttcgaagatttttggaagaatactgagaacggcataaagtgaagatcgacatttaaaa

SEQ ID NO: 566138 - DNA, 96 bp, Homo sapiens
agaccgtgaccgagagcgtgaccgagagcgcgaatatcgtcatcgttagaaggtgccaggaccattgacaccagaaatggaggcacggcaggctac

SEQ ID NO: 566139 - DNA, 50 bp, Homo sapiens
aacgaacaacgctgctattataaatcgagggcacccagaaactgctcaac

SEQ ID NO: 566140 - DNA, 113 bp, Homo sapiens
ctttactagagcaagagaaggagccctggatggtgaagcgagagctgacaggaagcctgttctcaggtgctggagaatctggtaaaagcaccattgtgaagcagatgaggatc

SEQ ID NO: 566141 - DNA, 82 bp, Homo sapiens
gccgctctgggatcccggccaccagcaattgtccggtgcagagcattgtagaccaaggagccatggataggagaagtatggg

SEQ ID NO: 566142 - DNA, 75 bp, Homo sapiens
cattggcgaccagcgcttcacggaatagccaggccagaagaaggaaggcctgtggtgagtgggacaggaaatgac

SEQ ID NO: 566143 - DNA, 82 bp, Homo sapiens
gctaaattagaaaagggagtattttgtcaaagttgaagaccctctttcccagctgcccgctcctcagcacccgaagattcgc

SEQ ID NO: 566144 - DNA, 75 bp, Homo sapiens
cccgcaggaactcggcagaggagaaattcagacggctcccgaggaatttcttgaggttggcaaaaagcagcctgc

SEQ ID NO: 566145 - DNA, 90 bp, Homo sapiens
cgcaaggccgcccgggaactgctgacgcttgatgagaaggacccacggcgtctgttcgaagtgaacgagataattgggagagacatgtcc

SEQ ID NO: 566146 - DNA, 75 bp, Homo sapiens
aagggaatcgcaaggctcttccctgaccattttctactgtccctgcgcgaggctggttgaactcatggacctgat

SEQ ID NO: 566147 - DNA, 99 bp, Homo sapiens
ctgctaccccactcctgggccgtccctgaagctctgcagccagatggaacagctggagcaagagaaccagcaactgaaggagggggctgcaggagcagg

SEQ ID NO: 566148 - DNA, 90 bp, Homo sapiens
gcaagagtccgtccaacaaggctctgttagaacaaggcaataaactgcgtaatgccatggtgatttctgcaatgaaatcaagcccagaga

SEQ ID NO: 566149 - DNA, 100 bp, Homo sapiens
gccgggccccgcgagtgccatggcggccgccctgggagcgagcggaggagcaggcgccggagggtgttctaaggatacattttattgaagctcaggatct

SEQ ID NO: 566150 - DNA, 113 bp, Homo sapiens
acaccatcgtgcctgctatcgccgagttctacaacacgagctacagagacttctgaagtggagagtctgcgacctcctcggttcttcaatgaagatggagttatcagaccgta

SEQ ID NO: 566151 - DNA, 100 bp, Homo sapiens
agatcagaggtagtcggacctttcccgctggcgcgcagcctcagctagaaacaaatgccaggagagctgtagacagaggatatgtccaagtgcttttaac

SEQ ID NO: 566152 - DNA, 82 bp, Homo sapiens
acgctactccggacgcaaagctgtcatcgtgaaggtccgcgggagagctgtggggcttggtgagtgtttcgtggcctctcgg

SEQ ID NO: 566153 - DNA, 90 bp, Homo sapiens
gcagtggatcaccgccctggagctggccaaggccaaggctgtccgcgtgatgaacactcattcagagtggacccagagggacctggaacg

SEQ ID NO: 566154 - DNA, 100 bp, Homo sapiens
ctgcaggcgtccggcttggacgaaccgccgttcccagtgctgggaccctttaagtatcctgtggagcacccagacaaattcctgaagtttggcatgacac

SEQ ID NO: 566155 - DNA, 88 bp, Homo sapiens
tgaaaaatatatccgcagggttcggatgagaccagatatgattatggaacttgctgtacatgctcagtttattacaactacttttagg

SEQ ID NO: 566156 - DNA, 60 bp, Homo sapiens
attaaattggaacttacctttagagaactaattgaaaacatccagtacagacctttctga

SEQ ID NO: 566157 - DNA, 90 bp, Homo sapiens
cggaatggaattagcaaacttaaggatggagcattttttggcttgaataacatggaagaactgccagattacctgtccctaatactgagc

SEQ ID NO: 566158 - DNA, 73 bp, Homo sapiens
acgaatgggacaagatcccgtccatgaatcaggacttctgcacggacctggccgtctccagtgccaacttcat

SEQ ID NO: 566159 - DNA, 102 bp, Homo sapiens
agggcgtggctgttccagcatctaacagcttatcagtaacatcagaacaaataaatcctcatagtactggagctcggaagacagaaactagagtcgaagagg

SEQ ID NO: 566160 - DNA, 113 bp, Homo sapiens
cctgcccgccggccccgacatcctgcggacctactcgggcgccttcgtctgcctggagattgtaaagaacaagcacctttggagatgagtatgcatccagcggcaagcgctcc

SEQ ID NO: 566161 - DNA, 75 bp, Homo sapiens
cggcactacagagctcccgaggtcattttgggtcctagaccagaaggagcacaggctggatggccgtgtcattga

SEQ ID NO: 566162 - DNA, 50 bp, Homo sapiens
aagcataagctgccaaaccaaggaatcccagtcagaagttccagcctgcc

SEQ ID NO: 566163 - DNA, 80 bp, Homo sapiens
ggctgtgagcaagaggaagctgcagcccacccgggcagccctcaccctggtctcctctgagcctccggcctccataagac

SEQ ID NO: 566164 - DNA, 96 bp, Homo sapiens
ttcagcagggctctccccagatgggaggacaaacaggattgagaggcccccagcctcttaagccaatggagatcttcgtggatgatgagacgaagt

SEQ ID NO: 566165 - DNA, 100 bp, Homo sapiens
tcaaagttgctaacaaggagaaaactgttcaggatttaaaaactggaacggtgaaggtgacagcagtcggttggagcgagcatcccccaaagttcacaat

SEQ ID NO: 566166 - DNA, 100 bp, Homo sapiens
cttctacctaattttcaccaatgaggcagcctggcatcctcgctacaacctcattgttgtgggccgatacccagatcctaatttcaaaagttgtacccct

SEQ ID NO: 566167 - DNA, 118 bp, Homo sapiens
gattatgccttcgtacacatggagcgggcagaggatgcagtggaggccatcaggggccttgataacacagagtttcaaggaagcggggagaggtggtgagagatgacccctgttgagg

SEQ ID NO: 566168 - DNA, 100 bp, Homo sapiens
cctgaatgaagatctggaggtgaaaatagagtggaatgttggctgtccgtgaaaaccgctacattgtcctggccaaggacttcgagaaagcatacaagac

SEQ ID NO: 566169 - DNA, 92 bp, Homo sapiens
cgaccgttggtgtctggcacgcgccaccccgatgtaccaggaacgtcaaggtcgtgggaaataaaaggcagttctacacagactgcagcaac

SEQ ID NO: 566170 - DNA, 100 bp, Homo sapiens
gggattacaggcatgggctaccacgttcagccatgattgtttccagggtgatttgctacacatgttgggacagttgaatttctgaatgaaaagctggaaa

SEQ ID NO: 566171 - DNA, 80 bp, Homo sapiens
acccagaaatacccaccagtaaagtttttatcagaaaaggatcggaaaagaattttggggcataaggaaatggtggcagg

SEQ ID NO: 566172 - DNA, 75 bp, Homo sapiens
acctctaacacagtacctgttaacaacacagggaaaaatgcattttttgtgggagatcttggaaagattgtgaag

SEQ ID NO: 566173 - DNA, 90 bp, Homo sapiens
agaagaaaaatgtcccccttggtgtttggagtagatgacaatcaggattataataggcctgttatcaacgaaaaacataaagatctaata

SEQ ID NO: 566174 - DNA, 101 bp, Homo sapiens
cgggatggtgccacaggaggctgtgcgggccccgctccgcttcgaatgggttttagatggagcaggattagatattgatttccatcttgcctctccagaag

SEQ ID NO: 566175 - DNA, 73 bp, Homo sapiens
ctgtatcaaactgtccactgaaaatgccataggaaaaggatacagagtagagtttcatgaacctgaaacttgg

SEQ ID NO: 566176 - DNA, 90 bp, Homo sapiens
cggcgccgcgccctcggcctgcacgggtgtgatgaatgcagactctgctaccattttggctgtttggatcctcctttgaaaaagtctcct

SEQ ID NO: 566177 - DNA, 98 bp, Homo sapiens
cggcgggagctgggtcaccggcttgaggggctgcgtgaggcgcggaggcagtagtttatgccaacgtgacttcattcatacagatgaaccaaggatcg

SEQ ID NO: 566178 - DNA, 74 bp, Homo sapiens
cccgggcccaggccccggcagcgcctgggacaagaatggcctgtccagaagacagccaaatacatccttcaaac

SEQ ID NO: 566179 - DNA, 100 bp, Homo sapiens
gaaagctggaatcaggatctatttgtaaaggccagcagcttgtgatgatgccaaacaaggtcatgcaaggatcagatgtgagaggaatggagaacctcag

SEQ ID NO: 566180 - DNA, 95 bp, Homo sapiens
ctgcttccttcggccttgtccgagcaaacagaggcgctcatccacagagccacatctgttagttgagtcagcagatactggagttatttgaaaca

SEQ ID NO: 566181 - DNA, 100 bp, Homo sapiens
cttcgggagttgagccacgagctgttgtgcatccagaggtggaattggggcccgacatcgctattgcggttccgaggcagtgggaagagatgcggcccct

SEQ ID NO: 566182 - DNA, 100 bp, Homo sapiens
gaagaattggtatttcaaatgaccaccatgttgcaaaaggtatgataagtattatcagcaacataatagttctgggcatcttcattaagtacaaggaact

SEQ ID NO: 566183 - DNA, 100 bp, Homo sapiens
ctgagcgggactggggagcagaatgtgttccctgtctacttgaaacacaggcccttcataacacaaggcttttatctgcttattccgccattgatcccag

SEQ ID NO: 566184 - DNA, 83 bp, Homo sapiens
tgaaaaataccacgacaaaaccaccctactcagagtcaagatctccactgaagttggcatcacaaatgttgatctttccaccg

SEQ ID NO: 566185 - DNA, 100 bp, Homo sapiens
aacgcgtctgctctgaacggggttccagtggtggtgtcgacccacacagttcagcacttagaggaaggactgaaatgcaactgcagaagcaacatgtgac

SEQ ID NO: 566186 - DNA, 78 bp, Homo sapiens
actgagcgtgctcccctctgagactggagtgagagggtcttctgtatgtccgtggttcagaccctgtattaaagcttt

SEQ ID NO: 566187 - DNA, 98 bp, Homo sapiens
tatgtgatgatgctgaggagctggagagaggtggtgaagcagtattttccaatttgaagattcatttgaaggtggctcctgccacctgctaatagcag

SEQ ID NO: 566188 - DNA, 100 bp, Homo sapiens
aaggaggcccgggcctgtccctattacgggagccgccttgccatccctgcagcccagctggtggctcggcccgatgtcgtggagatgcacgatgtgacag

SEQ ID NO: 566189 - DNA, 50 bp, Homo sapiens
cgatgaagaggatgatgtttttggtgaagaatgctatcttctttgagaag

SEQ ID NO: 566190 - DNA, 100 bp, Homo sapiens
gccacttcaaaatcagacctctgtggcagcattttttccagaacacaaaagctggagtcacatcagaagccgcgcagactatcaccacggctcctgatgc

SEQ ID NO: 566191 - DNA, 89 bp, Homo sapiens
gtacaaacaaaaaccaactgaagcagctgacagaggaaaatatgcccaggttaccaacaatcctgaaaatgatggatgtataaatgcag

SEQ ID NO: 566192 - DNA, 75 bp, Homo sapiens
cttgcatgatggaaacaccatggctgcggcggcccagctctctctgacacagtctggatgtggatagtgaagcta

SEQ ID NO: 566193 - DNA, 100 bp, Homo sapiens
agagatgctgaaccagacggacccatcatttaagaggtcacaagaggaccagattaaaaatgctattgataaactttttgtgttgtttggagcagaaata

SEQ ID NO: 566194 - DNA, 50 bp, Homo sapiens
ctgggtcccaatgatcaatacaaggtgggattgttcctccagcagctcaa

SEQ ID NO: 566195 - DNA, 100 bp, Homo sapiens
cggcggccagaggaaccccgaggacactggggttgggaaatcaagcatcgtgtgtcgatttgtccaggatcactttgaccacaacatcagccctactatt

SEQ ID NO: 566196 - DNA, 83 bp, Homo sapiens
cctatccgcggctctgatgaaggtccacctaatcatcctgtgaaagtggtttctctatggaaagctttgtttgcttcctacaa

SEQ ID NO: 566197 - DNA, 82 bp, Homo sapiens
aaacagctggctaagctcatcattgttactgctctgcttatgataatgtcaacaaagttcgagtagctatcaagaaaatcag

SEQ ID NO: 566198 - DNA, 75 bp, Homo sapiens
gctaatgtcagcagacagattgaggacactgtattatacggttactatagccaaatttgagtccctctttaggac

SEQ ID NO: 566199 - DNA, 100 bp, Homo sapiens
actttggttacctatgtacctgttaccactttcaaaagacacagcattgttggttttgccatgtactattttacctatgacccgtggattggcaagttat

SEQ ID NO: 566200 - DNA, 83 bp, Homo sapiens
cctcggccttccgacgtgggcggtgggccccagccccacagaccagcccagcattcaggtatttctgggaaaagccagcttct

SEQ ID NO: 566201 - DNA, 97 bp, Homo sapiens
gaagcaggcctttctccaccaaggaaaaaacgagaagaccccaaaaccaggatattccccgagtccctccggtggctaatggccacccagcagtttg

SEQ ID NO: 566202 - DNA, 75 bp, Homo sapiens
tctatagtttccagatggctctaacctcagtgagtgcagcagctgccccgagccccgtgcttggcaacattcccc

SEQ ID NO: 566203 - DNA, 74 bp, Homo sapiens
gacttggagctgccgccgccgggactcccgtcccagcagcaaattgtggctactaatttgccccctgaagatca

SEQ ID NO: 566204 - DNA, 50 bp, Homo sapiens
ctcccgggtagctgggactacaggagccgagccgagccacccactcttgt

SEQ ID NO: 566205 - DNA, 75 bp, Homo sapiens
aaacgcagaaggactgcctcactgagcaaccaagagacctcagcagccatgtcgaagccccatagtgaagccggg

SEQ ID NO: 566206 - DNA, 90 bp, Homo sapiens
cggtgcagaagtcattgatacacctgtatttgaactaaaggaaacatcgtgggaatcggccagtgcctgctgcatggcatgacggtggtg

SEQ ID NO: 566207 - DNA, 74 bp, Homo sapiens
gctcccttccccctctgtgggtcccgcgaggagactctcgggctttgagggctctgatacttgtgctcaatgtg

SEQ ID NO: 566208 - DNA, 101 bp, Homo sapiens
ctctggaagcactgcgcctctcgatccagacggactcccctgtgtgggtgattctgagcgaggaccgccgggagagcctgcccacctccccaccctggacg

SEQ ID NO: 566209 - DNA, 80 bp, Homo sapiens
gggagctggacggcgagcgcgagcggcgcgagaaacggtggagacacagagcaccagctcagaggagatggtgcccagct

SEQ ID NO: 566210 - DNA, 90 bp, Homo sapiens
ttttgatgataccttttctatatggattacaatttgatcgctgggaattctccaccttaaagaaggccctgggcagtgacggggttcggg

SEQ ID NO: 566211 - DNA, 75 bp, Homo sapiens
gtccgcggggcagacgtcggtgtatgccctggatgagaatgattgttgatccatttcagatacttgtggcagcaa

SEQ ID NO: 566212 - DNA, 75 bp, Homo sapiens
ttgacgtggagagataaagccgagcactgatcaggatcctcatgaccagccaaagagaagaagaattaggaagca

SEQ ID NO: 566213 - DNA, 82 bp, Homo sapiens
cactgtctctccgacgcaagactgtcccggcccggtgtaaatgagcaaagatggatcaggaaggtgggggagatgggcagaa

SEQ ID NO: 566214 - DNA, 127 bp, Homo sapiens
ccgtggatccgctggagcggagccggccgtacgcggtgctgcgagggcagaacctggatgatgtgatgccagccacttactgtgaaattgatttagataaagaaaagagagatgcatttgtatatgc

SEQ ID NO: 566215 - DNA, 99 bp, Homo sapiens
agcagtatggcttccagtacccccttgccatggcagcaaaggcggcgactggcggcgcgatggacctgaccgggctcctgctggacgaagaaggcacct

SEQ ID NO: 566216 - DNA, 101 bp, Homo sapiens
gcttgaccgagatgctgcgggcctgtcagttatcgggtgtgaccgccgccgcccagagagctcagaaatatgctcagcaagtcttgcagaaggaatgtcgt

SEQ ID NO: 566217 - DNA, 100 bp, Homo sapiens
ggcacatcctctcggtgttcccgctggcggcgggcatcttcttcgtgaggctgctcttcgagcgataactccaggaggaaaagtagggatgggtcagcat

SEQ ID NO: 566218 - DNA, 100 bp, Homo sapiens
caccacctttacagtaaagacgctgcgaattgacgccttttataataaagacacttatcttgcccaagagctgggagcatattaatgaaaagtgccataa

SEQ ID NO: 566219 - DNA, 100 bp, Homo sapiens
aagaaggagcgtcgcttcacctcggccctggtctccctcctgaacccgtgtgccaacatgaaggtgtgcaatgaggaccagaccaactgcacagtgccca

SEQ ID NO: 566220 - DNA, 82 bp, Homo sapiens
ctggctgctggagcttgtcaccaccagggccggatcgtggcacccagaggctgccaggactttggctgggacccctgctttc

SEQ ID NO: 566221 - DNA, 95 bp, Homo sapiens
cgtacccgccaagctgtcatcacaaaagagttgattgaaattatctctggtgctgcagctctcattcctctgaatattgatttgctgaatagccc

SEQ ID NO: 566222 - DNA, 98 bp, Homo sapiens
gggttccctactcccctgctatccccaacaagaggaaagacacacctaccaagaagccagtcaagcggccaggacatgatccacatcgcggacaccaa

SEQ ID NO: 566223 - DNA, 89 bp, Homo sapiens
tttgaatatcgtaagcgcacgtttaaacatctcaagcctgattacatcaaccccagagccgtgcagctgggctcccttctcgtccgcgg

SEQ ID NO: 566224 - DNA, 125 bp, Homo sapiens
cgtctcgtactgtcgccgtcaccgccgcggctccggccctggccccgatggctctgtgcaacggagactccaagggccgttgctccagggagaactgcaaatatcttcatccacccccacattta

SEQ ID NO: 566225 - DNA, 82 bp, Homo sapiens
gcggcggcaacgagggaatagtggacgaactgcacgtgtacaacacgggtcagcccaaggccaaccccactgtcactctgtt

SEQ ID NO: 566226 - DNA, 100 bp, Homo sapiens
cacctgcagctgggctccgttctctatcaccacaccaagaacagcgagcaggcgcgcagccacctggagaaggcggaggaacatatgcagcagaaaaaag

SEQ ID NO: 566227 - DNA, 100 bp, Homo sapiens
gctgaagtgaccctttcacctcagtacccaaaagtagctggaattacagatatgctgtgatagcatttggatgtgccagctgtccaaaattaacttgtgg

SEQ ID NO: 566228 - DNA, 80 bp, Homo sapiens
cttgtcattcccctagagatggggaccatgctgcgctcagaagggctgtgggacagatgatgtctaccatgttctaccca

SEQ ID NO: 566229 - DNA, 90 bp, Homo sapiens
cgcccgggaactgtgcgccggacccgcgtgcaacgaagtggagcgcgcccctgcccggggcccggctcttccgccctctctggatgaggg

SEQ ID NO: 566230 - DNA, 100 bp, Homo sapiens
agcggctgaggaggggccccagcagcccccgaaggccctatcaggacatggagtatgaaagacggccttggatggtatactgtaaattcagcatatggag

SEQ ID NO: 566231 - DNA, 50 bp, Homo sapiens
gagaggttggcaacaaaggagccaagttcaggcttcagagagcccctgac

SEQ ID NO: 566232 - DNA, 101 bp, Homo sapiens
aagcgcagggggacggggaccagcagctgtcgccgccgctctcaggagatacaactcgtcaacgaatcaaattcagtgatgacagagtatgcaagagtcac

SEQ ID NO: 566233 - DNA, 82 bp, Homo sapiens
ccgctgcctttgccgccaccatgcccaaaacgctccttcgagaactcatagaacggaagaccagctccttggatcccaacga

SEQ ID NO: 566234 - DNA, 83 bp, Homo sapiens
aggcctgcgaaggaaacttacccaaagggaagtctatatgtgtcacaaagatgtctacacggaactgccagggaatggactca

SEQ ID NO: 566235 - DNA, 75 bp, Homo sapiens
gaaatccacaaggattcttttcaatacatcctaaaacagatgcctgtgaggagccaccaacatttgaagctatgg

SEQ ID NO: 566236 - DNA, 89 bp, Homo sapiens
gggtacaaacagagagttctacagttactccaacattaccagggctgttgataatcaggtgtatgtggccacagcctctcctgcccggg

SEQ ID NO: 566237 - DNA, 82 bp, Homo sapiens
gcagttgtatgtgtagaaagtgaaatcagaggagatgtaactatcggtgaactccagtttgcttttgtgtgcttcctgctgg

SEQ ID NO: 566238 - DNA, 75 bp, Homo sapiens
gccgccagcaatattgtccagatgaaggacggctattcaagatctctggcagtggaggaagtctctttaagaaaa

SEQ ID NO: 566239 - DNA, 74 bp, Homo sapiens
ctcaaaaccaaaaccagacacagcacaagcagcggccacagaagaagcgtgtggagggccctggctccctgggc

SEQ ID NO: 566240 - DNA, 89 bp, Homo sapiens
gcacagttagacctctgtgaggatgaagatgtatcttttggtgaggattcatcaacctccagtatgatgtctgtgaactttgatgttca

SEQ ID NO: 566241 - DNA, 75 bp, Homo sapiens
tgccaccaccaccaccaccaccacagagtctgtggaagaggtggttcgaggtgtctttccgatagccgttcctgg

SEQ ID NO: 566242 - DNA, 100 bp, Homo sapiens
attcgcagtggtcgcttcttctccttgataaactcatcctgaaagtcgctgttgttctcctgctgagcaagaatggaggccccactggtgagtctggatg

SEQ ID NO: 566243 - DNA, 98 bp, Homo sapiens
ggtgccgagaagcagctgcgagatcagcccggaggaagaggagcgccgccgagtaaggcgcgagcggaacaagctggctgcggccaagtgcaggaacc

SEQ ID NO: 566244 - DNA, 100 bp, Homo sapiens
ggggaccggcgaccgctgccgaagcatgaagaaggggtaaggcgtgagcccccaagatttcacgataaacaggggtcacatgacgacagaagccaagagg

SEQ ID NO: 566245 - DNA, 83 bp, Homo sapiens
cgctgcccttggccaccacactgcctgccccacgagctgggaggcaggttttgtacggacattggctccctggattatcaaga

SEQ ID NO: 566246 - DNA, 101 bp, Homo sapiens
cagagctgtgtaggcaagatgagaaattgcgaacttgttcggccaaaggttgatggaaagttattatgctggctctgtactttatcgtacaaaagagtttt

SEQ ID NO: 566247 - DNA, 99 bp, Homo sapiens
attcacaacatgaataatggaagcactgtgttaatggaatttctcagtgacaacaacgaagcagcagctgctgatgtcttggagtttgttcgtgaagcc

SEQ ID NO: 566248 - DNA, 89 bp, Homo sapiens
caacttggtctgattttccaagctggggctggtgaattaccatatctccgtcaagtgcagtaaccagttcaagttggaagtgtgtcttt

SEQ ID NO: 566249 - DNA, 96 bp, Homo sapiens
ctcgccgcactcctgcagctggcccccgcccaggaaactacaagatccccggatcatgaccactctcagcgtcctccttggggtcgatctgggcag

SEQ ID NO: 566250 - DNA, 100 bp, Homo sapiens
gcatttgtctgtttgatatcaccaaactggaggatgcctatgtattccctggggatggcgcatcacacaccaaaggtttgaattttgggaagattttgaa

SEQ ID NO: 566251 - DNA, 74 bp, Homo sapiens
aacatttggtcagctgtttggagacattgcagaaggctctcaaaggttttagatggagcaggattagatattga

SEQ ID NO: 566252 - DNA, 83 bp, Homo sapiens
gccacttctgccctggcccccaagatcggccccctgggtctgatatctgtatgcccttggacagaaggtttggaaaagatgga

SEQ ID NO: 566253 - DNA, 87 bp, Homo sapiens
tctggacaagatgaccacactccaggaatgccagtgcatcttttgcacagctgccatttcataattctgaatcatgtctgataacgg

SEQ ID NO: 566254 - DNA, 75 bp, Homo sapiens
tctgaaacatggcaggctcggatgctggttatggaattagaatcaaagctaaatgaagcaaaagaagaatttacg

SEQ ID NO: 566255 - DNA, 75 bp, Homo sapiens
cttcagcagaggctgcagggccagcagaagaagatagtggtgagctggcaaagccaaagattggttttccagaga

SEQ ID NO: 566256 - DNA, 51 bp, Homo sapiens
ggactgggaggagcatgtcaacaggcaaataagggcgagactgaaaaatca

SEQ ID NO: 566257 - DNA, 75 bp, Homo sapiens
ccatcattgatgtggtgcgatcggtgttcccaccaactccagtccgtccagccttctccttctatgagactctgc

SEQ ID NO: 566258 - DNA, 95 bp, Homo sapiens
tcaactatgctagacagctgcaagctgaaaagtgcctgcaatttgccatttatttgtaataaggaggaagttaacatccctaataggagggttct

SEQ ID NO: 566259 - DNA, 75 bp, Homo sapiens
ttgtccgggtgcggataagggacccgacactgatatcaatgaactgagccatgttcaaatccctgttatgttgat

SEQ ID NO: 566260 - DNA, 96 bp, Homo sapiens
tcgggagatggaggaaaaggagatattacggcggcagatccgcctactgcagggcacacatccatagttgtgcacaaggatgagttcttcttcggc

SEQ ID NO: 566261 - DNA, 75 bp, Homo sapiens
caaagtctattactgtgcccgtggaaatccccagctcccctctgggtgaaaggtgtagcagtcactcggcctaca

SEQ ID NO: 566262 - DNA, 100 bp, Homo sapiens
ctcaatatctgtcttcggtggactccttcggcagtccacccaccgccgccgcctcccagaaccactcacgaattcttgtttggtgcccttgctgaactgg

SEQ ID NO: 566263 - DNA, 100 bp, Homo sapiens
ggaaccgcctgaaacagcctccggagtgtatggaggacgtggctccgccatgtcacagatgaccagaagacatacaaaaatcccagcctgcgggctcaag

SEQ ID NO: 566264 - DNA, 100 bp, Homo sapiens
tttgtgtcctgagatcaaatggcacttcattggccacctacagaaacaaaatgtcaacaaattgatggcccatgaaacccctgaaggccaccgccaccac

SEQ ID NO: 566265 - DNA, 82 bp, Homo sapiens
cagaagatgttgcacaagaaatgtaatgaagaagttagtactattattatctcccattttccagatgaggaaatttagttcc

SEQ ID NO: 566266 - DNA, 75 bp, Homo sapiens
cagcccccgcccgcagcctggacgacatcgacctgtccgccctgcggccaatggagatcttcgtggatgatgaga

SEQ ID NO: 566267 - DNA, 73 bp, Homo sapiens
tgtagaggaggctggagattccacccaaatcctcttctccaagaaggcaatgcatgaaccattgcaaacttgg

SEQ ID NO: 566268 - DNA, 83 bp, Homo sapiens
agttaagcgaaaagctggacaaattgacccagagcctgtgatgcctgtggagccgccaccaaaatgcagattttcgtgaaaac

SEQ ID NO: 566269 - DNA, 50 bp, Homo sapiens
gccgaggccggcggatcacaagaaaatcgacacagctctaattaaagctg

SEQ ID NO: 566270 - DNA, 100 bp, Homo sapiens
cttcgccttcggagagcagagtcaacacggagctggatgctgacaaatatgagaatgatccagaattagaaaagatccgaagagagaggaactactcctg

SEQ ID NO: 566271 - DNA, 75 bp, Homo sapiens
gcagcccgggcccaggccccggcagcgcctgggacaagcgtcacctgggaacttgttagaaatgcagaatcgtag

SEQ ID NO: 566272 - DNA, 75 bp, Homo sapiens
gtgcatgcttagaaatgtgtcagttcgtcttgctcagcagatatctgatgagtagtgactgaagatagacccaca

SEQ ID NO: 566273 - DNA, 75 bp, Homo sapiens
cgacgggggagacggagccccaggtactaggttttgacaagcttgcatcatgcgtgagtataagctagtcgttct

SEQ ID NO: 566274 - DNA, 101 bp, Homo sapiens
gaattgaagaggttagaagccatgctaaaagagagggagagtgatctttctagcaaaacacagctgttacagaaaaaagttgtctcaggtatagcaagtaa

SEQ ID NO: 566275 - DNA, 125 bp, Homo sapiens
ttgaatacattgatctggtcagcagtgatgatgaagagcctagcacctcttatactgatgcttttaaggataccggaaaaacacccgtggagccggaggtggcaattcaccgaattcgaatcacc

SEQ ID NO: 566276 - DNA, 83 bp, Homo sapiens
ttccaaagaagagtgagtagcttggttggtggtaccctaaaattagggcatgattaagagttgatctctctaatgtattagat

SEQ ID NO: 566277 - DNA, 95 bp, Homo sapiens
cgagcagcaagtcagggagcttaagttctggctgccggacacctttggctactcagcacagctcccccagatcatgcacggctgtggcatcaggc

SEQ ID NO: 566278 - DNA, 75 bp, Homo sapiens
cccccaggacgacgtgtacctggacatcaccgtgctcttaaagttccgtacagataaaggaagagatcccagttc

SEQ ID NO: 566279 - DNA, 100 bp, Homo sapiens
aacttggaatcttggacctcatccaggaatttttcacagacaacctatgggacacactcccttgctcatggcaggaagcattggatggactgaaaccacc

SEQ ID NO: 566280 - DNA, 100 bp, Homo sapiens
cggcttctgagacggcggcagcagcggcattcagagtttatagaaacctattcaccaaaatggcatcctggttatatgaatgtctttgtgaagctgaact

SEQ ID NO: 566281 - DNA, 101 bp, Homo sapiens
cgcaggtgccgatggaagtccttaaggaatggtcgttggaggtcagaatggaagtttacaatcactccttcaaccactcaagtggttggcatcttgaaaat

SEQ ID NO: 566282 - DNA, 74 bp, Homo sapiens
ctttgaacgcactcctcagagtccgactctcccacctgctaaggtacccactgatggtaatgctggcctgctgg

SEQ ID NO: 566283 - DNA, 75 bp, Homo sapiens
aaaaaaccatctggtgatgatagatacaatcagtttcacataagacaaatttacatgtattggagaccagaccag

SEQ ID NO: 566284 - DNA, 120 bp, Homo sapiens
cagacaacttctggcagaaacagaggactaattttggcagttctaaatttgaatttgagtgtaaggcaaacattggtgggcaccgatcttcctgttcattctgcaagaacccaagagaag

SEQ ID NO: 566285 - DNA, 51 bp, Homo sapiens
cttcttgatcctgcataaaaccaagaaaacagacgtgactatgctcttgta

SEQ ID NO: 566286 - DNA, 89 bp, Homo sapiens
aggttacaaacccagatctcacacaagtggtcagtttggttgtggaaaggttccagcaacagatagaaatgctttaagttcactctggg

SEQ ID NO: 566287 - DNA, 83 bp, Homo sapiens
gcaaagaggagctgatagcggagctgcagtgcagagcagagcgggcggaggaccccgggcgcgggcgcggacggcacgcgggg

SEQ ID NO: 566288 - DNA, 97 bp, Homo sapiens
gctgaggtcgtctgagccctgcgacagcctggacagcaactcagagctcgtccgcatggtgctgaatggctgaggaccttcccagtctccccagagt

SEQ ID NO: 566289 - DNA, 98 bp, Homo sapiens
gaaaaggaagtaatccctagtgtcagcagattcagcggtactggtgtataataggactatacaggctccaacccaagttccagtggttgtgtctccta

SEQ ID NO: 566290 - DNA, 75 bp, Homo sapiens
accagtactgctttgaatgtgactgtttccgttgccaaacccaggacaagagcaaatcatggaggaagataaaaa

SEQ ID NO: 566291 - DNA, 75 bp, Homo sapiens
gccgcccgccgccgctggagctagagactcggtgaaatacctggagtgctcagctctcacccagagaggcctgaa

SEQ ID NO: 566292 - DNA, 100 bp, Homo sapiens
ctctatggtggaatttaacgggaagctgttagccagcatcaatagcacgctctttcgacgtgtagcagcagctttgccgggaatggaaagcacacaggac

SEQ ID NO: 566293 - DNA, 82 bp, Homo sapiens
tgagcgcccatatgggggttctggagagcggggtgtgggttccagggtctccctccactgctgtagtaacccgggtccgggg

SEQ ID NO: 566294 - DNA, 75 bp, Homo sapiens
caacagtgtaccagcagggcgttggctatgtgcccatcacaggttaatttggagtggcccctggagtcagtttcc

SEQ ID NO: 566295 - DNA, 82 bp, Homo sapiens
tgaagcagcagaaccccaggctggtgtacgacaatgcagatcttcgtgaagactctgactggtaagaccatcaccctcgagg

SEQ ID NO: 566296 - DNA, 75 bp, Homo sapiens
gaaaattccttttcagaaaatcagccatttccttctcttaagatggcggcttacagggagaacacagttggcctc

SEQ ID NO: 566297 - DNA, 75 bp, Homo sapiens
cactccgcctgcaggaatacttatcagggctttaatggagtccccgggccccaggctgcagactggtacctgtcg

SEQ ID NO: 566298 - DNA, 75 bp, Homo sapiens
cgccgccctctcgtcccactttccaggatgacatggaagcttaccggacccagaactgcttcctcaactccgaga

SEQ ID NO: 566299 - DNA, 93 bp, Homo sapiens
caacagaccccgagaatatattcagctacacaggccaagaagcttgagagaagaaaaatttcagaaaaattgtctcaatttgactagaatatc

SEQ ID NO: 566300 - DNA, 73 bp, Homo sapiens
cctgcagctctacagaggcttcaccttggggtgtccgcaatgttgccagtgtctgtctgcagattggctaccc

SEQ ID NO: 566301 - DNA, 100 bp, Homo sapiens
aagcttacgtctctgctcttcagtacaatcctgtggaagatgaaactgttttacataacattccttatatgggagatgaagttttagatcaggatggtac

SEQ ID NO: 566302 - DNA, 90 bp, Homo sapiens
gctgcccgcgccatgtccgcgcacaatcggggcaccgagctcggtgattgtagagaaggctccaaaagccagggtgcctgatctggacaa

SEQ ID NO: 566303 - DNA, 100 bp, Homo sapiens
ctgacagcaacaagaaaatgtttccgacacatagccctcgattatgtgcttcagtggctctgtttctcagtactttgaagttataactaatctgcctgaa

SEQ ID NO: 566304 - DNA, 100 bp, Homo sapiens
caatgggctaaagcctctggaagaggtgaagttgggaaactgcggattgccaagaccttaattcccattttacatcaaaaagcaaagaggggtactccac

SEQ ID NO: 566305 - DNA, 99 bp, Homo sapiens
gttgctggagcactcctgagagccatcttcaaagatacattccaccgttgatctgggggaaaagtggacacatccagacagccttgtatgggaagatgg

SEQ ID NO: 566306 - DNA, 100 bp, Homo sapiens
gccctggtcttcgggctgtcgctcgtctacttcctcagcagcaccttcaagcaggactcacaccacccggcaagaactgctcactacggctccctgcccc

SEQ ID NO: 566307 - DNA, 100 bp, Homo sapiens
gaacaatgccatcaaatataccaaaaatgtagaagttctccatcttgggaaagtctggataaacctctacttgaaaatggagaaaaaacctaacaaaaag

SEQ ID NO: 566308 - DNA, 97 bp, Homo sapiens
ttgatatggattatacccttgctgatcttgctgggtcagaaatacaaccactctgtggactggtggtccttcggggttctcctttatgaaatgctga

SEQ ID NO: 566309 - DNA, 89 bp, Homo sapiens
cgcgagcgaacgaccaagagggtgttcgactgctagagccgagcgaagcgaggatacgaagcgttttcggcttcctgcccggagctgtg

SEQ ID NO: 566310 - DNA, 74 bp, Homo sapiens
agatgtgatgttggagaactacagaaacctcgtctccctggcatgctacaagtgaaaactgatgagaaactgaa

SEQ ID NO: 566311 - DNA, 82 bp, Homo sapiens
tggagcgcgcgggccggcggcggcgcgagtggctcgggagcgcggctgcacagccatgacagtgcagatcctgctgaagctg

SEQ ID NO: 566312 - DNA, 100 bp, Homo sapiens
cccacgactgcctgggacctggccaagggctccacacaccaagaccaagatgaggagcgggaaggcctcctgcaccctggagaccgtgtgggaagacaag

SEQ ID NO: 566313 - DNA, 87 bp, Homo sapiens
ggaaagcatgatgggagccacgaagggactgtgtattttaaatgcagaatatggttgagccccttatacccacgaattgctgatgga

SEQ ID NO: 566314 - DNA, 82 bp, Homo sapiens
tgggatccggttccttggtgtcatccagccttagcaaaccagagcctcctgacaaggtgatccgggcgggccccgcaggaat

SEQ ID NO: 566315 - DNA, 75 bp, Homo sapiens
agaatgaatgaagtgcttcagatttaaataatgttcccacaagcctgcatttccagagcatgctgaaatctcagt

SEQ ID NO: 566316 - DNA, 75 bp, Homo sapiens
tgttactccattgctgaggagtggtgggagacctccacagaacccttccagcaagctgtcttctaaagcaaacaa

SEQ ID NO: 566317 - DNA, 90 bp, Homo sapiens
gtgccaggagggagagatcctggccacaggcagtacggcatggtgctcgttaagtgggcagaccaacatccacctcagcaaaaacttctt

SEQ ID NO: 566318 - DNA, 100 bp, Homo sapiens
ccttccacagtgcaaggaagacgccgagggctgccagaggaacccgaccagaacctgtccagccctgaggaggtgttccactctggccactcccgcaact

SEQ ID NO: 566319 - DNA, 75 bp, Homo sapiens
ctgggccggagcctccgagaaccctgccaagcccaaacatgtggaactaaatcttaaaacccctaagaatcttga

SEQ ID NO: 566320 - DNA, 101 bp, Homo sapiens
tggcttttagctgaactaaggagaaagtcctacaacagtttggcgtgcaacatggggcttgagaaaggtcaggatggctaaaggtgaccccaagaaaccaa

SEQ ID NO: 566321 - DNA, 78 bp, Homo sapiens
tccgtccgccgccaccacccactccggacacagacacatctttgccatcgtggcatcagcctatgacctggctcagaa

SEQ ID NO: 566322 - DNA, 99 bp, Homo sapiens
gggcggccatctgggtcaccatcctgtgcatggcacggctcaagacagtcctgaaatacgttctgctccagacgagcccttaccacgttgactcactcc

SEQ ID NO: 566323 - DNA, 90 bp, Homo sapiens
aacgccaggcgccgctcctttacaggtcctcgcaagggccgagaggtgtaccggcatttcggcaaggccccaggaaccccgcacagccac

SEQ ID NO: 566324 - DNA, 90 bp, Homo sapiens
tgccgtggagggcctcgccatgtcctgctgcccgaagcctggctacagataagggaccaaaatgactgactcaaaatatttcaccacgac

SEQ ID NO: 566325 - DNA, 108 bp, Homo sapiens
gatatcttcctgtcatggttccccttctactacatgctgaaggctgttgaaaatcctacagctacagagattcaagatgtatgttcagcagttggacttaacgtattt

SEQ ID NO: 566326 - DNA, 74 bp, Homo sapiens
cgcaggcatttcaatcacattatggtcaggatggctaactggttggctccccacatggtgccctacgtctatat

SEQ ID NO: 566327 - DNA, 75 bp, Homo sapiens
cccacgaggcgctggcccggaggctccagaaacgggtcctgctgctcaccaagaccatgccagagtaatctcagc

SEQ ID NO: 566328 - DNA, 50 bp, Homo sapiens
gaccagggccgcaggaagacgcactcctctggtgcaagtgtggtagctat

SEQ ID NO: 566329 - DNA, 75 bp, Homo sapiens
ctgaggctgcaccaagtggcgaaggagccggctccaagaggctgctggccaagctgcaaagctgggagagactgg

SEQ ID NO: 566330 - DNA, 82 bp, Homo sapiens
taatttagaactgaatgatgtggttatcaccatcccactcccagggaggaagaaggagacttcagagaaagaggccgtgtga

SEQ ID NO: 566331 - DNA, 101 bp, Homo sapiens
gctttaaactgtatatgcccagcaacatctacacttattacactactggttcatacctctagagggcagatctagtgaaaagccatttgatgtatgcggtc

SEQ ID NO: 566332 - DNA, 96 bp, Homo sapiens
aaaatacccacacaaaataaagagtggagctgaagctaagaaattggtgcgttatccagaacgcattacaatattgagaggaaatcacgaaagccg

SEQ ID NO: 566333 - DNA, 82 bp, Homo sapiens
cttaattcaaggtcacacaatgtcggggatggacctccagatttccttactgctgctccaggctctgcaccgcctcactagg

SEQ ID NO: 566334 - DNA, 100 bp, Homo sapiens
gaccatacccctgtccacctggcgttgctggatgagatctgttgcagtctccttcaagcattctgtcgaccctggatgttgaattgccacctgtttgctg

SEQ ID NO: 566335 - DNA, 123 bp, Homo sapiens
cgttgagatgtgggagagaatgcactaatctgaaggcagccctgcgtcaggaattcagcaacctggaagagcagatcccagatggattttttgcccatttttatgccatttgtgaacacatca

SEQ ID NO: 566336 - DNA, 76 bp, Homo sapiens
aacctggcatatctgggcgccaagccgcggagcctccagacggatctgccttctggagactgcgccgtcctcccgg

SEQ ID NO: 566337 - DNA, 100 bp, Homo sapiens
gtacaagacatgcgcctcatcttccagaaccacagggcctcttacaaggttttggaaaagcttcgtcccttggaccaaaagctgaagtatcaaattgaca

SEQ ID NO: 566338 - DNA, 98 bp, Homo sapiens
ttgacagtcttctagaagagagaaggaggaaaagaagcagttcctgatgttacaaatgaacaaggatctcccagagagagcgctgtacagcatggaat

SEQ ID NO: 566339 - DNA, 100 bp, Homo sapiens
gaagccatccacacagacaccgacagagcaagagcagctctacctgaggtcaggtgtggtgtcctctgccaccttcgagcagccgagtcgccaggtgaag

SEQ ID NO: 566340 - DNA, 83 bp, Homo sapiens
cttcgatcgcctcgcgccggctgctctttccgggtatataatgtttacatggcagggaggcagctgtgttctaagcggtaccg

SEQ ID NO: 566341 - DNA, 100 bp, Homo sapiens
aacgaaggtgaagccacggaagataaggtcgcaatggaagaagagatcgccgcgctggtcattgacaatggctccggcatgtgcaaagctggttttgctg

SEQ ID NO: 566342 - DNA, 79 bp, Homo sapiens
tgaggctgccgccgcgagtctgccatcgtccaaggaggtggcaggcccgatgagagaaagggaaagttaaggatgctgg

SEQ ID NO: 566343 - DNA, 100 bp, Homo sapiens
caaggtcaaacagtgtatttgctgtcaaccaagctgtgtcaccaaacttttcacaaggtctaaatctcaaaacatcctcagcacagaggaggaacgaact

SEQ ID NO: 566344 - DNA, 100 bp, Homo sapiens
agaagagtgagagagagctattagagattgtgaagaagaatttcgatctccgccctggggtcattgtcagtcactttcgaagtatagatcctggcctcaa

SEQ ID NO: 566345 - DNA, 150 bp, Homo sapiens
atcaccttcatgggcctggagaagctgcatccctttgatgccggaaaatggggcaaagtgatcaatttcctaaaaggctccaccaaggacctgatcgagacttgctgcgcagccggacagcagtgggccattgacaatgacgagtgcctg

SEQ ID NO: 566346 - DNA, 83 bp, Homo sapiens
ctcttactcgtgttccctgccactgtcttgttccgaggcggccccagaggcattgaatgccccagaggagcccgaaacctccc

SEQ ID NO: 566347 - DNA, 75 bp, Homo sapiens
attacagcaggagattatgaccttaacatcagtgattccacaccaaatcatccatcacaaacaacgcctgcccaa

SEQ ID NO: 566348 - DNA, 99 bp, Homo sapiens
agacactcctgctctcttccatccccatcttacagatgtattaagaagcctcagaatcctcactatggatgggctcattgaggacattaagcatcggcg

SEQ ID NO: 566349 - DNA, 100 bp, Homo sapiens
agaagttaaaacatttcagggcaagccaattatgccattggaaaagaagtttgttcgagtttcaggagaagcaactattggacatgtagaaaaattcctc

SEQ ID NO: 566350 - DNA, 78 bp, Homo sapiens
tcctgatgactgacaccagcttcaaggacttctctctcgtggagtctattatcctcccagtccacaacgctgaaccgt

SEQ ID NO: 566351 - DNA, 99 bp, Homo sapiens
acactgatcgtttctgcagctgcagattctgctgttcgactctggtctaaaaagggtccagaagggtcccgggattcttgagctgtgcccagctgacga

SEQ ID NO: 566352 - DNA, 99 bp, Homo sapiens
gtggacggactcactgccctgcaccaggttcctagaaggtgagcgcggacggtatgcaaagttgtgaatccagtggtgacagtgcggatgaccctctca

SEQ ID NO: 566353 - DNA, 97 bp, Homo sapiens
cgctgacggtcccgcacgtctgccgctgccaccggcgcgcccgagtgctaagagatgccgtttgcaggcctcatctctgcttgagaatcgggggctc

SEQ ID NO: 566354 - DNA, 75 bp, Homo sapiens
agatcaaaggtcacctggaaattgccttattggaaaaacatttcttacgacaactacacctttgcccaacctggg

SEQ ID NO: 566355 - DNA, 96 bp, Homo sapiens
ctcgctctgcttcatcccactattattttggcacaacaggaaggtttccaatacttatctacaggaatcgccatgaccccagctctgagggaggca

SEQ ID NO: 566356 - DNA, 100 bp, Homo sapiens
tttgtgactcacaatctgtcttttgatgaaatcaacaaagcctttgaactgatgcattctggaaagaggggtggcactgaatcaacaagacaagcaactc

SEQ ID NO: 566357 - DNA, 75 bp, Homo sapiens
gggttcttccttccaaactgtctctgcccttttcaggatagcattacaactctgccagatctaactccacttttc

SEQ ID NO: 566358 - DNA, 100 bp, Homo sapiens
gaagagcctgctgatgtcagtgggacccattcaggagcatggggaagtgattgactgtgtgcaggagctgagccactccgtgaacaagctgtttggtctg

SEQ ID NO: 566359 - DNA, 83 bp, Homo sapiens
ctctaccctggaggagattctggggcagtatcaacggagtctccggggttaatttggagtggcccctggagtcagtttcctac

SEQ ID NO: 566360 - DNA, 80 bp, Homo sapiens
gaagagcagtaagggactgagctgctggcatttggatttgatcccaaagtcgacagttatgttgagaaggcagttgctgt

SEQ ID NO: 566361 - DNA, 101 bp, Homo sapiens
gaaacttttatctcatctggcttggcgcctgaggttctcccattagggaaatcctcattgacgattcaatttgttgaaggccaatttgtggactcctacga

SEQ ID NO: 566362 - DNA, 100 bp, Homo sapiens
cgcgtacgggcttcccgagctgacgtggcttgaattgggaggggggcagctggagcctcaggcggcagcgcttctaggttacacctatgtttgaggattg

SEQ ID NO: 566363 - DNA, 90 bp, Homo sapiens
aaaatgggatcccttactggatcgtgaaaaactcttggggtccccagtggggaatgaacggatcctccccggcgtgaaggtcatcatcgc

SEQ ID NO: 566364 - DNA, 82 bp, Homo sapiens
tgaccccggcggccctgcccgcccctccctccaggtaactaggatttctacctcaaccgcgagacctatgcaaggacggtgt

SEQ ID NO: 566365 - DNA, 74 bp, Homo sapiens
catccacgcacctgcagctctgctgagagagtgcaagccgtggggttctcagaggcactgtgactgacttccct

SEQ ID NO: 566366 - DNA, 50 bp, Homo sapiens
gactgctataacaatctagctgctgcccagtcaggaatacttgataggac

SEQ ID NO: 566367 - DNA, 75 bp, Homo sapiens
gagttcctctcccacctgaacttgttgagcagtttggactggtcgtttttgatgctcgatgaatgctgggaattc

SEQ ID NO: 566368 - DNA, 78 bp, Homo sapiens
tcggtcctccacctgtccgctacgctcgccggggctgcggccgcccgagactcggtgaaatacctggagtgctcagct

SEQ ID NO: 566369 - DNA, 95 bp, Homo sapiens
ggtggtcggcgggggcggcgtgggcaagtcggcgctcaccatccagttcatccagacaatgcagatcttcgtgaagactctgactggtaagacca

SEQ ID NO: 566370 - DNA, 90 bp, Homo sapiens
acctccatcaggaccccagatgtctgacagccctgtgtgacaccaagataagtaaccaaactgaaaccgtgtcagttcagtcttcggtat

SEQ ID NO: 566371 - DNA, 98 bp, Homo sapiens
cttcccggccgcgtcggagtccggcggcgacctgcctctgaaacatggcaggctcggatgctgggatagctgggagtatggccaccctgctccacgat

SEQ ID NO: 566372 - DNA, 96 bp, Homo sapiens
ttcgaaagctggtaaggcctgagggcacaggtgcccgaccatacactgggaaagttggtgctgaggatgccgatgggattgacatggcctaccggg

SEQ ID NO: 566373 - DNA, 100 bp, Homo sapiens
tggacaaggaccctgacctgcctgtcgtcgtggtggccaacaagcaggtttaagtttttgaaactgaagtaggcctacacagtaggaactcatgtcattt

SEQ ID NO: 566374 - DNA, 82 bp, Homo sapiens
cggcgagcgcgagcggcgcgagaaagacggcccacctccatggagacggcccacggcctcgccaccaccagccccacctggc

SEQ ID NO: 566375 - DNA, 100 bp, Homo sapiens
gagaaactcgctcgccttcagaagacaggtgcagcagtaccgcgtcgccatgactgccaaggactgctccatcatgattgcactgtctccctgtctgcag

SEQ ID NO: 566376 - DNA, 75 bp, Homo sapiens
gtggcctaccaggaggccaggggtgtcgccatggaacgcaagccattttctgtttctagcactcccaccatgtca

SEQ ID NO: 566377 - DNA, 100 bp, Homo sapiens
ggctagcctggaggctgagcaggaagccctggagaaggaccaggagaggcattttccctgaagatgagatcccagagaaggcctgcaggcgcctgcttga

SEQ ID NO: 566378 - DNA, 74 bp, Homo sapiens
tcggatcccaaggcggccaaggacctcgggttcatgacgctctcgatattcctgtgcagaaacctggaccacgt

SEQ ID NO: 566379 - DNA, 98 bp, Homo sapiens
agcagaaaaccctgtgccagggacaggaaagataggagaatttagataatgggctgtgtgcaatgtaaggataaagaagcaacaaaactgacggagga

SEQ ID NO: 566380 - DNA, 109 bp, Homo sapiens
cagaaaacaagaaaaattcactgtggtccagaagcagatatcggtgagaagcggtaccgcgcggtgtatgactacagcgccgccgacgaggacgaggtctccttccagg

SEQ ID NO: 566381 - DNA, 100 bp, Homo sapiens
ttttgggagagcccggagacggtgtcccagctggattcggtgcgggtctggctgggcaagcactacaagaagtgggaccctgaagatgtgaacctcgaag

SEQ ID NO: 566382 - DNA, 99 bp, Homo sapiens
gaaacatctgtagcatcaatgagtcagacaagcggtggtgaggcaggctcgcctcctccagctgttgttgctgctgctttctgaaacaaagactcattt

SEQ ID NO: 566383 - DNA, 100 bp, Homo sapiens
gcaagactgtgggcgtggagccggcagccgacggcaaaggtgtcgtggtggtcattaagcggagatccggttctggcctataggaacaagacattttcag

SEQ ID NO: 566384 - DNA, 146 bp, Homo sapiens
aagtatccagcctatattgttacaattttttttcaagaactgccgtcttctttgcctgcactaatgggaggaataagtttttttcatctgtaatttggaagccaagtcagtaacaaaatgaaaccagtaaagcatctgttgaccac

SEQ ID NO: 566385 - DNA, 100 bp, Homo sapiens
ctgatctggttgctcttctcgcctcgatgacttacgagccctcaaggggaagcattttctcctggaccccttgatgccggagctgctggtgtttcccgcc

SEQ ID NO: 566386 - DNA, 66 bp, Homo sapiens
cgcaactagcggcgggtcgtgggcacctccaggtacggttcctggagcagcagaacaagatgctgg

SEQ ID NO: 566387 - DNA, 100 bp, Homo sapiens
tggaggacgtgaagctggagttcccttcccttccacagtgcaaggaagacgccgaggccagaaatgtacacacaggagagctggctgcagtaaaaatcat

SEQ ID NO: 566388 - DNA, 100 bp, Homo sapiens
cttttacaatgggaataaaagagaaaagcagacagtccactcagtcttccgaaaactgattcccaaatgctggaaaatcctctttgctaagttgtgtttc

SEQ ID NO: 566389 - DNA, 83 bp, Homo sapiens
atgtcgggttattcgagtgaccgagaccgcggccgggaccgagggctccaccgaggacaccgcgtccagcttgtgtggcgagg

SEQ ID NO: 566390 - DNA, 100 bp, Homo sapiens
ctcgcaactcggcagcctccacccaccggcccaccctacatttagcgcatcatgtgatccggaattctgcttggtcagaatcgtgatggcattgtgttca

SEQ ID NO: 566391 - DNA, 100 bp, Homo sapiens
cgagcccagagctccgatccctgcgcgggctcgagagctcgccccgaacgggggtcttcctcctccgccgttgacagggacccagacatggagctgcggg

SEQ ID NO: 566392 - DNA, 75 bp, Homo sapiens
cccacgcctgtcacgaagccaaagctggactcggcagcgtacaagctgctggagccagttctgcttctcggcaag

SEQ ID NO: 566393 - DNA, 80 bp, Homo sapiens
gaatgatgatgaattgacaatcaaagaaggagatatagtcactctcatcaataagatcacagaactgtgtggtgcaaagc

SEQ ID NO: 566394 - DNA, 100 bp, Homo sapiens
gaaggtggtggtgtgcgacaacggcaccgggatatattcgactttatgggagaaaatttagcaaagaagatcatgttctttttattaagttattgtatga

SEQ ID NO: 566395 - DNA, 82 bp, Homo sapiens
atggactctgactcttgcgccgccgccttccacccggaggattttttatcaagcagaaatgcatcgaacaacgagaatcaag

SEQ ID NO: 566396 - DNA, 82 bp, Homo sapiens
ccccaagcaacttagaatgcagcttcagcagaggctgcagggccagcagtcgtgatgagaggagatggattgaaaagcagaa

SEQ ID NO: 566397 - DNA, 100 bp, Homo sapiens
ggcaaatgctctctggaggatctgaaacttgcgaaatccctggtgccaaaggctttagaaggttatatcacagttggaaagatccaaataatgacttcag

SEQ ID NO: 566398 - DNA, 120 bp, Homo sapiens
tggatctagaggcataattaggataataaatcctataacaatgcagtgtataaagaggagaaggcagagcccccccaggctatgaatgccctgatgcggttgaaccagctgaagccaggg

SEQ ID NO: 566399 - DNA, 100 bp, Homo sapiens
agctttgaaacaactgatgagagcctgaggagccattttgagcaatggggaacgctcacggactgtgtgaaatacccacctcggaaagacttggtccgag

SEQ ID NO: 566400 - DNA, 153 bp, Homo sapiens
ccgggaagcatggggcttcccaggctggtctgcgccttcttgctcgccgcctgctgctgctgtcctcgcgtcgcggaaagccatctctgtcctggagatggagaatggctattggtggtgcaggaagaagcagcgggcaggtgtgatgctgac

SEQ ID NO: 566401 - DNA, 100 bp, Homo sapiens
cttccccacttccctgcactctcatcgctctcggcctcggcctcggcctccgacacgagtccggcagcgtcttctcttgagggagcaatttggagaagag

SEQ ID NO: 566402 - DNA, 100 bp, Homo sapiens
gaaccaggaatcttccctcggcccgcgcgcgcgaccggccggtgcgccgcggcccgcggataagttctgaacgtcgaaaagaaaagtctcgagatgcagc

SEQ ID NO: 566403 - DNA, 74 bp, Homo sapiens
aaaagagaagttgcctcaggttacgaggtcttggcacaattatatgtgtaatggtaaaggagctggaagtgcga

SEQ ID NO: 566404 - DNA, 100 bp, Homo sapiens
gccgcatccggcctttggcggagaaaaccggcatctgcaaaattcggccgcccaagaaacaaaggatggagtatggcccaagaccagctgatactccccc

SEQ ID NO: 566405 - DNA, 90 bp, Homo sapiens
cagaactgaacttgctgtatgagcaagcattgggtttgcagctgatgcctttgctgcagggtaggaaaatgtctgtgtgcaccgacaatg

SEQ ID NO: 566406 - DNA, 75 bp, Homo sapiens
ccgagcacaggctgacctggcctatcagcttcaggtgcccacggtctgcagatgatgagcgaaagcatcctgtcc

SEQ ID NO: 566407 - DNA, 76 bp, Homo sapiens
agggtcttcatgcactctgtcaagctgagaactgataaatttcaaacggaagagagtggcagcatttagaaagaat

SEQ ID NO: 566408 - DNA, 75 bp, Homo sapiens
agaagctagaatctgccgtcttttgaagcaccctaatattggaagggtagatgtctacccaaatggaatattgag

SEQ ID NO: 566409 - DNA, 75 bp, Homo sapiens
gtcttcagctacctgggttaagtttaagcagattgcccaaggactccagatactccaaataatgaccctcgttgt

SEQ ID NO: 566410 - DNA, 75 bp, Homo sapiens
ggctgaggaggcggcggcggagatctggaacaaaaagagcctggtagcctttaagatcatgcccctggaggatat

SEQ ID NO: 566411 - DNA, 82 bp, Homo sapiens
cgcgggtctgctctgtgtgccatggacgggtatcacctcttctgggctcaagatggacaacaagaagcgcctggcctacgcc

SEQ ID NO: 566412 - DNA, 98 bp, Homo sapiens
ggaagaacccgagtcgaagcgggaagatggctgcagacaagcctgcagattttaccaaatgttgcaagaactctggagttcttatggtagtaaaatgc

SEQ ID NO: 566413 - DNA, 146 bp, Homo sapiens
gcagcggcggaggaggaggaggctggagtgggcgcggaggcgaccgccatggcgttcctcaaactccgtgaccaggctccaaccaggaatggagacgccattggatgttttgtccagggcagcatctctggtgcatgctgatgacg

SEQ ID NO: 566414 - DNA, 90 bp, Homo sapiens
gcaagagtcaccgggatccctacgcgacctccgtgggccacctcataggaagagagaagggcacagttacctaagtatcaacgtaatctt

SEQ ID NO: 566415 - DNA, 75 bp, Homo sapiens
ggatggctgctcagctgctgactgatgaggcactgttcgatcctttggtacagaagacagaccgacagatcgtcc

SEQ ID NO: 566416 - DNA, 50 bp, Homo sapiens
agaaacccggagggcgccggggcctcagagaaccatggctactgccaagg

SEQ ID NO: 566417 - DNA, 100 bp, Homo sapiens
gagccattggagggcgcggggactgcaaccctaatcagttttccacctatttccctggatattttgatggtcagtactggctctggtgggtgttccttgt

SEQ ID NO: 566418 - DNA, 83 bp, Homo sapiens
ctggctctaagatctgaatgttgtgaccactaatttgtcttgaatccagataatagttttgaaatactggttgaccaatctgt

SEQ ID NO: 566419 - DNA, 80 bp, Homo sapiens
tcggcagtccacccaccgccgccgcctcccagggagaggctgtcgatgctgaggcacgagagaatttgctcctgctcctc

SEQ ID NO: 566420 - DNA, 82 bp, Homo sapiens
ttccttctgtcacatcacacccaatgctctttcgacgtgtagcagcagctttgccgggaatggaaagcacacaggacagaag

SEQ ID NO: 566421 - DNA, 90 bp, Homo sapiens
gcgatctgctggcctcggcctctcaagcaatggctgccatccggaagaaactggtgattgttggtgatggagcctgtggaaagacatgct

SEQ ID NO: 566422 - DNA, 82 bp, Homo sapiens
ctcagctccgagtccagggcgagatggtggccagcagagatctgcaaccccaggtctgtgccactgaacatccagggcctta

SEQ ID NO: 566423 - DNA, 89 bp, Homo sapiens
ctccatgaaggctactggcaggagcacatgagagagtgacagacatcacacctccagtgcaatccctgttcctaagagacaaagctcca

SEQ ID NO: 566424 - DNA, 74 bp, Homo sapiens
gtttccagatggctctaacctcagtgagtccgatgggtggtccttttattcctgctgctcctgtcaaaactgcc

SEQ ID NO: 566425 - DNA, 82 bp, Homo sapiens
gcactggtgggagtatgttgacgccactgtgaccttggaacttttagatgggaagacaaaggcgctttggctaagctggtgg

SEQ ID NO: 566426 - DNA, 100 bp, Homo sapiens
caaaaacatgagtcaatatgtattgtggcattcaaatcctagcactctgggagagtccaatatcagatggaaatgatgcggagccttcgccatgtaaaca

SEQ ID NO: 566427 - DNA, 111 bp, Homo sapiens
gtttcctccaggacagcacctagtcgtggccggaggagtctcagagctgtcagaaagaattatatccagatcgagagacagaagattctgaaagggttcaatgaaatgaga

SEQ ID NO: 566428 - DNA, 100 bp, Homo sapiens
tagctcgtgctgtggctgatcagatttggaagtcaaaccagaaacttcaggctctactacgatggcaagcactttgttggggagaaacgctttgagtcca

SEQ ID NO: 566429 - DNA, 75 bp, Homo sapiens
gcggtcgccccggggctccggcggcgggtccctgtgcgttttattgcgacctgccggtgggaactttgtctccga

SEQ ID NO: 566430 - DNA, 90 bp, Homo sapiens
gaaaaacactatctcttctatgacggagaatccgtttcaggaaaggtggttagctcaaccaatggagagctgaatgttgatgatcccacg

SEQ ID NO: 566431 - DNA, 100 bp, Homo sapiens
gcaagtatcaattatcccttgttaaagatgccttattggaggaactggaacgctccacccttcaggacagtgatgaatattccaacccagctcctcttcc

SEQ ID NO: 566432 - DNA, 99 bp, Homo sapiens
cgacctcccccagaatttgtccgagatgtcatggcaatggctgccatccggaagaaactggtgattgttggtgatggagcctgtggaaagacatgcttg

SEQ ID NO: 566433 - DNA, 90 bp, Homo sapiens
cgcgcttctcctctcggggtcccatgtgccgccggctctcggacggtgccctacgagacgctgaacaaacgctttcgcgccgctcagaag

SEQ ID NO: 566434 - DNA, 99 bp, Homo sapiens
atccgcgggagctgcccggcagggcggagcctcccctcgcaggccgctgtgctcgctgtggagaaaacgtagttggggaaggtacaggatgcactgcca

SEQ ID NO: 566435 - DNA, 96 bp, Homo sapiens
cgcatctgctcaacgacgaggacctgacgcaggaagatgaagatcctgccaaaggtgatcagagtcgatcagttgaccttggggaagataatgtga

SEQ ID NO: 566436 - DNA, 82 bp, Homo sapiens
cagtttgaggacctcctggtgcgcatcctgctgctggctgcccttgtctcctttcaggaagaaccggacccggcgaacctgg

SEQ ID NO: 566437 - DNA, 75 bp, Homo sapiens
ttcctcactcagttgttctgctgctttcagacccccagtgatttcttctgacttgagcctgcagtgtgctgtgag

SEQ ID NO: 566438 - DNA, 75 bp, Homo sapiens
gatcaactcctctctgttaatggagtgtggttcagcactgagtcatgcttgcttctgctacgcactgatttgttc

SEQ ID NO: 566439 - DNA, 100 bp, Homo sapiens
ccagcctgcggagcctgtggggcagagtgaaagcagcagcagtagcaacatctccaccatgttggtgacacacgattacacggcagtgaaggaggatgag

SEQ ID NO: 566440 - DNA, 100 bp, Homo sapiens
ccaacccactttctcggcgccgcggctcttttctaaaagttgtcacatttgaagacgagcactgaggatgaggaaccaactgaagaatatgaaaatgttg

SEQ ID NO: 566441 - DNA, 83 bp, Homo sapiens
cttccagtcacacagtgcgcgggccgaggcctgaagctgcccagcaggcattccaaggcctgggtcctggtttctccggttac

SEQ ID NO: 566442 - DNA, 89 bp, Homo sapiens
gctgtgcgacgtgaccctcaagatccgctgttgtaccaggggtctaatcaggcctgtgtctgcctccttcttgaatagcccagtgaatt

SEQ ID NO: 566443 - DNA, 74 bp, Homo sapiens
tgaaaaataccacgacaaaaccaccctatgggtaattccagaattgattggccataccattgtcactgtattac

SEQ ID NO: 566444 - DNA, 75 bp, Homo sapiens
ccgagaaccgtcagtttgagccagatgctagaacgagtaaatctgtctgcagcccagacactgagagccgctttc

SEQ ID NO: 566445 - DNA, 100 bp, Homo sapiens
cttcctcgcactgtgacatgtctgatcccttgctcccatccctgcagcatgaacaaggtggcatttttctgaagttgttcattaagacttcccagcattc

SEQ ID NO: 566446 - DNA, 97 bp, Homo sapiens
cgacttagaagctaccgagttaccctaagaaaggagctggaggatcttcagaagaagcctcccccatacctgcggaacctgtccagcgatgatgcca

SEQ ID NO: 566447 - DNA, 100 bp, Homo sapiens
caggacaattccatttggggaccagagatggacggtcactcagcctatggagtcatgcccataaaaacacagtaatggaagtgaaattaaacctcaatgg

SEQ ID NO: 566448 - DNA, 122 bp, Homo sapiens
ttttttggcaagttgttacgggaatttagacttgtagcagctgaccgaaggattaaagagtctattgttggggaaatcagacgggaaattgtaagtggacttttggcagcagtatcttcaag

SEQ ID NO: 566449 - DNA, 98 bp, Homo sapiens
tgttcaaggtgaaggattcatgagtctatataaaggctttttaccatcttggctgagaatgggagtatgcggttaatgaagttgtggcagggataaaa

SEQ ID NO: 566450 - DNA, 98 bp, Homo sapiens
gacccttcctgtcgctgacggcgactgcgggaggccagcgggtatttctgtgggacttggatgaaaccatcatcatcttccactcacttcttactgga

SEQ ID NO: 566451 - DNA, 82 bp, Homo sapiens
ttctgatagcataaacccaggcaacctacaattggtttcagagttaaagatggcggacttccaccacaaatggagggatttt

SEQ ID NO: 566452 - DNA, 88 bp, Homo sapiens
cagggaactcaaacagcagatgcagcagccatggcaatgacaggctcaacaccttgctcatccatgagtaaccacacaaaggaaaggg

SEQ ID NO: 566453 - DNA, 100 bp, Homo sapiens
agcaaaaagctccgcaacaagatagcagggcaagcaccggaagcaccccggcggccgcggtaatgctggtggtctgcatcaccaccggatcaacttcgac

SEQ ID NO: 566454 - DNA, 75 bp, Homo sapiens
cggagatccagtgggaagagccggcggctgcccgggcgaaactgatgactatagatattttgatcccaaaatgct

SEQ ID NO: 566455 - DNA, 90 bp, Homo sapiens
cccggaggaaactaacctcaacctctgccatcacaaggaccgagacatgggtgcccggcaccgcgcccgagcccactccattcagatcat

SEQ ID NO: 566456 - DNA, 50 bp, Homo sapiens
ggacccgcctggctgcgagatatgttttgagcaaaattttggactgtgaa

SEQ ID NO: 566457 - DNA, 100 bp, Homo sapiens
tgccgtcaaaccagaagactgatctctctgcaagagtagatgcagttaaggaagaaaatctgaagctaaaatcagaaaaccaagttcttggacaatatat

SEQ ID NO: 566458 - DNA, 101 bp, Homo sapiens
tctcggacaccattttctgccgctggacgcaaggatgtttcgtctgaactcactttctgctttggcagaactggctgtgggttctcgatggtaccatggag

SEQ ID NO: 566459 - DNA, 76 bp, Homo sapiens
ctggtatacacctccttctcccaagcttccttcaaaatgtctactgttcacgaaatcctgtgcaagctcagcttgg

SEQ ID NO: 566460 - DNA, 98 bp, Homo sapiens
gcacactcttcggcctgacgcccaccctcaatggcggtgatgactatgactccaagaaacgcaaacagcgggctggtggagagccctggggtgctaag

SEQ ID NO: 566461 - DNA, 82 bp, Homo sapiens
ctttagccatgtggatacctacggagcacgagaaatacggcgtgggaactgtggctgcaccatctgtcttcatcttcccgcc

SEQ ID NO: 566462 - DNA, 83 bp, Homo sapiens
ggaagagattcagccagcacactcctcgcgagcaaggctgtctgtccccagaccccagagcacgtccggcaccaccatgactg

SEQ ID NO: 566463 - DNA, 83 bp, Homo sapiens
atttaaacttccctcttagaactgcttttgtggcatcccataagttttggccactgcagaccccggaaggtcaaggctgacat

SEQ ID NO: 566464 - DNA, 95 bp, Homo sapiens
ggctgcagcagagcgagtacttcgttccaacatggacatcctgaagccaatcctgagtgaagatagtccaagtcctaagagacagcgcctctctc

SEQ ID NO: 566465 - DNA, 98 bp, Homo sapiens
gctcattgtagcctcaaactcccaggctcaagcagtcctaccatgtcagccttcccagtagctgggaccacaggagagaagatgactgaggaggaggt

SEQ ID NO: 566466 - DNA, 50 bp, Homo sapiens
tggcggcttattatgaggagcagcacccaccgtcatggaaatgatgagtc

SEQ ID NO: 566467 - DNA, 100 bp, Homo sapiens
ccttagtggccgtcttttgcctctttctctcaggctttcctacaactcatgcccagcagcagcaagcagaggaggaacccgttttcactagacaagacag

SEQ ID NO: 566468 - DNA, 75 bp, Homo sapiens
atgctgggccggcgccctggggccccggagaggttttgcactgattgcaaaaataaagtcctccgagcatacaat

SEQ ID NO: 566469 - DNA, 75 bp, Homo sapiens
gaggagttccgcccctttctggcaaagatgagggggattcttaagttaattggccttggtcctcacagctccaaa

SEQ ID NO: 566470 - DNA, 48 bp, Homo sapiens
acagctgggaaaactggcacgctctgcccggatggccctagtcttcgt

SEQ ID NO: 566471 - DNA, 90 bp, Homo sapiens
gaagccccagtgcactagccattgaagtatttgaagcacatttgggaagccacattttgcaggttcattttccagacactgaaagagcag

SEQ ID NO: 566472 - DNA, 78 bp, Homo sapiens
caggaaagccagtgttgtggaccctagcacagagctggttgtcttcttgcctgccctgtgtcgtaaaatgggggtccc

SEQ ID NO: 566473 - DNA, 83 bp, Homo sapiens
gaaggattcaaatgctagcagacacggtggctactctgcctcggggacgaaagcagaactcccccactggaaaggattctgaa

SEQ ID NO: 566474 - DNA, 80 bp, Homo sapiens
actttcagttaaactaacaaatatgtgttgagacggattctccgccgagctgtccgatacgcccatgaaaagctcaatgc

SEQ ID NO: 566475 - DNA, 100 bp, Homo sapiens
agtgtccatagtggattactatgagccaagatatgtgaacttttgcaaagcggagccataatgaataaattttaccagcctcatgaagcgcatattccct

SEQ ID NO: 566476 - DNA, 75 bp, Homo sapiens
ttggattcagacgccgattcgcccaggacagagcgggatgccaccagcttgtccaaagggaagttccaggagctc

SEQ ID NO: 566477 - DNA, 108 bp, Homo sapiens
aatactgtgtggctgacttcaaaagagtagtggattttctgaaagagaaattactcttgtctctgctgctcctgggaaagtgatttgtgaaatgaaagtagaagaaga

SEQ ID NO: 566478 - DNA, 75 bp, Homo sapiens
ccatccccagaagatcctggtcccctgctttaaccatcgaaaatgaggatctatcttgggatcccatggctttct

SEQ ID NO: 566479 - DNA, 96 bp, Homo sapiens
ccccagcaggaacaatgctagcctgcctgacccgagggaacttactggacgtcctgcaggagggcttcaatgagattggaggattctggagggaag

SEQ ID NO: 566480 - DNA, 82 bp, Homo sapiens
caaggacggagacgccggcgtgggcagcggccactgggagctgaggcccactgctcagtggagcgtggaggacgaggaggag

SEQ ID NO: 566481 - DNA, 75 bp, Homo sapiens
catgtttgctgactacctcgcccacgagagtcggagccggctcagttcggggaagctgcaggagttcggcgtggg

SEQ ID NO: 566482 - DNA, 83 bp, Homo sapiens
ctggtcgcagatcctgagacccggacagtggcagtgaaacaggatctaggggtgtttattcctgctcctatggctcaagggat

SEQ ID NO: 566483 - DNA, 100 bp, Homo sapiens
atcactcaggcctgacttcctaggcctgaccttggaagttttgggacagttgtctacgatacttgccagaactaatacagctgatgaaatacctgacctt

SEQ ID NO: 566484 - DNA, 75 bp, Homo sapiens
ttactactgtgacaacattaacgatcctaattatctcatggctaatgaacgcatgaacctcatgaacatggccaa

SEQ ID NO: 566485 - DNA, 75 bp, Homo sapiens
cactaatatttaagaaagaagatgttaactttcagctgtgatgcagatccatccgccctagcaaaatatgttctg

SEQ ID NO: 566486 - DNA, 75 bp, Homo sapiens
agccattgctggctatgtgtttagagataaggtgatggtgtttcttagagagaagatcactgaagaaacttctgc

SEQ ID NO: 566487 - DNA, 83 bp, Homo sapiens
attccgccgaaaaagagaagacgctttacccgactctttgggccgttatctcacttccagggtctccctccactgctgtagta

SEQ ID NO: 566488 - DNA, 75 bp, Homo sapiens
cagactgcacctcgcagtctccccaggtccgcccagcagccgcgcttcagccagctctacaagtttcacgctgtt

SEQ ID NO: 566489 - DNA, 122 bp, Homo sapiens
caaaatgacttgagcaatcttcgtttttataagaataaaattccattcaagccagatgacctcagaaagtactactacagtaaaaagcaaagttgatgaaagagaaaaatatatgataggaa

SEQ ID NO: 566490 - DNA, 103 bp, Homo sapiens
gaaacttcatggggaactgcaagacaggaagagaggccgtgcccctcaggaaatggcagcagtgtctgcttttcttcaaccaggagcacctaggccatatcct

SEQ ID NO: 566491 - DNA, 75 bp, Homo sapiens
gatccagcctgcggagcctgtggggcagaaaattgtacaagctggagataaggaccttgatgggcagctagactt

SEQ ID NO: 566492 - DNA, 98 bp, Homo sapiens
cctagacttggcatggaggctgggatcagtgaagtggagcccaaatactatgcagatggggaggacgcctatgccatgaagcgggacctcactcagat

SEQ ID NO: 566493 - DNA, 51 bp, Homo sapiens
acctccagtcaagacaattctgtgaagaacagaatggcaattttcgtgtgg

SEQ ID NO: 566494 - DNA, 75 bp, Homo sapiens
ctgctggaggcggccgagtacctggagcgcagggatcgaggtgtttcccattaaacactaccaggacaaaatcag

SEQ ID NO: 566495 - DNA, 100 bp, Homo sapiens
tggaacttcgttgcttgcttgcctgtgcgcgcgtgcgcggacatggcctcaaacggtgacgcggcgcacggcgcggatggtggccgagtggcagtgtgtg

SEQ ID NO: 566496 - DNA, 83 bp, Homo sapiens
attaattccaaccaaatcccggggctcatctggattaataaacagcctcccgcgacgatgcccctcaacgttagcttcaccaa

SEQ ID NO: 566497 - DNA, 98 bp, Homo sapiens
acaattgcagcagatgaagatccattggtaaattgatcaggatttttggcctaccctccaaagaaaagagctgttgcgcagccattggtacctgtatt

SEQ ID NO: 566498 - DNA, 97 bp, Homo sapiens
cgggaaatgcatgtgcaaggcaggatatgaagagaaaaatggcacctgtcaagaaccttcaacaagttttacagactcattggatgaagagtgcctg

SEQ ID NO: 566499 - DNA, 82 bp, Homo sapiens
aagagattcagccagcacactcctcgcgagcaaggatctcattttgcccaacggtggtactccagcaggtacttcaagtcca

SEQ ID NO: 566500 - DNA, 75 bp, Homo sapiens
cttagcgaaagaaaccctctctgagttcttgggcacgttcatcttgattgacgcgtgaccaaaaccaaagacggc

SEQ ID NO: 566501 - DNA, 76 bp, Homo sapiens
cctgaaggaattctcagtcaaagagtgatggctcatgaagcaatggaatatgatgttcaggtgcagttaaatcatg

SEQ ID NO: 566502 - DNA, 90 bp, Homo sapiens
aaaattagaagcctgagtcaacactgttttgatggactagataacctggagaccttggtccatgcctttttagagcagtggggactcgtt

SEQ ID NO: 566503 - DNA, 98 bp, Homo sapiens
agtacatgaccctgagactggaaaattgaccacagcacagtacagagtatctaagagtgcaccaattccagctggacatcactgtgaaaatgggacgg

SEQ ID NO: 566504 - DNA, 80 bp, Homo sapiens
cgacaggattcgttggctgccgtccccgctgctgtgcattggcggaatagaagatgaactcaactgaattcaccgaagat

SEQ ID NO: 566505 - DNA, 75 bp, Homo sapiens
gcagattatatcgcatcctatggctcaaagaaagatgattatgtgcagtcagcctcagtttccaaagccggaaaa

SEQ ID NO: 566506 - DNA, 100 bp, Homo sapiens
aagaaggaaaactctgagacagtggtcacaggctccctagatgacctggtgaaggtctggaaatgattggactggctaaggacgatcagctgaaggttca

SEQ ID NO: 566507 - DNA, 105 bp, Homo sapiens
cggacgcgcgcagcccgcccgcccggcgaccagcaagtactatactggcaattgctggagaagattttgcaattgttgcttctgatactcgattgagtgaagggt

SEQ ID NO: 566508 - DNA, 75 bp, Homo sapiens
atcacagtcagaaacaataggattatcatgagaatggaggttttgattcccaccatggccatcacccagtttcgg

SEQ ID NO: 566509 - DNA, 100 bp, Homo sapiens
gcagggggactctggccgcggctactacctggagatgctgatcgggacccccccgcagaagagaataacttgtctgactaccagtattcttggatgcaga

SEQ ID NO: 566510 - DNA, 83 bp, Homo sapiens
aggaaacaagacagttctgtctgcagaagcccattatggctgtaactggagatgacacaggatcatcaagcacattgtgagtt

SEQ ID NO: 566511 - DNA, 98 bp, Homo sapiens
gccatgtccactggaagacctggctggccatcaagtgctcgcccagcctgcacgtcgacgacagtactaaggctcgtacgtctgcatcgattatctta

SEQ ID NO: 566512 - DNA, 58 bp, Homo sapiens
caaggaacgtttggggtttcctaggctgtcatggaagttcagactttgagaccatctt

SEQ ID NO: 566513 - DNA, 75 bp, Homo sapiens
cactgtcacaccttgctcctggagaaggaaggaattgaatgatctggcacgggaccctccagcacagtgttcagc

SEQ ID NO: 566514 - DNA, 89 bp, Homo sapiens
acacaagaagatattgaaggcattctacagaaatttactggaaatataatgcaagtgccccccctgtatgtcctggatgatgaatacac

SEQ ID NO: 566515 - DNA, 75 bp, Homo sapiens
cgggtctggagtgcgtgggggaccggctgttggcggagttgcatgctgagaatttgaaaaatgaagatgatgtag

SEQ ID NO: 566516 - DNA, 98 bp, Homo sapiens
cggtgggatttcgttttgcctccggttggggctgctgtttctcttcgccgacgaggatgtctacagttgctttcgcttcctacgtgatgtttttgcag

SEQ ID NO: 566517 - DNA, 90 bp, Homo sapiens
tggggaggttgggctgaactgcagtgggagaggagaagagatgctggcgtgaaggggatatcttaaatacgatcataaggcactgtccac

SEQ ID NO: 566518 - DNA, 82 bp, Homo sapiens
cgagacggcgatccgggcgctcgagacttaccagagccacaagttggaatcgaagcctcttaaaatggcagatgacttggac

SEQ ID NO: 566519 - DNA, 100 bp, Homo sapiens
aagaccagtccatttggggaaatccttcggatggtgaactcattagaagtgcctgtgtcagtggccatgatgactccccaggtgatcacccctcagcaaa

SEQ ID NO: 566520 - DNA, 74 bp, Homo sapiens
tcacctgtgcgggatggaacaaaagaagttgaatataccggcaattttgcgagcacccaaggagagaaaaccaa

SEQ ID NO: 566521 - DNA, 75 bp, Homo sapiens
gacaagaagctcacccaggaacaagtatctgacaggtttattcagtcaccatgaagctgctgctgctgcacccgg

SEQ ID NO: 566522 - DNA, 75 bp, Homo sapiens
gcagttggcactacccgtcttgaggaatgtgagctgaactcacgggaatcaaatggcgtaggtacaattttggag

SEQ ID NO: 566523 - DNA, 75 bp, Homo sapiens
cgtttacttccagaagattggtggagcttgatctgaaggacccagccgccgcctccatctctgacggagactgtg

SEQ ID NO: 566524 - DNA, 83 bp, Homo sapiens
gccctcaaggccatgatcaaaacatgcttcaggactgccccaaggcccgcagggaggtggagctgcactggcgggcctcccag

SEQ ID NO: 566525 - DNA, 89 bp, Homo sapiens
tccatgccgcagtaggacagcaggcccaagtctgcacatcccaggggtagtaaaaagaatcattcctgcagtagcttccacaaatgcag

SEQ ID NO: 566526 - DNA, 82 bp, Homo sapiens
actatgggacacagatatgttgaagctgaatgcaatatccatacatctccttctccgggaattcaagtaaggcatgtctaca

SEQ ID NO: 566527 - DNA, 98 bp, Homo sapiens
gacagcaccatactggaacttcaaaaagttctgaaaacatgttgaactcccccactggaaaggattctgaaagaaatgaagtcagccctcagaaatga

SEQ ID NO: 566528 - DNA, 100 bp, Homo sapiens
tgaggatccagaaaccgccccagcgatggaagaggatcaggagctggagaggttcgctttgtgaacagcacatggatatttgggaagggcatgtgccatg

SEQ ID NO: 566529 - DNA, 82 bp, Homo sapiens
gggaccaaggtggaaatcaaactgttacagaaagggagagaataggaattcccacggagcctgactctgcagacagccatgc

SEQ ID NO: 566530 - DNA, 82 bp, Homo sapiens
acctgcagcaggtggagcggcagattaaggtctctgtcccacctggtgctctggactgctgggtgtttctgagctgtctgga

SEQ ID NO: 566531 - DNA, 97 bp, Homo sapiens
gagctggacgccactgtggggctctgagagtcctgaattcttactgggaggtgtgattgcctatatcagttcttccagctcagcctcaagccctgcc

SEQ ID NO: 566532 - DNA, 107 bp, Homo sapiens
cgcaacccgataccatcggacaggatttctccgcctcagcccaacggggagggggatatgagactttctactcggaatatcctgagtgttgcgtggatgtaaaaccc

SEQ ID NO: 566533 - DNA, 80 bp, Homo sapiens
cctggacgaagtgtactgccttaacgactttgaagaagatgacacagatggttcccacagaactagtagaaaaggaattt

SEQ ID NO: 566534 - DNA, 100 bp, Homo sapiens
agtactggaagaacttaacttttgtggcacctatctatggtgcagatattaatgggagcatatatgatgaggttgatgttcttaaggcaacagcactccc

SEQ ID NO: 566535 - DNA, 101 bp, Homo sapiens
gctcccctaggagtgctgagcccgcggaaccgcagccatggtttttcgttggaatatacgttgcacatttatggcgattctgagtgtgagggcagacttct

SEQ ID NO: 566536 - DNA, 110 bp, Homo sapiens
taaagattacagagaaaaaaccaacaccttcctgtgcagtcctgttggaatttacaatgcagatcttcgtgaagactctgactggtaagaccatcaccctcgaggttgag

SEQ ID NO: 566537 - DNA, 100 bp, Homo sapiens
ctgtgcagaacacattccagtttttattagaaaactccagcaagagtgcagtgggccatgagtatgttgccgaggtggagaagcactcttctcagacgga

SEQ ID NO: 566538 - DNA, 100 bp, Homo sapiens
ctcaacttcttgtcctcaagtgatcctcccaccttagcctcctaagtagctgggaccacaggacagagcgggatgccaccagcttgtccaaagggaagtt

SEQ ID NO: 566539 - DNA, 100 bp, Homo sapiens
ctgaatgttatgtttattgaaactagtgcaaaagctggatacaatgtaaagcagacatttctcttgggaagttgtgcatctgacaggaatatagtactgt

SEQ ID NO: 566540 - DNA, 100 bp, Homo sapiens
cttgaaaccggcactgggacttctcgatctctggaggcacctgttgcaagtgacagatgcacaaagcagggtcatcagaagcctctcgattcaaaagatg

SEQ ID NO: 566541 - DNA, 82 bp, Homo sapiens
cgagggtgcagagcctggagagcatgccccggccccctgagcagcctcagactatggcatgaaactgccaatcctgcgttcc

SEQ ID NO: 566542 - DNA, 83 bp, Homo sapiens
ccgcaagctgagcgagctgtcagagcccggggacggcgaggccctcatgtaccacacgctgcttccctgaatctgtggatgtg

SEQ ID NO: 566543 - DNA, 51 bp, Homo sapiens
gattgccacttgatgccgccaaacgaacccacttccagcgggtgatcccag

SEQ ID NO: 566544 - DNA, 90 bp, Homo sapiens
cctgcacagatcaaacagcttttacagaatcctcctgctgcgggtccatatggaatatttgctggtagggatgcctccagaggactggcc

SEQ ID NO: 566545 - DNA, 87 bp, Homo sapiens
cgtggccggcagcgtcccggacgaggagccaagacaatgcaaactccagtgaacattcccgtgcctgtgctccggctgccccggggc

SEQ ID NO: 566546 - DNA, 87 bp, Homo sapiens
tggggagaaggaagcgagactcatacgcaacctcaatgcccgagcgggaagaagttccgcagcaagccgcagctggcgcgctacctg

SEQ ID NO: 566547 - DNA, 100 bp, Homo sapiens
gcattggcgtccgagcgacttctaggagcctggggttcggcgctatggaggagctcgatggcgagccaacagtcactgtgaaaggtgtagcagtcactcg

SEQ ID NO: 566548 - DNA, 100 bp, Homo sapiens
acgagtgggaatttgctccagcacttcacggactgcaagcgaggcacttgctaactcttgggttgggggccgtcccgctcctaaggcaggaagatggtgg

SEQ ID NO: 566549 - DNA, 100 bp, Homo sapiens
ctgggatccagtacgagttgaatcattgttcaaataagagggtcgatgaatggatggcgaaggaaggcctcttagatccaaacgtcaagtcaatttttgt

SEQ ID NO: 566550 - DNA, 82 bp, Homo sapiens
ccgttggccttcgtacccgtcttgattgaggattttttatcaagcagaaatgcatcgaacaacgagaatcaagatcactgag

SEQ ID NO: 566551 - DNA, 100 bp, Homo sapiens
caacaacaagttggccagggtgccctcagggctcccagacctcaagctcctccagccgctggaaagctgaagactgtcgcctgctccgaatttccgtcat

SEQ ID NO: 566552 - DNA, 101 bp, Homo sapiens
tgcccaggtgtggtcaccatgttcctctccgcggtcttctgtggctgcctctttgatgagccgtatagcacatgtggatatagtcaatctgaaggtgatga

SEQ ID NO: 566553 - DNA, 100 bp, Homo sapiens
gtggaagatgaggacagcatggatgggctggagacaacagaaacagaaacgattgtggaaacagaaaaccatgagctgttttccaagagcttcatctcca

SEQ ID NO: 566554 - DNA, 82 bp, Homo sapiens
cggaaactgagtatgggatctgatgatgctgcctacacacaaggagatgttacagcccagatagctcttcagcctgcactga

SEQ ID NO: 566555 - DNA, 127 bp, Homo sapiens
ggcttaagttttgaagggaggtagcatccgttggatatccacaccatccttctcgctgcaggaggacagagctgcccagtccttactcaacaagctgatcagaagcaaccttgttgataacacaaac

SEQ ID NO: 566556 - DNA, 87 bp, Homo sapiens
gaagagcgagtcgtcgtgagcgcggtcggcgattagcctgaggcctgctcagtcgttcctaatgaataaaaatcaagtgccaaagct

SEQ ID NO: 566557 - DNA, 78 bp, Homo sapiens
tcatgctttttcttctcaccatttctggccaaaactacaaacaagacttcgcaggttgatgataattagaagcatgct

SEQ ID NO: 566558 - DNA, 97 bp, Homo sapiens
ttccagtaccagatcatcatgaccatgatcgtccataagaactgggtgtcttactactttgaccgcgatgatgtggctttgaagaactttgccaaat

SEQ ID NO: 566559 - DNA, 50 bp, Homo sapiens
ccaccacccactccggacacagttactccacaggatccgctgaacatagg

SEQ ID NO: 566560 - DNA, 75 bp, Homo sapiens
cgctgttttcgacaggtgtgcaggtttcggcacatggagattgattgatcagggccaaagcggtcagtgagaagg

SEQ ID NO: 566561 - DNA, 117 bp, Homo sapiens
ataagggagggtggagtggaacacccctggcacaacaacgagattctacaagcctctgtagatggtccagggtgctgataagactgtgaaaggcccagatggactgaccgcctttga

SEQ ID NO: 566562 - DNA, 97 bp, Homo sapiens
gaatttccttcttgtagtctattgaaggcttattgtgtaacagaacctggagcaggctctgatgtagctggtataaagaccaaagcagaaaagaaag

SEQ ID NO: 566563 - DNA, 50 bp, Homo sapiens
gcaaaaaggagtgtgatattatcaatgtccgagttaccaccatggatgca

SEQ ID NO: 566564 - DNA, 101 bp, Homo sapiens
ttggaagcgctttgatttacagcagctgcagcttacgaggaaatatttcagtaaaagcagttaaaaaagaagtagaaaagaaactccgatgtcttcttgct

SEQ ID NO: 566565 - DNA, 75 bp, Homo sapiens
cccagaactacaggggctctggccatcttcgtggatatcccagaagctcctgagagactgatgacagacaccatt

SEQ ID NO: 566566 - DNA, 119 bp, Homo sapiens
ctgactttggctcagctgctgcatcaggcagtttcccttcccaaggacactgcccatctctaagataagaacctggaaaggggactctgttggccattggaaattgcagaataatgtct

SEQ ID NO: 566567 - DNA, 82 bp, Homo sapiens
gtcgccgcagccccccaatgcggccgcgagaagcagcgggggggcaggcgatcgaagaaaaatatgtcgtaactgcaagtgt

SEQ ID NO: 566568 - DNA, 75 bp, Homo sapiens
tggccctactgcaatctactgcactcgaggggaggttcattacacctgctcactacagtgatgtcgtggatgaac

SEQ ID NO: 566569 - DNA, 83 bp, Homo sapiens
tcagggatgagtcatgtggcagtggaaaatgcgctcgggctggaccagcagactgctgtgccctaatccgccggtgcctggcc

SEQ ID NO: 566570 - DNA, 100 bp, Homo sapiens
cggacgacagaggatgccgaaccactccagcaactttttcctgtacctgtgaggagcagtacgtgggtactttctgtgaagaatacgatgcttgccagag

SEQ ID NO: 566571 - DNA, 100 bp, Homo sapiens
ctctgattgaattttttgacagaaaaggcagatgtaattgttaattctgtaaacccacatgatattacagttggacctgtggcaaagtcaattctacaac

SEQ ID NO: 566572 - DNA, 100 bp, Homo sapiens
gtgggttatacctgtcttgcagccatccgagatcacgcttctgtctcatataatcaagtttcacagagcttctaaagcaaacaagaagccagttcagtta

SEQ ID NO: 566573 - DNA, 75 bp, Homo sapiens
gtctggaacattattgaaatgataatcagacagctaaatggagtctgagcagctgttccatagaggctactatag

SEQ ID NO: 566574 - DNA, 51 bp, Homo sapiens
cactgaaaacgtgctgcatttcaaagaaagtgactgagaccgaagatgata

SEQ ID NO: 566575 - DNA, 76 bp, Homo sapiens
gctgtgtgctggagggcactaccagatgggtttttggatgaagacttgaaggtagctgggaaatacaaaggaaatg

SEQ ID NO: 566576 - DNA, 83 bp, Homo sapiens
cgcgccgagccggaggccgcgtggacccgaaagccgctgggaaaagttgtggcagcactgcctgaaggtatgagaccagattc

SEQ ID NO: 566577 - DNA, 50 bp, Homo sapiens
tgaatgtgttactccattgctgaggagtgtggccacagatgtctttaatt

SEQ ID NO: 566578 - DNA, 97 bp, Homo sapiens
ctggcccccgggactccctgtgccttgcttggagctgacgccgacgggtgtcacaacataatgaaagttgctcaagccaaactggaaatgataaaac

SEQ ID NO: 566579 - DNA, 100 bp, Homo sapiens
gcctttctcattattataggctccctcctgctgtcaggctacatcagcaaaggggtgtcagcagttgagtctttggagggccccctgctccaggtggaag

SEQ ID NO: 566580 - DNA, 98 bp, Homo sapiens
aagaaacataaattaaaagaagaattgcggcaagattacagacgttatcttactcagctgggaaaacggcaatggattaataacaagaaattaatggt

SEQ ID NO: 566581 - DNA, 100 bp, Homo sapiens
ttctgcttcgaacatcgggtcaacgtctgcgagcactgcctggtagccaatcacgccaagattttaacctttgagaccaagaacccgtcggaattagcag

SEQ ID NO: 566582 - DNA, 116 bp, Homo sapiens
cagaccctctcctttccctttgagaccgtgaagagaaagatgcaggctgaatccattttgcaagggtacctggatgattcaggatacagtatccaggacctgaagagctttcattt

SEQ ID NO: 566583 - DNA, 75 bp, Homo sapiens
cgcaaggtcgccctcaaggccatgatcaaaacggactcggagatcatgcagcagaagcagaaaaaggcaaacgag

SEQ ID NO: 566584 - DNA, 98 bp, Homo sapiens
gggtctctagctcagaaccattagacacatcagtggagtccatgctacctgattgcccccgggtctcagcaggtgaaacagtcgcaaatggaattcca

SEQ ID NO: 566585 - DNA, 88 bp, Homo sapiens
ggccgatcctcgcgtgagacagatcaagatcaagaccggcgtggtgaagcgataagccaatggacacgtcagtgttatctgaagaagg

SEQ ID NO: 566586 - DNA, 75 bp, Homo sapiens
ggaagcctagcggagctcagtgtggcagctgctggcctctgggccgctgtccagactaccctcaagtttacatac

SEQ ID NO: 566587 - DNA, 100 bp, Homo sapiens
ctctcggcaggagacggggcgcacgcctgcagatgtttgagcgtgagacccggcgagagaagatcctggaggccaggcaccgggagatgcggctgaagga

SEQ ID NO: 566588 - DNA, 75 bp, Homo sapiens
aaatgcagtaaccagcatgtcaataaggggtcataggtggaaaagacatgatgttgtaaattttgatgacatagc

SEQ ID NO: 566589 - DNA, 75 bp, Homo sapiens
cacagaaactatatgccaccatggagaagcataaagaggctgcagtgcagaaggcaattcctatgtacaaaattg

SEQ ID NO: 566590 - DNA, 100 bp, Homo sapiens
cttccatctacaaaagctgagtttacttctcctccttctttgttcaagactgggcttccaccgagcagatcagctggatactcttgttaccagaattcca

SEQ ID NO: 566591 - DNA, 100 bp, Homo sapiens
cgcagctggctggcttcagtggaccaatcatcaccgaccgacctggctttcatgatgagagtgccatctaccccgtgggctattgcagtactcgaatata

SEQ ID NO: 566592 - DNA, 148 bp, Homo sapiens
cgagaccacgcccggggcccaggaaggcaagaagcagtataagatgatctgccatgtgttcgagtcggaggatatcattgataactggaagtatcataaaaccaaagtggcttcatattggctcataaaattggactctgtaaaacaa

SEQ ID NO: 566593 - DNA, 101 bp, Homo sapiens
gtttacatggaactcagacatctgcaaatcatggatctgtccaaaaccctcctgatgtacacggtgcctgccgtccagggcttcttccgttccatctcctt

SEQ ID NO: 566594 - DNA, 100 bp, Homo sapiens
tcaagactattaccagtgaagacgtggccgaaatgcacaacatcctgaagaaataccaccagaaatttccatgcagtatcggcatgatggagcttgccca

SEQ ID NO: 566595 - DNA, 74 bp, Homo sapiens
gagcctcagttggaagcagccgatccagcctgcggagcctgtggggcagagatggagtctcactgtattgccta

SEQ ID NO: 566596 - DNA, 98 bp, Homo sapiens
cgattgcacccacctgaagatccaaaactgcggctgctggagataaaacctggtaagaacaagagagttggaaagcagttagcctcacagaagatcct

SEQ ID NO: 566597 - DNA, 100 bp, Homo sapiens
atttattgctttagcatggatgcccaaagctacagtacaggttggccttgccatcaaaccaggaacctcagttgagtatttggcaccatgggctaatcag

SEQ ID NO: 566598 - DNA, 51 bp, Homo sapiens
tctcaccacttccctgcagctcccttaagttgcttttacagagttaacagg

SEQ ID NO: 566599 - DNA, 125 bp, Homo sapiens
aaggccatggatgaagatgggcttgaattacaacaagagccaaactcattttttgatgcaacagctggtaatgaatcttgccctcagcctcagacatcggaacacctggctgctatagagatcat

SEQ ID NO: 566600 - DNA, 83 bp, Homo sapiens
gggcgctacgccacctcgagtcgtggtgcgtccagagacaatgcagatcttcgtgaagactctgactggtaagaccatcaccc

SEQ ID NO: 566601 - DNA, 80 bp, Homo sapiens
cccagagggaaaagaagcccaaagttttaaagtaacaaatgtggcaattattttggatctatcacctgtcatcataactg

SEQ ID NO: 566602 - DNA, 83 bp, Homo sapiens
tttgactggaacatgctgaaattccttccccgggcgctgcctggacaggcctgcctgcgtgctgggacatgtctggcctccaa

SEQ ID NO: 566603 - DNA, 78 bp, Homo sapiens
actcaagagtggaagttttcacaggagccctctggcacaaatggaagaagaaagaagggagcaagtagctaaaattaa

SEQ ID NO: 566604 - DNA, 90 bp, Homo sapiens
caggagcatgtggccttacacgcccccatcagctgaccggttccctgatgtgttacctgcttctgctactgatccaaactgcagaacttc

SEQ ID NO: 566605 - DNA, 82 bp, Homo sapiens
gaggccccagaactatcttttcggcttctcacggcattcagcagcagcgttgctgtaaccgacaaagacaccttcgaattaa

SEQ ID NO: 566606 - DNA, 75 bp, Homo sapiens
ccccaagaggaaggaattcctggatgacttgttcagcttcatgcagaagcgagcaagagtgagccatggagctac

SEQ ID NO: 566607 - DNA, 83 bp, Homo sapiens
cgcgctcccgcggagccggagccgcagaggctcccgggctggactcaggcttctcaggcttcaacggaccacaccaaaatgcc

SEQ ID NO: 566608 - DNA, 98 bp, Homo sapiens
ttgcctttgccactatcacgcctctcatgttcacaggtgattaaggctgcagaagacagtgcgttgcagtatatgaacttcatgaatgtcatctttgc

SEQ ID NO: 566609 - DNA, 138 bp, Homo sapiens
tcttcctggccgatggcaatgtcttcaccactgggttcagccgcatgagcgagcggcagctggctctctggaatccgatatcagaaaaccaggactctgcagatgttgatcctcaggagcattcatttactcgaacta

SEQ ID NO: 566610 - DNA, 75 bp, Homo sapiens
cttttctccactcatataaaatgaacttgtaatagctggcatcgttgagaatgaatggaaaagaacgtgctccag

SEQ ID NO: 566611 - DNA, 80 bp, Homo sapiens
tggcccgattgatagaagacaatgagtacacagcaagacaagattttctaccctagcaaggatggtacgaagattccaat

SEQ ID NO: 566612 - DNA, 87 bp, Homo sapiens
ctcttcgcctcgcctcgggacccgcggtccccgctcttgctgtgccggtggtggtgtgcacattgagccccggtatagacagttccc

SEQ ID NO: 566613 - DNA, 98 bp, Homo sapiens
ctatagatattttatccacaactggccacagctgtgcttcttgctatgaaacccacgtagtcgaacaccgtgatgcttctcctgcagggcgtgtgatg

SEQ ID NO: 566614 - DNA, 100 bp, Homo sapiens
acttgcggcagctgcagcagcaaatccaacattggcttttggtcagggtcttgctactggcatgccagttgacattcgtgaaattaaggagatccgccca

SEQ ID NO: 566615 - DNA, 75 bp, Homo sapiens
ggggacccgggacgacgagtacgactacctattcaaagacatttatgcagtgtgtgattctttctaaaacaactc

SEQ ID NO: 566616 - DNA, 100 bp, Homo sapiens
agctgtccagatgctgaaaagagaaggtcaaacagctgaaggtgtgaccaattcagtgaaaggaacgaatgcgattctctggacctgtttgggactgagc

SEQ ID NO: 566617 - DNA, 75 bp, Homo sapiens
aaactactaggatcacgcggcatgtattgaggaagccaccattcttcagagggcaatgaaggcacagaaatggaa

SEQ ID NO: 566618 - DNA, 89 bp, Homo sapiens
cgggcgaggagggcacaaggccaggttcccaagagctcagatccttcccagcctgcaggccaacgatgcaatgctggacgtggtggaca

SEQ ID NO: 566619 - DNA, 100 bp, Homo sapiens
ctcgggacccgcggtccccgctcttgctgtgagagggtccaagcctggtaagaatgtccagcttcaggagaatgaaatcagaggactgtgcttaaagtct

SEQ ID NO: 566620 - DNA, 100 bp, Homo sapiens
ctcagagggacttatacaaggatgtgatggtccagaattatgagaacctggtctctgtaggatctgtgccagttcagaagcaggcgagcctcttccctga

SEQ ID NO: 566621 - DNA, 75 bp, Homo sapiens
ctgagtggttgtgtggtcgcgtctcggaaaccggtagcgcttgcagcatgatatttggagttcttacaacatggc

SEQ ID NO: 566622 - DNA, 50 bp, Homo sapiens
atgacgtggctcctggacccgcaataaagcgtacacagactttactaaaa

SEQ ID NO: 566623 - DNA, 100 bp, Homo sapiens
ttaatgatgcaatgaacatgggccacactgccaagcaggatgaaatactggagctgttgtagaagaaaaacttctgattttaatacattcttagcccaag

SEQ ID NO: 566624 - DNA, 100 bp, Homo sapiens
tccgatgctggggacaagaatgccaccaaagcaggcgatgacgagccagagtacgaggcgcagcccagcctcgaaatgcagaacgacgccggcgagttcg

SEQ ID NO: 566625 - DNA, 95 bp, Homo sapiens
tggctgccttatctttacacgctgcaggctatctatgtgcctgctgatgacttgactgaccctgcccctgctactacgtttgcccatttggatgc

SEQ ID NO: 566626 - DNA, 83 bp, Homo sapiens
cggcgactggacttacgaggagcagtttaagcagtgtgccgtgcaggtgaagctggagctggggcaccgcgcccaggtgagga

SEQ ID NO: 566627 - DNA, 98 bp, Homo sapiens
tggcggtgcagagaccagcatccttggagaagggtagaatttcagaacaaattctacgttggtgcaggcaccaaatttgttcctttctcattcagtct

SEQ ID NO: 566628 - DNA, 51 bp, Homo sapiens
agcttcatgttcctggtgtttgaccttagggacggggtttcaccatgttag

SEQ ID NO: 566629 - DNA, 82 bp, Homo sapiens
gctgaacaaggctgggtggatgggcagctacagcttggttccatgtactatattacatgggaataggactctcggctcaagg

SEQ ID NO: 566630 - DNA, 100 bp, Homo sapiens
ccttgcaaagggcacgtatagcattggtaaagaacgatcgtccagtggagacagatttgaccagttttgggccatcaatcggaaactcatggaatatcct

SEQ ID NO: 566631 - DNA, 75 bp, Homo sapiens
cgccggggggctagtggccacgctgcagagcctcggtctacatgttcaagtgcgtgtggcggtgctacagattga

SEQ ID NO: 566632 - DNA, 93 bp, Homo sapiens
ggccccgggatgacttctcagcgttcccctctggcgcctttgctgctcctctctctgcacgttaaacacagtgggaatatcacttttgatgag

SEQ ID NO: 566633 - DNA, 78 bp, Homo sapiens
tgtgacatcaccttattcacagacaactccaccaattgtacagggaactctctctctgatgctgatttgcactctgct

SEQ ID NO: 566634 - DNA, 75 bp, Homo sapiens
cgacgatcgggcctacagcagcttcggcggcggcagaggagaggtacagaaagcagtcaacactgcccagggatt

SEQ ID NO: 566635 - DNA, 75 bp, Homo sapiens
aaaaatcaaaaggagttcatgcttatgaatgctcgacttcaggaatcctttgctgaacacctaggctattcaaat

SEQ ID NO: 566636 - DNA, 98 bp, Homo sapiens
gtcctagatcgggaacaaaggagtcaacgtgtggccgggcggccaaagcctcctgctcttcatggatgaagcagacgccttccttcggaagcgagcca

SEQ ID NO: 566637 - DNA, 50 bp, Homo sapiens
ggaagatggaaggaaggagcgcagcgtatgggattgtgctggatgcgggt

SEQ ID NO: 566638 - DNA, 95 bp, Homo sapiens
tcccaagaagaataagcacaagagaaagaaggttaagctggctgtcctgaaatattataaggtggaggagtctggcgagcatgtgatcctgggca

SEQ ID NO: 566639 - DNA, 74 bp, Homo sapiens
cgagcacgcgggtctgtcatcatgtcgcgttacgggcggtacggaggaggaggcaggtggaagtcatcataaag

SEQ ID NO: 566640 - DNA, 102 bp, Homo sapiens
tggagaagctgggattggagattccacccaaacttgctggtcactgggaggacactcatgaggaccatgatacttccactgagaatacagacgagtccaacc

SEQ ID NO: 566641 - DNA, 102 bp, Homo sapiens
tggaaatgttatgcagctcagcaaggtgaagattctgatggtagaattaaccatgggcgaattgcttatatttcttcgaagagctgctctaatcctgatgag

SEQ ID NO: 566642 - DNA, 74 bp, Homo sapiens
gtagaacgtgcccttgagactcggcacgagcaggaacacttcagcagtgtggttctctttggtgcctgcattga

SEQ ID NO: 566643 - DNA, 82 bp, Homo sapiens
agcctaccagcaataccaggatgccggagagaagatgactgaggaggaggtggagaccgttctggcaggacacgaggacagc

SEQ ID NO: 566644 - DNA, 83 bp, Homo sapiens
ccaaagcctaccatgagctcttggaggcgagcctgctgcgggagtttttccagaaaggaggagtcaaggaagcccttagtgaa

SEQ ID NO: 566645 - DNA, 50 bp, Homo sapiens
atagcctttgccatcactgccattaagaacgtgaagctcttggagcaatt

SEQ ID NO: 566646 - DNA, 96 bp, Homo sapiens
gaaaggaaccagtgtctcccagaaggtatacatggactggtacgagaagttccaggacaggctcaacaagaaggtggtactcctgacaggcgagac

SEQ ID NO: 566647 - DNA, 90 bp, Homo sapiens
gaagtgactgggcggtgccggcgccggagacgatgccgttctgaaccttagccggccgatcgaggagcagggccccctggacgtcatcat

SEQ ID NO: 566648 - DNA, 100 bp, Homo sapiens
cgcgaatatcgtcatcgttagaaggtgttgagagagaaaagaattcctccctggatggaagtggtccttatacccatgacaggaaaaccaagtctgtacc

SEQ ID NO: 566649 - DNA, 101 bp, Homo sapiens
cccgggccaccgcgcaaccaagtgttgcctggtgagcctctgaagagccaatccattcaggatgggaaaccacgcaggcaaacgagaattaaatgccgaga

SEQ ID NO: 566650 - DNA, 83 bp, Homo sapiens
cgaggactgcctccccacaccaccgaccaggacctggtgaagctctgtcaaccggtgtcagtgtggaggcagttgatccagtg

SEQ ID NO: 566651 - DNA, 73 bp, Homo sapiens
agcactgctatgaagactgagaattgtgtggccaaaggtgataaaagaaaatgtggctgaagttacccgaagt

SEQ ID NO: 566652 - DNA, 75 bp, Homo sapiens
gcaaacttgacactcaccctgaccgaaaaacaagagctggatctcagaggatgacttctaccggccttcccggga

SEQ ID NO: 566653 - DNA, 75 bp, Homo sapiens
cattattccacagaaccaagtcaatcgaaagtcagaaatgttccgaataacgttacttcaagtcctacatccaac

SEQ ID NO: 566654 - DNA, 75 bp, Homo sapiens
ctcatcatggaaatcacagcacctgattcccaaggcaagacaggacagtcattttgtttactcattcagccctgt

SEQ ID NO: 566655 - DNA, 100 bp, Homo sapiens
gaggccgcggagcgccagctcaatgaactccccaggtgtgtcctggtagacaactgctcccaggagctggcatagaagcaaacctgcaggaaaagccaac

SEQ ID NO: 566656 - DNA, 75 bp, Homo sapiens
gctacttctcgctctgcttcatcccactattattttggcacaacaggaaggctaacagagaccctgatgctggaa

SEQ ID NO: 566657 - DNA, 76 bp, Homo sapiens
ctcccgctcccgctcctcctccaggtccccgacgcgccacttccgcagaagcagcctgatccttggccccttgagc

SEQ ID NO: 566658 - DNA, 75 bp, Homo sapiens
cgttgtggtgcgctgtcttcccgcttgcgtcagggacctgcccgactcagtggttggtgttcgaggaagagacat

SEQ ID NO: 566659 - DNA, 82 bp, Homo sapiens
ccggacgaaggtactcgcagcacttggagcgcagaaccggccgcgcccggttcagaagaagaacccagtcctgttttgaaaa

SEQ ID NO: 566660 - DNA, 75 bp, Homo sapiens
tcttcatagttacgttatactgcccctgcattgttggtattgaaacgagttgaaaatggtgacttcaactggatt

SEQ ID NO: 566661 - DNA, 83 bp, Homo sapiens
aagggacaatggtcaccgtctcttcagtgctgagcttgcaagacctctgctgccgggcggtcgtgtcctgcacgccggtgcac

SEQ ID NO: 566662 - DNA, 75 bp, Homo sapiens
atatcccagatttctgtggcagaagatgatgatgaaagtgtggtgaaggtgggtctggttgaagactctccctcc

SEQ ID NO: 566663 - DNA, 100 bp, Homo sapiens
aggatctatcctcactctgtggttcacgacagacttcgctgtgagtgcccaaggtttcaaagcattatatgaaggtaagaatgattgatgttggctgata

SEQ ID NO: 566664 - DNA, 76 bp, Homo sapiens
acaataccaactaaacagacaggatgcaccacatctagtaaaggtgtctgacaacaaagcatccctgccgcccaag

SEQ ID NO: 566665 - DNA, 96 bp, Homo sapiens
ctggaggtgggcaaggtgatccagcaaggtcggcagagcaaggggcttacgcagaaggacctggccacgttccagacagaactccggaagatactg

SEQ ID NO: 566666 - DNA, 100 bp, Homo sapiens
cagattcgcagtggtcgcttcttctccttggatacttttgtggaactctatgggaacaatgcagcagccgagagccgaaagggccaggaacgcttcaacc

SEQ ID NO: 566667 - DNA, 74 bp, Homo sapiens
cctacttcctgtcccactgccacaaagacaaaacttacctggggtccctacttatggttttacatgcttcgggc

SEQ ID NO: 566668 - DNA, 100 bp, Homo sapiens
ctggatctacggccctttccatagccagagcagtacaagagagttgagaagaggaggaagaataatgggaggagacaggacctttttcaacttgacaaat

SEQ ID NO: 566669 - DNA, 73 bp, Homo sapiens
gtccgtccgccgccaccacccactccggacacagtgagcaggggtgagcgcagccactgcccaacgcaaaccg

SEQ ID NO: 566670 - DNA, 60 bp, Homo sapiens
ggccccctcttcgcctcctccaggaaaatacctgaccctagagaatgtggctgatctggt

SEQ ID NO: 566671 - DNA, 75 bp, Homo sapiens
cccccgcactgtctttgtatctgagcgggagctggactgggccaaggtgatggttgctgaagccttggatatttc

SEQ ID NO: 566672 - DNA, 100 bp, Homo sapiens
gggggccaccacactggcccaaatatttcctgcagggtcctcatagaagatcttcagaaaacactggagaagggaagcagcttgcacacccagagaaacc

SEQ ID NO: 566673 - DNA, 75 bp, Homo sapiens
tggtgcagactttgctgagggtgacccagctgcctctggagacgtacaaacataccagattcgcacagcacccac

SEQ ID NO: 566674 - DNA, 78 bp, Homo sapiens
ctgggcgacggcgccttcggcaaggtttacaaggttctgcggggagtgtctccagccctgcctgcaggtgccatcccc

SEQ ID NO: 566675 - DNA, 75 bp, Homo sapiens
caatgtcacttacaacattaatcagatactgcatttaaggcagcagcagcggaaccgcttaggcagtgggggaag

SEQ ID NO: 566676 - DNA, 100 bp, Homo sapiens
cagagtatagggaggacgtgggcccattcattgcagtggaatcccccaaagaaggtaaagggagcaagccttccccactgtctgtgaagaacaccaagag

SEQ ID NO: 566677 - DNA, 100 bp, Homo sapiens
gaagcagcccagtggaaccacaaaaaggccaatttcagatggagatctataaggacaggcagaaattctcagaacaggttttcaaagtggcctcctcaga

SEQ ID NO: 566678 - DNA, 90 bp, Homo sapiens
cactccggatacttctccagcctgtacccccatcaccagtttggcccgttcccgcatcatcactctgtgataacccccgtgaggacaggc

SEQ ID NO: 566679 - DNA, 75 bp, Homo sapiens
cgcagctgcgatggccgtggccgtggggagaccgtctgttgaaatcacaaagattagacacctttttagataggt

SEQ ID NO: 566680 - DNA, 88 bp, Homo sapiens
ccaggttgccttggaaaatgccaacgccgtgtctgaaggtttggcagttctctaccagtggaccaatcttttcatccccgtgtacctc

SEQ ID NO: 566681 - DNA, 78 bp, Homo sapiens
agagcgcagcgccgagcgcggcccgggcgccatcgagccttggcggcggacgtgcagtattctgaaaaggaggacaaa

SEQ ID NO: 566682 - DNA, 82 bp, Homo sapiens
ggtgtacaaatacccctttgaattaattatggctgaaaaccaattctgtgtcctcggaggaccacagcccagttgggcccca

SEQ ID NO: 566683 - DNA, 82 bp, Homo sapiens
cccgccggtcacctccgcgcggacaccaggtgtttgagaagtcccccctgcgggtgaagaacttcgggatctggctgcgcta

SEQ ID NO: 566684 - DNA, 133 bp, Homo sapiens
tctaactcttatttctccgttggcccaaccagtcccagcgctgtcgtgctcctctactcggtgtcgtgaaaactacccctaaaagccaaaatgggaaaggaaaagactcatatcaacattgtcgtcattggac

SEQ ID NO: 566685 - DNA, 82 bp, Homo sapiens
tggcctggaggctatccagcttcctccaggagtgatccaaaatggagcgcgggtcctgagccgagggctgtttcctggcgtg

SEQ ID NO: 566686 - DNA, 101 bp, Homo sapiens
tgatatctgcaatggaaatgatcactaggcaatttcagccttgcaaatctaactgcaagcagctaatgactcagtctgtagactccaacagagggaacagg

SEQ ID NO: 566687 - DNA, 83 bp, Homo sapiens
ctgaagtggtttttcctaatggaaaatcacatacctttccaatcggacagctggcttttaaaggaatgaagagactcaataga

SEQ ID NO: 566688 - DNA, 100 bp, Homo sapiens
aaataattatgcctcagtagaatgtggtgccaaaattctagcagctaatccagaagccaagtacctggagtagaacagaaaaattattatgtctgtgttc

SEQ ID NO: 566689 - DNA, 83 bp, Homo sapiens
aagaaaaataacatcagcattacgctcgttgagcaatgccaccattatcaatgaagagggacagtatggaaattaccagcagt

SEQ ID NO: 566690 - DNA, 85 bp, Homo sapiens
cgttaaatcagtgcttcggggcacttagcacagcgcctggcgcaaggaggcctgtgcaacctgtgcccagacagggccaacaagg

SEQ ID NO: 566691 - DNA, 74 bp, Homo sapiens
acagctcaaaatgtcagatctagaaaagcagcatttgaaggctgttctgagatgttgatggctcatgctgtgac

SEQ ID NO: 566692 - DNA, 100 bp, Homo sapiens
ctggagaatgtcatcaagcagcacattcaaggcatttattaatacagcaaaagaaatttatgaaaaaattcaagaaggagtctttgacattaataatgag

SEQ ID NO: 566693 - DNA, 75 bp, Homo sapiens
ggacgtccggcttcggagcgggagtgttcgttgtgccagcgactaaaaagagtacttggaccatgagactgtttc

SEQ ID NO: 566694 - DNA, 75 bp, Homo sapiens
tgtggatcgctgtgatcgtcacttgtttttcagaagaagtgaagtcaagatgaagaaccatttgcttttctgggg

SEQ ID NO: 566695 - DNA, 74 bp, Homo sapiens
tttggagacaaaactatgccattgccctcggaccagaaagaagaaaatctgactcaggagttatgttgccaacg

SEQ ID NO: 566696 - DNA, 98 bp, Homo sapiens
ggcatccggggatttctgctcacctggagaagggatggaaatacttcaacaagtgttagatgatgaagatagcaacaacatcacagtaggatccttag

SEQ ID NO: 566697 - DNA, 100 bp, Homo sapiens
cggtcatggagggagcaggagctggatccggcttccggaagaatcatgtccctaaggaggaagctggagctccacgaggggaggggccggccatcccagg

SEQ ID NO: 566698 - DNA, 100 bp, Homo sapiens
gactttccttacctgtttttccagctcacccactgccagcagaggttttactgcaatcacagcaaccaaccccatttggcttataaagactcggttacag

SEQ ID NO: 566699 - DNA, 100 bp, Homo sapiens
cgcggcttccggagccctcggggcggcggactggctcgcggtgcaggagcctcacagtctactcagagaaaaataaaagaaggcaaaatgagtcctcccc

SEQ ID NO: 566700 - DNA, 101 bp, Homo sapiens
tttctccagcgaagaagtagacatggcgagcgactccccggctcgaagcctggatgaaatagatctctcggctctgaggagctgtaggtaaaacttgccta

SEQ ID NO: 566701 - DNA, 83 bp, Homo sapiens
acagtttgaggacctcctggtgcgcatcctgctgctggctgcccttgtctccttttctattatcctcccagtccacaacgctg

SEQ ID NO: 566702 - DNA, 74 bp, Homo sapiens
atttggatatccctagaacgttgagggcacgagtcgggtcctgagaccagtggcctgattccaccaagagaagg

SEQ ID NO: 566703 - DNA, 76 bp, Homo sapiens
atcagatcgatctaagatggcgactgtcgaaccggaacttagtgatttggcccgtgaccctccagcacaatgttct

SEQ ID NO: 566704 - DNA, 51 bp, Homo sapiens
agtggccgaggagattcaggatgaagttgaggcggggtttcaccatgttgc

SEQ ID NO: 566705 - DNA, 101 bp, Homo sapiens
ctggaaaaagaagtccaagaagcaaaaaagggactgctaagaagataccaccaggcgaaacctaaccaaactgtccctcatcttcagccacatgctggcag

SEQ ID NO: 566706 - DNA, 50 bp, Homo sapiens
ctcccggcgcctcaagcggaagaaattgcatctgatggtctcaagggtcg

SEQ ID NO: 566707 - DNA, 100 bp, Homo sapiens
acggatgccgtctggatgggaagttacggtttacagcgaagtccacccagcgtttccgagtttcgccgtgaggaagatgcggaaaaggctgtgattgact

SEQ ID NO: 566708 - DNA, 95 bp, Homo sapiens
gcggggatgggggcctcgggcgccccgcagccccccaacatcctgctcctgctcatggacgacgaggcatacacggaatacctgaggagcatcca

SEQ ID NO: 566709 - DNA, 80 bp, Homo sapiens
acacatgctaaaagatgacagacttggacaacatgtcccaacattacatcccagtgcgtagtttctctgaaaagcatcac

SEQ ID NO: 566710 - DNA, 51 bp, Homo sapiens
gagagaactcagcgaggattctgagtgagatgaacccggtacctcagatgg

SEQ ID NO: 566711 - DNA, 100 bp, Homo sapiens
ttgcagtcggccagcccccttctccacgggacgcgtgtgggcgtggtgcagtacagccacgagggcacctttgaggccatccagctggacgacgaacgta

SEQ ID NO: 566712 - DNA, 100 bp, Homo sapiens
atcggtgcgtggtgacgtttcgccggcgcgggcgccatcccggaagcgcgagcaaggccgccagatgtgcagacaccattcgcttttcacccaagatgat

SEQ ID NO: 566713 - DNA, 90 bp, Homo sapiens
ctcgggtcgttgtggtgcgctgtcttcccgcttgcgtcagggacctgcccgactcagtgccttgatgacttacaagccctcaaggggaag

SEQ ID NO: 566714 - DNA, 100 bp, Homo sapiens
tgggcctgcaggtctctgtcgagcagcggacgccggtctctgttccgcaggatgccaggcccagacatgtccgtccttgtaagttaaaagcttccatggg

SEQ ID NO: 566715 - DNA, 82 bp, Homo sapiens
tgtgctcgcgctactctctctttctggcctggaggctatccagcatttggagcaagaggtggtggtggccttcccccgaaga

SEQ ID NO: 566716 - DNA, 50 bp, Homo sapiens
catggagaaaaatggatcttaggtgtccatgaaactgggaggcgaccgtg

SEQ ID NO: 566717 - DNA, 97 bp, Homo sapiens
aggccctccggccgcaggcgggacccggcggggcgcaccacagagaccggcttcaatatcttcacccagcatgattacatgaagcagatgacatttg

SEQ ID NO: 566718 - DNA, 75 bp, Homo sapiens
ctacaacccgaccaccggagaattcctggggcgcaccgccaagagctggggtttgcatcgccagcttctatatat

SEQ ID NO: 566719 - DNA, 51 bp, Homo sapiens
tcggaactgtatcccatttgccggccacgacttcctccgtcaggcagctgg

SEQ ID NO: 566720 - DNA, 90 bp, Homo sapiens
agggcgggaggaacatgacatcgcggaggggttgcagatggtgtaggaggctggagagactatggagttgatccatctcaattctcaggg

SEQ ID NO: 566721 - DNA, 100 bp, Homo sapiens
agtgacacaaggtgatagacttcgggccttgaaaagcagaagacaatccaaaacaaacgctattcctctcacccttatgtttgatcatcggccaaggtcc

SEQ ID NO: 566722 - DNA, 100 bp, Homo sapiens
tcgcttggttaaaacctgacacttttaacagatgtctttggtggacttgggaaagaggttgctagaagcagcaagaaaaggccaagatgatgaagtgaga

SEQ ID NO: 566723 - DNA, 104 bp, Homo sapiens
tttaaagctgtccctgaagtgacagcggagagaaccaggcagcccagaaaccccaggcagaggagatatggaacagaatgactctgacaaccgtagaataattc

SEQ ID NO: 566724 - DNA, 100 bp, Homo sapiens
cagaaagccgcctcttggtttgcgtcctgcactgaaaggaaatgacggattttggcccggcctgccccgcacctgagctgccctcgcccccctctgctgg

SEQ ID NO: 566725 - DNA, 75 bp, Homo sapiens
aacgaaagcagtgacggaggagcttgtaccaccggtatgatctcgtgaaatcttgagagaaactgaatgacgaat

SEQ ID NO: 566726 - DNA, 90 bp, Homo sapiens
ctcggcctcggagcaacgagcgcagcgccggctgaccccgcactacatctacccaccagccatcgtgcagcccagcgtggtgatcccagc

SEQ ID NO: 566727 - DNA, 76 bp, Homo sapiens
cgggcattctacggagggagatattcttgagatgcctgaaaacttcatgcctcctgttcccatcacatcaccaatc

SEQ ID NO: 566728 - DNA, 75 bp, Homo sapiens
gaccgacctcaccctgtcgcggccattgagacccagagcagcagttctgaagagatagtgcccagccctccctcg

SEQ ID NO: 566729 - DNA, 98 bp, Homo sapiens
gcatggccgacggtgacttcgtcagggctgaccccacattggacaccgctgcatccatgtccatcacacaacacagctgccgtttcttctgcctgctt

SEQ ID NO: 566730 - DNA, 98 bp, Homo sapiens
agcagcactcttcaccctgcacagccttgttagtggccttgttcccagtgtaccagatgacctggatggcatcaaccccaatgctgggttgggaaatg

SEQ ID NO: 566731 - DNA, 98 bp, Homo sapiens
cggagagcggcctgcgggcgatcgggccgaggaacctagaaagattgtacaatgaatggtgattctcgtgctgcggtggtgacctcaccacccccgac

SEQ ID NO: 566732 - DNA, 100 bp, Homo sapiens
gattagcttcgcagtctggaaagctttaggagttcacagtgaacttaagaagtatggagttaccacaatagtaagagtatgtgaagcaacttatgacact

SEQ ID NO: 566733 - DNA, 98 bp, Homo sapiens
ctgccttattacgccgtctccaagatgtagctaatgaccgtggttcccactgagcattgtcttcagtgttaagaaatgtggactcctgtgaggtgctg

SEQ ID NO: 566734 - DNA, 101 bp, Homo sapiens
cccgcctgtcatgggctggacagcggccacgggcagcctcgatgctgggacctgatgcccagaaccctggacgggcagatcaccatggagaagacgcccag

SEQ ID NO: 566735 - DNA, 78 bp, Homo sapiens
cgctgctgtcttcgtgggaggcgccgtgagttcgccgctggtggctccgggactatacaggctccaacccaagttcca

SEQ ID NO: 566736 - DNA, 97 bp, Homo sapiens
gcctgcccagacggctcacctgtgcgggatggaacaaaagctctggggcgctgctttccatggaccaacgttactccaccggcgctcccagggatca

SEQ ID NO: 566737 - DNA, 90 bp, Homo sapiens
caaagaagataaagttgacagcagaggcagagcatttcaccaaccagagggaagaatttgagggcaccagggagagcattctggtgtggc

SEQ ID NO: 566738 - DNA, 90 bp, Homo sapiens
ctcgctgcgtataaggaggaagcaaacaccattgctaagattcctataactttaggtgtaatcctaaattcttattacgatgtgaagttt

SEQ ID NO: 566739 - DNA, 83 bp, Homo sapiens
tgaagctgagacccgcgtccccactatgagtctattatcctcccagtccacaacgctgaaccgtggctggacgaatgtttgag

SEQ ID NO: 566740 - DNA, 101 bp, Homo sapiens
ccgcagcaccatggcgaccaccgtcagcactcagcgcgggccggaattgcattttgtgaaaaaagaacaagaattttctgcaaggatcatatctaagtgca

SEQ ID NO: 566741 - DNA, 90 bp, Homo sapiens
cgactcgcggaccggcgtccccggcgcgaagaggctggactcggattcgttgcctgagacattaccagaaacatctttaccaaattatgc

SEQ ID NO: 566742 - DNA, 50 bp, Homo sapiens
gtcatgagcagggcttctctgtggaaatattccatcaaagaccttttgaa

SEQ ID NO: 566743 - DNA, 73 bp, Homo sapiens
agaagtctactaatggacagttagtcacccacctacatgttgagttatctcagcatcgagtgacaagagactg

SEQ ID NO: 566744 - DNA, 82 bp, Homo sapiens
tacactttgaccatgctgtccggatgggaatccattacattgggcgtatggaagagggcagcattggccgttttatcttgga

SEQ ID NO: 566745 - DNA, 50 bp, Homo sapiens
ccgagcggaactggagaaagctgaggagctaaaaaagtccctgtacgcca

SEQ ID NO: 566746 - DNA, 96 bp, Homo sapiens
gaagttcttattaaggtgaagcatttcatgaaacaacacattcttccagctgaaaaggtggttttagaagaaaatggtgagaaaaatcaagtacaa

SEQ ID NO: 566747 - DNA, 100 bp, Homo sapiens
cgcgactagggtgcagcgccaggtccggtgttggggtgtccgagttgccgccggagaggagtggcctcgcccgcttgaaaaagatggaggagctcttatt

SEQ ID NO: 566748 - DNA, 83 bp, Homo sapiens
gccgcgccgtccgcgccgcccgttctggtggtctttgggaagaagcttcctgcctttgccaccatccccatccaccagctgca

SEQ ID NO: 566749 - DNA, 100 bp, Homo sapiens
gtgacctggccgatgaggaagtactgagcctgttggaggaactggcccggaaacaggaggacggatccaggtccggcacgatcaagacccaggctacatg

SEQ ID NO: 566750 - DNA, 100 bp, Homo sapiens
ataggcattctgatgggaacttgtgtgttaaagtaacagatgatttagttgtgaagacattcagtgaagcttgcctgatggtaaggaaaccagccctaga

SEQ ID NO: 566751 - DNA, 89 bp, Homo sapiens
cgcggacccactgggttgccaagctcgcgccggatgcggagcgcggtgctgccggtggagcttcaggagcacttgattagactccagaa

SEQ ID NO: 566752 - DNA, 90 bp, Homo sapiens
aaaacagcttctgacaagagccccagcacagtgagagatcaaggtcccagaatggtgcttagatgactggcatccttctgagaaggcaat

SEQ ID NO: 566753 - DNA, 75 bp, Homo sapiens
ctgtggtgatggatgaggtggtgctgacaatcgagcaaggaaacctggccaccaaagtccttggcactgtcaaat

SEQ ID NO: 566754 - DNA, 82 bp, Homo sapiens
ttcgtggggcgtgaggagtgtgagctcatgctacagcaaattgtggctactaatttgccccctgaagatcaagatggctctg

SEQ ID NO: 566755 - DNA, 74 bp, Homo sapiens
atgaaggacgtgcccgactggaaggaacttgtaatagctggcatcgttgagaatgaatggaaaagaacgtgctc

SEQ ID NO: 566756 - DNA, 88 bp, Homo sapiens
aggaaggaacgaggcaaggagctaaagcagcgtgcgttcagccctggggctttccatctgatggtcccctggtgtgtgccctggaaca

SEQ ID NO: 566757 - DNA, 82 bp, Homo sapiens
tcagcagatgaaatacatgaaggagacctagtggaagtggttctttcaggagtccaatgtgctgattgctgctaacagtcag

SEQ ID NO: 566758 - DNA, 110 bp, Homo sapiens
ctgcagtactcttggcccatggacctgaaggagaagcacctgataaagccaccaatccttccaaccgccaggaggactgggaatacataattggcttctgtgatcagatc

SEQ ID NO: 566759 - DNA, 100 bp, Homo sapiens
gcccacctgcgtaagggggcagagacaggctatgtccaaactgggtcttcggcaggttacaggagttactagagtcactatccggaaatctaagaatatc

SEQ ID NO: 566760 - DNA, 74 bp, Homo sapiens
tgttctacaggaagatgctgagaaactgcggaaagaattgcatgaaggttttaaaatcaaagatgggaaaatcg

SEQ ID NO: 566761 - DNA, 100 bp, Homo sapiens
cgagtcattgtttggatctgttgctgatgatcagaaacttatgatagatgtgaactttgtccccataaggatggagctttaaaaagaacagataatgggg

SEQ ID NO: 566762 - DNA, 75 bp, Homo sapiens
gatatatatgctgacgaggagttcaaccaggtttaaaatgctacctgaagttctatatcgtatcttcacacttga

SEQ ID NO: 566763 - DNA, 101 bp, Homo sapiens
gaattatacctagaagtctactaatggacagttagtcacccacctacatgttgagtatgtgcagaagcttataatcctgatgaagaagaagatgatgcaga

SEQ ID NO: 566764 - DNA, 100 bp, Homo sapiens
cttcagtccccgccgagccgccaccgcaggtcgaggacggtcggactcccgcggcgggaggagcctgttcccctgagggcgtgatggtgggcatgggtca

SEQ ID NO: 566765 - DNA, 83 bp, Homo sapiens
atgctcaagcactgcaagcggcacacggacaatgcagatcttcgtgaagactctgactggtaagaccatcaccctcgaggttg

SEQ ID NO: 566766 - DNA, 75 bp, Homo sapiens
atcatccctgtggagattgatggggtggtccaccagatactattcgttacttgtccttgcatgacaacaaataca

SEQ ID NO: 566767 - DNA, 98 bp, Homo sapiens
tggaggagcgaggcagctgtactaggactgggaacggtgcacgtgccggaaggacatggtcaagatctccatggacgtgttcgtgcgcatcctgcagc

SEQ ID NO: 566768 - DNA, 101 bp, Homo sapiens
aaagcgggcagcaggatggtggtggatgcggccaactccaatgggcctttccagcccgtggtccttctccatattcgaggaatgaatctgaagtctgctgc

SEQ ID NO: 566769 - DNA, 50 bp, Homo sapiens
caagagaaggcactcaagtttatgtttgcagagaaattccaggaggtgaa

SEQ ID NO: 566770 - DNA, 100 bp, Homo sapiens
tacggaggtggcagccatctccttctcgctttatgctgaaaaggtggccactagaggtctgtgtgccattgcccaggcagagtctctgcgttacaaactc

SEQ ID NO: 566771 - DNA, 89 bp, Homo sapiens
cttcgggtgccactgtaagaagatgcctgaaatgtgcagatgccccgtgtcagaagagctgtccaactaatcttgatattaaatcattc

SEQ ID NO: 566772 - DNA, 75 bp, Homo sapiens
aacagcaaccttggtatgaagtgtggcatccaaaatcagaggcttcgtgggacacatatgcaacatgcctatgat

SEQ ID NO: 566773 - DNA, 100 bp, Homo sapiens
aattctcccacaatagtttcacctgctattgtttcccccacccagggcttaaaagacaaccttcttgcttctgggacatccagcctgacagccaccaaac

SEQ ID NO: 566774 - DNA, 80 bp, Homo sapiens
gctctaaagcccttcacagcaagacccaggaagccgcgggcaaactcagactcgaagcccaagaagatgaaaggattgtt

SEQ ID NO: 566775 - DNA, 100 bp, Homo sapiens
agccgcttccgacagaactgaatgtaacttcaccgagtaaagaggagtgcacattgcaagcaacccgtgccttgatggtggttggcatcctcctgggagt

SEQ ID NO: 566776 - DNA, 75 bp, Homo sapiens
gtgacctccagttccatccatgttgctgcaaatgaaaataaagcagttggagtgatgaagtcgggccatgtattt

SEQ ID NO: 566777 - DNA, 82 bp, Homo sapiens
tgagaccctggtggagtttgctattgaccttgccaccatggaagaaagagtacaaagacgatattatgaaaagctgacggaa

SEQ ID NO: 566778 - DNA, 100 bp, Homo sapiens
ttcagcggggcgctccaggaggcactcacagggacctccgaaacaatcttattagtagtatagatccaggtgccttctggggactgtcatctctaaaaag

SEQ ID NO: 566779 - DNA, 100 bp, Homo sapiens
cgcagccagtctcctggccatgtgcgcaggggcagaagtggtgcacaggtactaccgaccggacctggaaccctaaggactctgcaatatgaataattcc

SEQ ID NO: 566780 - DNA, 75 bp, Homo sapiens
gacaggagtatctgaggatggagaactcagcaatgtaaggctacgaaaacttgctggagagaaggaagaactact

SEQ ID NO: 566781 - DNA, 100 bp, Homo sapiens
ccggaatggaaaagtgggactggatgctacaaactgtttgaggataactgacttaaaatctgggaaataatgcaaaaggtgtcccaaggctcctgaccag

SEQ ID NO: 566782 - DNA, 100 bp, Homo sapiens
agcttggactacaggcgtgcccttccatgcccagttttctggatatgccgcagaaggatccgtgccagaagcaagcctgtgagatacagaaatgtttaca

SEQ ID NO: 566783 - DNA, 100 bp, Homo sapiens
tggctgagagctagcaaggaaaactcaggaccatgatggctcagtttcccacagctatgaatgaattggcagagggggtcgatttgggaggaaaggtgtg

SEQ ID NO: 566784 - DNA, 83 bp, Homo sapiens
gaatttgtccgagatgtcatgggcagcctggcatcctcgctacaacctcattgttgtgggccgatacccagatcctaatttca

SEQ ID NO: 566785 - DNA, 75 bp, Homo sapiens
caaaaatagtgatagctttgataaggccgcgttcgcaccaaaaccgtgaagaaggcggcccgggtcatcatagaa

SEQ ID NO: 566786 - DNA, 75 bp, Homo sapiens
tttgcaacagaattacagagtatgatttttaacttctagtcatggcgaatgatcgcaggagagcacagactggac

SEQ ID NO: 566787 - DNA, 102 bp, Homo sapiens
cgccggttttgaccgccacattaccattttttcacccgagggtcggctctaccaagtagttttcggctttgtgagaaaccttaccatcaaacacgatggcca

SEQ ID NO: 566788 - DNA, 96 bp, Homo sapiens
ggtctgttagaggaagacgacgagtttgaagagttccctgccgaagagtacatccagaaatacgccacggaggaggcgctgaaagaacaggaagag

SEQ ID NO: 566789 - DNA, 97 bp, Homo sapiens
ggtctttgtcaattatggaggaggaaaatattggtacttcaaacatgcaagttggaatgtgacctgaccaacggtgcagatgggatgctggccacaa

SEQ ID NO: 566790 - DNA, 90 bp, Homo sapiens
gagagcctaactgaaaggaagagggagcagagcaagaaaaaaaggaagacgatgacttcagctatcatggtgaacttacttcagattgtg

SEQ ID NO: 566791 - DNA, 100 bp, Homo sapiens
aatgaaaaatttggcagataatcattgggcaaaaacttgtgagggcgaaggtcgtattgaatggtgttgtagttctgagccatctgaagatgaagagtcc

SEQ ID NO: 566792 - DNA, 100 bp, Homo sapiens
caagaactcaaactttttgtatctcgacactctgcaagattctctcctgaagtcccagttcaggatctgctatctgaggatcatggatgcagcctcccag

SEQ ID NO: 566793 - DNA, 82 bp, Homo sapiens
gccgcccgtccacacccgccgccaggggggtcctgtggagatccttcccttcctctacctcggcagtgcctaccatgctgcc

SEQ ID NO: 566794 - DNA, 97 bp, Homo sapiens
ttgtcctaccctatcaggatccagctggagaaaacaaaaggtcaactgatgacctggagcaggaattcagagcctctgaattgcttcgaagtggact

SEQ ID NO: 566795 - DNA, 75 bp, Homo sapiens
cgccattatcgcatctccccgacaaacaccacgagaattccgcagcccacacggaggaggatgtggtgattgaag

SEQ ID NO: 566796 - DNA, 89 bp, Homo sapiens
tgacatccttctttttagagatcgttttgatggatatatcttccttgacagcaaaggcatccgtgtcattctggaccttactcccaact

SEQ ID NO: 566797 - DNA, 100 bp, Homo sapiens
tcctggcacccggtgcttatgtctttggctgaaactcgaactatctaccagtttcattacaagaattggccagaccatgatgtaccttcatctatagacc

SEQ ID NO: 566798 - DNA, 87 bp, Homo sapiens
gactttcacttccagccagctgtgaagaagatgcatcaaattgcaatttggaggagaggcagcacaagcagaagcctgggcctggct

SEQ ID NO: 566799 - DNA, 75 bp, Homo sapiens
tattcccttcaattcaagtaacagggaccatgggctgtggctgcagctcacacccggaagatgactggatggaaa

SEQ ID NO: 566800 - DNA, 100 bp, Homo sapiens
ggcggtggtggcttgtggtgcggcctcaccatacaggaacagggcagacgttagcgtgagtgatcactctcaatcccggcaatcagaaacggagactgtt

SEQ ID NO: 566801 - DNA, 75 bp, Homo sapiens
caccagtagcttttctgagaatacttgctgaaaaggaagttttctggaatgggaaaattgcctaagaattatgac

SEQ ID NO: 566802 - DNA, 100 bp, Homo sapiens
atcaagggcggcacgctccggggcatcatcaagagcatgggagagcacatctgcctgatccgcaaggtgaacgagaactggtacgagggacgcatcacgg

SEQ ID NO: 566803 - DNA, 100 bp, Homo sapiens
gttttccccaggcaaggattccggagagaggatcaggtgttttcaggttaaccgtcagatgttttcacctcctgtgagcagtgggaaaaatggaccaact

SEQ ID NO: 566804 - DNA, 100 bp, Homo sapiens
gctgctatgaggtctcgtaaacaggtgcagattcactttataggaacagcttcagcttcagtgatgaaaaactgaattctccaacagactctaccccagc

SEQ ID NO: 566805 - DNA, 75 bp, Homo sapiens
aatgtgatttgcttgaagatatgagttcatagccctgatgaagcaagttactctgctctcctaataaatgcaaga

SEQ ID NO: 566806 - DNA, 100 bp, Homo sapiens
ataccttggcttatgccctttctcctgcatcttccaagccagcaatggtagggtatatttgaaggctcccatgattctgaatggagtctgtgttatctgg

SEQ ID NO: 566807 - DNA, 74 bp, Homo sapiens
aaaaccttcaggcggcccatgggtgttgctctcttgccattcgtggatgagcgaaggctacgagctgccctaga

SEQ ID NO: 566808 - DNA, 86 bp, Homo sapiens
cctgcttcagggaacacattttctcatcacagtatggtagccaatctgaattctaaggacctctcatataccttaaaggattatgt

SEQ ID NO: 566809 - DNA, 90 bp, Homo sapiens
aaacctttgaccatgaagagaaatgagatgatagccaaaccctcagcttcagaggatgattccgaagaagacggagaccataacaggaca

SEQ ID NO: 566810 - DNA, 71 bp, Homo sapiens
ctcggggctggcagccctggccaaggtgcggtttctggagcagcagaacaagctgctggagaccaagtgga

SEQ ID NO: 566811 - DNA, 51 bp, Homo sapiens
gccacatcattgctttatgtggtatcatgatattagctggtttgacatcaa

SEQ ID NO: 566812 - DNA, 90 bp, Homo sapiens
gccagacagactgctgagcgactatattgagaaggaggtaaagtgagcatttgtcctgtgctttcacattctttctgcatggagaaagta

SEQ ID NO: 566813 - DNA, 100 bp, Homo sapiens
gctgagggcgcgccctgatctcagcgggaagagtgcgaccccgagggcgcgctaggagtatgcgaccagtggttggaacctgaatgtgatgccagtgcta

SEQ ID NO: 566814 - DNA, 100 bp, Homo sapiens
cctctcttcgcggagcggcgccgcgtagcttccatccgccagctgccatgagcgagcgcctccgtcccaggaacggaaaacagttcttccttcaaagcat

SEQ ID NO: 566815 - DNA, 98 bp, Homo sapiens
tcgacgggaccgaagtgagcgtggacctgccggatgttgcttcagagtgtgaagtcaaatgcatgccaacattccagttttttaagaagggacaaaag

SEQ ID NO: 566816 - DNA, 96 bp, Homo sapiens
ctgagcatcatctttcgaaaagaggacatgtactcccaggattccatagatctccttgctaactcaggactacagtttcagaagcatgaagaggaa

SEQ ID NO: 566817 - DNA, 101 bp, Homo sapiens
ccaacagaacgacctagtatttgaatttgctagtaacgtcatggaggatgaacgacaggatgaatgctatcaagtaagacaagtgtttgcccagaaacttc

SEQ ID NO: 566818 - DNA, 90 bp, Homo sapiens
atagatcttctgcactgtttacaggcacagagatggagtttcaccgtgttgcccaggctggtgtcgaactcctgagctcaggcgatccgc

SEQ ID NO: 566819 - DNA, 100 bp, Homo sapiens
ttcgagaaaatctaagagatgcaagaaacagtctttttacaggtgatacacttggagctggccaattcagcgatgtgcattttgtaagcactttggagcc

SEQ ID NO: 566820 - DNA, 73 bp, Homo sapiens
aatccttgaaagaagaagatggagaagaaatagttacctatgatcggtaaaatatttggagtaccttttaatg

SEQ ID NO: 566821 - DNA, 51 bp, Homo sapiens
ccgggcggctggcctcaccgcccactggtttgggagcctctggtggagcaa

SEQ ID NO: 566822 - DNA, 90 bp, Homo sapiens
ggtccctgcagagcgatccccgggcccagatatggacgcagcagagccggagctagagccggtgcaggccacgcagaacaagacagggaa

SEQ ID NO: 566823 - DNA, 100 bp, Homo sapiens
acctcatccacagggcctcctgccagccccagcccctggagaggatgcaggccctggccaacgtcaacattgggagcctcatctgcaatgtaggggccgg

SEQ ID NO: 566824 - DNA, 75 bp, Homo sapiens
agttgccatctatgttaatggatacacaggaggactgacaaatggtagtggtcgatatatctctgcagcacctgg

SEQ ID NO: 566825 - DNA, 75 bp, Homo sapiens
ttgtttgtggatcgctgtgatcgtcacttgggtaacaagatgctcaactatagtgctcccagtgcagggggttgc

SEQ ID NO: 566826 - DNA, 83 bp, Homo sapiens
cgaaaattggatgtgaaaatgaagccagaccgagctgcccgaaaccatgttaatagaatgtgcctggcagctgatgttcctct

SEQ ID NO: 566827 - DNA, 51 bp, Homo sapiens
gccaagccctagcctgtgggagcaacagacagtgacaataccctcccctcc

SEQ ID NO: 566828 - DNA, 80 bp, Homo sapiens
ctgaaaccagtatccatcaatacttgaatgcaatgagagccactatggaacaccatgccaacagaggtgtttacccccct

SEQ ID NO: 566829 - DNA, 113 bp, Homo sapiens
gaacatcatcaaaaatgaagctctctttgacagtggtctccacccagctgttaaagcaggggaaatggaaggtgatgcagtcgaagccattgtggaggagtccgaaactttta

SEQ ID NO: 566830 - DNA, 101 bp, Homo sapiens
gtgagcacataaaaaatccatgtcttgcacctgtattttagcgtactatgcagaataactgaagtgaagtgatggactccgatttggagagtagtaagacg

SEQ ID NO: 566831 - DNA, 98 bp, Homo sapiens
gaatgtacatagaagaacaagatgatcaagatggctcttcatggaaatgcattgtcagatatggaatgtgcagatgtcccactattaactccaagcag

SEQ ID NO: 566832 - DNA, 100 bp, Homo sapiens
gaaaaacttataattcaggactttatcttagaagctacacagaatggccaaagttttctggtcttggatgagcaacgatttgcaaaagaaattcttccca

SEQ ID NO: 566833 - DNA, 75 bp, Homo sapiens
atagctctgtatgagaaggacaacacctacttaggcctcaggcccaggcccaaggccaagtgagagagcccaggc

SEQ ID NO: 566834 - DNA, 96 bp, Homo sapiens
cagagccaagcgggcccgagcaatgcccgaggaggagccagtgagaggtcctgaagaagaaaggagggcgcgggctaatgaccgagaatacaatga

SEQ ID NO: 566835 - DNA, 90 bp, Homo sapiens
agggctggaaacttcgctatcatggagatctgctgtgctgtggctttcattgagaagctagacgcccagtctttgaatctaagtcaggag

SEQ ID NO: 566836 - DNA, 85 bp, Homo sapiens
gctggcggagagcggcctgcgggcgatcgggccgagttcctgtgccttaagaacattagaaccttcctgtccacctgctgtgaga

SEQ ID NO: 566837 - DNA, 100 bp, Homo sapiens
cgggaaggccctgctcacaggactgctggacctccaggaattccatatttaaatcaggaagaagaaagacagttaagagagcagtatgatgaaaaacgtt

SEQ ID NO: 566838 - DNA, 97 bp, Homo sapiens
agcagaaatcaaattgaagagagcagttgaagaagtgaagaaattattggtacctgcattgctgttggactgcggtttgggaaatggcagcacttcc

SEQ ID NO: 566839 - DNA, 100 bp, Homo sapiens
atgagcgagcgcctccgtcccagtaagactttgaccccgacgcaggcttcagtgattgccgcggatcagaagcctgagcactttggctcgagacaattaa

SEQ ID NO: 566840 - DNA, 75 bp, Homo sapiens
ggtcctcgatccgcccacagacctcaaattcaaaggcctgtctcctccctcctacacatttccagctcctgctgc

SEQ ID NO: 566841 - DNA, 73 bp, Homo sapiens
cagcgctcagcccaggagaggaaggagcggctgcggcgcgcgctggaaggtcaaacaggatttatgcatcatc

SEQ ID NO: 566842 - DNA, 100 bp, Homo sapiens
ccggaggagtcagtcagaggggcgagcaggagcgattccgtcgccaaacagcctctgaagagccaatccattcaggatgggaaaccacgcaggcaaacga

SEQ ID NO: 566843 - DNA, 75 bp, Homo sapiens
tggcagtgacgaggacgaagtgtccgagtttcactgttacatgccttgaagtgatgaggaggtttctgttactat

SEQ ID NO: 566844 - DNA, 100 bp, Homo sapiens
tcgaccacagcaagctcctgggggcaactacactttccaatgcagtgtcttccctggcaagcactggtctatctctgaccaaagtggatgaaagggaaaa

SEQ ID NO: 566845 - DNA, 100 bp, Homo sapiens
caaggacatgaagatcaagtccctggaggagatctatctcttctccctgcctattaaggtcctcgggccaggtgatctcaggggatgcctgtgccgccac

SEQ ID NO: 566846 - DNA, 100 bp, Homo sapiens
gccgattcctcctccttggtcgccgcgtccttggctggcgtggatcgcttacacctgagacgaactacagaacagcacgtaccagaggtggaagtccaag

SEQ ID NO: 566847 - DNA, 83 bp, Homo sapiens
gactcctcatcggtctacatggtggccatacattctggatataggcatcctagaatacgtttccacacgggtcttgtggatgc

SEQ ID NO: 566848 - DNA, 100 bp, Homo sapiens
ctgactattatgaaggccaaaagcagcaaattatcatcctgatggaactattcaagtaagcaatggtagccttgccttttacccagcacagacgaatgtg

SEQ ID NO: 566849 - DNA, 100 bp, Homo sapiens
ttccagagcgtgaagatcaagatcgtggagtacgacaaggagttctcccctcgtcagcgacaccacaaagagttcaagttcaacttatcccagattcctg

SEQ ID NO: 566850 - DNA, 75 bp, Homo sapiens
gtagaatatgacttaccagcactcctggaccaagagctctttgatggccataaaatgcagtaaaaacaaatccag

SEQ ID NO: 566851 - DNA, 78 bp, Homo sapiens
gaccaccgaggctggagggggagaacacccagaagaagcctgggaagtttataaacagataaagacgcaacatgaaag

SEQ ID NO: 566852 - DNA, 100 bp, Homo sapiens
cggcgagcggttccttgtgggctagcaatttcctgctgcagagagcattttaagaaaggacagcattcctgtgacctctgcctaccatccataaaatact

SEQ ID NO: 566853 - DNA, 100 bp, Homo sapiens
tctgatattgcaccttcacagcaacaaggttggactccatgaaagaattgcacaaaacaaatcgacagcagcatgagaaacatctgcaaagccgagtgga

SEQ ID NO: 566854 - DNA, 108 bp, Homo sapiens
gggaggaaggaacgaggcaaggagctaaagcagcgtgcgttcagccctggggttgacatcatggacatatgtgagtccatcctggagaggaagcggcatgacagcgaa

SEQ ID NO: 566855 - DNA, 75 bp, Homo sapiens
cccgttacggagccagccccctccactgggccaagaacgcagagatcccagatgcagtgactggttactacctga

SEQ ID NO: 566856 - DNA, 98 bp, Homo sapiens
agaacttttattccttccagaagcaggctcacagaacatttcctgcctgttgctcacactctgttgtccacagcatacccgcaccctagatggctgac

SEQ ID NO: 566857 - DNA, 75 bp, Homo sapiens
attaacatgatgattgatctggctgaagtagcagatctgatgacagtcatgtccctttccagggacctcaaggac

SEQ ID NO: 566858 - DNA, 74 bp, Homo sapiens
agccgatgcaccgagtccagcccaggaaaatggagaggaatacctcaatagcattctccagcatgccaaggatt

SEQ ID NO: 566859 - DNA, 75 bp, Homo sapiens
ccggttccccggcccacagtgggggtgtgcaaacccgagagaactggtatgcaaccgattataaagtcgtgaccc

SEQ ID NO: 566860 - DNA, 75 bp, Homo sapiens
gtgcggtgctgctgagcttggcctcggcgtcctcgggatatggaggcacagcaagttaatgaagcagaatcagca

SEQ ID NO: 566861 - DNA, 100 bp, Homo sapiens
tcgatctcctcgtctcccgctccgccctcccttttccctggtgcccctgggcgctgggattgctctagcctgtaagtataatggaaaagatgaggtctgc

SEQ ID NO: 566862 - DNA, 50 bp, Homo sapiens
ttcacctgacttctgcagaacataattgacctgctgactgtgggcgagtc

SEQ ID NO: 566863 - DNA, 98 bp, Homo sapiens
cgggggtgaagcctcctgcgccggccttgcctcggtactatactggcaattgctggagaagattttgcaattgttgcttctgatactcgattgagtga

SEQ ID NO: 566864 - DNA, 100 bp, Homo sapiens
gcggagggagaggctgcagagcgagggcaggaggatgctgtatgattatgttgaaaggaaacgaaaagaaaattcaggagcccaactgcatgttacctac

SEQ ID NO: 566865 - DNA, 50 bp, Homo sapiens
atttcagtcactggtttgcagagtccaggggatcatcgtcttgctcttct

SEQ ID NO: 566866 - DNA, 75 bp, Homo sapiens
cgtgccgcgagcgcggcctgcaggaggtgaaaggtgtagcagtcactcggcctacacccacagcatcgaccttgt

SEQ ID NO: 566867 - DNA, 100 bp, Homo sapiens
gacctctcccaaagctcctatccagtttgtcccgctggctggaagcctggcagtgacacgattaagcccaacgtggatgacagcaaggaatatttctcca

SEQ ID NO: 566868 - DNA, 80 bp, Homo sapiens
ctgaaagtggaggctgcgaaaataggtcatcctgtacagttctacagcatgaataggcctgcctctcgccatactccccc

SEQ ID NO: 566869 - DNA, 98 bp, Homo sapiens
ggatgatacaccttttccacagggaattgagttggttttcccatcatatgattcccggtcctcctggtccccacacaactggcatccctcatccagct

SEQ ID NO: 566870 - DNA, 98 bp, Homo sapiens
tgggaaatgaaagagcgccttgggacagggggatttggaaatgtcatccgatggcacaatcagttttagaaagagcgttttcgctacgtaaagcacat

SEQ ID NO: 566871 - DNA, 100 bp, Homo sapiens
gtctgacatggaggatgatttcatgtgcgatgatgaggaggactacgacctggaatacaaacagaagcttgcacgagtaacccaggtccgcaaggaactg

SEQ ID NO: 566872 - DNA, 100 bp, Homo sapiens
ttgactgctctgctcctctatgctggacatcaaatttccagacatcgctattgcggttccgaggcagtgggaagagatgcggcccctggacatcgtcgag

SEQ ID NO: 566873 - DNA, 75 bp, Homo sapiens
cgggcatggtggtctggggcaacgcggaaggtgagaagccctaccactgcaactgggacggctgcggctggaagt

SEQ ID NO: 566874 - DNA, 83 bp, Homo sapiens
gaacagacctagtgggcgttgcctttagacccaggctctcaaaattagagagatgtgtaattgtccaccactgtctaatccag

SEQ ID NO: 566875 - DNA, 100 bp, Homo sapiens
tcgccaggatcaccgacaagggactgcagtatgtgctgaggtgcctgggcatccctacccgcgtcgtgaccaactacaactcggcccatgaccagaacag

SEQ ID NO: 566876 - DNA, 98 bp, Homo sapiens
tgagtcttctcaacttgaaggtcatttaaccaacctcagctttacaaaccctgaatttataactgaacaacagcagttctgtagagagtttaaatatg

SEQ ID NO: 566877 - DNA, 75 bp, Homo sapiens
aagagacacagtatggtagccacacccccaggaatgtctgatcacagatacggggatggtggctctactttccag

SEQ ID NO: 566878 - DNA, 101 bp, Homo sapiens
gctgagtgtgtgcccatggtcagggaccttctcaggttgaggagcgtcaagatggaacagaggaagctgagtgaccaagccaacactctggtggacctttc

SEQ ID NO: 566879 - DNA, 100 bp, Homo sapiens
gaggctacaacaggcctgcgccggcggcagagaggatatcttgggcgggggatgtgagcgctgagcccttggcaggctgctgagaactagccctagacct

SEQ ID NO: 566880 - DNA, 100 bp, Homo sapiens
aactggacagcgaggacaaggacaaagaaggcaaacccctgctgaaggaaaactcactaccatgagaattgcagtgatttgcttttgcctcctaggcatc

SEQ ID NO: 566881 - DNA, 75 bp, Homo sapiens
ccttagtcgtttatttcttccgagttagaaatcctacaaaggaccttggattaatgaaaatcaagttccatcctc

SEQ ID NO: 566882 - DNA, 96 bp, Homo sapiens
gaaggaccttcttcgtgctcagggcctgggagatattattgatagttcaagcgtcctcagtaagccttgttcagtgactgtagccagtgaggcaag

SEQ ID NO: 566883 - DNA, 100 bp, Homo sapiens
gtgggaacaggcttcggcgaacacaaaggagccagtgcatcaatcagatgaaggaggtgaaggaacagtgtgaggagcgaatagaagaggtcaccaaaaa

SEQ ID NO: 566884 - DNA, 100 bp, Homo sapiens
ctatcccaggaatacagctttgcattagactggtcgaattgacaaatcttaccctacagtatgtggccacacaggaccagtgctggacatagactggtgc

SEQ ID NO: 566885 - DNA, 99 bp, Homo sapiens
caaaagcataaccaatggcagtgatgatggagctcagccctccacctccacagatgactgtccaagtgcctccaaagtgtacaaagcatcagattcagc

SEQ ID NO: 566886 - DNA, 95 bp, Homo sapiens
acctccccccggagccaggctggtttcggaaatgcccttacagcagcaggtaagaatgattgatgttggctgatattggagtgctcattcacatg

SEQ ID NO: 566887 - DNA, 97 bp, Homo sapiens
caacaaacaggctgcgccaggctttatcggaccacagcttccctctcacatgataaaggctcaggaagaggccaaagaagcagaaatgagcagaaag

SEQ ID NO: 566888 - DNA, 100 bp, Homo sapiens
gttcttgtttgtggatcgctgtgatcgtcacttggctttcttcgagagtcacccagctccttcagctgagcgtaccatccagcagtgttgtgaaaatatt

SEQ ID NO: 566889 - DNA, 100 bp, Homo sapiens
gccaacagacactgccaccctcaaggagttcacgttcatgggcgagggaacagatgagaaacccggcaatgaaagacacattcagctaacgtattttagc

SEQ ID NO: 566890 - DNA, 101 bp, Homo sapiens
agacgcaagactccactctccctacgagatcaccacagaccgaggtcctgcacataggaagcgcccacaaccgaagtgccatgccctttaccgcctcgcct

SEQ ID NO: 566891 - DNA, 75 bp, Homo sapiens
gatggtgtcctccgggacggagatggagccgtggtccttcccaatgaggctcgtggtcccaagaagcatctgaag

SEQ ID NO: 566892 - DNA, 116 bp, Homo sapiens
aagaacttgagcaaatggaaatagaactcaaaaggctgcaacaagaggtgctggagaatctggtaaaagcaccattgtgaagcagatgaggatcctgcatgttaatgggtttaatg

SEQ ID NO: 566893 - DNA, 82 bp, Homo sapiens
cggagcggtccgcgagccaccgaggcccaggtctgcgaggaacagaagtgcgaggaggaggtcttcccgctggccatgaact

SEQ ID NO: 566894 - DNA, 74 bp, Homo sapiens
gtccagcactctgcatgtgactccccgcagcctggacagctatcagttgagggatttgcagttgataaaatggc

SEQ ID NO: 566895 - DNA, 82 bp, Homo sapiens
ctcatgttcactacccttcatgcatgaaagacaaagctactcagagagtggtttttcctcctgtctcatgaggtgctcaacc

SEQ ID NO: 566896 - DNA, 98 bp, Homo sapiens
gagaaagccagttatccacggactggaagatcaaaagagggtctcggtgattcagaatacacctacttttgcaatggggggaagataattgataaacg

SEQ ID NO: 566897 - DNA, 101 bp, Homo sapiens
tactatggaatgcaaagatttggaaccacagctgtccctacgtatcaggttggaaggtacaaagcactgggaatacaaccttgaacaagacaagaatcctg

SEQ ID NO: 566898 - DNA, 100 bp, Homo sapiens
gaaggggtctagatgtaaatgtcagtggaaaggagagctaccatcactaagggaagaagcgatgctgtccacatactttgaaaccatcaatgacctgctg

SEQ ID NO: 566899 - DNA, 100 bp, Homo sapiens
ctctcccaggccacaagacatttcctgctcggaaccttgtttactaattgtttggtgcacctcgatttggaggaagtagggcagggcccttatctggaaa

SEQ ID NO: 566900 - DNA, 113 bp, Homo sapiens
cgccgcccgggcctcgcccgcccgcctgcccgccatggtgtcatggatcatctccaggctggtggtcaatgccaagtgagtacacctatgtgaaactgagaagtgattgctcg

SEQ ID NO: 566901 - DNA, 88 bp, Homo sapiens
ttcctgcttctgggacagctctactgacgggtaagggactgttctgaagaacctttccatttagtgatcaagatatggaagctgattt

SEQ ID NO: 566902 - DNA, 75 bp, Homo sapiens
gagcctggcctgggccgcgtccatcacctggcactcaaggtgggcaccatgtccttgaagcttcaggcaagcaat

SEQ ID NO: 566903 - DNA, 88 bp, Homo sapiens
ggcagtagctttccgcagattgaaattaataaaatgcacatatcccagtccattgagactcctgaggaagaagagattttaaacaaaa

SEQ ID NO: 566904 - DNA, 74 bp, Homo sapiens
cacagaaagcacagataatagacgtgtggtgcagaggagcgagctggacgccactgtggggctctgagagtcct

SEQ ID NO: 566905 - DNA, 96 bp, Homo sapiens
gtgatcgtcatcacagtcaactatcgacttggagtactcgacacgttggtcgtcattgcctccgagcccactttagccctcagctctgtatcagaa

SEQ ID NO: 566906 - DNA, 80 bp, Homo sapiens
ccggctccggagcgagaacgcgcatgtggaagttcacgcagagccgctgggtggttaggaaagaggtggcaaccgtgacc

SEQ ID NO: 566907 - DNA, 75 bp, Homo sapiens
acagatgattccccaaagtacaattaccatttggactccagtggtagctatgcaaagccttctagacaagctcag

SEQ ID NO: 566908 - DNA, 100 bp, Homo sapiens
tggtttcgggatctcggtgctgcagacggcgagacctcctgcacagagtgagcctcgcagctggtccctgctagagcagctgggcctggccggggcagac

SEQ ID NO: 566909 - DNA, 100 bp, Homo sapiens
ggcaccatgcaggtcaccctgaagaccctccagcagcagaccttcaagatagacattgaccccgaggagacgaatgcatacacagccacagctatcaaca

SEQ ID NO: 566910 - DNA, 74 bp, Homo sapiens
tgggagagattggactgggagactcagcaggagatatctgaagagattataggatcacccatcccagaacctag

SEQ ID NO: 566911 - DNA, 101 bp, Homo sapiens
gtgaagtttggtcacaaacaagtggctgaccccacattggacaccgctgcatccatgtccatcacacaacacagctgccgtttcttctgcctgcttatggg

SEQ ID NO: 566912 - DNA, 75 bp, Homo sapiens
actaccctgactacagctggagcgcccagaggcgagccctggtggaggaagaggagaccagtatgatgtctgtgc

SEQ ID NO: 566913 - DNA, 73 bp, Homo sapiens
ttgcaaaactgcagttttgacagcctatacacagaatgggattttacatatgctggacagaaataagagaatc

SEQ ID NO: 566914 - DNA, 74 bp, Homo sapiens
gagtgctgagcccgcggaaccgcagccatgatgtgaagttcatttccaatccgccctccatggtggcagcgggg

SEQ ID NO: 566915 - DNA, 83 bp, Homo sapiens
ggaattttggcatcaaggacaaacccaccttcatcaaagggatggctatatgcatccagttcatcctcatgtagttagaagac

SEQ ID NO: 566916 - DNA, 51 bp, Homo sapiens
gaaggctacgatcctacagtggagaatatttttggctttcacccccaacca

SEQ ID NO: 566917 - DNA, 83 bp, Homo sapiens
ttgaccatgatggaatgcttgacagagatgagtttgcagttgtgccaacatcgcctctggtgaggaagtcgccatcaagctgg

SEQ ID NO: 566918 - DNA, 98 bp, Homo sapiens
cccagacaagatggacaccgcggaggaagcacaacaagccgctctactcctttgaagacaatgcagactatgtgtacgatgtcatgtggtcccccgtg

SEQ ID NO: 566919 - DNA, 100 bp, Homo sapiens
ccttggggtccatgtggatggcttcatcgctaatgtagctcacacttttgtggttgatgtagctcaggcccctcaccgttccccaaccaacaaactcctc

SEQ ID NO: 566920 - DNA, 101 bp, Homo sapiens
acagaggtgtgctgacgacctgctacaacagaagtagacgttacatccaagaggaaataatccaggcaaggaagcacaagctgatcaagatgtgtagttct

SEQ ID NO: 566921 - DNA, 100 bp, Homo sapiens
agccggagctgctcgacgaccaagaggcgaagagctattcccttcagcaagctcaagctttttatacgtttccatttcaacaactgatggctgaagctcc

SEQ ID NO: 566922 - DNA, 100 bp, Homo sapiens
aaattgatgcacaaaataagctggaaaaatctgagatgccttcaattaagttgcagagttctgatggagagatatttgaagttgatgtggaaattgccaa

SEQ ID NO: 566923 - DNA, 75 bp, Homo sapiens
attccaagtaactcttatttggttctgtcatatgttgaagaatccatacaccattaagaaacagcctctgcatca

SEQ ID NO: 566924 - DNA, 50 bp, Homo sapiens
cttggcttcctcgcttctgctcctcagggcatccgcttcgatcctgaaat

SEQ ID NO: 566925 - DNA, 100 bp, Homo sapiens
tcttcttttcttcattcatgaaaatgcagatccactgagaaagggaataaggattggtccaaaggaagattttttccattgtttgaaatgtaacttatgc

SEQ ID NO: 566926 - DNA, 100 bp, Homo sapiens
actgggtgccagttgcagagaccaaattcctcgttgcgcctctgaccttctcgaacaggcagcccatcaaacctggtttgggcctgacacccagcacttg

SEQ ID NO: 566927 - DNA, 98 bp, Homo sapiens
gcaacacttctccgagccagcgagccagcgagccgccgacccgccgagcaaaatgatggcggcagctatgccatccacgactcccaggcccccagtct

SEQ ID NO: 566928 - DNA, 87 bp, Homo sapiens
aaagccagtgttgtggaccctagcacagaggccaaccccttcaaggagcgaatctgcagggtcttctccacatccccagccaaagac

SEQ ID NO: 566929 - DNA, 98 bp, Homo sapiens
gtggccttcgcggtggcgatgctcttcttggaaaaccagatccagaaactggaggagtcccgctcgaagctagttccatggaaaatgggagaccacct

SEQ ID NO: 566930 - DNA, 114 bp, Homo sapiens
aggagcaaagcaagtgaaggcacagacgcacgggacaggagagcctgggcaagactggagaggccaccagcccctcgggttccaagatgcagctactggagacagagttctcac

SEQ ID NO: 566931 - DNA, 74 bp, Homo sapiens
cacctggagaaccaggaccttccaccaatattcctgaaaatggtttactcctggcttgggggcattaggaagca

SEQ ID NO: 566932 - DNA, 126 bp, Homo sapiens
gtccacccaagatggagttcctcctggggaacccgttcagcacaccagtggggcagtgcctcggagaaggccatcagcatttgggagtcaaagaatttcttttttgaacttgagcctctgccaggg

SEQ ID NO: 566933 - DNA, 100 bp, Homo sapiens
ggatgctacttcctattctaagtgggaaaccacccatcaatgatatgttcacagacctcaaagatggaaggaagctattggatcttctagaaggcctcac

SEQ ID NO: 566934 - DNA, 100 bp, Homo sapiens
cccgcggcgggaggagcctgttcccctgaggagccagcaccgctctttgaccttgccatgcttgccttagatagtccagagagtggctggacagaggaag

SEQ ID NO: 566935 - DNA, 75 bp, Homo sapiens
tactgaccaagatcttgtcaagctgtgtcagccggtaaataatgcttttctggaccgactccaaggcaaaagtca

SEQ ID NO: 566936 - DNA, 74 bp, Homo sapiens
acaccgggacacccgcgaggccggaaaatggtgctggagaatctggtaaaagcaccattgtgaagcagatgagg

SEQ ID NO: 566937 - DNA, 74 bp, Homo sapiens
tggctccacgccctgctgggtcctacctgtcagagccccaaggtaaaatgtcggttccaggaccttaccaggcg

SEQ ID NO: 566938 - DNA, 100 bp, Homo sapiens
gaggatacatggatgctacctgatgtgaatgagagaattgaacagttctcacagtctcaagggcgaagtgaaatcttaatgagtctacagaaagttctaa

SEQ ID NO: 566939 - DNA, 103 bp, Homo sapiens
gcccgggcggcgggcggagacgtgggcgccctccccgccaaggcccgtgcgagactcccaccactacccaggaccaactcctgctcctgaatcttctgatggg

SEQ ID NO: 566940 - DNA, 100 bp, Homo sapiens
gcaacttccagtactcggagctggtggccgagttctacaacacgtgggaggatacccttgacaaatactgtgaccgggagtatgctgtgaagacccacca

SEQ ID NO: 566941 - DNA, 99 bp, Homo sapiens
tctgcctcgctttctccttggccaccctggtccagcgaggtgaatgaaaactttgccattgatttgatagcagagcagcccgtgagcgaggtggagact

SEQ ID NO: 566942 - DNA, 100 bp, Homo sapiens
gccccgctgaggggccgcaaggacgaggacgcctttctgggagaccccgacaccgaaaccagcctggacaccaagtctgtgtcagaaggccacctcaaga

SEQ ID NO: 566943 - DNA, 99 bp, Homo sapiens
aaaacctgtatgtggaaccacctatgcgtctgaagaaacatcgctggtataagaaaatcctcaagtcccgagatccaatcatattttctgtagggtgga

SEQ ID NO: 566944 - DNA, 100 bp, Homo sapiens
gtctcggaaaccggtagcgcttgcagcatgagaaatggtcaatgcatggtttgctgagagagttcacaccatccctgtgtgcaaggaaggtatcagaggc

SEQ ID NO: 566945 - DNA, 74 bp, Homo sapiens
ggagtccatagtacaggaagaaaagaagaagctgacccctgaaggaaacaaagctacccaaacctctttccctg

SEQ ID NO: 566946 - DNA, 100 bp, Homo sapiens
tgtgaaatcctaagtggattgcagttgggagactttctcattaaggatggctcgctgttgtcctccccgttcctcaagggattcctggctggctatgtgg

SEQ ID NO: 566947 - DNA, 75 bp, Homo sapiens
aagaaacagcttcatgaactccaagccaaaatcacagctttgagtgagaaacagacttcaggcccgcatagctca

SEQ ID NO: 566948 - DNA, 100 bp, Homo sapiens
tcagccgtatctcagcaggaggacaggtgccggagcagctcgtgcagctaagcagccaactgcagaaacgtcagctcggcaagatgtcggtgaaggaggg

SEQ ID NO: 566949 - DNA, 101 bp, Homo sapiens
gaaggagaagagaagagagcccgaaactaaacagggaggaatccaccatttagaagtctggcaggcaaagaggacaaggtccaggtcaagacctcgtctcc

SEQ ID NO: 566950 - DNA, 83 bp, Homo sapiens
ctgaggcggcggcgcgaggcagacaatgcagatcttcgtgaagactctgactggtaagaccatcaccctcgaggttgagccca

SEQ ID NO: 566951 - DNA, 90 bp, Homo sapiens
cggggcgtctgggcagcctacgctttccggttgggacaaacattcctatggttaccatggtgatgatgggcattcgttctgctcctcggg

SEQ ID NO: 566952 - DNA, 75 bp, Homo sapiens
tgattgaaattatctctggtgctgcagctctgctgtgggtgagcgtggaggatgctcagatgcacaccgtcacca

SEQ ID NO: 566953 - DNA, 100 bp, Homo sapiens
gagatggacccgccaaatccagaggaggtgaaaacgcctgaagaaggtaattaagaatccagtatcagatcactttccagttggatgtatgaaagttggc

SEQ ID NO: 566954 - DNA, 116 bp, Homo sapiens
caagaagtcgtagggggtgagggtggaagctgggaaacccacaggaggcaaccacactagtttaggccggatcacctcaacagtcacgtcagacaagtgcactcaacagaacggcc

SEQ ID NO: 566955 - DNA, 98 bp, Homo sapiens
ggaggaagagccgggcagtccctggagcgggccaggaggccccgtgtgggccgcggcccggccctcaccatggagtccatgttcgaggacgacatcag

SEQ ID NO: 566956 - DNA, 100 bp, Homo sapiens
tgggcttctctgaggcggcgagagatggtcaggtctggagctcgaccgggccagggaatgacagaggaagaggaagacaaacttctggcactgaaagact

SEQ ID NO: 566957 - DNA, 100 bp, Homo sapiens
tgtggactgcactggtgctgatattaaaatctcaggcataaaatttgttcagcatgatgctgtagagggaatcttaagccctcgggaccaaggatcacgt

SEQ ID NO: 566958 - DNA, 83 bp, Homo sapiens
tccactgatttatgaaattattttttgggaaaacacttcaaatgctgagataatggcatcagctgctaaggaatttaaaatgg

SEQ ID NO: 566959 - DNA, 75 bp, Homo sapiens
agtgtgcatgcctctctgccagggtgggagtcacgatggccgaggcctcagaagacagtccgaggccaagtgctc

SEQ ID NO: 566960 - DNA, 74 bp, Homo sapiens
ctcacaaccctaccaatgctactctcaacaagttcacagaggaacgccgcgatggctgcgcagggagagcccca

SEQ ID NO: 566961 - DNA, 87 bp, Homo sapiens
cctaccatgtcagccttcccagtagctggaactacagatacatccagaaagtgcccagaagaaacttcctgctggaaaaaatgaaaa

SEQ ID NO: 566962 - DNA, 97 bp, Homo sapiens
ttaccacatttcttcatgggatagaaccctaaggactctgcaatatgaataattccctagagaacaccatctcctttgaagagtacatccgagtaaa

SEQ ID NO: 566963 - DNA, 75 bp, Homo sapiens
tgggcggtgccggcgccggagacgatgccgttgtgacttaagagattaaaattaatttggttgctgttggttctg

SEQ ID NO: 566964 - DNA, 75 bp, Homo sapiens
acagacctgcgctgcttcctacacagcctcctgtcgtgtacatccagcagtggtcattcgacaacgaaagtcata

SEQ ID NO: 566965 - DNA, 83 bp, Homo sapiens
ctgccgctgctgatcccaccgcggatttccatcaccagggccgagaacgacaggttttaaaatcaaagatgggaaaatcggag

SEQ ID NO: 566966 - DNA, 98 bp, Homo sapiens
acgagctcaacgccaggcgccgctcctttacagaacaccttccaccatgaccacctcagcaagttcccacttaaataaaggcatcaagcaggtgtaca

SEQ ID NO: 566967 - DNA, 100 bp, Homo sapiens
ttttgtacctgctacctggcttcttacctcacgaacaaggctttagtgtatgaacatcctggacaagaattagagattgagctctttgatgaagacccag

SEQ ID NO: 566968 - DNA, 82 bp, Homo sapiens
ttaaacagccaatttagggaagaggtatcatatcaacgtttcttcacgtccatccttttggagccaacatagaatatctttg

SEQ ID NO: 566969 - DNA, 95 bp, Homo sapiens
gcctgcggctctctacgtccctgcggagcagccgagcaaattggtcaggagatgttggaaaaccttagtcatgacagagaaaagatacagcgagc

SEQ ID NO: 566970 - DNA, 75 bp, Homo sapiens
ttaaggaagagtttcagtttttacaggctcaataccacaggtatcaacttgaactgaaggatgactacatcatta

SEQ ID NO: 566971 - DNA, 83 bp, Homo sapiens
ctctacctggaacccttggaggacgggacaatgcagatcttcgtgaagactctgactggtaagaccatcaccctcgaggttga

SEQ ID NO: 566972 - DNA, 88 bp, Homo sapiens
tcccccaaagatgagatttacctgtgagatgtttcatcccaacatgtatcgcattaagttcaaggagagctttgctgagatgaacagg

SEQ ID NO: 566973 - DNA, 82 bp, Homo sapiens
ccacaatcttcaatgagtaaacatattccttgagaaggcaaccaaagtgcaggacatcaaaaacaacctgaaagaggcgatt

SEQ ID NO: 566974 - DNA, 100 bp, Homo sapiens
aggcatccccagttgctgtacgagagcaagctctataagattcttcaaggtggggttggcatcccccacatacgttgatattcactgatggactccaaag

SEQ ID NO: 566975 - DNA, 100 bp, Homo sapiens
tattgccaagattcttcctgggggaagtgcggaacagacggggaagcttatggaaggattttatagctaccttgggaaaactttcaggattacatggcca

SEQ ID NO: 566976 - DNA, 90 bp, Homo sapiens
ttcgagtgttgcagagcctgcggggcaagatctgaagtaacagctagcagtcgccactatgttgacaggctatttgaccctgatccccag

SEQ ID NO: 566977 - DNA, 102 bp, Homo sapiens
ccgcgggcagcgtcgcctcacgcggagcagagctgagctgaagcgggacccggagcccgagcagccgccgccatggcaagctggcggtaaggctggaaagga

SEQ ID NO: 566978 - DNA, 105 bp, Homo sapiens
tggtcattgttgcttccttcttcatattgaagaacttcaaccccacagttgctattatcatctctggaggacctaattctgtgtatgctgaagatgctccctggt

SEQ ID NO: 566979 - DNA, 75 bp, Homo sapiens
tgcaagagcaacatctttcctcaccccaagggtttgtaccagttgctggagccccgaatgattgttcgttgcagg

SEQ ID NO: 566980 - DNA, 75 bp, Homo sapiens
gcgccgggcgaccccgcccgggcctcgggtttgctggttggctcccgagcagacagcaggaaagaagaagccctt

SEQ ID NO: 566981 - DNA, 49 bp, Homo sapiens
tcttggatgaattgcttgctttggagacctggaatggccaaatatcaag

SEQ ID NO: 566982 - DNA, 100 bp, Homo sapiens
ccctacgagtttttcagcgaagagaacgcgcccaagtggcggggactactggtgcctgcgctgaaaaaggatttgaatttgttgaaatgagcagtcgtaa

SEQ ID NO: 566983 - DNA, 75 bp, Homo sapiens
ccaggcccctggtgagcttgggatctgcgacaaaagggaccgagggccaggagtggtggctcacacctgtaatcc

SEQ ID NO: 566984 - DNA, 98 bp, Homo sapiens
ggaaaacttggggatttcacaataatttcttggacaataatgaggctacagacataaatgcagaaatggtggagtcaatgaagaaagtagcagggatg

SEQ ID NO: 566985 - DNA, 92 bp, Homo sapiens
atgaagaagaagattaacctggagttaaggaacagatccccggaggaggtttggtgcacctcgatttggaggaagtagggcagggcccttat

SEQ ID NO: 566986 - DNA, 75 bp, Homo sapiens
cgccctaatggaggtctccagtttcggtggttggaggcaaagtaaagaagcccggtaaacgtggtcggaagccag

SEQ ID NO: 566987 - DNA, 75 bp, Homo sapiens
tgtccttgttggcctaactgtgctgagccaagtgccaatggatggcaggaatggacccctatggtgtagccgtgg

SEQ ID NO: 566988 - DNA, 100 bp, Homo sapiens
gcacgggggcctctcgtccgatgctcaggagagcttggaagtggctgtcgctgggcgcggactccaacgggagcggcgtctctgtgctgctggagctggc

SEQ ID NO: 566989 - DNA, 71 bp, Homo sapiens
gccggcacgggggccatccacatggaatatcttcatgctatggataaaaagcaccaaggattctcttttgt

SEQ ID NO: 566990 - DNA, 90 bp, Homo sapiens
gcacgccgcgggcccagctgcgaccccggccccgcccccgggaccccggccatggacgattcatcacaagagagctacaagagcctggaa

SEQ ID NO: 566991 - DNA, 51 bp, Homo sapiens
caaatatgaatgacttcaaacgacttttctgggagaagaggctacaaggac

SEQ ID NO: 566992 - DNA, 50 bp, Homo sapiens
gcagaagctcatggtgcacaactggtcatgtttactggtgaaaatattcc

SEQ ID NO: 566993 - DNA, 97 bp, Homo sapiens
cgccgtgcgcctgccgctgatggagtgcgtgcagatggatcccctaacaacagtgagagagcaatgcgagcagttggagaaatgtgtaaaggcccgg

SEQ ID NO: 566994 - DNA, 75 bp, Homo sapiens
tctcactggccttccctgtgaatatgggtaatggaactgctggtccatctgaataaacgtataaaaagccgcccc

SEQ ID NO: 566995 - DNA, 51 bp, Homo sapiens
tttttgaggagttgccatgaggactgtcagatctattaatgagatgaagcg

SEQ ID NO: 566996 - DNA, 100 bp, Homo sapiens
ccttgcagtcagcgtcaccgtggggggcaagcagtacctcctaggactctatgacacggccggacaggctttttggaaaggatataaacaacggaaggag

SEQ ID NO: 566997 - DNA, 99 bp, Homo sapiens
gcggcagagagggaatggtgcaggcaggcgctgagaaggacgcgcagtccatctctctcagagatgtctctgagttgacgggatttcctgaaatgttgg

SEQ ID NO: 566998 - DNA, 98 bp, Homo sapiens
gcagtaccttcttcaagagaaatggagcccttctccaaggtttccaatacttatctacaggaatcgccatgaccccagctctgagggaggcaacagca

SEQ ID NO: 566999 - DNA, 51 bp, Homo sapiens
tgggacaagatcccgtccatgaatcagattgatgttctgccagaaattgtg

SEQ ID NO: 567000 - DNA, 73 bp, Homo sapiens
cctttatatagaagggagagtagtatttcagacaacttttaagaggtgcagaatcaccaacacgcaattcaaa

SEQ ID NO: 567001 - DNA, 51 bp, Homo sapiens
ctaaacaggagcacctgctggcgctaaaagatggagtcttgccctgtcacc

SEQ ID NO: 567002 - DNA, 90 bp, Homo sapiens
gaggccagagagaaaagactgcgaggtggccgcagctgtggccggagagcccacagagcagttcaacgggcagggcgccagcttcaacgg

SEQ ID NO: 567003 - DNA, 101 bp, Homo sapiens
tgaaccaaacccacttcgttcaagacaggtgtttaagcaaaagaggcacagttagatgaagaaggacagtttcttgtcagaataatatatgatgactccaa

SEQ ID NO: 567004 - DNA, 98 bp, Homo sapiens
tcctcagccaacggggacagcttgttctccatgttttcagggcctgacctcgttgctgctgtcaagcagagaagtgaccttcctgatgcaaaatcgag

SEQ ID NO: 567005 - DNA, 76 bp, Homo sapiens
gggacccggtgtctgctcctgtcgccttcgcctcctaatccctagccactatgacatttgtcttcaccgacagccc

SEQ ID NO: 567006 - DNA, 100 bp, Homo sapiens
gactctgaggagggcgaaacgccgacagatcccagtgctggtcagagacgagcagcaccagtgttccctggggaacctgaaggtccccctcagccagctg

SEQ ID NO: 567007 - DNA, 97 bp, Homo sapiens
cccatttctcgtctctcatctacatcgccttcatcctgggcagctccataatgggagaagtaaagaacaaagacttaaggaacagcttggcgctcaa

SEQ ID NO: 567008 - DNA, 100 bp, Homo sapiens
cggagtatctggcctccatcttcggcaccgagaaagacaagaactcatgtcgtgtcccattttgtaaactgggagacacctcaaggatgtggacttgggt

SEQ ID NO: 567009 - DNA, 75 bp, Homo sapiens
tgattttcgaaccccggagtttattccacagtggtgtgtggagtacatgcgatcattaccaggacccaagagagg

SEQ ID NO: 567010 - DNA, 83 bp, Homo sapiens
tccttctcaaccttgtgggatgtgaaaactctgttactgaaggtggccagcatcgaaatgttcagccttttagtgatgaagat

SEQ ID NO: 567011 - DNA, 101 bp, Homo sapiens
tagctgtgtggagaaaactgacttcgaggaattctttctaacggagtttaagagagctgtgaaagtagcaacaggacaagaactctcaaacaatattttgg

SEQ ID NO: 567012 - DNA, 75 bp, Homo sapiens
cttgccctggtcttgctcggccgatgaagtgcagaggtttttttctgcctggagtactcgggtactttgagttca

SEQ ID NO: 567013 - DNA, 97 bp, Homo sapiens
gcctccgccgggcgggcggggagggggaggggcagttacgccccatggtgtccatcctgccagcagactgattcagaatgggaggcttttgcaaaga

SEQ ID NO: 567014 - DNA, 100 bp, Homo sapiens
ttaaggaaatttcacaagatagtttggcagcaagagatggcaatattcaagaaggtgatgttgtattgaagcctccaaaggaattcaaaatatggaagtc

SEQ ID NO: 567015 - DNA, 74 bp, Homo sapiens
tgaacctgaccattggggtcacggtgtttgccgtggggaagttaaagttaaagtttaagcgcggtagccttccc

SEQ ID NO: 567016 - DNA, 82 bp, Homo sapiens
ccgccgtctacccgtggccgctgccggtctacgcgcgcctcaagttccccatcgactacccatactctccaccagcctttcg

SEQ ID NO: 567017 - DNA, 74 bp, Homo sapiens
ctggacccggaccggttttggagataacaggaagagagcctggttaccatttggtggaacaatcctgctggctc

SEQ ID NO: 567018 - DNA, 50 bp, Homo sapiens
ggacacagaagtatttgtgacagggacagcaatcagacctattgctttga

SEQ ID NO: 567019 - DNA, 100 bp, Homo sapiens
ggggacagctgaagaaggtgtgagtgatcttccattgtttgaagcactggacctttaatccactgtaggtatggacagggaagaaaggaagaccatcaat

SEQ ID NO: 567020 - DNA, 90 bp, Homo sapiens
ggccactccagtcggtgttgagcacggcgagcagtctcaggcctttagtgatgatggaattgaatgatctggcacgggaccctccagcac

SEQ ID NO: 567021 - DNA, 75 bp, Homo sapiens
ggagttccggtacaagctcctgcgggccggcggggagatggtaacctgcacctcaatgtgacggcggaggccttc

SEQ ID NO: 567022 - DNA, 82 bp, Homo sapiens
tgtgctctgagggagggtccgagccagccgctgttttgccggaggagcccctcaggccccattcaaactcctccccacgaca

SEQ ID NO: 567023 - DNA, 90 bp, Homo sapiens
gccattatttatgtcatcaagaagaatgacgatgctcgcagacctctgaagagagtgccattgagacgggttccagcagttccaccttca

SEQ ID NO: 567024 - DNA, 74 bp, Homo sapiens
cgagccagagcctgcagtcccacacgttacatccggtgatcaaggctttcctgtgtggctccatcagtgggacc

SEQ ID NO: 567025 - DNA, 96 bp, Homo sapiens
tcgtgggcgagctgggcgacggcgccttcggcaaggtttacaagaggctgcctccattcgaaacattttctcagggacctacgttgcagttcactc

SEQ ID NO: 567026 - DNA, 90 bp, Homo sapiens
cccaggcgcagtatctgccgtcccagtcccagcagaggtaccagccgcagcaggcatctggtgtcgaaggctcagatattcctgatgatg

SEQ ID NO: 567027 - DNA, 96 bp, Homo sapiens
ggcagctacggtttccgtctgggcttcttgcattctgggacagccaagtctgtgacttgcacgggcagcaggatgggtgtggaagcagtgatggca

SEQ ID NO: 567028 - DNA, 51 bp, Homo sapiens
ctccaaactcctctccaccagcgccaagagatgatatcatcaagttgaatc

SEQ ID NO: 567029 - DNA, 90 bp, Homo sapiens
caggcacgcgccaccactcccaggtggtaataagctgcagtcaacaggaaataaagcagaagacataaaaggaaccgaatgtgttaaaag

SEQ ID NO: 567030 - DNA, 101 bp, Homo sapiens
ccagaaaccggggaccttaacaatccacctaagaaattcagagagaaagtttcattgtgcaaatctaacttcatggcctcgctggctgtattccttatatg

SEQ ID NO: 567031 - DNA, 132 bp, Homo sapiens
aagcccccgtcctgcagcgagaggcccctgacgctcttccacaccgttcagtcaacagagaaacgcaatttgtcacctcacttgcagaatatcttttccaagagccccatttttgctggggtagttcttcct

SEQ ID NO: 567032 - DNA, 75 bp, Homo sapiens
tatacttgcttttgcttcagcgttctgtggttgtcaacaggtaaatcagaagactgaagcacggcatatactcac

SEQ ID NO: 567033 - DNA, 75 bp, Homo sapiens
ggccacggcgtggagagcggcaaggcagctgcaatgactctccgcacggtattattgtcattgcaagcactattg

SEQ ID NO: 567034 - DNA, 76 bp, Homo sapiens
aaaaatgcacttatgctgataaatatacccaaacaccctggagacgaattccttatgtgacactaaaagagatgcc

SEQ ID NO: 567035 - DNA, 101 bp, Homo sapiens
gggaaagtgaatgtggccaagttgcgttacatgagccgagatgacttcagggtcttgaccgcggagctgatgaccattttccaactattgcactggaatgg

SEQ ID NO: 567036 - DNA, 100 bp, Homo sapiens
cctgcgagagctgccccagccgcttctgaccttccaggcctacgagcagattctcgggatcacctaacctgcaaccatggtcgtgccactagccagctcg

SEQ ID NO: 567037 - DNA, 100 bp, Homo sapiens
tccagtttgtcaactcgtacctgagcctcttctacatcggtttctacctcaaggacatggagcgcttgaaagaggtcatagagctgcccaacatccagaa

SEQ ID NO: 567038 - DNA, 98 bp, Homo sapiens
gaaaatccccgttgtttttcgattgcaagagagatggagtttcactgtgtcagccaggatggtctcgatctcctgacctcgtgatccgcccgccttgg

SEQ ID NO: 567039 - DNA, 87 bp, Homo sapiens
tgtctgatcccttgctcccatccctgcagcatgaacaaggcaacggacagccaagacgtagatccatccaagacttgactgtaactg

SEQ ID NO: 567040 - DNA, 100 bp, Homo sapiens
ctgatggagctggtgtggggcaccaagagcagccccggtctctcggacaccattttctgccgctggacgcaaggtgcagctaaatcaagtccagcagcta

SEQ ID NO: 567041 - DNA, 90 bp, Homo sapiens
taactaaaaatgtgcctaaacaaagctctcagcttgatgaggcggcttacagggagaacacagttggcctccaccgtttctgccccacag

SEQ ID NO: 567042 - DNA, 100 bp, Homo sapiens
cttgaaagaaatgaaggtcgaattgctcagccccaccatggtgtgccatatttcaggtttactcctggcttgggggcattaggaagcactggaggctctt

SEQ ID NO: 567043 - DNA, 50 bp, Homo sapiens
gcatgagtatctgggatgtgaagagcgtggagaacgcggtgtgcgtcctg

SEQ ID NO: 567044 - DNA, 98 bp, Homo sapiens
gggaatcccagagacatgcgccgcttccaggactacgcccaagcaaggtttgatgcctatttccaccagaagaggaagcttggggtgtgactgtgggg

SEQ ID NO: 567045 - DNA, 100 bp, Homo sapiens
cccacctgtcctcaggcatatcaaagggagtaactattcccagtcagaggcgctatgtgtattattatagctacctgttaaagaatcatctggattatag

SEQ ID NO: 567046 - DNA, 99 bp, Homo sapiens
ctgctctaccacctgcaccccttcttgcagcgccagcagcttgcttatggcatctatgtcatccaccagggcttaacctctaaggagcgcaagacccaa

SEQ ID NO: 567047 - DNA, 100 bp, Homo sapiens
gggatgtgaagtagatgataaagatgatgatatccttctcaaccttgtgggatgtgaaaactctgttactgaagggttgtcgttttggaaagtaggccaa

SEQ ID NO: 567048 - DNA, 75 bp, Homo sapiens
aagaagtgcaagagcagaggccttctctagaccttgccaagatggcacagctctgtcacctaggctggacttcag

SEQ ID NO: 567049 - DNA, 51 bp, Homo sapiens
taaggattccaagtaactcttatttggtgctcttacagcctgttccaagtg

SEQ ID NO: 567050 - DNA, 100 bp, Homo sapiens
gatgttcttcttcgagtatttgtagaaggttaagtgggcagaccaacatccacctcagcaaaaacttcttcctgacgaatcgcgccagggagcgctcaga

SEQ ID NO: 567051 - DNA, 76 bp, Homo sapiens
cctcacctatgcaaagaaagggaagctattgctgggattttgaggagattgagaggatccagaatccagatctctg

SEQ ID NO: 567052 - DNA, 75 bp, Homo sapiens
aaagacccagtgaacaaatccgggggcaaggccaaaaagaagaccaacacaggcatccgtaagaacttggagcag

SEQ ID NO: 567053 - DNA, 75 bp, Homo sapiens
gggtgctgagtgatgccaggaccatcctggaagagaacatccaggaccaagtccagggagctcccagggaagtgg

SEQ ID NO: 567054 - DNA, 117 bp, Homo sapiens
ctgggacgggaccgacgcctcggaccgggctgcgccgcgggagttcgagaactccatccggcacaacctgtcactgcatagtcgattcatgcgggtccagaatgagggaactggcaa

SEQ ID NO: 567055 - DNA, 74 bp, Homo sapiens
cttaatcaacgaatccctgataaagaaactcaggcgtcattgctgtggtgattttcaccatcctgtgcaccctg

SEQ ID NO: 567056 - DNA, 75 bp, Homo sapiens
aagaaaattcagcctttagcaaaagccacttccagatcagtaaccaaaatatccactgaggatgatggattggtg

SEQ ID NO: 567057 - DNA, 82 bp, Homo sapiens
tcggggatcggtcgcctgagagactacatgaggaaataattgacttttataacttcatgtccccttgtcctgaagaagcagc

SEQ ID NO: 567058 - DNA, 75 bp, Homo sapiens
gaaaaactggagaacagggagatccagccaccattcaagcccaaagtgaaactctataaaacaggtcgggagatg

SEQ ID NO: 567059 - DNA, 116 bp, Homo sapiens
atagcctcaaactcccaggctcaagcaatcctaccatgtcagccttcccagtagctggaactacagggaagaaggagaaagggccaacccctgaagaagcaatacagaaactgaag

SEQ ID NO: 567060 - DNA, 50 bp, Homo sapiens
ttacggttttgggaaacattggacagaccctcaaactgacacaagaccta

SEQ ID NO: 567061 - DNA, 110 bp, Homo sapiens
ctgatgtgatcctcaagttggaacgaggagaagagccatggacatcatttgcaggtcatacctgcttgggttcttgggtgtctctggggagtccctgggccagaccttcc

SEQ ID NO: 567062 - DNA, 100 bp, Homo sapiens
ggtgaaggtccggggcttgccctggtcttgctcggccgatgaagtgcagaggtttttttctgaaactgattattgatgagaagaagtattacttatttgg

SEQ ID NO: 567063 - DNA, 82 bp, Homo sapiens
gcgcggagcccgggacgcgcgtacgccctgctgcttctcctggtataatgggtctctcccaaatggcgatagaggaaggagg

SEQ ID NO: 567064 - DNA, 74 bp, Homo sapiens
gcaacaccaggagaggccgggggcagccgccatcggcagcgccaggagggtttctcttcccctcccagttcgct

SEQ ID NO: 567065 - DNA, 101 bp, Homo sapiens
ttctgagctgctgcgggatattttgcagaaggcatccgtgtcattctggaccttactcccaactaccggggtgagaactcgtggttctccactcaggttga

SEQ ID NO: 567066 - DNA, 76 bp, Homo sapiens
tcgggtccttgaccgcttcgcacagcagagtcagggcatgttgggacagtcatctgtccatcagatgactcccagc

SEQ ID NO: 567067 - DNA, 50 bp, Homo sapiens
aaggattccaagtaactcttatttggtggtcctggctctgccatatgaca

SEQ ID NO: 567068 - DNA, 100 bp, Homo sapiens
cagaaatcacattggaccctcctcccaactgtaggcttcatagagcccagtgtgcaattaaacagactcaggtaactgttcagaaaattggaaaggaaat

SEQ ID NO: 567069 - DNA, 98 bp, Homo sapiens
gttattctgatctcaccaccctggtggcctttccctccagctctgtctatcctaccaagggtgccgacccccacatcctggcaaaagagcgagagagc

SEQ ID NO: 567070 - DNA, 74 bp, Homo sapiens
cttggaattacatagctggaaaggatcttacagacaggggcaagtgtccgagtggtgaatcagctacttacaga

SEQ ID NO: 567071 - DNA, 82 bp, Homo sapiens
agacaagctaaaaatgattcgggaatatcggcaaatgaaaaaccatgccacatggatcgtttggatcgaatcctattgtctg

SEQ ID NO: 567072 - DNA, 75 bp, Homo sapiens
acatggagacatatatgggtcctgctctttttgcagttctgcggcatgaggaatttgaagaaggctgcaaagctg

SEQ ID NO: 567073 - DNA, 83 bp, Homo sapiens
ccctgaaggacagtgggcctggttgtactcgtaaaacaaggatcatcgatgttgtctacaatgcatctaataacgagctggtt

SEQ ID NO: 567074 - DNA, 75 bp, Homo sapiens
gccgctgtccaggagctctgctctcccctccagaaggaccctctattgtcccaggcctgtgttggctgcctggag

SEQ ID NO: 567075 - DNA, 100 bp, Homo sapiens
agctgtcgtgaagaagcaggaggctaagaaagtggtgaatcccctgtttgagaaaaggcctaagaattttggcattggatgccaaccctgtggtaattga

SEQ ID NO: 567076 - DNA, 75 bp, Homo sapiens
cctcctgagtagttgggatgacaggaaactactttgcttcgcactttttcatgggaggagagaaattcgacaccc

SEQ ID NO: 567077 - DNA, 76 bp, Homo sapiens
tggatacatacaatgtgaaaagagaagccgctgagcagtaccttctccaggcaaattccgttcccctgcagcacca

SEQ ID NO: 567078 - DNA, 88 bp, Homo sapiens
gcagaaattatattttccagcccgtgtctgcaggaaattcgaaatgagtcccatgactatcctcatagagtggccaagtttccagaaa

SEQ ID NO: 567079 - DNA, 100 bp, Homo sapiens
gtcctatgagttcctgcagaagaagcacgcagaggagccctgggtccacctgcattactatggcctgaggacacttcgtgtatgatcatgtgttcgctga

SEQ ID NO: 567080 - DNA, 100 bp, Homo sapiens
agctacaccaccaacgcctttcccggagagtacatccccaccgttacaaaatggttcgttacatcagaaggatacagttcatgacaatgactttgagccc

SEQ ID NO: 567081 - DNA, 73 bp, Homo sapiens
ggcgcggaggcgaccgccatggcgttcctcaaactccgtgaccagaaatgaccatggttgacacagagatgcc

SEQ ID NO: 567082 - DNA, 75 bp, Homo sapiens
aagcggcatagcacccgtggtgcatgtctgagtcacaacagcatttctcaggaaagtgccctgtacctgctggag

SEQ ID NO: 567083 - DNA, 100 bp, Homo sapiens
gcctagaccctgcccaacagaatttatatagagatgtgatgttggagaactacagaaacctcgtctccctggagccatccaaaactctgtttgtcaaagg

SEQ ID NO: 567084 - DNA, 83 bp, Homo sapiens
tgggtccgcgctgcttccacccaacttcctgttagacgccgcaccaggctgcaggccagcccttcaagttcactatcccggag

SEQ ID NO: 567085 - DNA, 82 bp, Homo sapiens
gggccctcccccctcctaggcgggagggggggtggtgcgcacgcccccgaggacgcagttccagggtctccctccactgctg

SEQ ID NO: 567086 - DNA, 100 bp, Homo sapiens
ttcctgggaaggtggagccaccagcctctccttggcattgtgtccagatctggcaccctgacttatgaagcagttcaccaaacaacgcaagttggattgg

SEQ ID NO: 567087 - DNA, 96 bp, Homo sapiens
agtaaaaacaatagctcaaggaaacctttccaacacagatgtccaagctgccaagctcagcaacagcctcaccaaggactccatgaatatcaaagc

SEQ ID NO: 567088 - DNA, 83 bp, Homo sapiens
gaggacataaggaactagtcacagtgttgctgcaacatagagctgacattaactgtcaggtgcaagcggtcttctctgtcttc

SEQ ID NO: 567089 - DNA, 98 bp, Homo sapiens
cggaagttcctggtccacaacgtcaaggagctggaagtgctgctgatgtgcaacaaatgagcagcaccagcagtaagagggctccgaccacggcaacc

SEQ ID NO: 567090 - DNA, 98 bp, Homo sapiens
aagaatgctcgcgccacgctcagcagcatcagacacatgatccgcaagaacaagtaccgccccgacctgcgcatggtcagaaagcaacattgaatgca

SEQ ID NO: 567091 - DNA, 82 bp, Homo sapiens
cagaccatggccgcggccttcgctgtgccacgaccgtggctatctggtgacccaggacgagcttgaccagaccctggaggag

SEQ ID NO: 567092 - DNA, 101 bp, Homo sapiens
gcagccgatcatggcggatggcccccggtgcaagaggcgcaaacaagccaatcccaggaggaaaaacgagggagaccaagacatcattgttttgaagtttc

SEQ ID NO: 567093 - DNA, 97 bp, Homo sapiens
tgagcttctaactcattgtattcctcctgagataataatgaagcacaagtgcatacaccttgatagcaccaaatataaaccggagaaatgagataca

SEQ ID NO: 567094 - DNA, 75 bp, Homo sapiens
cctcatacttttcatttgcgacctcatcatccagcccgacaacaagctcaaatacgtcaccaaatggcagaggac

SEQ ID NO: 567095 - DNA, 100 bp, Homo sapiens
tgagataaaagggcccctttcgactagcctctgctgaaagcgacatcatattggagatcgcagtctttccttatgtaatatgttcctagatgaaatggcc

SEQ ID NO: 567096 - DNA, 89 bp, Homo sapiens
accagctccaacaggattccatggtagctgggatgttagggctcaggttcccaagacaacccaaaagggaaaagggacccgtcaaggaa

SEQ ID NO: 567097 - DNA, 100 bp, Homo sapiens
aaaccgaagttggaagtgtctcttagcagcgcgcggagaagaacggggagccagatcatccaagcctagaaaacatggaacagatagagaaatttcagga

SEQ ID NO: 567098 - DNA, 83 bp, Homo sapiens
agcctcccgagtagctagtattacaggtgtgttccagagaacaagccttcagacatttgctatattgacgctgagctgtcagg

SEQ ID NO: 567099 - DNA, 125 bp, Homo sapiens
gcgactcaggctccggcgtctgcgcttccccatggggctggcctgcggcgcctgggcgctctgaggaaggtgggagtcaatcattttgacaagtctcctgaaaggaacagctagcaggaactgaa

SEQ ID NO: 567100 - DNA, 90 bp, Homo sapiens
gggtttctctactatgtccaggagttctgggaaatcgttcattcatttacagatgaacagaaaagactcttcttgcagtttacaacgggc

SEQ ID NO: 567101 - DNA, 99 bp, Homo sapiens
gcactttgcaaacatgagatcgttgatccaggatgatggcttggaaaaaagtccaatgaaaaaaaaacagaagaagaaagagaacaaggagaacaagga

SEQ ID NO: 567102 - DNA, 100 bp, Homo sapiens
attgacaatcaatgggccatcttggacggctatttagcagacatgacccacaagcagaagaagcattagcaaagaggaggggaagaaacagcccgaatgg

SEQ ID NO: 567103 - DNA, 100 bp, Homo sapiens
ctgaagtagcaaaggcaagaaggcaacgacgttccatctgtggaaggacctaccaaccagcatggtgacatggaccagaaggagagagatgttatcatga

SEQ ID NO: 567104 - DNA, 100 bp, Homo sapiens
cagaactgggccatccgcgccatcgagaccctctcggggaacctcagaacctgttctggatccacagcaaatccaagcatttgatcagctttgccgtctc

SEQ ID NO: 567105 - DNA, 74 bp, Homo sapiens
cccttttctgctttgctgtacgtaatcccacaggaggcaaggcttctgggaacttggcagacgcagcttagaga

SEQ ID NO: 567106 - DNA, 100 bp, Homo sapiens
cgcggaggtgcggagagactccttgggggtcgagcacataacggggttcgggtgtctcgtgtgtgaacatcacagcataagctgtggccatgactactga

SEQ ID NO: 567107 - DNA, 82 bp, Homo sapiens
gaaaatacaaggagctggacatcgagcctgagggaggggaaaggcgcagggccagctgcgggccgtccagcggctgtgccac

SEQ ID NO: 567108 - DNA, 50 bp, Homo sapiens
cgctgaccctgactcactccaggatttacaaaaggtgcaggtatgagcag

SEQ ID NO: 567109 - DNA, 90 bp, Homo sapiens
cagattcgcagtggtcgcttcttctccttggacgggctctacgagtgcattctctgtgcctgctgtagcaccagctgccccagctactgg

SEQ ID NO: 567110 - DNA, 83 bp, Homo sapiens
atgctcggatgcctccccctgtggagccccctactggagatggagcactcaccaggttccctttgagagtgaggacaaccagg

SEQ ID NO: 567111 - DNA, 50 bp, Homo sapiens
acaaacttgcagcccaagagaacaggaatgcttccggatcccaagaacac

SEQ ID NO: 567112 - DNA, 75 bp, Homo sapiens
agatcccaggcggtgacagagtggagccatggctagaggtacaaattctgagctgtctaacccctctgaaacgga

SEQ ID NO: 567113 - DNA, 75 bp, Homo sapiens
gccggagcctagaagtcagcttttttggtgttgagccagacttgaccagggaaggcggcagtattcccgtgacct

SEQ ID NO: 567114 - DNA, 74 bp, Homo sapiens
ccggcccatagccgagcagactggcatctgtaaggtgcggccgccgccgctctgcttatgataatgtcaacaaa

SEQ ID NO: 567115 - DNA, 82 bp, Homo sapiens
gaagttcggcctgaagtgtgagctctggctgaaggcctttcggcagcagctgaggaagaccacgcggaccaaagggtttctg

SEQ ID NO: 567116 - DNA, 98 bp, Homo sapiens
tcgtgcggttggtgggggagccctgccctcctggttcggcctccccgcgcactagaacgagtccgaaattgaagttcagaggaagaattgccttccac

SEQ ID NO: 567117 - DNA, 83 bp, Homo sapiens
gtcttcaccgccccacactggcggatgaagcagctggtggggctctactgcgacaagcctcttagcaatgcataccacgagtt

SEQ ID NO: 567118 - DNA, 98 bp, Homo sapiens
gaaggcgtatacaggaacaatattgatgatgtagtaaggtgctgcgagtggctgagatgctgcggtggaggggaggccaggccccgcactgtctggct

SEQ ID NO: 567119 - DNA, 100 bp, Homo sapiens
gtcaaaccagaccaatgggtgaaggtttaccgaactaatcagtgtgctggggagtttgtgattacatttccaagagcctaccacagtggttttaaccagg

SEQ ID NO: 567120 - DNA, 115 bp, Homo sapiens
ctggattaaatgatgaagccatcgccaagcaattacagcttgatgaagatgcggaggtgtcacgtcttgaaattttaaatgtcctcagtgactctctacctctggcagatgatgt

SEQ ID NO: 567121 - DNA, 109 bp, Homo sapiens
gagccttcttcccggggcgccataaacgcccccaatttcccagctgctaaaggaagaggaagtacgaggatgtcgtccaggaaagattgtgcagatgactgaagcagaa

SEQ ID NO: 567122 - DNA, 51 bp, Homo sapiens
actttccgaatctgcaaaagaagatgaggtggaaagtgagaaatggtacct

SEQ ID NO: 567123 - DNA, 100 bp, Homo sapiens
gggcgctggagcagtcacagagcctgcccctgccggccccgaccagcaccaggtacttcctccagccccgggacaatggtagcaagagcctaaagccaga

SEQ ID NO: 567124 - DNA, 75 bp, Homo sapiens
cgcagcacctcctcgccagcagccgtccggagccagccaacgagcgaacctgcaaccatggtcgtgccactagcc

SEQ ID NO: 567125 - DNA, 100 bp, Homo sapiens
gaggtcccaatcccccactctttccgccctaatggaggtctccagtttcgacggagtctcagtggcgtgatcctggttcactgcaacctctgggcccccc

SEQ ID NO: 567126 - DNA, 50 bp, Homo sapiens
tgtctcccggacctcttcattgcctaaaatcctgcagctcctgaaaggca

SEQ ID NO: 567127 - DNA, 88 bp, Homo sapiens
gtcgtcgggccgccgcagcccgccgaaggcgcggatctaaccatgagctaccctggctatcccccgcccccaggtggctacccaccag

SEQ ID NO: 567128 - DNA, 88 bp, Homo sapiens
ccgcgagccggacccctgctctgaccgcagaaacaacgagttttcgtcgttcgaatcaggttgactggtccttcatccccccaatctc

SEQ ID NO: 567129 - DNA, 100 bp, Homo sapiens
cggcttcacagaaaggagtcactgccttctaacgaaagggcagtacagactttggcaggtaagaatgattgatgttggctgatattggagtgctcattca

SEQ ID NO: 567130 - DNA, 100 bp, Homo sapiens
ttttcgaggcatttgacttgtttgatgttcgtgactttggaaagtcactcaagactgcttgcaactgattgcagacagtgaaacaccaactatacaaaaa

SEQ ID NO: 567131 - DNA, 98 bp, Homo sapiens
aacagcatgacgtgaggccgtggatgcaggcattaaggcaccatgactcctgtgaggatgcagcactccctggcaggtcagacctatgccgtgcccct

SEQ ID NO: 567132 - DNA, 83 bp, Homo sapiens
ccgaactgggaggcccctttgaccagatgaacggagtggccggagtgcctccggagccagcgtggtggccatagacaacaaga

SEQ ID NO: 567133 - DNA, 110 bp, Homo sapiens
ctctgccttggccagagaagagaacaggagcttactccacgggaacagcctctagataatctgagttgttgaaaatacgaagcctgttactcgtgaacagtggctgacaa

SEQ ID NO: 567134 - DNA, 87 bp, Homo sapiens
caggtcttctgcaaacagtcttcctaatagcaaaagtgaaatatttgtcagctcctactccaatgtggccagatgacctgcaaaacc

SEQ ID NO: 567135 - DNA, 100 bp, Homo sapiens
cacagctgcagtctgacgagagggacctgcgaccgcatcaagcagtccgccagcggaaccaagcggcgcgtgttcatcatcgagaccatgggcggctact

SEQ ID NO: 567136 - DNA, 97 bp, Homo sapiens
agaaggtcagtgtgcttgcttggagatcaggacgcaaagcccagctccatgaccttctccagctgaggcaggagaatgcctacctgaccaccatcac

SEQ ID NO: 567137 - DNA, 82 bp, Homo sapiens
agaaggccatcagtagatgccagtccctcaaccttgaactttccagacgcagaactgccccttcacagatgtagtcactaca

SEQ ID NO: 567138 - DNA, 100 bp, Homo sapiens
gcctatgcccaccggaaccccaagattggatactgccaggaagaggagttgtacgcatgtcagagaggttgcaggctgttttcaatttgtcagtttgtgg

SEQ ID NO: 567139 - DNA, 101 bp, Homo sapiens
ttcttttggacccttattttatgccataatgccaccttttgtggtgacattggatgaggtagagctgatccactttgagcgggtccagtttcacctgaaga

SEQ ID NO: 567140 - DNA, 89 bp, Homo sapiens
cctttgggctgcctgaggatgagttcctggtggtgctgcgctgtgtgggtggaaccgtcccaaaatgtcccttgctcagaagaaggatc

SEQ ID NO: 567141 - DNA, 80 bp, Homo sapiens
tatgaatgagttgcataaaattccatgtcttaattacagagcacggtgacctgggtaatagcagatttttagatccaaga

SEQ ID NO: 567142 - DNA, 115 bp, Homo sapiens
cccgagtatgcttcgtttttcgccgtcatgggcgcctcggccgccatggtcttcagcgggggatatgagactttctactcggaatatcctgagtgttgcgtggatgtaaaaccca

SEQ ID NO: 567143 - DNA, 96 bp, Homo sapiens
attttccggtcccggcgcccggcgagggcgcgcggctggtgtccgccccgcccgaaagagttgcatgctgagaatttgaaaaatgaagatgatgta

SEQ ID NO: 567144 - DNA, 83 bp, Homo sapiens
agacctatatcacagatcctgtttcagccccctgtgcgccaccattgcagccaaaggatgaacttactgctgtgaatgtaaag

SEQ ID NO: 567145 - DNA, 75 bp, Homo sapiens
tttcatgaagggcctctacacagacgccgagatgaagtctgataatgtgaaggggaaatgccgggagtacagacg

SEQ ID NO: 567146 - DNA, 100 bp, Homo sapiens
gagagggagtgcgtggaggagctgtgcagccgcgaggaggcgcgggaggtgttcgagaacgaccccgagacgagagtaaaacttgtctcggcacagagtc

SEQ ID NO: 567147 - DNA, 83 bp, Homo sapiens
catcaagcacacgactcttggtgagcgaggagctctccgagaagcaatgaggtaatagcctgcagctggtgttttgagaagcc

SEQ ID NO: 567148 - DNA, 88 bp, Homo sapiens
aagaccttaagaagtttctaaaacaaactggcgatggaatatgagaggagccctctggaaagaaaaggacagaccctgtgctttcatg

SEQ ID NO: 567149 - DNA, 74 bp, Homo sapiens
tcagcttgaggagcaacacaggagtctctggagggtgttaaataccacattatttgaaagctgggagatcgttg

SEQ ID NO: 567150 - DNA, 90 bp, Homo sapiens
cggcaacatggtgcggtcggggaataagaggctcacaggacacctgcatgcccaaggcactccaccgtatgtgatcaacctggatccagc

SEQ ID NO: 567151 - DNA, 74 bp, Homo sapiens
accacccctgaagaaattgcacagaatccaaaggactgcatgacacaccataggatatagtcaagaagcctttg

SEQ ID NO: 567152 - DNA, 74 bp, Homo sapiens
cgggactccggacctccaggagtcttcccaagggattgttgaagaaacttctgaagagggaaactctgtacctg

SEQ ID NO: 567153 - DNA, 90 bp, Homo sapiens
ctgcgacagcgggtagcacaggcctttcgggagggagagaatacccaggaagagagaagggcacagttacctaagtatcaacgtaatctt

SEQ ID NO: 567154 - DNA, 75 bp, Homo sapiens
agaaataaggtagactcaatggtcacagctacttggaaggctgagatgtgaagactacttgagctcagaagttcc

SEQ ID NO: 567155 - DNA, 100 bp, Homo sapiens
ttctgtatcttcatggtgcggctcatcttcgagagcttttctgggagaagaggctacaaggacttagtgcatcagatgtaacagaacaaattataaaaac

SEQ ID NO: 567156 - DNA, 75 bp, Homo sapiens
gtgacccagaccctctcctttccctttgagaccgtgaagagaaagatgcagagagaactcgatgccaccgcaacg

SEQ ID NO: 567157 - DNA, 75 bp, Homo sapiens
tcaggaatctggtctcattggtttttcagaagaagtgaagtcaagatgaagaaccatttgcttttctggggagtc

SEQ ID NO: 567158 - DNA, 100 bp, Homo sapiens
tgaaaatggagatattgggaaagaaagatatagagacaacgactatgtccaattttcatgctcagggagaagatgtcaaccggacactagaaggtggaag

SEQ ID NO: 567159 - DNA, 108 bp, Homo sapiens
ttgaagaaaagggtgaaggaggcgaattttcagttgataggaggacgaatccatgaaccaaccaggaccaatcaaaaccagactggctattagtcagtcacatttaat

SEQ ID NO: 567160 - DNA, 75 bp, Homo sapiens
cacgcaaccccagatccatttacactttacagtaactaggatttctacctcaaccgcgagacctatgcaaggacg

SEQ ID NO: 567161 - DNA, 82 bp, Homo sapiens
gtacaacagcatcttcagcctgctcagcttcgagaagattggctacacaggatccctccccgcggcggcgatggcccgagcc

SEQ ID NO: 567162 - DNA, 75 bp, Homo sapiens
gaccaagagcatgttccagaggaccacgtacaagtatgagatggtcaagagcaatctgaatccaaatgcaaagga

SEQ ID NO: 567163 - DNA, 88 bp, Homo sapiens
cagaccacagtggaccacttctgggggggccgtggagcccatgcagatcgacgtggacccccaggaagacccgcagaatgcacctgac

SEQ ID NO: 567164 - DNA, 87 bp, Homo sapiens
gtctggatccccgcccaggaagcccctctgaagcctcctcgccgccgtttctgagaagatgttcctcctgctgatcaagagaagctt

SEQ ID NO: 567165 - DNA, 82 bp, Homo sapiens
atcgacgtcgtgatccagaagtccagagctgaggactgcctgtttgcagtgagacggtttaagcggaagcatcttactgcca

SEQ ID NO: 567166 - DNA, 100 bp, Homo sapiens
ctgaagtcggtgtctgctgcgttcacggcaggattcggttaggtaacagaggatgaagtgttggatattttagaaagtgtcctaatctctaatatgtcca

SEQ ID NO: 567167 - DNA, 100 bp, Homo sapiens
tgtgcttccagaacctgcgggaggtggggaacgccatcctcttctgcctgctcatcgagcagagcctggccttggtatgttcctgcttcatccccttcta

SEQ ID NO: 567168 - DNA, 91 bp, Homo sapiens
attgacgccatgtcgggttattcgagtgaccgagaccgcggccgggaccgaggtgatgatgacagcctcttcatctatgactgcagtgctg

SEQ ID NO: 567169 - DNA, 75 bp, Homo sapiens
tgataagagctgtcagttttctgtggatgaagtgggtcggaagcagttcatgaggtttgagtgggcaaactacgc

SEQ ID NO: 567170 - DNA, 78 bp, Homo sapiens
gcagaacccccagaccatcatacaatgcagatcttcgtgaagactctgactggtaagaccatcaccctcgaggttgag

SEQ ID NO: 567171 - DNA, 51 bp, Homo sapiens
cgaagatgcagagttcattgttgccaagctccttgaggagaatgaccagct

SEQ ID NO: 567172 - DNA, 82 bp, Homo sapiens
ggagctggctgtggccctttttacctcatgagggaactgccagatgatcaagcggtgctgattcacgagagtggaagcctcc

SEQ ID NO: 567173 - DNA, 80 bp, Homo sapiens
ctcgcctcgactccaaatggttgaaaacagatatacaggattttttatcaagcagaaatgcatcgaacaacgagaatcaa

SEQ ID NO: 567174 - DNA, 75 bp, Homo sapiens
ccggccagctgctcttcgccaacttcaaccaggacaacacccgccctgcccgcaggccatgtggcccccgctgtt

SEQ ID NO: 567175 - DNA, 75 bp, Homo sapiens
tgccaaggaaaaactggagagcttcatcaaaaatagtgatagctttgataagtactccacatcagcattctcaag

SEQ ID NO: 567176 - DNA, 75 bp, Homo sapiens
gcatcctatggctcaaagaaagatgattatgaggcagcatggcgggagctggaggccgagcgggcccagctgcag

SEQ ID NO: 567177 - DNA, 100 bp, Homo sapiens
tagattccacaattctaaattactttgcaattgcagaaccagaggaagagatcattgccgaggactatgacgatgatcctgtggactacgaggccaccag

SEQ ID NO: 567178 - DNA, 87 bp, Homo sapiens
tgccatcaccactgtaacggtgccaactccaatttaccaaactagcagtggacagtataacaatctgcttcatcctgattctgcggc

SEQ ID NO: 567179 - DNA, 76 bp, Homo sapiens
gtcagcgctcccatgggggtatcgatgtgaaggaatggaagttggatacactttgtgacttgtacgagacactgac

SEQ ID NO: 567180 - DNA, 100 bp, Homo sapiens
gccggacacgctctgcttcgacaaggacgagttcatgaagatttatgtccacctgaaggaaggtgggggcccagatggcctggatgcgctgaagaataag

SEQ ID NO: 567181 - DNA, 90 bp, Homo sapiens
cttgaagatgatttacttggagaagatttgctatctggcaaaaagctctgtgatcagcagctgcccgggcctgctctacctcaacctgga

SEQ ID NO: 567182 - DNA, 51 bp, Homo sapiens
ccagaatcggagccccaaccgcgctgccggagtccaaaactacttacctgg

SEQ ID NO: 567183 - DNA, 96 bp, Homo sapiens
ctctagtggcggaagccttcgtctcccagattgcaggtgcttttgaagatgatgatatcacgcacgttgaaggaagtgtagatcctattcgagata

SEQ ID NO: 567184 - DNA, 74 bp, Homo sapiens
tgctggaagacccagaaggcgtgaaaagatttaggaaaaagcttgtggtgaaggggggcaaaaaaaagaagcaa

SEQ ID NO: 567185 - DNA, 101 bp, Homo sapiens
aaagcggggacccagaccctggagcctcagttggaagcagccgatccagcctgcggagcctgtggggcaggtccacgctgcttttatgagctgtaacactc

SEQ ID NO: 567186 - DNA, 88 bp, Homo sapiens
gaagatggcgcttgacggaccagagcaggccaggtcagagcagcccaccatgggatggggagggggtggaggctgcaccccgcgccca

SEQ ID NO: 567187 - DNA, 100 bp, Homo sapiens
aagaacattctcgaatacctagaatggggagacgcaggtcagaatggaaatgggctgcagaccgggcagctattgtcagccgctggaactggcttcaggc

SEQ ID NO: 567188 - DNA, 100 bp, Homo sapiens
tgcattgaaccctaatgagatccagcgggccctggtgcagtgcaaggaacaggtttccccacttgctctggagcgggactgtgctgaagaccatgctgga

SEQ ID NO: 567189 - DNA, 98 bp, Homo sapiens
gagagcagggaaatggactgctatctccgtcgcctcaaacaggagctggtctctgacattgacagagcctggacgttggaggaagccccaggacgttg

SEQ ID NO: 567190 - DNA, 88 bp, Homo sapiens
gctgctgctcgggctgctcttggagaaagacttccgagtgcaggaactcccactggctcgtattaagaagattatgaaactggatgaa

SEQ ID NO: 567191 - DNA, 100 bp, Homo sapiens
agaaagatggatttttgcatgagacgcttctggacagcttcatcgcagtaggaatggcagccccatctatgaaggaaagacaggtctgctggggggcccg

SEQ ID NO: 567192 - DNA, 117 bp, Homo sapiens
gcactgaggaggccgagagatgaggccggagcccaccaagttctgggaagtatctctcctaaatgtgtgatcaaggaattaccaccaacagagaacagtaatacaggagaaaggttc

SEQ ID NO: 567193 - DNA, 90 bp, Homo sapiens
aaggacatgtggagatccccaatttgtctgatgaaaacagcgtggatgaagtggaggttacagattatgccattgccaggcgcatagtag

SEQ ID NO: 567194 - DNA, 83 bp, Homo sapiens
ccttgggcctcgcgccggctatggccgtgccctggggctgagccctcagatgtcgtgatctcaacagcttgtcacccaacaga

SEQ ID NO: 567195 - DNA, 100 bp, Homo sapiens
aaggatcaagaagatttctttcttcatgaccctgcccttgccagaatttcctgcgctgttccacctcattcaacttcagcagtcctgcgttaactgcggc

SEQ ID NO: 567196 - DNA, 80 bp, Homo sapiens
ccatcacagacaccatcgcgtggaacgtgctcccccgggggaacggcaggagcagctgatgggatatcggaagagagggc

SEQ ID NO: 567197 - DNA, 75 bp, Homo sapiens
tgcagcagcagaagcagcagaaaggccgcggcatgggcggcgctggccgagctattcaaagtgtgattagagctg

SEQ ID NO: 567198 - DNA, 75 bp, Homo sapiens
ctccgaggagaaggacccgctctggcaggaccaagacccctggacctggggcccagtcggccctcagagcccttg

SEQ ID NO: 567199 - DNA, 96 bp, Homo sapiens
atcggttagacttctcaagtgcaattcaagatatccgaaggttcaattatgtggtcaaaagacatgaagggagcacatgctgttagaagatggtac

SEQ ID NO: 567200 - DNA, 100 bp, Homo sapiens
tagatggacaccccatcacagaagatgagtacctggagaatgccttgaagctgatttcagttgcaccaccagcaccaccttccagtagtcagctctgccg

SEQ ID NO: 567201 - DNA, 97 bp, Homo sapiens
ttgttttttcctgtatgaagcggttggcaccactgaagtgaccgaatgaggtgtctgagggttctgtggtccagttttcatcagcaaacttctcctt

SEQ ID NO: 567202 - DNA, 90 bp, Homo sapiens
ggaattttgaagtacaccgtggtgacattgtatcattggtggataggatgggatctgcactgatgattgaaacagcaagaaaccccacat

SEQ ID NO: 567203 - DNA, 75 bp, Homo sapiens
tggagaactatagcagcctagtgtcactgggttatgatgtgattgctcaagcccaatctgggactgggaaaacgg

SEQ ID NO: 567204 - DNA, 127 bp, Homo sapiens
acttcaatatcactgaagacatgctccggggcatctttgagccctttggtaaattccgccatggagtcatagttgcagctgactccagggctacagcgggtgcttacattgcctcccagacggtgaa

SEQ ID NO: 567205 - DNA, 82 bp, Homo sapiens
acagaagatggtgcagaagaaaccagccgaacttcagggtttccaccgttcgttcaaggcctccggtgtggctgtctctgat

SEQ ID NO: 567206 - DNA, 90 bp, Homo sapiens
ccgcagccaccagccgcccgcgccctccagccccgtccgggagtccccggcccgctgcggtgccggggggccctcagcctcttggccttg

SEQ ID NO: 567207 - DNA, 75 bp, Homo sapiens
ccattcccaagtcccacgaggcgtctcagaccagtatccttcaggggttctcttactctgatttgcggaaatttg

SEQ ID NO: 567208 - DNA, 90 bp, Homo sapiens
cactggataactatgttattcgagaaaattttaagagcttgcattgaacaagtgaaaaagtattcagaattctatactctccacgaggtc

SEQ ID NO: 567209 - DNA, 99 bp, Homo sapiens
cacagacgcaacgtgagcgccctcaagtaccacgcgggcacctgggacggcaaaacagaacagaaaggcggagataaaaagaggggtgttaaaagacca

SEQ ID NO: 567210 - DNA, 73 bp, Homo sapiens
ctgggtcagtccgccgctcaccccgcggccgcaccttcccgccttctcagctgagatctgtatctgtggacct

SEQ ID NO: 567211 - DNA, 100 bp, Homo sapiens
tgatacccaaacttccccagagccaggcacaaggatgaacattctgccgaagagaacaagacgtgtgaagactcagttacagccaagttctacttctgaa

SEQ ID NO: 567212 - DNA, 78 bp, Homo sapiens
ccgctgtggtacttctcgcagtccccgcgcgtggtcatccagggtctcctatggacagaagtgcgggcaaggagcttt

SEQ ID NO: 567213 - DNA, 100 bp, Homo sapiens
cgccgcccgagcgctcgagaaagtcctctcgggagaagcagcgcctgttcccggggcagatccaggttcagaacaggaggtgaggttccgccctgcacac

SEQ ID NO: 567214 - DNA, 100 bp, Homo sapiens
gaatttcttcaacttgatgtcaagcgagtaacacatcttctcaaccaggacactctgactgtgagagcagaggatcaggatgagaacaagttgagcagtg

SEQ ID NO: 567215 - DNA, 50 bp, Homo sapiens
gaataatcaaaagtttccttggtggacagcagcaaggaatcagctgaagc

SEQ ID NO: 567216 - DNA, 89 bp, Homo sapiens
gtttgtaggtcgtcagaaagagcagaagatggctgtgccacccacgtatgccgatcttggcaaatctgccagggatgtcttcaccaagg

SEQ ID NO: 567217 - DNA, 82 bp, Homo sapiens
gcgagcgcgagcggcgcgagaaagaataatcggtggagatggattgtgaaatggaggtgcataaatatccagtttgccaacc

SEQ ID NO: 567218 - DNA, 76 bp, Homo sapiens
gttcatctaccacgctttcgtcgtcatcacgtagacataaccaagaaacttcacccaaatcaagctggcctggatt

SEQ ID NO: 567219 - DNA, 75 bp, Homo sapiens
agtttgcacaagggaggcgacagagacagcagcagggaaaatggtatcatcggaggcaagctgtaaaagaattac

SEQ ID NO: 567220 - DNA, 74 bp, Homo sapiens
tgttgtcaaggtggcctaccaggaggccaggggtgtcgccatggttgagaacttgttgcttagtaaccaaggga

SEQ ID NO: 567221 - DNA, 98 bp, Homo sapiens
atgtatccaagttgctgtcacagtgtaaatttgatctgttggaagaacttgtggccaaagaggatgagctttctgatgttagccaaggcggatctaaa

SEQ ID NO: 567222 - DNA, 95 bp, Homo sapiens
acgatttaaggatttttaccagtttacttttaattttgcaaagaatccaggacaaaaaggattaggcttttaaagaagcagttttttcaccgagc

SEQ ID NO: 567223 - DNA, 83 bp, Homo sapiens
ccgatccagcctgcggagcctgtggggcaggcataatgattataaagtggtttctcctgctttgcgagctgtgggaaacattg

SEQ ID NO: 567224 - DNA, 85 bp, Homo sapiens
acagtgtggatgagatggatacagaccgagtgtgtcagcagccaggactttctctctgggtccccttccaaaacgcagccaccgc

SEQ ID NO: 567225 - DNA, 75 bp, Homo sapiens
agatggcaactcaggaagttcctactggtcttgaacactgtgtctcaggtgacgagctcatcttcttggaccctc

SEQ ID NO: 567226 - DNA, 100 bp, Homo sapiens
attgttttaggggccagcagatgcaggaaaatttcgatattgaagtgtcaaaatccatagatggaaaagatggttatgatgtgattgctcaagcccaatc

SEQ ID NO: 567227 - DNA, 96 bp, Homo sapiens
gcggatgccctgcagtacctgcagaaggtctctggagacatcttcagcaggagcatcagatccatgctgctgctgactcggagccccacagcttgg

SEQ ID NO: 567228 - DNA, 152 bp, Homo sapiens
cccacccagatgccagtagtgcccgccccacccgcatgctctttgtcactccccggcggcagcacgaaagtaccattgctggaggtgtgccagttctcgagggatgcctctgtggctgaggcgtggctgattgcccaggagccctacctggc

SEQ ID NO: 567229 - DNA, 83 bp, Homo sapiens
caccacaataatccacagccaaggtaccgaggagaaggcattgtatatgggacactagaggaggtgtgggactgtgtgaagcc

SEQ ID NO: 567230 - DNA, 82 bp, Homo sapiens
cccaccatcaagttcttcaggaatggagacacggcttcccccaaggaatatacagattatggattggatatgtctacttctg

SEQ ID NO: 567231 - DNA, 83 bp, Homo sapiens
ccgcggcgtcctcggcgctgaaggggttaattcaacagttcaccaccattaccggtctggtgtggcagatgtggatagctgga

SEQ ID NO: 567232 - DNA, 51 bp, Homo sapiens
ggaaaacctgtgcctttagatgaagagaggaaatgatccgactagatgaag

SEQ ID NO: 567233 - DNA, 82 bp, Homo sapiens
gaagtcaattcaaaggacctgcccccagagagagtagttgatgtcacttggcgatattcctgcaaacatgaagaggtgattg

SEQ ID NO: 567234 - DNA, 100 bp, Homo sapiens
ttattgctgaggcagttggaagttatgacaccatggatctcttcaggcacactacagaactaaatatgcatgcacagaaaactgaatctgtagataacga

SEQ ID NO: 567235 - DNA, 74 bp, Homo sapiens
ttgtggcaacatccaacaggccaccggaagccatcgacgagtacaagccccaggatgctaccaccaacccgtcc

SEQ ID NO: 567236 - DNA, 75 bp, Homo sapiens
tcgctgtctaggccggagcaaaggccggaggtatccagatatggacactgagaataatccagaatggctactctg

SEQ ID NO: 567237 - DNA, 100 bp, Homo sapiens
aaaatagtcaatagtgctcagactggtagcttcaaacagctcacagttaagacttaattcagtgcacaaatgagatgaatgtgaacatcccacagttggc

SEQ ID NO: 567238 - DNA, 100 bp, Homo sapiens
atttgttaaggattccaagtaactcttatttgggtggccgtgaattaagtgattttattagctatctacaaagagaagctacaaacccccctgtaattca

SEQ ID NO: 567239 - DNA, 75 bp, Homo sapiens
gggcgcatggaagtgctcaccgacagtgaaggacacaactcagatgggaagttcatcgcccgggcacagcggata

SEQ ID NO: 567240 - DNA, 82 bp, Homo sapiens
catggatgttcttcttcgagtatttgtagaagggtaacaaatcggaagtacccaaaactgaaagaagtggatgatgtgcttg

SEQ ID NO: 567241 - DNA, 75 bp, Homo sapiens
tgaggagcagggaagcatggctattgtggatgtaaaagccatgttcaagtccctaaaagataagttagtacaaga

SEQ ID NO: 567242 - DNA, 75 bp, Homo sapiens
acaacctgatttctcctttcttaggatgccacagctgggttgcttacaaatacactacttcaaagtaaactttct

SEQ ID NO: 567243 - DNA, 100 bp, Homo sapiens
ggaccccaagaagaccattcagatgggatctttccggatcaatccagatggcagccagtcagtggtggagagcaatggtggaacaaagcggcaaaagata

SEQ ID NO: 567244 - DNA, 96 bp, Homo sapiens
ggcatcagggaggctttcagccggagaagcgagtttcagctgaagaagaagaggacagtgctccagtgaaagtggaagaacaaaggaagatgagtc

SEQ ID NO: 567245 - DNA, 97 bp, Homo sapiens
aaaggctagagaagtcaccctccttcgcctcggagtgggatgagccctggcttgaaaaacagtccaattgatgaaagtgaggtgcaaacagcaactg

SEQ ID NO: 567246 - DNA, 82 bp, Homo sapiens
aataccggctctcagcggctgtctgtccacgttctctgtgggttcattgccggacttgagtctgagttcatggagactctgt

SEQ ID NO: 567247 - DNA, 74 bp, Homo sapiens
tctctgctgctctctcatttgctggccatcggattgggggtgttgaaagcagcaggggcctagaagacattaaa

SEQ ID NO: 567248 - DNA, 100 bp, Homo sapiens
ctgacagcgccagccgaggtggagtggccgtggtccccgcatcagatatcagttcagtcatccgatcttccttggggaaatacccattaccgtcctgaac

SEQ ID NO: 567249 - DNA, 97 bp, Homo sapiens
ccgcagcttcctcggcgcccccggccgctaccgctcaggtgctgcaggcacagcccgagaaaccgcagcactacacacaaatttacatgtattggag

SEQ ID NO: 567250 - DNA, 100 bp, Homo sapiens
atgaaatccaaaggtgaatcttttggttggtgattttgatgatagccacaaagcaagcaggagttgtggaaagtaaaaatgtagccctaccaaaaggaac

SEQ ID NO: 567251 - DNA, 90 bp, Homo sapiens
cacgtgtccactgccgcggtggtccgagagcagcacgggcgcgatgagtcggtgcacagtgagaaagatcagtctaaagaaaaggagaag

SEQ ID NO: 567252 - DNA, 100 bp, Homo sapiens
cttgacgaggctgcggtgtctgctgctattctccgagcttcgcaatggtacaggtttgcagattccgccagcagcacagcaagctctacagatgagtggc

SEQ ID NO: 567253 - DNA, 100 bp, Homo sapiens
aaaaaatttgctgttgaagttcatgatccacgaaggagatgcagaaactaccagaggccgttcagctaattgagaaggccagcatgatgtatctagaaaa

SEQ ID NO: 567254 - DNA, 51 bp, Homo sapiens
caaaatcacagctttgagtgagaaacagaacatcatcaagaaggtgatcgg

SEQ ID NO: 567255 - DNA, 82 bp, Homo sapiens
gcggtgtagaggcggcggacgggccggagggaggatgttaaagccccgcggctcaggctgcacgaagaaaaggttattaaag

SEQ ID NO: 567256 - DNA, 128 bp, Homo sapiens
cccgaagtaccgacccgagttatgcccaccctccaactttgcgacggaaatgtgtcatcgaaagccagaacactcctatgccaccttcaccagctgtacaagtgcagggccagcctaacagttctcag

SEQ ID NO: 567257 - DNA, 75 bp, Homo sapiens
catcccaccgccctacgacaaggcctacgagaagcagcggggcacccggcgcgaggagcagaaggagcttcagcg

SEQ ID NO: 567258 - DNA, 105 bp, Homo sapiens
gggatcgatgtttcaatattggaagcgctttgatttacagcagctgcaggagtggagtcaacatatcaatggagcaagtcacagtcgtcgatgccagcttcttct

SEQ ID NO: 567259 - DNA, 90 bp, Homo sapiens
cgctggatcaggagtgaagctgcagaccttcgcgcgcggagacccacatcaagggcttcacactgaacgatgctgccaacagccgcctca

SEQ ID NO: 567260 - DNA, 51 bp, Homo sapiens
agccaatcccaggaggaaaaacggtgcgtataacccgtatatagagataat

SEQ ID NO: 567261 - DNA, 87 bp, Homo sapiens
acccccgcttcctgtcggccgaagccatcggcatcatgagaaggacaggggcaagtgtccgagtggtgaatcagctacttacagaga

SEQ ID NO: 567262 - DNA, 51 bp, Homo sapiens
actagacccacagctgttaaagcaacaggttttttattggcacctcagtct

SEQ ID NO: 567263 - DNA, 114 bp, Homo sapiens
tcaggcaccagggaagaccctaatttagtcccctccatctccaacaagagaatagtaggctgcatctgctattcccaacagaagagcttgaacaatgctgcatttgcatcaggt

SEQ ID NO: 567264 - DNA, 82 bp, Homo sapiens
cggcaaaggcaagagtaacagcagcgccgtcccgtccgacagccaggcccgggagaaccgccaccggcacggccaggccagc

SEQ ID NO: 567265 - DNA, 75 bp, Homo sapiens
gcccttatcatctgcttgaatcactgcacgtctgagaatggtggatgtggtggagaaagaagatgtgaatgaagc

SEQ ID NO: 567266 - DNA, 87 bp, Homo sapiens
cacgcgggtctgtcatcatgtcgcgttacgggcggtacggaggagctcaccatggatgatgatatcgccgcgctcgtcgtcgacaac

SEQ ID NO: 567267 - DNA, 90 bp, Homo sapiens
cagaagcagatggaacattttcaagacctgtggatgaagagccagagtcctctgaggtcgatgctgctggtcggtggcctggtgtctgtg

SEQ ID NO: 567268 - DNA, 75 bp, Homo sapiens
accgcatctggctggagccctgcattcgcggcgtgtgcaggttgtttttcaccattcagaacattgcctgaagca

SEQ ID NO: 567269 - DNA, 75 bp, Homo sapiens
ttgtttgtggatcgctgtgatcgtcacttggatcccaagagaagccactttgtcttaattgctggggagccatta

SEQ ID NO: 567270 - DNA, 76 bp, Homo sapiens
ctggtccattgctatcagcccattactcaggcaaagattacatgaggagtggttgctaagagagcagaaggcacaa

SEQ ID NO: 567271 - DNA, 101 bp, Homo sapiens
tcttccaggtgggctccagcggttcccagcgcgatgtcaactgctcggttatggacctcagttggatgaacccattccactgtatgaggcaaaagtttcca

SEQ ID NO: 567272 - DNA, 100 bp, Homo sapiens
ccgattcccgcattgcagaacttctcacagagctccatcagctgatcaaacaaacccagctttgcccgaagtttttacatacaaattctactagtcacac

SEQ ID NO: 567273 - DNA, 83 bp, Homo sapiens
gcgggccgcgcgcgggtctccgtggaagtccgtttcgtgagcagcgccaagacttcccaagtaagaagcggaagaggagccgc

SEQ ID NO: 567274 - DNA, 75 bp, Homo sapiens
cctaaagtaaattggttgaagaaattagatcccaaagattcttggagtggtaaaatttcagccttccctttggcc

SEQ ID NO: 567275 - DNA, 75 bp, Homo sapiens
cccccacttccagagatccccaacggtgaatggctctgtccccgttgtacgatcgccacatcacagaatcgtatc

SEQ ID NO: 567276 - DNA, 59 bp, Homo sapiens
ggaagagcggctcggtggaaaacgggttcgatacccagctgggatctagcaattgggag

SEQ ID NO: 567277 - DNA, 90 bp, Homo sapiens
cttagcgggtgggggaagctggtaggcacgggcggctccgcagtgaccggactcgggggaggcgttactacaaggagacctctggcctga

SEQ ID NO: 567278 - DNA, 83 bp, Homo sapiens
ctaaatgggggcctctccagggagtgctctgttcacggctccatcgctgttaatacctttgtctggatatggaggaacaagca

SEQ ID NO: 567279 - DNA, 90 bp, Homo sapiens
ccatagcctctcaccctaaggtagctttccacagccccaccaccaggatcaagaaggagccccagagtccccgcacagacccggccctgt

SEQ ID NO: 567280 - DNA, 100 bp, Homo sapiens
gccgcttgtcagtgtgatgaagattggcacccagccagaaagactccaggggactcattactctgtgcagtcagacatctggagcatgggactgtctctg

SEQ ID NO: 567281 - DNA, 100 bp, Homo sapiens
cacagacccttcacccctcacctcgatgcagccagtagcttggatccttgtgggcatgatccataatcggtttcaaggccatgttttcgcaggcagtctt

SEQ ID NO: 567282 - DNA, 101 bp, Homo sapiens
agctccccagggcccacgggccagccccgccgccctcgcaacctggcagccgccgccgtggaagatggttgacattactactgaagaactgaaacagcagt

SEQ ID NO: 567283 - DNA, 100 bp, Homo sapiens
tgcccaaagtgggactcaagtacgggacagatttacatagcagaccccacgttagctgaaatgggaaaaaacttgaaggaggcagtgaagatgctggagg

SEQ ID NO: 567284 - DNA, 100 bp, Homo sapiens
aggtgcgggcggctgctgaagaacagattaaggtgctggaggtgacggagggttggatggcaagcatgtggtgtttggcaaagtgaaagaaggcatgaat

SEQ ID NO: 567285 - DNA, 104 bp, Homo sapiens
tgttctgctttcatggagttcacagaagagtcgaggagttcacacaaaagatgttggacaatttctacaattttgcttcatcatttgctgtctctcaggcccag

SEQ ID NO: 567286 - DNA, 97 bp, Homo sapiens
tcgaccgtcagttgcaagaggaccgcatgtacccggacctttccgagctgcttatggtgtctgccccaagcccctgtctcccagcctgatgcccctg

SEQ ID NO: 567287 - DNA, 100 bp, Homo sapiens
gtgcgcagggcgacggccccacctccggccactgggacggcggcgcggagaaggcaggatggcactggatctttaaaacgcagtggttcctttagcaaac

SEQ ID NO: 567288 - DNA, 100 bp, Homo sapiens
ctgaagctgtgcaggctgcctgtatgggatttgtgattgagcttcttctcacattggaatctgcaattgatactttggctgaaaccatgaagcattatga

SEQ ID NO: 567289 - DNA, 93 bp, Homo sapiens
ggcgatacgagatagcagtgaatctggatctcactgaaagacagatcctccatgaaatgatggaagaaattgactatgatcatgatggaaccg

SEQ ID NO: 567290 - DNA, 82 bp, Homo sapiens
ctccctcggtgttaacgtctgctccagctcgcagcccgctgctgggtgagaagccctaccactgcaactgggacggctgcgg

SEQ ID NO: 567291 - DNA, 82 bp, Homo sapiens
ggcaaggaacagtgtcttgcagtgtggaatttctcatgaggctcacagaacatttcctgcctgttgctcacactctgttgtc

SEQ ID NO: 567292 - DNA, 101 bp, Homo sapiens
gaagaaaagggtgaaggaggcgaattttcagttgatagcaagatggaaagttgccttttgttcctccggaggaagaatttattatgggagtttccaagtat

SEQ ID NO: 567293 - DNA, 75 bp, Homo sapiens
ggacgtgctgaggaccaacctggggcccaaagggaccataaagatatgatttcagatatcgaaaagaaaaggcag

SEQ ID NO: 567294 - DNA, 51 bp, Homo sapiens
tctacgaaggcggctacttcaagcatcaacaacagcaacttgtgattggcg

SEQ ID NO: 567295 - DNA, 98 bp, Homo sapiens
agcaacagactctcctgcagaccttcccaggaagccagagccacacacaccatcatggtcctggttcaagctgaagttcctggatctcccatatttgt

SEQ ID NO: 567296 - DNA, 100 bp, Homo sapiens
cttggcatccccttgctggacagtggctgtggagtgtcatgggccggcagacatgcctggagtgcagcttcgagatcccagacttccctaatcatttccc

SEQ ID NO: 567297 - DNA, 75 bp, Homo sapiens
ccagtgccttctcgctgccgcgcgcccaagctcggcggacggcagtgccccagcctctacagctttacgttccag

SEQ ID NO: 567298 - DNA, 51 bp, Homo sapiens
ggaatggaccccgatggtgtcatcgaggcctcatcgacaaagtcgacaact

SEQ ID NO: 567299 - DNA, 100 bp, Homo sapiens
cctcgctccctctgctcttcctcccttcgctcgcaccatggttcgagaacttgtcttggacaattgcaaatcaaatgatggaaaaattgagggcttaaca

SEQ ID NO: 567300 - DNA, 90 bp, Homo sapiens
ctgagcaggagtcgtccgcttatagtggaggctgctaggagccggtcagagggactttgtgttttatgccccacgtctgagaatcaacaa

SEQ ID NO: 567301 - DNA, 82 bp, Homo sapiens
ctgaggcctggaatttgattaactcattcaaggttacccagttgaacccagcttagactagaaagtctagaagacacacaca

SEQ ID NO: 567302 - DNA, 74 bp, Homo sapiens
ttggaggaggtagaatcactcaatcggaaatatacccctgtttcttatatgacttcctagcatgggctgttgtg

SEQ ID NO: 567303 - DNA, 101 bp, Homo sapiens
gccaccgccccgggacccgcgccgctgccctccggctccgcgggcggcccacggcgagtggtgaactatgacaatgtagtggacacaggttctgaaacaga

SEQ ID NO: 567304 - DNA, 74 bp, Homo sapiens
ttttggcattgacatttaattttagggtcctttatatagaagggagagtagcaaattgccatcgcaagagaggg

SEQ ID NO: 567305 - DNA, 100 bp, Homo sapiens
gaccttgaacgattccgctctgcggcgggtgtccctaaactagcagtttagggtgtcagggccatgaagcccccaggaggagaatcgagcaatctttttg

SEQ ID NO: 567306 - DNA, 101 bp, Homo sapiens
attggattaaaagtttcaaaacaaacaataacgctttggaaaaagtgttctggacttggtgcctctttctgttatatgctttcctatttagttgggagacc

SEQ ID NO: 567307 - DNA, 75 bp, Homo sapiens
gcagatggccgagctgctgcgcagctcctgcccggtgtttcccattaaacactaccaggacaaaatcaggcctta

SEQ ID NO: 567308 - DNA, 110 bp, Homo sapiens
caaagatattttcctcacaaatctaggcatgatttggaggaatgccagctcctgagcaggcctcattggtggaggaggggcaaccacagacccgccaggaagctgcctcc

SEQ ID NO: 567309 - DNA, 97 bp, Homo sapiens
tggtgcggctcatcttcgagagtgccggtggtggtgtgcacattgagccccggtatagacagttcccccagctgaccagatcccaggtgttccagag

SEQ ID NO: 567310 - DNA, 100 bp, Homo sapiens
cctgcgcgacctgcctgatgggctcttcactcgcgcccagcgcctaacctggctggaggcctcagctgccagccttgccctggctctgaatggcgtcttt

SEQ ID NO: 567311 - DNA, 80 bp, Homo sapiens
acggagtgaccaagagcaggtttgagattactccaaaggtttcggcggcaaatacggtatcgacaaggacaaagtggata

SEQ ID NO: 567312 - DNA, 82 bp, Homo sapiens
caacctagtgggtgtaatacatcatgaactgcaggccgtcatttcaccaagctgataatgttcggggaacccgccatcacgg

SEQ ID NO: 567313 - DNA, 76 bp, Homo sapiens
ccagttccaaggactccacgggtggctggcacatgtgtatcaatcccaaggaatgatgagagctgcagagatgtgt

SEQ ID NO: 567314 - DNA, 104 bp, Homo sapiens
tcaggaacagggacagcacctcatcccctggatgggggaccacaagatcctcatcgacagacccaacatgagtgaagtttcctgcaagaaacgggacgactatt

SEQ ID NO: 567315 - DNA, 90 bp, Homo sapiens
agagcagtaagggactgagctgctgctgttcaacggttttgtgtatagcatttgaggttcttcagggcttgcagtatatgaacaaacatg

SEQ ID NO: 567316 - DNA, 75 bp, Homo sapiens
cgttacggccatcacggcggccgcagtggcgtcctggagccctcctcagttccagggtctccctccactgctgta

SEQ ID NO: 567317 - DNA, 100 bp, Homo sapiens
cagaggcacttaaaatttcaagagaggtagatccagatggtatcgaatgataacagaaggcggagtcagcataaatcaccaacaagtaacaaatcctgag

SEQ ID NO: 567318 - DNA, 50 bp, Homo sapiens
ctagacaatggtacaatctcaaaactaattctgaagcaagcccttatagt

SEQ ID NO: 567319 - DNA, 98 bp, Homo sapiens
ggttttggctctgcgtgagtgtggtctacgagctgtttctcatctttatactcttccagggaaagcaggcaggatgggagagtcgccgatagaaccac

SEQ ID NO: 567320 - DNA, 75 bp, Homo sapiens
cctagggaaccggcagaagcagttcaacagagacgtgttggagtgtgggcccatcgctggatggatctgtcagaa

SEQ ID NO: 567321 - DNA, 83 bp, Homo sapiens
ctcggggaggggaccgcgcccgcctcatttgcgccttgcagcactgctggaccagtgaaaaatgtgaggttttacaatattct

SEQ ID NO: 567322 - DNA, 75 bp, Homo sapiens
gtgggaacagggattttctcagtccttcactcaagaacaagtagctggtgagcatctggagaaagatctggggag

SEQ ID NO: 567323 - DNA, 100 bp, Homo sapiens
gctagaagaatcagacgtgctccaggaggccagaaggaaatacgcactcagaatggtccagcgtttgacataccgacgtaggctttcctacaatacagcc

SEQ ID NO: 567324 - DNA, 89 bp, Homo sapiens
ggactgtgccggcgccgcacccgaggctctcgccagcccggcgccccggtgctgagccaccagctgaacaggccaaagccagactacag

SEQ ID NO: 567325 - DNA, 75 bp, Homo sapiens
catccgcctttgatcgtcttcctcttcagccatccaggtgtgagatcaaccatgagttccgttgcagttttgacc

SEQ ID NO: 567326 - DNA, 100 bp, Homo sapiens
ggaaaatgctggcgtcagcatcggaagatcattttattgacattgctgaagtggagacagaggaggcctaccagaaactggccagcgagaccctggagga

SEQ ID NO: 567327 - DNA, 100 bp, Homo sapiens
gattccagagagcggcggaaaggataagcctcgacttagaagctaccgagttaccctaagaaagggaataaccagcaagtacctgtcaagaatgaagtag

SEQ ID NO: 567328 - DNA, 90 bp, Homo sapiens
ccctgagatcgtcaagtctcccagcgaccccaagcaataccggtacgcaataactgtttggtattttgatgcagatgagagagcacgagc

SEQ ID NO: 567329 - DNA, 80 bp, Homo sapiens
gaatacgtttagcttcaaaaatgacaagttcgataaaagtgtgcagaccaagcactctggcccccagaagcttctccaca

SEQ ID NO: 567330 - DNA, 99 bp, Homo sapiens
tttgggcatttttaagatttctgttgacaaagaaacccaggaaggaatcattactatacagaaggtgaccaagaatatggcccaggtgaccaaagccct

SEQ ID NO: 567331 - DNA, 83 bp, Homo sapiens
caacgcctggaggacgccttatggagccagcatattccaggtgtccctggccagtgtccttccacctgtccacaagcatgggg

SEQ ID NO: 567332 - DNA, 90 bp, Homo sapiens
gatccccatgaaccacgagacagatgtgaacttccagggcaagaacctggacaccgtgaagatgaaataccgagaccgagctgcagaaag

SEQ ID NO: 567333 - DNA, 83 bp, Homo sapiens
acgcggaggccgcctggggtagcggcggcgggagtcctggcgctctgcaggaatgtctgcagaggttcgctgacagcctacag

SEQ ID NO: 567334 - DNA, 90 bp, Homo sapiens
ggaggccctccgcgttgtctggcggaggaggggagtggcaggtgatcctcacagttaataacgacatgatagtcactgacaacaacggtg

SEQ ID NO: 567335 - DNA, 90 bp, Homo sapiens
gcggaacctccgagaacgacatcctgcaaaagttccaggtgcccacactggaaacttggagatcctgcttcccagaccacagctgtgggg

SEQ ID NO: 567336 - DNA, 100 bp, Homo sapiens
gtgcgggacgcgggcgccaggaccggccgaacgcagagaggaagcagaccagcccactacagagccaggcatggtcctggacagtgtggaagcaggagac

SEQ ID NO: 567337 - DNA, 100 bp, Homo sapiens
gcatgctgtcctatgtcagcaaaaactggagcagaaattggaggctcagcataggtgtgagttcttgatacgaatgaaaggccaagagtttgttgatgag

SEQ ID NO: 567338 - DNA, 95 bp, Homo sapiens
gggaccagattctgcgcgtcaacgacaaatccctggcccgggtgacccacgcggaggccgtcaaggatcttagaaatgaagttgaaaaattacgc

SEQ ID NO: 567339 - DNA, 97 bp, Homo sapiens
tcatggtgtgcatgttctaggaggaatgtttgctgggggattgaaggagatggaacaggaagaggtcctgatccacggtgtgtcctacaatgctatg

SEQ ID NO: 567340 - DNA, 117 bp, Homo sapiens
acgtatttaccttgtgacaacctatgctgaattttggttttactataaatccagtgtctgtcttcaccaagaaggacgactttgattggctgtaattggccactgttgctaatggag

SEQ ID NO: 567341 - DNA, 100 bp, Homo sapiens
tgcacgataaaggaactcaggcgcctcttcttagttgatgatttagttgattctctgaagggcagcaggatgggtgtggaagcagtgatggcacttttgg

SEQ ID NO: 567342 - DNA, 83 bp, Homo sapiens
cgcggctgggcaagaagctgatcgagcccctcaccaatctcatccacaggtgagaagccctaccactgcaactgggacggctg

SEQ ID NO: 567343 - DNA, 75 bp, Homo sapiens
aagagcctggtgagacggagctatcggcgccgcggcaagagccaggaatactcccccagttgcaagaggcgcagg

SEQ ID NO: 567344 - DNA, 90 bp, Homo sapiens
aagataatcgtcaagcacgtgacggtcatcggcggcgggctgatgggcgccggcattgcccagagaatgtaactggtcactacatttccc

SEQ ID NO: 567345 - DNA, 74 bp, Homo sapiens
gctgctgctggcgctgctgctgcacgggcggctgctggcgggtgatgctggtcccaaaggtgctgatggctctc

SEQ ID NO: 567346 - DNA, 73 bp, Homo sapiens
acagactcttgtgattggccgagggatgagtgaggccttgaagtaccaaaagaattggtggagctccatttga

SEQ ID NO: 567347 - DNA, 100 bp, Homo sapiens
gtcatctgtatgcataatatggaatgttcttaacccagaagtagctgaatgtgttactccattgctgaggagtggaaagcgtctctagcagctgatatcc

SEQ ID NO: 567348 - DNA, 100 bp, Homo sapiens
ctggacgagctggagaaggccatcaccacgcagaacgtcaacaccaagtgcatcaccatccccagggtatttgaagtataccatacaactgttttgaaaa

SEQ ID NO: 567349 - DNA, 90 bp, Homo sapiens
gctaatgccacaagtgatatgttctattttgcagttgaagatggtgggagatgtcccaaaatcagagaagaatgtgaattccaagaaagg

SEQ ID NO: 567350 - DNA, 50 bp, Homo sapiens
gggacttcccgtccgcggcgtggaggtgtctttggtgcaacactaacaag

SEQ ID NO: 567351 - DNA, 99 bp, Homo sapiens
gtggcaatcatcctgaatgaatttagagccaaactgtccaaggctttggcatttgtgaatagcacaatggaagaagctggactttgtgggttaagagag

SEQ ID NO: 567352 - DNA, 75 bp, Homo sapiens
gaactggtcgaatgaggcacctaaaaattgtataccgcagattcagggaatgggtactgttcaaaaaggaatgcc

SEQ ID NO: 567353 - DNA, 100 bp, Homo sapiens
tccaagccgcgtcggctgaaagttccgggcaaaaggagcctgtggtgctgaccgacacaaatcttgtgtatcctgccctgaaatgggaccttgaatacct

SEQ ID NO: 567354 - DNA, 129 bp, Homo sapiens
cgatctgcacttcgcattttggcattgacatttaattttagggtcctttatatagaagggagagtaggtatcgagaaccttccctgcgaacttcagaggaacttccagctgatgcgagagctggaccag

SEQ ID NO: 567355 - DNA, 75 bp, Homo sapiens
tttgttgcctccttctcaaaactcaaatactctttattcatctaagactgtgaatgaaagctggaatgccttagc

SEQ ID NO: 567356 - DNA, 107 bp, Homo sapiens
aggaggttgggatcttcttcactgcctctggcatggatgagacaggggcaagtgtccgagtggtgaatcagctacttacagagatggatggtctggaagcacgccag

SEQ ID NO: 567357 - DNA, 87 bp, Homo sapiens
cgaagtcatcctgggtatgggctacaaagagaacgacagagtctcgttctgtcacccagcctggtgtgcagtggttcaagccattct

SEQ ID NO: 567358 - DNA, 100 bp, Homo sapiens
acaagctgcaccagcttctaaccgagtcagtcttcactgtttccaatggaagatggattcttggatgatggccgtggggatcagcctcttcatagtggcc

SEQ ID NO: 567359 - DNA, 71 bp, Homo sapiens
cgggcgccaggaccggccgaacgcagagcctccgggaggagttcctgggacacagccattgctgcccaatt

SEQ ID NO: 567360 - DNA, 83 bp, Homo sapiens
tcttgactccgctgctcgccatggtcaaaatgcagatcttcgtgaaaacccttaccggcaagaccatcacccttgaggtggag

SEQ ID NO: 567361 - DNA, 74 bp, Homo sapiens
taaagactaatcctgacatgttgttagcagtttttgaaggaacgagtggaatatctctttctcataatttttac

SEQ ID NO: 567362 - DNA, 83 bp, Homo sapiens
agtgtctttggtccaacgttgttccagtttccaggaatatggatctactggaacagcccatgctgatagtgaatatgaaagaa

SEQ ID NO: 567363 - DNA, 100 bp, Homo sapiens
tcggatgatgccttcaatactacctttatttccaccataggacttgtcttacaaggaccggcactggcatgaagcctgtttccactgctcgcagtgcaga

SEQ ID NO: 567364 - DNA, 88 bp, Homo sapiens
ctccgagccccttcctgagaagatcccaggtgagaagccctaccactgcaactgggacggctgcggctggaagtttgcgcgctcagac

SEQ ID NO: 567365 - DNA, 50 bp, Homo sapiens
gtcgtcatcaccttattctggtcccggtcctgacacagctctccctgagg

SEQ ID NO: 567366 - DNA, 80 bp, Homo sapiens
ctaagggtgaactactgaagagggtgcttaacccattacttcggccaagaccagcttcaagtctccatggtaccagaaaa

SEQ ID NO: 567367 - DNA, 95 bp, Homo sapiens
atgcactgtccagacggagatccggtacagtgctgtggataccaatccactttctctgtatgtcatgcatccattctggaacactatagtaaagg

SEQ ID NO: 567368 - DNA, 75 bp, Homo sapiens
ggaacccttgacacagttttcatatagattggcctccagggcagacagcagaatggctattcaagtggacaagtt

SEQ ID NO: 567369 - DNA, 98 bp, Homo sapiens
acagtaccaaagtttgtgaagttatgtattgaacatgttgaagaacatgcaccttgcagagtgaagtcaagcccatcctagagaagctgacccaggac

SEQ ID NO: 567370 - DNA, 100 bp, Homo sapiens
cttatcaacatctacaggatgtggacattgagccttatgtaagcaaaatgttaggttgaagaagaggatgaacttgaatctggagaccaagaggatgagg

SEQ ID NO: 567371 - DNA, 82 bp, Homo sapiens
aaatatgaacaatgcacggttgtgttgcgtgtagcttccactttcataagatttccatggtgtcagtgattcatattcctga

SEQ ID NO: 567372 - DNA, 51 bp, Homo sapiens
cacagccagcggctgctcttccgaatcgggattgtcagtggcttcgccccg

SEQ ID NO: 567373 - DNA, 98 bp, Homo sapiens
actggctctgctgaccttgtgccttgctaatcttccagtaccaacaattgcagcaatagatggactcgctttaggtggtggtcttgaactggctttag

SEQ ID NO: 567374 - DNA, 74 bp, Homo sapiens
aaagaaccctggctggggaaaagggaagtgaaaagagatctgttttcagatacggactcagaggaagacgaaga

SEQ ID NO: 567375 - DNA, 51 bp, Homo sapiens
cgggaagcccctctacatcctcacttacgcatcctgaggttagcattacac

SEQ ID NO: 567376 - DNA, 100 bp, Homo sapiens
ggtctcatctttgaactactgccggagcttctgccaggtgctttggaaataccagccagctcatgcatcttaagataatataaaatcaatggactctgac

SEQ ID NO: 567377 - DNA, 75 bp, Homo sapiens
caagggattgctggctacagcttcagaagaccgaagcgttcgtatctggaagtttgtttcgacgccggaccgcgt

SEQ ID NO: 567378 - DNA, 90 bp, Homo sapiens
caaccgcctacgagacactcaagatggcaggagagctggctgacaaaaaggaccgtgatgcatcaccttccaaggaggaaaggaagcgat

SEQ ID NO: 567379 - DNA, 82 bp, Homo sapiens
caaagcggatcagagagggctaccttgtgaagaagatcgccaaactgaggcagcaactacaacgcagtaaacagagtagtcg

SEQ ID NO: 567380 - DNA, 75 bp, Homo sapiens
gttcctgccccaggtcttctctaaggtgattgtgaagaacctgtcatcaggaacccgagtggtgctcaagtcaca

SEQ ID NO: 567381 - DNA, 51 bp, Homo sapiens
gaagtcattgccagaagaagatgtagccgcacagcactttgggaggctgag

SEQ ID NO: 567382 - DNA, 51 bp, Homo sapiens
ttgcagagtcactcaggacaagcttgaagaggtcatgacgccagtcagatc

SEQ ID NO: 567383 - DNA, 75 bp, Homo sapiens
atcacctacactaccacggccacactcaccactccatggccacacagatgactttcagtaacctgtccaggtaca

SEQ ID NO: 567384 - DNA, 83 bp, Homo sapiens
gcgccgggggccggggagcgccagtttttggctttcacccccaaccagtgaccaaagacttgaccactcaaagtccagctccc

SEQ ID NO: 567385 - DNA, 74 bp, Homo sapiens
ctctaggccttttagaaaacatggacattgtcaatacctctggccgcttcttcatcatcaacaaggaaaattac

SEQ ID NO: 567386 - DNA, 51 bp, Homo sapiens
gatgataattgggcctccaagagtatttaccttgctgtggattgctgactg

SEQ ID NO: 567387 - DNA, 100 bp, Homo sapiens
tcagctagtgacgtatggatgtttgctgccactgcagagccccgccatggaagacacgccgttggtgatatcgaagcagaagacggaggtggtgtgcggg

SEQ ID NO: 567388 - DNA, 98 bp, Homo sapiens
aggatttgctgctctggaagatgcacccgcttcctgggacccagctgcttgatgttgctggaggcacaggatgttgagaaagagaaggaaacccacag

SEQ ID NO: 567389 - DNA, 100 bp, Homo sapiens
ggagtgtccgctgtgcccgggcctgcaccatgagcgtcccggccttcatcgacatcagtgaagaagatcagatcttggcatatacagaagggctgcatgg

SEQ ID NO: 567390 - DNA, 82 bp, Homo sapiens
gtacatcggggatttctggctctttcctcttcgccttaaattcggaaatctggcattttttaaagtttgcgccccacaaaga

SEQ ID NO: 567391 - DNA, 75 bp, Homo sapiens
ttcaggggaagagtacactcgagatgaaggaaggattccctatcttggacctgaggctgctttcttgaagaaaac

SEQ ID NO: 567392 - DNA, 90 bp, Homo sapiens
agacaagaaggaaaattagagaagatccagaccaaggcagcaggttcaggagaagtggcacctggtggaggacctgtcgcgactgctgcc

SEQ ID NO: 567393 - DNA, 89 bp, Homo sapiens
ggaaggcaacaggtgtcacagcacgactaaatgtgttaaatgggcttgccaacaatatggatgatttgaagataaacaccgatattact

SEQ ID NO: 567394 - DNA, 97 bp, Homo sapiens
cgcctgcgcctggagaggatggaccgcatcgagaaggagcgcaagcaccagaagatcctggaagttttaacttcgcgccccgcctgttcatcctcag

SEQ ID NO: 567395 - DNA, 98 bp, Homo sapiens
ctccttttcctccacctaccttcccgaccatcactggtgcaagctatatttaacggagatcctgatgaagttcgagcactaatatttaagaaagaaga

SEQ ID NO: 567396 - DNA, 75 bp, Homo sapiens
ctgtggtattgtggaaattcccagaggactttggagaccagttacagctcttttgaggaagcttaagcagcaatc

SEQ ID NO: 567397 - DNA, 100 bp, Homo sapiens
cctgccgccgcccctcaccagacagatcgctgtcaaaaccctagctggtgctcaagaccgaatcggctgggcttttggcctaggattagaaaggctagcc

SEQ ID NO: 567398 - DNA, 82 bp, Homo sapiens
cagttttgaaatcgacacacaaagaatagagttgagcctgtgggacacttcgggtgccagaaccctgtggagcatcatgaac

SEQ ID NO: 567399 - DNA, 82 bp, Homo sapiens
gaaggaaccaattccggacacataacaagcagcagtgaggacaccaaagcatatcccagtagaatacgggcttttccagggc

SEQ ID NO: 567400 - DNA, 100 bp, Homo sapiens
ctgggccactcccgggcatctgtgatctggcatcggacacagctggccagctcagcgtccctggaagggaagggacaactgaagttcacctcaggacggt

SEQ ID NO: 567401 - DNA, 100 bp, Homo sapiens
caacccggccatcgaggccctgctgcacgacctcagctcccagaggatcaccagcgtggatctccaagaaggagaagcttctctcgcagccggagcaggt

SEQ ID NO: 567402 - DNA, 100 bp, Homo sapiens
cctttctccaccaaggaaaaaacgagaagaccccaaaaccaggtatttgtaggcaaaataccaagggatttatatgaggatgagttggtgcccctttttg

SEQ ID NO: 567403 - DNA, 83 bp, Homo sapiens
caccgctgccctcagctccgagtccagggcgagagacaagaggagcagcagcggcaccgcccctcaccctggagggtcctgta

SEQ ID NO: 567404 - DNA, 90 bp, Homo sapiens
gagctgggcgacgagctgaccctgggagacatcgacgggggatatgagactttctactcggaatatcctgagtgttgcgtggatgtaaaa

SEQ ID NO: 567405 - DNA, 83 bp, Homo sapiens
tgaagttcgagcactaatatttaagaaagaagatgttaactttcagaaccgagattaagcgtagctcctgaaatggatatcat

SEQ ID NO: 567406 - DNA, 108 bp, Homo sapiens
gcaagaagatcggctgcggcaacttcggggagctccgcctagcaggttacgggcaggacttgagtggcttcggacagggcttctcagaccccagccagcagcctcctt

SEQ ID NO: 567407 - DNA, 75 bp, Homo sapiens
acagcggcgagcagaactacggcgagcggacttcgattttcagaattcctcctgggaatgctgactccttgcttg

SEQ ID NO: 567408 - DNA, 75 bp, Homo sapiens
cgtctccttaacaccgaacaccaaaggaagctgttgaagttattgaagtacctgttgctatattctaagaaatta

SEQ ID NO: 567409 - DNA, 75 bp, Homo sapiens
ccactacctcctggctgccgtgaataggcagcctaaagccatccgggtgacctgcataggttcctgcggggtctc

SEQ ID NO: 567410 - DNA, 75 bp, Homo sapiens
cacccaatggagatggctctaatgtgtaacctcacctccagctctcacacccttacatacagctactggacaaag

SEQ ID NO: 567411 - DNA, 100 bp, Homo sapiens
gaagtttctaggaaaggccggacaccagggcgtctctggccgagcctctttttgtggaaaacgacagcagcagcagtggcctggaagacgccaccgctaa

SEQ ID NO: 567412 - DNA, 50 bp, Homo sapiens
agcactgtggaggccgtcctcggtgggaaactacctccgtatgttccgag

SEQ ID NO: 567413 - DNA, 83 bp, Homo sapiens
cgcatgtaaagaggtgtagattcaggaagtaaaaatgttgagtagttcaaaatctatgaaggaactcactgaagaacagcaga

SEQ ID NO: 567414 - DNA, 98 bp, Homo sapiens
tggagcccgaggagatgctggatgttaaaatggaggacatcaagctcctgtccaaatatgacccccagaaggaggcagagctccgcacctggatcgag

SEQ ID NO: 567415 - DNA, 98 bp, Homo sapiens
gattggcagtaattggaggaagaatgatagcacagaaaatctctgtcagaactggatttgcctcaaagggcactgcaaaaattgaacagaggaatccc

SEQ ID NO: 567416 - DNA, 100 bp, Homo sapiens
caggaggagatgcttcagagagaggaagccgaaaacaccctgcaatctttcagacagggtgagcccatcactttctgtgaggagagttttgtaaagcacc

SEQ ID NO: 567417 - DNA, 100 bp, Homo sapiens
gaggcgctggagctgggtcagtccgccgctcaccccgcggccgcaccttcccgccttctcagcacaggaagtcctggagaacctgaaggaccgctggtac

SEQ ID NO: 567418 - DNA, 95 bp, Homo sapiens
aacccaaggaccaagcccaggactccagtcagccttcccaagacttggtggagttcacagatgaagagggatatggtcgttatctcgatctccat

SEQ ID NO: 567419 - DNA, 83 bp, Homo sapiens
cgggcgctgtgcatccacactggacgcgagctgcgctgcaagggtctccatcacccaactccatgcttcgagtcctgctctct

SEQ ID NO: 567420 - DNA, 75 bp, Homo sapiens
cgggaagacacattttatgttgtctctttccgaagggttgctgtgaagttaaatgagttaatgagaagaatatca

SEQ ID NO: 567421 - DNA, 74 bp, Homo sapiens
gcccagctcacgccgcgcccgcgctcccaggctccgggtccccaggtgcatccaatttttcaactttaccaaag

SEQ ID NO: 567422 - DNA, 96 bp, Homo sapiens
gcctcaaactcccaggctcaagcaatcctaccatgtcagccttcccagtagctggaactacaggcctgtgaacatacatgacacaagccctatggg

SEQ ID NO: 567423 - DNA, 100 bp, Homo sapiens
gacccggagaagatgtcttcgcggacggtgctggccccgggcaacgatcggaactcggacacggcccggaggctgtttgatgtcctgcacgagcccttct

SEQ ID NO: 567424 - DNA, 82 bp, Homo sapiens
tggacatgagggtccccgctcagctcctggggctcctgctgctctggctcccagggtggcggtggtggcagcagtgatcctc

SEQ ID NO: 567425 - DNA, 75 bp, Homo sapiens
cttccacacaactccagtgctaactcaacaggttctggtgtgggatgtataaccgctttgacaaagggctgcagc

SEQ ID NO: 567426 - DNA, 75 bp, Homo sapiens
actagaagcactgagagatgcggccccctcgcaggaagctccaccatgaggcgaggtggatggaggaagcgagct

SEQ ID NO: 567427 - DNA, 99 bp, Homo sapiens
cttcccctgaagacacctggttaattcacttgcaacctgtttccagatttgccagcaggacagctcttgatttgaaagatggagtctcgctgtgttgcc

SEQ ID NO: 567428 - DNA, 100 bp, Homo sapiens
gaatcctgcggcagaagccgagttcaacatcctcctggccaccgactcctacaaggccaagactaaggggctgcagagcggggtggacattggcgtcaag

SEQ ID NO: 567429 - DNA, 101 bp, Homo sapiens
ctgataccgtcccaggatcccaggggaaacctgacggccaggttccctcgtgccagctgccgggaggcgggagggaggtcaccggattgaaactgtctcag

SEQ ID NO: 567430 - DNA, 100 bp, Homo sapiens
cttcctggccgatggcaatgtcttcaccactgggttcagccgcatgagcgagcggcagctggctctctggaatccgattagcctgaggcctgctcagtcg

SEQ ID NO: 567431 - DNA, 97 bp, Homo sapiens
gccaaagcctgcccagacggctcacctgtgcgggatggaacaaaagacactggagagcagcgtcctgtgccaggagaaaggcttgggcgcgcgggac

SEQ ID NO: 567432 - DNA, 90 bp, Homo sapiens
ctgaagttcaaggcagggtccaagcggcttttcttctggatgcaggaacccggcgatatggctgccgctgtgccccgcgccgcatttctc

SEQ ID NO: 567433 - DNA, 75 bp, Homo sapiens
acaaacacttctggatgcatccttttttgtagcatcagatccaacagttaaaacagatcgactgtggcacgacaa

SEQ ID NO: 567434 - DNA, 101 bp, Homo sapiens
gcaacttacccgagaacgtgcgggaagagaagatcatcgagcatttcaaacggcgcagacggggaagcggagccaacatgccagtggcccggagctgggtt

SEQ ID NO: 567435 - DNA, 75 bp, Homo sapiens
gaagcaggagtaggacaaggagtaggagtcgatatggaggtaccacatggttctcagagcagcgaaagttttcag

SEQ ID NO: 567436 - DNA, 90 bp, Homo sapiens
aagacatccttcacccctgtagggaatgatgagaagacagcagctgattacaagattttaggtggttcagtccttcacctggtgttggct

SEQ ID NO: 567437 - DNA, 111 bp, Homo sapiens
cgctcacgggtcgttgaggccggtgacatgtctgtgagctgcggaggctgcggcccccaggttttgatgatgatggttcagaatttcatgaacatatatttctggagaaac

SEQ ID NO: 567438 - DNA, 75 bp, Homo sapiens
acgcttttcacgtcacctggagagatgcacagtgtactaatggtcacttgatgtgcgctggctgttttatccacc

SEQ ID NO: 567439 - DNA, 73 bp, Homo sapiens
ccgtttaacctttattgtggtggagtccaccccgctgtgaattaacactgaatcctccggaaggaattgtagc

SEQ ID NO: 567440 - DNA, 51 bp, Homo sapiens
agcttggatgcggaccctcagtcctcagggcccggcaggaagatgggctcc

SEQ ID NO: 567441 - DNA, 101 bp, Homo sapiens
gtcgctgcggcgcccgagtgccggcttctcccctacgcgctacacaagtggagctccttttcctccacctaccttcccgaatcttaccaatatatttgagt

SEQ ID NO: 567442 - DNA, 82 bp, Homo sapiens
ccctggccgaggtctccacccgcctctccccactcaccgcgccatgaatgagaggccacacgtatgtgagttctgcagccac

SEQ ID NO: 567443 - DNA, 97 bp, Homo sapiens
agattcgcagtggtcgcttcttctccttggaaaggggactaccacaggtatctggcagaatttgccacaggaaacgacaggaaggaggctgcggaga

SEQ ID NO: 567444 - DNA, 77 bp, Homo sapiens
atacagaaggacatgcaaaacttgcagattttggggtagcaggtcaacttacacctcagttttatgaccctgtggag

SEQ ID NO: 567445 - DNA, 90 bp, Homo sapiens
gggcgcatgacgatggagagcagggaaatggactgctatctccgtcgcctcaaacaggagctgatatttgaatggtggtacttccataag

SEQ ID NO: 567446 - DNA, 100 bp, Homo sapiens
cgccgagccacccgcccgcccaaggtctctcgcgggcgggagaacggaaaactcccaacttcctggttgaaaaagatcatctagcaaagccttttttccc

SEQ ID NO: 567447 - DNA, 82 bp, Homo sapiens
acctgctgtacaccctcaacaaacaccagcgctttgggaagcgccgcggagccatcaacagcaagcagctcacctacctgga

SEQ ID NO: 567448 - DNA, 87 bp, Homo sapiens
gaaagaggccgggagtcgccccctacccgcttctcgtagtcctgggagcacagcagaagttaagactttgaccccgacgcaggcttc

SEQ ID NO: 567449 - DNA, 74 bp, Homo sapiens
cacttatcgcactggaaaagtttgcacagacaagagagcaaagggagaaagctctaggctaaaggccagaagac

SEQ ID NO: 567450 - DNA, 100 bp, Homo sapiens
cttcaaaaggagcagaaaactttacagataacgaaggaggcccaacttcattcaataaggagcctgacggatttatcccagacggtagaacaaaaggaag

SEQ ID NO: 567451 - DNA, 96 bp, Homo sapiens
ttcccacctcagcctcccgagtagttcctccccgggcagaagaaatcaccattccagctgatgtcaccccagagagagttccaacacacattgtag

SEQ ID NO: 567452 - DNA, 100 bp, Homo sapiens
atgaagataatcccattcaacagactcacaattggagaaggacagcaacaccacctggggggagccaaacaggctggagagcaaaatccgggagcacttg

SEQ ID NO: 567453 - DNA, 100 bp, Homo sapiens
ccagacctgcgggtccggagtccccactacgtccattccacgagattttctggcatccttaaatcttgtgtcaaggattggttataatataaccagaaac

SEQ ID NO: 567454 - DNA, 74 bp, Homo sapiens
tgaatttgcaaaacttactgtagatccccgtcgaggtcaagatcaagatccaggtctatttcacgaccaagaag

SEQ ID NO: 567455 - DNA, 90 bp, Homo sapiens
cagcacctttcggcttctgagacggcggcagcagcggcattcaggtcggccctcctccacgctgacttccgggtctcactctcccacgcc

SEQ ID NO: 567456 - DNA, 75 bp, Homo sapiens
atggggttgtgatggcccaggttcttcaaaagatttaaaagatgttgatactcggaaaatcataaaagcaatgct

SEQ ID NO: 567457 - DNA, 100 bp, Homo sapiens
tcgtagccagccagctggagcgatgcaagctcggatccgagactggcagcatgagcagcatgagtcgtcattgaattttgagaagcattctgaaaacttt

SEQ ID NO: 567458 - DNA, 100 bp, Homo sapiens
ctcactgcagaggtgctggagctggcagtgctgggctttgacaaacttcctctgtggggtaccatcctcatctcggtgggatgtgcagttttctgtgccc

SEQ ID NO: 567459 - DNA, 49 bp, Homo sapiens
ccgcttcctccacggaatgttggcaaagacagcaccagagcagttcccc

SEQ ID NO: 567460 - DNA, 100 bp, Homo sapiens
gagcaagctctataagattcttcaaggtggggttggcatcccccacatacgggaagacaaaggcgctttggctaagctggtggaagctatcaggaccaat

SEQ ID NO: 567461 - DNA, 101 bp, Homo sapiens
gaagaaaatgagaggctcactgaaagtctgagaagcaaagtaactgctataaaatctgaataagtttgtggagtttgacatgaagccagtctgtaagaagt

SEQ ID NO: 567462 - DNA, 83 bp, Homo sapiens
attcccggggcctggctttcagcgtagcaattctgccggcgaagaagacaatgcagatcttcgtgaagactctgactggtaag

SEQ ID NO: 567463 - DNA, 74 bp, Homo sapiens
ggagttaccccagacccctcagcgtctggcatctgtgtgagcctcagcagcgatttcattgctggcttttgtgg

SEQ ID NO: 567464 - DNA, 96 bp, Homo sapiens
gccgcctgcggaagaagtgcccgtccacgcacagcgaggaggttgtccttctattcaggccactcttcgttttccatgtactgcatgctgtttgtg

SEQ ID NO: 567465 - DNA, 83 bp, Homo sapiens
cagaccctggagcctcagttggaagcagccgatccagcctgcggagcctgtggggcaggggaaagcctcctgaagctgatggt

SEQ ID NO: 567466 - DNA, 98 bp, Homo sapiens
ttcctttggccacatatatgcgaatctataagaaaggtgatattgtagacatcaaggaaagatatggagagagatttgaaggctgactcaaacatgcc

SEQ ID NO: 567467 - DNA, 100 bp, Homo sapiens
cgaggaggacaggggcggggggcgggaggcttgccaccttcagcccccccgcgaacgcccaagatgctggcatcaccatctacatcaggtcagctgtctc

SEQ ID NO: 567468 - DNA, 73 bp, Homo sapiens
cacaaccaagaggtgcaaaaacgaaagcaactggagctcaggctctgggctacagaccactatcagcctttaa

SEQ ID NO: 567469 - DNA, 74 bp, Homo sapiens
agcattctatacataattttcagccacccaataactctggtgataaagaaatgggggctcagagcagtcaagaa

SEQ ID NO: 567470 - DNA, 100 bp, Homo sapiens
accaaataagctatatactttggttacctatgtacctgttaccactttcaaaagtgtgctgggcatcaaggtgaagatcatgctgccctgggacccaact

SEQ ID NO: 567471 - DNA, 100 bp, Homo sapiens
gaggtgtcagtgttaaaggaacctctacaacgaaggtgaagccacggaagataaggacactggggttgggaaatcaagcatcgtgtgtcgatttgtccag

SEQ ID NO: 567472 - DNA, 74 bp, Homo sapiens
ggagtacgcacctgctggggacctgtttgacatcatccctccccaggtttggtgcacctcgatttggaggaagt

SEQ ID NO: 567473 - DNA, 98 bp, Homo sapiens
aatggattcccagtcaagaaatgctcagccttccaattttttaagaagcggtggacaaactacattcatgggtggcaggatcgttgggtagttttgaa

SEQ ID NO: 567474 - DNA, 75 bp, Homo sapiens
aactgtgaaggaggctcatttgacaaagggcaagctctgtgtgattgattggaagacatcagagaaaccaaagcc

SEQ ID NO: 567475 - DNA, 82 bp, Homo sapiens
agccgatccagcctgcggagcctgtggggcaggtgaatggaagagaatccgaagaagaaaatctcaataaatctgaaataag

SEQ ID NO: 567476 - DNA, 100 bp, Homo sapiens
cgaggctgctgaccagaagaggtttagtgccctcctgagtgactgcgtcaggcatctcaatcatgttaaagccttccatctgaagtatgatgaagttcgt

SEQ ID NO: 567477 - DNA, 100 bp, Homo sapiens
aacagagggaactacaacagaggtggaatgcccaacagagggaactacaaccagattgggatcatctaaactgagtccagctgcctaattctgaatatat

SEQ ID NO: 567478 - DNA, 75 bp, Homo sapiens
aactagctccaggttaggccgagctttgcgggaaagcagcgagcgggacaaggagaaccggcatcggaagcgcag

SEQ ID NO: 567479 - DNA, 100 bp, Homo sapiens
gattagtaaagaaagagccaattattttaaagaattatttgaaacaattgcaagatctctgctggatgaaccgaatcctaacagtccagccaatagccag

SEQ ID NO: 567480 - DNA, 74 bp, Homo sapiens
taccatggtctacaagactctcttcgctctttgcatcttaactgcaggaaaatgtttataggaggccttagctg

SEQ ID NO: 567481 - DNA, 82 bp, Homo sapiens
cgagaccgcggccgggaccgaggtgccaccatggcaactgcaccatacaactactcttacatctttaaatatattattattg

SEQ ID NO: 567482 - DNA, 83 bp, Homo sapiens
ctggatgggaagttaatgtttacggcgaagtctactcaacgtttccaagcttgccttgcgccatggactggcagccagacgag

SEQ ID NO: 567483 - DNA, 83 bp, Homo sapiens
tgggcgagctgggcgacggcgccttcggcaaggtttacaagtttggtgccctggttgtcagatgttggaaagcagtaggacgg

SEQ ID NO: 567484 - DNA, 97 bp, Homo sapiens
gaacgtggacagcctcatcacccggctgctggaggctgcacatcattgactcctgggcccaactgtgaccgatttaaactgcacataccatatgctg

SEQ ID NO: 567485 - DNA, 102 bp, Homo sapiens
cttccctcggtctgggcttctctgaggcggcgagagatggtcaggtctggagctcgaccgggccagatcgatgccttccagcacatgcagcattttgtccag

SEQ ID NO: 567486 - DNA, 51 bp, Homo sapiens
gaaaatggagcccttcaccaatggtatttgtggaaacattagacaaatgtt

SEQ ID NO: 567487 - DNA, 87 bp, Homo sapiens
caggtgtaaagtgcaagagtaatatgctatgactgagttattcaagcggagaaatgttgctacagcagaagaagaaacagaagaaga

SEQ ID NO: 567488 - DNA, 100 bp, Homo sapiens
aacaccttctccgacagcagcacacccggtggtgattccactgaagcaactgccaaaccaaagagaagtttttatgctgccagggatttgtacaagtacc

SEQ ID NO: 567489 - DNA, 75 bp, Homo sapiens
gatctcatctctatgggtggaaggacacattcagctaacgtattttagcaggtggagtgaggttgaagattcctg

SEQ ID NO: 567490 - DNA, 90 bp, Homo sapiens
gctgctgctgctgctgctgcatgtctaccaggagaggagggaactgcggagcggctggagaatgctggaggagaccttaaggatggccac

SEQ ID NO: 567491 - DNA, 103 bp, Homo sapiens
tcttgggaaaggacaaaaaaattcctggaaaaagaagtccaagaagcaaaaaagggactgctaagaagataccaccagaaggtctgaagaaaaccctgcggga

SEQ ID NO: 567492 - DNA, 50 bp, Homo sapiens
ctagataagtgggccaaaattttggagctgaatttcgtcggttttcgctg

SEQ ID NO: 567493 - DNA, 96 bp, Homo sapiens
ggagatgaggtcagagaagtcgaaggggtgctggcgagacgggggtgatgcccacccgggcgagaaagacaacagcccggagacgcgggctaaagt

SEQ ID NO: 567494 - DNA, 50 bp, Homo sapiens
gtgcgtgggggaccggctgttggcggggccatgaagcccccaggaggaga

SEQ ID NO: 567495 - DNA, 90 bp, Homo sapiens
cgtctgtctggtgataccaggggcagagggaccactctgacaggatgaagccaacgcacacgatggtcaactgctggttctgcaaccagg

SEQ ID NO: 567496 - DNA, 80 bp, Homo sapiens
gccaagggaccaaggtggaaatcaaacggtgcttcaaggatgaccgcatcgtcttctggacttggatgttctccacctac

SEQ ID NO: 567497 - DNA, 75 bp, Homo sapiens
ggaacttgcagaaatcacattggaccctcctcccaactgtaggagtggctttggagagatatcatcccctgtaat

SEQ ID NO: 567498 - DNA, 90 bp, Homo sapiens
aaccacagtcttgtagatattttaacccaaaggtaataatagacgtggatggaatacaactagccagagatattccaatgtcatccagcc

SEQ ID NO: 567499 - DNA, 101 bp, Homo sapiens
cggcttctgcctggtgctctgcgtcctcatcgggcttatgttcgaggacagaactgtaccgctctctttttggccagctccaccctcccgacgaaggccac

SEQ ID NO: 567500 - DNA, 101 bp, Homo sapiens
tcagtcccatcactccaaggagagaaggtatgggcactaggaaaagacttcttccatcaagcttaattgttttgttattcatttaatgactttccctgctg

SEQ ID NO: 567501 - DNA, 100 bp, Homo sapiens
gaaaagagagccagccgagcaccctccaagcagagccggatccagagcaatgtagaaggcctatacctgactgatggggtccctttctcctgttgcaacc

SEQ ID NO: 567502 - DNA, 100 bp, Homo sapiens
gtatcctgagctaactctcgccatattctcagacatagggcctgattacattccaacagaggaagaaaggagagtcttcgcagaatgcaatgatgaaagc

SEQ ID NO: 567503 - DNA, 83 bp, Homo sapiens
agatctagatgtgaggtcctctctgtcagtttctggaagtgtgactgacctaggcaaaatgatgcttcaacacccaggccagg

SEQ ID NO: 567504 - DNA, 75 bp, Homo sapiens
ttcaggaagactacctcatgtggttcttgcatcaagcagggatgaatcttcagctacttggagcaacagccattg

SEQ ID NO: 567505 - DNA, 96 bp, Homo sapiens
gccgaagcaggacccgaagcctaaattccaggagggtgacttaagagattaaaattaatttggttgctgttggttctgaacaaataatgagttctt

SEQ ID NO: 567506 - DNA, 74 bp, Homo sapiens
cccggccaccagcaattgtccggttatcaatactctggctgaccatcatcatcgtgggactgactttggtggaa

SEQ ID NO: 567507 - DNA, 50 bp, Homo sapiens
tccagatggcagccagtcagtggtggagcttgaagaagtcatggaaaaag

SEQ ID NO: 567508 - DNA, 100 bp, Homo sapiens
tcagggcccagtccctcggacccatcgccgcttctagaccctactgcggtctcggatattgccgggttatcaatactctggctgaccatcatcatcgtgg

SEQ ID NO: 567509 - DNA, 100 bp, Homo sapiens
ggcagggcttctcctatgactacgtctttgactggaacatgctgaaattcactccatggataccgaggactcggcctcttctcagaagttggatttgtca

SEQ ID NO: 567510 - DNA, 98 bp, Homo sapiens
ggaagaaggcgcggtggcaggagctgacagagtgatgggaaacgcgtgagccaggccgagagcttgcccagtttcgacaaagaaaagctcagtcggat

SEQ ID NO: 567511 - DNA, 100 bp, Homo sapiens
aaattattatgtctgtgttcccttgggactcattggaaattgtacagtgacatcttctgggatttagtctgattctgtttctggcgtctgcatacgcaag

SEQ ID NO: 567512 - DNA, 98 bp, Homo sapiens
ctgtggaacgggggcttttcatccaatttgcacctacattgaaattggacatcatcctgaggaggattatactgactgtggtggtgtttctggattaa

SEQ ID NO: 567513 - DNA, 76 bp, Homo sapiens
ggatgatgatgatgatgactaacaggtggtgaagcagtattttccaatttgaagattcatttgaaggtggctcctg

SEQ ID NO: 567514 - DNA, 101 bp, Homo sapiens
ccctttgtgtcatcctccacagctccagggaaggcactcaaaagtggggggcaggaaagcagtctctggtcccagcccaccccatggcccctcccagtccc

SEQ ID NO: 567515 - DNA, 80 bp, Homo sapiens
gaaaaataacatcagcattacgctcgttgagcaatgccaccattatcaatgaagaggacatagctcgccttttgcaagaa

SEQ ID NO: 567516 - DNA, 100 bp, Homo sapiens
agaagccgagttcaacatcctcctggccaccgactcctacaagagctgcagaaactggagggcagcagtggacctgtgcggacgtctcctcacagcccac

SEQ ID NO: 567517 - DNA, 101 bp, Homo sapiens
ctgatctacaagaaaatccacaagaacgcactttcctcccagggcgtctctggccgagcctctttttgtggaaaacgacagcagcagcagtggcctggaag

SEQ ID NO: 567518 - DNA, 100 bp, Homo sapiens
cgagtctgtgcaaagcctcctgcttgacctgccctcattcacccagaatgtgcacaggctggtcaacgacctgcgctactacagactctgcaacgacagc

SEQ ID NO: 567519 - DNA, 75 bp, Homo sapiens
cggagagatgtcgagtgacatctatgtgaagagggctatggcgtgtgctcggtggggctggagcggctggcttac

SEQ ID NO: 567520 - DNA, 75 bp, Homo sapiens
tggagctgagcgagttggctcgagaaggtacagtctttgcccgctgcctgatttttcctctcatcgtgacgggcc

SEQ ID NO: 567521 - DNA, 75 bp, Homo sapiens
agccaggcatgtctcccgaggagtgcaggcgcttcaccacagacggatcgcaagtcctacagctggaaacagcgg

SEQ ID NO: 567522 - DNA, 100 bp, Homo sapiens
gacaaaatggcgaagatcgccaagactcacgaaggatccagttcactatcctagccttgcagacaagtatgaaagtgctttagaagatcttcattccaaa

SEQ ID NO: 567523 - DNA, 98 bp, Homo sapiens
cctggaatccctacgcgtccctttgggtttagcacgatgagctcaatcggcactggggtgtcgtgaaaactacccctaaaagccaaaatgggaaagga

SEQ ID NO: 567524 - DNA, 101 bp, Homo sapiens
acagcggccccgaagcgggcggcctgcactcgggtatccgttacagcactgatgtgagtgtagatgaagtaaaagctttggcttctctgatgacatacaag

SEQ ID NO: 567525 - DNA, 82 bp, Homo sapiens
ttcacgccaagtccctatgacactgactccctcaaaatcaagacttgtgcaccatggacaattttgctgagggagatttcac

SEQ ID NO: 567526 - DNA, 51 bp, Homo sapiens
aagaataagcttataacactgatggatcccaccaaatattttggttgtgag

SEQ ID NO: 567527 - DNA, 100 bp, Homo sapiens
gaacctgagcctgttaaagaagaaaaactttcgcctgagcctattttgatgacgattcctgggacctcgtgacctgcttctgcatgaagccatttgccgg

SEQ ID NO: 567528 - DNA, 89 bp, Homo sapiens
aggatatcgacgtcgtgatccagaagtccagagctgaggactgcctgtttgcagatcgcagtggtcatgggctcctgcaccgcaggagg

SEQ ID NO: 567529 - DNA, 100 bp, Homo sapiens
ctgaacttccctggtcgaacagttttttctaatggctattcaagaccattaaaaatctcaagtgacgactttgggaaactctggttatccttcgcaaatg

SEQ ID NO: 567530 - DNA, 90 bp, Homo sapiens
gtcctcagcgactcttctgacctccgcgcgacgtacccgccgccgccgttggctggagtagccggatcgagctgggagatgtgacaccac

SEQ ID NO: 567531 - DNA, 100 bp, Homo sapiens
cggacagggtccacgagctccaaagaagatgactatgaaagtgacgcagctacaattgtccagaaatgtgtcttggcagcacctgtctcctttcacccca

SEQ ID NO: 567532 - DNA, 97 bp, Homo sapiens
gtcggcagcaagaacagagagagaggtggacagatctgagagatactgagacaggggcaagtgtccgagtggtgaatcagctacttacagagatgga

SEQ ID NO: 567533 - DNA, 95 bp, Homo sapiens
gaaaaccccagaagaaagctgggtagttttcagaagatacactgacttctctaggcttaatgacaaatgtcgacttcttccactacaaaatctcc

SEQ ID NO: 567534 - DNA, 100 bp, Homo sapiens
gacaagatgaccacactccaggaatgccagtgcatcttttgcacagctatctgtgactttggcctggcccgtgttgcagatccagaccatgatcacacag

SEQ ID NO: 567535 - DNA, 75 bp, Homo sapiens
aagggccggcccgcctccctggccggggcgcagttcggaggttcagctgtgagccgtgagctttgaggcggtggg

SEQ ID NO: 567536 - DNA, 90 bp, Homo sapiens
ctagtgccaacctcagctcccaggccagttctctgaatgtcgaggttggctatcaagcagggagcaatggccagccccttccctcgcagt

SEQ ID NO: 567537 - DNA, 90 bp, Homo sapiens
gaaacaatggcatttacagaaagagtcaacagcagtggcaacagaggtcctgctgtactagccaccaaagcagctgctggtactaagaaa

SEQ ID NO: 567538 - DNA, 75 bp, Homo sapiens
tgatgagcctcggaaagtgctcctgcggctgtatggagcgattttgcagatggaaggaattttacagaagctaca

SEQ ID NO: 567539 - DNA, 74 bp, Homo sapiens
cagatccttgagtgataaaggagtagaggctttggaagtgataaagcagttaaaagagaaaatgaagatagaac

SEQ ID NO: 567540 - DNA, 98 bp, Homo sapiens
gttgatgaaaaacagcccctatcgaagcctttgcaagatcggtttgggcttggccagccaggaagaatacctggttctgtgaatgccatgagagttct

SEQ ID NO: 567541 - DNA, 82 bp, Homo sapiens
tggcctggaggctatccagcaagatggctgtgccacccacgtatgccgatcttggcaaatctgccagggatgtcttcaccaa

SEQ ID NO: 567542 - DNA, 97 bp, Homo sapiens
tggcggcggtcgacatgttccaggtcccggatagcgagggcggccgcgccggctccagcagagtccccaggccccgtttgccgagctggctgatgat

SEQ ID NO: 567543 - DNA, 74 bp, Homo sapiens
caagactgttgtcatcatcctggaaaatgaattgtgacttgtcccggtctctcttatctagtggtaagcatccg

SEQ ID NO: 567544 - DNA, 90 bp, Homo sapiens
ggaagaactcgtcatgctctttgtagcgtggtgcttctgttgctcacaggctggttgtggtgactcatgcccataatcccaacactttgc

SEQ ID NO: 567545 - DNA, 82 bp, Homo sapiens
aaagagccggatcgcaggctccctgcctactcccccaccggggatttcagctggatgctgacaaatatgagaatgatccaga

SEQ ID NO: 567546 - DNA, 73 bp, Homo sapiens
caaagggcagtcggcggagcttcgccaaggctggcgcagtcgacccaacatgagtgaagtttcctgcaagaaa

SEQ ID NO: 567547 - DNA, 90 bp, Homo sapiens
ccggagctcgcccaagccgcgtccccagagagcgccctgagagaacagggtggccgcttggtccagcatgattccacctttccactgata

SEQ ID NO: 567548 - DNA, 100 bp, Homo sapiens
aagctatggaaggaaaatggataacagatcagttgtatcaccttttgccatgatagcatttctttcattggacagttccttacaagggctccactcagtg

SEQ ID NO: 567549 - DNA, 87 bp, Homo sapiens
ttcgtgaaggttttgactctgatatcaacaatcggatggttctaagcatatctttgagatggaaagtgttcggggtcagctccagac

SEQ ID NO: 567550 - DNA, 100 bp, Homo sapiens
gactagccactttgcattgactggaaacaatggcatttacagaaagagtcaacagcagtggcaacagacgaagttatacggaagcgtctcctcattgatg

SEQ ID NO: 567551 - DNA, 74 bp, Homo sapiens
gggactcgtttcattgctttcaaagttcctttgcaaaagccaaaatgaagtttaatccctttgtgacttccgac

SEQ ID NO: 567552 - DNA, 100 bp, Homo sapiens
ggatgacgatgtttacgttgaggaggctgagaaagtgcgggaatcacgtgcccccagtatggaaatttcatcgataagctaagactcttcaccaggggag

SEQ ID NO: 567553 - DNA, 51 bp, Homo sapiens
cttggcctcccaaagtgccgggattacaggcatgagccaccgtgcccggcc

SEQ ID NO: 567554 - DNA, 87 bp, Homo sapiens
gagtatttgctctgatgatgaactaatgactgaaggtgaagaccagtttgatgagttcccgattttgaaatgctgggctcactcaga

SEQ ID NO: 567555 - DNA, 146 bp, Homo sapiens
gtctgcgacccccatggaaactggaatagcagagactccggaggggcgtcggaccagccggcgcaagcgggcgaagaaaggcctaaagaatgtatttgacgaagcaatattggctgccctggagcctccagaaccgaagaagagcc

SEQ ID NO: 567556 - DNA, 100 bp, Homo sapiens
gtgtaccaggcgaagctggccgagcaggctgagcgatacgacgatgtaggtgcaaaaaactacagacatctctgtgctgtttattacaacaagaatcctg

SEQ ID NO: 567557 - DNA, 88 bp, Homo sapiens
gggcttggcagatgccagtggatccatacaactgctccgcctggtggaatctgagattacgtgtgaaaatgaacttgtgcaaacccaa

SEQ ID NO: 567558 - DNA, 75 bp, Homo sapiens
gaagagagcactgcagccagtgaaaccactgagcacagacgcagtcttcagcaaggaagtgctgggaacgccctg

SEQ ID NO: 567559 - DNA, 99 bp, Homo sapiens
ctcagaccgtgcagaatgttacattgtcgctcactctgcccatcacgtgccacatttgcttggggaagattgcaaaagttgagaagctcaaaccattag

SEQ ID NO: 567560 - DNA, 75 bp, Homo sapiens
aaacgaggaggagataacgcggccttgggctctggctgaccccgcactacatctacccaccagccatcgtgcagc

SEQ ID NO: 567561 - DNA, 100 bp, Homo sapiens
cgcaactctcagttcgagagtaaagagacaaagcatggaggacacaagaatgggaggaaaggcggactctcaggaacttcattcttcacgtggtttatgg

SEQ ID NO: 567562 - DNA, 75 bp, Homo sapiens
caagagatgaccttatcacagtgagacatggaatccattaaaattgcattatcagttaagaaatgtacgggaacg

SEQ ID NO: 567563 - DNA, 117 bp, Homo sapiens
cgagtttgtcttttcttacctgagactgggcctgaagggagagtttcagttcttcattgacgaagtccttaagaccatccaagatggagattctgacgaactcacaataaagcgatt

SEQ ID NO: 567564 - DNA, 89 bp, Homo sapiens
aatgtccttcccgtcagcctggcatttgacaaatgtacagcttgttcttccaaaattcttggtgccaccattgagaactccaggattgt

SEQ ID NO: 567565 - DNA, 87 bp, Homo sapiens
gagatccacagctaagacaccgggacctcctggaagccaaaaatgtgccagccatttttggagtctcctttggtatccgcaaactct

SEQ ID NO: 567566 - DNA, 100 bp, Homo sapiens
tacgaagacgaggcaaagcacccagctttcttcactcttccggtgagccctattcccagaggcaggtggtgctgaccctgtaacccaaaggaggaaacag

SEQ ID NO: 567567 - DNA, 75 bp, Homo sapiens
gcttcctacaatccatcctttgaagaccaccagataaaggataggttacagttacgggtgctcttgcgtcgggaa

SEQ ID NO: 567568 - DNA, 100 bp, Homo sapiens
gtcaccatgctcaaagtgaatatattaagattttaacctttgagaccaagaacccgtcggaattagcagaacgtttgcgctctgtttgtgggaatcagag

SEQ ID NO: 567569 - DNA, 50 bp, Homo sapiens
gtaacgtcatggaggatgaacgacaggcatgttatgttacccagagaact

SEQ ID NO: 567570 - DNA, 83 bp, Homo sapiens
tgccctttcttccgggcacgtcctttaaggactctacgggtttggaaatcccttgtctccaggttgctgggattgacttcttg

SEQ ID NO: 567571 - DNA, 98 bp, Homo sapiens
agtgctaaaggatctctgatctgggtatttaccttgctgtggattgctgactggatggtccatcacttctggaggaaaggaaaggacccggatagttt

SEQ ID NO: 567572 - DNA, 75 bp, Homo sapiens
cagaaaaccaaacaccacatgttgtctcttagaagtgggagctgaacgatcatcgaaggtaacatgaaggcccac

SEQ ID NO: 567573 - DNA, 100 bp, Homo sapiens
agcagacaactgatctagaaataccacccccagttccctgaatgtggtttctacggaatgtatgataagatcctgctttttcgccatgaccctacctctg

SEQ ID NO: 567574 - DNA, 75 bp, Homo sapiens
agagctatggtgaaacaccactgaagcattgccaaggggttattatcgtccccagtgctggtgttggtattgtcc

SEQ ID NO: 567575 - DNA, 95 bp, Homo sapiens
cttcaagcatataagtggtcaaacaaggtacccactgatggtaatgctggcctgctggctgaaccccagattgccatgttctgtggcagactgaa

SEQ ID NO: 567576 - DNA, 100 bp, Homo sapiens
gcgacgagagcagtggcctctactgtgatcgcagcgcggaccccagcaaccagactggcatctgcacggattgctttcacaacaaaaatttaccatccaa

SEQ ID NO: 567577 - DNA, 98 bp, Homo sapiens
taacttaatcaacaacctggaaacattctttgaattggattatcccaaaagaatttggatggagagacccggaactgccggaagtgattcagatgttg

SEQ ID NO: 567578 - DNA, 90 bp, Homo sapiens
gttcagtatgaccctccggatgaccctaagttcattgactccacttgatgcgagagatatattgatgcaaataggaaaacaggaggatga

SEQ ID NO: 567579 - DNA, 100 bp, Homo sapiens
ggactttgctgcaagcaacaaagttactgtgaatgtgtactggtgctattacatggtatttcagacccaaaagcagatggacagaaagcaactgaaaaag

SEQ ID NO: 567580 - DNA, 97 bp, Homo sapiens
aagaacaacagtaatgatattgtaaatgcgattatggtagaggtgcggcccatgatgtacgtggcactgacctatgatcaccggctgattgatggca

SEQ ID NO: 567581 - DNA, 100 bp, Homo sapiens
cctcgccccagccctcaccacgggaccagcagaggctcatctttgcaggcaagcagctggaagatggccgcactctttctgactacaacatccagaaaga

SEQ ID NO: 567582 - DNA, 98 bp, Homo sapiens
tctcgggaccacaaaaggtcacgaagtagagaaagaaggcggagcagattggttcgagtgagtaaaaactaccgatcagtcatcagagcatgtatgga

SEQ ID NO: 567583 - DNA, 50 bp, Homo sapiens
ggttacattgcacaatatttgaataaggctcttgctgaagaggccagtga

SEQ ID NO: 567584 - DNA, 100 bp, Homo sapiens
cggaagcggaggagtctccaggagacccggggacagcatcgcccaggcccctgaaatgggatttgaccgatacaaaatggtggtgcaagtagtgattgga

SEQ ID NO: 567585 - DNA, 99 bp, Homo sapiens
ggtcgtggaggtggccgtggaggcagaggtggcatggggggtggcctatgtatgcacagctactgattgatttattcaaatatttagcgcctttcctta

SEQ ID NO: 567586 - DNA, 50 bp, Homo sapiens
cctcaaccatcagtccctgctttaaggatgtcatccaagtctccaagaag

SEQ ID NO: 567587 - DNA, 83 bp, Homo sapiens
gatccgtccagtctgccgcaagttcatgcaagatagccagcagccacccccgcccagccaacacctccccaggcccaaggggg

SEQ ID NO: 567588 - DNA, 121 bp, Homo sapiens
aacgtagggaccacatcaaagacagctttcacagtttgcgggactcagtcccatcactccaaggagagaagctgagatgagtgaactgagtgtggcacagaaaccagaaaaacttttggag

SEQ ID NO: 567589 - DNA, 75 bp, Homo sapiens
gaaagaacatgaccaccttcgaaaaacccacaatacattatatgcaccagaaatgctagccaaaatggcagagcc

SEQ ID NO: 567590 - DNA, 74 bp, Homo sapiens
tcgtgatccagaagtccagagctgaggactgcctgtttgcagagtcgagagaaagaacttatgggtttcagcaa

SEQ ID NO: 567591 - DNA, 100 bp, Homo sapiens
caacagcaagaagaagagcccagctagcaccttcgccctctccagccaggctttatcctgtggataaacgcagagtgaacgagtttggggagtcctacga

SEQ ID NO: 567592 - DNA, 98 bp, Homo sapiens
cgaaggcccgcggcgccccgtgctgcaggaatgtcgttgtctgctgggtcttcccctcttcattcccccaagattactccacatacttctcctgctcc

SEQ ID NO: 567593 - DNA, 116 bp, Homo sapiens
tcttcatcgacagggaccctacagtcttcgcccccatcctcaacttcctgcgcaccaaagagttggatcccagaaaccagcctggacaccaagtctgtgtcagaaggccacctcaa

SEQ ID NO: 567594 - DNA, 83 bp, Homo sapiens
aattgataacaccctgtaacagctgaatatgtgtcacaaagatgtctacacggaactgccagggaatggactcagtgatcaaa

SEQ ID NO: 567595 - DNA, 51 bp, Homo sapiens
cagcctcccgagtagctgagattacaggagagaagcctcatcagtgccaag

SEQ ID NO: 567596 - DNA, 98 bp, Homo sapiens
gaagaaagccaaagagcagctgaagatccgtaagagcaatcagatacctactgaggtcaggagcaaagctgaggagggtcctggaacagctacagagg

SEQ ID NO: 567597 - DNA, 82 bp, Homo sapiens
gggaccgcggggttagccactgctggctgcttccagtgttcgccgagagagccaaatctcctcagccacctgttgaagaaga

SEQ ID NO: 567598 - DNA, 87 bp, Homo sapiens
cctgttgtctccgatccagaggatctgcaagtacccgctcctccttaaggatatccgacatgaagccagtgacttcccatgtagagt

SEQ ID NO: 567599 - DNA, 75 bp, Homo sapiens
cagatgtgcaacaaagtgcgatggtattcaaagcaatgagtatcccacagatcagaaatccttcgctgcctcccc

SEQ ID NO: 567600 - DNA, 100 bp, Homo sapiens
gccatcgttgctgccttcttcgtcaaggatcacctgctgttaccagctaccacccataacaagaccacaagaccaaaaatgtcaattgtgttaccagcaa

SEQ ID NO: 567601 - DNA, 83 bp, Homo sapiens
gctgtgggcgctgctggcgctctggctgtgctgcgcgacccccgcgcatgtttccctgaaacctgggctcttgaagacgcatc

SEQ ID NO: 567602 - DNA, 82 bp, Homo sapiens
aaattgttgatgtagccaagttcacatcaagtccagggttaagtacagaaggatcatgctcctctgtggagcaagtgcctcc

SEQ ID NO: 567603 - DNA, 100 bp, Homo sapiens
tggagatccaatgagaaaacctggacagaacttcatgtgtctgtggcagtcttgtaaaaatgatcgaactgtgagaatttggaaggctcgcaatttgcaa

SEQ ID NO: 567604 - DNA, 100 bp, Homo sapiens
gcagggggccagctcaggacacacagacccagctggaactcggtgtttaagatagaagtgctaatgaatggaagaaaacattttgttgaaaagagataca

SEQ ID NO: 567605 - DNA, 100 bp, Homo sapiens
ggcctgggccgccgctgctacctgcagcgccgtgtggcacgacacaaaaatcaggagcacgtgaattgcctctgcttacgttcaggccctgtcctaaacc

SEQ ID NO: 567606 - DNA, 83 bp, Homo sapiens
cgagcacagagcctcgcctttgccgatccgccgcccgtccacacccgccgccagtttccctgaaacctgggctcttgaagacg

SEQ ID NO: 567607 - DNA, 95 bp, Homo sapiens
ggggaagaagatcaaaacccaccatgccccaggtccaagtgtgcctgccatcaactaactatccaggctacagcctgtaccccaggaggccaaat

SEQ ID NO: 567608 - DNA, 98 bp, Homo sapiens
gtgctttcccaagcctggaagaactcgtcatgctctttgtagcgtggtgcttctgttgctcacagatgcctgaggaaacccagacccaagaccaaccg

SEQ ID NO: 567609 - DNA, 100 bp, Homo sapiens
ccccggtgcgcagacagagctattccagcaccagcagagggaaatcctcattgacgattcaatttgttgaaggccaatttgtggactcctacgatccaac

SEQ ID NO: 567610 - DNA, 99 bp, Homo sapiens
ccaagcccctttgttttatggaggcgaggattaaatccaccacacagggtgaaatctatctccatgacaacattcacacaacaggaaattgaattctta

SEQ ID NO: 567611 - DNA, 75 bp, Homo sapiens
cactgatgatgacctggaggccatcgccaatgactcagaggaaggccttatctaaaatccaagaataattgccag

SEQ ID NO: 567612 - DNA, 100 bp, Homo sapiens
ctggagttgatcgttactatgtgtcaaagggttatgtggtccgaatcagtggtgggaacgacaaacaaggtttccccatgaagcagggtgtcttgaccca

SEQ ID NO: 567613 - DNA, 80 bp, Homo sapiens
tctcctgcagaccttcccaggaagccagagccacacacaccatcatggtcctgttacatcatgctgatgacagcttcctg

SEQ ID NO: 567614 - DNA, 98 bp, Homo sapiens
gctggggacgtgcgcccgcgccaccatcttcggctgaaggtctgaatttcctgctgctgttcacaaagatgctttttatctttaactttttgttttcc

SEQ ID NO: 567615 - DNA, 90 bp, Homo sapiens
cgcgagcggtgcgtgtgccgcgggtgcgctgccggtgacagtgccaaacccaagtctgaaatccacgtgtctatggccactccggtcact

SEQ ID NO: 567616 - DNA, 98 bp, Homo sapiens
ccttcgatgcttcacttttgacagaggggatatcagtcgcttccctcctgccaggaggtcacaagccccaaagtggacgtgttcaatgctaacagcaa

SEQ ID NO: 567617 - DNA, 90 bp, Homo sapiens
ggggcgcgcgagctcgcgctcttcctgacccccgagcctggggccgaggttggggtgactcagtgggaacgccatctgagcggggcatga

SEQ ID NO: 567618 - DNA, 111 bp, Homo sapiens
gaaactgatcaatcctgtaaaaacctcccggaaccatcaagatcttcacagagaacttcttatgaatcaaaaaagatggactcaccctgtcacccaggttggactgcactg

SEQ ID NO: 567619 - DNA, 78 bp, Homo sapiens
ctcaggctggaacttgccctgtctcctcgcagatgagagagttttcaacgtcctttatcccatgcctgccgaccagcg

SEQ ID NO: 567620 - DNA, 80 bp, Homo sapiens
catgcgacctctccatgcagtcagtggaagtggcgtttggaaattttagcattcaggtgccaggaatgcagatgggacag

SEQ ID NO: 567621 - DNA, 100 bp, Homo sapiens
gtcagaacaatcttgaatcatgaagctactaaccagagccggctctttctcggtgtggatgaggtcaccattgtcaacattttgaccaaccgcagcaatg

SEQ ID NO: 567622 - DNA, 100 bp, Homo sapiens
ctctggcacaaggcaaagcccctcgcccaggatatgggccctcacattttccaaacctgtccatctgctaactattttgactgcagagccatgtccattg

SEQ ID NO: 567623 - DNA, 83 bp, Homo sapiens
ttaaccaaattcgagaccaagagcgcgcgggtcaaaggagagagaagctcttcagaaacagctggatgaagcaaatcgagaag

SEQ ID NO: 567624 - DNA, 100 bp, Homo sapiens
ctgcaagccaaaggttcatagagctgggagcagagattaaaagagttcggcgaggaactccagaatacaagcaggttcaggagaagtggcacctggtgga

SEQ ID NO: 567625 - DNA, 100 bp, Homo sapiens
catccttgggaccgcctgcctggccattgcgagcggcatctacctactggtaatatgtctcatcctcggccttggctagggctcgaccacttcaacaaag

SEQ ID NO: 567626 - DNA, 100 bp, Homo sapiens
ctcacaatgaggctccctgctcagctcctggggctgctaatgctctgggtctctgaaatcaatgtggactgaacataaatcacctgatggaaggacttac

SEQ ID NO: 567627 - DNA, 88 bp, Homo sapiens
gatggtgtgtatgatggcctggcgacccattcaggcacttatggccatttcagccactaacaacctgagagaagattacaaatttcac

SEQ ID NO: 567628 - DNA, 50 bp, Homo sapiens
gtcgtcgctacctcctcggacaggtgtgatgaatgcagactctgctacca

SEQ ID NO: 567629 - DNA, 100 bp, Homo sapiens
gtcagcctcccgccggccgtctccttaacaccgaacaccttgtatcacggactgattcaccgagcccaaccgtactcaactcacatatttctaccccaaa

SEQ ID NO: 567630 - DNA, 76 bp, Homo sapiens
ctcagtggtcctacctggggatattatcaaatctactactgttcatggcaggtagatgacattaatgctgataaga

SEQ ID NO: 567631 - DNA, 50 bp, Homo sapiens
aagcattgtttctagaacatgaggtttgccatgcagaacttgaattgggg

SEQ ID NO: 567632 - DNA, 83 bp, Homo sapiens
cagcagcttcctgcagcagcataaaaaggaggtgatgaagcagcaagatgtcatctatggaaactggtggtgacaaaagagaa

SEQ ID NO: 567633 - DNA, 90 bp, Homo sapiens
agcggcctggcaggggaaggatcgaggagctcgaggccatgagcagatataccagcccagtgaacccagctgtcttcccccatctgaccg

SEQ ID NO: 567634 - DNA, 74 bp, Homo sapiens
ccccggcccctcctgcccatggcggtggccgagctgtacacgcagcccaggatggcggcccaggtgactctgga

SEQ ID NO: 567635 - DNA, 75 bp, Homo sapiens
atccagagctacagatcacaaatgtgatggaggcaaaccagcgggtcaaaatgcagatcttcgtgaaaaccctta

SEQ ID NO: 567636 - DNA, 90 bp, Homo sapiens
cgaagaactcctaaacaggtggatccagaaaatttttactactggagatgtcaacaaagatgggaagctggattttgaagaatttatgaa

SEQ ID NO: 567637 - DNA, 100 bp, Homo sapiens
tatcaatgagctgaaattccatccaagagatccaaatcttctcctgtcagtaagtaaaggattcactccttctccagttgcacagccacacccttcagct

SEQ ID NO: 567638 - DNA, 100 bp, Homo sapiens
tttgaagacgttccttgaggaggtttgaaaaattatacatgggaagctgttgataccaaaaataatgtactttataaaatcaacatctgtggaagtgtgg

SEQ ID NO: 567639 - DNA, 82 bp, Homo sapiens
tgagaaggacccacggcgtctgttcgaagggccaagaccagcttcaagtctccatggtaccagaaaacaacaacctcacagc

SEQ ID NO: 567640 - DNA, 94 bp, Homo sapiens
tcagttggaagcagccgatccagcctgcggagcctgtggggcagtacttccagcggcaatgtaagcaacagaaaggatgagacaaatgctcgag

SEQ ID NO: 567641 - DNA, 75 bp, Homo sapiens
attcgagtgaccgagaccgcggccgggaccgagggttcctgcgtgaagaccagctgggagcccactgcctgctgc

SEQ ID NO: 567642 - DNA, 80 bp, Homo sapiens
ctaggtgagtcgcggtgggtcctcgcttgcagttcagcgaccacgagaagatggcgaattagaagatggtgaaatagacg

SEQ ID NO: 567643 - DNA, 83 bp, Homo sapiens
cagcctggaacaacgtcaagtacggcttgggcactgtttaaaggaaagttccgagaaggcatcgacaagccggaccctcccac

SEQ ID NO: 567644 - DNA, 82 bp, Homo sapiens
ggaggatcgcccacatccccaacccccgcctggctgcagtgctctggcgctgcttcagcaccgtggtcatctttctgttcct

SEQ ID NO: 567645 - DNA, 95 bp, Homo sapiens
gagcgcggcccgggcgccatcgagccttggcggcggacgtgcagcatgatgccttcttctgtagagtgggcgctttgcagaatacgtgttgaatg

SEQ ID NO: 567646 - DNA, 99 bp, Homo sapiens
cccaacccagaccacacccttgagcctgagcccgacattattcctgaggtgtgcccggagaggctgagcagcctgcgcctgagctggtggaggtggaag

SEQ ID NO: 567647 - DNA, 100 bp, Homo sapiens
tcgtctacttcctcagcagcaccttcaagcagaaaacttggaatataacgtggagcctcaagaaatctcacaccctgacgtgggacgctatttctcagag

SEQ ID NO: 567648 - DNA, 98 bp, Homo sapiens
aagtacgaggagaatcctgggtttagccattgagtgttccttgcctgtatctccccttggttcaatagctaccagatttttggaagaggaggaactga

SEQ ID NO: 567649 - DNA, 83 bp, Homo sapiens
tgtgcctacaccttcgccacccactattggaccagacatatctgaagagatggattaagaatgctttggattaaggattgtgg

SEQ ID NO: 567650 - DNA, 100 bp, Homo sapiens
atagacatttacgcggatgtcggcgaagagttcaaccagataacgaaggaggcccaacttcattcaataaggagcctgacggatttatcccagacggtag

SEQ ID NO: 567651 - DNA, 76 bp, Homo sapiens
atcgagagcctaactttgcaaccattggtctgcaggacatcactttagatgatggctcacgaggcccagggaatcc

SEQ ID NO: 567652 - DNA, 100 bp, Homo sapiens
ggtggccgctagctccaaggaagaggcctaacatcgtgtcccagctcagccaagcctgcgatggagccataacgagtcgtccagggcgtcttctcgtcca

SEQ ID NO: 567653 - DNA, 50 bp, Homo sapiens
ttttgaggagtcttcttgacccaaggatcagaattcaggctataaatgaa

SEQ ID NO: 567654 - DNA, 75 bp, Homo sapiens
gtctgggaggacagctcatgagacaagcagggggggccctcagcctcttggccttgaacgggctgttcatcttga

SEQ ID NO: 567655 - DNA, 100 bp, Homo sapiens
cgagaaggccttaaagtacgtccgcgggttgctgcagacagagccccagaacaaccaggcctttgctggacagatgaagagtgacttgtttctggatgat

SEQ ID NO: 567656 - DNA, 100 bp, Homo sapiens
tgggatggttgtgagggaagggacaagaagatactgccctgctctggacttattggacaaaatgttgacattcaacccacacaagaggattgaagtagaa

SEQ ID NO: 567657 - DNA, 100 bp, Homo sapiens
caaaactacaaacaagacttcgcagtgttctggacttggtgcctctttctgttatatgctttcctatttagttgggagaccagttgtatacaaataccta

SEQ ID NO: 567658 - DNA, 100 bp, Homo sapiens
cctcctgtcccggatcattatgaaggagaagcagagcaccaaggtggttcagtacatcggggagatctgccgctacctgctgaagcagccggtgcgcgag

SEQ ID NO: 567659 - DNA, 90 bp, Homo sapiens
cctgggttacaagcagcaagtgcgcggttggggccactgcgaggccgttttaggtggctcatccacaataagcttaaactctaaccaggc

SEQ ID NO: 567660 - DNA, 100 bp, Homo sapiens
tctgggactttcttcgttgccatgaggaaagaattctccgagtttcaccagtgatcattaaagaatgggcagcttacaaaggaaagtctcctcaaacccc

SEQ ID NO: 567661 - DNA, 82 bp, Homo sapiens
ggaaatcgggctgaagcgactgagtccgcgatggagccgagcctcttgaagccattcttacagatgatgaaccagaccacgg

SEQ ID NO: 567662 - DNA, 98 bp, Homo sapiens
agtgggaaacattgaaatcaagatatgattctataacagactcttccagaaatgatatgaagaggaaatttgccctgacaatggaatttgttgaagaa

SEQ ID NO: 567663 - DNA, 50 bp, Homo sapiens
ctgcggctgatcatctccatcttcctggcatcctgaggttagcattacac

SEQ ID NO: 567664 - DNA, 103 bp, Homo sapiens
cctgcctcatctgtgccaaagcagaatatgttcccacaagcctgcatttccagagcatgctgaaatctcagtggcagaacaagccttttgacaaaatcaaacc

SEQ ID NO: 567665 - DNA, 75 bp, Homo sapiens
gctttatggaccacggctacgaagagacctcagtttatttgaaggaactgtggctgcaccatctgtcttcatctt

SEQ ID NO: 567666 - DNA, 74 bp, Homo sapiens
ccgccggccacgcgccctgggacaaccacgtctccggccacggtgcccattctgcatttattccaccaaccgcc

SEQ ID NO: 567667 - DNA, 74 bp, Homo sapiens
caccaaccccttcgcggacccagtggatgtaaaccccttccaggtgaaagaacttgtcctggacaacagtcggt

SEQ ID NO: 567668 - DNA, 100 bp, Homo sapiens
aactggagcaattgaagctgactactaaggagaataaggagatctataaggacaggcagaaattctcagaacaggttttcaaagtggcctcctcagacct

SEQ ID NO: 567669 - DNA, 75 bp, Homo sapiens
ctccagagtagctgggattacaggacttggatgttgtgggtgatggtatgcagtgtcctccttcacctttgcttt

SEQ ID NO: 567670 - DNA, 73 bp, Homo sapiens
acttccgcgttccggcatcgtcgcctggtgcgtgctacaaggctttggccgaccaagtgtgtaccatgctgct

SEQ ID NO: 567671 - DNA, 51 bp, Homo sapiens
ttgcacttcggtatgcagggaggcaggttatcaatactctggctgaccatc

SEQ ID NO: 567672 - DNA, 100 bp, Homo sapiens
cttcccaacaccatgccgtccgccttctctgtcagctctttccccgtcagcatcccagccgtgctcacgattggcggcagtaagcacacaatgaatgatc

SEQ ID NO: 567673 - DNA, 83 bp, Homo sapiens
gggaagcaagagaaaaagaacattactgtcttgacttcccaagtaagaagcggaagaggagccgctggaaccaagacacaatg

SEQ ID NO: 567674 - DNA, 100 bp, Homo sapiens
ttcagtcttgataactgaatattcaaagcactgcgggaaacctgtgcctccagacactgctccctgtgaaattctgaagaaaacttggaatataacgtgg

SEQ ID NO: 567675 - DNA, 88 bp, Homo sapiens
gctgacaactcacagcctgaaaatgaaaaggaagcttcaggtggagacagcccgaagggaaagaatatggcaaagctgatgcaagatg

SEQ ID NO: 567676 - DNA, 100 bp, Homo sapiens
gggaggctttcagccggagaagcgagtttcagctgtgtttagtgtatgtgcagctgcctttcatggaagacttgcggcaatacatgttttcatccttgaa

SEQ ID NO: 567677 - DNA, 100 bp, Homo sapiens
cagaagctgcatatcaaactgtttcaccagtgatcattaaagaatgggcagcttacaaaggaaagtctcctcaaaccccggaactggttgaagctcttgc

SEQ ID NO: 567678 - DNA, 75 bp, Homo sapiens
cgcgagctggtggacaaagcgtacaggtcagtgtggccactcaccctgctggccctgaagtccacggcgtgtgcc

SEQ ID NO: 567679 - DNA, 50 bp, Homo sapiens
aagaccactgaggagcaggtgcagatgaggagcgggaaggcctcctgcac

SEQ ID NO: 567680 - DNA, 75 bp, Homo sapiens
gaggaacagtgtgtccagcatgggagagtacatgagacgatgaagcaaagctgcagaagaaagatcagcaactgg

SEQ ID NO: 567681 - DNA, 100 bp, Homo sapiens
gtttctgcaaagattgggtttttgaactgaaccttcacctagccccaggattacaaggaaaagcaccaggcaaaccaccatcacatctcattttgcaaag

SEQ ID NO: 567682 - DNA, 74 bp, Homo sapiens
aaatttcagctgcagttatgaagatttttgatgctgccaaagaaaatggctttgtaaagaagtttgaacctaaa

SEQ ID NO: 567683 - DNA, 90 bp, Homo sapiens
tcatggacagctgattctttcccagcagccagacccggtccgtttggaatgcctgggatggtgccgccgcatgttcctcctcagatgctc

SEQ ID NO: 567684 - DNA, 97 bp, Homo sapiens
gagatggatattgaaatggacagtggagatgaagcctaagaatatgatcagaagcagtcagttccctgcacccagcacctcacagcccttcctccgt

SEQ ID NO: 567685 - DNA, 83 bp, Homo sapiens
cgcggaggccgcctggggtagcggcggcgggagtcctggcgctctgcagttcaaatctgaacatcaatgatgtactagggaac

SEQ ID NO: 567686 - DNA, 75 bp, Homo sapiens
cggtccctgggatgccttcgcgtcttctcttccctcgggtgacttgaggtcaaaatgcagatcttcgtgaaaacc

SEQ ID NO: 567687 - DNA, 99 bp, Homo sapiens
accacctcggaacccagggtaacgctgtcagtctttgaataccaagctgctattttacacttgaagagggagcacaaagaagaaattgaaaacctgcag

SEQ ID NO: 567688 - DNA, 100 bp, Homo sapiens
ggccagcagagggcgaagtttcaagcagacttcacttgctcttgtacatgaggttcaaaccttgtactactcagctgatcacaagctgcttgatgggaac

SEQ ID NO: 567689 - DNA, 100 bp, Homo sapiens
gtcgggacacctttgaccacccgactctcatagaaaacgagagtatatgcgatgagtttgacaagttggatggcttgaggactggtactaaaaggaaacg

SEQ ID NO: 567690 - DNA, 51 bp, Homo sapiens
gtttatgtgtctcagtctgcagcagatgataacaccctatgcccattgtcc

SEQ ID NO: 567691 - DNA, 100 bp, Homo sapiens
atgggacaagacccatctttatgcaaagccagcgttacagtaatgttccagacacgctaccaggaaatgcctgaaccaaagttcatgtatgggagtcact

SEQ ID NO: 567692 - DNA, 96 bp, Homo sapiens
ttgacttccccacgagcttccagctcaccgaggaggaggatgccgaggaatgtgacagggctgggagtgtggccacctgccaggccgtcatgcgtg

SEQ ID NO: 567693 - DNA, 90 bp, Homo sapiens
tgctcaactaagaccaagtcctcgctggactgctcagggtgccagacctcatcgaatgtatcctgtcaggtataatgtcagtgaatggca

SEQ ID NO: 567694 - DNA, 76 bp, Homo sapiens
gccggagcccgagtggatcggggacggagagaacacgagcccatcaggagagcttgtttcatatccatatcccact

SEQ ID NO: 567695 - DNA, 75 bp, Homo sapiens
cttcagagttctttgtggatggacttgattctgatgagagatccaaaatacggagctggcatatacttcaccaag

SEQ ID NO: 567696 - DNA, 83 bp, Homo sapiens
gatcaaccccgagctggtgtgctgcaacccccatcaccttagccgactctgcgaactaggtatggcctcacaagtcttggtct

SEQ ID NO: 567697 - DNA, 133 bp, Homo sapiens
tccccgatttgggatcactggaaagtcagcatgattttcgaaccccggagtttgacatctgtgttaaggcttatctagcccttcgtcatcacacaaacctactgatcatcctgttctccatgatgctgatgac

SEQ ID NO: 567698 - DNA, 100 bp, Homo sapiens
gtcaaagggttaaaacagcccttcctacaaggatttgaaaactctgtgctctgctcttcctcagcagacttctcgttcttccttgtggtcatagatgcaa

SEQ ID NO: 567699 - DNA, 100 bp, Homo sapiens
tgcacaccaaaaatggaaattttcaagacctggcatcaggctcctttctgtcaaggtgctgatattcgtggcttcagtgctcctaggacatttggcctta

SEQ ID NO: 567700 - DNA, 98 bp, Homo sapiens
gtgtggtccatcctcttgctgagcacattgaaaggaactggctatctttgatctcttcctccaggctggtgagattggagagatgaaggatggagtcc

SEQ ID NO: 567701 - DNA, 100 bp, Homo sapiens
acctgcaggacgacgcgctgcacctgctagtgctcaagaccgggtgaggtggctttgaccccgggttgcccggccagcacgaccgaggaggtggctggac

SEQ ID NO: 567702 - DNA, 75 bp, Homo sapiens
aatgcccggcagctggagaggtctccaacaagcttccaaaatggcctggatttgttaaggattccaagtaactct

SEQ ID NO: 567703 - DNA, 100 bp, Homo sapiens
gacagacgggaaaaatagtagcaccagtaaaacctgtttcccagcctggtggcatcctgtggaaagttggtcagctgcaacctggggtgtgaaggactgg

SEQ ID NO: 567704 - DNA, 90 bp, Homo sapiens
tgctgccgccggacgcctccattgtttgaccacaacaagggccggattctcacccagcctcagactatggcatgaaactgccaatcctgc

SEQ ID NO: 567705 - DNA, 100 bp, Homo sapiens
ccccagccagggtcaccatcaaaatggaatgtaaccctagccaggtgaatggctcaaggagttgataccaagttgaaattcactcttgagccatctttag

SEQ ID NO: 567706 - DNA, 100 bp, Homo sapiens
gtgagcgaggactccatcttcctgcacctggagcatgtgcaagaaaccagcctggacaccaagtctgtgtcagaaggccacctcaagaggaacatcgtgg

SEQ ID NO: 567707 - DNA, 74 bp, Homo sapiens
gaggctgcaaagaatgctttgaatgcaatggtcgagacagttaacaacctccttcagccacaagctttgaatgc

SEQ ID NO: 567708 - DNA, 82 bp, Homo sapiens
cggactgcagccgcgagctcctggaggcggcgggatggaggcggcggccgggagtgcatccgccccaacccttttccccctc

SEQ ID NO: 567709 - DNA, 75 bp, Homo sapiens
gggctctggaacaacacggtgttcatcttttctacaggtcacagtgctgtcgatatcaccaaggtggctagaaga

SEQ ID NO: 567710 - DNA, 100 bp, Homo sapiens
ttcgacctgagctgggaggccactagcagccagttccggcccgaggacaccgactaccagcagcagaagatggctgtgccacccacgtatgccgatcttg

SEQ ID NO: 567711 - DNA, 73 bp, Homo sapiens
ctggatcagtttctttgtcatgtagccaagactggagaaacaatgaatgcccagaaagaggatcgtgttccag

SEQ ID NO: 567712 - DNA, 104 bp, Homo sapiens
gctcgctcaagatggcggcgcagccaccccgcgggatacgcctcagcgcggctctgacgcccgctctgcggcttcggtgtttgaacaggccacagtccaggagc

SEQ ID NO: 567713 - DNA, 51 bp, Homo sapiens
ctgcgctcctttctggccggagcctggaatatgaagttcaatttagcacat

SEQ ID NO: 567714 - DNA, 83 bp, Homo sapiens
tagagaaggatcaaggacggatgatgaagtagtacagagagtaagttgtttaagaaaggcctgaatatatcagaacatctgag

SEQ ID NO: 567715 - DNA, 101 bp, Homo sapiens
tcatcacatgaccaaagcattcctcttctatgtctgtgtcggccctggtagacaagtttaagaagaatgaccaggtatttgacatcaatgctgaagttgac

SEQ ID NO: 567716 - DNA, 98 bp, Homo sapiens
tgacctatatagatcaagtgacttataccagcgacaaccacggtctcctcgaaaaaacaaacagttcattgcagttgattcgggaggagcatacttac

SEQ ID NO: 567717 - DNA, 93 bp, Homo sapiens
cggcaagatccagatcgggatttacgtggagatcaagcgcagcgatgtttggtgccctggttgtcagatgttggaaagcagtaggacggaaca

SEQ ID NO: 567718 - DNA, 82 bp, Homo sapiens
aagagagcagtaccctgatggagtcccttgcaggtgtggacactgccagcggctgcagccgacttggaatgacctgggagac

SEQ ID NO: 567719 - DNA, 111 bp, Homo sapiens
aaaagaacgacatgatgcaatcttcaggaaagtaagaggctgccaatttgtggtgtctgaagaccaagactacacagctcattttgctgatcctgatacattagttaactg

SEQ ID NO: 567720 - DNA, 75 bp, Homo sapiens
cggagtcggggacccaggagtttcctgtgtccagcgctgccggagccgcctgagtgttcggctaatgaatgagtt

SEQ ID NO: 567721 - DNA, 75 bp, Homo sapiens
gctgacccagaggagagttctccaaacatgatcgtttactgcaaacatcaattcctgaagattgccaagcccctc

SEQ ID NO: 567722 - DNA, 100 bp, Homo sapiens
tatgatgaactggaggctgagtacgacagcctcaaacaggagctggagcagctcaaagagggctttttggtggtgctggagttggcaagactgtactgat

SEQ ID NO: 567723 - DNA, 96 bp, Homo sapiens
gtgaatacagctagggacgtgaaaggcagctcaactataaatttccagcaacagtgcacatggcgcatcaaaaacccacacctgctctggaaaagg

SEQ ID NO: 567724 - DNA, 100 bp, Homo sapiens
acgcagaatgcaagagcacattgtctgcttaactgatgaaataaggagaaattccatgagtgaaaccgtcagactggtcagtggaatgcagcaccctggc

SEQ ID NO: 567725 - DNA, 90 bp, Homo sapiens
aaggaagccacgtgcagacatctacaaccttcgatctcctgacgaggtcatcacactgaaacggtgttcaaccgggttttgccagggcct

SEQ ID NO: 567726 - DNA, 82 bp, Homo sapiens
tgaaggagctaaaggctcaaattgaggaagcaggattctcctcagtgtcccacatcaggtgatgctgtcagataatggctga

SEQ ID NO: 567727 - DNA, 96 bp, Homo sapiens
ccggctccggccgcgtttcccgggtaaagggcctcaagtactacagccttccagcagccttcccagacccacagatcacacccagggaaaactaat

SEQ ID NO: 567728 - DNA, 98 bp, Homo sapiens
gaacgagcgacggcggaacccgtgggcctgtggactgcagcctcggcggtcagcagggagttgaccacatttggccatttcccagaagggccccaccc

SEQ ID NO: 567729 - DNA, 82 bp, Homo sapiens
ggcctagcggagccgggactggaggtttacccaaggtccagcctagcccctaggcaccatgtcggacagtgatctaggtgag

SEQ ID NO: 567730 - DNA, 88 bp, Homo sapiens
cggatgctgggaagcctgctggtccacaggtccatacatgaagtcaccataagcccacatatgacagtggacatagaggacaacgcag

SEQ ID NO: 567731 - DNA, 75 bp, Homo sapiens
agaagaggacgccgggcgcgcagtacgtttcaggagacggcagcgaggctaccttgcatggtgtggtggacgagc

SEQ ID NO: 567732 - DNA, 82 bp, Homo sapiens
ttcggcagtccacccaccgccgccgcctcccaggctccctggggaagggaatgcagggttgctggggctgggcccagaagca

SEQ ID NO: 567733 - DNA, 100 bp, Homo sapiens
cagagactgaaaaacctgaggctgatgacccaaaggaatatgagagcctggagcaagaaaacaccatgctgcggagagagatcgggaagctgacagagga

SEQ ID NO: 567734 - DNA, 90 bp, Homo sapiens
atgagtatgagctattatagaaaccatgttttcggctttgtgagaaaccttaccatcaaacacgatggccagcaacgttaccaacaagac

SEQ ID NO: 567735 - DNA, 74 bp, Homo sapiens
cagcaactggtctattatatcatttaaaccacatggctatctaaagaggagccggtgaaacctgaagaaggcag

SEQ ID NO: 567736 - DNA, 107 bp, Homo sapiens
gcccccatcaagatgaccggggtgtgccggggggaaaggggcagcatgatggtctgagatggcagccacctggacagccaccggaggatggcgcccactcccatccc

SEQ ID NO: 567737 - DNA, 98 bp, Homo sapiens
cgccgccatgtccgacagcgagaagctcaacctggactcgatcatcgggcgcctgctggaaggtatcatgatattagctggtttgacatcaagtcatt

SEQ ID NO: 567738 - DNA, 75 bp, Homo sapiens
gatgttgtcctgtgctggggctgacagcattatggatccaagcctgttgagagaaagggagctgttcaaaaaacg

SEQ ID NO: 567739 - DNA, 51 bp, Homo sapiens
cgcgcgggcaaggaggtgctgctggagggggttgccctgctgtcagacgtc

SEQ ID NO: 567740 - DNA, 100 bp, Homo sapiens
agacggagctaagagatatctgcaatgatgtactggtgtcacccacacatcatccggtgggcacaggagagcagagacagcatgcgcacacggtcctgtc

SEQ ID NO: 567741 - DNA, 75 bp, Homo sapiens
attgatgatgatgctacaagccagcttgcaagaaattggggatcgctcggcttattccaggggtgtgtttcgtcg

SEQ ID NO: 567742 - DNA, 75 bp, Homo sapiens
ggaggttctctcacactctctagaagcagagcacagccttggggagcagtactacaaagatgccatggagcagtg

SEQ ID NO: 567743 - DNA, 153 bp, Homo sapiens
aaggcaaaggagtggaagtttgagagaagtttaagagaagaaatggacatgattgcctaaatcagccaaacacaggtgttctggacttggtgcctctttctgttatatgctttcctatttagttgggagaccagttgtatacaaatacctaac

SEQ ID NO: 567744 - DNA, 100 bp, Homo sapiens
gttcaagttatccggcagcgaaactgggtggtcgtgggagggctgaacacacaggttcccagtgcccccgacaagcccctgctggtgtctccatctcctg

SEQ ID NO: 567745 - DNA, 101 bp, Homo sapiens
caccaccaagagcccaggaccgtccaggcgtagcaagtcccctgcctccaccagctcagctacactcataacattgaagctgtcagttgtgatgaagcgct

SEQ ID NO: 567746 - DNA, 74 bp, Homo sapiens
gctagactacaccctcatgagggtctgcaagcagatgataaagtctcttcaagaaaatgaggaggaggagattg

SEQ ID NO: 567747 - DNA, 100 bp, Homo sapiens
ccagtctcttctcatcccaaaacaatgcctttgcacaaaataaaccaactggctttggcagcattttcagatgaatttgccagaagggctaatggaaatc

SEQ ID NO: 567748 - DNA, 74 bp, Homo sapiens
gctaacagctgccaatacctcactgagtgcctcacaccaacatgggctccaagggaggacatgtatgcccagga

SEQ ID NO: 567749 - DNA, 88 bp, Homo sapiens
aggccaggctgatggagagctgaacattactcttccagaagagcagatataatttctacagtagaatttaatcattctggagaattac

SEQ ID NO: 567750 - DNA, 100 bp, Homo sapiens
acattgacctcctccccaccaacctgccccatgcagtgacctgtgatgttaaattcaaaaactacctcatccccaaggcagcgtctatcccagactaccg

SEQ ID NO: 567751 - DNA, 75 bp, Homo sapiens
ctttgggcttcatggagtcgtcttagatgttgattcagagcattgggctcaggatctgaacaaagtccgtgagcg

SEQ ID NO: 567752 - DNA, 98 bp, Homo sapiens
gtcctatggcttgaacattgaaatgcacaagcagggcttgctctcaattttgcgcaagttgaaaagtgcaccagaccaggaggtgagaatacttctcc

SEQ ID NO: 567753 - DNA, 100 bp, Homo sapiens
aaaatcttcgcctgaagcagcaaagtgaattgcagagtcagtgggagctggtgaggtggccaacttcgctgcgtatgcgtttgcaccagccactctagtg

SEQ ID NO: 567754 - DNA, 100 bp, Homo sapiens
tgtttgtgaaccgaagtttagcaatggaaaagataaagtgttttggttttgatatggattatacccttgctggggaggacgaggaagaaacgaacgtgat

SEQ ID NO: 567755 - DNA, 51 bp, Homo sapiens
ctggcatgctcaaggaatgggctattaaggacgactgggtttggattcaga

SEQ ID NO: 567756 - DNA, 83 bp, Homo sapiens
gaaaaacttcttgccaaccaaagtgtagctagcttgaaccagagtgcactgagccgtccaatgcaaaggaaactggtgacact

SEQ ID NO: 567757 - DNA, 82 bp, Homo sapiens
ttcttcaggaatggagacacggcttcccccaaggaatatacaggacggaagctcctgttttcttgtcagccgccagctgagg

SEQ ID NO: 567758 - DNA, 75 bp, Homo sapiens
gcgggaggacgaggagctgaacaaccccatgaaggtggagtataccctgggagaggagtcggaagcccctggcca

SEQ ID NO: 567759 - DNA, 100 bp, Homo sapiens
gtggacacagtgagcagcttgtttcacatgctggtggactcacccatcgacccgagcgagggcactgcacttggctgtgattcatcagcatgaacccttc

SEQ ID NO: 567760 - DNA, 99 bp, Homo sapiens
gactacccagttacaagcgtcttgccaccggcttccctttgtaaattgagctctgcacgctggggagtttgttggggtctcaccaacggctttgggggt

SEQ ID NO: 567761 - DNA, 100 bp, Homo sapiens
cacgtcggcaccagctgcggggcaagatggaggcgctgattttgctgcaagctttcttcctggtggcagatgacatcatggattcatcccttacccgccg

SEQ ID NO: 567762 - DNA, 50 bp, Homo sapiens
ggctttctgctgccgcccgcaagcagagcctcaccctgcaggaatgccag

SEQ ID NO: 567763 - DNA, 75 bp, Homo sapiens
caggaccagtcatggagccaggctcaggaccctgatgcttggtgtgacctgagtaaatttgacctccctgaggaa

SEQ ID NO: 567764 - DNA, 88 bp, Homo sapiens
cagcaaccaaaggcaccggccttgatgaggcaatggaatgccgtgctatcaagactaatcaggaccttctcccagaaactccatggac

SEQ ID NO: 567765 - DNA, 100 bp, Homo sapiens
acggagccggatcaggagccgccgccgccatatcagatcgtcagtatttaaacagatcacatcatgcgtgagtacaagctagtggtccttggttcaggag

SEQ ID NO: 567766 - DNA, 75 bp, Homo sapiens
cagggtttccaccgttcgttcaagacaaagaaccggcgctgcaaactgctgcccctggtgatggctgcccccctg

SEQ ID NO: 567767 - DNA, 129 bp, Homo sapiens
atgatttaacaacgttaccagcatccattgcaaaccttattaatctcagggaactggatgtcagcaagaatggtgctggagaatctggtaaaagcaccattgtgaagcagatgaggatcctgcatgtta

SEQ ID NO: 567768 - DNA, 98 bp, Homo sapiens
agccgtggaccaagaggctgacagaatcattgatcagcgattcgagaaggtttcctactttgtatttggtgatttcaacttccggctggattccaagt

SEQ ID NO: 567769 - DNA, 76 bp, Homo sapiens
agctcctacttccagaaaaagtgctcctgggactccaggataccagaaagtttcctacactactgaggtttagggg

SEQ ID NO: 567770 - DNA, 99 bp, Homo sapiens
cctcttcttcgggcccctgggattcagcttcttcttcaacatgctcttcgtctgtggaataatggcaacagaaagactggctaactacaccggaggcat

SEQ ID NO: 567771 - DNA, 100 bp, Homo sapiens
tgcacatccaggctggtcagtgtggcaaccagatcggtgccaagttgcagttgccaatacctatgcctgtaaggggctagacaggattgaggagagactg

SEQ ID NO: 567772 - DNA, 73 bp, Homo sapiens
gaaggtgcaagactgtccgtgtggaccctgactcacaggaacaggagtacagctgtgtagtaaagatgccttc

SEQ ID NO: 567773 - DNA, 100 bp, Homo sapiens
gccaacgatacctgaggggggttgttttgatgaaagtgaaaggtcacggtctagatcacattctcgatccagaggaaggcgatactctcgctcacgcagc

SEQ ID NO: 567774 - DNA, 74 bp, Homo sapiens
aattataggaacctggtctccctggtatgtccgtggttcagaccctgtattaaagcttttggacgacaatggga

SEQ ID NO: 567775 - DNA, 71 bp, Homo sapiens
agctgtggataacgggaggtgaatttccatgtcaacatagtcctggactgtccaacccattccggggtctc

SEQ ID NO: 567776 - DNA, 96 bp, Homo sapiens
gcggtccctgtgacctgtggagacacggccagatctgccctccaatcttggagaaattcattcaaggcttttggatcacagaccagttattcaagg

SEQ ID NO: 567777 - DNA, 75 bp, Homo sapiens
agagcctgaaagagccaaatcttaccttctggaccatggatattatcaactcactggtaacaacagtattcatgc

SEQ ID NO: 567778 - DNA, 76 bp, Homo sapiens
aaatgttgatgtggtacttgaagacacctgtactgttgaaatcatagcccactaatgagttttggagccagctttg

SEQ ID NO: 567779 - DNA, 98 bp, Homo sapiens
cgggtcggtgtcggggcgagccttccctccttttcctggagcccgtctcaggtgctggagaatctggtaaaagcaccattgtgaagcagatgaggatc

SEQ ID NO: 567780 - DNA, 82 bp, Homo sapiens
tgtgaaaaccgagctgctgggagaaggtagcagtagctgatgtgcagtttggccccatgagatttcatcaagatcaacttca

SEQ ID NO: 567781 - DNA, 100 bp, Homo sapiens
ccactcctcccggaggcgacatggggcacccggtgtaccgcggcgagaagccccagctgcactacgcgcacttgctctgaaggaacacttggttcatcag

SEQ ID NO: 567782 - DNA, 113 bp, Homo sapiens
aaaaagatgagtatgcctgccgtgtgaaccatgtgactttgtcacagcccaagatagttaagtggggacacagcattgttggttttgccatgtactattttacctatgacccg

SEQ ID NO: 567783 - DNA, 90 bp, Homo sapiens
ggaccctgccatctatgactccaggtcttcagcacccacccaccgtggtacagggggggccctcagcctcttggccttgaacgggctgtt

SEQ ID NO: 567784 - DNA, 101 bp, Homo sapiens
accatgctggcaagtctgaaggtcaagagccggtgaaacctgaagaaggcagagatatggcaaacaggattggcgcttttgggtacatggagtgttcagca

SEQ ID NO: 567785 - DNA, 82 bp, Homo sapiens
acaagcagaccaaaagctacagggaggcggcctccgtcccagtccctcacatctagtttcgctcttgttgcccaggctggag

SEQ ID NO: 567786 - DNA, 58 bp, Homo sapiens
gcgagcagaactacggcgagcggattcctgaatttgacaacttgtacctggatatgaa

SEQ ID NO: 567787 - DNA, 82 bp, Homo sapiens
agaaagaagatgttaactttcaggtgaagatggttctggtaaaacaaccctcatgactaaactacaaggagctgagcatggc

SEQ ID NO: 567788 - DNA, 100 bp, Homo sapiens
ggtggattgactacggcaaagtggccactcaggtttacccaaggtccagcctagcccctaggcaccatgtcggacagtgatctaggtgaggacgaaggcc

SEQ ID NO: 567789 - DNA, 100 bp, Homo sapiens
taaggaactagaacaagaagaagaggagaggaaaaaggaagagagcactgcagccagtgaaaccactgaggctcacggaatttgaagacacccccaccag

SEQ ID NO: 567790 - DNA, 99 bp, Homo sapiens
ggctggagggagatggcgccgcgctcccggatgaacagagaaagcgacagggtctctaattaacagaagatggcaaagcccagccacagcagctatgtc

SEQ ID NO: 567791 - DNA, 80 bp, Homo sapiens
aaaaggaagaggagaaggaaattgtcccgaatccctgcagttcaagaatgctaatgcagtcatggaatatgagaaaatag

SEQ ID NO: 567792 - DNA, 82 bp, Homo sapiens
ttcgcggctcttcccgcccgccttccgccgtctcttcgagttcttcgtgctgctcaaggactcctcctattttgaggacttc

SEQ ID NO: 567793 - DNA, 95 bp, Homo sapiens
aggttctttttaagagttcagctgcgagggctgttttgctgcagcttctgaagtgttaaagcacttgaaggaacgatttccgcctaatagtcagc

SEQ ID NO: 567794 - DNA, 75 bp, Homo sapiens
tgatggaaatgaagtataataccaagaaagccccacttggtgcttttgaagatgatgatatcacgcacgttgaag

SEQ ID NO: 567795 - DNA, 101 bp, Homo sapiens
cttaagatgatgtttgagaaaggtgaaccaactcaaactaagactacacttgctgctttgaaggatgaagttgtatctgttgaaaatgaactctcagaatt

SEQ ID NO: 567796 - DNA, 83 bp, Homo sapiens
agagacaacaccgagtatgagaaaaaatggtgtgaatggaacattaacttcaaatgtagcagactctccccggaataaaaaag

SEQ ID NO: 567797 - DNA, 75 bp, Homo sapiens
gagggtcttcatcgctgaggttcccataatagatggacggggagtccgaggaggagcaggagtccgtggacaccg

SEQ ID NO: 567798 - DNA, 75 bp, Homo sapiens
aactcggtgtcaaagccaagacataaactcaaccccttctcttccaaaagttacagaatgtctgaaggggacagt

SEQ ID NO: 567799 - DNA, 51 bp, Homo sapiens
gacagggcacaccaaactccatctgtataaccccgttttcacacgaatggc

SEQ ID NO: 567800 - DNA, 82 bp, Homo sapiens
cacagataaatcacaagaagggtctcagtttgtgaaaggatttggtggaattggaggtcaagagcaatctgaatccaaatgc

SEQ ID NO: 567801 - DNA, 75 bp, Homo sapiens
accctcgcaagggcagaaggttgaagaacaggaggtctctgtcactgcgcgggaagatgtgcccacctttggtcc

SEQ ID NO: 567802 - DNA, 90 bp, Homo sapiens
agcgggagcctcgctggtccccatttcaggcgggggagagagacagagaagtgagcagcctgaacagcaagctgttaagcctgcaacttg

SEQ ID NO: 567803 - DNA, 85 bp, Homo sapiens
ggtggatgcggccaactccaatgggcctttccagcccgtggtccttctccatattcgaggtgcccagggtggctccgtggcccgc

SEQ ID NO: 567804 - DNA, 90 bp, Homo sapiens
acctgctgatgagggaggtgcccctgcgttgtaccatccgcctgtgggacacctaccagggaagacactgatcaaggtggcagaagctga

SEQ ID NO: 567805 - DNA, 50 bp, Homo sapiens
ggggaggagctaccaaacagctgatggattcctctttggaatccatgcag

SEQ ID NO: 567806 - DNA, 80 bp, Homo sapiens
ggcatcactgggcatctacttaacactgaccaggacccctcgtccagtcattgtggaacccatggagcagtttgatgatg

SEQ ID NO: 567807 - DNA, 75 bp, Homo sapiens
cttttgtctgcccctattgtaagtgcagatggaacacaacagcgcttctctgaagtagctttggaaagtagagaa

SEQ ID NO: 567808 - DNA, 73 bp, Homo sapiens
cagaggcttcgcatttgtgcagctgtcctctgcaatggagtctgcagtttctgggagcagtgaacggtgcccc

SEQ ID NO: 567809 - DNA, 100 bp, Homo sapiens
aggaggccgtccagcagatggcggatgccctgcagtacctgcagaaggtctctggagacatcttcagcagggatgcttgaagatggaaagaaatttgatt

SEQ ID NO: 567810 - DNA, 50 bp, Homo sapiens
atgaccaactgtatcaagaagtttactcctggcttgggggcattaggaag

SEQ ID NO: 567811 - DNA, 75 bp, Homo sapiens
agcagtggcagtccatcgaggggaccaaactctccatcacccaggagtggccagagttcgtgaggaactatgccc

SEQ ID NO: 567812 - DNA, 74 bp, Homo sapiens
ccaccgccgagacccagcacatcgccgaccagaaagtttcctacactactgaggtttaggggcactgtgaagca

SEQ ID NO: 567813 - DNA, 95 bp, Homo sapiens
taggaggaccaggtgtacaactaggaagcccagataagaaaaagcgcaaggcaaatacacaggtgtttgttgaaagctccgagactttggattac

SEQ ID NO: 567814 - DNA, 80 bp, Homo sapiens
cgaggaggcagccaagctcgtagcctgccactccgtgcgtgagaagccctaccactgcaactgggacggctgcggctgga

SEQ ID NO: 567815 - DNA, 51 bp, Homo sapiens
ttggcaccagctgatgaaagctattggggtttccctaggacttctgcatgc

SEQ ID NO: 567816 - DNA, 82 bp, Homo sapiens
ccggccgacccttcctgtcgctgacggcgactgcgggaggccagggatgttcaatagcccagaaatgcaagccctcctccag

SEQ ID NO: 567817 - DNA, 75 bp, Homo sapiens
ggctggaggtgcagggccaggaggaacatgagattaaaaggagcccaagccccatctcatcctagcacaccctcc

SEQ ID NO: 567818 - DNA, 100 bp, Homo sapiens
tgcaaggacagggcaggagaagaggaacctgcaaaggccttttctgattatcagatgcaacaaatgacgtccaattttattgaccagtttggcttcaacg

SEQ ID NO: 567819 - DNA, 49 bp, Homo sapiens
ttcctgcatggattgggagatactggaactcaagacatggctgcccagt

SEQ ID NO: 567820 - DNA, 98 bp, Homo sapiens
cttcaaacagctcacagttaaggcgcagttgtgtagcagttgagtaatgctggttagctgttaaggtggcgtgttgcagtgcagagtgcttggctgtt

SEQ ID NO: 567821 - DNA, 100 bp, Homo sapiens
tcttagataaaatgacgacgtccttctggaagaggcgaaactgggtggttctcttcccaaagtggaagccaaattcatcaattatgtgaagaattgcttc

SEQ ID NO: 567822 - DNA, 74 bp, Homo sapiens
ttacgtctgcggaagtgcagctgcctcagttcttagcgcaggtttttcgttggaatatacgttgcacatttatg

SEQ ID NO: 567823 - DNA, 75 bp, Homo sapiens
gggtcggcgctgggctggaggcggcggagcgcgagagcttcgagcggactcagagaatggatcttggagaatgtc

SEQ ID NO: 567824 - DNA, 100 bp, Homo sapiens
gcccgcctgccctgaggagtccccgctgcttggttcatgtgaaaatggcggatgaggctgtctgtgttggcccagctcccaccagtaaaagctacctcaa

SEQ ID NO: 567825 - DNA, 95 bp, Homo sapiens
cgaaaactggatatacagagcccagcccagaaaaggtgaaagaactcttttcttctttgggagtcgaatgtaatgtcttggaacttgatcaagtt

SEQ ID NO: 567826 - DNA, 100 bp, Homo sapiens
ctctgtaaaagccccgcctctgccttcggatagagtgtgaacatggctacgcctcttcattcccgtccatgccgagcccccgactgcagcattcaaagcc

SEQ ID NO: 567827 - DNA, 82 bp, Homo sapiens
gggagcgcggcggagacgatgcctgagatcagagtcacgcccttggctgagcgggctttggacaccatgaactttgatgtga

SEQ ID NO: 567828 - DNA, 83 bp, Homo sapiens
ttgatgaagatgcgctacttggaagtatcagagccacaggacatgtgtcagcggtgcccactgtgctggccatgaagaatggg

SEQ ID NO: 567829 - DNA, 101 bp, Homo sapiens
ggcggcggcggccggagcttctctcagccgttccaggaggcagcatttgccaatggaaagctctaggaaacaccagtcttgagaggtggccagccagactg

SEQ ID NO: 567830 - DNA, 89 bp, Homo sapiens
cagcagccttggcatttcacacgctcctgttgacagcgatggctcagacaggtgaagaggacaataccagcgtcgtctggttttggctg

SEQ ID NO: 567831 - DNA, 119 bp, Homo sapiens
tgctgggatgacgtgagttgaggaggctcagcggaaagcgacaggaaagactgcagctgaatatgtaaaatctcgactcccagaggcccttaaacagcatcttcaggactacgagaaag

SEQ ID NO: 567832 - DNA, 75 bp, Homo sapiens
ccgcgcccctcggacggccacgagactcgggtacgagtggctgctttacagaatctggtgaagataatgtcctta

SEQ ID NO: 567833 - DNA, 74 bp, Homo sapiens
aagacttgaggcgaatggccgaatctctccgaactcccccactggaaaggattctgaaagaaatgaagtcagcc

SEQ ID NO: 567834 - DNA, 98 bp, Homo sapiens
tgatgatattgtgaaaacatctgttccttcaagagaggggcttaagcaggtaacgtatcttgggaaggagcttttaaggtatgtttctgaggatgcac

SEQ ID NO: 567835 - DNA, 50 bp, Homo sapiens
ccaggagcagcagcctttctgttttgagcaaaattttggactgtgaagca

SEQ ID NO: 567836 - DNA, 101 bp, Homo sapiens
caatccacctaagaaattcagagtttgggaatacctgctactgcaattcagttcttcaagcactttatttttgtcgtccatttcgggaaaaagttcttgcg

SEQ ID NO: 567837 - DNA, 83 bp, Homo sapiens
caacgatatatgtcagatctaaagatgctgcacttaaaaggatgcttgttttgatgtcctgctcattgttttccctatgaagt

SEQ ID NO: 567838 - DNA, 51 bp, Homo sapiens
ggagccgagagaggccggtttcccccaccccgtgtggttttgccatgttct

SEQ ID NO: 567839 - DNA, 112 bp, Homo sapiens
tttaatcactgtgcaatgaccgtgaactgtacagttacctccgtgtgtcacaggaagactcttgtacatcaggaacgtctctatcaagaatacaatttcagcaaggctgagg

SEQ ID NO: 567840 - DNA, 50 bp, Homo sapiens
gctgacggcgactgcgggaggccagaggagaagaagggacctggtggcgg

SEQ ID NO: 567841 - DNA, 101 bp, Homo sapiens
gcggggaagtcatgctcgcttcacggaggcaatagctagccgtgtaaacaggaacatcgataagtagtgtaaaaacttgcacaatgaaatccgaagccaag

SEQ ID NO: 567842 - DNA, 100 bp, Homo sapiens
tggaccaagatcgagcccagcgtcaacttcctcaagtcgcccaaaggttttaaaatcaaagatgggaaaatcggagaaaattgcccttccccatggccag

SEQ ID NO: 567843 - DNA, 75 bp, Homo sapiens
gcaaagcatcggaaccagtacacacggatgataccatcggggaccttaagaagctgattgcagcccaaactggta

SEQ ID NO: 567844 - DNA, 100 bp, Homo sapiens
ccacactgcaacagctggagccagttactgggcaggtgtctgcattattgggccgaatcccttctgctgtgggctatcagcctaccctggccactgacat

SEQ ID NO: 567845 - DNA, 80 bp, Homo sapiens
acctcgacgtcttgcctgtgtcccacttgttcgcggcctatagcatccgcagtgtcatgcagaagtacctggaggaccgg

SEQ ID NO: 567846 - DNA, 96 bp, Homo sapiens
ggagtgaatataaaaggacttcatctcctcaacatggaaactaagagtaaagccaatcccagctgaaggaatcaagtcaaatccttccaagcggca

SEQ ID NO: 567847 - DNA, 100 bp, Homo sapiens
gctggcttcaaaggtgaacaaggccccaagggagaacctgattgtctcaaagcttgccaggagcagattgaggcggtgctcctcaatagcctgcagcagt

SEQ ID NO: 567848 - DNA, 99 bp, Homo sapiens
ccaggccctgaggtgggccggacctgggagtggcagccctgggcgctgcctatggcacagccaagagcggtaccggcattgcggccatgtctgtcatgc

SEQ ID NO: 567849 - DNA, 101 bp, Homo sapiens
gcccggccgcgggagcctcgtggctgcgtcaccgccgcccccccagacaagatggacaccgcggaggaaggtactaggttttgacaagcttgcatcatgcg

SEQ ID NO: 567850 - DNA, 99 bp, Homo sapiens
ttggaaaagagcttggggccagggaagaccacagctgagccccagcaccagtcacctccagagataatcattcaggtcttcgtgagctaaggccaaaca

SEQ ID NO: 567851 - DNA, 89 bp, Homo sapiens
tgggaagtccttattattggccctccagatacactttactgaacaaaaggttcatcctcagttttctccatgcccatgggaagctgttt

SEQ ID NO: 567852 - DNA, 100 bp, Homo sapiens
tgaaagtggcaaaacccacaagtatgtatatgaatgatggctatgcaccacctgatatcaccaactggcgatttgatgaaactgttatcgaagagagaag

SEQ ID NO: 567853 - DNA, 83 bp, Homo sapiens
agcgcgtcgtggggcgagcggcaggagctctttgttcaatgcctagccacctattcctacagacacggcagtggaaaggaaaa

SEQ ID NO: 567854 - DNA, 75 bp, Homo sapiens
cacccagcctcggtgaccaggagactcggcgcaaggcccgaggcttcagggatgacttcttagggggcaggggag

SEQ ID NO: 567855 - DNA, 75 bp, Homo sapiens
gcaaagattacctattaccagaacacactgacaggcttccgttacaagatgaggtctgtgtatgctcacttcccc

SEQ ID NO: 567856 - DNA, 100 bp, Homo sapiens
ttcgagcactaattgaaggacaattcatggccaagaggattcacgcagaaggcctgggctatcgagtcagtgactccattgttttgcaaagtttcttgcc

SEQ ID NO: 567857 - DNA, 82 bp, Homo sapiens
agattaaaagagcgaataaagtttatcacgccgggcagaaaaatatggctcaggagactaaccagaccccggggcccatgct

SEQ ID NO: 567858 - DNA, 100 bp, Homo sapiens
caggatcactactcttggaatcaaagataaatccaaatactgcatatcagaaacaacaggaagaagccatggatttaataaatagagaaacaatgtctga

SEQ ID NO: 567859 - DNA, 82 bp, Homo sapiens
ctcctggggcacctaacagtggacacttatgacttcctgctatatcctgatcatcactattgcaaatattgcaaatttggcc

SEQ ID NO: 567860 - DNA, 51 bp, Homo sapiens
ctcggacgccagcggacacgcgggcgaggttatcaatactctggctgacca

SEQ ID NO: 567861 - DNA, 90 bp, Homo sapiens
cgagaattccgcagcccacacgagtcctccggaggctgagagcaaacggctgcactaggaacccagcagtcagaccggcccccaccctgg

SEQ ID NO: 567862 - DNA, 50 bp, Homo sapiens
ttggatctctgctcctatactttccaatatgcctcttcatgttcgacgca

SEQ ID NO: 567863 - DNA, 100 bp, Homo sapiens
gtaccatccgcctgtgggacacctaccaggcctgaggagcgatgcgacaggcatgatggaggtcgagtcctcctactcggacttcatctcctgtgaccgg

SEQ ID NO: 567864 - DNA, 97 bp, Homo sapiens
gaggtggacccactccggattcctccacaccacccacacaccagtcggcagcctccctgtctgttatgttctgaacccacacatgttttcggaagga

SEQ ID NO: 567865 - DNA, 100 bp, Homo sapiens
ccggatttccagccagagctgagcggcgcgggctccagactcgccgtggtcaagttcaccatgagagggtaagaatgattgatgttggctgatattggag

SEQ ID NO: 567866 - DNA, 98 bp, Homo sapiens
accgcagcaggtcacagcccctcgaggcgacagcggccccgccgcaccagagcagaataccctctaccatctgctttggtcagggtgccgctcgagga

SEQ ID NO: 567867 - DNA, 97 bp, Homo sapiens
atggttctgaggtccccgtccaaaacttctacagtgactacaacacgacctactccatccagctttcttggactccgtactgttggtgtaaccaagg

SEQ ID NO: 567868 - DNA, 75 bp, Homo sapiens
cagccccgagcgggacagcgcggcggggagcgacgaaagaacatgtgatcatccaggccgagttctatctgaatc

SEQ ID NO: 567869 - DNA, 122 bp, Homo sapiens
tgcccacacctcttcccggcccctgaagttggcactgcagcagacagctccctgggcaccaggcagctaacagggggggccctcagcctcttggccttgaacgggctgttcatcttgattca

SEQ ID NO: 567870 - DNA, 107 bp, Homo sapiens
gagtgagagttcaaagattctttgtagcagacactgcaaatgaagctctcgaggctgctaagagactaagtgtcatggagaaactccagctgggcccagagattctg

SEQ ID NO: 567871 - DNA, 100 bp, Homo sapiens
tacgagagtggccctgacggaggggaggaaaaataccagagatggacagccatctggtagagaagttgggccagcacctcttaccttggatggaccggct

SEQ ID NO: 567872 - DNA, 97 bp, Homo sapiens
ctctgggtctccaggcccgcgaccgtccgccagtcgtcccgaggttttaaaatcaaagatgggaaaatcggagaaaattgcccttccccatggccag

SEQ ID NO: 567873 - DNA, 75 bp, Homo sapiens
gctgtgctcgcgctactctctctttctggcctggaggctatccagctcaccagggaagaaccatctactgtcctg

SEQ ID NO: 567874 - DNA, 101 bp, Homo sapiens
aaactggatgttggtagaaaaagcaagagtttgttatatagcaattgaagataaaactttccaagtccttggtaatctttacagcgagggagactgcactt

SEQ ID NO: 567875 - DNA, 100 bp, Homo sapiens
aggaccctaacgacaggcgcctccggcccatttacgggagctgagcacataacgacttacacgttcaatactcacaaagcccagcataccttctgtaaga

SEQ ID NO: 567876 - DNA, 50 bp, Homo sapiens
ctacagcaacctgatctcattggtcactcagcctctgaagaagcttcggg

SEQ ID NO: 567877 - DNA, 50 bp, Homo sapiens
tcccaagtagctgggattgcagttttgggctatgatgcattaggcttctg

SEQ ID NO: 567878 - DNA, 90 bp, Homo sapiens
tgccctgatgagctcctgtttagccactgcagacggatgtttccagtcctaaagattagtgtcacagggttggaccccaatgccatgtac

SEQ ID NO: 567879 - DNA, 89 bp, Homo sapiens
tagccaccaaactgattatgaattgccctgaaatctgaaaaatttcaattccaatccctgcccactaaggaggaggagtcattgctgcc

SEQ ID NO: 567880 - DNA, 98 bp, Homo sapiens
tgacgtgaaatcgatatcatctcgaggcagtgatgattacatgcagcaaactggaggtcaagcacatctattcttttggatgacagtggaaggatacc

SEQ ID NO: 567881 - DNA, 75 bp, Homo sapiens
cgggagcttccgggagggcggctcgcagctcaccatggatgatgatatcgccgcgctcgtcgtcgacaacggctc

SEQ ID NO: 567882 - DNA, 74 bp, Homo sapiens
ggggccaccggctggagcggatcccacacctccggaccgagggacgcggggagtaaggcatgtcgaggctttgg

SEQ ID NO: 567883 - DNA, 75 bp, Homo sapiens
cgggacgctagagcaggcggttcctgggctgctccgatttaatccagagactgacttcactatagaacccacagt

SEQ ID NO: 567884 - DNA, 75 bp, Homo sapiens
atcttcgagttcaaagagaccctcggaacatcaatgaactgagccatgttcaaatccctgttatgttgatgccag

SEQ ID NO: 567885 - DNA, 88 bp, Homo sapiens
cggcagaagccgagttcaacatcctcctggccaccgactcctacaaggaggaactctctggaatgaaaaataaaatacaagtagttgt

SEQ ID NO: 567886 - DNA, 75 bp, Homo sapiens
gacgaaaccatcggtagactccacaaggagcttgaaaaatcacatttgagaagaggattggatcctagccataac

SEQ ID NO: 567887 - DNA, 50 bp, Homo sapiens
aacagatctgcgtggtcatgttggagattatttcccttggctgaattccc

SEQ ID NO: 567888 - DNA, 83 bp, Homo sapiens
gttctgggaagatggcgaaggtctcagagctttacgatgtcacttgggaaggctttatcctgtggataaacgcagagtgaacg

SEQ ID NO: 567889 - DNA, 100 bp, Homo sapiens
aagcggaacagccacagcagcctcccaaggagtctgcaagttgggacctcatgtcttggatcaatggaatacgggggttggtgtcctcagatgagctagc

SEQ ID NO: 567890 - DNA, 74 bp, Homo sapiens
ggcgccttcggcaaggtttacaaggtggcagtagagaagagcatcacagaagttgctcaggagctgacagagct

SEQ ID NO: 567891 - DNA, 83 bp, Homo sapiens
tgccaacatcaggaatatttgtgttttggctcatgttgaccatgggactttgaacatgtcggggatcgccctcagcagactcg

SEQ ID NO: 567892 - DNA, 100 bp, Homo sapiens
gggagcccagggtggcggcgcctgcggccgagcgccgggagcagaagcccttcagcggccagtagcatctgactttgagcctcagggtctgagtgaagcc

SEQ ID NO: 567893 - DNA, 50 bp, Homo sapiens
attataaatctcctcctgcaaacaggtgaaatgacaatggatgctctgtt

SEQ ID NO: 567894 - DNA, 100 bp, Homo sapiens
ccgccgctgccaacgtcgagcggcgacggctgtacttggaccatgagactgtttcagccactttcatcgacagcagtggacagtttgtttcctcccaggt

SEQ ID NO: 567895 - DNA, 75 bp, Homo sapiens
gcctcacctgcagaggggccgttccgggctcgaacccggcaccttccggagacggggtttcgccatgttggccag

SEQ ID NO: 567896 - DNA, 101 bp, Homo sapiens
cacgagtctgtatctggatagtcgtaaacttcctatgataggtgaaatcaaaattgctgtttctattgaagatgaagccaacaaggacctgcctccggccg

SEQ ID NO: 567897 - DNA, 100 bp, Homo sapiens
tctttgatgactcagaagctattgttaacaataagttcttggccaggctgactgagagatttgtgctgggagtggatatgttcgtggagacactgtggaa

SEQ ID NO: 567898 - DNA, 100 bp, Homo sapiens
aaactcagctactttgagcacaatctggagacggggaagcggagccaacatgccagtggcccggagctgggtttgtcgcaaaacttatgtgaccccgcgg

SEQ ID NO: 567899 - DNA, 101 bp, Homo sapiens
gttctggcagcttctccgagaccccaacaccccactgttgcaaggatattaccttccaaatgatgatggagaattttatcagttctgttacgttacccata

SEQ ID NO: 567900 - DNA, 75 bp, Homo sapiens
agcctctgcttggcatccccttgctggacagtggctgtgaggagaaggcagagcccccccaggctatgaatgccc

SEQ ID NO: 567901 - DNA, 90 bp, Homo sapiens
gagggcgaggcggcggcggcggcggccagagagcagcagccgcctgctaaaagatggcggcaaggcagcccaggcaaatgtaagaatagg

SEQ ID NO: 567902 - DNA, 126 bp, Homo sapiens
gtcttcagagagacccagctcagatggggagggtgttgtggaaaatggaattaccacatgtaatggaaaggagcaaggtgctggagaatctggtaaaagcaccattgtgaagcagatgaggatcct

SEQ ID NO: 567903 - DNA, 82 bp, Homo sapiens
gccaaggaaaaaaagcagagaggagcggggagcaatgcagggttttgaatatagccgttctggaaatcccactaggaattgc

SEQ ID NO: 567904 - DNA, 100 bp, Homo sapiens
tgtcagtagcagaagctactctccagaaaggagcaaatcatactctttccatcagtctcaacatagaacctttctgagaaaagtctacagcattctttct

SEQ ID NO: 567905 - DNA, 100 bp, Homo sapiens
attcacgctctgtgcttgtgccaaggtcatcatcagatttgaaatatttaaagtggatacaaaactatttcagcaatgcagacaattaagtgtgttgttg

SEQ ID NO: 567906 - DNA, 83 bp, Homo sapiens
acggctgcacctggagattgacgcagagtgggcggcggtggtggctgaccggttccctgatgtgttacctgcttctgctactg

SEQ ID NO: 567907 - DNA, 88 bp, Homo sapiens
agattcgcagtggtcgcttcttctccttggtgctggagaatctggtaaaagcaccattgtgaagcagatgaggatcctgcatgttaat

SEQ ID NO: 567908 - DNA, 75 bp, Homo sapiens
tgaaaagctaccccccaaagtcctggagctgtggccagtgacatatcaggcatttcgggaatgtacactggagac

SEQ ID NO: 567909 - DNA, 96 bp, Homo sapiens
aaggattttggcttgctcaaggtcacacagcttgtatgaggcagtgctgcaatttaaagccagatccctgcagtgaagttgaacgagctgctcgag

SEQ ID NO: 567910 - DNA, 89 bp, Homo sapiens
ctctgggactcgtggggctgcagcaccgggtgtttgtgaaccgaagtttagcaatggaaaagataaagtgttttggttttgatatggat

SEQ ID NO: 567911 - DNA, 100 bp, Homo sapiens
gagatggtgaagaagcaggtgcttatgatggacctaggactgctgagccataagtgtgatccttggtgacaggtggaagaaaatgaagaatgaagagaga

SEQ ID NO: 567912 - DNA, 75 bp, Homo sapiens
ccagcaccgcagcaaccactccagaaactttccctccttcaggtggaatatgtgatcaagtgtgacatgtcagct

SEQ ID NO: 567913 - DNA, 48 bp, Homo sapiens
gtggcttcgtgaagcccaagctgggcataccaatcccattgtggaaaa

SEQ ID NO: 567914 - DNA, 90 bp, Homo sapiens
gcatcgacatcatcatcaacaaccagacagggcagcacgccgtcattgacatcaatgccttcccaggtggaagcagggaaaggcctggag

SEQ ID NO: 567915 - DNA, 87 bp, Homo sapiens
tggacgcgctactggccagcaagcagcattgggaccgtgacctgcagattcatgctggtcctggccagcaatctgcctgagcagttc

SEQ ID NO: 567916 - DNA, 50 bp, Homo sapiens
ctctcggactgagaaacgcaagcagcagccgctcttctaaaacattcaaa

SEQ ID NO: 567917 - DNA, 90 bp, Homo sapiens
ctccaggagttcgtctcttacgtctgcggaagtgcagctgcctcagttcttagcgcaggattgtcaccagacctgcaatctatggagcag

SEQ ID NO: 567918 - DNA, 83 bp, Homo sapiens
ccgcgcagtccgcgcagccctcatcgcaactgggcccgcgcgcaggaaagctgtgtgaagagacaaagggagaatgccatgtg

SEQ ID NO: 567919 - DNA, 97 bp, Homo sapiens
caggtcaatgggcgggtgcccctacctcacattcccgttttgcacactagggaccaagaagccctcggggacactgctgagaaaagactgccgaagg

SEQ ID NO: 567920 - DNA, 100 bp, Homo sapiens
ctatatgcttgtgcttctccaaaaacacccatccaggcagggggatatgtgccggtggtggtgtgcacattgagccccggtatagacagttcccccagct

SEQ ID NO: 567921 - DNA, 99 bp, Homo sapiens
tgaaagacggagatactattggtgttaaggctccgagctctgtccagtggtgggagtattacatcccctcctctttctccagcattgccgaagtataaa

SEQ ID NO: 567922 - DNA, 90 bp, Homo sapiens
ggagctgcagcccgagcgcggtggtgccctcagccccgtcctcttgtcctcctcagcctcggctcttctcaaccatctgtgagtccaggg

SEQ ID NO: 567923 - DNA, 80 bp, Homo sapiens
cgcggatctcaccgccgctcaggattgacgagatgcctgaggctgccgtgaaatcaacagccaacaaataccaagtcttt

SEQ ID NO: 567924 - DNA, 97 bp, Homo sapiens
gagctatagaagcactcctgcaatattgggccaaatttgagtttcatcatggtgactatgaaaaacagtttctgcatgtactgagccgcaaggacaa

SEQ ID NO: 567925 - DNA, 80 bp, Homo sapiens
cgaagttgccgcggggccttccgatcccctcttggatttacactgggcaacgtggttggaatgtatctggctcagaacta

SEQ ID NO: 567926 - DNA, 82 bp, Homo sapiens
gcagggtgtgagcagggctgagatgggcaccgcggatctggggccgtcctcaggaacaagatcactcaaggtgaaggataat

SEQ ID NO: 567927 - DNA, 82 bp, Homo sapiens
agtcagtgtggaaaaactgcgctgctccatgtcttcgccaaggactgcttccccgagagacctgtcggccatggagcctaat

SEQ ID NO: 567928 - DNA, 100 bp, Homo sapiens
tcagatcttcacagcacagttcctgggaaggtggagccaccagcctctccctgagaagcatatgcaattgggaagaaagagaaacctcccttcttaccag

SEQ ID NO: 567929 - DNA, 82 bp, Homo sapiens
actgggtttggattgtagtgggcatcctcaacttcgtagcctacactctagggaagcacttggagaatatttagatgggaag

SEQ ID NO: 567930 - DNA, 100 bp, Homo sapiens
gtgctgaaccagatgatgaagagtatcaggaatttgaagagatgctggaacatgcagagtctgcacaactttaccaacagggacgcttatgtcaactggg

SEQ ID NO: 567931 - DNA, 83 bp, Homo sapiens
tcgtccgttctctcaggctcccgttcagacggttgatgatgaagcgccggccgtgtaaatgaagatcgggtgaggagcaggac

SEQ ID NO: 567932 - DNA, 51 bp, Homo sapiens
ggccggaatgcagtaccctcagcagcaggtgaaagaaaagatgttgtcccg

SEQ ID NO: 567933 - DNA, 91 bp, Homo sapiens
cgacaagccgctggcagccgcggatctcaccgccgctcaggatctgccttctggagactgcgccgtcctcccgggagagccagaaagagga

SEQ ID NO: 567934 - DNA, 90 bp, Homo sapiens
aagaagtcggatggcggtgtcaagctggatacacagtatcgtcgctcatgtgcagttgagtatcctcatcaggcccgacctggcagggga

SEQ ID NO: 567935 - DNA, 97 bp, Homo sapiens
cactgcccgcatgaaccgggtcctcagcttccacagcgtgtctgaccccatgcccatggagcctcaaggccaaaagcctctcgcctcagcccacctg

SEQ ID NO: 567936 - DNA, 125 bp, Homo sapiens
agggcccagtccctcggacccatcgccgcttctagaccctactgcggtctcggatattgccgggttggattatctcaagatgcccaggatcaaatgagaaagatgctttgccaaaaagaatctaa

SEQ ID NO: 567937 - DNA, 115 bp, Homo sapiens
cctgcacaatgccgaatgccagaagactgtcaccatctccaagccctgtggcaaactgaccaagcccaaacctcaagcaattttgcaggcagtaatagctggtgatcttatgaag

SEQ ID NO: 567938 - DNA, 82 bp, Homo sapiens
gaacttctgttcagagcttcagcacctcagtttaggcagttgtgtcatgggcagcccaatggatccaatggtgatgaagaga

SEQ ID NO: 567939 - DNA, 100 bp, Homo sapiens
gattgtcttggaaatactaagttgggtatgatgatgtcaaacgtgatgctgatgctacagttacagcccctgctggcgcagcctctctgattctctctcc

SEQ ID NO: 567940 - DNA, 100 bp, Homo sapiens
tgatggcccggcatgggttaccgctgctgcccctgctgtcgctcctggtcggcgcgtggctcaagctaggaatttttggaatttcgtaaggcaagaagtg

SEQ ID NO: 567941 - DNA, 48 bp, Homo sapiens
acaaaatgtggccacagcttttgtactatactggcaattgctggagaa

SEQ ID NO: 567942 - DNA, 90 bp, Homo sapiens
ctgcctctgtcactcctggtgaccagcattcaagcatatcgcacggatgactgccatccctgggttttgccagtagtgaagaaagtggag

SEQ ID NO: 567943 - DNA, 90 bp, Homo sapiens
gcagattttggcagattatggctttgtccccacccagcactgatgatattataaatcttatgatgtaatcagcgcgatttcacttcctga

SEQ ID NO: 567944 - DNA, 83 bp, Homo sapiens
gcggcagcaacacgatcggcgcccgcctgaaccgagtagaagacaaggtgaaagaacttgtcctggacaacagtcggtcgaat

SEQ ID NO: 567945 - DNA, 80 bp, Homo sapiens
cttatggaggtgtctgtaactgagaaccaaaaacttttgctagaaaatcagcttttacgagagaaaactcatggccttgt

SEQ ID NO: 567946 - DNA, 101 bp, Homo sapiens
ttcagttctgagcaggctttacccagaaaacaagaaaaattcactgtggtccagaagcagatatcggtgaggctggagtgcaatggcacgatctcggctca

SEQ ID NO: 567947 - DNA, 75 bp, Homo sapiens
gggccgttaccattacgatccatctccgattcctccattgcatattggcttttcatggcctgccactgaaaatca

SEQ ID NO: 567948 - DNA, 82 bp, Homo sapiens
ttctgttttcctgagggctacaccgttttcttttgaaagaggaattgaatgatctggcacgggaccctccagcacagtgttc

SEQ ID NO: 567949 - DNA, 84 bp, Homo sapiens
atcttgggacccaccgctgccctcagctccgagtccagggcgagcaaacggggattcagcgtccgatcctttggaacagggact

SEQ ID NO: 567950 - DNA, 96 bp, Homo sapiens
ttgcagtctcatatttctcctctgaagctgatggtgagaccattctaaaaggcctccagtccattttccaggagcaggggatggcggagtcggtgc

SEQ ID NO: 567951 - DNA, 83 bp, Homo sapiens
cttcccatgaggcaggctcttcagtctgagcagagggcggggtgcaggcggaatggccctcgtgccctatgaggagaccacgg

SEQ ID NO: 567952 - DNA, 99 bp, Homo sapiens
gcctgcaggatttggtttcagcatgtccttctctgaatgatgaatacttttactactgtgacaacattaacgatcagaccccaacaccaacaagattct

SEQ ID NO: 567953 - DNA, 100 bp, Homo sapiens
tagccacggtgtggcagctgctctgaaccaggacctggacccggacccaaagtgccatgtctttaataaggacagaataacgggctcccagattcacaag

SEQ ID NO: 567954 - DNA, 104 bp, Homo sapiens
atgctgatggcgataagtcattaccacagttgactaagataacacgcacaggtccttcagcttgggaaaccaaaaagattcttgctgtttcttttgctcctctg

SEQ ID NO: 567955 - DNA, 100 bp, Homo sapiens
caaccttcgatctcctgacgaaccacctcctccaccctgaagggtgccatccagctgggcatcggctacaccgtgggccacctgagctccaagcccgaac

SEQ ID NO: 567956 - DNA, 87 bp, Homo sapiens
agcagcagcatctacggcatgaccggctcctttcctatgaggaactcccaggcactgatatcagggacacttagtcggtctggatga

SEQ ID NO: 567957 - DNA, 100 bp, Homo sapiens
gccggagaggagtggcctcgcccgcttgtctcggaaagggagcgacccagacaaagagaagaaaggcctggagagtcgtgcggacagcattgggagcggc

SEQ ID NO: 567958 - DNA, 83 bp, Homo sapiens
ggtgggtcctcgcttgcagttcagcgaccacgttacatgggaattggtctttctgctcaaggtgtgaacatgaatagactacc

SEQ ID NO: 567959 - DNA, 90 bp, Homo sapiens
ggcaagtattgctgtgggtgctgggacttcccgtccgcggcgtggaggaaagcataacccctactgtagaactaaatgcactgtgcatga

SEQ ID NO: 567960 - DNA, 74 bp, Homo sapiens
tcagcctcccgagtggctgggactacagggcttcctactatgagatttcagttgatgatggtccatgggaaaaa

SEQ ID NO: 567961 - DNA, 82 bp, Homo sapiens
cccttgctgtcctcctctgcaccatggctctctgcaaccagttctctgcatcactacttggaccatgagactgtttcagcca

SEQ ID NO: 567962 - DNA, 90 bp, Homo sapiens
ggggcagctgaactgagcgtatgtgccacgccgcccaggagacccctctgctgcaccacttcatgagtcattcttatagaagagcatcag

SEQ ID NO: 567963 - DNA, 90 bp, Homo sapiens
cgagttacaccaaccaggacagaaatcattatcttagccaccagaacgtggcctcccaggccccacagagcctcccggccatctctcagc

SEQ ID NO: 567964 - DNA, 90 bp, Homo sapiens
atcaaactttgggcacaagtcatgaagccgacaagcccgggagacacagtgtcagaattacaaggaagaggagatcccagaactggagat

SEQ ID NO: 567965 - DNA, 80 bp, Homo sapiens
ggttcaccgccatcattggacccaatggctctggtcaaaatgcagatcttcgtgaaaacccttaccggcaagaccatcac

SEQ ID NO: 567966 - DNA, 95 bp, Homo sapiens
ccgctcgacctcctggtcagcacttaccggctgccccagatcgcgcgcctggacaacgggaatttgaagtactgccttgtaattcttaatcagcc

SEQ ID NO: 567967 - DNA, 100 bp, Homo sapiens
gactctgaacttccctggtcgaacagttttttctaatggctattcaagggaagctgccaaagaatgtcgacgtcgaaagaaagaatatgtaaaatgtctg

SEQ ID NO: 567968 - DNA, 134 bp, Homo sapiens
aaacagattgccctgggaacctccaaactcaattatctggaccctaggatcacagtggcttggtgcaagaaagcctttgaggtgaaggtgtatgaaagtcatcataacagatgttttccaaaaacttgtagaag

SEQ ID NO: 567969 - DNA, 74 bp, Homo sapiens
cacgggatcccagcctcaggcctgcacggacggtgttggttgggggatttgtcttggctgttactatgacacgg

SEQ ID NO: 567970 - DNA, 101 bp, Homo sapiens
catttgaggagtgggaacaggcttcggcgaacacaaaggtgatgatgaacagtctacacagatggctgcaagttgggaagatgataaagttacagaagcat

SEQ ID NO: 567971 - DNA, 75 bp, Homo sapiens
actccttcctccgagggctgtttgggagcccagcagccggggccgccctattacaccgacccaggaggaccgggg

SEQ ID NO: 567972 - DNA, 85 bp, Homo sapiens
catggaggctgagcatttattcagttaattggccttggtcctcacagctccaaaaagaaacaggatctcgataagctctatgagc

SEQ ID NO: 567973 - DNA, 100 bp, Homo sapiens
ctgactgtggagatggcggctcagaagataaacgaggggctggaacacctcgccaaagcagagaaatagtgaccagcaatggcagcatcgggagggaccc

SEQ ID NO: 567974 - DNA, 99 bp, Homo sapiens
ctcaggggcaagtacagttactctggggaggaaagaccacagcaagattctttcattcgtctcctcctagcctgggggaccaggctcgaactgaccctg

SEQ ID NO: 567975 - DNA, 90 bp, Homo sapiens
cttggaagcaatgtttgaacaaactcgaagaacagctgtggaaagaagttgcaaaacactggaaagtgaagtcactgcttttgctgtctt

SEQ ID NO: 567976 - DNA, 95 bp, Homo sapiens
ggcgccgttctctgtggacctcagcagcatttggatcttcataccacaggataaagggaagtggaggctggacactcactcggcgaatagaagac

SEQ ID NO: 567977 - DNA, 87 bp, Homo sapiens
ccaagctgcctaaattgaaaaagatgttggtcaggcgtcatttaaatattttcagtcagcagaggaagcaaagcgtgccattgaggc

SEQ ID NO: 567978 - DNA, 90 bp, Homo sapiens
cgattactttagtatcaatatctgctacaacatcacattttcatgcatcattttttcaaaataggtgtcttctcagaaaccaccagcctt

SEQ ID NO: 567979 - DNA, 100 bp, Homo sapiens
caaaggagagcacaaccatcgcagttggaagcccatggggcagcctatatatgcaaacagatttgcagtaccaacctatgcagccaagcaacctcagcag

SEQ ID NO: 567980 - DNA, 100 bp, Homo sapiens
gatggaacctcctggtcctgtgaggactttgtgttgctgaaagagcggactctggacgaggcccctcggcctcccaagaaggccatggactactcgtcgt

SEQ ID NO: 567981 - DNA, 90 bp, Homo sapiens
caagaaactgtaggcaatgttgtcctgttggccatcgtcaccctcatcagcgtggtccagaatgatgcctttgaagatgagaaaccccca

SEQ ID NO: 567982 - DNA, 100 bp, Homo sapiens
aataggctgagatatagtgactgtaagctgtgatctcagtatacaaagggcatttttggtcgaagagagctgaagtaatgagaagacatcatggaggccc

SEQ ID NO: 567983 - DNA, 97 bp, Homo sapiens
gaagaagcagaggaagaacaagaagagaaccttgaagcaagtgggcagccgatgaagtgcaaccttcacatgaatgggaatgttatcacctcagacc

SEQ ID NO: 567984 - DNA, 89 bp, Homo sapiens
aaattacaagtggaaatccacaaggattcttttcaatacatcctaaaacagagggccaagatgggtcgccgagctcaacaggagtcagc

SEQ ID NO: 567985 - DNA, 83 bp, Homo sapiens
agacacagaccttcactacctattctgacaaccagcctggtgtgcttattcagtattcaagtcaaacaacgttgaaatggatt

SEQ ID NO: 567986 - DNA, 75 bp, Homo sapiens
ggcacggcctcgtgcccttcgccttcgtgcgcttcgaggacccccgggtcccctggaagtgacgctgactcagcc

SEQ ID NO: 567987 - DNA, 100 bp, Homo sapiens
cggcacctaccgcacgagcacaggtcaccagtgaaaagttgtgcagagcccaacatgagcttcatttccaagctgccacctatctctgcctcctgcgtag

SEQ ID NO: 567988 - DNA, 100 bp, Homo sapiens
aaactttcaaagtttgatgagcagagaactgctactgattatcattggcaatggcgttcattccttacgagtggctttactgcagtttatttcttaatct

SEQ ID NO: 567989 - DNA, 75 bp, Homo sapiens
tggggatcctctgtacgcccgttcactgagctttcagcagaggccaaggcagcattgcttgaatttgaagaaagg

SEQ ID NO: 567990 - DNA, 100 bp, Homo sapiens
acatcttggatcccctgctacttcagtgcctggaatggaatcaagcactcttttggaagagggtaatctctctccaaaaactgaggacacttaccttccc

SEQ ID NO: 567991 - DNA, 98 bp, Homo sapiens
actggagcagggtacatgtgtccacagacatatgccaagatcaagaggtctcaacagatgcagtgtaagaggtgggatgcagatcttcgtgaagaccc

SEQ ID NO: 567992 - DNA, 73 bp, Homo sapiens
ttggctggactctgcgggactatgtccgaggatacatccttcagggaaagaatatggcaaagctgatgcaaga

SEQ ID NO: 567993 - DNA, 100 bp, Homo sapiens
aactcctcgctggctggtgccgcgttcctgctgctctgcctgctccacaagcggcgccgcgccctcggcctgcacggtataccaaatactacattcaccg

SEQ ID NO: 567994 - DNA, 101 bp, Homo sapiens
ggccgacatcatccaccactggaacgccaaccggctggacctgttcgagatcagccagccgaccgagttctcctgtgcctcctgttggctctctttgcatc

SEQ ID NO: 567995 - DNA, 96 bp, Homo sapiens
gtgaggagctgcaggtgccagagttccaggcctgcccacagacggtggtgcctcaaaacacctacccagattcatgttacatgtaaagctgtcctc

SEQ ID NO: 567996 - DNA, 100 bp, Homo sapiens
ggaatggtgcaggcaggcgctgagaaggacgcgcagtccatctctctcaggtttccgccagctgtggatgcctttgacattatgaccgcagaggattcca

SEQ ID NO: 567997 - DNA, 100 bp, Homo sapiens
actgagccaggattgaatacttggaccccagcacttttccagccattaactccaggctctcgagaatttgaagatgttgtaaatattctccattcttctt

SEQ ID NO: 567998 - DNA, 100 bp, Homo sapiens
ggaaagggataggagaaggatgtggactgcagtgctgcagtgccagttgcagaatgaagaagagtctggagaacctgaacaggctgcaggtgatgctcct

SEQ ID NO: 567999 - DNA, 75 bp, Homo sapiens
atcttccaggagcccacggagccggaaggccaggagaatgtcgagatcctcccctctggggagcgaccgcaggcc

SEQ ID NO: 568000 - DNA, 82 bp, Homo sapiens
gtcctgaccagcggcggcgacgcgcaagtattctaccttgtaaatactgttatttgtatatactgtaaatgatgacatcggt

SEQ ID NO: 568001 - DNA, 100 bp, Homo sapiens
aggcgactaatcagattgtgatgaattgtgctgatattgatattattacagcttcatatgcaccagaaggagatgaaggatggcagaggcggaattgcac

SEQ ID NO: 568002 - DNA, 101 bp, Homo sapiens
cctcaggccagtcgcctccaggccaagagggatccttcacccgtgtctgggttaaagcacgaattgggagctctcagcgacatcaccagtcagcagccaaa

SEQ ID NO: 568003 - DNA, 98 bp, Homo sapiens
ggcgctccaaggcccgcccgggagggccggggccgcgctcagaattctggggagacattgccaaggaattttactggaagactccatgccctggccca

SEQ ID NO: 568004 - DNA, 50 bp, Homo sapiens
agttcgtgaagtctgtgaggaggcgaatgctgcatcagtgcccaggcaag

SEQ ID NO: 568005 - DNA, 83 bp, Homo sapiens
ggtctggagtgcgtgggggaccggctgttggcggaccatgtcgcctgaagaatggacgtatctagtggttcttcttatctcca

SEQ ID NO: 568006 - DNA, 100 bp, Homo sapiens
agaggtggtggattcgaatccctacagctcaaagatcctctcaagacagtatccggctctgctcctttcatctgaaatgactcacatagttttcgcccgt

SEQ ID NO: 568007 - DNA, 107 bp, Homo sapiens
tgaggccggcatcgtctttccgtcctctgaggcgacggccgcggctgcacagtttttggctttcacccccaaccagtgaccaaagacttgaccactcaaagtccagc

SEQ ID NO: 568008 - DNA, 83 bp, Homo sapiens
tccgccaggcggtgatgaagaatccccccgaaaggaccccccaggtgcagaccatgaattacgtggggcagttagccggccag

SEQ ID NO: 568009 - DNA, 100 bp, Homo sapiens
ttccacaatggaaccaattgttttacagtctgttccacatgatcattgtaataaggagggccgcaagaacgagatgctgctgtccaaggtgaaagcgaag

SEQ ID NO: 568010 - DNA, 75 bp, Homo sapiens
tccagcagcagaagcagcgcctgatcgagtccctccggaactcacactccagggtcacggagactcaccagttgg

SEQ ID NO: 568011 - DNA, 75 bp, Homo sapiens
ctcccgggacgctgcccacggcgtccccggtcgcggtctacttcaggaaaggaaaagtactctgcgatgctggtt

SEQ ID NO: 568012 - DNA, 82 bp, Homo sapiens
gcagcgtgcgttcagccctgggttaccggtattgtaagaacaagccgtacccaaagtctcgcttctgccgaggtgtccctgg

SEQ ID NO: 568013 - DNA, 82 bp, Homo sapiens
gaagcagccgatccagcctgcggagcctgtggggcaggcattctgtgaaactttagaagagacaaactaccgcttacagaaa

SEQ ID NO: 568014 - DNA, 101 bp, Homo sapiens
tgaaagttttcagcctcatccagcaggcggtgacccgctaccggaaggccatcgccaaggtactaggttttgacaagcttgcatcatgcgtgagtataagc

SEQ ID NO: 568015 - DNA, 80 bp, Homo sapiens
catcaaagtgattccccggaatcgtgtgctgggctggtcccccttggtggcaagtgcaggcagctgtcccggttatgccg

SEQ ID NO: 568016 - DNA, 87 bp, Homo sapiens
agaagaaggtagaatttgtccttaagcagctgcgaataatgcagtcatctcagagcatgataggtgatcttcagctttgcaaactgg

SEQ ID NO: 568017 - DNA, 75 bp, Homo sapiens
agaagtatgtaccaaatacatttataataggagtccagctattgctgctgttggcagagtctcgctctgttgccc

SEQ ID NO: 568018 - DNA, 75 bp, Homo sapiens
ggggacgcggggtctcgcggcgcctggcagcagagaccaccagaaggagagactagcttgcaaaattttcctcat

SEQ ID NO: 568019 - DNA, 75 bp, Homo sapiens
cattctcgctaacaactgcccagctttgagcttccacagcgcggcacctgtacctccggggtggcgctggggttg

SEQ ID NO: 568020 - DNA, 74 bp, Homo sapiens
agaagcttatcaaaaatattgaatatcctgtggacttggaaattagtaaaggcaaactaggcgtggcaactgct

SEQ ID NO: 568021 - DNA, 50 bp, Homo sapiens
ctcgtcgggagtgatcacctaccctacagtgcccccactcccaactcccg

SEQ ID NO: 568022 - DNA, 100 bp, Homo sapiens
tctgggatatgtttggtgaaaaaagcctgcattcattggtaaagtacatagtggaatgtcatgggatcacccttcttccccagttcttgggcatgtaccg

SEQ ID NO: 568023 - DNA, 75 bp, Homo sapiens
aagaaaacttacaaacaaccccatctccagacaaaactggatctcgctcttatctcccaggttggagtgcagtgg

SEQ ID NO: 568024 - DNA, 100 bp, Homo sapiens
ggaagatccttcaggtgctggaaaggaatgaggagttacagagggccgagaaggacaggatcagagcccaatgacgaaagtggagctaacgtggatgcgt

SEQ ID NO: 568025 - DNA, 50 bp, Homo sapiens
aggaccagctggatcgacccccgggacagagtgctccaagctcccgaagc

SEQ ID NO: 568026 - DNA, 74 bp, Homo sapiens
agtggatttcagcctgcacggatggtcttgaaacacaaatggtttttgaaaagagtctcatcgtggaaggcaag

SEQ ID NO: 568027 - DNA, 100 bp, Homo sapiens
caggattccactatggagttcatgcttgcgaaggctgtaagggctatggaacacacctgatgaatcatttgaaagaatatcacataaagcatgacatcct

SEQ ID NO: 568028 - DNA, 100 bp, Homo sapiens
cagcagtttggtcaatattgtcttaacatgcttcaaataaatcagaacattaaccaggtggtatttgttggaaatttcttgagaattaatacgatcgcca

SEQ ID NO: 568029 - DNA, 115 bp, Homo sapiens
tttatggaccttactgcagaacgtcccaattcttcaggccaagcttgctgatgaccgtatggcactggtgtcaggcatcagcttagatccagaagcagcgattggtgtgacaaaa

SEQ ID NO: 568030 - DNA, 75 bp, Homo sapiens
gaaaggattgtgacatatcgttggacccagaattgaggctttacaggaagtatggtgctggcatctgcttggctt

SEQ ID NO: 568031 - DNA, 100 bp, Homo sapiens
aacagggacacctggttccagctgcagcacgtggacgctgactcggaagtgcaggtgcatctgcagacgcagcaggaggtgaagctgcgcatgacgggca

SEQ ID NO: 568032 - DNA, 50 bp, Homo sapiens
tggatgtcgcgtcggagtttcgaaagaactctggacatcctgagcccaag

SEQ ID NO: 568033 - DNA, 96 bp, Homo sapiens
cccgcgccctgcggggctgtccaacgccttccagctccggctcccgctgcctgcaccatgtccgccagagaacccttaggagaaatcttgagagtg

SEQ ID NO: 568034 - DNA, 50 bp, Homo sapiens
cgaggactccagcacaccgaggcttgagaatgccagactgtcatcagaga

SEQ ID NO: 568035 - DNA, 98 bp, Homo sapiens
aaactcccaccgacccacagaggttgtaaatgtcttaaaatccttattgtcaaatcttgatgaagtaaagaaggaaagagagggtctggagaatgact

SEQ ID NO: 568036 - DNA, 99 bp, Homo sapiens
cctggttcggcctccccgcgcactagaacgctccccaggtgtgtcctggtagacaactgctcccaggagctggcatagaagcaaacctgcaggaaaagc

SEQ ID NO: 568037 - DNA, 75 bp, Homo sapiens
ctagctcacaaagacaccaaagtttctattaaaatttggtgcttccagatgtgagttatcaggtggaatccagtg

SEQ ID NO: 568038 - DNA, 100 bp, Homo sapiens
atcacacgcataatggatgaaaggaaccgacagctaatgctgcctaccttgggggccaagaaatgatggaggtggtgaagagagatgacgaaaccataaa

SEQ ID NO: 568039 - DNA, 75 bp, Homo sapiens
cccagaggcgagccctggtggaggaagaggtccggcaggttcggctattccaggacgaggagatctacagcgacc

SEQ ID NO: 568040 - DNA, 87 bp, Homo sapiens
ctcttgggttttttgtggcttccttcgttattggagccaggcctacaccccagggagtgcatccgccccaacccttttccccctcgt

SEQ ID NO: 568041 - DNA, 124 bp, Homo sapiens
ttacacagaaatatcagaagaagcttcaagactttaatctgcagttggaagacatatacagcttcgcagaatcaagaacggctatgtgcgtttaaagatccgtatcagcaagaccttgggatag

SEQ ID NO: 568042 - DNA, 95 bp, Homo sapiens
taagccagcggcaggaccagcgggcgggggcccacgaggggatatgagactttctactcggaatatcctgagtgttgcgtggatgtaaaacccat

SEQ ID NO: 568043 - DNA, 100 bp, Homo sapiens
tgatgcctgaagctcaagggactgtgtccaccctcaggaggcaacgcacgggccacaggcatgttcctgcagtatacagtgccggggacggagggtgtga

SEQ ID NO: 568044 - DNA, 100 bp, Homo sapiens
cgaagaagagtccttggaacaagcaactggctattgaaaagactccaaagctgagctctttcccctgccctgtgtgtggccgtgtgtaccccatgcagaa

SEQ ID NO: 568045 - DNA, 75 bp, Homo sapiens
cgcagggacagaaacagttggggttaacacagaaatctgcctcctgggccatgccgcttctaaggcctgtttctt

SEQ ID NO: 568046 - DNA, 75 bp, Homo sapiens
ttgattgaatacttacataatgcattggaacatgacatgagattaagattcatgatgttgctatcaaaagttgag

SEQ ID NO: 568047 - DNA, 100 bp, Homo sapiens
tttgttcttccggccctgctgtctgcctccccggctgattggattcgttactgctttgcaacgcgcacctaactccagagtttcgctcttgtcacccagg

SEQ ID NO: 568048 - DNA, 98 bp, Homo sapiens
cagcacatctcagtgaatttgcaagtgagaactttactgaatatttgatggtggatgaagaagcacatgaatttgttgcagaactgaaggaacctggg

SEQ ID NO: 568049 - DNA, 124 bp, Homo sapiens
atgatccaccggcctcggcctcccaaagtgctgggattataggcgtgagccaccgtgcctggctgaaggatgcttgaagcccacatgcagagctacaagggcaatgaccctcttggtgaatggg

SEQ ID NO: 568050 - DNA, 74 bp, Homo sapiens
gtgaacattcatgcacaaatttttatgtggagttgaacgcatgaggaatgggattgatatcctggttggaacac

SEQ ID NO: 568051 - DNA, 74 bp, Homo sapiens
gagctgtatggccgccgtcgcaagaaagtgtgaacatggctacgcctcttcattcccgtccatgccgagccccc

SEQ ID NO: 568052 - DNA, 48 bp, Homo sapiens
gagggaaaagcgaggcaaggcaggcggctgcagcttatcttctggtgt

SEQ ID NO: 568053 - DNA, 97 bp, Homo sapiens
gattattgaccagtggatctgcgcacacgccagttttaaagcccatctgggagcagttacctgtgccagcccctctacctgtgttagcagatctggc

SEQ ID NO: 568054 - DNA, 96 bp, Homo sapiens
aagaagtcaagccgatcttgcagaaattgcaggtacggattttcaaatatgcgctatatttcttcgctaattagtggtgttggtattttcatgatg

SEQ ID NO: 568055 - DNA, 101 bp, Homo sapiens
tttgcctctttctctcaggctttcctacaactcatgcccagcagcagcaagcagatatcaatgaatgtcttctagaacccagaaaatgtgcaccaggtacc

SEQ ID NO: 568056 - DNA, 96 bp, Homo sapiens
aatcaccaaagactacattatgaacccaccactgggcaaagaaagtatccctttatcatcacgaagtatgtatatgagctcctggaaaaggattgt

SEQ ID NO: 568057 - DNA, 100 bp, Homo sapiens
ctcagcactttgcgccaccttactctaaccagagtcatcaccagtgttatcgccaaggaagccttctcacccagtcatggattttttcagttcacatctt

SEQ ID NO: 568058 - DNA, 90 bp, Homo sapiens
ttcgcagtggtcgcttcttctccttggaagttcaaactgatggcaacagtcagtttgcatcacaaggtaaaacagtttctgcaacctgta

SEQ ID NO: 568059 - DNA, 100 bp, Homo sapiens
taatcttggctgtgttttcaatgcacaaggggaaatttggcttgcaattcatcactttgaaaaggaattcgaatttagagtttaatttctcagagcattc

SEQ ID NO: 568060 - DNA, 90 bp, Homo sapiens
gctgccgaaaacaagccggaagggtaatcaggaagcagccgctgcccctgacacaatggctcagccttacgcttcggcccagtttgctcc

SEQ ID NO: 568061 - DNA, 83 bp, Homo sapiens
cccaaatcccggaaactccagcgtgtctccagccgtgagaaccatggagtctggcagtaccgccgccagtgaggaggcacgca

SEQ ID NO: 568062 - DNA, 100 bp, Homo sapiens
gtggacgttgcatcggacccaaccgctgtgcttgtgtttatgggttcactggtccacagtgtgaaagaggccctcgggaccaaggatcacgtcatgactc

SEQ ID NO: 568063 - DNA, 75 bp, Homo sapiens
ttttatctcatattagtgcctgtgatggcatctttcatctaacaccttgcccaacagaaggtggaaaaaatcact

SEQ ID NO: 568064 - DNA, 101 bp, Homo sapiens
cccggctccactgagttaaggcacacttagtccagtttcatcgcaaaccagaaaaggttagaaatcatcaacgaagatgatgttgaagcttatgtgggact

SEQ ID NO: 568065 - DNA, 90 bp, Homo sapiens
cttgggcccagtttatggcttccagtggaggcattttggggcagaatacagagatatggaatcagcaaaccagtccagctacgggggccc

SEQ ID NO: 568066 - DNA, 98 bp, Homo sapiens
atgagaagtgccaggaccttcgtgccctcctcaagcgaaaacaccgctttatcctgctgcgatccccagggaacaagctccagtcagcccggtcaagc

SEQ ID NO: 568067 - DNA, 75 bp, Homo sapiens
tgcacttgttgcagaaacagccaaggttaatgttgaagaaggaaaatgcggaagtcgtcatttgacaagttttat

SEQ ID NO: 568068 - DNA, 52 bp, Homo sapiens
cacactgggaaacatcattaaatcgcactgttatgtggtatacttgttacat

SEQ ID NO: 568069 - DNA, 75 bp, Homo sapiens
gcatcatgaagggcctaaaccaccccaacatcggtgcagcttcaagcttaggaccacccaccatgcctatccagg

SEQ ID NO: 568070 - DNA, 76 bp, Homo sapiens
tggctatcctgcgcctttccactgctctgccttcacagttgttgatcacatagcatggtcatccactcacagctta

SEQ ID NO: 568071 - DNA, 98 bp, Homo sapiens
aagaacgcgctcctccgcctgctgcccgggctgggtacaggtttgcagattccgccagcagcacagcaagctctacagatgagtggctctttggcatt

SEQ ID NO: 568072 - DNA, 49 bp, Homo sapiens
actggggccttgttacttatagattctgctagcctaccaagaatccaag

SEQ ID NO: 568073 - DNA, 99 bp, Homo sapiens
ggaagcatacagatctgggaccgaaatttgactatttgtggtggtgacaaaccatttctggccccaaatgacttgcagaccaaacacctgcaacttaag

SEQ ID NO: 568074 - DNA, 100 bp, Homo sapiens
caatctttgcctgaagataaatgcaaaacttggaggaattaacaatgtgcttgtgcctcatcaaagatgcctccactccagcctcatcagagttaaataa

SEQ ID NO: 568075 - DNA, 82 bp, Homo sapiens
ttcgaccccaccggcctggagcgcgccgccaaggcggcgcgcgagctggagcactcgcgcttcagtttcacattcttggtac

SEQ ID NO: 568076 - DNA, 80 bp, Homo sapiens
cggccccggggacaccagcagctctgctgcggagcgggaggaggaccgaaaggatgattgaggaaagtgggaacaagcgg

SEQ ID NO: 568077 - DNA, 87 bp, Homo sapiens
ttcgccgccgtgcgccgcgagagctgcagctgcgccgccgccctggcgcaggccacgcccggctacctcggacctgaacagctgcct

SEQ ID NO: 568078 - DNA, 75 bp, Homo sapiens
gtgcccaagctcatcgagaagtgctggaccgaggacgaagtgaatctgtcactgcgaaggggatgaagagagccc

SEQ ID NO: 568079 - DNA, 50 bp, Homo sapiens
cttggctgtaaggacccctaagggatgaccagtgtcccagtgaaggaacg

SEQ ID NO: 568080 - DNA, 75 bp, Homo sapiens
aggcggcgatcctgggctgcgggcaaggcggtataccaagcttggctacgcaggcaacactgagccccagttcat

SEQ ID NO: 568081 - DNA, 82 bp, Homo sapiens
gttcccaaggctccgggctttgcccagatgctcaaggagggagcgaaagcagcctgcttctgcaaagtggtacgatcgaagg

SEQ ID NO: 568082 - DNA, 77 bp, Homo sapiens
cggcaaccgctgctggcagttttgccaggtgtttgttaccttgacgtcttgctgccctccaaaaaagaagagaactt

SEQ ID NO: 568083 - DNA, 51 bp, Homo sapiens
gcccttatcagtaacacctgagcttggaatacacgaagactctcaaaatcg

SEQ ID NO: 568084 - DNA, 110 bp, Homo sapiens
ggcccttgttcccccaaatgtctgactctgactctcggactgagaaacgcaagctggagcagttcaacatgatggagaacgccatcagctccagcagcctgtacagcccg

SEQ ID NO: 568085 - DNA, 100 bp, Homo sapiens
ggctgccattaaaaaccgatataaagggggcattcgaggagatacaactcgtcaacgaatcaaattcagtgatgacagagtatgcaagagtcaccttctc

SEQ ID NO: 568086 - DNA, 118 bp, Homo sapiens
cactgaatcccgtgtggaatgaggacctgacttacagcgggatcacagatgacgacatcacgcacaaggtgctcaggttctgtcaaaggaagagccctggggctgtgcgggcgctgct

SEQ ID NO: 568087 - DNA, 100 bp, Homo sapiens
ctggcggctgctggtagttccatgctgtctgttcagacttcagcttggtgcacattgcaagcaacccgtgccttgatggtggttggcatcctcctgggag

SEQ ID NO: 568088 - DNA, 98 bp, Homo sapiens
gcgattctacacagaagattcacctgggctcaaagtgcagacaccacccatcctttaaccaagcacagaaaaatagcctcttcttttcgcgattcatc

SEQ ID NO: 568089 - DNA, 94 bp, Homo sapiens
cagagattttggagacagcctggccagaggaggaaagggctttctgcgagttttcctttggaatatggataaatacaccatgatacggaaacta

SEQ ID NO: 568090 - DNA, 82 bp, Homo sapiens
agagatcctgagagcccgagcgcccagcgccgcgccgggagcccctgtcaaagggaacaggaagcagtccacggagggtgac

SEQ ID NO: 568091 - DNA, 100 bp, Homo sapiens
gcctagcaaagactattaccagttactggtcacccggtctcaggttggtgggacaagtgatgttgaagtgaatgaaaagaaagacagagttacagatgcc

SEQ ID NO: 568092 - DNA, 121 bp, Homo sapiens
aaaaaagacaaggaaaaggacaaggggaaatggaaggggcctccagggtctgcagacaaggcagggttgtccttctattcaggccactcttcgttttccatgtactgcatgctgtttgtgg

SEQ ID NO: 568093 - DNA, 90 bp, Homo sapiens
tcgccttctgcctggtcgggatcccgccccgcccggagccccggcccccacagtaaaggcatgacttcctggcaccacagggaaaatcgg

SEQ ID NO: 568094 - DNA, 128 bp, Homo sapiens
cggcggaaaaccgaagttggaagtgtctcttagcagcgcgcggagaagaacggggagccagagtgagcctcgcagctggtccctgctagagcagctgggcctggccggggcagacctggcggcccccg

SEQ ID NO: 568095 - DNA, 90 bp, Homo sapiens
caagggtgcagactatatggactgcttatatagggtcatcctaaagtatgtgaaaaattaaaggctcttatggttgaatggacagatgaa

SEQ ID NO: 568096 - DNA, 100 bp, Homo sapiens
cttttggctttcggggggaagctctgagctcactttgtgcactgagtctcttgcatggcaccaagaatgttaccaattcaagcagtttaagattgccaag

SEQ ID NO: 568097 - DNA, 50 bp, Homo sapiens
cacgccgccgcttgtgctgcagccatggtgtttaatgacgaccttaccaa

SEQ ID NO: 568098 - DNA, 124 bp, Homo sapiens
tgaagaagattccactcgtggtatgagagtggataatataatcaactcctctgcctggttcaaaccttgtactactcagctgatcacaagctgcttgatgggaacctactagatggacaggctg

SEQ ID NO: 568099 - DNA, 100 bp, Homo sapiens
tccctactacgatgcaatcctgaaagtgatgagagcctatttacaacagctaaggcaagagactggactgagactttgtgagaaagttttcgaccctcag

SEQ ID NO: 568100 - DNA, 100 bp, Homo sapiens
gccctgtggatgactgagtacctgaaccggcacctgcacacctggatccaggataacggaggctggcatgcaatgatgctacctgttctgacccatcata

SEQ ID NO: 568101 - DNA, 82 bp, Homo sapiens
aatgaaacccccaagatgggcatctattacattccagcagctgagtatgtcccagagaaggtgaagaaagcggaaaagaaat

SEQ ID NO: 568102 - DNA, 75 bp, Homo sapiens
aagctgagccagagcccacagaagcatggaagaaaatgatgcatcctgttgccagcagtaatccagctttctgtg

SEQ ID NO: 568103 - DNA, 100 bp, Homo sapiens
gagctttgtggaagcatttggcggcataccaccctgcactgtgaggtggcaggatcccattttctcactggcgactcccctgcgtgctggtgaagaaggc

SEQ ID NO: 568104 - DNA, 75 bp, Homo sapiens
tagggtcctttatatagaagggagaccctgagtattccctctttgtgggggacctgaccccggacgtggatgatg

SEQ ID NO: 568105 - DNA, 98 bp, Homo sapiens
gctattgacagcaattcatgcatctccagattcctaagatgaggacacagcatcctgggccactgtcactaatacaaatttgcctctggagggactct

SEQ ID NO: 568106 - DNA, 100 bp, Homo sapiens
gcacagtccatcggcatacggagacaggaggagagggcagtgagagataggaatctcctccaggttcatgaccataatcagcccatcccgtggaaagtgc

SEQ ID NO: 568107 - DNA, 98 bp, Homo sapiens
gcctggcgggcgtgggaacccaggccccgccgaggcggccaggtgattttacaacgagatgctgctctccatagggatgctcatgctgtcagccacac

SEQ ID NO: 568108 - DNA, 100 bp, Homo sapiens
ctgtgggcgccatcatcgggaagaagggggcacacatcaaacagctggcgagattcgccggagcctctatcaagctggtggccaaggaattgggccagac

SEQ ID NO: 568109 - DNA, 80 bp, Homo sapiens
gcaagacatgacacaaagctgctagcagaaaatcaaaacgctgattaaaagaagcacgttgtggacatcggatacccaag

SEQ ID NO: 568110 - DNA, 139 bp, Homo sapiens
gatatatttatgggtgtttacagaaatctgttcagcataagtggcctacaaataccaccatgagaacaagagttgttagcaggaacgaatgcaggaatttgggaactgagctgtgcaagtgctgaagaaggagatttgt

SEQ ID NO: 568111 - DNA, 50 bp, Homo sapiens
gaggccctcccaggtcacggtcaaagccgcttacaaacacgcagatggca

SEQ ID NO: 568112 - DNA, 100 bp, Homo sapiens
ctcagcacctataccaaagcaatgagaatagtagctcttctagtatctgcaaagacaatgcaggcaatgtctatgctgcttcaaggaatataagcatttg

SEQ ID NO: 568113 - DNA, 100 bp, Homo sapiens
agctgagcagagccctgcgatactattatgacaagccataaccagcagaccacagcattcaggcatcctgtgacgggacagttttctccagaaaatagtg

SEQ ID NO: 568114 - DNA, 99 bp, Homo sapiens
aaagacaatatcaatgacaaactgacggaaaaggagagagagtagcagttttacaacatcatcaggaatatatacaggaaataattcactcacaaattc

SEQ ID NO: 568115 - DNA, 75 bp, Homo sapiens
tttggatcggcatctagtctttccgcttcttgaatttctctctgtaaaggaggcacgcacagaggctgggctgcg

SEQ ID NO: 568116 - DNA, 74 bp, Homo sapiens
caaggtcgccctcaaggccatgatcaaaacgtgatccgcaggggctggctgaccatcaacaacatcagcctgat

SEQ ID NO: 568117 - DNA, 100 bp, Homo sapiens
aaaaaaaattactcatccatttgcctcccagccattgggacaggtcacaaggcacttaaagcattgttgaggtcattggtaggtcttcaggaagagttgc

SEQ ID NO: 568118 - DNA, 98 bp, Homo sapiens
gaactgagcgtatgtgccacgccgcccaggagacccctctgctgcaccacttcatggcctcaggcccaggcccaaggccaagtgagagagcccaggcc

SEQ ID NO: 568119 - DNA, 75 bp, Homo sapiens
agtggacgtggatttggggatggctataatgggtatggaggaggacctggagcgagaactttcaaaggcttccaa

SEQ ID NO: 568120 - DNA, 75 bp, Homo sapiens
atcagctacagactttcctgagtcaggctcagcttgtcaatcggaaacagaaattagagtctgtggaactttcta

SEQ ID NO: 568121 - DNA, 80 bp, Homo sapiens
tgttgatagatgatgaatacaagaaatttgcctgtaatggtactgtgattgaacatcctgaatacggagaggttattcag

SEQ ID NO: 568122 - DNA, 98 bp, Homo sapiens
tccgtctccttggtgcagatgaagaaaccgacgcccatgggcgaaagggacctgctcaagttcactcagactttccttatcccagttgattgtgcaga

SEQ ID NO: 568123 - DNA, 90 bp, Homo sapiens
cagagataattgataacaccctgtaacagctgatctgactaaagacatgactggaaaagaagatgtataccgaggcccggccatcagagc

SEQ ID NO: 568124 - DNA, 75 bp, Homo sapiens
cgagggctaccacgttctgcggagtgatcagcagctggactgtgccttggacctaatgaggcgcctgcctcccca

SEQ ID NO: 568125 - DNA, 100 bp, Homo sapiens
cccaagcagtggcgaagggaatcgcaaggctcttccctgaccattttctactgtccctgcgcgagtttgcagtgttgatgtgggtatttacctatgttgg

SEQ ID NO: 568126 - DNA, 97 bp, Homo sapiens
gcagctcctcggcgcttcctcggtggcttccccgggtcgagcaaacagggtagcagccgagctctggcgcagcctaagccgtaaccagcgtgtaaat

SEQ ID NO: 568127 - DNA, 85 bp, Homo sapiens
ataccttcacccagcatttcatccctcgtcgaaaggattggattggcatctttagagtttcagccatgccacagagctccggcag

SEQ ID NO: 568128 - DNA, 50 bp, Homo sapiens
attcaacatgattgcatttgaaggcttatttcaaaacctttgtccctcag

SEQ ID NO: 568129 - DNA, 100 bp, Homo sapiens
gcgggccggggcgcggaccgcggagcggccgaaggccccgccaccacttgctgctgctctggcccacgaagcagtttcacagctgctacagacagacctt

SEQ ID NO: 568130 - DNA, 100 bp, Homo sapiens
cgaggagggggaccttgaagacgacttcgaccctgcccagcacgaccagctcatgcaggctgtaacagaagacaagtacgaaatactgcaatctgtcgac

SEQ ID NO: 568131 - DNA, 107 bp, Homo sapiens
tgtgtctcacatggactgctggagagtcaacgggaccctggccgtctccagagccatcgctctgcttatgataatgtcaacaaagttcgagtagctatcaagaaaat

SEQ ID NO: 568132 - DNA, 100 bp, Homo sapiens
aaaagttagaattcttgaaaaaaagcatgttattgaattatcaacatcactggttgtccaagcaaacacagtggatgaacgtactaactttcttgtggaa

SEQ ID NO: 568133 - DNA, 97 bp, Homo sapiens
gcaggcctctggctttgtccgtgatctcagcgggcacgtggacatgtattcctctgagaaaccttggacagcagattttggtttaatatctgattgg

SEQ ID NO: 568134 - DNA, 73 bp, Homo sapiens
atgcgagcagagaacttctttatccttcgaaggaagcctgtggagttgcttttggaggaagtcatgaattcaa

SEQ ID NO: 568135 - DNA, 75 bp, Homo sapiens
tgaaacctccttctaatgtggtgtcccccctggaacaggctctctcacaacatgagggtctccccagacacccga

SEQ ID NO: 568136 - DNA, 82 bp, Homo sapiens
cctcggagcctttgtcgttgtgcacaggcctctactacgtggacagtgaagggaaccggatttcaggggccaccttctctgt

SEQ ID NO: 568137 - DNA, 100 bp, Homo sapiens
acccagaacggagagctccctcctagaaaaggtgtcagttgtacccgaggcgttctcagcagcagcaagtacctgtggtggatttccaggctgaactgag

SEQ ID NO: 568138 - DNA, 83 bp, Homo sapiens
ctggatcagtttctttgtcatgtagccaagactggagaaacaatatgagttttgatcatcctgagaaaaatgggccttggcct

SEQ ID NO: 568139 - DNA, 100 bp, Homo sapiens
atgaccaaactggaaatgctctgacagagaatgagatgaccacaattcactatgatagaattacttctctacagggatttgtcttggctgttactatgac

SEQ ID NO: 568140 - DNA, 75 bp, Homo sapiens
cctcaggccccctcaccatcctagaggtcaagatcagctctggctaggttggatggcaagcatgtggtgtttggc

SEQ ID NO: 568141 - DNA, 75 bp, Homo sapiens
attcaagacattactgctatgctgagatctgtatctgtggacctgaatgttgatccctcgcttcagattgacata

SEQ ID NO: 568142 - DNA, 100 bp, Homo sapiens
caaaagtgctcaacttcctccagaaactttggcgacaatgttggcctgtctgcaagcttgtgcaggtgtttgataagcactacatcaaccgcaactttga

SEQ ID NO: 568143 - DNA, 82 bp, Homo sapiens
ctctgctgagagagtgcaagccgtgggccgtgcttcctcaaagactgggaaatgcacgtccacttcaaagtccacggcacag

SEQ ID NO: 568144 - DNA, 87 bp, Homo sapiens
gacaccacacacatcatcagtctgatacagccttttcctccctctccatgaactctggaaacagtacatcagggacctgtgcagtgg

SEQ ID NO: 568145 - DNA, 75 bp, Homo sapiens
cagtcagaagaaggctgctattgaaagagagtatgcacagagttgctggagaatgtaaccctaatccataaacca

SEQ ID NO: 568146 - DNA, 100 bp, Homo sapiens
ccaagaaaccaacattcccaacagccaccaccaccaccagatggtgtcgtgaaaactacccctaaaagccaaaatgggaaaggaaaagactcatatcaac

SEQ ID NO: 568147 - DNA, 90 bp, Homo sapiens
gaagatgaggaggtcgctgagagctgggaagaggcggcagacagcggggaggtgctcctgtaccctggccacagcccaatcctgccactg

SEQ ID NO: 568148 - DNA, 83 bp, Homo sapiens
gcagcagcccagacgcggcacagagagggcctgggagcttgctgcagcttcaggacgtggcccagtggaacatcgggagcctc

SEQ ID NO: 568149 - DNA, 50 bp, Homo sapiens
ctgctgattgagctggaatattgtaatgcaaaacaagctatcgatcaggg

SEQ ID NO: 568150 - DNA, 98 bp, Homo sapiens
cttcacccagaacctgttgtggggagtaaggaacagaggcggctgagccaggaacgggatcgcctagagggtcttcgccagagactccgcaaggccca

SEQ ID NO: 568151 - DNA, 100 bp, Homo sapiens
gtacgacgtggaacagcattctgtcaactagaattgtatgtagaagttgtcccttggtgtgggattgcttccagtacctctgtgtgtaacaaaagctgca

SEQ ID NO: 568152 - DNA, 97 bp, Homo sapiens
caaatctgacatctggtctcttggctgtctactatatgaggatatgggccctcacattttccaaacctgtccatctgctaactattttgactgcaga

SEQ ID NO: 568153 - DNA, 98 bp, Homo sapiens
gcccatgatctgatccggaagatgtcacctagccccggagctatgtggagtctgtggcacggacagcggtggctggaccccgagctcaggactctgag

SEQ ID NO: 568154 - DNA, 100 bp, Homo sapiens
ggaaaatagcctttgccatcactgccattaagaggggggatgatccagacggcagagcagtaccagttcctgcaccacactttggccctgtatgcaggcc

SEQ ID NO: 568155 - DNA, 100 bp, Homo sapiens
aaaatggacgagtaatcgcctgctttgattcattgaaacagagagagatcatcattgcctgaatttagctttgtgactgcaagagcaagaccagttcctg

SEQ ID NO: 568156 - DNA, 82 bp, Homo sapiens
aggattccaagtaactcttatttgggttctatggcctggatgagtctgacctcgacaaggtcttccacttgcccaccaccac

SEQ ID NO: 568157 - DNA, 50 bp, Homo sapiens
agaggctcccggtgtccaggcagggagcgcctggaccatgctgctgagcg

SEQ ID NO: 568158 - DNA, 100 bp, Homo sapiens
caggaagccagctagagtggttaattcgccaaaatgacgaacacaaagggaaagaggagaggcacccgatatatgttctctaggccttttagaaaacatg

SEQ ID NO: 568159 - DNA, 82 bp, Homo sapiens
caccacaataatccacagccaagactctcagcgttctcatctctcttccttcaccatgaagctgatggacaaattccactca

SEQ ID NO: 568160 - DNA, 74 bp, Homo sapiens
tttctgtggagctgagggctgatgggttctgacggataatttccaagccagacccgggaaaaggagaagatgaa

SEQ ID NO: 568161 - DNA, 98 bp, Homo sapiens
aggggaggggagtggaaaggctctcagtgaaaaagatacaccatcccagagagttcagtttatccttggtactgaagatgatgatgaagaacatattc

SEQ ID NO: 568162 - DNA, 100 bp, Homo sapiens
tcagcagcctggcagcagcccccggggcaagagcaggagcccggcaccccccgccgacaaggagggcatcaagcatgatggaaccatgtgtgatacctgc

SEQ ID NO: 568163 - DNA, 100 bp, Homo sapiens
gccaacacatatattcacagagcaggtagaactgccagagctctgaagatgagtgggttgaggctgttccatcccagactcctgacaaggaaaaagcctg

SEQ ID NO: 568164 - DNA, 90 bp, Homo sapiens
gcgggcacgcacggcccgggccggcgctccaaggcccgcccgggagggccggggccgcgctcagacccggactccttcctgaagtctgca

SEQ ID NO: 568165 - DNA, 90 bp, Homo sapiens
tgaagtcaaattggccctgaaaaaagacagagaaactatgggacacagatatgttgaagggagcatgattgagcggatattagtgtcgtg

SEQ ID NO: 568166 - DNA, 75 bp, Homo sapiens
gaccagatgataccatgaagagaagtttacaggccctctattgccaactgttaaattgtttcccagagaaagctg

SEQ ID NO: 568167 - DNA, 89 bp, Homo sapiens
attgttcaaagtggaccccaggggagaagtcggagcaaagaacttaccaccaagcaggcaggatgacgcaaaacacggtgattgtgaat

SEQ ID NO: 568168 - DNA, 90 bp, Homo sapiens
ggctggcagtcaggacatattcgatgccatcgtgatggcggatgagaggttggatggcaagcatgtggtgtttggcaaagtgaaagaagg

SEQ ID NO: 568169 - DNA, 101 bp, Homo sapiens
cgccatcctgccgcagctggcgcagcccacgctcatgatcgacttcctcacccgcgcctgcgacctcggttggcgctgtacgtttatgagtacctgctgca

SEQ ID NO: 568170 - DNA, 74 bp, Homo sapiens
tgtaatgaaattatcaactggcttgataagaatcaggaacctggccactgctccttggtccttggcattatgac

SEQ ID NO: 568171 - DNA, 83 bp, Homo sapiens
agaagccaaagaactggctaggcaaataagctttaaggaaattagatcgactggagaagaaaaaaaagaaaaaagatagaaaa

SEQ ID NO: 568172 - DNA, 100 bp, Homo sapiens
gccccccatctcaccccccaagcggatactggtcttctcgtcggattgcccatgcacttgttgcagaaacagccaaggcagctaacctgacagccataat

SEQ ID NO: 568173 - DNA, 100 bp, Homo sapiens
tgttcagaagttcttccttgaagaaatacagcttggtgaagagttactagctcaaggttacgccaaggaggccctgaatctggcgcagatgcaggagcag

SEQ ID NO: 568174 - DNA, 100 bp, Homo sapiens
atcgattgcatcagcaatgtggcgcacgttttttcaagggggaacatggcaaaggtgttcagtttcatccttgttaccaccgctctgacaatgggcaggg

SEQ ID NO: 568175 - DNA, 50 bp, Homo sapiens
cagtggtcgcttcttctccttgatagagaagcagaggcggatagaacgga

SEQ ID NO: 568176 - DNA, 98 bp, Homo sapiens
ttatgagagatttttgggacctgaaatcttttttcatccagaggtaaacattataccagtgattgccaaagcagatacggtttctaaaactgaattac

SEQ ID NO: 568177 - DNA, 90 bp, Homo sapiens
ctttggcagaaattaagaaggaaatatctccattcgcggagacccacatcaagggcttcacactgaacgatgctgccaacagccgcctca

SEQ ID NO: 568178 - DNA, 101 bp, Homo sapiens
gcgcgcgcggcggaggacgaggaagagttgtggcgaggcagatcctgccccgtggccgcggccgtctcgtaggctttgactactcgcaggacgccgaggct

SEQ ID NO: 568179 - DNA, 49 bp, Homo sapiens
gaactgtcaggtacctcaaagcgaaaatgttggggcttttcaggaagca

SEQ ID NO: 568180 - DNA, 83 bp, Homo sapiens
catgtgcgatgatgaggaggactacgacctgagcctattgtgaagaatggcaggcctccaacgtctcacagtatgcattcctt

SEQ ID NO: 568181 - DNA, 89 bp, Homo sapiens
caattacctgcacgacacatggaaattggactaaattaccagaatgcaggggcttcagctctggcggcatggactatggcatggttggt

SEQ ID NO: 568182 - DNA, 84 bp, Homo sapiens
gcaaggagctaaagcagcgtgcgttcagccctgggaaatgagccgtcagactgctacagcattacctaccggtacctcgaagtg

SEQ ID NO: 568183 - DNA, 90 bp, Homo sapiens
acatcatgagtaagcaccgagaagtctgttccttatcacgtgtgtaaggggaaaaaggagtgattggggcagatgtgagagggcacggcc

SEQ ID NO: 568184 - DNA, 75 bp, Homo sapiens
taccccctcccccctgagcccgaggtgctgacgtcgcaaaaaaattggatattgatcatcatggagacccgcaag

SEQ ID NO: 568185 - DNA, 97 bp, Homo sapiens
ccatgagtttctccggcaagtaccaactgcagagccaggaaaactttgaagccttcatgaaggcaatcggttggttcctgtataccttgggccagag

SEQ ID NO: 568186 - DNA, 82 bp, Homo sapiens
gtctttaccaaacttattaataggaataccactattccaaccaagaagagccagtatgaaaacaaagttgcagtacgtgaca

SEQ ID NO: 568187 - DNA, 100 bp, Homo sapiens
ggaggaggacattgatacccgcaaaatcaacaacagtttcctgcgcgaccacagctatgcgaccgaagtgttgctaacaaccacaagcagaatttgatga

SEQ ID NO: 568188 - DNA, 75 bp, Homo sapiens
tggacaaaggaacaggtatctcagagtgaagatagtccaagtcctaagagacagcgcctctctcattcagtcttt

SEQ ID NO: 568189 - DNA, 83 bp, Homo sapiens
gtaccagaattcggccatgagccgctacatactcatcatggggctcctgtacaagtattctaccttgtaaatactgttatttg

SEQ ID NO: 568190 - DNA, 51 bp, Homo sapiens
ctgaagatgatgctgctatcagcctggtggcaattttggaggtagccccgg

SEQ ID NO: 568191 - DNA, 74 bp, Homo sapiens
ccgtgtgtgcgtgagagaagaccagtctttcctctagtacaaaattggacagctgtacatgatcagcaaacaca

SEQ ID NO: 568192 - DNA, 101 bp, Homo sapiens
ccgggctaggacgccgagcggtgactccccgccgctcccgggggccgtgacgggacagcaatcagacctattgctttgagagctgtgacctccattgctcg

SEQ ID NO: 568193 - DNA, 83 bp, Homo sapiens
ccgccctggggccggcgatgtgccaccgaggctgaggatgatggtagattgccaggttggctcaaaaacagaagttgctgagt

SEQ ID NO: 568194 - DNA, 101 bp, Homo sapiens
cccttgccatccctgtgtgacagcaatgaggtgaacccaggggccgaagcccacccagggagttgatgggcgccctgcgtccggcagaggaggcgagcatc

SEQ ID NO: 568195 - DNA, 100 bp, Homo sapiens
acgcctggatcagccacaaatgtacccccagtacacttactactatcctcattatctccaaaccaagttgatgcggatgaaattaaaaggctaggaaaga

SEQ ID NO: 568196 - DNA, 74 bp, Homo sapiens
ttgttgtggtacagtttaaagatatggactccagttatgcaaaaagagtatcaaaggtgcagaatctgggacaa

SEQ ID NO: 568197 - DNA, 98 bp, Homo sapiens
taagatcaaagtctgaggctttttccatcagtaatcagactcagattgatggacaacttttcttaattaagcaccttttgatacttcgtgaacaaatt

SEQ ID NO: 568198 - DNA, 100 bp, Homo sapiens
agaaggcagccgaggggctgtcaaagctccaactggaggccaccctgtggttcagttgatattcactgatggactccaaagaatcattaactcctggtag

SEQ ID NO: 568199 - DNA, 100 bp, Homo sapiens
cgggatcgtgaccgagaccgtgaccgagagcgtgaccgagagcgcgaatatcgtcatcgttagaagaattctcccagtccttggctacatcagcccaccc

SEQ ID NO: 568200 - DNA, 90 bp, Homo sapiens
cctcggtcccggcccccatcctccccgccccatcggttgttgtctgggcggacaacatctggggaagatgtacgagacttcacaaaggta

SEQ ID NO: 568201 - DNA, 83 bp, Homo sapiens
cgagaagcagcgggggggcaggcgatcgaaggtcatgcaagacaagataatctgccttccgaaaagagtgcagcctgctcaga

SEQ ID NO: 568202 - DNA, 96 bp, Homo sapiens
agctggaggattgtaaatgcaccaatcagcatgctgtgtctagctcaaggattgactcagtcagcattgacacccttatcttcactttggagttta

SEQ ID NO: 568203 - DNA, 75 bp, Homo sapiens
acagaactcattctcaccaataatagtctcgtggaactggatttgtactgtgttcgcagtgacctggggaacctg

SEQ ID NO: 568204 - DNA, 90 bp, Homo sapiens
ctcttacgtctgcggaagtgcagctgcctcagttcttagcgcaggggaaagtggagatgacattggaaatcctcaacgagaaggaggccg

SEQ ID NO: 568205 - DNA, 115 bp, Homo sapiens
ccccgaaggaaaaggaggaattcgccgtgcccgagaatagctccgtccagcaggttctacatgaaacattttctcaacacacattcctcatgaatggtctcattcaaggtgtaaa

SEQ ID NO: 568206 - DNA, 74 bp, Homo sapiens
ccaattcgttttcaggagcatctccagacacgatgaggcgagtggtacgacagagcaagtttcggcatgtattt

SEQ ID NO: 568207 - DNA, 49 bp, Homo sapiens
gttttctcctgtgaaattaaagaggcacaccagaattatggaacattta

SEQ ID NO: 568208 - DNA, 87 bp, Homo sapiens
agacttctttcccagatgtttataatgagggcacacagaatcgagagctccagatcatgagaaagctagatcactgtaacatagtcc

SEQ ID NO: 568209 - DNA, 101 bp, Homo sapiens
ggatgttgcggacagtatgaggcaagcgcagggggacggggaccagcagctgtcgccgccgctctcagggatgcttgaagatggaaagaaatttgattcct

SEQ ID NO: 568210 - DNA, 89 bp, Homo sapiens
cacagatgatacctttgatccagaacttgcagcaacaataggattttttatcaagcagaaatgcatcgaacaacgagaatcaagatcac

SEQ ID NO: 568211 - DNA, 90 bp, Homo sapiens
ctgaccttggcgacctcagctccggcctccaagacttaattcagtgcacaaatgagatgaatgtgaacatcccacagttggcagacagtt

SEQ ID NO: 568212 - DNA, 100 bp, Homo sapiens
tatatgccttttgccccagccatccagacggctgtgatgcgccgctggctgcctgccggagacgccttgttgcagatgatcaccatccacctgccctccc

SEQ ID NO: 568213 - DNA, 101 bp, Homo sapiens
ccgggctaagcgtcggcaagttctgtagagaaactcgggcaacctttggagaactacgatgacccgcacaaaacccctgcctccccagttgtccacatcag

SEQ ID NO: 568214 - DNA, 88 bp, Homo sapiens
gtgggggctgactgtcgctctgcctttgacaggagaggctgcttcttgtagaggctgcaagaaagcgtaagattgccattcgaaaagc

SEQ ID NO: 568215 - DNA, 75 bp, Homo sapiens
ccgtcaacaatcccaagaagcaggaatgaaagtggcgctttctccgccccaggtgcatggctgcctcctaatccc

SEQ ID NO: 568216 - DNA, 74 bp, Homo sapiens
tggtcgtggataacacttttatgtcaccatatttccaggaattgcacgtaggtgaaaaccagattgaaatgtta

SEQ ID NO: 568217 - DNA, 90 bp, Homo sapiens
agaatgtgtgtgtgtcccgggcccagacgaattgggaaagaatatggcaaagctgatgcaagatgggtttattttgatccaaccattgtg

SEQ ID NO: 568218 - DNA, 50 bp, Homo sapiens
agatcctccaaagacagatctggcattgtttccaagtcgtacgagtgccg

SEQ ID NO: 568219 - DNA, 82 bp, Homo sapiens
gccagactcagggatcaaagagcaaacagattcagtggcctgcattgaactttcacgatggccgtaaagcacagcagcacat

SEQ ID NO: 568220 - DNA, 100 bp, Homo sapiens
gcaacatgccacaatcacttaagtgagacggtttaagcggaagcatcttactgccattgactgccagcatttggctcggagtcacttggctgtgacccag

SEQ ID NO: 568221 - DNA, 75 bp, Homo sapiens
accgccgggaggctgctgtacgacatttcagggcgacagctcagtgaagtcttcattcagttaccttcaaggaaa

SEQ ID NO: 568222 - DNA, 90 bp, Homo sapiens
cgaggcatcccttttatacccatgatttccccaagtcctagtcaagaggaactacagaccactctgggtcagatgtaccaacagtaccag

SEQ ID NO: 568223 - DNA, 96 bp, Homo sapiens
cgcgcagcatcgtgaagggctggggccttcactcctctgtggctctggaagagcccgatttcctcaggagctgcagccccctaaacccaggaggcg

SEQ ID NO: 568224 - DNA, 100 bp, Homo sapiens
tcgaagtggctgtgggtattgctgcggctggtgcgtcgtcgctctagaacttaacactacaagcggaagccttccttcaacaacaccgatgtctccatcg

SEQ ID NO: 568225 - DNA, 88 bp, Homo sapiens
gcttctgctgttgctcttctccgccgcggcactgatccccacagccacagctccggagcaagccccagccccggcccggccataccag

SEQ ID NO: 568226 - DNA, 100 bp, Homo sapiens
ggaagaaacctcagacagatcgccggggaggcagcgcgggatcccagcctcaggcgtgcgcggacggtgtgcgggccgccgcccaccgcccgccgccatg

SEQ ID NO: 568227 - DNA, 100 bp, Homo sapiens
cgaatttaggagacataagaccgttggttctgacgaggcacagcgtttcttgcaagaatgggaggcattgaatgccccagaggagcccgaaacctcccag

SEQ ID NO: 568228 - DNA, 100 bp, Homo sapiens
ggaataaacttttgaaacactaatgtaaccagagttggagccacccaggggaatgatctctgatgacctaacctaagcaaaaccactgagcttctgggaa

SEQ ID NO: 568229 - DNA, 98 bp, Homo sapiens
cccatatctaagcaaaggaactgattacctctctagtgacccttcagctgttaaccctggttggccatgacgatcagcttgatggaccaaaatacaaa

SEQ ID NO: 568230 - DNA, 95 bp, Homo sapiens
cagagaccaacgagatcctgcacatgtctttgcgcagacggggaagcggagccaacatgccagtggcccggagctgggtttgtcgcaaaacttat

SEQ ID NO: 568231 - DNA, 90 bp, Homo sapiens
ttcaaaaattctaggaccaaaacctcaggccaacagagcacttatggcaaggcatctcgagggggtggcaatcaccaaaacaattaccag

SEQ ID NO: 568232 - DNA, 126 bp, Homo sapiens
cagcggtgttggaacttcgttgcttgcttgcctgtgcgcgcgtgcgcggacatggcctcaaacggtgtggaaacaggaagagaactagaactggaagtaaagcattgaagatgtgactgaattgct

SEQ ID NO: 568233 - DNA, 98 bp, Homo sapiens
atcgatgcagaacacctgggtgacttccacagatggatccctgcagagacccctccagtccgggatccccactctcgtggtaggctccctcagacgca

SEQ ID NO: 568234 - DNA, 95 bp, Homo sapiens
caaacatctccttgcatttttgttggctgaattgggtacaagagtcttgctatggagatacacttcaattcctacttcagtggaagagtcgggaa

SEQ ID NO: 568235 - DNA, 100 bp, Homo sapiens
agtgctgtaaggaagctgtgtgtgtcattgacatgtcctctttcacaaagtttgagataacagtcgagtttgagtggctgaggcagttttggtttcaagg

SEQ ID NO: 568236 - DNA, 75 bp, Homo sapiens
ctcatggcaaaagggaagctgaaaccaactcagaatgcttctgagaagaatcaggaaacccaggcccaacggcag

SEQ ID NO: 568237 - DNA, 100 bp, Homo sapiens
tgtatctatcctgcttatttaaataataagaagaccatcgcagagggaaggcgaatccccataagtaagtgtatgtggtagaagaccaaagaagagatga

SEQ ID NO: 568238 - DNA, 100 bp, Homo sapiens
tccgaatgcacctgggcttggtgattcccaaggaaggctgcaagattcgatgtgccaacgagaccaacaatttcctgctgcagagagcattttaagaaag

SEQ ID NO: 568239 - DNA, 75 bp, Homo sapiens
ccgccatgagccaggagacgtacctttaccacatagacaaaggtaacgatgggaaaggaactcctgtattcacag

SEQ ID NO: 568240 - DNA, 107 bp, Homo sapiens
ccaacagggaagaaatgaaatttcatgagttcgttgagaaactgcaggatatacagcagcgaggaggggaagagaggatagaccatgaagctgaaggaacttgagcg

SEQ ID NO: 568241 - DNA, 75 bp, Homo sapiens
cggtaggaagccggagacagcagggtgacagctcctattcagacatatgtgcttggtgctaataaccaggaaaca

SEQ ID NO: 568242 - DNA, 100 bp, Homo sapiens
gacgtctgatttatgaagctccccatccacctatctgagtacctgacttctcaggactgacacctacagcatcagacgcaaacatgcagatctttgtgaa

SEQ ID NO: 568243 - DNA, 98 bp, Homo sapiens
gtggatctgatcagctgaggcctgagacacaggaccaggcagtcgatgatgtgaagaaaggttacatcaaagcagaagaaaagtcctatcaattacag

SEQ ID NO: 568244 - DNA, 97 bp, Homo sapiens
ggaaatttggccagttatccaattgatgaactagtagatagagccaaacaatcttttcaaggatgacagtgatgggattccgtggtcagaagaacgg

SEQ ID NO: 568245 - DNA, 100 bp, Homo sapiens
ggggcggcggcggggtcaggggccgcataagctgtggccatgactactgaagtaggctctgtgtctgaagtgaagaaggactctagccagttaggaacag

SEQ ID NO: 568246 - DNA, 100 bp, Homo sapiens
tcctctccacgccgctgccgctgccgccatgcaaggggaggacgccagatacctcaaaaggtggtgactatcctgttgagaagcaaaagatactttgcaa

SEQ ID NO: 568247 - DNA, 101 bp, Homo sapiens
atgacaccagcgcagctctcttgatttcacacattgtgcaatctaatcacatatggctctgatagaactgaggcactgaagagaatggcagatgcactgga

SEQ ID NO: 568248 - DNA, 75 bp, Homo sapiens
agaaaccccgttgacaaggcactgctttttcatgacgttgttagagttggaagcttggcagttggcctcccttct

SEQ ID NO: 568249 - DNA, 100 bp, Homo sapiens
tcccgggtagctgggactacagatcacacaaaagttgggaagagaaggatgtcaattagactacatcaaaatctgggcagagggaggacaaagagctgcc

SEQ ID NO: 568250 - DNA, 75 bp, Homo sapiens
ggcggacgaccatttggtttggtcatcaatctgaactacaaagatttgaacgtgactttctgcagacttcggact

SEQ ID NO: 568251 - DNA, 75 bp, Homo sapiens
aggtatcctggcctgccgccctagccggcccaaggtgaagctttgttctaagaatatttgtttcatctagtttat

SEQ ID NO: 568252 - DNA, 98 bp, Homo sapiens
gaccccgcgcgggctggttcgggatgagcgatggcatcggtcaaggtggccgtgagggtccggcccatgaatcgcagatattaataaggcagcggaaa

SEQ ID NO: 568253 - DNA, 100 bp, Homo sapiens
cttgtgggcatgatccataatcggtttcaaggaggaagaacgtgcaaaacgtgaggagctagagcgaatactggaagagaataaccgaaaaattgcagaa

SEQ ID NO: 568254 - DNA, 75 bp, Homo sapiens
gttgccgggcgggacagtgattccagcccttcagggtggtgctggtgttgcgggaacgctggcatttctgccggg

SEQ ID NO: 568255 - DNA, 100 bp, Homo sapiens
tagcacgtggaattcgcgaagctgccaaagccttagacaagatgaaatctttgacatggtaaaaccaaaggatcctttgaaaatctctcttcaggattta

SEQ ID NO: 568256 - DNA, 50 bp, Homo sapiens
aatcccttcctgatactagaagtgaggtttcccacaagaaactggactgc

SEQ ID NO: 568257 - DNA, 82 bp, Homo sapiens
aataaccaggtgcttggcaaaatcgagcgggccattgcgtccagcctgcatgccgtgcggactgcacccaccagcaaggtga

SEQ ID NO: 568258 - DNA, 100 bp, Homo sapiens
attaaaacgagatgacagaagccaaagtaattatgatccagtttgctgaccagaagcaagaattcaacaaacgtcccaccaaaattggacgtcgctcttt

SEQ ID NO: 568259 - DNA, 82 bp, Homo sapiens
cctggtcctcgatccgcccacagacctcaaattcaaaggtacctgcaccagtcaggggccctgaccatggaggccctggagg

SEQ ID NO: 568260 - DNA, 90 bp, Homo sapiens
gctgtgtcgtagaaagctggcctattgaagcttcttccagaccagctggtcttgcttctggagcatctcttggagcagaagactctgagc

SEQ ID NO: 568261 - DNA, 95 bp, Homo sapiens
accaacccaccccacatggcccacgtacctcagggctagggcgagcaggtgccacggcggccgccagcgagatcaagcgggaggagaaggaggac

SEQ ID NO: 568262 - DNA, 83 bp, Homo sapiens
ggcccaggcgcacacggaagtggtgaaagacccctgacaaaagacaatcatcttctgggtacatttgatctgactggaattcc

SEQ ID NO: 568263 - DNA, 121 bp, Homo sapiens
gcaggagctgaagcaggacaacatagcggtgaaggcgaacgcggtctgcaagctgacgtatcgggctgacgcacgaggcacacaggaaggaggtggagcaggtgtatctgcgctgtgcggc

SEQ ID NO: 568264 - DNA, 74 bp, Homo sapiens
gcggcgtctgtctctgcggcttctggttctcacttgtcggcagccttaagtgccttgaaacaattttctgaaca

SEQ ID NO: 568265 - DNA, 100 bp, Homo sapiens
gaccactgaggatgtggagaaggccacagatttctctatgaatcatcatcaagaactctgggagaacttttgaattcataaccaagccaacatctccaga

SEQ ID NO: 568266 - DNA, 96 bp, Homo sapiens
aggaacccaacagagatctcttctgttctccactgctaggtttgtatgcagtgaaaatccgagctgaggccatgcaggaagcttcagaagctgtcc

SEQ ID NO: 568267 - DNA, 82 bp, Homo sapiens
gtctggagtgcgtgggggaccggctgttggcggcttgctgagcgagagcgagaagcggcccttcgtggaggaggcagagcgc

SEQ ID NO: 568268 - DNA, 100 bp, Homo sapiens
atgaacagacctagtgggcgttgcctttagacccagtggggtgctgacctacggactgaacatgaaaagtacctggtgaagcactgtggcaacatacctg

SEQ ID NO: 568269 - DNA, 100 bp, Homo sapiens
atatggtctcatgcgatacaaaaatacttggaaatcccactgaaagatttaaagactctttttgatcagaacaatgctgcaaaaaaagaagagtcagaaa

SEQ ID NO: 568270 - DNA, 97 bp, Homo sapiens
agaaggctccctatgaatctcttatcattgatgggctcagcagggagctgctggatgagaaagggcctgaagtcttgcaggactcactggatagatg

SEQ ID NO: 568271 - DNA, 90 bp, Homo sapiens
aggcagcgtgtgtcggtcgcctagtctggagaactagtcctcgactcacgatctttgatggaaaacagattccacagagaatggttgatg

SEQ ID NO: 568272 - DNA, 82 bp, Homo sapiens
cacagagactttcttcatgagattgaaacagcactgccagtgaaagatgtagaagataaacctgaacaacaaaccagaacaa

SEQ ID NO: 568273 - DNA, 82 bp, Homo sapiens
cgatttgaccaaatttctggaagagggggcagctggcattttatgctatgtgggagcctatgtcttcatcacttatgatgac

SEQ ID NO: 568274 - DNA, 85 bp, Homo sapiens
gatttgttaaggattccaagtaactcttatttgccccgtgatgtgaccaacttcaccgtgggtggctttgcgcctatgagtcccc

SEQ ID NO: 568275 - DNA, 100 bp, Homo sapiens
cgcgaatatcgtcatcgttagaagggcaccccggctctgccccagactggcataccaacagaggctttggtgaaggggtccatttcgagaatgcccattg

SEQ ID NO: 568276 - DNA, 96 bp, Homo sapiens
gtgcgcaagcgcaaccgtcggtgggtcggggatcggtcgcctgagaggccacaccatgaggccccagccccaccagaggccccgcgctgccctggc

SEQ ID NO: 568277 - DNA, 83 bp, Homo sapiens
ctgtcctcgtccgtctcatcaaaggcgctccaggcccctgcctgtcacgagaacatggtgaaggttggcggctacatccttgg

SEQ ID NO: 568278 - DNA, 51 bp, Homo sapiens
gctacatcaaggcctggcccccagcagaatttttggaaattcctcctttca

SEQ ID NO: 568279 - DNA, 90 bp, Homo sapiens
cttggaccccggcttctgggacgcgtcagactcttccagctggagttggaggctgacgccctagtgaatttccatcagtattcttcccag

SEQ ID NO: 568280 - DNA, 100 bp, Homo sapiens
ctcaggagcagccccatccgaggagtcctcttcccaggtgctgccctccagctcacaggttagctgctgaatcaaagcttcaaacagaagttaaagaagg

SEQ ID NO: 568281 - DNA, 50 bp, Homo sapiens
ctctatgagcttttgaaacttgttaaggggagttgctgagtcagcccaga

SEQ ID NO: 568282 - DNA, 100 bp, Homo sapiens
ggcagattgtctctggatctcgagataaaaccatcaagctatggaataccctgggtgtgtgcaaatacactgtccaggggatgaggccagaactgagaag

SEQ ID NO: 568283 - DNA, 100 bp, Homo sapiens
ctgaattttgcagctgcagaatgtgtagtaccttaaaagcctttgcttctacatactggaatgggacggttatgcacactggatgaatctgtctccctgg

SEQ ID NO: 568284 - DNA, 100 bp, Homo sapiens
aagaccatctacatctcccacaggaagtgtcacacagcagtcaagtatgtcccaaacgtctctcctgttcgacacagtggagaccatgggaaaagactat

SEQ ID NO: 568285 - DNA, 100 bp, Homo sapiens
ctccgtgcgtctgcccaccaaggactttgaggtggacctgctagaaaagaaatgttctttactaccatggaaagccaccttctgcgctgcaaagtgttag

SEQ ID NO: 568286 - DNA, 100 bp, Homo sapiens
ccggaaagctgcccagccaccagcaaccccccagaagcctccccagctttctgaggatgatatctggctaaaaagcgagggagacaactatagtgccacc

SEQ ID NO: 568287 - DNA, 100 bp, Homo sapiens
cagggaagttcgtggtggtcggcggcggcatcgcgggcgtcacttgtgcggagcaggagatatctgaagagattataggatcacccatcccagaacctag

SEQ ID NO: 568288 - DNA, 83 bp, Homo sapiens
cggcggctgatttagaaggaggttcaggctacgtcactgctgggctgaggtggccaatcatcacccaccacgtgttcctgact

SEQ ID NO: 568289 - DNA, 96 bp, Homo sapiens
cagtcaaagacagtagattatgaggattaaagcaaggagagccaatcatgactggcaaaacacagaccagcaacgtcaccaataagaatgacccca

SEQ ID NO: 568290 - DNA, 74 bp, Homo sapiens
ggactttgtaccatatcaggatatcaggatttaaaaactggaacggtgaaggtgacagcagtcggttggagcga

SEQ ID NO: 568291 - DNA, 75 bp, Homo sapiens
cagttcaggggctgggcggctgaggcagcagcggctcccctgttgtatggacattctgcacccgaaactgatagc

SEQ ID NO: 568292 - DNA, 74 bp, Homo sapiens
cagcaccctggggttgaggaactgccttgctctggtgctactgattgctcaagagaaggaaagaaacatatttg

SEQ ID NO: 568293 - DNA, 98 bp, Homo sapiens
atatccatgtcggcttgtagagagattgcaatccagtataaaatactcacgcagaaggaagatgattgtgacgagattcagtgccagttagcgattcc

SEQ ID NO: 568294 - DNA, 50 bp, Homo sapiens
cccaacttcactgctaacaacaggtttgtccagaggggttgcgtttatcc

SEQ ID NO: 568295 - DNA, 100 bp, Homo sapiens
acaatgttgcacttaactgatattcaggctggtctccaatttctggcctcaagtgatcctcctgccccagcctacgaagtagtcgtgattacagacatgc

SEQ ID NO: 568296 - DNA, 129 bp, Homo sapiens
aaagaactgctctccatggagagagtaactctgtccttattatcggaccccgaggatcaggaaaaactatgatgtacattgaagatgtcagtttctacatgtgggaagtagacattgaaggctttatgg

SEQ ID NO: 568297 - DNA, 75 bp, Homo sapiens
cccgccactacctcctggctgccgtgaataggcagcctaaaggatcactactcttggaatcaaagataaatccaa

SEQ ID NO: 568298 - DNA, 80 bp, Homo sapiens
cttttcaagtatgccaccaacagtgaagagatgacttcaaacctgcttctattgacacttcttctgaaggataccttgag

SEQ ID NO: 568299 - DNA, 82 bp, Homo sapiens
tttgctcagcgactgtttgatgacgtcccgcagcgccatcatgaccgggtcctataacaacttcttcaggatgtttgataga

SEQ ID NO: 568300 - DNA, 75 bp, Homo sapiens
ccatcaaaactgccttcagaagcaaaagggccaggaaggaatactgggagaatcttcggatagcctcaggccggc

SEQ ID NO: 568301 - DNA, 100 bp, Homo sapiens
ccgcgggctgcggacgctcggtcccgcgctgcgcatccccgcggacgccacagcgctgtttacccaaggtccagcctagcccctaggcaccatgtcggac

SEQ ID NO: 568302 - DNA, 99 bp, Homo sapiens
agactttttgatattcagagccttggaagtcaacactgtcaatatcaatgatgtcaaacggctgaaacctggctacttagaagctactgtggactggtt

SEQ ID NO: 568303 - DNA, 102 bp, Homo sapiens
caatggcacaaagttctctcgatcagggcatacatctttcttcgacaaagggtgtggacactgccagcggctgcagccgacttggaatgacctgggagacaa

SEQ ID NO: 568304 - DNA, 97 bp, Homo sapiens
tggagaaggagaacgacggctactttcggaaggtggcggcgactttgaataaccttgcagtcctttatggtaaaagagggaagtacaaagaagcaga

SEQ ID NO: 568305 - DNA, 75 bp, Homo sapiens
gagttcgtctcttacgtctgcggaagtgcagctgcctcagttcttagcgcaggtcaggaatatcccgctatagta

SEQ ID NO: 568306 - DNA, 100 bp, Homo sapiens
aggactgaggcagactccacggaatatattaaaggaatctgtgaacctgaactagaagaaagagaatgttaccccaaggacatgcactgcatttttgttg

SEQ ID NO: 568307 - DNA, 75 bp, Homo sapiens
caccgcgcccatggcagagccagaccagttgaagtattgataacaccaaggaactctatcacaatttgaaaagat

SEQ ID NO: 568308 - DNA, 100 bp, Homo sapiens
gaacttcgccttgttcttccagctggtagatgtgaacactggtgctgaactcactcctcaccagctgtcggaaaaggtaacagaagatggaactcgaaat

SEQ ID NO: 568309 - DNA, 100 bp, Homo sapiens
ctctcctctaccaaactcacccagaatggtgaggaaaatagcagctgaatactatgacaacctccctcactacaattcctggataaaagtactgtatgat

SEQ ID NO: 568310 - DNA, 100 bp, Homo sapiens
agctaagatgccaggaccccctgaaagcctagacatgctacatcaaatgggtctttggagggcctggataaccaggagggaggggtgtgccagacaagag

SEQ ID NO: 568311 - DNA, 51 bp, Homo sapiens
caacactggaaagcatactaaatgagtgcgaccaagaccagtgcattcaga

SEQ ID NO: 568312 - DNA, 89 bp, Homo sapiens
taagtaccgcaaaggagcatgtgaaaattgtggggccatgacacacaaaaagaaagactgctttgagatcttttatgacctagtgcggc

SEQ ID NO: 568313 - DNA, 101 bp, Homo sapiens
ggagcacgggcaaggcggagagtgacggagtcggcgagcccccgcggcgacaggcctttgaactggccacaggtgactatttgtttgaacctcattcaggg

SEQ ID NO: 568314 - DNA, 100 bp, Homo sapiens
cgtccggagctagctggatcctctaggcaggaccgcctgtactttgtgatggagtacgtgaatgggggcgacctcatgtatcacatccagcaagtcggcc

SEQ ID NO: 568315 - DNA, 74 bp, Homo sapiens
aagattgtcatagctgatgtcaagttggttgctgatttccaaaggttgaattctcttacccgcccctgattcca

SEQ ID NO: 568316 - DNA, 100 bp, Homo sapiens
ctatgtttacgcacagctgcctgtcaccccagatgtcctcatcatcccgtcagagctgaggtacttcgtgaagccttggggagcagtactacaaagatgc

SEQ ID NO: 568317 - DNA, 82 bp, Homo sapiens
ctacaaatacgcctccagtgtccgcagccctcatcctgccatacagcctctgcaggcaccccagcctgctgtccatgtgcag

SEQ ID NO: 568318 - DNA, 100 bp, Homo sapiens
tgccgccgccagggtctgcagggcctgggccgccgctgctacctgcagcgccgtgtggcacgacacaaaaatcaggcatgaatcatacaaaactcaatat

SEQ ID NO: 568319 - DNA, 98 bp, Homo sapiens
cagcggggacgcgaggacccgggctgggctttcctcacccggttggttgaatctggcgatgtggaacccatggatatggagggctgactatatacacc

SEQ ID NO: 568320 - DNA, 107 bp, Homo sapiens
ctgaacctttgctgtctatggatctgctctaaaccttatagcctgcttatgggggaagtggacagaggactgcagaaaatcaacctatcctccttcaggaccaacgt

SEQ ID NO: 568321 - DNA, 100 bp, Homo sapiens
agaggttagacttgtttcttatatgtgatgccattccagcactggactcatggaggctgagcatttattcagtctcacagaaagttctccgctcccagac

SEQ ID NO: 568322 - DNA, 50 bp, Homo sapiens
gggagcttccgggagggcggctcgcagccccgagcctggagatgaggggg

SEQ ID NO: 568323 - DNA, 96 bp, Homo sapiens
ccgccgtgcaggcggccgtcagcaacctcgtccgggactctacagtattggacctgcgagggattgggcaagtgttgccaacccatctgatggaag

SEQ ID NO: 568324 - DNA, 75 bp, Homo sapiens
tttcttctggtatctggctaaacaggatgaagttaaaggaagtagatcgtacagccatgcaggcatggagccctg

SEQ ID NO: 568325 - DNA, 83 bp, Homo sapiens
gggctgggaacccgcggtggagcgggacacgaacgtgacctcctgccccccgaggtctgcagtctcctgaacccagcagccat

SEQ ID NO: 568326 - DNA, 80 bp, Homo sapiens
tacctctcgcatgtccacctcacaggtttctctggaaacccccctggtaagtgtggaggaggcgggacactctgacccaa

SEQ ID NO: 568327 - DNA, 75 bp, Homo sapiens
cacgcctcgggaagcgcgcacctgccaagcagctggagctctcaaacactgctgtcctgcaccagatgcggcggg

SEQ ID NO: 568328 - DNA, 105 bp, Homo sapiens
gaccctggagcctcagttggaagcagccgatccagcctgcggagcctgtggggcaggtacactgaggaggggacggctccgtcttcacattgtgcacagatctga

SEQ ID NO: 568329 - DNA, 100 bp, Homo sapiens
ggcggcgggcgcgctgctgctggcgctgctgctgcacgggcggctgctggcggagtgggaatagctttgcgaaaaatgggcgcaatggccaagccagatt

SEQ ID NO: 568330 - DNA, 51 bp, Homo sapiens
ggtctatttcccagtgggtttctaaaccaatttgatgatcttatggcggag

SEQ ID NO: 568331 - DNA, 75 bp, Homo sapiens
ggaacccgaagaagaaaggattcgttacagccagagattggtaatagcctgcagctggtgttttgagaagcccta

SEQ ID NO: 568332 - DNA, 88 bp, Homo sapiens
gagcttccgggagggcggctcgcaggtagacgttacatccaagaggaaataatccaggcaaggaagcacaagctgatcaagatgtgta

SEQ ID NO: 568333 - DNA, 75 bp, Homo sapiens
aactgtcacaactcagccatcacacatcttgaaccttccaggaattggcagagggggtcgatttgggaggaaagg

SEQ ID NO: 568334 - DNA, 100 bp, Homo sapiens
gaatgacagcatctatgaggagctggtgctcaagaccgaatcggctgggcttttggcctaggattagaaaggctagccatgatcctctacgacatccctg

SEQ ID NO: 568335 - DNA, 102 bp, Homo sapiens
gggatttgggtcgcagttcttgtttgtggatcgctgtgatcgtcacttggggtgagcccctccagactccgaataggagatcaagagtttgattcattgcct

SEQ ID NO: 568336 - DNA, 83 bp, Homo sapiens
ctccagagggccatggccggccagggggactgctgcgtcaaggtggccgtcagctggtagcagtgtttgatgagcaggatcca

SEQ ID NO: 568337 - DNA, 82 bp, Homo sapiens
agcgcctttcggctctggcctgaagcagtactcccgcctcctggagcgggtttggtgcacctcgatttggaggaagtagggc

SEQ ID NO: 568338 - DNA, 83 bp, Homo sapiens
caaattgaaacaacagcaagctgcagttcgttccaccagtcataaaccagatgaaatctatggcatgattgaaagactatctc

SEQ ID NO: 568339 - DNA, 100 bp, Homo sapiens
gcgaatatcgtcatcgttagaaggaatctacggcggatccggaagtgtcaacgtggtcgagagcagcaggaaaaggaagggaaggaaggaaacagcaaga

SEQ ID NO: 568340 - DNA, 95 bp, Homo sapiens
cctggtcaagacctacccgcgcctggtgcgccagggttgccgaggtactgtctgaatgccgcctgctcgcctacatatcccaggtgcccacgcag

SEQ ID NO: 568341 - DNA, 73 bp, Homo sapiens
gggaacatccaaggcaagactggcacccagcacagcagagtttacagatgcttcctcagcaacggaaagccat

SEQ ID NO: 568342 - DNA, 75 bp, Homo sapiens
ggagtactggccaagtccaagtgtcctcgattaagagctcatgctgaagattcggttatggaccatcatttccgg

SEQ ID NO: 568343 - DNA, 60 bp, Homo sapiens
ctttcgccagcccgtgccgcgagcgcggcctgcaggagagagtcacaccccaaagcctct

SEQ ID NO: 568344 - DNA, 101 bp, Homo sapiens
cgttggttcccctctttgacctgcccacaactggagttttatataaagaagataattatgtcatcatgacaactgcacataaagaaaaatataaatgcata

SEQ ID NO: 568345 - DNA, 83 bp, Homo sapiens
gggactctggacgtgccagggtcagatctcgcctccgaggaagacaatgcagatcttcgtgaagactctgactggtaagacca

SEQ ID NO: 568346 - DNA, 82 bp, Homo sapiens
cgctgggagagaggtacctctccttttccctctccctttccctaagtgcagggctcgcggcctggcaagaatgtacagctga

SEQ ID NO: 568347 - DNA, 83 bp, Homo sapiens
gccgctggcagccgcggatctcaccgccgctcagggtctgagtgtacggtttgcagatatgcctggaaaatcaaggaagaaaa

SEQ ID NO: 568348 - DNA, 100 bp, Homo sapiens
caggtctggagctcgaccgggccaggttctgcacttttaaaagaaaagcaaaggcatcgattacataagttcttgtgtctcagagttggaaaaccaatga

SEQ ID NO: 568349 - DNA, 100 bp, Homo sapiens
agagcgtgaccgagagcgcgaatatcgtcatcgttagaagtgaatctacagacctattttctcaggagctcagcctggccttacttcagtgataaaagga

SEQ ID NO: 568350 - DNA, 98 bp, Homo sapiens
ttgaagctattcctttggccttacaagccatccttacccgacctgggatggagatcaccaaagatggcttccacctggttattgagctggaggacctg

SEQ ID NO: 568351 - DNA, 87 bp, Homo sapiens
cgcggctgtgcactcgtttgctttctccaacgactcacggaggatggctccaaccttcccattcttccccctcaaagggcgccaaat

SEQ ID NO: 568352 - DNA, 90 bp, Homo sapiens
aacagattcagaaggagcaggattaccaaaggcaggaagaagcagaatgggaaagcataaatgtgctattgatgatgcatggcttaaaac

SEQ ID NO: 568353 - DNA, 75 bp, Homo sapiens
aaacatcaagcagaatgtgatttgcttgaagatatgaggaaatgcttccagactgcacacttttacttagaggac

SEQ ID NO: 568354 - DNA, 90 bp, Homo sapiens
ccccaggttaccactaaaaatgccagttgctaggaagaggctcaatgtttgtgttttcaccagatcagtttcagagactgcttaaaatta

SEQ ID NO: 568355 - DNA, 80 bp, Homo sapiens
gccaaaggagccagcctggacgatctcattgacagctgcattcaatcttttgacacagataatgtacaagtggatagagc

SEQ ID NO: 568356 - DNA, 82 bp, Homo sapiens
tgaagatcctggtgtcgccatgggccgccgccccgcccgttgctgaaactagaggaccgttctgtggtgccccgagatgtgg

SEQ ID NO: 568357 - DNA, 50 bp, Homo sapiens
ggctgccctgtggcctcgctcctcggaggtttttacccacctcttgatga

SEQ ID NO: 568358 - DNA, 100 bp, Homo sapiens
ggaagctccatcaaaattgtcaggcatatcatcaaggttccgagaggaacccgtgcaatagttcggtgccgcgtgacctccggcggcccgccagcctcat

SEQ ID NO: 568359 - DNA, 51 bp, Homo sapiens
agtggtgttggtagtaaaatgagcagcccgacggccatggaggctgaagag

SEQ ID NO: 568360 - DNA, 83 bp, Homo sapiens
cccaggtgttgtgtgtgggggtgcagacaatgcagatcttcgtgaagactctgactggtaagaccatcaccctcgaggttgag

SEQ ID NO: 568361 - DNA, 90 bp, Homo sapiens
ttaaaacatttttcagggacgtagccatccagaggagtggaagctggacacactatgtgacttgtatgaaaccctgaccatcacccaggc

SEQ ID NO: 568362 - DNA, 100 bp, Homo sapiens
ctggtaggcacgggcggctccgcagtgaccggactcgggggagatgtgttcagagcaacattgttttgttgacacaagcatttagaagaaagtttgtgat

SEQ ID NO: 568363 - DNA, 75 bp, Homo sapiens
gaactcaaaagtcaaccgctgaagagcagtgtcccagaagcttttgttgacaattccagtttccgaacaaaacat

SEQ ID NO: 568364 - DNA, 100 bp, Homo sapiens
cttatctgcacaaaacatctagttgctgtcaaagggaaaaccccccaagtaggtgacagagtattggttgaagctacttataatcctaatatgcctttta

SEQ ID NO: 568365 - DNA, 75 bp, Homo sapiens
tttcacttctgagaaattcctggtcatggcttcagaggatgcaccctcatcacatgtgtggattctgggattctc

SEQ ID NO: 568366 - DNA, 100 bp, Homo sapiens
cttaaacagctaaaaagaacccacaaaaagctgaccattaacccctgtgaaatcagaagcacaagcctatgcagacgacaacagtttgctgttcatggag

SEQ ID NO: 568367 - DNA, 75 bp, Homo sapiens
aaactctggagtaattggagccaagaaatgagtataggttggagtgcaatggcgcgatctcggctgactgcaacc

SEQ ID NO: 568368 - DNA, 82 bp, Homo sapiens
gccaagcagccaaccatgctcaacttcggtgcctctctccagcagactgcggcattggaatggatacttgtgtcattccttt

SEQ ID NO: 568369 - DNA, 100 bp, Homo sapiens
gagaggaaaggctgcggcgcgcagagcgaggctgcgggaccccaggatgggggacaggaggctgcggggcctcagggtgtcagatgcctgatacattcaa

SEQ ID NO: 568370 - DNA, 82 bp, Homo sapiens
tcgcctgtctccgtcggaagggagcccaagctttgcagagtcgagcaaaagatgtgataataccagcaaagccacctgtcag

SEQ ID NO: 568371 - DNA, 80 bp, Homo sapiens
caagcctctacaggggcctcccgcgccccccgggacccccacgccgccgccagactgcttttggcttctggatgccctcc

SEQ ID NO: 568372 - DNA, 113 bp, Homo sapiens
agaattgagaatctggaactaatgtcacagcatggatgtaatgcctggaaagtatacaatgatctgatgaccgggattccaagcgggattcccttgaggagggggagctgaga

SEQ ID NO: 568373 - DNA, 90 bp, Homo sapiens
gaagtattctgatgtttcaggtctgcttgaaaaccagtagattcccagacatcgcgaagtgaatctgaaattgtgccaaaagttgctaaa

SEQ ID NO: 568374 - DNA, 98 bp, Homo sapiens
gcgaaggagcggaagaatggcagtgctcaaactcaccgaccagtgacaaccatgagtggaaaaaactaattatggttcagcactggcctgagacagta

SEQ ID NO: 568375 - DNA, 101 bp, Homo sapiens
tcttatccaaccttgcgctgcatccgctcgacctcgtgaagatccgcttcgccggtaccaggatcatctatgaccggaaattcctgatggagtgtcggaac

SEQ ID NO: 568376 - DNA, 98 bp, Homo sapiens
tacctcttctatgaagacatgaaggagtgtccccagttgtcctcatccagggtgctattcgagtccagcctgaagggccggctccctctctaccacgg

SEQ ID NO: 568377 - DNA, 50 bp, Homo sapiens
ctccagagcgacgggaaacgaaaggatggcacatttcctagaggcagaat

SEQ ID NO: 568378 - DNA, 74 bp, Homo sapiens
gctgggctaccctgctcactttggacagctgctggatacaattttcatggcaataggaactgaagtacttcaaa

SEQ ID NO: 568379 - DNA, 100 bp, Homo sapiens
ctgcctttcaaggtcatgatgttggattctgttgcctgggtaccaccagagggaaagctggggcggataattttcaggaagacccaatccagatgtctat

SEQ ID NO: 568380 - DNA, 75 bp, Homo sapiens
ttgcagatcgggagcgcaaggtcgccctcaaggccatgatcaaaacggtatctcccagagccccagctggtgtgg

SEQ ID NO: 568381 - DNA, 75 bp, Homo sapiens
attactatccagatggaaaggattttccaaagctattctcaagctggaataactgagactgaatggacaagtgga

SEQ ID NO: 568382 - DNA, 98 bp, Homo sapiens
cgggtggagctcagaccggtgggctagggatgatgcagtgtgtgattgcagtcgcggacaaagtattcgatgccttcctgaacatgatggcggataaa

SEQ ID NO: 568383 - DNA, 82 bp, Homo sapiens
ggaagctgccggcagccctgcggctacggagacaggtctgtttggcaccccactgctgaccagcctcccagagaaagtgtgc

SEQ ID NO: 568384 - DNA, 90 bp, Homo sapiens
ggaatatatcctgactgattatccatccttttacaatccctgctattattcgtccattcagcgtattgaactatgatccacctcaaaggg

SEQ ID NO: 568385 - DNA, 74 bp, Homo sapiens
cagggagcaagtctgcatcgcagaggccagggttaatttggagtggcccctggagtcagtttcctacaccatcc

SEQ ID NO: 568386 - DNA, 101 bp, Homo sapiens
gcttaggaccacccaccatgcctatccagggcagctgcaatgactctccgcacggtattattgtcattgcaagcactattggcagctgcagagccagatga

SEQ ID NO: 568387 - DNA, 100 bp, Homo sapiens
cgaagcagacaagaaccatcgcgatttaatattaaggaagagacaatgcagatcttcgtgaagactctgactggtaagaccatcaccctcgaggttgagc

SEQ ID NO: 568388 - DNA, 83 bp, Homo sapiens
cacaagaaggactgcggggacctggtggccatcggtgccatcgcctgcaggattctttattcagctctgacagtggcttcagc

SEQ ID NO: 568389 - DNA, 74 bp, Homo sapiens
atgagcacctcatacggctgcttctggagaagctgtccgcaggcttgtccaaaaggaaacatcggaatgaccac

SEQ ID NO: 568390 - DNA, 83 bp, Homo sapiens
agaagatcatcattaaggacggaggcacggccatactggagatgttactattcaaacacagatgcagtcatttatgtagtaga

SEQ ID NO: 568391 - DNA, 82 bp, Homo sapiens
cggctgggccggaagatcggcagcggctccttcggagacatctatctcggtgagaagccctaccactgcaactgggacggct

SEQ ID NO: 568392 - DNA, 100 bp, Homo sapiens
aggcgattggcatcgatctctccatcccttccgaggcccgacttcggcctacaagactatgaaagaggatgaaaaaagatacaatgaaagaatttcaggg

SEQ ID NO: 568393 - DNA, 98 bp, Homo sapiens
atcgtccccggcgagcagggagcggagtaccagcacttcatccagcagtgcacagggagatacttcaggggattaccggaagattctgctgaagatct

SEQ ID NO: 568394 - DNA, 75 bp, Homo sapiens
acaaagcagtggagaagctgggggcctatgagctgccgcagcaatggcgctgagttcctctgctggagttcatcc

SEQ ID NO: 568395 - DNA, 51 bp, Homo sapiens
gagctggatccggcttccggaagcacctggccacattcatcatggacaaga

SEQ ID NO: 568396 - DNA, 100 bp, Homo sapiens
cgtcaaagaattcaaatcccagctctttgtggagggcctggtacaagggaatgtcacaagcacagtagcagcactgtctggagatgcacgacggtgcctg

SEQ ID NO: 568397 - DNA, 50 bp, Homo sapiens
ctcgccatgtcctgctgcccgaaatgttcccactgccaggaggcaggcgc

SEQ ID NO: 568398 - DNA, 100 bp, Homo sapiens
ggttctggagtcaagtgatcataagctgaagaagaggtcagcaggcaagagaaatagccaagtatcttcaagaccttctcatggagagtgtgaatttttc

SEQ ID NO: 568399 - DNA, 75 bp, Homo sapiens
caaaaccgacctgaggtttcagagcgcagccatcggtgcgctgcagttatgaaactgggaccagaagctttcaga

SEQ ID NO: 568400 - DNA, 100 bp, Homo sapiens
tggttggctttgagatggatattactcacttggatggtcacaagcgttttgctgctgacatcatctccgttttggccatgaccatgagtggggagcgtga

SEQ ID NO: 568401 - DNA, 90 bp, Homo sapiens
ctactgatggtgctgtaaccacctcacagattccagcttcggaacaagagaccctggaaccaaccggtgagccctctcctaagagaccca

SEQ ID NO: 568402 - DNA, 129 bp, Homo sapiens
aaagcactttatcattatgcttcctcaagatcgaggggcttcaggacagtgaacatataaacctctcataatgaaggcccccgctgtgcttgcacctggcatcctcgtgctcctgtttaccttggtgca

SEQ ID NO: 568403 - DNA, 75 bp, Homo sapiens
tcctggcttccctctggatgctgacagaaacaaggatgtctttggtggacttgggaaagaggttgctagaagcag

SEQ ID NO: 568404 - DNA, 75 bp, Homo sapiens
tgagagcttacgtaaaagaacattacccgaatggagtctgcactgatatgctgcaggctgctagtcattatcgcc

SEQ ID NO: 568405 - DNA, 96 bp, Homo sapiens
tgccatctttgttgcagagaatcggggctattactgtgtttcgaccccaaaacttcaatcaatttttcatccagcctgaagaatggaaaggaggta

SEQ ID NO: 568406 - DNA, 50 bp, Homo sapiens
ggagacgccgccgctgcctcccgccttcagcgccagtcagcaaagtaaat

SEQ ID NO: 568407 - DNA, 100 bp, Homo sapiens
tttaatgaccacaacaagcaagcatgcagcttactgcttgaaagagctaatccagacagagctgcaccatgtgaggacactgaagatcatgacccgcctc

SEQ ID NO: 568408 - DNA, 76 bp, Homo sapiens
gcagccttcaccacaacattacaacatatctgaagagatggattaagaatgctttggattaaggattgtggagcac

SEQ ID NO: 568409 - DNA, 75 bp, Homo sapiens
acttgtacccttcttagagagatgtccaaaaacttccctacaataactgctttgtgtctgaaaaaagcagtgaga

SEQ ID NO: 568410 - DNA, 82 bp, Homo sapiens
ctctacttcaacccgcaccttgtgttccggaagttccagattgagtttgtgacgggcaccaaaaaaggcaccacgaccaacg

SEQ ID NO: 568411 - DNA, 98 bp, Homo sapiens
gtgccaaatacattgtcttaacttccaaacatcatgaaggaagtatactgaagatgcaagtttttttcatctggagttctgcctgaccaagaattaag

SEQ ID NO: 568412 - DNA, 100 bp, Homo sapiens
cctccacaaggtgatcatggttggcagcggaggcgttggcaagtcagccctgacgcttcagttcatgtatgacgagggtagatatggattcccagtttct

SEQ ID NO: 568413 - DNA, 97 bp, Homo sapiens
cgcgttgtgcgttcgacgacgcggcaccggcttcgacgccctctgcccgctccagaagcagggaggaggtacaggagaactgtgtgcggtggcgaaa

SEQ ID NO: 568414 - DNA, 88 bp, Homo sapiens
gggtgctgaatggcaatggcacaaagttctctcgatcagggcatacatctttcttcgacaaaggaaacctgtttggaggttatggatg

SEQ ID NO: 568415 - DNA, 75 bp, Homo sapiens
gcagcgggatcaagctgtgtgcattagtacaaatgagaccatggcgagcccagggaaagacaattatcgaatgaa

SEQ ID NO: 568416 - DNA, 75 bp, Homo sapiens
tggcggaggccttgctgatgaacctgactgagatcatggaagggaagtggttgctgtgtatgttactggtgcttg

SEQ ID NO: 568417 - DNA, 83 bp, Homo sapiens
cagctcccgaaagcgacgttcggccaccggaggagcgggagccaagcaggtttggtgcacctcgatttggaggaagtagggca

SEQ ID NO: 568418 - DNA, 100 bp, Homo sapiens
ggaatttgttacgcaagtatcgccatggcgacagattatgactgctggaaggagcacgaggaagcaatgggtatgctttttctcaagaagaacacggagc

SEQ ID NO: 568419 - DNA, 100 bp, Homo sapiens
ccagagattgctcaggaagcaatggaggttgtttacattcagagctctatcaataagaggaatacatattacagtgaattcgacaaccgcacaagttggc

SEQ ID NO: 568420 - DNA, 74 bp, Homo sapiens
ccggcctttgtctgcgggcacgcgccgctgcggccaagaagacgctggagggaggctgttaggagggactctga

SEQ ID NO: 568421 - DNA, 100 bp, Homo sapiens
gcagcagaacttcaacacagggatcaaggactttgacttctggctgtctgagttctacagcgagtcgggcatgcctaccaaacatctttcagacagtgtg

SEQ ID NO: 568422 - DNA, 119 bp, Homo sapiens
atttgacttggaagcaatgtttgaacaaactcgaagaacagctgtggaaagaagttgcaaaacactgggaattgaatgatctggcacgggaccctccagcacagtgttcagcaggtcct

SEQ ID NO: 568423 - DNA, 83 bp, Homo sapiens
tcaaggtatttcagagaaggaaaaggctgatctcccttgagtttagaaatctggctgagaaataccaaacagtgattgccgac

SEQ ID NO: 568424 - DNA, 102 bp, Homo sapiens
gttggcctgacaaattatgctgcagcatattgtactggcctgctgctggcccgcagggagacggtggctcagggagtaaaggaaggccagttgagcaaacag

SEQ ID NO: 568425 - DNA, 74 bp, Homo sapiens
gaccctgtcataaagaaaattgcccttcgggaaatccgaatgctcaaggcctatatgaacccaatagcaatggc

SEQ ID NO: 568426 - DNA, 82 bp, Homo sapiens
tgcagacttggccaaatggacgggactattaaggtgcgtgcaggagctgcggcaggggctgctggtgtggcagcaggaggag

SEQ ID NO: 568427 - DNA, 98 bp, Homo sapiens
acaagccccggagcgcggccgagcaccgcaaggatttctctctgatcaaacggacagttcaggactcagaatctaaggatgaatgttcaccgtggcag

SEQ ID NO: 568428 - DNA, 51 bp, Homo sapiens
agaagttggagatggaactacttcagtgaaagtgactgagaccgaagatga

SEQ ID NO: 568429 - DNA, 115 bp, Homo sapiens
gcctgctcagatcagagtctcacatggagtggacgtggggcggattcccagagtccaccaagagtctggtgctggcagaaagtagtcctggaagggatagtactgaatattttat

SEQ ID NO: 568430 - DNA, 100 bp, Homo sapiens
cacgttctgtgaagcttttggatcgtatccacaatcctggggatgtatggcattgagaatgaagtcttcctgagccttccatgtatcctcaatgcccggg

SEQ ID NO: 568431 - DNA, 90 bp, Homo sapiens
ggattggcatgctttagctatctgaacgaaacttccctttggggagttaagttttccagatcaatgtccgagttaccaccatggatgcag

SEQ ID NO: 568432 - DNA, 100 bp, Homo sapiens
cctcagggctcccagacctcaagctcctccagggtcttgttttgccacccaggctggagtgcagtaatataatcttggctcaccgcagcctcaacctcct

SEQ ID NO: 568433 - DNA, 100 bp, Homo sapiens
agctgaaacaatgggacccatgggttggcagtactacgagatgctttacaacacagctgacgagctcctgaacctggtggtggaccagggtgtgaagtac

SEQ ID NO: 568434 - DNA, 75 bp, Homo sapiens
cagcgactcatgagagcgcggccggaggacagatgatgataattccgaagaaggcttccacactattcattcagg

SEQ ID NO: 568435 - DNA, 74 bp, Homo sapiens
cttagtctagggactgaggagtcgccgccgccccgagtcccggcatgtcgggccccaggcctgtggtgctgagc

SEQ ID NO: 568436 - DNA, 75 bp, Homo sapiens
agctggaaaatgccgtctgaacgctgcctcagactgaaggggctggacttgctacctgtatagaactgtgtgtaa

SEQ ID NO: 568437 - DNA, 100 bp, Homo sapiens
caggaactctacaacccaatccagtgtctttggtgcaacactaacaaggcttgtctggactacccagttacaagcgtcttgccaccggcttccctttgta

SEQ ID NO: 568438 - DNA, 100 bp, Homo sapiens
gtgcgcacagtgctggtctgcctgacatatccggacaaaggacagagtctttgacagtatcagccacctcatcaaccaccacctagaaagcagcctgccc

SEQ ID NO: 568439 - DNA, 100 bp, Homo sapiens
ggacattgaagccatggatcctagcatcctgaagggagagcctgcgacagggaaaaggcagaagatcatggaagggaagtggttgctgtgtatgttactg

SEQ ID NO: 568440 - DNA, 98 bp, Homo sapiens
gaacagctttgagaagagcaaggaaggagggagccccaggaacaggagtcccaccgaagaactgctctctgacagaacagagacctcctcaccagggc

SEQ ID NO: 568441 - DNA, 100 bp, Homo sapiens
gctttagataaatttgaccatggctgtagaacccagcagctcagaatccattaaaaggagagctgggaggaggtgtcatggagaaactccagctgggccc

SEQ ID NO: 568442 - DNA, 75 bp, Homo sapiens
gagcttcttcatattaaagccttatcccatctttctaccacagtgaatgttggagacacagtcgcgatgctgccc

SEQ ID NO: 568443 - DNA, 98 bp, Homo sapiens
ttgggcttatcgaagtggtggctacaaaaaggccagagctgtgtttaaaaggttcggagatgatcgagacgcaggaggacatctacgtgggctccatt

SEQ ID NO: 568444 - DNA, 76 bp, Homo sapiens
gctgggccgcgaacacctcactattgatggtgtagcgctttaggggaagtttccaacatggctagatccatcagaa

SEQ ID NO: 568445 - DNA, 110 bp, Homo sapiens
gtagtcacaggaggtgtagagaggaccccgggacatctgaaagccaggaaatgggcagatgattctggaccagatgaagcctgaggagccttccagctctaagatagcag

SEQ ID NO: 568446 - DNA, 74 bp, Homo sapiens
gtttcaagctgctcaaaaactgggaggatatgaaacagttcagaattttcacagctgtattcaggtaactgaag

SEQ ID NO: 568447 - DNA, 100 bp, Homo sapiens
gactatttattcatgctcctctttaactggatttgcatcgtgatgtatgtccctgggaagctgcatgatgtggaacacgtgctcatcgatgtgggaactg

SEQ ID NO: 568448 - DNA, 111 bp, Homo sapiens
cgcccttccgcgaggcttcggccaagctaaccacgctggtggatgccgacgccgaggccttcaccgcctacctgggcagctggtggaatttttgaagaaaatggaatctcg

SEQ ID NO: 568449 - DNA, 106 bp, Homo sapiens
gtcctttgttttggattacataaaccagtcacccaagtgcattgcctttggaaacgaggacagtcattttgtttactcattcagccctgttgcaggtcccaataaa

SEQ ID NO: 568450 - DNA, 103 bp, Homo sapiens
tggccttagctgtgctcgcgctactctctctttctggcctggaggctatccagcctttctatgggaggattctcgtaacagcagcacaccaactgaaaagccc

SEQ ID NO: 568451 - DNA, 80 bp, Homo sapiens
tgctgatcacttggagtgctgtcccttggaacaggaggagtaagattgaggtgacacttggacagaaacactggcctatg

SEQ ID NO: 568452 - DNA, 103 bp, Homo sapiens
gcctcccgggtagctgggactacaggagccgggtgtgggctgagccctgcctgattgatgctgccaaggaggagtacaacggggtgatagaagaatttttggc

SEQ ID NO: 568453 - DNA, 74 bp, Homo sapiens
tagggctctgtgatgtaggcagaggttcatacgttttatgaagctgtggggtacatgattggtgcacaaacaga

SEQ ID NO: 568454 - DNA, 76 bp, Homo sapiens
aaacactgagcaaggcccagaatgttccctaaggcccaaccaaacagaagagacgctgaccggaaaggagattgag

SEQ ID NO: 568455 - DNA, 99 bp, Homo sapiens
accagattaaacaggctgtgaagaagctgtatgacattgatgtggccaaggtcaacaccctgattcgcctatatatgcaaacagatttgcagtaccaac

SEQ ID NO: 568456 - DNA, 75 bp, Homo sapiens
caaggtcgcctacgtgcagctggtctggtgtggcagatgtggatagctggaccctcctgggtgcctctgcgttat

SEQ ID NO: 568457 - DNA, 100 bp, Homo sapiens
agcgactacgcggccgcggagacctacctgcggcgtcggcagctgctgctccgagcaaatcagccggcaccaggagcagttcatccagatgctgaacgag

SEQ ID NO: 568458 - DNA, 100 bp, Homo sapiens
gtccgagccttcctgctcatctccaccctgaaggacaagcgcgggacccgctatgagagtaatcaagtcagaggattatatgacttttatctgcctagag

SEQ ID NO: 568459 - DNA, 76 bp, Homo sapiens
ggtagagaagaatgaacattgtattgagaacaatatagatttgcagacacctagctgttgggcagaagagggtgca

SEQ ID NO: 568460 - DNA, 73 bp, Homo sapiens
ctgcttcagtgtgaaaggccacgtgaagatgctgcggctgtagcacgatacaaccgcaccagctacttctacc

SEQ ID NO: 568461 - DNA, 100 bp, Homo sapiens
caggcatcagagatcatgagaggaaaatgctgtccagtggggtgtgtacatcaactgttcagcttcctgggaaagtagttgtggtcacaggagctaatac

SEQ ID NO: 568462 - DNA, 83 bp, Homo sapiens
gtggagcacctgaagagatgccagcaggccctgggaggagcggggacactgaggacctctctccaaattggcctctcaactca

SEQ ID NO: 568463 - DNA, 98 bp, Homo sapiens
ggccttcgtacccgtcttgattgagtaagactttgaccccgacgcaggcttcagtgattgccgcggatcagaagcctgagcactttggctcgagacaa

SEQ ID NO: 568464 - DNA, 82 bp, Homo sapiens
tcaaaagcgcactaaatcgtctccaaggtagctacagcaagctgggtagcaggcagatccaaaggatatcatgaagtttcca

SEQ ID NO: 568465 - DNA, 98 bp, Homo sapiens
gtcagcgatggtgcccggcgaggagaaccaactggtcccgaaagagtcctattttgtaacggattatgatccaaccattgaagattcttacacaaagc

SEQ ID NO: 568466 - DNA, 75 bp, Homo sapiens
tgggacttcccgtccgcggcgtggaggacgccatcctgggcctggaggaagtgcggctgacgccatccatgagga

SEQ ID NO: 568467 - DNA, 78 bp, Homo sapiens
ttttatacactcttagtgctgtccagatgccctccaaatccttggttatggaatatttggctcatcccagtacactcg

SEQ ID NO: 568468 - DNA, 96 bp, Homo sapiens
tggcgctttgctgtgaatctccgcggggaggctcttccaaccaggggctgagcttctgcgctgtggagaagccagtggcccgaacctgtaacttga

SEQ ID NO: 568469 - DNA, 100 bp, Homo sapiens
cgaggacatgttgacgtcgtccgagagtcttaaaatcctgctctggccggattccagactcgtgggggaaaggctgcgagaatataaaaagctctttgag

SEQ ID NO: 568470 - DNA, 80 bp, Homo sapiens
cgggtgtgtgctgcgttcacaggtgtttctgcggcagatcaatgtccgagttaccaccatggatgcagagctggagtttg

SEQ ID NO: 568471 - DNA, 100 bp, Homo sapiens
cgacgcgcctctccggttactaagcggccttggatacctggccgcgggatgctgggcggcgtcagaggctatcaactgcttaaatgcagccatcgacatt

SEQ ID NO: 568472 - DNA, 83 bp, Homo sapiens
ggccgtgcgggacgcgggcgccaggaccggccgaacgcagaggaattgcattttgtgaaaaaagaacaagaattttctgcaag

SEQ ID NO: 568473 - DNA, 75 bp, Homo sapiens
atgcatttatcaccttctgtggaaaggaagctgcacaggaagccgtgaaactgcccagaagaatcagtgcggttt

SEQ ID NO: 568474 - DNA, 100 bp, Homo sapiens
gacatctgacgacgtgaaggagcagatttacaaactggccaagaagggccttactccttcacagatcgaccaggtcatctggcttccgagatcatcagag

SEQ ID NO: 568475 - DNA, 78 bp, Homo sapiens
agagaagagcgagctgaggctggagctgagcagagggcagggaggttgaaaggattgttgacaaaaggaaaaataaaa

SEQ ID NO: 568476 - DNA, 50 bp, Homo sapiens
gacggagatggtgcagaagatggaggagtgcctccggagccagcgtggtg

SEQ ID NO: 568477 - DNA, 50 bp, Homo sapiens
gtctgcgagccaggattcccgaaaccaaggtgtatgttggtaacctggga

SEQ ID NO: 568478 - DNA, 98 bp, Homo sapiens
atgtcttaagacaagcttctaagaaactaattctgaagcaagcccttatagttgtgctgcagtggtgtttcaatcacaattttagtgttcgactgtat

SEQ ID NO: 568479 - DNA, 92 bp, Homo sapiens
cgacagtgccctgagggccttcgagagctaccgcgccagacagggcgaactttctgaccaagtatacaactacccagagggcctaggagaag

SEQ ID NO: 568480 - DNA, 100 bp, Homo sapiens
gcggagggagagcaggagccactgagatgaggaggcgtcgcgcgcgcctgtagctcgcgggcctcgcagagacagggcagggcattgttcatgcactgac

SEQ ID NO: 568481 - DNA, 100 bp, Homo sapiens
atgaagttgaggttcaggaaggattcctgagattccaggaggaagtactggcgaagtgctccatgatcagcaagttgctcggatggaaaaactagctggt

SEQ ID NO: 568482 - DNA, 100 bp, Homo sapiens
catcacattcccatgcatgcgttgcctgaagaaatccaaaaggatcttacacatttgttccatggcttctcagctttaaaaggggaagtgccctagaaga

SEQ ID NO: 568483 - DNA, 80 bp, Homo sapiens
cttgacgcgctggagcttgagaggtcctgctcaatctggaattttgtcagatcgtgaagtggtaaacctctttcttcatt

SEQ ID NO: 568484 - DNA, 78 bp, Homo sapiens
gaggaagtgctcctgctgggcctcaaggaccgcgagcctaccgtatgtgaacgggagctgtgtgtgtttgcttttcaa

SEQ ID NO: 568485 - DNA, 90 bp, Homo sapiens
cggccaaaagatgaagtatactccaaatactacacaccagttccctgcgagtctgctactgtgtctccagaacgctatagctatggcacc

SEQ ID NO: 568486 - DNA, 83 bp, Homo sapiens
ccaaggattggagcacagaggctcagaagcaagtccaggaacaagatcactcaaggtgaaggataatctactaataccagcac

SEQ ID NO: 568487 - DNA, 100 bp, Homo sapiens
ggacctcctagccagttacattccagaggatgaggcgctgatgcttcgggatggacggtgactctcctattccatctgtttcttcgggatcatcttcacc

SEQ ID NO: 568488 - DNA, 82 bp, Homo sapiens
tgcatgttcaagaagtggccggagagttctgcatgttgattcggggattcccgaagtcttccgttttctgagaatgtgagtg

SEQ ID NO: 568489 - DNA, 100 bp, Homo sapiens
cgccacctccatgttgaccaagcctctacaggggcctcccgcgccccccgggacccccacgccgccgccagccgcaggtggctgcgatgggacggaagcc

SEQ ID NO: 568490 - DNA, 99 bp, Homo sapiens
atgtctagacgtctcggccaaccaagttgcttttggtgtacagggtctgggatgggtgtacgaaggaagcaagattcagaatggacagtttagaagaac

SEQ ID NO: 568491 - DNA, 75 bp, Homo sapiens
aggttcacgccaacagtacctcattgctctttggcgactcttattgatttgtcccatcagatgaaaagaagaaac

SEQ ID NO: 568492 - DNA, 83 bp, Homo sapiens
cgcaaatgttggatcaggaggaggtcagcccaaggctgccccctcggtcactctgttcccgccctcctctgaggagcttcaag

SEQ ID NO: 568493 - DNA, 83 bp, Homo sapiens
tggctactctgcctcggggacgaaagcagaccaaactagagtcagaacgaatactagcatcagtggggaagaaacctccccag

SEQ ID NO: 568494 - DNA, 90 bp, Homo sapiens
tttcaaccataaagacatcttaattgggcacgaaagaggctggccagctaaactatgtggatccagctactggctatgtggtgctcacac

SEQ ID NO: 568495 - DNA, 51 bp, Homo sapiens
agtgtggagtaattgacactttcgagggctattgagtggccagacttcccc

SEQ ID NO: 568496 - DNA, 80 bp, Homo sapiens
gtcagatgaggcagaacttcttgttaggggtctgaaggggcgtctcgattacctgagctctctgaaggtgaagggccttg

SEQ ID NO: 568497 - DNA, 49 bp, Homo sapiens
ccccggggtgtggaacactgagcgagattctgccgttcctgtattgcta

SEQ ID NO: 568498 - DNA, 100 bp, Homo sapiens
taaagatcctatatcatctactgaaatctttaaagggttttgcactgattgcaaaaataaagtcctccgagcatacaatatccttattggtgaacttgac

SEQ ID NO: 568499 - DNA, 100 bp, Homo sapiens
cggccgaggctacagagccggcggcaggggatggcaagatagcggcgcgggagcgtaccccagagactgctgctactttgaaacgtacgatagaggccct

SEQ ID NO: 568500 - DNA, 82 bp, Homo sapiens
ccgcgggaatgtcgacgaggagctgagggcagctttggaagaagtagaaggtgatgtggcagaattggaactaaaacttgat

SEQ ID NO: 568501 - DNA, 80 bp, Homo sapiens
tgacagctgagctcgaggaacttggtgaacttcacggtagaccagatccgcgccatcatggacaagaaggccaacatccg

SEQ ID NO: 568502 - DNA, 50 bp, Homo sapiens
cgaggagcgggaagagttgctgggcttttctgggagaagaggctacaagg

SEQ ID NO: 568503 - DNA, 98 bp, Homo sapiens
gcatcacaagctcagcctggacagcaacaggttcctgcacacctccagaacagctgggagagttattatctagaaattttgatggtgactggtctgct

SEQ ID NO: 568504 - DNA, 50 bp, Homo sapiens
tcagccacagccttataaaagggaagagacggggtcttgctctgtcaccc

SEQ ID NO: 568505 - DNA, 96 bp, Homo sapiens
tgagactaagtttattcctccaaagcaaaccaactgagaatgcagtttgctgaggctaaacactatcatgccaagttggtgaatataagaaaagag

SEQ ID NO: 568506 - DNA, 98 bp, Homo sapiens
acccagcctgtttcacttcttggagctatgcctgttccagaccagccttcatcagcctcagagaagacgagttccctgagccccggcttaaacacctc

SEQ ID NO: 568507 - DNA, 98 bp, Homo sapiens
cgaggcccagactggtccatccccatcttggactttgtggaacagaaatgtgaagtaagactttgaccccgacgcaggcttcagtgattgccgcggat

SEQ ID NO: 568508 - DNA, 74 bp, Homo sapiens
gggctcaccaactacgagaaggccaccaatgccaatccctcccagctcttcggcctttccgttccgaacgtcca

SEQ ID NO: 568509 - DNA, 100 bp, Homo sapiens
tgctgatggtgatggagattttgatgtggatgatgccaaagttttattaggtattgaagcccctgggtgataatttgatggaggaaaacataaggcagtc

SEQ ID NO: 568510 - DNA, 50 bp, Homo sapiens
cgggcccagagctcctgtctctcaggtctggcgtgctcctgatcagagtt

SEQ ID NO: 568511 - DNA, 95 bp, Homo sapiens
cttcgtggctccacgacttactctctacccttggcagaggtaccgaaatgctacatttggctgtgttacattctagaaaactttgtgtctactct

SEQ ID NO: 568512 - DNA, 105 bp, Homo sapiens
aacaatcctaaaggaagatccagcaaatacggtttactccactgtggaaataccgaaaaaggactaagagcctctggaaaggactcagccccaacagtggtgtca

SEQ ID NO: 568513 - DNA, 100 bp, Homo sapiens
ctctccatggagagagtaactctgtccttattatcggaccccgaggatcaggaaaaactatggctacattattggaattttgaagtcatgaaaacatcag

SEQ ID NO: 568514 - DNA, 75 bp, Homo sapiens
ttagattgactgagaagaaagaatatgatgagaagaatagctgtgtgaagtttcccaggcagctgcagacttgaa

SEQ ID NO: 568515 - DNA, 125 bp, Homo sapiens
tctagatcgagcagatttcaatgctgttgagtatatcaataccctgttcccaaccgagcaaacataccagggtctagagagtctagaagaagtctgtgtatatcattctggagtacctattttcc

SEQ ID NO: 568516 - DNA, 51 bp, Homo sapiens
ctctgcgcctcacggccagatcccagttcttcctgtccaagatccggtccc

SEQ ID NO: 568517 - DNA, 82 bp, Homo sapiens
atttgatcctccatttgttcgagtggtgttacctgttctctcaggagggttggtcatcattttatccaagcttgactgtggt

SEQ ID NO: 568518 - DNA, 49 bp, Homo sapiens
tctggacaaaggaacaggtatctcagcaatcagccatgactgcctttgc

SEQ ID NO: 568519 - DNA, 115 bp, Homo sapiens
caccttcaagcctatgtcgtgaggctttggcagaaattaagaaggaaatatctccattgaatccagaaccctggctgaaattgcaaaagcagagctggacggcaccattctcaag

SEQ ID NO: 568520 - DNA, 98 bp, Homo sapiens
tggtggtgttgatcactcctcaggtgtccagcctgctcaggctgagctcattggaagtctcacccacaagctggagaccctccaggaggcgaagggga

SEQ ID NO: 568521 - DNA, 88 bp, Homo sapiens
agagccatccttcgggagaggatatgtagcgaggaggaacgcgctaaggcaaagcacctgtctcgaagatatgactccaggaccacta

SEQ ID NO: 568522 - DNA, 75 bp, Homo sapiens
gcgcgcgcaccatgggggagaaacccgggaccagggccggatcgtggcacccagaggctgccaggactttggctg

SEQ ID NO: 568523 - DNA, 75 bp, Homo sapiens
accccagggctgcctggtggctgagacacgccgctttttggatgcctcctatgcctggcgggagtcttgtctgag

SEQ ID NO: 568524 - DNA, 108 bp, Homo sapiens
ctcaggactggagtgcctcatgaactgttgaagcccagctcccgtggaagtcgctgaccagcatcattgagtactactacatgtggaagaccaccgacagatacgtgc

SEQ ID NO: 568525 - DNA, 75 bp, Homo sapiens
aagacagagggttttcttttgagattagaagcccaggacccaggaaggagacacaggaaatttattcaaagtccc

SEQ ID NO: 568526 - DNA, 100 bp, Homo sapiens
aaggacccccagcggtgcacgctgctggtcagccagttccgctcctgtcagggacctctactcacggttttctgaatggaaatcaggaacaaactgctca

SEQ ID NO: 568527 - DNA, 96 bp, Homo sapiens
caaacacgattgttgtttcttggactgcagaaattggaagagactcctctgatgatggcctgcacaaggaagaacctgggggtgatccaggagctg

SEQ ID NO: 568528 - DNA, 75 bp, Homo sapiens
aaaaaaatagactaatggattaacgtccctgtcgtgtgacattttctgctccctgtgctgtcaggaatctacagg

SEQ ID NO: 568529 - DNA, 100 bp, Homo sapiens
gaactgctgacgcggctaaagcagattggagctctgcagtaaccacagaattaaacaaccaccatgtcgagcaaaaaggcaaagaccaagaccaccaaga

SEQ ID NO: 568530 - DNA, 90 bp, Homo sapiens
ctgttccaccttcagagcgtcacggcgtacgccctcatggggaaaatctccccggtgactttcagcaaagccttctagacaagctcagtg

SEQ ID NO: 568531 - DNA, 100 bp, Homo sapiens
gccgtgcagcacatgcaccggcagaagccgcccatcatccacagggacctcaagggggtccactggacggggcctgagctacaacttcacccacctggac

SEQ ID NO: 568532 - DNA, 83 bp, Homo sapiens
gaatagtggacgaactgcacgtgtacaacacgggtgagaagccctaccactgcaactgggacggctgcggctggaagtttgcg

SEQ ID NO: 568533 - DNA, 100 bp, Homo sapiens
cagcagtcaagatgaaaccaaaaaacttcttcatgatcatgaacttcttttggccaagctcaagaatgttattccctgaagcgcagcgcttggaaagcac

SEQ ID NO: 568534 - DNA, 108 bp, Homo sapiens
cggggcctagcgctatgcctgcggcggagactgcatcaggctctcgacttcccaagtaagaagcggaagaggagccgctggaaccaagacacaatggaacagaagaca

SEQ ID NO: 568535 - DNA, 88 bp, Homo sapiens
catcagctgggccaagagcatcccaggaaggtgaagcagatgcaccttaacttcatggatgaaaaggatcggatcatcacagccttct

SEQ ID NO: 568536 - DNA, 82 bp, Homo sapiens
gggcagatcgccggcaccacgagagcccggcccgcctgtgtggacgctggtactcctggttaatcaacagcttcgtcaacgg

SEQ ID NO: 568537 - DNA, 50 bp, Homo sapiens
gcgacggcggcctacgagcagctgaagcttgtgcccagctggctggaaac

SEQ ID NO: 568538 - DNA, 83 bp, Homo sapiens
ccgagacggcgatccgggcgctcgagacttaccagagccacaagtcgtgagatggagaataaagaaactctcaaagggttgca

SEQ ID NO: 568539 - DNA, 100 bp, Homo sapiens
ggccaagccaggccacgtgtcgcccctccagctgaccaacatccaagtgccccagcaggtcctccacttcttccaccttggctacccctgagatagcaag

SEQ ID NO: 568540 - DNA, 83 bp, Homo sapiens
gcgggaggtgttcgagaacgaccccgagacggtatggtttaggaatgatttattacaagcaagaaaaattcagccttgcagaa

SEQ ID NO: 568541 - DNA, 76 bp, Homo sapiens
cccgggacctgggctgggaacccgcggtggagcgggacacgaacgtgatcaatgagctgagcaatgttcctgttcc

SEQ ID NO: 568542 - DNA, 101 bp, Homo sapiens
cgggccctctgcgacctggggccctgggtgaagtgctccgccgcccttgcctccaggtcacgagaagagaatgccttctagatgcaaaatcacctccaaac

SEQ ID NO: 568543 - DNA, 100 bp, Homo sapiens
aaaagactttatggctaaaaggcttaacccaggcatttggagggtttctcatttggcctgagtcatcctttttgaacttccatgactcagactgcgaacc

SEQ ID NO: 568544 - DNA, 100 bp, Homo sapiens
ctctgcccgcggtcctcgctctcgggcggggcggcggcgacgcggacctgcggactagcgaacccggagctaggtcttgactccactaacggggacttct

SEQ ID NO: 568545 - DNA, 99 bp, Homo sapiens
ttttgctgacgtgtcatttctaagtactttctcctactccataaagacttcaatgagaactcaacagaggcaaaagcagtagattctaacaatcagtcg

SEQ ID NO: 568546 - DNA, 100 bp, Homo sapiens
aagtggaccagatgttggatatgggatttgctgatcaagtggaagagattttaagtgtggcatacaagaaagttctctacagaaagaaccaatgaaccca

SEQ ID NO: 568547 - DNA, 93 bp, Homo sapiens
caggtttagaaaatggaatcctcctctgcgacaattcatgatgaccaataaactggacacggcaatgtggctttctcgcttgttcacagttta

SEQ ID NO: 568548 - DNA, 74 bp, Homo sapiens
ttcgagcagctcatgaccgacctcaccctgtcgcggacacgatgaggcgagtggtacgacagagcaagtttcgg

SEQ ID NO: 568549 - DNA, 90 bp, Homo sapiens
gcaggagcgattccgtcgccaaacagctcttggataagcacaagaatacagagagcatggtggagcttctggacttgtatcagatggagg

SEQ ID NO: 568550 - DNA, 98 bp, Homo sapiens
ttctctaggccttttagaaaacatggttggtggagtccacattcaaactggtattgactgcgaacctctacttttaaatgttcttcatctagacacaa

SEQ ID NO: 568551 - DNA, 78 bp, Homo sapiens
tgacctgccccttgtcctggccccgggcgccctgcgtccggcagaggaggcgagcatcccgctcaggtgatgaggaac

SEQ ID NO: 568552 - DNA, 97 bp, Homo sapiens
tgctaatttgggaaaaagctccaggattctgacagggatgttgcgaaggcaggtgacaaacattaccaccccagctgtgcacgatgcagcagatgca

SEQ ID NO: 568553 - DNA, 97 bp, Homo sapiens
agtgacagccagtgagaagaatgagtataaaggatgggttttaactacagacccagtctctgccaatccgcttccggacaacaacagggcttgattc

SEQ ID NO: 568554 - DNA, 98 bp, Homo sapiens
gggtcctaaaacaggatcagtaaagaaggaaaaagcagtaaagccagaggaagtggactcccgaaaaattgaccaggaagggaaaatcccagatgaaa

SEQ ID NO: 568555 - DNA, 100 bp, Homo sapiens
gcacggggcactgagccgggtgctgagcaccggaggccccgccgaggccgggactcagctggtagcagtgtttgatgagcaggatccacatcacggaggt

SEQ ID NO: 568556 - DNA, 100 bp, Homo sapiens
aggaacctgcttttcccaagaggagagaatggctgctgggtacctgccccgctggtcccagaaaaacctaagctgccttcactatgcagccctcagtggc

SEQ ID NO: 568557 - DNA, 98 bp, Homo sapiens
acgatgactgttgaactggaaaaactgaaaactcctccttaacttggtagatcatactgaagtggtcagagatttaacttttgctccagatggaagct

SEQ ID NO: 568558 - DNA, 75 bp, Homo sapiens
catgactttatacaggaatcggaggaggcgaggagaattttttgaacttataagaaaaaatcaattcaatttgga

SEQ ID NO: 568559 - DNA, 100 bp, Homo sapiens
cctgcttttcggttccgggtcttggccccgtccttacctcacagatgatgctgtgtatctggacaatgagaaagaaagagaagagtatgtcctgaatgac

SEQ ID NO: 568560 - DNA, 87 bp, Homo sapiens
cacagcgaaacgccgcgcactcggagccggcacggctcggcggtttggtgcacctcgatttggaggaagtagggcagggcccttatc

SEQ ID NO: 568561 - DNA, 83 bp, Homo sapiens
gcctacacttgcctatccagaaagcaacagcagaggataaaagaatcagagtgtctcaacccttgacaagaggaccaagtgcc

SEQ ID NO: 568562 - DNA, 81 bp, Homo sapiens
tgaaagtgaaaatgttagaagaactcgtgagccggattgatggtactccaaagattcaggtttactcacgtcatccagcag

SEQ ID NO: 568563 - DNA, 100 bp, Homo sapiens
gggagggtggttaccgctgaggagctgcagtctctgtcaagattgggaaaatgaggtacgttagtgttcgcgattttaaaggcaaagtgctaattgatat

SEQ ID NO: 568564 - DNA, 100 bp, Homo sapiens
ctggtaagggaggcgtcgctgattccagagagctaaagccgatggttcctgatatggcaggctatcctcacatccgttacatttcatcaggattggatgg

SEQ ID NO: 568565 - DNA, 75 bp, Homo sapiens
cttggacaacatgtcccaacattacatcccaatcctccaggtcctattgacaatactaagattgcagtcactaaa

SEQ ID NO: 568566 - DNA, 75 bp, Homo sapiens
ggatgagcctgcagagcgcgcagtacctccgactattgcccagaagaaaagatgtttggttttcacaagccaaag

SEQ ID NO: 568567 - DNA, 74 bp, Homo sapiens
cgtggggtggtgcacacagaacaacaaggtgttgatgccgccggacgagttgctggagaatgtaaccctaatcc

SEQ ID NO: 568568 - DNA, 75 bp, Homo sapiens
ccggactgggaagatggacgcagtttattctccagatatgccttcacggcttccaattcaagacatatttgctgg

SEQ ID NO: 568569 - DNA, 100 bp, Homo sapiens
tgattacttgatgacttgggttcaggaccagttggatgatgagacgttatttccatcaaaaattggtgctcgcatttggcttttcgttggtttcatgttg

SEQ ID NO: 568570 - DNA, 90 bp, Homo sapiens
cattcctgcagatgaaaaagtgtgacttggcagctggaggagatcgacgtgtggaccgaggagcggaagggcaccctcaaccgcgacctg

SEQ ID NO: 568571 - DNA, 83 bp, Homo sapiens
cttcggcagtccacccaccgccgccgcctcccagaaggaacccagccagccggcggaatgcaagcagcagtaggaagcggagg

SEQ ID NO: 568572 - DNA, 73 bp, Homo sapiens
ccagcgagccgagtggccttggctggggagtatggagcagtcacttacaggttcgttccaccagtcataaacc

SEQ ID NO: 568573 - DNA, 80 bp, Homo sapiens
acgtgccagatggtgttacctggagcttaaaaagctgcacgcaagtgttaaacttctgatggcccactgcgtgaccttgg

SEQ ID NO: 568574 - DNA, 75 bp, Homo sapiens
caagacttgactgtaactggaacagaacctggtcaggtacatcaggaacgtctctatcaagaatacaatttcagc

SEQ ID NO: 568575 - DNA, 75 bp, Homo sapiens
cgacgtgtacctggacatcaccgatctccagcaccctgccggtggcactactgagagacgaggtgccagggtggt

SEQ ID NO: 568576 - DNA, 50 bp, Homo sapiens
cggctattgtggaaatattctccaagtgaaaccagcccagagaagttacg

SEQ ID NO: 568577 - DNA, 75 bp, Homo sapiens
cagaacaaagcattgccagaaaacgttaaggatgggagcaaagtgtttacggcatcgtgtgataaaactgccaaa

SEQ ID NO: 568578 - DNA, 100 bp, Homo sapiens
cactctcaacagcatggatgccactagtgagcgggactttgtgggcctctaagaaatatgtctccaaagaacttgccaaagagattcgtgtcaaagcaga

SEQ ID NO: 568579 - DNA, 82 bp, Homo sapiens
gctgccgcacctccgtagctgactcggttgtgaccgagattcccgacgagagagactgaggggaagagaggaaggaggggcg

SEQ ID NO: 568580 - DNA, 51 bp, Homo sapiens
ccagccctgcctctccctgggctctggtacgtgaacacactcctgaaactc

SEQ ID NO: 568581 - DNA, 85 bp, Homo sapiens
tcatcggaaacatggcactgttgcctatcagaagtcaattcaaaggacctgcccccagagagagcaggatgacgcaaaacacggt

SEQ ID NO: 568582 - DNA, 100 bp, Homo sapiens
actgagcgggacctgcgagcagcgcgggcggcagcccgggggaagcggaggaaatctctgacatcaaagaggaggggaacctagaagctgtcttgaatgc

SEQ ID NO: 568583 - DNA, 99 bp, Homo sapiens
attgaagaaatccacagtgtgagtgccaagaacagggcagtgtctatcgagaatgagaagactttgggacatttcatgagtcattcaagcaacatttct

SEQ ID NO: 568584 - DNA, 76 bp, Homo sapiens
cctcgggcacctccggtaccgctgcagccaccgcggcccccgcggtcactcagcctctgaagaagcttcgggttca

SEQ ID NO: 568585 - DNA, 83 bp, Homo sapiens
ttttgaagtcatttcacatcgaagccatgatttaaatatcggcgttaaggggacttgtctttgacacactgtatggaaatctt

SEQ ID NO: 568586 - DNA, 100 bp, Homo sapiens
gcggtgtttgaggaggttctggatttggtggacgccgtcatccttacggaaaaggccaagtataaggagcgagggacggtcttggctgaggaccagctag

SEQ ID NO: 568587 - DNA, 50 bp, Homo sapiens
cttcaggttcccgcgggaccctgccagtgtggtacaggtcctgcttgctg

SEQ ID NO: 568588 - DNA, 82 bp, Homo sapiens
gcagatcctgagacccggacagtggcagtgaaacaggattttttatcaagcagaaatgcatcgaacaacgagaatcaagatc

SEQ ID NO: 568589 - DNA, 74 bp, Homo sapiens
acgaatgttaaaagacaacaaaaagaattggagaagagtttataagggtgtgtttgaccatcgaatgaagtgct

SEQ ID NO: 568590 - DNA, 100 bp, Homo sapiens
gccaaagctgcagggccactgcaagtctataaagaacacgctcaggaggttacaggaaatacaggaggcagaggaacaaataaaagacaccacgagaaac

SEQ ID NO: 568591 - DNA, 82 bp, Homo sapiens
agggaagcgtctccgttgggtccggccgctctgcgggactctgaggaaaagctcgcaccagcaaaatgatgcttcaacaccc

SEQ ID NO: 568592 - DNA, 96 bp, Homo sapiens
aaaaatgtggtcagtgaacctatcgaaggacatgaagactaccacatgatgaattcaattcgtcataatctgtccctacacagcaagttcattcgt

SEQ ID NO: 568593 - DNA, 100 bp, Homo sapiens
gctcggcgcagctgttgcggggccatggcggggaccgcgctcaagaggctgatggccgagtacaaacgatgacccctccggcgaaggtgtcctgccctcg

SEQ ID NO: 568594 - DNA, 76 bp, Homo sapiens
ggtggagacatcccatgaggatctgcccgcttcccaggaaaggtccgagcaatcaaggagaccgcgaaggcgtaca

SEQ ID NO: 568595 - DNA, 75 bp, Homo sapiens
agcatccagaggccctgagcagctttcagcactggagggagaagaaatgggtgaccgttggtgacacatccctac

SEQ ID NO: 568596 - DNA, 83 bp, Homo sapiens
gccagctgccatgagcgagcgcctccgtcccaggtgtcgtgaaaactacccctaaaagccaaaatgggaaaggaaaagactca

SEQ ID NO: 568597 - DNA, 98 bp, Homo sapiens
tcgccccgccgcgccgcgctccaaccgcctcctcctcctcagtaacgcgggacccttgaacatctgtgaagaaatgactattctgcatggaggcttct

SEQ ID NO: 568598 - DNA, 96 bp, Homo sapiens
tgccagatccgctgatctagtgcttctcgaaaaaaaccttcaggcggcccatgggttaacacagaaatctgcctcctgggccatgccgcttctaag

SEQ ID NO: 568599 - DNA, 100 bp, Homo sapiens
aggcccgaggcccctatggcagatttgaaaattcacccttgtagagtcattcctgcctttgagcggactcccttttaagccaacaaatggaattttcttg

SEQ ID NO: 568600 - DNA, 75 bp, Homo sapiens
aacccggacctcctacgtcacatgcccactgacagaggggtgggagaccagttaccggtattgtaagaacaagcc

SEQ ID NO: 568601 - DNA, 100 bp, Homo sapiens
agtcagacaaggactctggcttttcagggcatggtgctgatgtgaaatgtgtagactggcatccaaccaaagggttagttgtttcaggaagtaaagatag

SEQ ID NO: 568602 - DNA, 100 bp, Homo sapiens
ttaaggatgtactgctcccatggtacaatgcctatcgcttcttaatccagaacgttctgaggctccagaagacatggacgtctcgctgcctaatgaagtt

SEQ ID NO: 568603 - DNA, 100 bp, Homo sapiens
ggcccggtgaaactgaacttataatcgtcactggattcccttctgcagaggccgggctggaggagaagatggcggccaagcagcccccgcctctgatgaa

SEQ ID NO: 568604 - DNA, 100 bp, Homo sapiens
ggatctggcactgtggttcctgcatgaagacagtggctggcggtgcctggacgtacaaggtggtagatctctgtagaaatgtaaaagaaagaataacaag

SEQ ID NO: 568605 - DNA, 100 bp, Homo sapiens
ttcccctgaagacacctggttaattcacttgcaacctgtttccagatttgccagcaggacagctcttgatttgaaagagatggagtctccctatgttgcc

SEQ ID NO: 568606 - DNA, 98 bp, Homo sapiens
ccgagagccggaggcaatggatgaacagagcgtggaggtatcgtcagatcctggaaaaagccattcagttatctggagcagaacaactagaagctttg

SEQ ID NO: 568607 - DNA, 121 bp, Homo sapiens
tggcaattcaccgaattcgaatcaccctaacaagccgcaacgtaaaatccttggaaaaggggcagagcggcttgggtaaatccaccttaatcaacaccctcttcaaatccaaaatcagccg

SEQ ID NO: 568608 - DNA, 100 bp, Homo sapiens
taactcctgcagagctcattgaaagattggagcaggaacgagggggaataatgtcactcacggaggtgtactgcttagtaaaccgagctcgaggaatgga

SEQ ID NO: 568609 - DNA, 100 bp, Homo sapiens
cgtgtaaaaagaactcttaacggccgatgcagctcttccaaagctaagacctgcctagagctggaacgttacctccagagcgagccctgctatgtttcag

SEQ ID NO: 568610 - DNA, 83 bp, Homo sapiens
gccttcctcaacgacgcggacatggtcatgagctttgtgaacctgggttgattgtacacagcactatgaactctgctccggaa

SEQ ID NO: 568611 - DNA, 90 bp, Homo sapiens
tcacctgagactgctccagaagtggagaccagcagaactccaccaggcttcaacggaccacaccaaaatgccatctcaaatggaacacgc

SEQ ID NO: 568612 - DNA, 148 bp, Homo sapiens
gtggttggggctgtgggacttcgaaggagggctctcctgtctgccaccatcctgggttgacaattctacacaaggagagttacatccatatgggagaatagtctccagatcactacaatttctagctttgtaggagcatggcttggag

SEQ ID NO: 568613 - DNA, 50 bp, Homo sapiens
gttggctgcaggagcagctagcacagatatatttttgccatcatggatca

SEQ ID NO: 568614 - DNA, 98 bp, Homo sapiens
cgccccgcgcccccgccgcgccctcagggccatgaagcccccaggaggagaatcgagcaatctttttggaagtccagaagaagctactccttccagca

SEQ ID NO: 568615 - DNA, 75 bp, Homo sapiens
tttggaattccattcttttccttattcttctgatgtggatccaggggttataatgagaagaaactaacagacaat

SEQ ID NO: 568616 - DNA, 119 bp, Homo sapiens
gtgggcgtccgcaagaccgggcagatctggcccaacgatggcgagggcgccttccatggagacgcaggtggcccagagtggcgagatccccccatcttgctgcaacttccccgtggctg

SEQ ID NO: 568617 - DNA, 76 bp, Homo sapiens
tcagcaagctcgagttaaagttggatgtgctggaacaggttcaaaccttgtactactcagctgatcacaagctgct

SEQ ID NO: 568618 - DNA, 75 bp, Homo sapiens
atttcctcgtcgagcgcaacccaaggacatgtattcctctgagaaaccttggacagcagattttggtttaatatc

SEQ ID NO: 568619 - DNA, 100 bp, Homo sapiens
cccgcatcaagaaaatctccatcgaagggaacatcgatccctaaagaagtggctgacatctttaacgcccccagtgatgatgaagagtttgttggcttcc

SEQ ID NO: 568620 - DNA, 100 bp, Homo sapiens
aagatgtcatgatggagaattatggaaacctggtctcactggggttttgtctccacaattatccgtttacttgacagcccctcaacatgcattagagcaa

SEQ ID NO: 568621 - DNA, 83 bp, Homo sapiens
gcccgtgccgcgagcgcggcctgcaggaggtactaccgtggtgcagtgggcgccctgctggtgtacgacatcgccaagcacct

SEQ ID NO: 568622 - DNA, 87 bp, Homo sapiens
aagctgtcctaggccaaccagagattcatctttcatgcagtgacatgttgataaaaaatgatggagcttactccacgggaacagcct

SEQ ID NO: 568623 - DNA, 101 bp, Homo sapiens
cgtaatcctggatcaacaaatcacataccttttctggaggaatcaccttgtggaagccaaatagctggaagtcgagtgtgctactcaactcaggagatttg

SEQ ID NO: 568624 - DNA, 100 bp, Homo sapiens
attttgaagttattggaagataaaaatggagaggtacagaatttagctgtcaaatgaaaaagcttgtggtgaaggggggcaaaaaaaagaagcaagttct

SEQ ID NO: 568625 - DNA, 90 bp, Homo sapiens
tacatgagacagcagccaaacccccagggagttctgggaaatcgttcattcatttacagatgaacagaaaagactcttcttgcagtttac

SEQ ID NO: 568626 - DNA, 74 bp, Homo sapiens
atggtttcaagggacgtaccaggaggatggtgcccaggaggatggactcagacaagttctggaggagatgaaag

SEQ ID NO: 568627 - DNA, 100 bp, Homo sapiens
tggaaatcctaatgacagtctccaaattcgcctccatctgtaccatgaacagtgcaaccctgaaactcgtcctgttgagaaaaaaataagatcagctctt

SEQ ID NO: 568628 - DNA, 128 bp, Homo sapiens
agccaatgatgatggctgccagacagctccatgatgaagctcgcaaatggtccagcaagagcccccctccatgcgcctgaaggcccgacccagcagccctggcttttccgtgcttacctgcagcgcct

SEQ ID NO: 568629 - DNA, 83 bp, Homo sapiens
gagagaacatagacctttcaaagattccaaacagacaatgcagatcttcgtgaagactctgactggtaagaccatcaccctcg

SEQ ID NO: 568630 - DNA, 51 bp, Homo sapiens
gtctgggccagccacctggtgtccggtgcagcttcaagcttaggaccaccc

SEQ ID NO: 568631 - DNA, 108 bp, Homo sapiens
ggccgactccaccctggctggaggaactgggtgctcctgcccgctggcccctcgcgcgtgaggatctatctcagctgcagaaccttggcctgaaaatgctacattata

SEQ ID NO: 568632 - DNA, 87 bp, Homo sapiens
aaagaccgctttccatggagagtaaaggccggctggaaagtccccaagcggcccagcttcccgatcagtggagacgttgaaggagat

SEQ ID NO: 568633 - DNA, 102 bp, Homo sapiens
gtcagggtcaagtcgtgttctgatcactactgacttgttgggtggctttgtccactatggtgaagtgaccaatgactttgtcatgctgaaaggctgtgtggt

SEQ ID NO: 568634 - DNA, 95 bp, Homo sapiens
agagatggaggaaaaggagaattgtcacctggagcagcgacaggttaagactggcataaggtcccagctggtgatatgaagaggtggctacaact

SEQ ID NO: 568635 - DNA, 90 bp, Homo sapiens
ctgcatcaagaaacccaagctgctgagagattgccttgcaacaggtttccatgttcttccgatcagaaccaaagtgggaggtggtggaac

SEQ ID NO: 568636 - DNA, 90 bp, Homo sapiens
cataatctgtcattgaacaaatgtttccttaaagtgcctcgatctaaggatgaccctggaaaggtcaaggctaatgtcttctgaagactt

SEQ ID NO: 568637 - DNA, 83 bp, Homo sapiens
ggttattcgagtgaccgagaccgcggccgggaccgagggtggctttgtacaagtcagtgccaacgcgcttgctgtcacgggcc

SEQ ID NO: 568638 - DNA, 75 bp, Homo sapiens
cggccgccgcctccgcctcccaggatgagctgagaattgaatgatctggcacgggaccctccagcacagtgttca

SEQ ID NO: 568639 - DNA, 51 bp, Homo sapiens
acagtcttttcagaaactcatatttaaggcagaagatgactcaagaccggc

SEQ ID NO: 568640 - DNA, 100 bp, Homo sapiens
actgctcttcagcctcagcggcagtgttctgtgtgcagaagacttgcactatctgccagatgctgcttcctaaccagtgcagttatgcatcacaccagag

SEQ ID NO: 568641 - DNA, 83 bp, Homo sapiens
ggtggaggcagcgcggctctcagatccggaacatggtggcggtgctggaagtcatctccagcctggagaaataccctattacc

SEQ ID NO: 568642 - DNA, 82 bp, Homo sapiens
ttccggggacagccagccctcgctggaccagaccatggccgcggccttcgcgggctgacgcacgaggcacacaggaaggagg

SEQ ID NO: 568643 - DNA, 83 bp, Homo sapiens
ctacgacgtccctcaaaccttgcttctaggagataaaaagggactggtgattgcagctggaagtgcccatgaccgagctggcg

SEQ ID NO: 568644 - DNA, 101 bp, Homo sapiens
ttggtctgctggtgggactcaatgttctcgatgccaatctctgcttgaaaggagaagacttggattctcagttcatccatgagctcggatttcccacatta

SEQ ID NO: 568645 - DNA, 75 bp, Homo sapiens
cagagaagcctgtgaacaaagaactactataatgtctccagggatcctgtggtcatcaacaaagtcttcaaggac

SEQ ID NO: 568646 - DNA, 100 bp, Homo sapiens
actgatctctggcagaactgtagcacctcttcctcaggaaatgtccaccactgtttctcatcatcaccaaacgctgttgacagtgtcttgaagaggatga

SEQ ID NO: 568647 - DNA, 82 bp, Homo sapiens
ttgaaatgcatccgctggtcgctgccggaaatggccaggtttacccaaggtccagcctagcccctaggcaccatgtcggaca

SEQ ID NO: 568648 - DNA, 87 bp, Homo sapiens
ccggacagccgcgcgctgagggtctcggggcgggcgccgcgggacctctccgggccatgggcaacatgagtgagaatgaggaagagg

SEQ ID NO: 568649 - DNA, 100 bp, Homo sapiens
ctgacaccccctgagcccccatctgctgaaccctgactggtaactaggatttctacctcaaccgcgagacctatgcaaggacggtgtggaccaactcgcg

SEQ ID NO: 568650 - DNA, 50 bp, Homo sapiens
cgtcaatcagagcgtcctgtgcggttccttgtagcttggaatactgggat

SEQ ID NO: 568651 - DNA, 50 bp, Homo sapiens
gttcaatattcctgacttaaagaggatagtgctgatttggacagcattga

SEQ ID NO: 568652 - DNA, 100 bp, Homo sapiens
aaggccggttgctagggctgggggaactcagagaggatctgacgaactactctcaggcagtgttctcagtagtccgaactctaatatgagcagcatggta

SEQ ID NO: 568653 - DNA, 143 bp, Homo sapiens
aatcctcgagttctggcagctttacaggagcgacttgacaatgtccctcacaccccttccagctacatcgaaacgtgtacatcggtgagctcccgcaggacttcctccgcatcacgcccacacagcagcagcggcaggtccag

SEQ ID NO: 568654 - DNA, 100 bp, Homo sapiens
aaagcagcaaaacgaccactgaaaacaacgccgccaccagtggtaaaaacagagatggtaacaatttctgatgcctcacaaaggacagaaatctccacca

SEQ ID NO: 568655 - DNA, 75 bp, Homo sapiens
catcgacagcattatccaacggctgctggaagtcaccaggtgtcaagatgctgcaagtacataggactggactgg

SEQ ID NO: 568656 - DNA, 100 bp, Homo sapiens
atgggagaaaacacgatgaaaacagaaccgacttctccccttgtggaattacaagagatttcgactgtggaagagatcatgatgcagccgtccttttgga

SEQ ID NO: 568657 - DNA, 82 bp, Homo sapiens
ttcatttgcagtttggtgacaaaatctgtgaaggagcacgtgaattgcctctgcttacgttcaggccctgtcctaaacccag

SEQ ID NO: 568658 - DNA, 101 bp, Homo sapiens
caccagcaagatattgacgacctcaagcggcagaatgctcttctggagcagcaagacccttcttatgactcagtcagaagaggagcttggggcaataacat

SEQ ID NO: 568659 - DNA, 98 bp, Homo sapiens
tggcggatgaagcagctggtggggctctactgcgacaaggagtcaaattgactttatcagctttaatcgatgggaagaacttcagtgcaggaggtcac

SEQ ID NO: 568660 - DNA, 126 bp, Homo sapiens
tgtactggtgtgtggggccggaggagtcagctgtgtgtccagaacgtgccatggagacgcttaacggttgaaatcacaaagattagacacctttttagataggtgttcttcagcaccactgacaac

SEQ ID NO: 568661 - DNA, 100 bp, Homo sapiens
tcatcatggacgtgatgttggtgtgttcacatttgatcatggcatggtgtctgtgatcaaagttttgggattcatgttgcagagcttgctaatttcccta

SEQ ID NO: 568662 - DNA, 101 bp, Homo sapiens
aggacaccaagatgcggatccgggcctttccggtcagcccttcataaacccagatgggagtccagttgtgtataatcctcctatgactcaacaaccagtta

SEQ ID NO: 568663 - DNA, 100 bp, Homo sapiens
agtcggccggctgggacttgcagtatcagatgtagaaggtggtgatggactgcagctcagaaaggaacatactctcaaaatatttacttatatcaattcc

SEQ ID NO: 568664 - DNA, 82 bp, Homo sapiens
tgctggatgagctgctgaagcccaccgaattaggcttcttccccgggagctcgcagggctgcgacgccttcctgcggcataa

SEQ ID NO: 568665 - DNA, 100 bp, Homo sapiens
cctgaaactaaaagatgtcacaaaggaaaacgaggaaagtcccaggatgactactgtgtcaagtgctggagaatctggtaaaagcaccattgtgaagcag

SEQ ID NO: 568666 - DNA, 88 bp, Homo sapiens
tgcactaattcagttgtgtgtttctgagagcaaatgttacttgttccacgtttcttccatgtcagtgttctaagaacggaagcatctg

SEQ ID NO: 568667 - DNA, 101 bp, Homo sapiens
aagatggagttcctcctggggaacccgttcagcacaccagtggggcagtgcctcgagaggtaaagcattatttgacagatgtatggattcaagcaagaaac

SEQ ID NO: 568668 - DNA, 76 bp, Homo sapiens
tgatgatgacaacaatgatggtggtgatgatggtgttggtgttgaggattatgaagaggatgaggaagatgatgat

SEQ ID NO: 568669 - DNA, 90 bp, Homo sapiens
acgcatctggcagtacgtctactccaaggatcagctgcagaccttctcggaggagacaccacacctcgtcaacctgaacgaggacccgct

SEQ ID NO: 568670 - DNA, 100 bp, Homo sapiens
gccccctcacatctatgccatcacagacaccgcctacaggagtatgatgcaagatgccatggacaatattaccaggcagaaccaattctacgatacccaa

SEQ ID NO: 568671 - DNA, 74 bp, Homo sapiens
tcgctctcggcctccgacacggacccttcaaagttgtacaagaaagcagatgatgttgcagccattgaatgcca

SEQ ID NO: 568672 - DNA, 90 bp, Homo sapiens
gaatgaaggagagcagagaggagaggcttggaggaggcccagaagattaacaatggctcaagccaggcggatggcactctcaaaccagtg

SEQ ID NO: 568673 - DNA, 97 bp, Homo sapiens
tgaatcaggctttaaactgttgtgccagtgcttaggctttggaagtggtcatttcagatgtgattcatctagaacggaaaacagttcttccttcaaa

SEQ ID NO: 568674 - DNA, 75 bp, Homo sapiens
ctgccagcactcccagggaccctattgacgttgacctgtgctaccttgccctggccaaaggaggcttatctgatg

SEQ ID NO: 568675 - DNA, 80 bp, Homo sapiens
gttacagaacataaagacagggctccatgcagtggaccgatgggcctctacagactgtaccatgagctcccgacactctg

SEQ ID NO: 568676 - DNA, 74 bp, Homo sapiens
ttcagggtttccaccgttcgttcaagatccacctgtacacacgcggctgccacagcgaccagagccttagccat

SEQ ID NO: 568677 - DNA, 129 bp, Homo sapiens
tcagttccttgtggagccggagctgggcgcggattcgccgaggcaccgaggcactcagaggagttcatggcctcccacgggaacgacgccgcgagagccaggtttgagtccaaagtaccctccttctac

SEQ ID NO: 568678 - DNA, 90 bp, Homo sapiens
aggacatcatctgctataacctacaagcagttggacagatggtttcacccaaatatcactggtgtggaggcagaaaacctactgttgaca

SEQ ID NO: 568679 - DNA, 75 bp, Homo sapiens
agctgaaaaagccttcaaggttgaagaccctggacaccaagccagagaatctcgatgctggcctggagcagaaac

SEQ ID NO: 568680 - DNA, 99 bp, Homo sapiens
tctgaaagctagaagaaaaggtgtacttgcaagaaacctcaggacttgagtaacagcaacatggttgatgccggcccaggatggatcagacctgtgaac

SEQ ID NO: 568681 - DNA, 50 bp, Homo sapiens
ccccatcttcccttcacacctgatatgtgttgagacggattctccgccga

SEQ ID NO: 568682 - DNA, 89 bp, Homo sapiens
aaagtcccagcattcagaatgggagagaatatcactgggtcacaatcactctggacttaagacaggaatgttttaaaggaagttgggct

SEQ ID NO: 568683 - DNA, 100 bp, Homo sapiens
aagcagcagtgaggacaccaaagagtatcctgagctccagctggaccctaaattggatcctcttcctgctgagagtcccctaatgaacattgaggttgtt

SEQ ID NO: 568684 - DNA, 82 bp, Homo sapiens
gaggaagagttgtggcgaggcagatcctgccccgtggccgcggccgtctcccccagtggacaggaaagctaaggcctcagcg

SEQ ID NO: 568685 - DNA, 100 bp, Homo sapiens
ttaaacacattttacaaagccatgccctacaggttctccgtgctggagcaggtcagcgtcctcttactcccaatcagggtcagcaagggcagcaagcaga

SEQ ID NO: 568686 - DNA, 50 bp, Homo sapiens
cttgaattttctaaggtgtcattaggcattcccatcaagagcaccatgga

SEQ ID NO: 568687 - DNA, 74 bp, Homo sapiens
cgagtctacgatgtcacccgcttcctcaacgaggttctgtacagagtaatgagatgtgtgacggctgcaaacca

SEQ ID NO: 568688 - DNA, 80 bp, Homo sapiens
tgatttaaacaagagatttccacagaagagtttcactctgtcacccaggctcgagtgcagtggcgtgttctcggctcact

SEQ ID NO: 568689 - DNA, 90 bp, Homo sapiens
ggagaggatatgtagcgaggaggaacgcgctaaggcaaagcacctggtaatgctggaggatggaagaagcaaagggtttggcttcgtctg

SEQ ID NO: 568690 - DNA, 100 bp, Homo sapiens
gaaattgaaaacctgggatccacagaggaaaggagtctccccaggacagtgctatcacccgggatattaaccgaacattcccagcccatgactactttaa

SEQ ID NO: 568691 - DNA, 83 bp, Homo sapiens
ctcccgcctccgtgtgccctggttgtgagaagacgtctgtgtcgtgcgagttcctgagttggaggtagaagaagaaacccaag

SEQ ID NO: 568692 - DNA, 82 bp, Homo sapiens
tgggtgattctgtccgacggcgacggcaccgtggagaaagtgatcagggccaaagcggtcagtgagaaggaagtggactctg

SEQ ID NO: 568693 - DNA, 74 bp, Homo sapiens
tgacatttaattttagggtcctttatatagaagggagagtaggttacaacaacaatattcattgcttgaccaaa

SEQ ID NO: 568694 - DNA, 80 bp, Homo sapiens
tgagcatttcctcctgacggctgtacttgagcagtcacctggcacagaaggatatggccctgaagccacatgagcggaag

SEQ ID NO: 568695 - DNA, 74 bp, Homo sapiens
tcttggaaaaccagatccagaaactggaggagtcccgctcgaagctagcattgcagtgtcgagatggctatgaa

SEQ ID NO: 568696 - DNA, 100 bp, Homo sapiens
catcagattttgccaagattattaacaatacagagaatcttgtgcgggaattgctggaattgaaaattcggtttttactctaagtgaaggacattcagcc

SEQ ID NO: 568697 - DNA, 95 bp, Homo sapiens
acgcaaacagtttgaagctgaggattttgtatgccattgcattggccttaagggaaaagcagcgtgtaatatttaccagcccaattaaggctctg

SEQ ID NO: 568698 - DNA, 75 bp, Homo sapiens
ttcgcagtggtcgcttcttctccttgatacaaactggactctcaggacaaaacgacaccagccaaaccagcagcc

SEQ ID NO: 568699 - DNA, 90 bp, Homo sapiens
agaaggccctgagtcaaagaagatgcctcgaactaaacaaattcatcccagaaatctaagaggcatgatggctcatacctgtaataccag

SEQ ID NO: 568700 - DNA, 90 bp, Homo sapiens
ccatagagaacttcctggtggtgaacaagatatttggcatcttcctggcaaggacgctgatctcagacatcgaggcagtgaaggccggcc

SEQ ID NO: 568701 - DNA, 107 bp, Homo sapiens
ctgccttgtcttctccactgttcctggaggaatccgagaagagcagagcggagggagccccagacacgctgtgccctccccgagaggattctgtcctttcgtggacg

SEQ ID NO: 568702 - DNA, 75 bp, Homo sapiens
catttggctttgcctttctggacacagaagtatttgtgacaggaactgaaattaccattcacttttttaagtgga

SEQ ID NO: 568703 - DNA, 73 bp, Homo sapiens
gttggtcaacaccgagtggccaccggagactgaagtacagccattgatctgatgtacggaggcatctactgtt

SEQ ID NO: 568704 - DNA, 87 bp, Homo sapiens
agcttttcacctctggttcctacatctggattgtagccataagtggacttggcaatgccaggaagctggtgaagggtttcctctcct

SEQ ID NO: 568705 - DNA, 75 bp, Homo sapiens
gagtcccaggtcaagagcctctgcgagaagcaccctggaggagaagaggttctgctggaacaagctggtgtagat

SEQ ID NO: 568706 - DNA, 78 bp, Homo sapiens
tttggagtgtgcgtgcgcgccgagcgggttgttatgaggctcaaaggaacggctgctgtgaaaaaacatgctttgcaa

SEQ ID NO: 568707 - DNA, 76 bp, Homo sapiens
tgtacgagctttcgccaaagagcttttcctaggcaaaatcaagaagcagggagaaggttttaaggtgaaaacgaag

SEQ ID NO: 568708 - DNA, 98 bp, Homo sapiens
tggagtctgcgaaggccgggacccggttccccggcccacagtgggggtgtgcaaacccgagagaactggcaactccgatccaatatccgagaaattga

SEQ ID NO: 568709 - DNA, 75 bp, Homo sapiens
catatgagtgctgctgcagcttcccgagacatcaccttgggtttggttttcagataggagttaggtatgagaaca

SEQ ID NO: 568710 - DNA, 75 bp, Homo sapiens
tgcgcgcccgccagctgctccggagatacggaggatttgacagctaaggatattgaagaaattattgatgagctc

SEQ ID NO: 568711 - DNA, 100 bp, Homo sapiens
cgtgccgcgagcgcggcctgcaggagagcctcagctcaaaggcatcgtcaccaaactgttctgccgccagggtttctacctccaggcgaatcccgacgga

SEQ ID NO: 568712 - DNA, 50 bp, Homo sapiens
gcgcgtcaaggccctcttcgccatctcctaccatcaagtgcctgctgatc

SEQ ID NO: 568713 - DNA, 75 bp, Homo sapiens
tggcttcaaaggataaatccagcaaaaagaatgtatttgagcttggacgaaccttgacaggatgggtgcagcgaa

SEQ ID NO: 568714 - DNA, 95 bp, Homo sapiens
tgccggacgagcagatcgtgggcatttctcggagctacacccccacggtgtttgagcggtacatggtcaacctgcaagtgaaaggcaaacctgtg

SEQ ID NO: 568715 - DNA, 100 bp, Homo sapiens
gtggaagctgggaaacccacaggaggcaaccacactagtttaggaaccactcgttttgactattattttatcactctttgtgaaacttcacaatgttcgg

SEQ ID NO: 568716 - DNA, 100 bp, Homo sapiens
aggcagagtcagcagctgcagtgtggaagcaagaagtctatgtgccccaggatcctggattacctgaggaagaagagatcaaggaaaaaaaacccaccag

SEQ ID NO: 568717 - DNA, 75 bp, Homo sapiens
ctgattgaggtcggcagctcccgagaagcaggagaagcagagtttttgcagcttacatcaaaatctatcaaggag

SEQ ID NO: 568718 - DNA, 100 bp, Homo sapiens
ctggacacccagcggtctgacatcgcgacgctgctcaaaacctcgctccggaaaggggacacctgctgctctgttaaaagcgaaaatgaaacaattgcct

SEQ ID NO: 568719 - DNA, 100 bp, Homo sapiens
tgtccaggctggtctctactcctgggctcaagcagtcctcctgcctcagtctcccaaagtgctggaattacaggggttgggagccacgtgtaccagtgtg

SEQ ID NO: 568720 - DNA, 100 bp, Homo sapiens
attatgggagcgcatttccccagggtgtcatggagaaactccagctgggcccagagattctgcagcgggaaaatccaaggcttatttatgccaggctgag

SEQ ID NO: 568721 - DNA, 88 bp, Homo sapiens
gagaagcctgaaaagtcgcagcgagctggagccgccggaggtacgagtgcttccatatccatttacccaccattggcaatttgaaagg

SEQ ID NO: 568722 - DNA, 100 bp, Homo sapiens
agccttcatttctctgaacatactgccttatgggacagatcaagccccttcacagatgtagtcactacaaatcttaaattgcgaaatccatcggatagaa

SEQ ID NO: 568723 - DNA, 90 bp, Homo sapiens
cagccatgtgactgtagtccacatggagctctcagcataccgtgcaacagaacctccacattttgttgtgaaaccccgtgaccaggttgt

SEQ ID NO: 568724 - DNA, 100 bp, Homo sapiens
atccccaaatcagaggatcgtagatactccaagtatcacagctaaattaattagtgaacaaaaagatgacaaagaaaagaaaaaccatgaagagaaagaa

SEQ ID NO: 568725 - DNA, 78 bp, Homo sapiens
cctgcctcatcttaccaatctctttgtcggatgggttccaggaggaagaacgtgcaaaacgtgaggagctagagcgaa

SEQ ID NO: 568726 - DNA, 82 bp, Homo sapiens
ctccgggctccttcggccccgccatgggctgctgcagctccgcctcctccgccgcgcagataacgaaggaggcccaacttca

SEQ ID NO: 568727 - DNA, 98 bp, Homo sapiens
tacaatggcaagatccacgcgtgctcatgtgactatcacggatcgaaaagtagcattagaatttcttaaatcaaacgttcaagccaacttacctcctc

SEQ ID NO: 568728 - DNA, 83 bp, Homo sapiens
agcatcagaatttcttcagaatgcagtttacattaaccttcgacaggagctctttgttcaatgcctagccacctattcctaca

SEQ ID NO: 568729 - DNA, 90 bp, Homo sapiens
ctgcactgctgaacggaatatctgcagcaagtattcggaactgtggctgcaccatctgtcttcatcttcccgccatctgatgagcagttg

SEQ ID NO: 568730 - DNA, 100 bp, Homo sapiens
cttcgcgggcgattcgcgtagcctcaggttgagcttcagcgacagcgagagtgacaacagcgccgactcctccctgcccagccgtgagcccccacccccc

SEQ ID NO: 568731 - DNA, 100 bp, Homo sapiens
caagagtcaaccagaaagagattgggtacttaatggcagcaattccatttccgtgagggcgtttctagatgaagatgacatgagcttggaagaaataaaa

SEQ ID NO: 568732 - DNA, 87 bp, Homo sapiens
gaactgtctcctggtgaccgagcacccgcctccgggcatcttcaactccacaatggtgcgcatgaatgtcctggcagatgctctcaa

SEQ ID NO: 568733 - DNA, 100 bp, Homo sapiens
tctgcacaagatggcggcggtagcggcagtggcggcgcgtaggaggcgagggtcagctgtccgaggaggagaaaccagatcagcagcccctgagcggaga

SEQ ID NO: 568734 - DNA, 100 bp, Homo sapiens
gcatagtttcggtcatctaaaggaggttttaaacagtataacagcctccacaaatgggaagtgttcctgtaatgacgcaaccaaccttaatatacagcca

SEQ ID NO: 568735 - DNA, 100 bp, Homo sapiens
ttagccaatcacaggagacccaaatctgcttgttatctacagaactcaaagttgtcaatacgtagaggcgacatctagactaagagaaagaggctgtgat

SEQ ID NO: 568736 - DNA, 96 bp, Homo sapiens
ccagctcaaggcctttggctatgtcgagatcccctgtgtggccaagaagctggtgtgcggagatgaagggtcgctggtcatcctctggcacagaac

SEQ ID NO: 568737 - DNA, 76 bp, Homo sapiens
cacctttcggcttctgagacggcggcagcagcggcattcaggccggccttgtgctggaaagagcatgatgtgggca

SEQ ID NO: 568738 - DNA, 75 bp, Homo sapiens
taaaaagagatgtggggggattctcgacctgctaacagaactggaccttttcggcctactgaacttgacgcactg

SEQ ID NO: 568739 - DNA, 82 bp, Homo sapiens
cgactgaaggaggaatatcagtcccttatccggcacaacaccccgatcccccaaggaggcagaggagccatccagtttgtca

SEQ ID NO: 568740 - DNA, 100 bp, Homo sapiens
gacactggttttatcagaaaagtgcaaggaggagtgttctctccctacaggtgcagtagacattgttgcaatcatgatcggcaatctgaaaggcacaaaa

SEQ ID NO: 568741 - DNA, 76 bp, Homo sapiens
tgtttcccttggtcaaaagcgcactaaatcgtctccaaggtatcctgtggtctgaggccatcttcctcgaggcaag

SEQ ID NO: 568742 - DNA, 100 bp, Homo sapiens
tttaaccttatggccagtgatttgattgcccttaatagaagtctgccagatgtaagattagaaggaaataggaaggttgttgattactcacagtttcagg

SEQ ID NO: 568743 - DNA, 96 bp, Homo sapiens
ctctctcttgcccaaaccacgatgggaatcttggtgtaaaaattgccaaagcagttgcctgccacaactttgtaaaagccaaaaaggaggttgaaa

SEQ ID NO: 568744 - DNA, 100 bp, Homo sapiens
gccagtcatcactggtagcaaagctggaaaaggattttggtctgagatgctgggcgtgggggacttctattacgaactaggtgtccaaattatcgaagtg

SEQ ID NO: 568745 - DNA, 78 bp, Homo sapiens
ctcagaggacaacgaagtgttcgataacgaaggaggcccaacttcattcaataaggagcctgacggatttatcccaga

SEQ ID NO: 568746 - DNA, 100 bp, Homo sapiens
cgggaacgcgggatcctggggagagctgccatcagtcatgctcttaaacggggactgcccagagagcctgaagaaggaggcggcggcggccgagccaccc

SEQ ID NO: 568747 - DNA, 83 bp, Homo sapiens
tagattcttaggaagtatggattcactaacttcagcgaagcctccagggtcgtatagacctccccctcctatgggcaaaccac

SEQ ID NO: 568748 - DNA, 100 bp, Homo sapiens
aaatctgtgctgggatttaaagcttcagaggcagaaaggcagaagtggaagcaacttctatttagtgatcatgatatttggagttcttacaacatggcag

SEQ ID NO: 568749 - DNA, 77 bp, Homo sapiens
cctggatgagacatttgctacagcatcccacattaagtcaacgtgaggactcagaagacaaagatgtgaagaccaag

SEQ ID NO: 568750 - DNA, 75 bp, Homo sapiens
aataccgcttcctggagttcacgactctgagtgctggtctgcagggaactggccaggcaagggggcaggcccgtt

SEQ ID NO: 568751 - DNA, 100 bp, Homo sapiens
cgagtccggaccggagactttggggcctaactagcaccttatgaagctaggcagccccttgtccagcccgagggatcctcatcagggggcccaggaacca

SEQ ID NO: 568752 - DNA, 50 bp, Homo sapiens
ccattttctgccgctggacgcaaggttgaaaggattgttgacaaaaggaa

SEQ ID NO: 568753 - DNA, 96 bp, Homo sapiens
cgaattgttctgctcgggcgtcctggtgcatccgcagtgggtgctgtcagccgcacactgtttccagaaatgctgtgattgccatccagtcccaga

SEQ ID NO: 568754 - DNA, 75 bp, Homo sapiens
ctccaagttctaccagccctacgttgccaacttggcctgttccatctcaaataatgaagaaggtgtaaagcttgt

SEQ ID NO: 568755 - DNA, 100 bp, Homo sapiens
ggaggagaaaaaccatcgaagaatgaaaccggcttgttgtcttcaattaaaaaatttattaaaggaagcacacctaagtgaaaatgcctcgtgtaaaagc

SEQ ID NO: 568756 - DNA, 100 bp, Homo sapiens
gcctcaggccagtcgcctccaggccaagagggatccttcacccgtgtctggaatagccaggccagaagaaggaaggcctgtggtgagtgggacaggaaat

SEQ ID NO: 568757 - DNA, 74 bp, Homo sapiens
agaaagtcagggggactgcaaaggccaatgttggtgctggcaaaaaggaaaacggacgatgtattactaagctg

SEQ ID NO: 568758 - DNA, 75 bp, Homo sapiens
ctgggtccctgctggagtatgctgggaaaaccaattctgtgtcctcggaggaccacagcccagttgggccccagg

SEQ ID NO: 568759 - DNA, 83 bp, Homo sapiens
cgacatgatggcgagcatgcgagtggtgaaggtgtggacactgccagcggctgcagccgacttggaatgacctgggagacaaa

SEQ ID NO: 568760 - DNA, 101 bp, Homo sapiens
aagagaaatagatgatgatctagaaagtggttattcctggaggaaatcaggacctttgatatttaggaaaactatgtttaactctacagatatcaagttat

SEQ ID NO: 568761 - DNA, 73 bp, Homo sapiens
atacccctgctgacatttggagcacggcatgcatgatacgtcggtaacctttccagagatgtgacagaagctc

SEQ ID NO: 568762 - DNA, 50 bp, Homo sapiens
tgctgcactttattatgccggagaagtccaagatagccactctaccagct

SEQ ID NO: 568763 - DNA, 98 bp, Homo sapiens
aacgttgagcaagatgcagaaaccaacagacaatgccaatttacgtgtcattatggaactacttatgaggtgattaaaaattctggccatctcccaag

SEQ ID NO: 568764 - DNA, 100 bp, Homo sapiens
gagaacaacacccccatgtgcgtgtgccaggaccccaccagctgcccagcccccattggcgagtttgagaaggtgctggcccaggccctgactccctgaa

SEQ ID NO: 568765 - DNA, 75 bp, Homo sapiens
aggagcaccaggagacgcaactcatcgggtttattacccagaactctttgtctgggtcagtcaagaaccatttcc

SEQ ID NO: 568766 - DNA, 75 bp, Homo sapiens
gttatgcagctcagcaaggtgaagacttaattcagtgcacaaatgagatgaatgtgaacatcccacagttggcag

SEQ ID NO: 568767 - DNA, 75 bp, Homo sapiens
cgcggctgggcgttcatctaccacgctttcgtgttcagcagatagatcgtgtggtagaagttgtggaggagacaa

SEQ ID NO: 568768 - DNA, 83 bp, Homo sapiens
cgctgctgatgtgctcccagatgggcccttcccccaggacgagaagctgaaggatgtccttcagcctcaagtccaaagcctgg

SEQ ID NO: 568769 - DNA, 98 bp, Homo sapiens
cgaatcatccacgcacctgcagctctgctgagagagtgcaagccgtgggcaaggacacccaggcccattattttcctccagcctccatggaccacagt

SEQ ID NO: 568770 - DNA, 90 bp, Homo sapiens
cggctgcagagagagagagaagagaggagattgcagcagcgaaccaatcccaaggtgagatttgtggatttaaaattcacgggcagaatg

SEQ ID NO: 568771 - DNA, 76 bp, Homo sapiens
tcacctgtgcgggatggaacaaaagatcaatgagctgagcaatgttcctgttcctgtcatgctaatgccagatgac

SEQ ID NO: 568772 - DNA, 90 bp, Homo sapiens
tgccagccacgtcagcaccatggccagcttcctgaagtttcctgtgggccgcatccacagacacttgaagactcgcaccacaagccatgg

SEQ ID NO: 568773 - DNA, 82 bp, Homo sapiens
tgaaatcctcattaaagatactctcgtggctgacaagattttgaaaaagaaagaataccctctttatataaatcaaacctgc

SEQ ID NO: 568774 - DNA, 100 bp, Homo sapiens
tcgacgttgagtctgggaaactgatcattaagaagtccaaggatggttctgaggacaagttctacagccacaagaaaaaccatcatcaaagaggggatgc

SEQ ID NO: 568775 - DNA, 98 bp, Homo sapiens
cttcggctgccccaatccccggcagctctctcaggtgtcatggagaaactccagctgggcccagagattctgcagcgggaaaatccaaggcttattta

SEQ ID NO: 568776 - DNA, 99 bp, Homo sapiens
ctgccatgagcgagcgcctccgtcccaggtacaccaggggttggaaaaaccacactaggcaaagaacttgcgtcaaaatcaggactgaaatacattaat

SEQ ID NO: 568777 - DNA, 50 bp, Homo sapiens
gaaactcggagtgtactccgcctgcaagcctcctgacaaggtgatccggg

SEQ ID NO: 568778 - DNA, 73 bp, Homo sapiens
gaagcttcaggagattgaggacagaaccacatattcttctctttagacgacctcttccaaaagatcaacaaaa

SEQ ID NO: 568779 - DNA, 51 bp, Homo sapiens
cttcatgtgcctcttctcctttggcaggtttgaagatgccgcatttggatt

SEQ ID NO: 568780 - DNA, 100 bp, Homo sapiens
aggtggataagctatctgaagacattgacctgctgaaatccaggatagagagtgagagcagagaggagccttcaggggaagtagaggtggccgaggttgg

SEQ ID NO: 568781 - DNA, 75 bp, Homo sapiens
catccacgcacctgcagctctgctgagagagtgcaagccgtgggtgtgttctaggtcagtggcttcaaagactcc

SEQ ID NO: 568782 - DNA, 78 bp, Homo sapiens
tgatctccatgtcctgttgtggggcttttacagcctttggttttcggctttgtgagaaaccttaccatcaaacacgat

SEQ ID NO: 568783 - DNA, 101 bp, Homo sapiens
tgaccgggcccgtgcacttcaccgttggcaagtcgcgctcctctgcccgcctggtggtctcaggtgtccctggccagtgtccttccacctgtccacaagca

SEQ ID NO: 568784 - DNA, 50 bp, Homo sapiens
ctaacgccgggccggcagcaaggaacacctgtgctgccccccaccatcac

SEQ ID NO: 568785 - DNA, 98 bp, Homo sapiens
cagatgagaacaactactcattgagccgggagctgctcatcaagcttcttaatgaagaggataactcagaatcatcggctatagagcagccacctact

SEQ ID NO: 568786 - DNA, 75 bp, Homo sapiens
gtatcctcagttgactcattcactcagtggtggacttgctttgtgaagagacagttcatgaacaagagtctttca

SEQ ID NO: 568787 - DNA, 80 bp, Homo sapiens
ctgctcctcgccctcaagttcacctgcagaaacactttgtgctactctgtggggctttggaaaagcatgttaaatgtgat

SEQ ID NO: 568788 - DNA, 75 bp, Homo sapiens
cctggagcggccgccttccagcaaatgctgctcatggattctcccttattcaggtggacaacacaaaggttacca

SEQ ID NO: 568789 - DNA, 50 bp, Homo sapiens
cccatgaccagcatgcggtgctaggaatgtggggtttccatgatcgggac

SEQ ID NO: 568790 - DNA, 88 bp, Homo sapiens
ggcggcatgacggatccagagaaactcatcaggatttatcctgagacccagctaagttcctctgaaacttttgaccttgaaagagaag

SEQ ID NO: 568791 - DNA, 100 bp, Homo sapiens
cacgagcgggtgacgctgggcctgcagcgcggagcagaaagcagaacccgcaggttaagcaaccttttccacgggatggataagaatactcctgtaagat

SEQ ID NO: 568792 - DNA, 100 bp, Homo sapiens
ttcacaagttgtctaccgcctgtccaggaagggttcaatgtggcttaattgtggtggcctacaaagatggatcacctgcccacccacatttcatggatgc

SEQ ID NO: 568793 - DNA, 100 bp, Homo sapiens
cggctgcagctccaggagcaagtactccaggaagcacagagctgtaccagtacacggcccacgttgccaggtcctaggcctacttacaagcctccagtct

SEQ ID NO: 568794 - DNA, 76 bp, Homo sapiens
cttctgggcaaagaatgtagtcaatttagagatcccactggcattgttggtggtaggcctgggcgggggcagcctc

SEQ ID NO: 568795 - DNA, 95 bp, Homo sapiens
agtggcttgcttgagttgacacagggagctccaggactcaccctcagaattcagtttgcctgttctgtatgcaagttccgtagctttgatgacga

SEQ ID NO: 568796 - DNA, 78 bp, Homo sapiens
tcaggaccccagatgtctgacagccctgtgtgacaccaagataagtaactgttccattggcaagctacaataatgggg

SEQ ID NO: 568797 - DNA, 100 bp, Homo sapiens
aaaatttattaaaggaagcacacctaaggattccccgttactactggtgatggagatgtatgaactgtgtatgttcttcaggaattataaagaagctgaa

SEQ ID NO: 568798 - DNA, 108 bp, Homo sapiens
gggtgactcagagagggaagagattcagccagcacactcctcgcgagcaagaagaagctcattcacacagaagacccatttaatgatgaacatcaggagaggcaagag

SEQ ID NO: 568799 - DNA, 90 bp, Homo sapiens
ggggcccccgctcccgggctcggcggcgcgggtgaacgtgagcggtccggccgtagcacctccgcgccgtcgccatgtcgcggtttttca

SEQ ID NO: 568800 - DNA, 76 bp, Homo sapiens
agagctcaggcaggaaaacctctcctggcagcatgagctgcatcagctcagaactttacagactagcatggcaaag

SEQ ID NO: 568801 - DNA, 120 bp, Homo sapiens
cgctggaggagctccccagctggtggctggagcgaccccttgttctttggtggcgctgatggcaagtttggggcctacatgcaggtgcacattcagaatgatgggcctgtgaccatagag

SEQ ID NO: 568802 - DNA, 82 bp, Homo sapiens
gcttcaatatcttcacccagcatgaacaccttccaccatgaccacctcagcaagttcccacttaaataaaggcatcaagcag

SEQ ID NO: 568803 - DNA, 119 bp, Homo sapiens
ggcggccgaggcggcggtgtgggcgcgtcaggccgcgacgagggcgctgagctgcaagctttcttcctggtggcagatgacatcatggattcatcccttacccgccggggacagatctg

SEQ ID NO: 568804 - DNA, 78 bp, Homo sapiens
tttaaacagccaaaacagttcattcatattcagcgtaaggtactcaactgtgtggggtactacataaatcctgaaaga

SEQ ID NO: 568805 - DNA, 74 bp, Homo sapiens
ctacatcatgatcgagaagttcgcaaagagaaaatgctcaggcaaatgaactgatagtgcatcagccgacccag

SEQ ID NO: 568806 - DNA, 83 bp, Homo sapiens
gcttcgtccagatcgggaagggtacatgtcccagagcaagcacacggaggcccgggagctcatgtactcgggagccctgctct

SEQ ID NO: 568807 - DNA, 87 bp, Homo sapiens
ggactacaatgcaggactgctctcctactacacgaaatatggctacacacacctttctgcaggagagctgcttcgtgatgaaaggaa

SEQ ID NO: 568808 - DNA, 51 bp, Homo sapiens
ttcttgaaaacttaagtacccaggcgggatccacagcaccattgtttactg

SEQ ID NO: 568809 - DNA, 98 bp, Homo sapiens
ttttattgtgactactgcgatacatacctcacccatgactctcacccacatgcaggatctccaggaggtgacccaggaccttcattatgaaaacttcc

SEQ ID NO: 568810 - DNA, 80 bp, Homo sapiens
cttcggctgccccaatccccggcagctctctcaggaggagacatcacagctttcccagatcgggaggaaaaatatggaat

SEQ ID NO: 568811 - DNA, 50 bp, Homo sapiens
atgccagcactgcgggggccgcttcagtactatactggcaattgctggag

SEQ ID NO: 568812 - DNA, 76 bp, Homo sapiens
cttcgatgagctctcggattccttatgcagagtggccgacttgggtgataaaagaaaatgtggctgaagttacccg

SEQ ID NO: 568813 - DNA, 97 bp, Homo sapiens
gatggcggaggcgcctcctgtctcagtgtgatccgccttattatgcagtacttgaaggagaacagtttacatcgggcgttagccaccttgcaggagg

SEQ ID NO: 568814 - DNA, 75 bp, Homo sapiens
gggaggaagaggaggaggaagaagaaggtgatggtgggtgatgctgaagaatgtgcatctggccccagggtggct

SEQ ID NO: 568815 - DNA, 50 bp, Homo sapiens
cttagactacctactcagcattccaagatgaagtggccattctgcctgcc

SEQ ID NO: 568816 - DNA, 100 bp, Homo sapiens
gaggaggcgagctagccgggagttacaccgccaccgccaggcccctggatcctcctggaatccccgatccctcttgctccctggcagagttttctagtcc

SEQ ID NO: 568817 - DNA, 97 bp, Homo sapiens
ccagccgctgcagccaccaccgccaccatgtcctaccaaggcaagaagaacatcccgcggatcacggaaacgttttgatggtaaattacaatcagaa

SEQ ID NO: 568818 - DNA, 100 bp, Homo sapiens
cgcacctcgtcaccaaggccaagacttaattcagtgcacaaatgagatgaatgtgaacatcccacagttggcagacagtttatttgaaagaactactaat

SEQ ID NO: 568819 - DNA, 100 bp, Homo sapiens
ctccacactccaggtacttcttccaaggacctaggtctctcgcccatcggaaagaaattgaagccaaggaagcttgtgattggctacgggcaactggttt

SEQ ID NO: 568820 - DNA, 100 bp, Homo sapiens
caacattaacctgttctgtgtggtcaggatccagccgcagaagccaggatgaaggtagcctgcatcacagagcaggtcttgaccctggtcaacaagagaa

SEQ ID NO: 568821 - DNA, 100 bp, Homo sapiens
gctgcgcggccttcccatcaccatcacagagagcgatttaagtgggcagaccaacatccacctcagcaaaaacttcttcctgacgaatcgcgccagggag

SEQ ID NO: 568822 - DNA, 83 bp, Homo sapiens
cgagcactaatatttaagaaagaagatgttaactttcagcacaccacacaaatgagtgatgaggaagaggatgatgatggctg

SEQ ID NO: 568823 - DNA, 108 bp, Homo sapiens
cacggagatggtagagtgcagcctggagcggcagctcagcttggagcaggaggtccaggtggtaagttttcttcatacagttcttttgtgtgacaaactggatttcag

SEQ ID NO: 568824 - DNA, 100 bp, Homo sapiens
cggcttccttagtccgggcaactgtccgggctgtgagcaagaggaagctgcagcccacccgggcagccctcaccctggtactccaaagattcaggtttac

SEQ ID NO: 568825 - DNA, 100 bp, Homo sapiens
ggcaatctcctccggtcactttcacaggcatcccaaaatgaaagctcattagcatctacactgaagacgctcctgttcttcacagctttaatgatcactg

SEQ ID NO: 568826 - DNA, 97 bp, Homo sapiens
ttctgttttgcctgaatacatgatttaaacaagagatttccacagaaggagtctcttgcatggctcaggactgtccactccgtacaccagaggactt

SEQ ID NO: 568827 - DNA, 99 bp, Homo sapiens
cctgcacgtgcaactgcaaacgctctttgttccagagcatggagatcagatgggagcaaagtgtttacggcatcgtgtgataaaactgccaaaatgtgg

SEQ ID NO: 568828 - DNA, 83 bp, Homo sapiens
gaaaaacttcttgccaaccaaaaacatcgatatattgaactcttcttgaattctactcctggaggcggctctggcatgggagg

SEQ ID NO: 568829 - DNA, 75 bp, Homo sapiens
gtgagtatgagcgtagagtggaacggggttttaaaatcaaagatgggaaaatcggagaaaattgcccttccccat

SEQ ID NO: 568830 - DNA, 98 bp, Homo sapiens
tttggacaaataggaattcaatgaaaacgtattcttaaaggcgaaaaaggtggatttgctaggtcgatggccaggtggtcttcataaactatactgcc

SEQ ID NO: 568831 - DNA, 99 bp, Homo sapiens
gtcagtcagtcgagactcccccagacctggaactggtgctcccacagagatatggctcgtggacagcagaaaattcagtctcagcagaaaaatgccaaa

SEQ ID NO: 568832 - DNA, 100 bp, Homo sapiens
gcagtggcacctgcgcgaagctggccaaagcctgcccagacggctcacctgtgcgggatggaacaaaagtaacatccaggagatgagggctcggcacaaa

SEQ ID NO: 568833 - DNA, 90 bp, Homo sapiens
ggcctagcgctatgcctgcggcggagactgcatcaggctctcgttctcctgtgcctcctgttggctctctttgcatctggcctcatccac

SEQ ID NO: 568834 - DNA, 50 bp, Homo sapiens
ctcaacatctctcagagacgaaagtgggctaccttgagaatggagcgagg

SEQ ID NO: 568835 - DNA, 75 bp, Homo sapiens
caagagggtgttcgactgctagagccgagcgaagcgccgatacaaagcaggggaaaaggagccagatcccaagac

SEQ ID NO: 568836 - DNA, 73 bp, Homo sapiens
tttgacgcccgagctcatccatccagtgggggtagcagcagaaggcccagatggtacaggaagacttggagaa

SEQ ID NO: 568837 - DNA, 75 bp, Homo sapiens
gtttgaggcattgacagttgtgattcagcacctgctgtctgagatggagtccattgccttacctgtgcaataatg

SEQ ID NO: 568838 - DNA, 90 bp, Homo sapiens
gataaatcagacagaacagttaatcctcaatttaagcctgatctaacccctagaaacagaaaacccgcctagtgccaagcaaccctccaa

SEQ ID NO: 568839 - DNA, 100 bp, Homo sapiens
ccctcgcaacctggcagccgccgccgtggaagagttctaaagttcctgttgcttcagacaatggatgagcaatcacaaggaatgcaagggccacctgttc

SEQ ID NO: 568840 - DNA, 75 bp, Homo sapiens
cgcagcgagctggagccgccggagacctgcaggctgggacaatgaaaagaaaatagctattttacatgaaaattt

SEQ ID NO: 568841 - DNA, 75 bp, Homo sapiens
cctccaccaggccaaagacttcggcagtgctggagaatctggtaaaagcaccattgtgaagcagatgaggatcct

SEQ ID NO: 568842 - DNA, 100 bp, Homo sapiens
ggcgtgttgtcgcaggtggacttcttgcaacaggttaacgtgtatggcgtgtgcgtgccaggtgacttcatggtcatgacgattttcttcaatgtgagca

SEQ ID NO: 568843 - DNA, 75 bp, Homo sapiens
tttgccctgaacatcatgaattcccaagaaggagaagtcacctgcaccggtgcccgtgacgtacgagctgcccac

SEQ ID NO: 568844 - DNA, 50 bp, Homo sapiens
ccctcctctgcctcgctccaacacagagctagagccggtgcaggccacgc

SEQ ID NO: 568845 - DNA, 100 bp, Homo sapiens
ctgcttttcgcttttcttcttctgcaacacggctacggtctacaagatctgcgcctggatgcagctcttggcagtcagactggttcttcagtgacgaaga

SEQ ID NO: 568846 - DNA, 100 bp, Homo sapiens
tctatccaggattcatcccgtgtcaacaatggtaaagcaaacaccgtctacaagattcgagtcaaacaacgtgagaacttgaaatacgtctccattcttt

SEQ ID NO: 568847 - DNA, 100 bp, Homo sapiens
gagacatgagatggtagccaacccctcagtatcaccttttgccatgatagcatttctttcattggacagttccttacaagggctccactcagtgtctgtc

SEQ ID NO: 568848 - DNA, 100 bp, Homo sapiens
gaaaatggcagacgatattgatattgaagcaatgcttgaggctccttacaagaagacaactgccagaacttccatctaaaaacctgtttttcaacatgaa

SEQ ID NO: 568849 - DNA, 98 bp, Homo sapiens
gggactgtgatggccagagagatgacgatcttaggtgtccctggccagtgtccttccacctgtccacaagcatggggaacatcttcgccaacctcttc

SEQ ID NO: 568850 - DNA, 50 bp, Homo sapiens
ccctgctggaggagcgcttccggaagaacatgagctgcctgtggacatgg

SEQ ID NO: 568851 - DNA, 100 bp, Homo sapiens
gaggtggacgccatcgtcaacgccggagccgaggaggtgctgctgctggcccggcggacggacctacggaggatctcgctggacacgccggacttcaccg

SEQ ID NO: 568852 - DNA, 100 bp, Homo sapiens
taacacctcaaggttgaagcagaagaataaggagaaggataagtcgaaggggaaggcgcctgaagaggacgaagcctgcaagcctcctggggaacggaac

SEQ ID NO: 568853 - DNA, 100 bp, Homo sapiens
ggtgaagtctagcagaggacgcggccaggcgattcggtgaagcgattcctgcaggcgttggttcccctctttgacctgctgtcctgagagcacgtctcta

SEQ ID NO: 568854 - DNA, 100 bp, Homo sapiens
ccagacctgctgctgcttcaatgtccgcatcgcaaccaccgccctggccatctaccatgtgaaacctctgtagaggagcaggatgcaaccgacaggctgt

SEQ ID NO: 568855 - DNA, 113 bp, Homo sapiens
catgttgcacatgttttaaatgacgaaactcagcggaaatatattcagcccaagctgttggccaaggagcttcttgaccttgtggcttctcacttcaatctgaaggaaaagga

SEQ ID NO: 568856 - DNA, 75 bp, Homo sapiens
ggcgacgcagcccgcggcagaagtaagactttgaccccgacgcaggcttcagtgattgccgcggatcagaagcct

SEQ ID NO: 568857 - DNA, 98 bp, Homo sapiens
ccgcgccaccgagtccggaccggagactttggggcctaactagggtatggctctctcggcatgatgaccagcgtgctggtttgtccagatggcaagac

SEQ ID NO: 568858 - DNA, 50 bp, Homo sapiens
aactgatgaggaacaagccattagcaggattgtcaccagacctgcaatct

SEQ ID NO: 568859 - DNA, 74 bp, Homo sapiens
cacagccatgccccttccgattgggagggacaaggtatggaacccttcagatcaaagcttaccaataaattcag

SEQ ID NO: 568860 - DNA, 99 bp, Homo sapiens
gcaccggaacaaactcaaccaactccactacagctgttcccagcttggttgcacttgagaaaattaatgtggcagatcccggtctccagaatctccccc

SEQ ID NO: 568861 - DNA, 83 bp, Homo sapiens
accccatatatgattttctttaaggatggtttagaaatggaaaaatgtgtggcgttcaagatgtacttgggcatcactccaag

SEQ ID NO: 568862 - DNA, 98 bp, Homo sapiens
gatgctccagtttgagaaacctggatctgcgatctgtttgtgggaggaggtacaggagaactgtgtgcggtggcgaaagaggttcaccttcgtgtgta

SEQ ID NO: 568863 - DNA, 74 bp, Homo sapiens
aaaagcaggaagctggaaaggaaggtactggtcttcttggacattaatctttgaatacttgctgactgctaaga

SEQ ID NO: 568864 - DNA, 100 bp, Homo sapiens
cagccctcgccgcacgcacagcctccacctcacaatcctagcagcatgatgggaccccacagtcagatacagcttggatcgagcttcctgcagtctgtcc

SEQ ID NO: 568865 - DNA, 120 bp, Homo sapiens
cggcgtctctggccggccttggtgcggcgagccgagcgaggcagctctgagccgcgcgacaatgcagatcttcgtgaagactctgactggtaagaccatcaccctcgaggttgagcccag

SEQ ID NO: 568866 - DNA, 83 bp, Homo sapiens
cggattcgccgaggcaccgaggcactcagaggagacccaacatgagtgaagtttcctgcaagaaacgggacgactatttggaa

SEQ ID NO: 568867 - DNA, 100 bp, Homo sapiens
actaagagaagtcacaaaacagcagatttcccaagagcagcggaaaatgatccagtcacaggcttctccagggaaagtgaccgaggcagtgaaagaggcc

SEQ ID NO: 568868 - DNA, 98 bp, Homo sapiens
tttaattttagggtcctttatatagaagggagagtaggcattccaatgttgtgattctgaccacttctaacatcaccgagaagatcgacgtggccttc

SEQ ID NO: 568869 - DNA, 100 bp, Homo sapiens
agcctgtatatggagcacagcatcctcctcttgacccacggctcaccaaaaaacacgatgaggcgagtggtacgacagagcaagtttcggcatgtatttg

SEQ ID NO: 568870 - DNA, 83 bp, Homo sapiens
gagagatgtttgagaagctgactgaggaaggctctcccaagggacagactattccccgccactgtatgtctgaagatagcaaa

SEQ ID NO: 568871 - DNA, 75 bp, Homo sapiens
gtgcatccttggcagaaagtgaggaggaaaacacccccattgtgaatccgccatactacatcccgctggttgagc

SEQ ID NO: 568872 - DNA, 90 bp, Homo sapiens
cgtcgctgcgcacctggcgggggcccgaggtctctaactggtttggcaacaaaagaatccggtataaaaagaacatggggaagtttcaag

SEQ ID NO: 568873 - DNA, 102 bp, Homo sapiens
gcagccgcgaggaggcgcgggaggtgttcgagaacgaccccgagacggctgtctgtccccagaccccagagcacgtccggcaccaccatgactgggctgttg

SEQ ID NO: 568874 - DNA, 50 bp, Homo sapiens
aaatcatttccatcaataccgggcaatagccctctggaacaagacaattc

SEQ ID NO: 568875 - DNA, 107 bp, Homo sapiens
tgggaagtgttaaagaagattacaacagactgagaagagaagtggagcaccaggagactgcctatggaaagatgaatgggagggctgattttcgagagccgaatgca

SEQ ID NO: 568876 - DNA, 50 bp, Homo sapiens
tggaggccatgctgctgtacctggggttgggtttggcactcaacttccag

SEQ ID NO: 568877 - DNA, 103 bp, Homo sapiens
ctgcagggttgtcgagctgctctgcaggggccaccttatcttagttccagaatttagtcttcctttggaatactacctaattcccttccttatcatagtgggc

SEQ ID NO: 568878 - DNA, 100 bp, Homo sapiens
ggcatcacttcctgatagcaagttcatctgcatggaatgtaaaactggctccttgaagttcgtggaaggctgtatgagcttctaactcattgtattcctc

SEQ ID NO: 568879 - DNA, 100 bp, Homo sapiens
ggcggagcaggagggccttcaagaaggagaccagattctgaagttgctgctgatgctagaaggactagtagatgaacggagtcggctcaatgaggcctta

SEQ ID NO: 568880 - DNA, 76 bp, Homo sapiens
cggcaccaactattcgcggagctggaatgactggcaacccaggagagccagtgtaactccttcaagactggagtga

SEQ ID NO: 568881 - DNA, 90 bp, Homo sapiens
acttgccgagcctgatgatggggacgtgccgcccctttgcggaaactggcgatggaatatgagaggagccctctggaaagaaaaggacag

SEQ ID NO: 568882 - DNA, 98 bp, Homo sapiens
agccgccggcctgggcggggggcgcgcggccgggccccggtgtctgggaccccaactgggacaggtactaccgtggtgcagtgggcgccctgctggtg

SEQ ID NO: 568883 - DNA, 75 bp, Homo sapiens
tgcggagcgagttacgagaattcccggccgctgcaaggggaatcgacaaggagaacgttgaactctcccctacca

SEQ ID NO: 568884 - DNA, 50 bp, Homo sapiens
tgggcaccttgcgcttcttgcagtcggacccagatgatgtggtaccagtt

SEQ ID NO: 568885 - DNA, 83 bp, Homo sapiens
catggagtcaccttttagcccgggactctttcacaggctggatgaagattggggttttaaaatcaaagatgggaaaatcggag

SEQ ID NO: 568886 - DNA, 100 bp, Homo sapiens
taagcagagaatggagaagaaggttgattccaggttgaaggggcccggccaggactcggggaagggtggcctgagagcagcgatgacctctggggtcact

SEQ ID NO: 568887 - DNA, 75 bp, Homo sapiens
gggtctggaggagccttctcaagaacagaggatactgtcatgaagcagacacatgctgacacacctgttgatcat

SEQ ID NO: 568888 - DNA, 100 bp, Homo sapiens
gcgccggcgacctgaggggagagggaacgcagctgaaagcgtgaactgtgcttttgaagatgatgatatcacgcacgttgaaggaagtgtagatcctatt

SEQ ID NO: 568889 - DNA, 100 bp, Homo sapiens
ggaagagagagctgaggcagacgatgtaagatctgctgttacttcttgctgtgtgaccttgggggatggagtgttagatctctctacaaagaaaaccagc

SEQ ID NO: 568890 - DNA, 80 bp, Homo sapiens
cgtctcttacgtctgcggaagtgcagctgcctcagttcttagcgcagtggcactatcacaacagagtgacataatggtgg

SEQ ID NO: 568891 - DNA, 82 bp, Homo sapiens
cgagccgagcgaggcagctctgagccgcgcggtcaaaatgcagatcttcgtgaaaacccttaccggcaagaccatcaccctt

SEQ ID NO: 568892 - DNA, 75 bp, Homo sapiens
ctgttttggaactgtcaggtacctcaaagcctgagcaactgggggcatttgcagctggagtcaagcagatgttag

SEQ ID NO: 568893 - DNA, 99 bp, Homo sapiens
ctttgaagtgggagcccagttggaagcccgggaccgtttaaaaaactgataagcatggattcctggttcattcttgttctgctcggcagtggtctgata

SEQ ID NO: 568894 - DNA, 96 bp, Homo sapiens
ctggttctgggaaaacaacattgtctcgggtgtatgtacaaagacttttgaagaggtgtgggagcacacatgatttaaaggaaaacaaagaccagg

SEQ ID NO: 568895 - DNA, 100 bp, Homo sapiens
agaatgttcatctttagagcaagaggagcttcaagcattgcagatagagcaaggaggctgcaaggtgtgactgttgtaaatctcaaggaactcttaaaga

SEQ ID NO: 568896 - DNA, 50 bp, Homo sapiens
gtctactgtacccgtcactgcttatccaaaaactggaggaagcagcatct

SEQ ID NO: 568897 - DNA, 101 bp, Homo sapiens
gcgcatcgtctgcaagaccgcgaggcgagacctcttaacgacaaatcctccacccctgggctcaagtccaacacaccaaccccaaggaacgacgccccaac

SEQ ID NO: 568898 - DNA, 100 bp, Homo sapiens
tggcactggtattgctttgagtgcaggtcctcttcctgatggatgggaacaagccatgactcaggatggagaaatttactatataaaccataagaacaag

SEQ ID NO: 568899 - DNA, 75 bp, Homo sapiens
ctggttccccaacatgcctcaccctcatctatatcctttggcagctcacaggtggctatggaccgccccctgcag

SEQ ID NO: 568900 - DNA, 90 bp, Homo sapiens
gacagctgttccttggccatcccaaagctattctgggggcaacagagctcatatttgatgccgtgctcaagatcatgtatgcggcagtgg

SEQ ID NO: 568901 - DNA, 75 bp, Homo sapiens
cgaggatgacatcatctacactcaggacttcacggtgcccgatcctccgagcggcggcgacggctgttgctaagg

SEQ ID NO: 568902 - DNA, 100 bp, Homo sapiens
cgcgggccgggccggggtgacctgggctgcagccatggaagaacagagggtacaagaagtatgtcttcctggaccccctggctggtgctgtaacaaagac

SEQ ID NO: 568903 - DNA, 120 bp, Homo sapiens
cgggttggagagaagccacgaaggctgcaagagaggcgctgttgagttctgcagttgatcatggtagtattattgattccacagaatacagccaacctccaggtttcagtggcagttctc

SEQ ID NO: 568904 - DNA, 75 bp, Homo sapiens
ctggcctcctgtgatgggccttcgcactcccagggaaatgtttcaacgtgcgcaagcgttgcggcggcgggcaga

SEQ ID NO: 568905 - DNA, 82 bp, Homo sapiens
tgaagcttctgaaccatccacacatcataaagctttaccagattgttaaaggaaatgggctggcaggaagacagtgaaaatg

SEQ ID NO: 568906 - DNA, 100 bp, Homo sapiens
cggaatctgtctcctgatcatcattcaggtacggaaaaaggaccagatcaatattgaaacaaagaataaaactgttcgttttataggagaactaactaag

SEQ ID NO: 568907 - DNA, 98 bp, Homo sapiens
ggatgaggctctgcggctggtccaggccttccagtacacagacgagcatggggaagatctactactatgcagctgcccagaccactcacacgacatac

SEQ ID NO: 568908 - DNA, 74 bp, Homo sapiens
gaatcacttgggttcattctattcagaaatcttgcagcagctccaccagcagctggttgaagctgaacgtaggt

SEQ ID NO: 568909 - DNA, 75 bp, Homo sapiens
aatatgaccctatggaagcagaagaagctgaggatgaagaagatggttgtactcgtaaaacaaggatcatcgatg

SEQ ID NO: 568910 - DNA, 83 bp, Homo sapiens
ctatgagaaaaaatatggaggcagatcaataagaaaagatccctttttcagatgtttccattcctgaaaaacccaagcttaga

SEQ ID NO: 568911 - DNA, 78 bp, Homo sapiens
atttccagatgccttgttcaacagtatgagcccagaggacctggtcggcccttgtaccaaagaagaatctcatctagc

SEQ ID NO: 568912 - DNA, 82 bp, Homo sapiens
gtgcaggcgctgcgccgcaacgccgagcgcaccgacatctgcctgctcaaaggctgatcagctgaccgaagaacagattgct

SEQ ID NO: 568913 - DNA, 100 bp, Homo sapiens
aggcagctcagagaacggctctccgcgctctctctgacaggtgttatcttcaggaaggcacactggacctgctaaattaacaaatggaaagaaagcgtaa

SEQ ID NO: 568914 - DNA, 94 bp, Homo sapiens
gaactgtgcccattacttctgcctggactgcattgtcgaatggtccaaggttatcagtgagctgaatggaaaaaacattgaagacgtcattgcc

SEQ ID NO: 568915 - DNA, 98 bp, Homo sapiens
ggagtccggacatctgaaacttgactgtgccctgtccacggtgcctcctgcatgtcctgctgccctgagctgtcccgagctaggtgacagcgtaccac

SEQ ID NO: 568916 - DNA, 51 bp, Homo sapiens
gtctggcaggaacctcggcctcagagctctcgtggcattatccttcagtgg

SEQ ID NO: 568917 - DNA, 85 bp, Homo sapiens
tggttcgtgctggactacaatgcaggactgctctcctactacacggccatccggctgtccttagagcaagccctgcctcctgagc

SEQ ID NO: 568918 - DNA, 75 bp, Homo sapiens
tgcaggctgagcgcgcgcagggcttccgccgactggaggagtgaccagaagtcagcagcttcccagaagccccga

SEQ ID NO: 568919 - DNA, 100 bp, Homo sapiens
tgctggcagattcgccaagagaagaatctaacaaacggcaaagaacttactgattcttgagatgacagcgcttctgctgcaagtagcatggaggtgacag

SEQ ID NO: 568920 - DNA, 56 bp, Homo sapiens
tgaaggtcctgaacgagctctactcgatgatgaggagtctgatgaggaagctgtga

SEQ ID NO: 568921 - DNA, 98 bp, Homo sapiens
gagctcctcaaagagctcaggaacggacaggacatggctggacctgtaccgagcctcgggtaaatttgagcttcttgatagaattcttcccaaactcc

SEQ ID NO: 568922 - DNA, 100 bp, Homo sapiens
taaagtctcccttaaaatgcaccctccttccacctggccaggaatcaggagactacacagacttctattcctctcggcagcatgctaccaacgtcggaat

SEQ ID NO: 568923 - DNA, 82 bp, Homo sapiens
gccgcacctgcgcaacctcgccgtggccatgtgcagccgctacgagccttcacgtaaatgggtccagtcatgcctcccagta

SEQ ID NO: 568924 - DNA, 50 bp, Homo sapiens
ggggaaggcgcctgaagaggacgaaggagggtgaggacaaaatcttctta

SEQ ID NO: 568925 - DNA, 75 bp, Homo sapiens
ccttcgcgtcttctcttccctcgggtgacttgaggtttacccagggttgatgataaccgctggccttattcattg

SEQ ID NO: 568926 - DNA, 101 bp, Homo sapiens
ctcatgggcaaggaggttggcttcttcatcatccgggccagccagagctccccaggggacttctccatctctgtcagcggttaagaagattgtctaccaaa

SEQ ID NO: 568927 - DNA, 74 bp, Homo sapiens
tccctgcctactcccccaccggggatttcaggttcgagaacttgtcttggacaattgcaaatcaaatgatggaa

SEQ ID NO: 568928 - DNA, 100 bp, Homo sapiens
ccagcgggctttccttctgatggcctctcagtaccaacaaccccacgagggtcctgaggacaccgtgagccagccaggcctggccgctgggcctgaccgg

SEQ ID NO: 568929 - DNA, 100 bp, Homo sapiens
aatctctgtgtgttccttattttgtgcttgaacttgatcaaacagaaaatgcatccgatgcagatttatggctcctgaacagttgcactgtaaaaaaccc

SEQ ID NO: 568930 - DNA, 74 bp, Homo sapiens
tactacctaccattgtggaaaaggtgattcttcctaaactaacaggtgggatctcatcgtgtccgtatgtcaag

SEQ ID NO: 568931 - DNA, 80 bp, Homo sapiens
gtcgaatccagtagaaaactggtcaaggaagctgttattttgtccacaaatattgctgaaacaagcattaccataaacga

SEQ ID NO: 568932 - DNA, 75 bp, Homo sapiens
tcaataaatatatcaacaccgatgcaaaggcaccgttcctgccttgggcgctcatgggcttctcgctgctgctgg

SEQ ID NO: 568933 - DNA, 75 bp, Homo sapiens
tgctgctgcccgcgtccgaggctcgcgggcggcgggcccgggggctaagtgatggatcttgtactccgtgttgca

SEQ ID NO: 568934 - DNA, 100 bp, Homo sapiens
cctgtacagcctgcagaactctgaagaaacacttaaattctggaaatagcgactcagtatcatggccagcagccttaatgaagatccagaaggaagcaga

SEQ ID NO: 568935 - DNA, 74 bp, Homo sapiens
acagttctccatgagttggacagataccaaagaggatggaggagatgtataagaaagctcatgctgctatacga

SEQ ID NO: 568936 - DNA, 99 bp, Homo sapiens
gtgaaatcctgtcctgaagactgtaaggccgaagaacagttgagaattgttgaagaacaaagaaagattcatgaggaaaggatgaaactagaacaagaa

SEQ ID NO: 568937 - DNA, 90 bp, Homo sapiens
gtttcttttactggcaaatagtacttcaagagcacagtcttatgtaagaggagatttgcaccctagttatcgctgagactttccctgaag

SEQ ID NO: 568938 - DNA, 90 bp, Homo sapiens
ggcagaatacagagatatggaatcaggtgtgctgggcatcaaggtgaagatcatgctgccctgggacccaactggtaagattggccctaa

SEQ ID NO: 568939 - DNA, 85 bp, Homo sapiens
gcgcccgcgccctccgcgcgacgccaggccctgtttgtgctcttcgtcctggcctacatccacatcgtcttctcccgctcgccca

SEQ ID NO: 568940 - DNA, 75 bp, Homo sapiens
ggcttcagggagtcggaccagcttttcaaacaatacagaaaatcgagagccttggttacaaccgacttatcctgc

SEQ ID NO: 568941 - DNA, 75 bp, Homo sapiens
atatcagcactaaacatcgtgggggatctcttacggaaagtagggaacatccagtcatggataaaaatgagctgg

SEQ ID NO: 568942 - DNA, 90 bp, Homo sapiens
gtgtggcgatgtcttagacaatcttaaaggagactgctatcaggatcttcaagatgaagttcaaagggagaatactaatctgcaaaaact

SEQ ID NO: 568943 - DNA, 83 bp, Homo sapiens
gggagatgctatagaggccataatcatcaccatgcatcaagaagacttttctggttggaaaatggatataccttatttgatta

SEQ ID NO: 568944 - DNA, 75 bp, Homo sapiens
cagaggctggggagtagctgctgagcaggaggccactgtctgcagctcccgtgaagatgtccactccagacccac

SEQ ID NO: 568945 - DNA, 90 bp, Homo sapiens
gccatcgccctgccggaccgcgcctcaggctcccccagcccgcggcgccatggctcacgtcggctcccgcaagcgctcgaggagtcgcag

SEQ ID NO: 568946 - DNA, 90 bp, Homo sapiens
gcgcttggtgctgcatctcaatccctgtggccccaggagcagctgcggcaggaacatgtgtggacaacagtgagtatatgcggaatggag

SEQ ID NO: 568947 - DNA, 97 bp, Homo sapiens
ggaagctgcagccacaatgtgcctttgcaggggagcctgagagccacagatgcggaggtggtggagaagccggccaaggaggaaacggtggtggaga

SEQ ID NO: 568948 - DNA, 100 bp, Homo sapiens
atgtcctttccatgctgggtgacatccgcaggagcctggaggaggagtatgcgaccagtggttggaacctgaatgtgatgccagtgctagatcagtctgt

SEQ ID NO: 568949 - DNA, 82 bp, Homo sapiens
tatgacagtgttcgctctaaggggagaaggaatgtgtgaccatttccaacgatggacttcagcagaaatctttatgatattg

SEQ ID NO: 568950 - DNA, 75 bp, Homo sapiens
catatttcaagtcattcaaagacagatgatggtatgttacttacggtcatgaactgatttggaagaacagggagc

SEQ ID NO: 568951 - DNA, 75 bp, Homo sapiens
ctgtcaatgagtatcaggaggcaatggaccagtatagtatagcactaagctcgccctcccctacctgcggaagag

SEQ ID NO: 568952 - DNA, 98 bp, Homo sapiens
ctcttcgcccagcagatctgcgaggccatggccttcgccagcatctataagctggacaaccttgtggccattctagacatcaatcgcctgggccagag

SEQ ID NO: 568953 - DNA, 82 bp, Homo sapiens
cgctccaaccaaaaccgtgaatggtgtctggaggagtgagagccggcaggcatgtcgggccccaggcctgtggtgctgagcg

SEQ ID NO: 568954 - DNA, 100 bp, Homo sapiens
gctttgactgctttatgaccatattaatgcagatgaggcgttctttgcaaatggttatgagccttagagtttctgaactccaagtactgttgggctacgc

SEQ ID NO: 568955 - DNA, 97 bp, Homo sapiens
atccgctggcgctagtctgaccctccgccaggcaaaaggaagcccgaccctgcccgccctggactggcagctgccgtcccactcaggcccgtatgag

SEQ ID NO: 568956 - DNA, 97 bp, Homo sapiens
tcctccttccagcccatcgagcctggacagtcattttgtttactcattcagccctgttgcaggtcccaataaactcttcataaggttgacagaagca

SEQ ID NO: 568957 - DNA, 75 bp, Homo sapiens
agtactcggaaggtcagttctgatacattggagaccattgctcctgggacagtatggaaattaccagcagtgaaa

SEQ ID NO: 568958 - DNA, 83 bp, Homo sapiens
ggacttgactctggaaagcgtccagaccaaggtcagcggagagtaggtttggtgcacctcgatttggaggaagtagggcaggg

SEQ ID NO: 568959 - DNA, 100 bp, Homo sapiens
cccgcctcggcccgcacgccaagcacgtggtgggctatggccaccttgtgaaacaaagagtcctcttcgtggaaaagaaaaaaatacgctccctttaaac

SEQ ID NO: 568960 - DNA, 90 bp, Homo sapiens
ctctgaaaggctctccttgcagctgcttagacgctggatttttttcgggtagtggaaaaccagatgccatcccgcccactttctacagac

SEQ ID NO: 568961 - DNA, 96 bp, Homo sapiens
acgtgggtttcttactaaggacgagctgatcaagtatatgactgaagaagtgaacacctacctcttcatgatgcaagcccaaggcattctgatccg

SEQ ID NO: 568962 - DNA, 75 bp, Homo sapiens
ccgcgggcgcccgaggggccgagcgagggtccacatatagcctcagttacattagctgcttatgaatgcaattca

SEQ ID NO: 568963 - DNA, 50 bp, Homo sapiens
gtggtcattaagcggagatccgggtccgcaagcaggtggtgaacatcccg

SEQ ID NO: 568964 - DNA, 101 bp, Homo sapiens
ttgcgactcgcggaccggcgtccccggcgcgaagaggctggactcggattcgttgcctgagaataccctctaccatctgctttggtcagggtgccgctcga

SEQ ID NO: 568965 - DNA, 75 bp, Homo sapiens
gaaacctttccaacacagatgtccaagctgccaattttgtccatcatggaactgtcctggattgtgaggagaaag

SEQ ID NO: 568966 - DNA, 75 bp, Homo sapiens
agcagccgatccagcctgcggagcctgtggggcagattttgtacagcagcaatttcttactctctctgcaagttt

SEQ ID NO: 568967 - DNA, 75 bp, Homo sapiens
gagatgttgcgttgagtgcagagttcaggaatactcccccagttgcaagaggcgcaggaccgtggaagacttcaa

SEQ ID NO: 568968 - DNA, 75 bp, Homo sapiens
cgctggcttcgaagtcagacaacaagtttggaaaatggcatcatcccaagaagccctgatgatattgggacctgc

SEQ ID NO: 568969 - DNA, 76 bp, Homo sapiens
ttgtgtgctccatagtttatcaaaagcaggaagctaggaaacctggcagtgccagctgatgagaagtggaaagcgg

SEQ ID NO: 568970 - DNA, 89 bp, Homo sapiens
gcccgcgcgcatctggctgcagctctgcggggcgcaggaggcggtgcacagcgccaaggtgctgctggtgagtagcagccggtacccag

SEQ ID NO: 568971 - DNA, 100 bp, Homo sapiens
cggcgctgccccctctgcgggaagcgggcggccccggccgcctccgcgagggcaccatggaggtgaatgcaggatctaaaatgtccactgaggcacaaag

SEQ ID NO: 568972 - DNA, 76 bp, Homo sapiens
aaggaagtcatcatgggccggcctggaacaggaaggtgctcgggtcttcggggcactgggtcccatcggtccctcc

SEQ ID NO: 568973 - DNA, 75 bp, Homo sapiens
cgtgtctgccatccccatctgtgcccttcgctttatgaggcggataattggacttaaagatgaattttataatcg

SEQ ID NO: 568974 - DNA, 76 bp, Homo sapiens
atcttgacgaggctgcggtgtctgctgctattctccgagcttcgcaatggatctcaaagatttcatgagacaagct

SEQ ID NO: 568975 - DNA, 82 bp, Homo sapiens
cggggatggacctccagatttccttactggtctcggcgcggaagatggccggcggcgtggacggccccatcgggatcccgtt

SEQ ID NO: 568976 - DNA, 75 bp, Homo sapiens
cctccgtcatcgagcagctcttcttcgtccgtttggacctgcaaatgcaactggttgatcctgaagacataccag

SEQ ID NO: 568977 - DNA, 74 bp, Homo sapiens
tcagcctcctgagcagctgggattacagagtgatttcttctgacttgagcctgcagtgtgctgtgagagatcta

SEQ ID NO: 568978 - DNA, 82 bp, Homo sapiens
cgacgtcttgcctgtgtcccacttgttcgcggcctataggagcaccgggggctgctgaccatccgctaccccatggagcacg

SEQ ID NO: 568979 - DNA, 100 bp, Homo sapiens
tctgagggagcttcacttggacaacaacaagcttaccagagtacctggtgggctggcagagcataagtacatccaggatgtggaaagctacgatccagtt

SEQ ID NO: 568980 - DNA, 83 bp, Homo sapiens
gttctgtctgcagaagcccattatggctgtaactggagatgacacagatagcagactccttgaaagcagggtccttgtttagt

SEQ ID NO: 568981 - DNA, 83 bp, Homo sapiens
ccggcccggcagcgacatggaaggattatattccatcacaacaagatattctgcttgccagaagacccaccaaaggcatccat

SEQ ID NO: 568982 - DNA, 75 bp, Homo sapiens
aagccctgggtcgcttggaagaagccaaggtctggaggcggctggtggaaatccaattccccgcggagcatggct

SEQ ID NO: 568983 - DNA, 98 bp, Homo sapiens
actggtcagatgaacccatcaaagagtgcgattcttgctcacttgtggcatctgggctactcaccagaagatatcattggcaacatctttcgagtgtg

SEQ ID NO: 568984 - DNA, 75 bp, Homo sapiens
gcgaatatcgtcatcgttagaaggtgtgtagctgggacggtgctggtctgagctggaccttgtctgatggcttcc

SEQ ID NO: 568985 - DNA, 96 bp, Homo sapiens
gtcagtctatgacaacgtctctctgccgtgaatcattcctgcagatgaaaaagtgtgacttggcagctgaaggggaaactgaggcccaaggaaatt

SEQ ID NO: 568986 - DNA, 87 bp, Homo sapiens
ggaagtggagcaccgatgatgtgcagatcaatgacatttccctgcaggttggatggcaagcatgtggtgtttggcaaagtgaaagaa

SEQ ID NO: 568987 - DNA, 82 bp, Homo sapiens
ccgcggggagcgcgggcgtccggggctggagtcgcgcagactggattatggacagaacttggaaatattgagaataatttct

SEQ ID NO: 568988 - DNA, 100 bp, Homo sapiens
gcgccgggagaggccggcagccccgggacacccccgcaagcgagcagatgaccattctagggtgattctgagccaactggatggaattccctgttcagac

SEQ ID NO: 568989 - DNA, 100 bp, Homo sapiens
gatgacagcaaggagttgcagcggcattttccctgaagatgagatcccagagaaggcctgcaggcgcctgcttgaagggaggcggcagaagaagacgaag

SEQ ID NO: 568990 - DNA, 97 bp, Homo sapiens
aagaagtcttgaatgactggaaactgattggaaactctttgggaaagccactcgaaaaggatggtgccatgacaatggtgtgaactacaagattgga

SEQ ID NO: 568991 - DNA, 75 bp, Homo sapiens
gcgtacataagttatctcttcttttggacccttattttatgccataatggagctgactaaggctttggaacagaa

SEQ ID NO: 568992 - DNA, 100 bp, Homo sapiens
gtctggagaactagtcctcgactcacgctccagggcccacaacggcagtgtcctacatgtcggtgaaatgtgtggatgcccgtaagaaccatcacaagac

SEQ ID NO: 568993 - DNA, 98 bp, Homo sapiens
cgggaatttgtgagacagtattacacactgctgaaccaggccccagacatgctgcatagtgtaaacaggaacatcgataagtagtgtaaaaacttgca

SEQ ID NO: 568994 - DNA, 100 bp, Homo sapiens
aaatttgattacatactgttagagaccactggattagcagaccctgactaccaaaaggaagcgtggctacattaaaaataagctggtttttaagaaaggc

SEQ ID NO: 568995 - DNA, 100 bp, Homo sapiens
cccagtaccaggctatcagcaaacacctccccaaggaaaacctcctgatgagaattcacttccacattgctgatgaaaccaaagaggatatatgtactgc

SEQ ID NO: 568996 - DNA, 75 bp, Homo sapiens
agtaaataaagctcatggcccaccagctagaaagagcacaaagttatcattgttgggctggataatgcagggaaa

SEQ ID NO: 568997 - DNA, 75 bp, Homo sapiens
ggccactattctttcatggacaggcttggccactccaacaggaagtgttcgccagttactacatgaaaagataag

SEQ ID NO: 568998 - DNA, 100 bp, Homo sapiens
cgcgatgggctcgatggattccccggcctcccaggccctcccgttggccgttgtccaatgtgttgctgttatctggaactcctacctgtcctggaaggca

SEQ ID NO: 568999 - DNA, 96 bp, Homo sapiens
gcagatgttgtcaaggtggcctaccaggaggccaggggtgtcgccatggtctgtgcagacttttgcagacaaatcaaaacaagaagctctgaagaa

SEQ ID NO: 569000 - DNA, 100 bp, Homo sapiens
tggtcaacgtcattgccccatgcatcctcatcactcttctggccatcttcgtcttctacctgccaccagatgcaggcggcctgagcacgctcactgacac

SEQ ID NO: 569001 - DNA, 100 bp, Homo sapiens
gcatgaagatggacgaggtcctgtacagcatcgccgagaaggtggaagttaaacgagctgagcctcgggacagcaagagccaagcgccgggacagccagg

SEQ ID NO: 569002 - DNA, 50 bp, Homo sapiens
tccttgcacttcttgttctgtgagaagctccaccatgaggcgaggtggat

SEQ ID NO: 569003 - DNA, 88 bp, Homo sapiens
gctccaggagttcgtctcttacgtctgcggaagtgcagctgcctcagttcttagcgcagctggaatagtcaaatgatttcagttcgtg

SEQ ID NO: 569004 - DNA, 74 bp, Homo sapiens
gacaggaggcagtagccaaacacccaggctagagtaccgtggcacaatctcagctcattgcaacctctgcttcc

SEQ ID NO: 569005 - DNA, 83 bp, Homo sapiens
cgaggcagaggaacagggaagatggcggctgtggtggagaatgtagtgaagctgggctggcaaggtttaattgcttatggatg

SEQ ID NO: 569006 - DNA, 75 bp, Homo sapiens
gtgggtcttcgtgctgctcgacgtgctgtgcttactggtcggtgagaagccctaccactgcaactgggacggctg

SEQ ID NO: 569007 - DNA, 74 bp, Homo sapiens
catggggaaaatctccccggtgactttcaggttatgagaagacagatgatgtttcagagaagacctcactggct

SEQ ID NO: 569008 - DNA, 75 bp, Homo sapiens
ggagccagctgctcactggccgctaccagttggtagctggcagtgttgtgatggcttttgaagaagtatgcccgg

SEQ ID NO: 569009 - DNA, 98 bp, Homo sapiens
gacgacagaccgtttgtgtgcaatgccccgggctgtggacaggaaatgctagtgagtcggaggaagaccgcagcgccggcagtgtggagagcccgtcc

SEQ ID NO: 569010 - DNA, 75 bp, Homo sapiens
taaagcaatatttcgagcagtttggcaaggttttcctttggaatatggataaatacaccatgatacggaaactag

SEQ ID NO: 569011 - DNA, 98 bp, Homo sapiens
ttctctgaagcctggaaacgaggcactcagttggaagagtccagcaagaaagttggagtgactggtccccctgatccacaagtccgctgtccctctgt

SEQ ID NO: 569012 - DNA, 82 bp, Homo sapiens
ggcggcttcctggcctgggcgctccggtggcggcggaggcgatcagtgggtgaccgcggctgcgagggactttgtcatccgt

SEQ ID NO: 569013 - DNA, 100 bp, Homo sapiens
tgtttgacaacgacttcccagctctgcagcctgatgcccccagtccaggtagtaaacctattgatggcaattttgctgactgtggaagtgactcatccaa

SEQ ID NO: 569014 - DNA, 101 bp, Homo sapiens
atacatgatttaaacaagagatttccacagaagatacaccatcagttaagattataccatcgactccttttccacaagaaggacagcctttaattttgact

SEQ ID NO: 569015 - DNA, 98 bp, Homo sapiens
gtagatacaaatttttggatgatgatggatccatttctcctattgaggagtcaacgtggaacaggaggattttgtaatggaagggcatggcaagactc

SEQ ID NO: 569016 - DNA, 110 bp, Homo sapiens
cctcaggccagtcgcctccaggccaagagggatccttcacccgtgtctgatgaacgggaccgggttcagaagaaaacgttcaccaagtgggtcaacaagcacttaatgaa

SEQ ID NO: 569017 - DNA, 100 bp, Homo sapiens
attggatattattggcctagctggagaatggctgacatcaacggccaataccaacatcaaccccaaggtccaggtggaggccatcgaagggggagccctg

SEQ ID NO: 569018 - DNA, 100 bp, Homo sapiens
ctctaacatcacctgcttcatccttgtttaatgactttggtgccctcaacatctctcagagacgaaagggaagaaacccttttttcttggagccagcaat

SEQ ID NO: 569019 - DNA, 82 bp, Homo sapiens
gcgggtctgtcatcatgtcgcgttacgggcggtacggaggagatgccgacaaaaggatcaaggtggcgaagcccgtggtgga

SEQ ID NO: 569020 - DNA, 100 bp, Homo sapiens
ccagcgccagctgcagccctggccgcgcactcgcctcagctgagcctgggcaggagctgggaggaggcggcagcggcggcggcagaaacagcagcggcgg

SEQ ID NO: 569021 - DNA, 82 bp, Homo sapiens
cggtggggcccgaggccgaggggcccaggcagagcccggagaaaagccacatgggagtgcatccgccccaacccttttcccc

SEQ ID NO: 569022 - DNA, 82 bp, Homo sapiens
tcatttccttcgtacccacagtgcttcatgagaggtgaggtttatacatggggcgacaatgatgagggacaactgggagacg

SEQ ID NO: 569023 - DNA, 75 bp, Homo sapiens
gaagaatcttagagctttctggatccagttcagaggattcagagaaggattagaactaagaggacacaccagcat

SEQ ID NO: 569024 - DNA, 90 bp, Homo sapiens
tttgagaaattttgagtcctcgagtgaatgggcggatctcatatcttcacttggcaaactcaacaagagctaaaaaagtccctgtacgcc

SEQ ID NO: 569025 - DNA, 50 bp, Homo sapiens
ggtcgccctcaaggccatgatcaaaacttaccggtattgtaagaacaagc

SEQ ID NO: 569026 - DNA, 90 bp, Homo sapiens
acagagaccaactgggatattgcccacatgatcagccctgcatctggcctgtgcaggtcagcacttggcctgtgccaagtttctcctgca

SEQ ID NO: 569027 - DNA, 50 bp, Homo sapiens
gcggacctgcggactagcgaacccggagcaatcagccatgactgcctttg

SEQ ID NO: 569028 - DNA, 50 bp, Homo sapiens
ggaagagctgcagtctttgtgggacaagggtacctgctcttccgagactt

SEQ ID NO: 569029 - DNA, 83 bp, Homo sapiens
cgcagagcattggcaggaggggcaaggtggaacaggtaaaaattcatgcaggccccaaatttgcctcctatctgaccttcagc

SEQ ID NO: 569030 - DNA, 74 bp, Homo sapiens
gtctggtgctcggtacggcagaagggtgagagcacagtaaggactattgctatggatggtacagaaggcttggt

SEQ ID NO: 569031 - DNA, 49 bp, Homo sapiens
gctcagactggaggatgaaacggaggagtatttgaagacttctgagcgg

SEQ ID NO: 569032 - DNA, 96 bp, Homo sapiens
acgcagggaggatgggggtccagcctgctacggcggatttgacctgtacttcattttggacaaatctgaattctacaaacacattgtgctttctgg

SEQ ID NO: 569033 - DNA, 75 bp, Homo sapiens
gacggcatcatgtttgttatcgattctggttattgcaaattaaaggtctggagtttcagcttggacactgagcca

SEQ ID NO: 569034 - DNA, 98 bp, Homo sapiens
ctcctgtattaggtcactacaggaatcaggaatacttgacccacaggattattctacaggtgaaaaacccagtgacttgattgtaaaaatttacagag

SEQ ID NO: 569035 - DNA, 90 bp, Homo sapiens
acaaaaaagattgcagttatctgtccagaaaccagagcaagttatcaaagaggatggagatgaagatgaggaagctgagtcagctacggg

SEQ ID NO: 569036 - DNA, 100 bp, Homo sapiens
ggatagactgttggtgcatgctacaaaaagaggcagtgaaatcaactgtgcagaccatcactgttggaggagtgagcacatcacagtttaagacaattat

SEQ ID NO: 569037 - DNA, 100 bp, Homo sapiens
ctggcctgcgcgccgctgcccgcgccacagatcagcatctcatggaatacttccgggacagaagaaatatttgttcaaagttccattatatgaacgtcaa

SEQ ID NO: 569038 - DNA, 100 bp, Homo sapiens
ttgtaattttactcatattagtagccaatgcaattgtgggtgtatggcagctatttcatgcagtgcaaagattgcaaagagtacaaaaccagctgaaaag

SEQ ID NO: 569039 - DNA, 50 bp, Homo sapiens
tggatggtgaatggggaacctttgcaataaggtggcccggaccatcggca

SEQ ID NO: 569040 - DNA, 51 bp, Homo sapiens
cccacaaggagttagcgacctactggggtgtcagaaactatttaaaagaag

SEQ ID NO: 569041 - DNA, 75 bp, Homo sapiens
gagcaattgaagctgactactaaggagaataaggaaaatatgcccaggttaccaacaatcctgaaaatgatggat

SEQ ID NO: 569042 - DNA, 75 bp, Homo sapiens
cacacacaggtgaatttaaaggagcagccctggtgtcacctatcagtaaaaggcagggactggctgccaacccct

SEQ ID NO: 569043 - DNA, 75 bp, Homo sapiens
gagaccgcggccgggaccgaggcctgacatttaccccggtaactgctgggcatttaaaggctcccaggggtacct

SEQ ID NO: 569044 - DNA, 101 bp, Homo sapiens
agaggatttgcttttgtaacttttgatgatcatgatacagttgataaaattgttggctttctcctgtttctcagaggatttatcaattatgcaaaagttcg

SEQ ID NO: 569045 - DNA, 82 bp, Homo sapiens
gtttggactgccaggctgggctgtggcttcaaggagatgcctacatagaagagtgacagcagctagactaaatgtttaactg

SEQ ID NO: 569046 - DNA, 75 bp, Homo sapiens
gtgtgagtgcgcgaagatgcgaaaggtggttttgatcaccggggctagcagctctggattaatcgaattacagct

SEQ ID NO: 569047 - DNA, 82 bp, Homo sapiens
gccgctgcgggcccgctccgacgcggaaggatgagacctgcacgcagtggctcacagcagcacgatttgtgacagcccgagg

SEQ ID NO: 569048 - DNA, 98 bp, Homo sapiens
ctgcctcagcctcccaaagcgctgggattgcagacatgcttgcttcctcatcaccttctgccatgattgtgtttcctgaggtctcccagccgtgcttc

SEQ ID NO: 569049 - DNA, 100 bp, Homo sapiens
actcgctggccgactgcgccgagctgcacgtcctcgaacgcgaggccaacagccccggtatggaacgccgtggactccgggcactgcctgcagacctact

SEQ ID NO: 569050 - DNA, 96 bp, Homo sapiens
atctttattatctcattgaagcttggaattacatagctggaaaggatcttacaggtgtcatggagaaactccagctgggcccagagattctgcagc

SEQ ID NO: 569051 - DNA, 83 bp, Homo sapiens
ggctgacaacatttttccttttccggtagaattgggctatttgctgaagcttcttggtggcccttgctagcccaggaagaaac

SEQ ID NO: 569052 - DNA, 100 bp, Homo sapiens
ggcaaagaacggaacagcctggcgccccacgagcgcggagggcgactttgaactgggcatcagcagtgtcttctgggactctcctactcattgcttgcct

SEQ ID NO: 569053 - DNA, 100 bp, Homo sapiens
ggcgcagccaccccgcgggatacgcctcagcgcggtatcatgatattagctggtttgacatcaagtcatttgtgagtcatcagatcttctcctgaaaatg

SEQ ID NO: 569054 - DNA, 92 bp, Homo sapiens
ggactgtcctttcgtggctcactccctttcctctgctgccgctcggtcacgcttgacaatgcagatcttcgtgaagactctgactggtaaga

SEQ ID NO: 569055 - DNA, 78 bp, Homo sapiens
tcctatctaccctgccattgatattgatgcacagaaggccaatgatgaggccaatcagagtgatacaagtgtctcctt

SEQ ID NO: 569056 - DNA, 100 bp, Homo sapiens
accgacatggaacagggactcactggggcctcctgacaaggtgatccgggcgggccccgcaggaattttatcccctcaccggcctcacactagtatcgca

SEQ ID NO: 569057 - DNA, 75 bp, Homo sapiens
cttgaacttaatacagcaagaaagaccatcaagtttaccaaactccatccggcacaacctgtcactgcatagtcg

SEQ ID NO: 569058 - DNA, 101 bp, Homo sapiens
atcagataaagcaccctgtatcacagactggcaacaagaagatggtaccgtgcatcgcacctatttaagagggttaaagcacgaattgggagctctcagcg

SEQ ID NO: 569059 - DNA, 100 bp, Homo sapiens
ttaggagctctgctcaaagccagacgagctatcagcttcccagtttgcacaattcatcaagaaattatgcggggtcaccggcacaaatgatgaggcatct

SEQ ID NO: 569060 - DNA, 74 bp, Homo sapiens
aaggattccaagtaactcttatttggagcagattctggccagatttctgaagaaacatggaattttctgcagtc

SEQ ID NO: 569061 - DNA, 76 bp, Homo sapiens
ggaggaacgggcccgtcaagctgcgcctgacaggtatgaggatacatgggctgcacttcacagaagagccaaagac

SEQ ID NO: 569062 - DNA, 95 bp, Homo sapiens
gagagaagtggtctgaaggcaaatgaacctacacacttcacggtggactgtactgaggctggggaaggtgaaggtggtgagcctgaagcctgagg

SEQ ID NO: 569063 - DNA, 100 bp, Homo sapiens
tttaaatcctttggcttctggtcaagggctggtggacgaagccattgataccaaatctctgttggatgcttcagaagaagcaattaaaaaagacctggac

SEQ ID NO: 569064 - DNA, 87 bp, Homo sapiens
tagggtcctttatatagaagggagagtaggaagaggagttgtacgcatgtcagagaggttgcaggctgttttcaatttgtcagtttg

SEQ ID NO: 569065 - DNA, 98 bp, Homo sapiens
ccagcgcatgtacaacactctgcgtctcgaggccccagcttctcccagcactcaggaggccatccagggcatgctgtgcatggccaacctgcagtcct

SEQ ID NO: 569066 - DNA, 100 bp, Homo sapiens
agaaagtacggaccataataatcaggagtgaagtcccagggatattctgtgctggcccaaactcgtgtaaaattgaatttcttggaccagattgcaaagt

SEQ ID NO: 569067 - DNA, 98 bp, Homo sapiens
acccaggcagggcctagggtgggacgatggcaggtgggggcagcgacctgagcaccagaaaaattgagtttgcatagccgggcgcagtggcttacgcc

SEQ ID NO: 569068 - DNA, 100 bp, Homo sapiens
ttggaaagcagtttttaagacaatttgctaatccagactttacacaacctatctcagaagttgtagatgaagtaattcagaattgtcctattgatgtcag

SEQ ID NO: 569069 - DNA, 101 bp, Homo sapiens
atgtgaagccaaggaagctgcggaaggattgaagtcaaagaattgaaaccctccaaaccacgtcatctgattgccagaggcattgatgtgcagcaggtttc

SEQ ID NO: 569070 - DNA, 51 bp, Homo sapiens
cagatgaagaagatgagatttcggtgggctaccctaatgttggtaagagtt

SEQ ID NO: 569071 - DNA, 74 bp, Homo sapiens
tatatgggtcctgctctttttgcatgctcaaagatccagacagcaatccatacagcttacttgataatacagaa

SEQ ID NO: 569072 - DNA, 74 bp, Homo sapiens
ttaatcctgaaagccatgcagcggggcaccatgccggtggaaaggatgcgcatgcgcccgtggctggaggagca

SEQ ID NO: 569073 - DNA, 75 bp, Homo sapiens
cattccgacgttacaatggtggagttggcaggtgtgcgcagatttgttcccgacaaggagttttctggttcagac

SEQ ID NO: 569074 - DNA, 83 bp, Homo sapiens
gcttgccgcacaaaaagctagagaggagttattcctgatgaagctaaagctttgtctctgttggcaccagctaatgcagtggc

SEQ ID NO: 569075 - DNA, 73 bp, Homo sapiens
tggacgactccgaggaacattgaggtcagccctgacaaaggtcagctagccccttgaggacatcagctttggc

SEQ ID NO: 569076 - DNA, 96 bp, Homo sapiens
gatcgcccaatccacatgcttttccagtttcacctgtgattccctggatggttaccattcttttgaatgcggctccatagatcccctgacaggctc

SEQ ID NO: 569077 - DNA, 82 bp, Homo sapiens
tgagctgcgccatggccagagtgagtcacccctttccagccagcaaacaaggtcgcctgcgaggccgctggccaggcctgag

SEQ ID NO: 569078 - DNA, 85 bp, Homo sapiens
cctccaaccagtcggagcgagacatggcgtgggtgaaaagagttggggatgatcagctttcttcgagagtcacccagctccttca

SEQ ID NO: 569079 - DNA, 80 bp, Homo sapiens
ctgtgccgtggagggcctcgccatgtcctgctgcccgtgtttgggaaatgggaagtaatgacagctggcacctgaactaa

SEQ ID NO: 569080 - DNA, 83 bp, Homo sapiens
agcggcccgcgcctgggctgccggcacttcgcggcagtcgggaacatgccctgtgtgccgccgtcatttcccacctgcggtta

SEQ ID NO: 569081 - DNA, 100 bp, Homo sapiens
gagaaaaagttcagtgggaagcatgtcgtctttatcgctcagccgggcgtgggtttggatgccatcaatgatgctaacctcctggaagcatgtatctacc

SEQ ID NO: 569082 - DNA, 100 bp, Homo sapiens
caacctttaagcagcagaggagcacgaggatcgtgggagctaagaatttcctgttttccagcacccaacataacttgtaaggattccagtggcaatgaaa

SEQ ID NO: 569083 - DNA, 75 bp, Homo sapiens
caccgagtacgaagcgggcgtttgcgaagttctggacatggcaagacatgtgccactctatcgggcactgctgga

SEQ ID NO: 569084 - DNA, 90 bp, Homo sapiens
aagaagtccgcggccaggacacagttccggaaagcacagccagaaattccgggtagatatgcctggctcaggcagtgcattcatccccac

SEQ ID NO: 569085 - DNA, 90 bp, Homo sapiens
aagctgcacttcctgatttaactaaagtgattcaattgaagatggacttcactgcatggatatcaaagtattgcagagtgccttagcagc

SEQ ID NO: 569086 - DNA, 95 bp, Homo sapiens
tcgagcatctagaaaagaaaatggacctgttgtaggtttttgccaatccagaagactgtgtagcatttggcaaaggagaaaatgccaagaagtat

SEQ ID NO: 569087 - DNA, 98 bp, Homo sapiens
agaagttgatgaaatgatcagggaagcagatattgatggtgatggtcaagtaaactatgaagagtggagactgctgcacggactctggaaccatgaac

SEQ ID NO: 569088 - DNA, 97 bp, Homo sapiens
tccatacaaatgttgccactgctgttttagaacatataaagttgcctgctaataaagatgcctttcgaaagacatggaatcccaagtatacactacg

SEQ ID NO: 569089 - DNA, 75 bp, Homo sapiens
cctttttcgtttttcggatgatgccttcaatactacctttatttccaccatagttgcctgacctggtaccccagc

SEQ ID NO: 569090 - DNA, 75 bp, Homo sapiens
actaaagagggagtgggctcccctaaactggggcctggaaaaggctccaactaccgtgaatgtaacacatcgtcc

SEQ ID NO: 569091 - DNA, 98 bp, Homo sapiens
ccaaatggaaaccaggaagcctagcatcccatgtcaaaaacttggatgaaaatggcttggatttgctctcgtaaaagaatgtgtggatcatttaagta

SEQ ID NO: 569092 - DNA, 83 bp, Homo sapiens
ctccgaaccccttcatgcccaaatcccggaaactccagcgtgtctccagccgtgctggctggaggcgtgatcctgggtgtggc

SEQ ID NO: 569093 - DNA, 82 bp, Homo sapiens
ggggaacaagatccgacccatcaaggcttctgtcatcactcaggtggtggtgaagtttattaagaaggagaaggtcttggag

SEQ ID NO: 569094 - DNA, 74 bp, Homo sapiens
tgaactttctaaccttaagaagaataggtacctcctatggaagattgtaaggaacaagagcctattatggacaa

SEQ ID NO: 569095 - DNA, 74 bp, Homo sapiens
tggaaaacaggcccagctctcaaggttgcagattgataggcagcagtttgaagaaacagttcgaactctaaata

SEQ ID NO: 569096 - DNA, 51 bp, Homo sapiens
tgcgcgccgctgcccgcgccacaggtgtcagctgtgatgcatgtttaaaag

SEQ ID NO: 569097 - DNA, 98 bp, Homo sapiens
taaagaaaatcatttgtgatgggtcagctagtatgcaggctaggcaaactgctgaacatgaactaaatctggcaagaaaaatgagggaatggaaacta

SEQ ID NO: 569098 - DNA, 98 bp, Homo sapiens
gtgcctgggcagcatccagcacctgaagaaccggaccatcggtgaccgcatgggggaggccaaggccagtggaaacctgggaaacacactcaaggtcc

SEQ ID NO: 569099 - DNA, 99 bp, Homo sapiens
caccgacgaacccccaatgctgaccaaggaggagcctgttccagaactgctggaagctgaggacgccaggaaagcatgtgcagatgcaactctctctca

SEQ ID NO: 569100 - DNA, 82 bp, Homo sapiens
gcaagatgtccagtaatgtcccggcggatatggttgtagatgagcatgagagtgtggagcagagtcggcgagcgcaagtcga

SEQ ID NO: 569101 - DNA, 100 bp, Homo sapiens
cccggccctgtaattctcaactgagcccagtttcctccaattgcagcacaagaccttccttttgttctaaaggctggctaccttgaaaaacgcagaaaag

SEQ ID NO: 569102 - DNA, 100 bp, Homo sapiens
cgcctctgaggagccgctgccgccggtgatctacaccatggagaacaagcccatcgtcaccttgtgggcgaaatgctgaaaacttcgaccgatttttcac

SEQ ID NO: 569103 - DNA, 90 bp, Homo sapiens
ggacaacaaaaaatgaaaacttagattgcaacagtgattcacaggtgtttccctctttgaatgaatggctttctaaaggacatggggaat

SEQ ID NO: 569104 - DNA, 82 bp, Homo sapiens
agagtatgtggctgaaatcttgcccaagtatgtccaacaagttcaggatctaggggtgtttattcctgctcctatggctcaa

SEQ ID NO: 569105 - DNA, 100 bp, Homo sapiens
ggaagaccaaagcattgctgcaggcctgctatggtgtgctgcggttcatcatggagagtggggccaaaggctgcgaggttgtggtgtctgggaaactccg

SEQ ID NO: 569106 - DNA, 82 bp, Homo sapiens
gaggcgttatgctgttgcccggttgcgacaggccgatgatgaggtcaaaatgcagatcttcgtgaaaacccttaccggcaag

SEQ ID NO: 569107 - DNA, 101 bp, Homo sapiens
cgaaaggcagccgcggatcgccgcgctcagcgacaaacaagtacaccaggggttggaaaaaccacactaggcaaagaacttgcgtcaaaatcaggactgaa

SEQ ID NO: 569108 - DNA, 75 bp, Homo sapiens
cagaaaggcgggtgtcactggggacgttctgaggagccatccaaaactctgtttgtcaaaggcctgtctgaggat

SEQ ID NO: 569109 - DNA, 75 bp, Homo sapiens
gcacagccagcaccgcacgccctgcaagggagctgttaaacgtttaatgaaagaagcggcagaattgaaagatcc

SEQ ID NO: 569110 - DNA, 75 bp, Homo sapiens
agaaacctgggtgaactttcacggacaacctcagaggacaacgaagtgttcggttatgaagacagtatggagttt

SEQ ID NO: 569111 - DNA, 82 bp, Homo sapiens
cttagctgtgctcgcgctactctctctttctggcctggaggctatccagcgcctgacctctcgggacacacccagccctgtg

SEQ ID NO: 569112 - DNA, 100 bp, Homo sapiens
attgtcaatgggcatactttgttggttgcatctgctaaagaggatcctgccaacattttacaggatgctttcattggatttggaggaaatgtgatcaggc

SEQ ID NO: 569113 - DNA, 75 bp, Homo sapiens
tccctaagacttcaccatgaatttgttagcatcagtgacctcctggtaccaaaagacttgggaacagaaagccag

SEQ ID NO: 569114 - DNA, 100 bp, Homo sapiens
gtaacttttgatgatcatgatacagttgataaaattgttggtggtgtattcgaaggctgccagtgtaccgaaagttgagactgtaaagtcagacaacaag

SEQ ID NO: 569115 - DNA, 100 bp, Homo sapiens
gcgggctgtgagcggaccgcgagcgctgggcgggtccgcggcgcggtcggtcggcgcctgttctcgggctgtttggcggtttcccgtcaccaattttcct

SEQ ID NO: 569116 - DNA, 100 bp, Homo sapiens
aagagacaggaggcagtagccaaacacccagtgccctgtactctgtggggatgacggcagtgggcctggccatcctgtggtatgttttccgtctggccgg

SEQ ID NO: 569117 - DNA, 51 bp, Homo sapiens
cttttggctgtgcgaagcctccgcaggtttggcttgagcaacaagtttgat

SEQ ID NO: 569118 - DNA, 100 bp, Homo sapiens
ggacagatcctgtgttcttctatgtccaggccaaaaagtcaagggtccagagaaggaggagaagttgagacaggcggtcaagcaggtgctgaagtgtgat

SEQ ID NO: 569119 - DNA, 109 bp, Homo sapiens
accccagccgaccttgagctccaggagttcgtctcttacgtctgcggaagtgcagctgcctcagttcttagcgcaggcatagaatgtcaagctaaccaggcgtccgcta

SEQ ID NO: 569120 - DNA, 89 bp, Homo sapiens
ccagagaggcccgcccaccagttcgcccgtccccctgccccgttcacaatacacgatgaggcgagtggtacgacagagcaagtttcggc

SEQ ID NO: 569121 - DNA, 80 bp, Homo sapiens
ggctggtgctggatgcacagggacgtggtcctggctctgggggacagaacccttaggagaaatcttgagagtggacagca

SEQ ID NO: 569122 - DNA, 96 bp, Homo sapiens
gttctcactaaaatgaaagaaaccgctgaggcttatttgggaaagaagaatgtcaagctgtcagctgaggtggagccatttattccccagaagaag

SEQ ID NO: 569123 - DNA, 100 bp, Homo sapiens
aagaaaagcctctgggagcagaagggaggctccaagacctcatcaacaattaagggtgtgctgtccgacctcaccaaagtgacccggatgcatggaatcg

SEQ ID NO: 569124 - DNA, 100 bp, Homo sapiens
agataacaatcaagatgaatatgaccctatggaagcagaagaagctgaggatgaagaagatgggaggcaaatacatgcaggcggtgattcagtatgggaa

SEQ ID NO: 569125 - DNA, 90 bp, Homo sapiens
gaaagatggagatgaacctctaacacagtggaaaggaaccgttctggatcagaatacattctattctgctgggaaaaattacttactacg

SEQ ID NO: 569126 - DNA, 90 bp, Homo sapiens
cctcccctctccagcacgcgagtgtcggattttgcctaccattttacagtatttgtcttctattttggagcctttttattggaagcagca

SEQ ID NO: 569127 - DNA, 90 bp, Homo sapiens
cctgcagtacctgcagaaggtctctggagacatcttcagcaggagccaagccgccatggcctaccacagcttcctggtggagcccatcag

SEQ ID NO: 569128 - DNA, 98 bp, Homo sapiens
ttgaaacagccaatcatgataaggaaatctttttccattacagcagctgatttagaagaaagttttaatgaacatgaactggagccctcatcacctaa

SEQ ID NO: 569129 - DNA, 100 bp, Homo sapiens
gaagatgcaatgctgatgtttgataaaactaccaacaggcacagaggtcagcccaaggccaaccccactgtcactctgttcccgccctcctctgaggagc

SEQ ID NO: 569130 - DNA, 76 bp, Homo sapiens
ggatctttccggatcaatccagatggcagccagtcagtggtggaggcttccaaaagccaggatcgcaaatcagcca

SEQ ID NO: 569131 - DNA, 100 bp, Homo sapiens
gataacactgcatgaaatgttagagtgatggaatggggagaagatattaaagcagtttcaaaagatgaagcagtgatgttggtgaatcatcaggcaacag

SEQ ID NO: 569132 - DNA, 50 bp, Homo sapiens
ttaccaccaatgggaacatgcacagatcaatgtccgagttaccaccatgg

SEQ ID NO: 569133 - DNA, 90 bp, Homo sapiens
cgaggctgcggtgtctgctgctattctccgagcttcgcaatggatccgagccaggagacactgagcctttggagttaggaggtcctggag

SEQ ID NO: 569134 - DNA, 100 bp, Homo sapiens
gtcatgattgtttatcctaatcccaatgctgaagtaagattgtcttggaaatactaagttgggtcctgagggagtctaacaagttagcagaaatggaaga

SEQ ID NO: 569135 - DNA, 75 bp, Homo sapiens
acagcggcctcggcctccccttggattcagacgccgattcgcccaggtctgccatcatggatgttctcgcagaag

SEQ ID NO: 569136 - DNA, 97 bp, Homo sapiens
cgcgaaccgcagtatcatgctggccaagaagatcatcattaaggacggaggcacgaattcctagaggacctgtgcaacaacctcttgaggatcgaat

SEQ ID NO: 569137 - DNA, 98 bp, Homo sapiens
cacaactcgacggtccaggcctcgatggagagactgtgcagctacctgcctgctagtgagacctgcaacgacttccacccgatgttcttcacccacga

SEQ ID NO: 569138 - DNA, 75 bp, Homo sapiens
ataacactaaaaggatgatggacagcagcctgagagacacaatctgacgtctctgaaagccactcggaatttctc

SEQ ID NO: 569139 - DNA, 75 bp, Homo sapiens
agacaccagctccgaaatcaccaccaagggtggatgtgaacactgaccggaagatcagtgccaaggagatgcagc

SEQ ID NO: 569140 - DNA, 74 bp, Homo sapiens
ggcctgataaagcgcgccgactgggctacaaggccaagcaagggatcaatgtgaccacagcagtatcagaggtc

SEQ ID NO: 569141 - DNA, 74 bp, Homo sapiens
tttatacttgcttttgcttcagcgttctgtggttgtcaacagctgtggtcgccaggacccccccagagccaaga

SEQ ID NO: 569142 - DNA, 82 bp, Homo sapiens
cttttcactgttccagagaggagcctgacaaccacattctccttctcaaggttacggcctccgctgccacagggccatcatc

SEQ ID NO: 569143 - DNA, 99 bp, Homo sapiens
gccagatgactaagacatataatgacatagatgctgtcactcggcttcttgaggaggaaaaatgccagctgtgggacaaggagtgcaggccgcacaacc

SEQ ID NO: 569144 - DNA, 100 bp, Homo sapiens
ggacgcgcgcagcccgcccgcccggcgaccagcaagatgatgtgatgccagccacttactgtgaaattgatttagataaagaaaagagagatgcatttgt

SEQ ID NO: 569145 - DNA, 100 bp, Homo sapiens
ccttagaggagccatttttccagctttctgaaaaggatatgagcatgctcgaggagaggattaagcggtcagcaaagagaccctctgctgcaccaataaa

SEQ ID NO: 569146 - DNA, 83 bp, Homo sapiens
ggccagcctctgcttggcatccccttgctggacagtggctgtgagcccaaatcttgtgacaaaactcacacatgcccaccgtg

SEQ ID NO: 569147 - DNA, 99 bp, Homo sapiens
aaaaacatggccttcaacctgctctgcttgtacattgggcagaatgccttcagaaaacggctcttgagatctgtcaacagagaaactttgtagaagaga

SEQ ID NO: 569148 - DNA, 75 bp, Homo sapiens
tgcctatgtattccctggggatggcgcatcacacaccaaagcaaaatgatgcttcaacacccaggccaggtctct

SEQ ID NO: 569149 - DNA, 89 bp, Homo sapiens
ggcgactcccatgcatcggctaatagcccggagacaagcgtggtctcatggattataaccatttggatatttggttcactaacaatttt

SEQ ID NO: 569150 - DNA, 82 bp, Homo sapiens
atagattctgctggtatacagctacatccaggagagaatgctgacagtcctgcagaaaatatggacttgaaggagcagccag

SEQ ID NO: 569151 - DNA, 83 bp, Homo sapiens
tttagagatggtgaagaagcaggtgcttatgatggacctaggactgctggtgttaataatgcagtttatggaatagatgctat

SEQ ID NO: 569152 - DNA, 90 bp, Homo sapiens
ggatattctggtggggagatgaacccaacctagtgggtgtaatacatcatgaactgcagggatttttcaagccacattcaattgatagga

SEQ ID NO: 569153 - DNA, 75 bp, Homo sapiens
tcgctacacagcaatgcatcgagttccagaagaaggcttcttattgggatgtgtgtttgcaattgcggattatcc

SEQ ID NO: 569154 - DNA, 90 bp, Homo sapiens
catgcgcagtcatgagtcgcttcaagtttatcggtttgacttgcagtatccagaggaaatgtggagaaacacagttgtacagaagggaag

SEQ ID NO: 569155 - DNA, 121 bp, Homo sapiens
aaatccagcagggaggtccagatgaaaaagaaaagactaccgcactgaaagatacactgcctctaggactgggacagatagccactgagtacctgcttcaaatcaccctgcacgttttctc

SEQ ID NO: 569156 - DNA, 71 bp, Homo sapiens
tacctgcggcgtcggcagctgctgctccgagaacccagggaccatgggcgcctccaggctctataccctgg

SEQ ID NO: 569157 - DNA, 100 bp, Homo sapiens
gaaaaaggaaccagagttggcagcattcgtcccatgaagctgaggtcttgaagcagctggctgagaaacgagagcacgagaaagaagtgcttcagaaggc

SEQ ID NO: 569158 - DNA, 98 bp, Homo sapiens
cagcgccgtcccgtccgacagccaggcccgggagaaatacagaattcgttgttgggaaggactggggaaacagctgtaacatttgccaccctcagaag

SEQ ID NO: 569159 - DNA, 80 bp, Homo sapiens
caaatgtctgactctgactctcggactgagaaacgcaagggaccttaaaccggaaaacattttgttaaatgaagatatgc

SEQ ID NO: 569160 - DNA, 101 bp, Homo sapiens
tgccccatgtgccagaaggagttcgcccccagataacgaaggaggcccaacttcattcaataaggagcctgacggatttatcccagacggtagaacaaaag

SEQ ID NO: 569161 - DNA, 100 bp, Homo sapiens
ggtgaacgggttggagaagggagccctggagcaggaagccaagtacggtcaggggctttgttatgcacctaaagccatattggaagctccagaagaaaga

SEQ ID NO: 569162 - DNA, 90 bp, Homo sapiens
gccaggtctcagggccgggggtacccgaggtaaatccatttcggatggccactcgtggcatgttcccgacagcccttcctgtcccgagca

SEQ ID NO: 569163 - DNA, 82 bp, Homo sapiens
ctgctgtgggtgatattactggtcctggaaggagaggcggctcctccaaaaccggcgtctggacttggatgcctgcaaagcg

SEQ ID NO: 569164 - DNA, 75 bp, Homo sapiens
tacgcctcctacgtttacctgtccatgcacgttcatcattgagaagcagcctcctcaggtcctgaagacccagac

SEQ ID NO: 569165 - DNA, 72 bp, Homo sapiens
ctgctgctatgctggaagtactgtgcctgctgcaaggctggagagcaaaatccgggagcacttggagaagaa

SEQ ID NO: 569166 - DNA, 50 bp, Homo sapiens
tgcacttctatggccgtaaatgcaaatggtcaagaaaaggcttcatccgg

SEQ ID NO: 569167 - DNA, 50 bp, Homo sapiens
tttcagggcaagccaattatgggatcgatttgcttagtggtataatacct

SEQ ID NO: 569168 - DNA, 75 bp, Homo sapiens
gcggctcccgccggctctgggtctggagtgctgttccctcgtcacaccaatgccagtgctcgagacaacaccatc

SEQ ID NO: 569169 - DNA, 51 bp, Homo sapiens
tcttgcccgagatcctgttaaacgaaaatgtttcaacgtgcgcaagagttg

SEQ ID NO: 569170 - DNA, 97 bp, Homo sapiens
aaaaccttccactccatggcctacgggcacatagggcggaagctgagtatgcccatcgtggtttctccgaggtgaaaactcccacactgttttctac

SEQ ID NO: 569171 - DNA, 98 bp, Homo sapiens
ggcccacagtgggggtgtgcaaacccgagagaactggctgggagtgtccactcgccttccaccagcatggcaacgtcttcacagtaccgccagctgct

SEQ ID NO: 569172 - DNA, 100 bp, Homo sapiens
cagggccaaaatcgcctgcaatctggcctggctggtggccaaagcctttgggacagacttaattcagtgcacaaatgagatgaatgtgaacatcccacag

SEQ ID NO: 569173 - DNA, 101 bp, Homo sapiens
cgagatgcggttttcctcgcagaacgcctttatgcagaagatgttttctcccagatgtcagattccaatggcttaatgatatttagcaagtttgaccagtt

SEQ ID NO: 569174 - DNA, 51 bp, Homo sapiens
gatgggcccaaagtggacatctggggttccttggatatcacccagagtatt

SEQ ID NO: 569175 - DNA, 100 bp, Homo sapiens
gatgaagaaacccagcttgatatgttgcctctctacatatgacatcgtgatcactacctatagcctcgtggccaaggagattcccacaaacaagcaagag

SEQ ID NO: 569176 - DNA, 80 bp, Homo sapiens
tgcagatcaagaccctggagggcgagttctcggtcaccatgtggtcctcagaggctgacccgcggctgattgagtccctc

SEQ ID NO: 569177 - DNA, 100 bp, Homo sapiens
ctgcatagaggcagacctccagaactacctgtaaattatgtgaaacctccaaatgtggaaagtgaagtcactgcttttgctgtcttggatcaagaccaga

SEQ ID NO: 569178 - DNA, 97 bp, Homo sapiens
cgacgccatgaagatcaaagatgccaagaaaccctagatttgagtgaaaaccagatccaggggatcccgaggaaggcgttccgcggcatcaccgatg

SEQ ID NO: 569179 - DNA, 100 bp, Homo sapiens
ggagcgatcacatcattttcccaaggccatgtttttggtatactgtgcactggagaaagaacctgtgccaatgtccttgcctccagccttggtgccacca

SEQ ID NO: 569180 - DNA, 100 bp, Homo sapiens
cctggctagaagcagagacaccaggacagaaaagacagtgttctgctttcatggagttcacagaagagtcgaggagggatgtgtctgcaggccttcgtag

SEQ ID NO: 569181 - DNA, 82 bp, Homo sapiens
gaatggagtcgccttctgcctggtcgggatcccgccccgcccggagccccggcccccacagttcaaatctgaacatcaatga

SEQ ID NO: 569182 - DNA, 75 bp, Homo sapiens
cagaaagagattgggtacttaatgccaaaatgaagtttaatccctttgtgacttccgaccgaagcaagaatcgca

SEQ ID NO: 569183 - DNA, 89 bp, Homo sapiens
agagtctgtggaagaggtggttcgagctccaaatgagaagatgaagcaagtgttaaagaagactatagaagaagccaaagcaataatat

SEQ ID NO: 569184 - DNA, 75 bp, Homo sapiens
caaggtcatctgggaccatctgagcaccatgtacgacatgcaggcgctggtaatagcctgcagctggtgttttga

SEQ ID NO: 569185 - DNA, 89 bp, Homo sapiens
tggacatgcacaccaaaccctgggttagagcaaggtatcagcagatgttgcacacaaacttggtataccttgctacaatagcagattct

SEQ ID NO: 569186 - DNA, 82 bp, Homo sapiens
acagacctcacagtgccaaatggagctggaagcagtccagtggatgatcttccaaaacccaagactactgaagtaattagga

SEQ ID NO: 569187 - DNA, 100 bp, Homo sapiens
ctggatgctcctgagggcggcttcgatgccatcctgcagacagctgtgtgcacggcgggattaaggacactgcatgacattgggccagaaatccggcgtg

SEQ ID NO: 569188 - DNA, 90 bp, Homo sapiens
caaggaaaacgcttagagattgaacattcggtgcccaaaaaacaaagcagcgtcaccctttacaccagaaagctggcgggcactatgggg

SEQ ID NO: 569189 - DNA, 99 bp, Homo sapiens
ggatcgggccccaaggaggcctccattactgtgtctgtgctccacggcacccattctggccccagctacaccccagaactgggcacctccgggctgtga

SEQ ID NO: 569190 - DNA, 100 bp, Homo sapiens
gcctcccaagtagctgggactacagggccgagatggacgaaaaaatgtggttccttgtgttctctctgtaaatggggacctagaccgaggcatgctggcc

SEQ ID NO: 569191 - DNA, 100 bp, Homo sapiens
aatatcatcttccacactaaacccttctatgggggcaagaagcacagaattactgccgagattttataaagtcagacctaaagccaaaaggaaagaagaa

SEQ ID NO: 569192 - DNA, 75 bp, Homo sapiens
acaatggctttggtccccagcgcagtgaagtggtgagcctttttgtcactgcattcacagctctgatggagggca

SEQ ID NO: 569193 - DNA, 103 bp, Homo sapiens
cccgaccccgtcccgaccctggccgccccgagcggagcctggaggtccgcgggagagctgtggggcttggtgagtgtttcgtggcctctcgggttggtcagca

SEQ ID NO: 569194 - DNA, 115 bp, Homo sapiens
gtctgacatggaggatgatttcatgtgcgatgatgaggaggactacgacctgttcaaatctgaacatcaatgatgtactagggaactactcattgactcttgttgatgcattgga

SEQ ID NO: 569195 - DNA, 95 bp, Homo sapiens
tctgaaccaggcggcgctgatcaccaatgactcaaagatcacagtgctcaaacaggtgttcaagcagccctggccagggatcatgcgcacagtct

SEQ ID NO: 569196 - DNA, 51 bp, Homo sapiens
cagattcgcagtggtcgcttcttctccttgatgttgaaagtgtgatgaaca

SEQ ID NO: 569197 - DNA, 98 bp, Homo sapiens
gctgcctcagttcttagcgcaggtgctggtaaacaatgccaaaactcatggagatacaagagcattggaactgaatcagagattgtcctcacaataac

SEQ ID NO: 569198 - DNA, 85 bp, Homo sapiens
acgctggccgcgggctccatcagcatggctgagacggccaatgggaacgtggaggccaaagtggtgtgcttctaccggaggcggg

SEQ ID NO: 569199 - DNA, 51 bp, Homo sapiens
gctggtctcaaactcccaacctcaggtgatctgcccacctcagcctcccaa

SEQ ID NO: 569200 - DNA, 100 bp, Homo sapiens
ctgctgagcccgtccgtccgccgccaccacccactccggacacaggtgtagtcgccgccgccagccgccatgggcaaacagaacagcaagctgcggcccg

SEQ ID NO: 569201 - DNA, 100 bp, Homo sapiens
ttaataaccatgcttaatgcaaaagaccttctacaggacctgaagtccccttcccctgagcccatctacaatagcgaggggaagcggcttaacacccgag

SEQ ID NO: 569202 - DNA, 100 bp, Homo sapiens
ccctgccatggacatgcctgaggtcctcaagtccctgctggagcactctctgccttggccagagaagagaacaggtgtagagaggagagagagtgaacag

SEQ ID NO: 569203 - DNA, 82 bp, Homo sapiens
ccgagaccgcggccgggaccgaggggaaatcgtggaacacatggtccagcactttaaaacacagatctttggggatcggaag

SEQ ID NO: 569204 - DNA, 100 bp, Homo sapiens
cggcgagcgacgcggggcccgggggcggggcggggcgccagccatggacaatcagggctcatcctggaagaaaccccagagagcagcttcctcatcgagg

SEQ ID NO: 569205 - DNA, 75 bp, Homo sapiens
tctaacatccagaagatcacacagtgttgagcggctcttatgcgagagcgagacatgcagtatgtccaaaggatg

SEQ ID NO: 569206 - DNA, 90 bp, Homo sapiens
atcttcaaccacctcgagcggctgctggacgaaggctccccacaggtgcaggaagccgccgcccagccatggacggggaggagcagcagc

SEQ ID NO: 569207 - DNA, 75 bp, Homo sapiens
cagatgcccctgataaaggatacgttgaaacgagatcctgcgttcacttatgaagtgatagtagttgatgatggc

SEQ ID NO: 569208 - DNA, 99 bp, Homo sapiens
tcgcagtggtcgcttcttctccttggcagatcgggagcggtgccgagaaaaatttccttactagatgacatttcatcgcaatgtccgatcgtttggggc

SEQ ID NO: 569209 - DNA, 75 bp, Homo sapiens
cggagacagaggcccccctggattcagaggggaaaatatctttgcatttcttcgttggtatgctcagcctccttt

SEQ ID NO: 569210 - DNA, 87 bp, Homo sapiens
gatgttggagaactatagcaatctggttttcttggggggaagaaatttgtggcaatgaaagtagttaaaagtgctgaacattacact

SEQ ID NO: 569211 - DNA, 80 bp, Homo sapiens
tacctgcggccaattcggtggaacgaggacgcggactgcgaaggcagaacccagtgacttgattgtaaaaatttacagag

SEQ ID NO: 569212 - DNA, 100 bp, Homo sapiens
tgacatgtctgatcccttgctcccatccctgcagcatgaacaaggtgttgacttcaaaatcaaaactgtagagctaagaggaaagaaaattagattacag

SEQ ID NO: 569213 - DNA, 100 bp, Homo sapiens
gcggcacccagggggcagccgcctcatcggccaccacggcgctgaggacgccacggcctccggtgtggctgtctctgatggtgtcatcaaggtgttcaac

SEQ ID NO: 569214 - DNA, 51 bp, Homo sapiens
ccaacccccaaattggctgggacaggtgtgatgaatgcagactctgctacc

SEQ ID NO: 569215 - DNA, 100 bp, Homo sapiens
cttttgatgtctgacaacgtggatcgttgttttgaaacgtcacagtaatgaaaggcagtaatagaaataaggatcattcagcagaaggagaaggggttgg

SEQ ID NO: 569216 - DNA, 50 bp, Homo sapiens
gcacctgccttcgctcccgcaccggtatcttctcttaatggatctccaag

SEQ ID NO: 569217 - DNA, 51 bp, Homo sapiens
gtatatacatcaagtcactgagatattttctgttaccaacaacacagaatg

SEQ ID NO: 569218 - DNA, 50 bp, Homo sapiens
cgcgaccgcggcgcgagtcaccatggaagcttgctgtcttcgatacgtgg

SEQ ID NO: 569219 - DNA, 51 bp, Homo sapiens
gcagaagaggagtcctttaggaagcaagaaagtacgactatcagcagccac

SEQ ID NO: 569220 - DNA, 100 bp, Homo sapiens
tcggaaagagagagcaggctgaagaggaacgatatttccgtttcggaggactcatcttgagcaaaaccgtttctaaacagcagtacaaaggcatggcgat

SEQ ID NO: 569221 - DNA, 51 bp, Homo sapiens
cttcaatactacctttatttccaccatagggttacattccgaaaagcaaat

SEQ ID NO: 569222 - DNA, 100 bp, Homo sapiens
gtcgggggtgtaggttatgggggatttcctgctgcagatatttactgtgttccgaatattgatacgcccggagatgtttccaaaggactggactgttatg

SEQ ID NO: 569223 - DNA, 96 bp, Homo sapiens
catgcccgaccggagagcggagcgcgagcaggacccgcgtgtcgcccctcagcagtttttgtttggctatgccaccacagtcatccccagggtcta

SEQ ID NO: 569224 - DNA, 82 bp, Homo sapiens
tggtcatcaaaatagctacaaaccatactaaattattccatttgcaacttatccccaacagaatgatcaagtctcggcctct

SEQ ID NO: 569225 - DNA, 100 bp, Homo sapiens
gaacttaaaaagcagtctaaacctgtgaccacccctgaagaaattgcacaggcatggaggagtgacggcaggaactttctgtgctctgacaacccttatg

SEQ ID NO: 569226 - DNA, 100 bp, Homo sapiens
tgccaaatgattcagtccttgaaaacaagatactgaagtactctttcccagtgggactaagaaccagcagaacagatatactttctctcaagatgtctct

SEQ ID NO: 569227 - DNA, 100 bp, Homo sapiens
ttggaaaagaggagcgtgggtctgctgtttacagtgcaaagatttgacagcttgctccaggctggatacaaggggcgggtgacaggctggggcaacctga

SEQ ID NO: 569228 - DNA, 100 bp, Homo sapiens
ggattgtagccataagtggacttgtctcagccaatttcttctccagtcatcctccagtttggtcatgcagagactcttcttccactgctttctctcatgg

SEQ ID NO: 569229 - DNA, 80 bp, Homo sapiens
ggatagcagtggcctgagaaaggtgagaagccctaccactgcaactgggacggctgcggctggaagtttgcgcgctcaga

SEQ ID NO: 569230 - DNA, 96 bp, Homo sapiens
ggactccttgtgggctctggaggagctcccagaatgaagacccttccttccattttgacgggagtgggtactctgtcgtggagaagtcacttccgg

SEQ ID NO: 569231 - DNA, 90 bp, Homo sapiens
gccgcaggggcccccgctcccgggctcggcggcgcgggtgaacgtgagcgtacctggtgtgtaagaggaagctggagagtaagaaggaag

SEQ ID NO: 569232 - DNA, 98 bp, Homo sapiens
agtgatggaccgtgctagtgacctgactgatgccttcgtggagccattacagcagcagatcatcagactccaccaagagcttgggagacagaagtctc

SEQ ID NO: 569233 - DNA, 100 bp, Homo sapiens
ggagcttccagccagagggggccgacactactgtgtcgcatttgaagacacttcgtcacccttgcttgctaagatttttatcttgtactgtggaagcgga

SEQ ID NO: 569234 - DNA, 117 bp, Homo sapiens
gggcctactcgcccgccaccctgcgctgccgccgctctgaggagttaaaggcagttcaattaacctccagaagatggctgaacctgcaggaataccagagcaagaaactgatgtctg

SEQ ID NO: 569235 - DNA, 74 bp, Homo sapiens
ggatattggccccgacagcttaacaattgaacccttgaatcagaaaggcaagaagtggtccaaaggcaaagttc

SEQ ID NO: 569236 - DNA, 80 bp, Homo sapiens
tctccctcgagaagctccagatggcgtcttccgtgggcaacgtggccgacagcacaggtggaggtggaggaagcgtccct

SEQ ID NO: 569237 - DNA, 100 bp, Homo sapiens
cagaacactaccgttcaagaggatgctcacttcaaagctttcttccaggttgctgctgactcagccattctagaagttcttcagtccaacattcagcatg

SEQ ID NO: 569238 - DNA, 82 bp, Homo sapiens
cagtctttctgatatctaccagtgtaaacaggaacatcgataagtagtgtaaaaacttgcacaatgaaatccgaagccaagg

SEQ ID NO: 569239 - DNA, 100 bp, Homo sapiens
gcaggctccaaagtgaaggatatggctggagactggcactgggctctgagggagccagatgaccaggatgccccagatgagcatgagccctctccatcag

SEQ ID NO: 569240 - DNA, 76 bp, Homo sapiens
gaggacccagctcaagtttaaacacacctgggagcttcagacgtgcagtccggagtaacactggccagaagactca

SEQ ID NO: 569241 - DNA, 86 bp, Homo sapiens
gcttgcaggccacaaatgcagtgtctccactcaaagatttgttgagaaagagataagaaaagctaacattccgattatggacaccg

SEQ ID NO: 569242 - DNA, 100 bp, Homo sapiens
cgggtgccgaggagcgggaagagttgctgggcttcctgcctgacacagctcacttcaagaagtgcacaatgtcagaacgtggaattaagtgggcttgtga

SEQ ID NO: 569243 - DNA, 100 bp, Homo sapiens
ttagatctaaaagccacccaggccttggtcctagcacccactcgagaattggctcagcagatacagaagatcattgagacactgacacagcagcttcagg

SEQ ID NO: 569244 - DNA, 88 bp, Homo sapiens
cggaacccgtggtcctccgcttcatagaatgtaactggtcactacatttccccctttcatgatattcctctgaaggtgaactctaaag

SEQ ID NO: 569245 - DNA, 100 bp, Homo sapiens
ctagaaaggttggagctgccgccgcctgcagtcggtgaccgcgcgactcggcgcccgcccgcgtgagaaagatcagtctaaagaaaaggagaagaaagtg

SEQ ID NO: 569246 - DNA, 50 bp, Homo sapiens
cccagggccaccggagctatttgctgggtgggttaggagtacagaagatg

SEQ ID NO: 569247 - DNA, 75 bp, Homo sapiens
gtcacagatgccaaagagttgaagtttgcaagtcaaggctgtatgtttgaaaagggccccaggcagttttatgat

SEQ ID NO: 569248 - DNA, 101 bp, Homo sapiens
cgctctggccgacgagtggagaaagtaagtaaggaggtctctgtaccatggctcgtacaaagcagactgcccgcaaatcgaccggtggtaaagcacccagg

SEQ ID NO: 569249 - DNA, 73 bp, Homo sapiens
gcccctatcgccgagctcgttggagcttgaacccattgtcacccctccgtgggtaattccagaattgattggc

SEQ ID NO: 569250 - DNA, 90 bp, Homo sapiens
gccgctgctacctgcagcgccgtgtggcacgacacaaaaatcagttttgatggcgacgactttgatgatgtggaggaggatgaagggcta

SEQ ID NO: 569251 - DNA, 83 bp, Homo sapiens
cggggctgctggtgggccgcgtcgaagacatggaccagggctacggaggtggagattctggacgcaaagacaagggagaagct

SEQ ID NO: 569252 - DNA, 83 bp, Homo sapiens
gagtgcagctcctaaacctgctggtgacacgactcagacagaaggtatctcaggagattacatttcagcttgaaaaagggtcg

SEQ ID NO: 569253 - DNA, 100 bp, Homo sapiens
ggacagcctcatcacccggctgctggaggttcaaatctgaacatcaatgatgtactagggaactactcattgactcttgttgatgcattggatacacttg

SEQ ID NO: 569254 - DNA, 76 bp, Homo sapiens
agccttcccagtagctggaactacagaactttcacgatggccgtaaagcacagcagcacatcgagacttgctggaa

SEQ ID NO: 569255 - DNA, 74 bp, Homo sapiens
tggcaaatgacatcatgacactggtacacggtcctcttctcgcacggcaatgccgtggacctgggccagatgag

SEQ ID NO: 569256 - DNA, 90 bp, Homo sapiens
cgcgtgcgccttgctcgcccgcagccccgagaccgcaggttgagaacttgttgcttagtaaccaagggaccattaagctgtgtgactttg

SEQ ID NO: 569257 - DNA, 98 bp, Homo sapiens
ggatgccctgcagtacctgcagaaggtctctggagacatcttcagcaggagcaggggagagaagacagaagaggttggagaggtcagggaggtgccag

SEQ ID NO: 569258 - DNA, 75 bp, Homo sapiens
ctggccagcgctgctggcgggcgttagggagccaaaaacctgtatatcatctccgtgaaggggatcaagggacgg

SEQ ID NO: 569259 - DNA, 100 bp, Homo sapiens
gtgaaggtggaacggggctcccaggacctccactaatcaccagaacaaaatgtgcagatgactatgctcagctgtgtaacatccccgtgacgggacgccg

SEQ ID NO: 569260 - DNA, 100 bp, Homo sapiens
cgccgccagccagagggccgagagccgcggggagaaggccatcacccaggtcagcaagggcacctgcgagcaaggccgagacgcatccagagctttcgtg

SEQ ID NO: 569261 - DNA, 50 bp, Homo sapiens
cgctaacaactgcccagctttgagtttcgtgtggctgatcaaagaaagaa

SEQ ID NO: 569262 - DNA, 74 bp, Homo sapiens
tgttctgcagtgaaaagaaattgcgtggtcttccgggctgcagggctccctcaggcagaggctatgacctgcag

SEQ ID NO: 569263 - DNA, 74 bp, Homo sapiens
caaggacggatgatgaagtagtacagagattcagccgttggtctttgaaatttcctgtgatgtgtttcaatcta

SEQ ID NO: 569264 - DNA, 82 bp, Homo sapiens
gtggaggacataagggagatagtgcagagactgaagattggtgctgaagacatggacggcttccaggcagacacggaggagg

SEQ ID NO: 569265 - DNA, 88 bp, Homo sapiens
cgcagacctgctgctgacttccatccctctggatccggcaagatatttgtcaggatacgaatcaggttctcttcaagtgctgccaggg

SEQ ID NO: 569266 - DNA, 100 bp, Homo sapiens
ggactcaggagcaaatcagtaatgatgagttccacccgttcatcgaggccctgctgcctcacgtccgcgccttcgcctacacctggttcaacctgcaggc

SEQ ID NO: 569267 - DNA, 97 bp, Homo sapiens
cagctgctgagcctggccagctacgaggaggagcactttgtggccaacatgctcaacaagatcttcggataatcttgtgccgtggaaatcagaaggg

SEQ ID NO: 569268 - DNA, 100 bp, Homo sapiens
gtcgtccttgatcagaagggtgatcagcaccgcgaaagccccaggggccattggaccctacagtcgaaatcagctgtccgccctgcctgcctgcctgtgt

SEQ ID NO: 569269 - DNA, 100 bp, Homo sapiens
agctccatgctgtgcctgtgctccgcgtctctcatgcagaggaggaaggcctagagagcgtggaccactatcccattctggtggcagtgacgggcatcct

SEQ ID NO: 569270 - DNA, 100 bp, Homo sapiens
ctggagagaagagaatgcctgaagacttggatgaaaatatggattacaggttgatgtgggaggaggaagaacgtgcaaaacgtgaggagctagagcgaat

SEQ ID NO: 569271 - DNA, 100 bp, Homo sapiens
cacagacaccgcctacaggagtatgatgcaaggcaccgggagcctggccgctgcagtggagacagcctcgggacgccaggccctggtggtgggcaagccc

SEQ ID NO: 569272 - DNA, 82 bp, Homo sapiens
cactgctccacctctgattccaccaccgggctgctgaaaatatgacaagctgactttctggagaaattctgatgagatatgt

SEQ ID NO: 569273 - DNA, 75 bp, Homo sapiens
tcttcaacaagaggacccaggagaaattcgccctcaaagaagggaaaaggccgaggcatcagcgtgtgaagaccg

SEQ ID NO: 569274 - DNA, 100 bp, Homo sapiens
acaggaccagttgaatcatctgttgaaatagaatgacatactatggaaatgatattagacaaaaagcaacttcaagtggttttcttatttgagttcaaaa

SEQ ID NO: 569275 - DNA, 83 bp, Homo sapiens
gccgcaggccgggccacagcctggaggccgagcgcgagcagttcgacaagacccagacaatgcagatcttcgtgaagactctg

SEQ ID NO: 569276 - DNA, 108 bp, Homo sapiens
ccagttttgaaatcgacacacaaagaatagagttgagcctgtgggacacttcggccgcggcgagtcctttgcacatgttggcaacacacgcatccgcatcggcctccc

SEQ ID NO: 569277 - DNA, 75 bp, Homo sapiens
aattaaagagtaaagttgtgctcaacggaaacccagcgtttgctggcagaaccagttcctggcatcaaagccgaa

SEQ ID NO: 569278 - DNA, 74 bp, Homo sapiens
agcctcggaggccttcaggaactcttccatgggaggagatgttaaagtaacccatcttgcaggacgacattgaa

SEQ ID NO: 569279 - DNA, 100 bp, Homo sapiens
agctgattcaggtcttaaagaaagagcaggacatctatacccatctggtcaaatctctgcaggaatcagacagagctgttccagacaactataaggtgat

SEQ ID NO: 569280 - DNA, 74 bp, Homo sapiens
gtctggtgcatccttggcagaaagtgaggaggaaaacacccccattagttctgaggttggaggttggaaatggg

SEQ ID NO: 569281 - DNA, 75 bp, Homo sapiens
tcctgctcaggaacatgcgccagttaaaggtacttgctaaagaagctcctccagcttcaggctctaactgaaggg

SEQ ID NO: 569282 - DNA, 75 bp, Homo sapiens
ctcgcctttgccgatccgccgcccgtccacacccgccgccagtcacagcaaactgtacaatggcagttgagtggg

SEQ ID NO: 569283 - DNA, 83 bp, Homo sapiens
ctctccgggctcttctctagctctcagcggctgcgaagtctgtaaacctggtggccaattaaattcactgaggaagaggagca

SEQ ID NO: 569284 - DNA, 100 bp, Homo sapiens
agcctggacctcttcttccgctggctctttgataagaaattcttggctgaggcagctattcggtttgagtcaaaatgcagatcttcgtgaaaacccttac

SEQ ID NO: 569285 - DNA, 111 bp, Homo sapiens
gtacagagatgtgatgttggagaactatagcaatctggttttcttgggtgactattatatggttaaaaagattttggaggaaaacagttcaggtgacttgaacataaattg

SEQ ID NO: 569286 - DNA, 100 bp, Homo sapiens
tacagctgtcagaggagcagatccggaacaaagacgacttcggcagtctgtccaaccttcaggtcactcagcctacagttgggatgaatttcaaaacgcc

SEQ ID NO: 569287 - DNA, 88 bp, Homo sapiens
gccggcagccgacggcaaaggtgtcgtggtggtcattaagcggagatccgcccgcgggaggactcagactccagcacttccagcagcg

SEQ ID NO: 569288 - DNA, 100 bp, Homo sapiens
acagctggaccctttttgagcacctgcctcacataggtgtagtggtggcacaaaggctgaggaagctagaatttcctgtgaaggacagtggagaacccag

SEQ ID NO: 569289 - DNA, 133 bp, Homo sapiens
gacggtgcaggccggagcggcacctacgtcctgatcgacatggttctcaacaagatggccaaagggacaaactctgcctgggcgagtccttttcctgcgttatgtcgttcagaccctagaagatgactttcag

SEQ ID NO: 569290 - DNA, 100 bp, Homo sapiens
tgatgatcttgtgtcaccccctaacacagaaggaaaccagtggtatgactttcttcaaaatagcagccaccttaaagcccaattatacagaaatccgaca

SEQ ID NO: 569291 - DNA, 100 bp, Homo sapiens
gaatgatttatagctaagactccaggacacccctgaagccgagaaatgctttctttagcttgcccatggtgatgtgaagatgagaagaaatagcaaggcc

SEQ ID NO: 569292 - DNA, 95 bp, Homo sapiens
acgaaatgttaagccgtggattcaaggaccagatctatgacatattccaaaagctcaacagcaacacccaggctctgtccagcagtgtaagctcc

SEQ ID NO: 569293 - DNA, 51 bp, Homo sapiens
ctcataataatgattgcctggcttagcagtgtctgcaaaaacgaatctttt

SEQ ID NO: 569294 - DNA, 75 bp, Homo sapiens
tggccagtgattcacgaaaacgcaaattgccatgtgatactccaggacaaggaggagaggagacgccgtgagcgg

SEQ ID NO: 569295 - DNA, 90 bp, Homo sapiens
ctgaactgaagaagcttgggctcacttccacaaatctcttcacagatggaatcacaaataaacttattggctgttacgtgggaaacacca

SEQ ID NO: 569296 - DNA, 96 bp, Homo sapiens
ggccgacctagcaaataaaagagcagtagatttccagaccaattttctgtcagcacactcggccagggatgaggcggcaaggttggaagagcgcag

SEQ ID NO: 569297 - DNA, 100 bp, Homo sapiens
gcagtttcttcaaacgtccagctctacattaaagtttctaatatctcgaaatgcggctgcttttcaagcttttcaggctgcctttcgagctcaggggccc

SEQ ID NO: 569298 - DNA, 75 bp, Homo sapiens
ggatcaggagttagtgataacagcatctcttgggcagtgaacagcagtcttctgtccagctctgggtctcctttg

SEQ ID NO: 569299 - DNA, 100 bp, Homo sapiens
catgatccttgtaggactctggttaattcagtggctgctcttaaaatacaactggtttgccatccacccggtcagcatgaacaacagtaaccatcttgta

SEQ ID NO: 569300 - DNA, 98 bp, Homo sapiens
ggcgaagacgcgaccgcggcgcgagtcaccatggcttcattccagcgctccaatagtcatgacaaagtaaggagaatagttgcagaggagggtcgtac

SEQ ID NO: 569301 - DNA, 83 bp, Homo sapiens
cgtagtcctgggagcacagcagaagtgctgtctgtccccagaccccagagcacgtccggcaccaccatgactgggctgttgaa

SEQ ID NO: 569302 - DNA, 100 bp, Homo sapiens
agctccgggacacctggggccgccgaggcaaagggagagtcccgtattctcagagtaaaagttgtttctggaattgatctcgccaaaaaggacatctttg

SEQ ID NO: 569303 - DNA, 85 bp, Homo sapiens
agtgtgatcccagctttaaaggagatgcaggagaaaatacggcattgctagagaggagcaagcaagggagctgtacaggagacta

SEQ ID NO: 569304 - DNA, 75 bp, Homo sapiens
attccttgggctgcctttcctgcaggtctaacttcaaacttgtggctgttaattcaaaactctatgccatcggag

SEQ ID NO: 569305 - DNA, 101 bp, Homo sapiens
agactgggggccgcaggcgcgctagtatcttaaatagcgaagatggagaaatactcaataatgaagagcatgaatatgcatccaaaaaaagaaaaaggacc

SEQ ID NO: 569306 - DNA, 90 bp, Homo sapiens
caaactgcctggttcaaatcccagctccaatacagagcactgcagtttcctcctgaaggctggctccggctctccctcaataatggcagc

SEQ ID NO: 569307 - DNA, 108 bp, Homo sapiens
tctctgaagaatgcagccttcctaggtccaggctttcatccatcccaggggaatcacttacctatgccagcacaactttcaaactctcagaagaaaagagcaatcact

SEQ ID NO: 569308 - DNA, 76 bp, Homo sapiens
gaccattcccatcagtgagcattacaggtctagatgttgatggaatatatcgagttagtggcaatctggcaacaat

SEQ ID NO: 569309 - DNA, 106 bp, Homo sapiens
ctgatatctcaaaaggtgatctggacaaaggaacaggtatctcagtgaatatcacctctgccaggcaattaaccggctgtagtcgctttggtcatattttcccttc

SEQ ID NO: 569310 - DNA, 100 bp, Homo sapiens
ggccggagggcccacaacccgcagagacttctactggctgcgctcctttctggccggaggtatgtcaagagccccaccttcctcgggggcacctccagcc

SEQ ID NO: 569311 - DNA, 82 bp, Homo sapiens
gcgtcccccagtaggagaatgactccgattcgtgaccctcagcgccggtgcatgtcgatggggatatgagactttctactcg

SEQ ID NO: 569312 - DNA, 100 bp, Homo sapiens
ccagtccgttgctttactttttgcttcaccgacatagtcattatgccgaagagaaagctgaagaaaaggtgactggtctcatgagccctgaagaatgaac

SEQ ID NO: 569313 - DNA, 50 bp, Homo sapiens
cggaaactccagcgtgtctccagccgtgatcccagccatcatgtccatag

SEQ ID NO: 569314 - DNA, 87 bp, Homo sapiens
aaaattactgatacagagacgatggtcggaatcagatttgaaaatgaaagtgtaccagcaacttcaaggtttctgccagcccactgt

SEQ ID NO: 569315 - DNA, 96 bp, Homo sapiens
cggcgggggagcgactcatggagctgccgtaaggcgcccagacaccatgtcacaaccctccagaactgacgttggcaggaagtagagactttgttg

SEQ ID NO: 569316 - DNA, 83 bp, Homo sapiens
ccgaggtggacctgcgggatctgcaccgcgaccagggccgcaggaagacgcaactgtggatattcataaggagaaagtggcac

SEQ ID NO: 569317 - DNA, 88 bp, Homo sapiens
taggggggacgcggcggcggcgttgacaatgagaatggtgacttcttggccctggatcttggaggaaccaatttccgtgtgctgctgg

SEQ ID NO: 569318 - DNA, 96 bp, Homo sapiens
ctggatgtttgcgacatcccagagagcttccagatgttccttgcctgtatctccccttggttcaatagctaccagatttttggaagaggaggaact

SEQ ID NO: 569319 - DNA, 98 bp, Homo sapiens
gggatttgtcctctggtgcctctgcagttttaacttctagtcatggcgaatgatcgcaggagagcacagactggaccctgctacgatctctcttggag

SEQ ID NO: 569320 - DNA, 85 bp, Homo sapiens
aaggaacgaggcaaggagctaaagcagcgtgcgttcagccctggggtaagaatgattgatgttggctgatattggagtgctcatt

SEQ ID NO: 569321 - DNA, 100 bp, Homo sapiens
tccaatcgacaagaagctggaaaagaatgatgttgtccttaaacaacctacagaatatcatctataacccgattcttcgctgctgctgccttaccgccga

SEQ ID NO: 569322 - DNA, 96 bp, Homo sapiens
ctgggaggccactagcagccagttccggcccgaggacaccgactaccagcagagacctgtcggccatggagcctaatgatagtaccagtaccgctg

SEQ ID NO: 569323 - DNA, 98 bp, Homo sapiens
cggcggccttcgaggaggtcatgaaggacctgagcctgacgcgggccgcgcggcgctcctttaccctcatcgtggaggcctgggactgggacaacgat

SEQ ID NO: 569324 - DNA, 100 bp, Homo sapiens
cgagagcgcgaatatcgtcatcgttagaagagccggggccatccagtcttggcagcatgctcatgcctgtccaggagactgcctgggaagagctcatccg

SEQ ID NO: 569325 - DNA, 74 bp, Homo sapiens
tgataggggggttccatctcccaacttgtccatgaagagagaagggcacagttacctaagtatcaacgtaatct

SEQ ID NO: 569326 - DNA, 78 bp, Homo sapiens
aaatacagatcccaagctaaatcccaagggtccctcaggctccctatcagcccctccagctgcctcagttatctctgc

SEQ ID NO: 569327 - DNA, 98 bp, Homo sapiens
gaggaggaagatggcgggacggctgccggcctgtgtggtggactgtggcacggggacatggatttgattgacatactttggaggcaagatatagatct

SEQ ID NO: 569328 - DNA, 75 bp, Homo sapiens
tagcttcagagttctttgtggatggacttgattctgatgagagcggagctggagtttgttcagatcatcatcatc

SEQ ID NO: 569329 - DNA, 83 bp, Homo sapiens
cgccgcatggaggccggctgaggagcgccgctgcctcgcctcgagtgccagctgatgaagacggagcggccccggcccaacac

SEQ ID NO: 569330 - DNA, 100 bp, Homo sapiens
ttagctcagcaattcttaccttgctgcagttcatggagctcgtttcaaagggcaagatctaaaactggcatggaataaaccagtaactaatatttcagct

SEQ ID NO: 569331 - DNA, 82 bp, Homo sapiens
gtctttccttagtaacctgggcgatagctgacatatctgaagagatggattaagaatgctttggattaaggattgtggagca

SEQ ID NO: 569332 - DNA, 82 bp, Homo sapiens
aatattggaagcgctttgatttacagcagctgcagatcacagctgggctggacccagtggggagaatccagatgaggacccg

SEQ ID NO: 569333 - DNA, 100 bp, Homo sapiens
aggcttcccccagcgcttgccgccctgggcgcggccctgctcctgtcttccattgaggcagaagtcctgtgcctcctgattgctgagtgttcacctggac

SEQ ID NO: 569334 - DNA, 90 bp, Homo sapiens
cagtcatttaccaccaatgggaacatgcacagggattttatattggaagacatggatcttgctgccaacgagatcagcatttatgacaaa

SEQ ID NO: 569335 - DNA, 98 bp, Homo sapiens
ggtgacctggaccacggcgcagacgcgggcgagctgcggctcggacgccagcggacacgcgggcgagtacatcgacgccatcagcaacaagcagggcg

SEQ ID NO: 569336 - DNA, 51 bp, Homo sapiens
cctgtttgtcttctgctttggcccagaatcaaaggcatgggaggttgatac

SEQ ID NO: 569337 - DNA, 75 bp, Homo sapiens
gcggcgccggcctccggggagaaacgattgggaaaatgaggtacgttagtgttcgcgattttaaaggcaaagtgc

SEQ ID NO: 569338 - DNA, 100 bp, Homo sapiens
gccacaggaggctgtgcgggccccgctccgcttcgaatggaacctcaagaaggcatgaagccagcccctgcagtgccgtccacccgcccctctgggcctg

SEQ ID NO: 569339 - DNA, 100 bp, Homo sapiens
gcatgccagggaagcccaagcacctgggcgtccccaacgggcgcatgctacaagtggaccttctagtgcagttgttcctaatacctcatctcggaaaaag

SEQ ID NO: 569340 - DNA, 75 bp, Homo sapiens
cccaaactggaaagaagatgctaattaaagtgaaggtgttttggggaacgagtttagtatattaaaatcaccagg

SEQ ID NO: 569341 - DNA, 100 bp, Homo sapiens
cagcatccagcaagttgcctctgcttcccagcagacgcaaacatgcagatctttgtgaagaccctcactggcaaaaccatcacccttgaggtcgagccca

SEQ ID NO: 569342 - DNA, 100 bp, Homo sapiens
ctaggagctggcggcgacggccacaggggcggcgacggcgcagtgcgaagcgaaacagcctgattacatcaaccccagagccgtgcagctgggctccctt

SEQ ID NO: 569343 - DNA, 51 bp, Homo sapiens
agttcctgagcatctttcccgggctctagagttgggaagacatcactgatt

SEQ ID NO: 569344 - DNA, 75 bp, Homo sapiens
ctgacatttcttttgtgcaagatgagcctcaagtgcttctgcattacagagaaatacgaatgtgctttaaagcga

SEQ ID NO: 569345 - DNA, 90 bp, Homo sapiens
gatcgccagcgccggcctcctccgtgcggagaagaagctgcggccgcacctggccaagatgctgcagttggagaagaaacttgaacgtga

SEQ ID NO: 569346 - DNA, 90 bp, Homo sapiens
agatggtacaaaagagtctttggaggatgcggctttgatgggtggtaaaaccaatcccagttaaaggagatggatctgaaatgaatcact

SEQ ID NO: 569347 - DNA, 50 bp, Homo sapiens
tgtgccaaagtggacgctgccaacagggtctataagaaggagaaagctcg

SEQ ID NO: 569348 - DNA, 80 bp, Homo sapiens
cgtgagattcgcatccacttatgtcagcgctcgcccggcagccagggcgtcaggtgcatggctgcctcctaatcccatag

SEQ ID NO: 569349 - DNA, 75 bp, Homo sapiens
caagagtccacaaagggacctgatgaagcgaagatcaaggaacagcgacatctcactcatgaaaatgtacagcgc

SEQ ID NO: 569350 - DNA, 100 bp, Homo sapiens
aaaggacagcaccctcacggaaccagcaaagcactggcatattgaaaactgccttttccttcctaaaagagatactaatttagtggaaagtgagattcaa

SEQ ID NO: 569351 - DNA, 101 bp, Homo sapiens
agccaagccggtcgtgagtgacgatgacagtgaggaggaacaagaggaggcagtccgttgccactgggcagtatagatatgttgtccagcctgccatcact

SEQ ID NO: 569352 - DNA, 100 bp, Homo sapiens
ggacgcgtatcgccagcacgatcccaccgcacgttcagaagtcgggatttttagactctgaggagcagttggagctaatccacattatggaaatggaaac

SEQ ID NO: 569353 - DNA, 100 bp, Homo sapiens
tgcaaaaaaacttgatcctcgaagagaaggtggtgatcaaagggttatgggtgctacatgtgtgctttcagagcagtagtgtgaggaagcttggagtggg

SEQ ID NO: 569354 - DNA, 100 bp, Homo sapiens
actctgcgccgccgctgcctccatcctgggcaaacctgcggacgtgggaaactacctccgtatgttccgaggttctctgtacaagagatacccctcactc

SEQ ID NO: 569355 - DNA, 74 bp, Homo sapiens
caatctgagggacctgaatcgctgcaccccagaggtggctcggagtctttattataccatttgagtgaattgaa

SEQ ID NO: 569356 - DNA, 75 bp, Homo sapiens
tcagactggccaaaattcaatccctgctttagctcagaagaggaatctcttgttggcatttgaagcggctgaaag

SEQ ID NO: 569357 - DNA, 100 bp, Homo sapiens
atggtgcccaaggcagacagcggcgccttcctgctgctcttcctgctcgtgctcactgtcaccgagccgctgcggccagatggagtctcggtctgtcgcc

SEQ ID NO: 569358 - DNA, 50 bp, Homo sapiens
gagacggcgacttctgacaacgagtttgtcctggttgtggtcaagactgg

SEQ ID NO: 569359 - DNA, 95 bp, Homo sapiens
ctggctcttgccctcatcctggttctggaatcctcagttcaagcaattctgtggtgttcttggtcacacatttatggagtttctgaagggcagtg

SEQ ID NO: 569360 - DNA, 90 bp, Homo sapiens
cgggatcgccgagcccgacctcgggcgccccgccggtcacctccgcgcggacaccagggctttgagtacaagagagtggccgggcagtgc

SEQ ID NO: 569361 - DNA, 82 bp, Homo sapiens
ctgcgcggcattctttgagggacccccattcaagttcaagttcacaattggctggaagcatcagttcacagcagtaatgcac

SEQ ID NO: 569362 - DNA, 100 bp, Homo sapiens
cttctgtaaagagtttaactactcaggttgccgatttaaaattgcaactgaagcaaactcagacagacctgaaggaaaagattatgcccttcattggcta

SEQ ID NO: 569363 - DNA, 75 bp, Homo sapiens
ctggccccgggcaacgatcggaactcggacacgctttgtgacaacaaactgtgctctgcagttttcatcccgtgg

SEQ ID NO: 569364 - DNA, 83 bp, Homo sapiens
ggaagggccggcccgcctccctggccggggcgcagttcggaggttcagaggctgtggccaggccagctgggctcggggagcgc

SEQ ID NO: 569365 - DNA, 90 bp, Homo sapiens
aagtcaaatgcatgccaacattccagttttttaagaagggacaaaagggcggcgactggcggcgcgatggacctgaccgggctcctgctg

SEQ ID NO: 569366 - DNA, 75 bp, Homo sapiens
tgcacagccaatttcatgctccactatagatgtttctatactttgaagatcatggactagtgacgtgctccgctg

SEQ ID NO: 569367 - DNA, 100 bp, Homo sapiens
cggtgcactttgtcttccatgacaccaagttggatgccatgctggaggagttcaagaaggttcagcccagctatggcccaggagaagacagagggctggc

SEQ ID NO: 569368 - DNA, 75 bp, Homo sapiens
aaacttttagactcaccctaagagctgtcaaattatgggcaaaacgtacaggtttgcagattccgccagcagcac

SEQ ID NO: 569369 - DNA, 75 bp, Homo sapiens
atctacttttgggttacaaaaatccagaccagacttgtgtatgcggatacctgcttcagtaccatcaagttaaaa

SEQ ID NO: 569370 - DNA, 101 bp, Homo sapiens
ggggcacgtgcagaaaggagccccgcgagtggcgcgccggggatgcgatcagtgggtgaccgcggctgcgagggactttgtcatccgtcctccaggatctg

SEQ ID NO: 569371 - DNA, 100 bp, Homo sapiens
gcagcgatatggaccacccccatcgtatcccaacctgaaaatccctgggctgaactcgcccatccctgagaggcgtcagtggctgcaggaggccatgtcg

SEQ ID NO: 569372 - DNA, 98 bp, Homo sapiens
ttaaaggctttcacttatattaatctggataaagcggttcttgatgatggtgtgagcatccccggggagtacacttcctttctggctcccatctcttc

SEQ ID NO: 569373 - DNA, 82 bp, Homo sapiens
ttcacccgagggtcggctctaccaagtaggccagaaatgtacacacaggagagctggctgcagtaaaaatcattaaattgga

SEQ ID NO: 569374 - DNA, 74 bp, Homo sapiens
aaagacttcctcaaggactacagtatgcacttaatgtccctctcaaagttatgaagtttcaggatgaattggaa

SEQ ID NO: 569375 - DNA, 75 bp, Homo sapiens
ggatgatgaagatgaggactccacagtattcgacatcaaatacagaaatgcactcggtgatggaaagagagccac

SEQ ID NO: 569376 - DNA, 74 bp, Homo sapiens
cgggaattcagtactctgtaacacccagctaccagaatcccctactttgaaactagtgctgccaatgggacaaa

SEQ ID NO: 569377 - DNA, 82 bp, Homo sapiens
agcagttcagaagagccaaggaataaacatgcaatgaacccaaaagggaacttatgctgtgctatttgattaaaccctctac

SEQ ID NO: 569378 - DNA, 100 bp, Homo sapiens
caacagagtgcctgacccaggtcagtttgtcccatgaggagcacccccatagccatcctctctatggacatggtgtatgcaagtggccaggctgtgaagc

SEQ ID NO: 569379 - DNA, 74 bp, Homo sapiens
caagtccttaactttgttcactcattccagcaagaggtggaaacatacagaagaagcaaggaaattacagttag

SEQ ID NO: 569380 - DNA, 100 bp, Homo sapiens
cgccagatggtggaggaatacacttatttatgaagcggcggcggcggcgcccgggagccggagccttcgcggcgtccacgtccctcccccgctgcacccc

SEQ ID NO: 569381 - DNA, 89 bp, Homo sapiens
aacctgccgccgcccctcaccagacagatcgctgtcaaaaccctagtgcatcacagcctcgtggagtttcacttgaaggaactgagaaa

SEQ ID NO: 569382 - DNA, 119 bp, Homo sapiens
gggacagcaggagcagtggtgctgtcagcgcggccgtcggagacatgggagacccggggtcggaggttttcaaatggaacattttgatgcatcacttagtacctatttcaaggcattgc

SEQ ID NO: 569383 - DNA, 98 bp, Homo sapiens
cagcagccccttacctggggactggttcttggctgcccaccttccccaggcccacggccacatctctgtcaaggccctgggctgcatcttgtacctgc

SEQ ID NO: 569384 - DNA, 82 bp, Homo sapiens
agcgcctctactacctctggatgtcttcccatcgacggtcagtgcgcacgttgtaatcagctgaggccatgtcaggagacgg

SEQ ID NO: 569385 - DNA, 50 bp, Homo sapiens
tttacaacctgcacccactaaagtgacagctggagtatcagccttggaag

SEQ ID NO: 569386 - DNA, 122 bp, Homo sapiens
agctttcacagtttgcgggactcagtcccatcactccaaggagagaagtgatgtttatccatgcatcgttgagacttcggaacctcaagaacaaactggagaataaaatggaaggaataggt

SEQ ID NO: 569387 - DNA, 99 bp, Homo sapiens
tcctatagagtgggctatcaatgctgctaccttgtcacagttttacatcaataagaaagacgagaatccaggacttgaatcgtatcttcccactttctg

SEQ ID NO: 569388 - DNA, 90 bp, Homo sapiens
cacctcacagattccagcttcggaacaagagaccctggaattgaatgatctggcacgggaccctccagcacagtgttcagcaggtcctgt

SEQ ID NO: 569389 - DNA, 90 bp, Homo sapiens
gcggcgcctgggactgcaccgcaccgagggcgagctccaggcagaagagcactgatcgtactggctcactcagagaggacgtccttcaac

SEQ ID NO: 569390 - DNA, 51 bp, Homo sapiens
acctatgaagccatcgtggacggagggtttttaatgaccacaacaagcaag

SEQ ID NO: 569391 - DNA, 74 bp, Homo sapiens
ggagcttctcagaagacagagggttttcttttgaggtttacccaaggtccagcctagcccctaggcaccatgtc

SEQ ID NO: 569392 - DNA, 101 bp, Homo sapiens
gccagcgtagctgaatccagtaccaaaaacgtcaacaacagttttacgctcaaatagctataactgtaccaaagacatggaagaaaccaaaagatcggacc

SEQ ID NO: 569393 - DNA, 80 bp, Homo sapiens
gaccctggagcctcagttggaagcagccgatccagcctgcggagcctgtggggcaggtgaccttgtacaaggactctgac

SEQ ID NO: 569394 - DNA, 100 bp, Homo sapiens
ggcaattgtggtttctctggcaatgaatacaagaagtgtgccactgggtattctgagagaagcctcacaaagtgtattggaattactattgaaaccagac

SEQ ID NO: 569395 - DNA, 80 bp, Homo sapiens
ttttggaagataccggaagtagagtcacggagagggttacacatcattttggaatgactgtatatcatctggattacgtg

SEQ ID NO: 569396 - DNA, 86 bp, Homo sapiens
ggtggcggggctgaagaagcagttctacaaggcgagccagacaatgcagatcttcgtgaagactctgactggtaagaccatcaccc

SEQ ID NO: 569397 - DNA, 74 bp, Homo sapiens
tcagccccaacggcaagcaacttggtgtcatccttgaaggatagaataaatcagctgtcgtgttctcagtgaaa

SEQ ID NO: 569398 - DNA, 100 bp, Homo sapiens
aagttgcagtattggcaaacatgaagcatccaaatattgtccagtatagagaatcatttgaagggtcctggttcttatatcatgaactacataatgtaca

SEQ ID NO: 569399 - DNA, 90 bp, Homo sapiens
agttggacataactttggatccccacaactgtgtggtccctacgtcttcatcatcttcactgtgctcctggttctgttcttcatcttcac

SEQ ID NO: 569400 - DNA, 80 bp, Homo sapiens
cttccgtgggcaacgtggccgacagcacagcatttaaatcaaacggtattgagatggattgggttatgaaacataatggt

SEQ ID NO: 569401 - DNA, 75 bp, Homo sapiens
cgtgaccgtcgctagaactcagttgtgcgttgcggccagtcgccactgctgttggacacgagttgccgctggttg

SEQ ID NO: 569402 - DNA, 100 bp, Homo sapiens
tcttgtgtccgcttctcgcccaacagcagcaaccctatcatcgtctcctgtggctgggacaagctggtcaagctgctaaaggcctggagccctgttttta

SEQ ID NO: 569403 - DNA, 90 bp, Homo sapiens
gggaagcttagcccgccgctgccgcctccgagcagcccgccaggccagtactgatgcaggcactgcaggagccctgactccacagcatgt

SEQ ID NO: 569404 - DNA, 95 bp, Homo sapiens
ggacagcaggagcagtggtgctgtcagcgcggccgtcggagacatgggagacccggggtcggaagttcaaaccttgtactactcagctgatcaca

SEQ ID NO: 569405 - DNA, 83 bp, Homo sapiens
ccttgtggagccggagctgggcgcggattcgccgaggcaccgaggcactcagaggagctccttccgcttccagccgttcgagt

SEQ ID NO: 569406 - DNA, 82 bp, Homo sapiens
gtgctgtccaccatcgagcagtatgccgccctggccacggggactctcttctggatgcaccagcagaaccaaaatcgtgtgt

SEQ ID NO: 569407 - DNA, 89 bp, Homo sapiens
ggcccccaagccctccttcgtgtcgtacgtacgccctgaggatgcctaaatcaaaggaacttgtttcttcaagctcttctggcagtgat

SEQ ID NO: 569408 - DNA, 100 bp, Homo sapiens
cctcgggaattccacctctgcgtttttccctccaggccaagatcaaggctcgagatcttcgcgggaagaagaaggaggagctgctgaaacagctggacga

SEQ ID NO: 569409 - DNA, 51 bp, Homo sapiens
cgggcgggacagtgattccagcccttcagaggttggagcaatcactgaaga

SEQ ID NO: 569410 - DNA, 73 bp, Homo sapiens
ccaagaaggcggagaaggactccaaggcggagcaggccaaagtgaagaagatgtctggcgataaagggatttc

SEQ ID NO: 569411 - DNA, 82 bp, Homo sapiens
ccaatttggccgtcgcagaacatatgccatcctgatgacgatggtgctcaccatcttcatcaagtatgtgctgcactccgtg

SEQ ID NO: 569412 - DNA, 83 bp, Homo sapiens
cttcaaccagcctttggtcatcaccagggtggcagtagagaagagcatcacagaagttgctcaggagctgacagagctggtgg

SEQ ID NO: 569413 - DNA, 103 bp, Homo sapiens
ttttgcaggaaatgtgaatctcaggagagagcagccagagtggttggcaaaagcagcttttgatgatgcaattgcagaactggatacgctgagtgaagaaagc

SEQ ID NO: 569414 - DNA, 74 bp, Homo sapiens
ttgacatttaattttagggtcctttatatagaagggagagtagagctccctctttgcccactagcagggcatta

SEQ ID NO: 569415 - DNA, 50 bp, Homo sapiens
aaaacagaatggaaaagagtcttctgaaattacagaagacatccccgtga

SEQ ID NO: 569416 - DNA, 100 bp, Homo sapiens
acagattttggtgcagctagagaattagaagatgatgagcagtttgtttctctgtatggcacagaagaatatttgcttttagaaattaactggacaggac

SEQ ID NO: 569417 - DNA, 88 bp, Homo sapiens
ctttgcattgactggaaacaatggcatttacagaaagagtcaacagcagtggcaacaggaaatggaagttccagtattaccgaaaatc

SEQ ID NO: 569418 - DNA, 100 bp, Homo sapiens
cttcaggatgcagatgggaagttcctctccaatgacacggtgcagctgaacgtgaagcatgaagttctcgctggagaagctgcaccaaggcatcacagtc

SEQ ID NO: 569419 - DNA, 75 bp, Homo sapiens
agggctgtattctgacgtttacaaaactacagaaatttcgtcctggtgagccatggaaaggttatccaaacattg

SEQ ID NO: 569420 - DNA, 50 bp, Homo sapiens
ctctgacccttgcagtcttcagatgtgaacgattggaagaacagctaaat

SEQ ID NO: 569421 - DNA, 71 bp, Homo sapiens
gactgagcgcgtccaggcctgacagctctgcggctcgggccctgagaacttgaaggtgcacattcttgata

SEQ ID NO: 569422 - DNA, 100 bp, Homo sapiens
ccttggtacccaccgtggaagcgggcctcatggtggcagagagcctccagctggtgacagtacaccagagtgagactgaagatggtgaattcactgaatg

SEQ ID NO: 569423 - DNA, 100 bp, Homo sapiens
accatcgaaaggagcaagagcaagatcaccgtgacatccgaggtgcctttctccaaaagatgaatggaccaggtagtttgtttgcttcagagaatttcct

SEQ ID NO: 569424 - DNA, 100 bp, Homo sapiens
ggtagttccatgctgtctgttcagacttcagcttggtatcagaatcaagctttgcgactctgtctgggtagcactagtgttggaggtcagtatggcgcta

SEQ ID NO: 569425 - DNA, 97 bp, Homo sapiens
atcctgtccatcgtgtgcctgatgatcacgcagctggctggcttcagtggaccacattcaattcgagcactggcgttaagagttttgagggaaattc

SEQ ID NO: 569426 - DNA, 74 bp, Homo sapiens
cctgactctactattctgcacagctgtttgatgaagacaatccagtacacaagtctggaaccagatacatgttc

SEQ ID NO: 569427 - DNA, 50 bp, Homo sapiens
ctggactcggattcgttgcctgaggccttggctgcctggagggtcagaca

SEQ ID NO: 569428 - DNA, 98 bp, Homo sapiens
caggattcgggcttctttgagatcagtatcaaatatttactgaaatcctggagtaatagcacggaagaagatgtagtaaagtcaaagaaaacattcag

SEQ ID NO: 569429 - DNA, 98 bp, Homo sapiens
cttactttattcccgattggagacaggaccaaaggaaaatgagcgtaccaaggatctaatcattgagcaaagatttcatcgcacaatcattgggcaga

SEQ ID NO: 569430 - DNA, 100 bp, Homo sapiens
agccgagttcaacatcctcctggccaccgactcctacaagctcccgaaaagcccgtgaaacaagaggaaatggctgccttggacgtggatagcggcggcg

SEQ ID NO: 569431 - DNA, 100 bp, Homo sapiens
aaggccgcctatgacatcgaggtcaacacccgccgagcacaggctgacctggcctatcagcttcagacgcaaacatgcagatctttgtgaagaccctcac

SEQ ID NO: 569432 - DNA, 139 bp, Homo sapiens
gcccttgaatctgccgacttttgtaacaaatatttgcggtttcagcctcaacccagaggaatcgttactctttcagacatcaaaatttacaagctcttcggatattccagtagaatttataagaagaaatgttaaacta

SEQ ID NO: 569433 - DNA, 127 bp, Homo sapiens
ccgccctgatgaaagccgccatgcagggtcgaacggactgcatccgagccctgatgctagcaggtgctggagaatctggtaaaagcaccattgtgaagcagatgaggatcctgcatgttaatgggtt

SEQ ID NO: 569434 - DNA, 111 bp, Homo sapiens
ccgccaccgagcgtgctgagcaaccgcagcctccgcggccgagagtgcagcgagattttttatcaagcagaaatgcatcgaacaacgagaatcaagatcactgagctaaat

SEQ ID NO: 569435 - DNA, 75 bp, Homo sapiens
aactaaggccccctgcccccttttcctggtgcatgtgaagttatcaaaaacagcaatgtctcaggctgtgcagac

SEQ ID NO: 569436 - DNA, 98 bp, Homo sapiens
gctgagattgactccttgaccagcatcttggctgaccttgagtgcagctccccctataagcctcggcctccacaggccaagctataacatcagaaatg

SEQ ID NO: 569437 - DNA, 51 bp, Homo sapiens
aagagcgaccagctcactaagaacatgactgctggagttaataccaccgac

SEQ ID NO: 569438 - DNA, 100 bp, Homo sapiens
ttaaaagacagtcctcgtcagcactgactttcagctatggaatcgagttttgcggcctccaggtggtggatccaatttttcattaggttttgatgaacca

SEQ ID NO: 569439 - DNA, 101 bp, Homo sapiens
ggacaagaccctggtgaaggaggtcgtacaggcagacctcaacaccaacatcgaggatgaaggcagctccttctatggggtctccagccagtatgagagcc

SEQ ID NO: 569440 - DNA, 75 bp, Homo sapiens
accatccacactgccaccgtcaaggtcgtcatacagaagcaacttagccgtctcgccttgcggcctggaacccct

SEQ ID NO: 569441 - DNA, 75 bp, Homo sapiens
tggacacagacctgctgtgtgtgcttctgcgccccaggccataaaattttgagtagaaaaatccagaaatttgaa

SEQ ID NO: 569442 - DNA, 74 bp, Homo sapiens
gctgggattccacaggcagttcaagtcaagcaactatgggtaattccagaattgattggccataccattgtcac

SEQ ID NO: 569443 - DNA, 100 bp, Homo sapiens
gaacaagccggggaccaagccggggaccaagccggggactaaggcgagccggagaccgagcccgaacagcagatgaaagcacccccgccaagaagacaga

SEQ ID NO: 569444 - DNA, 100 bp, Homo sapiens
tgaagatattattgctaaagaaagagaacagaatgtattgcatatgctgcaccagtttggatttaggtggcgagtagaaaaagaagtaatttcaggaaaa

SEQ ID NO: 569445 - DNA, 101 bp, Homo sapiens
ggggctgaatcttcaacctgtcaaagccttcttaattatgtctgagaaaaggggtgagcccctccagactccgaataggagatcaagagtttgattcattg

SEQ ID NO: 569446 - DNA, 75 bp, Homo sapiens
cttttaaaatattacttaagagaatctcaagctgctaagaattatatccagatcgagagacagaagattctgaaa

SEQ ID NO: 569447 - DNA, 100 bp, Homo sapiens
tcctactgaacccggcagcgacggcaccatgtcagacaaggaaattactcatgatgtcaaagaaacagattgtctcagtttacctagctttgaaaatgcc

SEQ ID NO: 569448 - DNA, 96 bp, Homo sapiens
tttgtggagaaagtcgtcttccacttgcacgaaagctttcctaggccaaaaagagaaatacctcagggactttttcagcgtgatgctccagtccgc

SEQ ID NO: 569449 - DNA, 90 bp, Homo sapiens
gcttgaggctcgcgagcctccttcgccgcgccccacttgctcgtgcactttacacacatgagaaatgttgctgaagtgctgctgaaaggg

SEQ ID NO: 569450 - DNA, 51 bp, Homo sapiens
ctcccattggacctgctgctattcctcaagaacgtggaggaactctgccgc

SEQ ID NO: 569451 - DNA, 84 bp, Homo sapiens
ttccatgctgccttcagcttcctttgccgctctgcatcatgttggccttttaaaggaccatgggctgtttgaggggccaacatc

SEQ ID NO: 569452 - DNA, 75 bp, Homo sapiens
cacagctttaagtaatgagcagcaagccagacgtgactgtcaggaacaaatcctcattgaattttgtgcaggtgg

SEQ ID NO: 569453 - DNA, 50 bp, Homo sapiens
cattgatcgactggcgcctcgcaaggagaaggcagagcccccccaggcta

SEQ ID NO: 569454 - DNA, 98 bp, Homo sapiens
cggaatcccgcgcgctgcccacgattcgcttctgaggaaaatgtttataggaggccttagctgggacactacaaagaaagatctgaaggactactttt

SEQ ID NO: 569455 - DNA, 83 bp, Homo sapiens
aaccgcttcagggtgtccaagttccggcacaccgaggctcggccgccccgccgcgaggcacaaatcctgaagagcccgtgggc

SEQ ID NO: 569456 - DNA, 122 bp, Homo sapiens
ccacaggtgtcagaatggaggggtttgtgtggatggggtcaacacttacaactgccgctgtcccccacaatggacagagattattttgcagaggatgatggggagatggtacccagaacgag

SEQ ID NO: 569457 - DNA, 131 bp, Homo sapiens
gaggggagacgccgtgacaactttcgtttccctctgagggaattgggaggtcggcggccccaaaagtgctggagaatctggtaaaagcaccattgtgaagcagatgaggatcctgcatgttaatgggttta

SEQ ID NO: 569458 - DNA, 82 bp, Homo sapiens
attataggcgtgagccaccgtgcctggctgaaggttccagcaacagatagaaatgctttaagttcactctggggaaagctgg

SEQ ID NO: 569459 - DNA, 99 bp, Homo sapiens
tgaggcgattccagagagcggcggaaaggataagcctcgacttagaagctaccgagttaccctaagaaagggtaaccaggagccgacaacaactcctga

SEQ ID NO: 569460 - DNA, 74 bp, Homo sapiens
gactactgcgatacatacctcacccatgactctgtgttggggatgtcctttgcactgaccctgaactgccagat

SEQ ID NO: 569461 - DNA, 83 bp, Homo sapiens
cgatggtgaaaagggtcctcctgctcacagtgtgaataacagtacctttgtgttggatgaatttaagcgcaagtactccaatg

SEQ ID NO: 569462 - DNA, 83 bp, Homo sapiens
cagcagccaggagtcatgagcgacagcggcgagcagaactacggcgagcgggtgttcttccagagagcaaagccctgaggact

SEQ ID NO: 569463 - DNA, 98 bp, Homo sapiens
ggcgtggaatccgcaacagcggatacgattactaaggctcgtacgtctgcatcgattatcttacgtggggcaaatgatttcatgtgtgatgagatgga

SEQ ID NO: 569464 - DNA, 100 bp, Homo sapiens
gtggtggaggcggcctctctggcagcagacatcagccacgcatctgaccttgttggacctgaaggagaagaaggagaaggtggaggagaaggcaagccgg

SEQ ID NO: 569465 - DNA, 50 bp, Homo sapiens
gccaggcggagattctgcggacattcagataagccaatggacacgtcagt

SEQ ID NO: 569466 - DNA, 75 bp, Homo sapiens
gacaaatgggatactgtttgtggcaagtctgtggagcggtgttggggatgtcctttgcactgaccctgaactgcc

SEQ ID NO: 569467 - DNA, 100 bp, Homo sapiens
cggaacatggccttggacgtcagaaataaggagctcatcgacgagatgcagcgactgtgtgtgtatgtgctgatctttgcactggctctggccgccttct

SEQ ID NO: 569468 - DNA, 100 bp, Homo sapiens
attaacagaggtccttgaagaggctaacactctgtttaatgaagcttgaaatggcgattgaaaacctccaaaaaagcgaaggaatcacatcacacaaaag

SEQ ID NO: 569469 - DNA, 80 bp, Homo sapiens
tcgccagcccgtgccgcgagcgcggcctgcaggagaagccccatgtgccactcccctgatctgcagcttcggtaggccgg

SEQ ID NO: 569470 - DNA, 74 bp, Homo sapiens
gaaaggtgccacagcagagacgcgaaggagaggccctagaaccaaatggaatctatttggaatttgcagaagca

SEQ ID NO: 569471 - DNA, 88 bp, Homo sapiens
gctgggctcacgtgggagctcagtgccctcctgctacagatctgtctcttccttacaatggaagctcttcgtgggcggtcttgactgg

SEQ ID NO: 569472 - DNA, 50 bp, Homo sapiens
ggtaaagaacgatcgtccagtggagggtgtgaacggcatgtctgtggatg

SEQ ID NO: 569473 - DNA, 100 bp, Homo sapiens
ccaagaagcatctgaagcgggtggcagctccaaagcattggatgctggataaattgaccggtgtgtttagggagaccaagacatcattgttttgaagttt

SEQ ID NO: 569474 - DNA, 139 bp, Homo sapiens
ctacaattcctgatattcagaagaatgcagcaaaagccattactaaagcagcttatgatcactgggaccattggtgatgagaaggcaaacatgttcagaagtcaagtaactggaaaaataaacctccttggcctgatag

SEQ ID NO: 569475 - DNA, 83 bp, Homo sapiens
gacgcaacacttttggaacttagacgctagccagaagcggactcctagaagaggggagcagcaaggatggaatgacagccgtg

SEQ ID NO: 569476 - DNA, 75 bp, Homo sapiens
tcacggcggaggacgacgcgctcaaccagatcgcgcgggaggtaaaccaagggaacatgccagggcttcagagca

SEQ ID NO: 569477 - DNA, 51 bp, Homo sapiens
gctgtttctcatctttatactcttccagtggagcggaggcggagggacaag

SEQ ID NO: 569478 - DNA, 75 bp, Homo sapiens
ggggtcacccgctacgggaagcaggcctcgccacagaatgtcttattcttgggctgtagcagtggacaatttaag

SEQ ID NO: 569479 - DNA, 100 bp, Homo sapiens
cactacttgctctttcaagacacagatttggaatgacactgtgcgctttgctttggatgtcctggctattcttactgtggtgccaaaaatccagctccag

SEQ ID NO: 569480 - DNA, 75 bp, Homo sapiens
agccacgcagaggacgccggaacaccctggaagccgagaaatgatactagagtaaaaggatggtttcttctggac

SEQ ID NO: 569481 - DNA, 83 bp, Homo sapiens
ccaagaaccaaccctgccagcacctggaccttggacattcagacttcagaatggactttgtttggagaagctgcctatttctt

SEQ ID NO: 569482 - DNA, 100 bp, Homo sapiens
tgaagcagctgcagccgcagccgcctccgaagatgggggatttctacgacccggagcacccgacccctgaacctgtcgcgaaatcgcctttcagaaattc

SEQ ID NO: 569483 - DNA, 75 bp, Homo sapiens
gtgtgacttcaccgaagaccagaccgcaggcacacaagaattgtgggcagatgagtgagattgaggccaaggtcc

SEQ ID NO: 569484 - DNA, 100 bp, Homo sapiens
gacacccaggaggcatttgaagttccatactatactggcaattgctggagaagattttgcaattgttgcttctgatactcgattgagtgaagggttttca

SEQ ID NO: 569485 - DNA, 100 bp, Homo sapiens
gaacaggcgccttcaaaagcccacttggcgatgggttacagtaagagtgtgatccagctttgcttcctgagcccaatcacgtcatgctgaaccacctata

SEQ ID NO: 569486 - DNA, 75 bp, Homo sapiens
ctttttggtacccctttttatccactcattggcagagaagctgatgaatttacaggaattgaacccttgagcgag

SEQ ID NO: 569487 - DNA, 74 bp, Homo sapiens
cgaaaagcggaaggtggcagcgctggagatcgagaagtgagcactgtgggctatgggatggatgaggtggagca

SEQ ID NO: 569488 - DNA, 137 bp, Homo sapiens
atcctctaacatcacctgcttcatccttgtttaatgactttggtgccctcaacatctctcagagacgaaagataaatttgcgcctcattttggtaagcggaaaaacaaaagagttcctgttttctcctaacgattct

SEQ ID NO: 569489 - DNA, 80 bp, Homo sapiens
aatcccccgtcgatgtcatcagggtcaagttgtattccggaatggggagagaatggggaccattaaatttactcaatttc

SEQ ID NO: 569490 - DNA, 98 bp, Homo sapiens
catggagaagtccttctccgacctcttcaagcgttttgagaaacagaaagaggtgatcgagggctaccgcaagtgagaaagatcagtctaaagaaaag

SEQ ID NO: 569491 - DNA, 83 bp, Homo sapiens
tttacctgtgagatgtttcatcccaacatttgctagtaatagtgttagaagcattccactttgaccacaaaactcttgaagaa

SEQ ID NO: 569492 - DNA, 75 bp, Homo sapiens
gtagcgtcggtgctggaagacgaggccacagacacttctgatagtgaagagttctaaagttcctgttgcttcaga

SEQ ID NO: 569493 - DNA, 90 bp, Homo sapiens
gtttctctgctgcaccgacctcgacgtcttgcctgtgtcccacttgttcgcggcctatagggcacggccgagcagatgaggactgtgtgg

SEQ ID NO: 569494 - DNA, 82 bp, Homo sapiens
acgcagaaggacctggccacggccgagacgcatccagagctttcgtgaccggggactgttctgaagcaggcctcgtggatga

SEQ ID NO: 569495 - DNA, 75 bp, Homo sapiens
aaaaattcaagaaactgactaaagctatatgtggactggttggatggcaagcatgtggtgtttggcaaagtgaaa

SEQ ID NO: 569496 - DNA, 100 bp, Homo sapiens
ggggaggcaagatgatccaccagcggttccatcctacacttggatgcctgaggaagtgcaccatggagaggaggaggtggagacttttgcctttcaggca

SEQ ID NO: 569497 - DNA, 73 bp, Homo sapiens
attgcacctactgaccagggcactcagaagcacatggaacaagcagctatacccctgataagtcatcttttaa

SEQ ID NO: 569498 - DNA, 100 bp, Homo sapiens
ctgtgagcagagatggcacctttgatgctgggccgcgatgggcctcttggaacattggtgtgttcatctgcattcgatgtgctggaatccacaggaatct

SEQ ID NO: 569499 - DNA, 75 bp, Homo sapiens
gttcagtcaggtggggccggtgaagcagtgcttcgtggtgactgaaaaagaactgataaatttcaaacggaagag

SEQ ID NO: 569500 - DNA, 124 bp, Homo sapiens
cgccgcctccgccgctgcctcaggagcggaacaacgtcggcgagcggggaggcaggtggaagtcatcataaagtttctgtttcacccgtcgtccatgttcgaggactctgtgaatctgtggtgg

SEQ ID NO: 569501 - DNA, 58 bp, Homo sapiens
cggacgtttgagaagatcgaggaggtgtctgctcgaccctgtattcagtggatcagct

SEQ ID NO: 569502 - DNA, 75 bp, Homo sapiens
tggacatgttccacacgcgcttcaagcaggagggtgtcctgaacagcaagggggggccctcagcctcttggcctt

SEQ ID NO: 569503 - DNA, 76 bp, Homo sapiens
gcagaatttgggagctgtttattgcagcactgttgtgccctctgatggtgtgtgatcctgtaaaattaaatcttcc

SEQ ID NO: 569504 - DNA, 75 bp, Homo sapiens
cttcctcacccgcgcctgcgacctcggccaccagcttgggctccccacggagggcagcaagtgggacttggggaa

SEQ ID NO: 569505 - DNA, 98 bp, Homo sapiens
tacagtttgattgatatccttctggcatattgctatgaaacccgtgtcactgaaggagagaagaatgttgcagattatattcctcaactggccaaatt

SEQ ID NO: 569506 - DNA, 118 bp, Homo sapiens
tttaactgcttggccgtgcttgccctgtcatcccacctgagaaccatgctcaccgaccctactgcttttggcttctggatgccctcctccagtacacatcgtatggggtgacaccgcc

SEQ ID NO: 569507 - DNA, 100 bp, Homo sapiens
atgccagcgagggctgcaccgtggttggcgggggcgtccagccctacctatagaagggccgagcacagcaatgcaagaaatgggtcctgatgaatatgaa

SEQ ID NO: 569508 - DNA, 75 bp, Homo sapiens
gcgccggaacgccgaggcccagactgccactctccgcccctacctgagtgccgtgcgggccacattgcaggctgc

SEQ ID NO: 569509 - DNA, 100 bp, Homo sapiens
ggccatcctcaatgttttgctcctggcctggaaggggctgggaaccgacgaggactctctcattgagatcatctgctccagaaccaaccaggagctgcag

SEQ ID NO: 569510 - DNA, 100 bp, Homo sapiens
agagaaacactctcaacattgacaaattgaaaatagaaactgctcagaatatcctccgaatcctaaatctagagctccaaggatgctggtcattaagaaa

SEQ ID NO: 569511 - DNA, 88 bp, Homo sapiens
tttctgtgaggaaatatcttccatgttttacatttctttccagaattatacaatatttggatatcaatgcttacaattgtgaagagcc

SEQ ID NO: 569512 - DNA, 101 bp, Homo sapiens
tggaaaagactaactcaaagcttcaagaagaggatatgggccctcacattttccaaacctgtccatctgctaactattttgactgcagagccatgtccatt

SEQ ID NO: 569513 - DNA, 100 bp, Homo sapiens
cggcgcagccaccccgcgggatacgcctcagcgcggtggtggtgaagtttattaagaaggagaaggtcttggaggattgttggattgaggatcccaaact

SEQ ID NO: 569514 - DNA, 96 bp, Homo sapiens
aggcaaggctggtgaccccacacggagaaagtgagcagatcggtgtgatccccagtaagaagagggttctgatattgaagatgaggacatggaaga

SEQ ID NO: 569515 - DNA, 99 bp, Homo sapiens
aaagcgagtcttcaagcgaaagaagcctcaacttcgtctggagaaaagtggtgacttattggaaccagtgacctttgaggatgtggctgtgtacttcac

SEQ ID NO: 569516 - DNA, 82 bp, Homo sapiens
ccgcgtcgaagacatggaccagggctacggagcccagggccttgctgccgccatgactgaggaatcagaggagacagtcctg

SEQ ID NO: 569517 - DNA, 98 bp, Homo sapiens
ggtttggttttgagcggctgaaggagcctggtgagaagacaggctggctcattaacatgcatccttatggggcctcgccagtgctgagtcaaggggtg

SEQ ID NO: 569518 - DNA, 100 bp, Homo sapiens
gggatgtgtatggtcccggaaaagcagtgcctgtaggaggaacaacggtttcgctctttggaaaatacggccacccacacagaatatgcctatgggtcct

SEQ ID NO: 569519 - DNA, 113 bp, Homo sapiens
cacgtcatccgcatcaacaagatgttgtcctgtgctggggctgacagggattgtcgatcagtcacaacaagcataccaagaagcttttgaaatcagcaaaaaggaaatgcaac

SEQ ID NO: 569520 - DNA, 100 bp, Homo sapiens
ctcttcactagaatatggagactgttcaatcaccaggggcagcccaatggatccaatggtgatgaagagacctcagttgtatggcatgggcagtaaccct

SEQ ID NO: 569521 - DNA, 100 bp, Homo sapiens
gggcggcgaccggggcctgggtccacgccgagggcaggacgaacttcaccaggatgttgacaatgcgtctctggcacgtcttgaccttgaacgcaaagtg

SEQ ID NO: 569522 - DNA, 100 bp, Homo sapiens
agtggaggggtgaatcagtatgttgtgcaagaggtactgtccatcaaacatcttccaccacagcttagaggtcaccaaccagtgtggaggctaaaagcgg

SEQ ID NO: 569523 - DNA, 75 bp, Homo sapiens
tcctgccaaaatcctgttaccctagcaacaggcagcttcaaaagatggtccatgatattaaaaacaatgaaggtg

SEQ ID NO: 569524 - DNA, 82 bp, Homo sapiens
acagactgttgcggtaaacctacaagtgcaaccaccagcacctgttgatccaccagtgatgatcatgacgcagtcctgaggt

SEQ ID NO: 569525 - DNA, 100 bp, Homo sapiens
aaaaaagtggtgcagtttttgatgaaattgtagagaacttggttggatttcatcccttactggtctcaaccaaaatattcctgttggaatcatgatgata

SEQ ID NO: 569526 - DNA, 73 bp, Homo sapiens
ctcatctcagcctccaaaagtgctggcattacaggtttgctggttggctcccgagcagacagcaggaaagaag

SEQ ID NO: 569527 - DNA, 95 bp, Homo sapiens
tcggactggtctgtctgagggagatggtgacaagctcaaggcctgcgagtgaagctgtggtctaccaatctagacaactcagtggcaagcattga

SEQ ID NO: 569528 - DNA, 75 bp, Homo sapiens
tatggaattatttcgtgatatccaagaacaagcactgcagccaagttctatagaaattttagagtattcatcaga

SEQ ID NO: 569529 - DNA, 100 bp, Homo sapiens
tggaaaattgttgcctgaagaataccaaggaggatcttttaggtgtgatgaatgcagactctgctaccattttggctgtttggatcctcctttgaaaaag

SEQ ID NO: 569530 - DNA, 100 bp, Homo sapiens
gcagatagaaaatctacttttggatgcccctggacgggacctggtctccctggctgccccctgggcctatggtttcagaaccagctggcgctgctgcaga

SEQ ID NO: 569531 - DNA, 100 bp, Homo sapiens
tccccgcaagatggacggtttcgccggcagtctcgcatcaacaacagcaacttgtgattggcggtgaccggatattcagttgcacatccccacatcaatg

SEQ ID NO: 569532 - DNA, 75 bp, Homo sapiens
ttaattttgccggaatatttcaagacaccgaaagtgtaccacatgaaggaagatggttgggtgaaagtagaaagt

SEQ ID NO: 569533 - DNA, 48 bp, Homo sapiens
agctggctgtcctgaaatattataaggatggcaatggctatattagtg

SEQ ID NO: 569534 - DNA, 75 bp, Homo sapiens
atcccatctaccgcaactctcagttcgagagtaaagcgggagatacagatgacccaccaagaattactcagaacc

SEQ ID NO: 569535 - DNA, 83 bp, Homo sapiens
caaggagctaaagcagcgtgcgttcagccctggggccactgcagaacaaattagacttgcacagatgatttcggaccataatg

SEQ ID NO: 569536 - DNA, 100 bp, Homo sapiens
atggagttcacagaagagtcgaggagctgttcctcctcccactgacctgcgattcaccaacattggtccagacaccatgcgtgtcacctgggctccaccc

SEQ ID NO: 569537 - DNA, 95 bp, Homo sapiens
cgagaacgtccactgcgggccggcgaaagctgttttggccaaacggattcgtgttctcgagctgctgcggcggccacaaggaacccggatgccgc

SEQ ID NO: 569538 - DNA, 100 bp, Homo sapiens
gcttcattggcgggggcctaatgagtccgatgggtggtccttttattcctgctgctcctgtcaaaactgccttgcctgctggcccccagccccagcccca

SEQ ID NO: 569539 - DNA, 75 bp, Homo sapiens
gcaatatataattctggtcaagatgaaaggttgtatcaaagttcttaaggaccaacctcctaatagtgtggaagg

SEQ ID NO: 569540 - DNA, 90 bp, Homo sapiens
tggttctctttgtcattttcaacagtctgcaggtggagccgccaccaaaatgcagattttcgtgaaaacccttacggggaagaccatcac

SEQ ID NO: 569541 - DNA, 100 bp, Homo sapiens
ggagaactggagaagttaaatcagtccacggatgatatcaacagacgggagactgaacttgagtgttgctaacaaccacaagcagaatttgatgacggtg

SEQ ID NO: 569542 - DNA, 83 bp, Homo sapiens
cacctgtcctgcagcactggatgctttcaattctgtggtgttcttggtcacacatttatggagtttctgaagggcagtggaga

SEQ ID NO: 569543 - DNA, 83 bp, Homo sapiens
caggaacagggacagcacctcatcccctggatgggggaccacaagatcctcatcgacaggagactgacaaactggaagatgag

SEQ ID NO: 569544 - DNA, 87 bp, Homo sapiens
gggggattctcgacctgctaacagaactggaccttttcgaccatgacctggtcgtttggatggaacagttctcttcctgtttactat

SEQ ID NO: 569545 - DNA, 75 bp, Homo sapiens
gctgagaggctcaagaagctgattgagcagtatgagctgcgcgaggaggatatgatggatgatatctgtcaggag

SEQ ID NO: 569546 - DNA, 100 bp, Homo sapiens
accattaaactatgggattttcagggctttgaatgcatcagaaccatgcacgctttccagttctcagggaacaatagaaaccagtcttcaggatatcgac

SEQ ID NO: 569547 - DNA, 100 bp, Homo sapiens
ggaagcacgttcagtctggatacctccatgggcaaaataacatggcagccagacgaattacacaggagacttttgatgctgtattacaagaaaaagccaa

SEQ ID NO: 569548 - DNA, 118 bp, Homo sapiens
aagaaaagaatacattcctgattacctgccacccattgtgtcttctcaagaaggaaacttggatttaactggccagaagcaggtattcaaagcagagaacaatccctgggtgaccccc

SEQ ID NO: 569549 - DNA, 100 bp, Homo sapiens
cctgtgggaagtctccatggtgaagtataggctgaggctacctgtgaacagtacgcagtgaatgttgttcacagcatgtccgcctcggcccctgctgcgg

SEQ ID NO: 569550 - DNA, 75 bp, Homo sapiens
cggccaagctatcttctcgctagcaggcctgttacatgaacagaatatggcaaaaatgagactacttacttttat

SEQ ID NO: 569551 - DNA, 100 bp, Homo sapiens
gctgagcctggagcccagaacgcctcggggaacacggctctgcacatctgcgccctctacaacaagggcaattgaaggaacagactaaaaatcgtgtcct

SEQ ID NO: 569552 - DNA, 50 bp, Homo sapiens
atttggtctggagcttgatgaaattggtggagagattcaaccagttagcg

SEQ ID NO: 569553 - DNA, 100 bp, Homo sapiens
gccccaggcccgggttgtggtgctggtcaagtctggcaccatctttgacaacttcctcatcaccaacgatgaggcatacgctgaggagtttggcaacgag

SEQ ID NO: 569554 - DNA, 75 bp, Homo sapiens
ggctgccgagggtgttcttgacgattaatcaacagcaatcatttggggaagaatctacagttgctgatggacaga

SEQ ID NO: 569555 - DNA, 75 bp, Homo sapiens
cgctgcgctaggggaagcgggcagacaagttggatggcttgaggactggtactaaaaggaaacgtgactgggagg

SEQ ID NO: 569556 - DNA, 83 bp, Homo sapiens
cctcgcctcctcgcagcagcgccatggatgagacctgcacgcagtggctcacagcagcacgatttgtgacagcccgaggcgga

SEQ ID NO: 569557 - DNA, 82 bp, Homo sapiens
aaacaatgaccttctcttccggaaccttaaggagggcggcgactggcggcgcgatggacctgaccgggctcctgctggacga

SEQ ID NO: 569558 - DNA, 78 bp, Homo sapiens
tggaggcgccgctctagcggccgggactctgaactatggcgcttattctaccagattccatgaaagtattgccagtgt

SEQ ID NO: 569559 - DNA, 100 bp, Homo sapiens
ctccaacagcttcatatggacagatggacttcaaatgctgtttgtattccagagactaggacctccctctgagattctgccactggtacaagctgtcccc

SEQ ID NO: 569560 - DNA, 98 bp, Homo sapiens
agagcagcagccgcccgcttcaaccccaggggaccagaggaactcagccctgattgcggagaataaaggcagccccgttgatgactgaaaatgacaaa

SEQ ID NO: 569561 - DNA, 75 bp, Homo sapiens
gtcagagctgcacaaagggaaaggatacagtttatgtaacttgatggaagaaaatggaattactccaaaaagaca

SEQ ID NO: 569562 - DNA, 82 bp, Homo sapiens
cgctcagcccacctgtgattatgcctcgatgacttacgagccctcaaggggaagcattttctcctggaccccttgatgccgg

SEQ ID NO: 569563 - DNA, 100 bp, Homo sapiens
gcaacttcatgcatctgcggcccatttcccagaacctccagaggcagctctatgggcggggacccaggcgcagctgcaccaccaccgcctgtgctgatgc

SEQ ID NO: 569564 - DNA, 100 bp, Homo sapiens
tgacaatccagaaatgccttctaattcaggcaatttgcaaaaggtgaatgcgtccccgtctctcacgtccagcactgccaatgaccgaatcctcaagtac

SEQ ID NO: 569565 - DNA, 88 bp, Homo sapiens
ggccggagcttgagatacgccgctctgaatcttgccgccctgcactgccgcttcggtcactagaggagatgttaaagtaacccatctt

SEQ ID NO: 569566 - DNA, 101 bp, Homo sapiens
agaaacagtagtggagaatcaaggactatgctgagaaggaaaataccatagcaaaagctctggaagatctgaaggcaaatttttactgtgaactctgtgac

SEQ ID NO: 569567 - DNA, 100 bp, Homo sapiens
gtcggcgccgagtgggaggatggcggaaggcgccctgcgtccggcagaggaggcgagcatcccgctcaggtgatgaggaacccctcgcgcacccagcgca

SEQ ID NO: 569568 - DNA, 75 bp, Homo sapiens
ttttgcttgtgcaagattatttcagagcaaggtcgtgcggtgtgtgtagaagttcaggcccatgaagttcatcag

SEQ ID NO: 569569 - DNA, 90 bp, Homo sapiens
taccaattggcctttattgactgtatccaaaggattttttgaaggcaccattgccagcaaagggaggaggaggcgagaagatggcggacg

SEQ ID NO: 569570 - DNA, 75 bp, Homo sapiens
cgcgtctctctgctgcggcgcggggaccgctgtgctctcgggtttccaggcctgaggtgcccgccctggccccag

SEQ ID NO: 569571 - DNA, 100 bp, Homo sapiens
ggaagtcatttctactggacttcatgcttagatacatgtataacaagactctttttgatcagaacaatgctgcaaaaaaagaagagtcagaaactgccaa

SEQ ID NO: 569572 - DNA, 100 bp, Homo sapiens
gcagaatttactacagcatgtgatttcaggtctaccagttgctgggcaaacctcagaatttgttaaccaagtgttagagaagactgcagaagggaatccc

SEQ ID NO: 569573 - DNA, 100 bp, Homo sapiens
tgggctcaagaatctgaaccttatcttcattgtgctggagacaggtcttattgaagttaaaacagatgagtttcctcgccatgggagcaacatagaagcc

SEQ ID NO: 569574 - DNA, 82 bp, Homo sapiens
aggcgaggtggccggagccgtgtggaccaggaggagcgctgaactgtggctgcaccatctgtcttcatcttcccgccatctg

SEQ ID NO: 569575 - DNA, 80 bp, Homo sapiens
tgaaaatggacatacggatgttgcagatgttttacttcaagcaggggctgatttaatacactgaagagatggtgccttgg

SEQ ID NO: 569576 - DNA, 75 bp, Homo sapiens
ttttagaggataccttggtcccagagtcatcatgaagggtttggtgcaattctccattaatgaagataacatttg

SEQ ID NO: 569577 - DNA, 75 bp, Homo sapiens
tagaaagtgaaatcagaggagatgtaactatcggagccctctggcacaaatggaagaagaaagaagggagcaagt

SEQ ID NO: 569578 - DNA, 143 bp, Homo sapiens
gtggatcccaaagaaattgatattccgcgtcatggaactaaaaatcgctataagaccattttaccaactggcctgggagcagaagtttcggtgaggagcactagaaacacggctccaccccagattctcactacctttaatgc

SEQ ID NO: 569579 - DNA, 112 bp, Homo sapiens
aacttaagcgaggccctgggggacaacgtgaaacagatatttggccttgacattaaaggcagagactgtggcaatgaggcagctaagtggttcaccaacttcttgaaaactg

SEQ ID NO: 569580 - DNA, 98 bp, Homo sapiens
accaaagccagcctggcatactttgaagatcgtcatgggtgttttacctcaatcatatatccacacaagtgcttctcttgacatttctcgaaaatggg

SEQ ID NO: 569581 - DNA, 83 bp, Homo sapiens
cctgcacctgcctcttcccccattctcaaacactctgctccagccaaggtggtgagggcagctgttcctaaacagcgcaaagg

SEQ ID NO: 569582 - DNA, 100 bp, Homo sapiens
gcgaggacgaggacgaggacgtcaagttcaattttgtggggaagattcttggaccacaagggaatacaatcaaaagactgcaggaagagactggtgcaaa

SEQ ID NO: 569583 - DNA, 50 bp, Homo sapiens
cagagacagctcaggaagcaactttggaatctatggatttcctgaaatat

SEQ ID NO: 569584 - DNA, 98 bp, Homo sapiens
agagtgttgccaaggccaaatatgaatttttatttggcagatctgaagggaaagctccagatactaacccaacatgagtgaagtttcctgcaagaaac

SEQ ID NO: 569585 - DNA, 100 bp, Homo sapiens
cgaccagcaggtggtctatatccatccttccagtgccctcttcaacagacagccagaatggccctagactggagctggttacagacggaagaagaagagc

SEQ ID NO: 569586 - DNA, 51 bp, Homo sapiens
atggtgcagaagaagaacgcgttgacattttgctaaaggctgtgggagaca

SEQ ID NO: 569587 - DNA, 100 bp, Homo sapiens
agctggggaatggagtgagcctgtctgtgagcaaacaacccatgacgggtctccgtctctccaccgggggcttcatccttccagggaggagaagagggac

SEQ ID NO: 569588 - DNA, 80 bp, Homo sapiens
gtgttcgcgggtgtgtgctgcgttcacaggtgtttctgcggcagactgtgccctgtccacggtgcctcctgcatgtcctg

SEQ ID NO: 569589 - DNA, 82 bp, Homo sapiens
aagtttgcagatcgggagcgcaaggtcgccctcaaggccatgatcaaaacgcctcaggcccaggcccaaggccaagtgagag

SEQ ID NO: 569590 - DNA, 90 bp, Homo sapiens
cagatggataccgtatcgacgtggggcctccgggacaggccttcagtatttggcatcacctttacatggagcacaaagatgatgatgatg

SEQ ID NO: 569591 - DNA, 98 bp, Homo sapiens
tgagacgtgcctttgaccttctgccatgattgtgaggcctccccagccacgtgaaactattctgaagggagtggtaatggaagtgaagatgcttcaaa

SEQ ID NO: 569592 - DNA, 100 bp, Homo sapiens
aagaagatcgaaaattaaacctcaggtatcatgatattagctggtttgacatcaagtcatttgtgagtcatcagatcttctcctgaaaatgggagacaca

SEQ ID NO: 569593 - DNA, 100 bp, Homo sapiens
gtaacatccaggttgatgaagctaatttattgacttggcaagggcttattgttcctgtggaggccacaagcaggaaagaaaaggccaagcagaggcccct

SEQ ID NO: 569594 - DNA, 98 bp, Homo sapiens
ataataaagatataaatgaaagtgatgaagttgagcggaaaatccgccagagctactttgcctctgtgtcatatttggatacacaggtcggccgcctc

SEQ ID NO: 569595 - DNA, 83 bp, Homo sapiens
gcccctatgccagccgcaactccagccagctcaccgtccacctgcgatctcacacggggaagaacctacggcagatgagcaag

SEQ ID NO: 569596 - DNA, 97 bp, Homo sapiens
gcgcccggataaggcggcgctgaacgcactgcagcctcctgagttcaggcttgtccagccggaagccctgagggcagctgttcccactggctctgct

SEQ ID NO: 569597 - DNA, 83 bp, Homo sapiens
tctgcaaggccaaggagaggacaagcgacgcgtggcccacctgggctgccattcagatgagtaacccgaagcccctagaggag

SEQ ID NO: 569598 - DNA, 101 bp, Homo sapiens
ggaccgaaacctagccccggacgagaagcgcagcaacgtgcggtgggaccacgagagcgtacctttgacaggagcgtgaccctgctggaggtgtgcgggag

SEQ ID NO: 569599 - DNA, 100 bp, Homo sapiens
cggcggatctggacacccagcggtctgacatcgcgacgctgctcaaaacctcgctccggaaaggggacacctggttttctgtctcaactggtctctgaca

SEQ ID NO: 569600 - DNA, 75 bp, Homo sapiens
gcctcagcctccctagaagctggaattacaggctatgacttctgccaggtcctgcagtggtttgccgagagggtg

SEQ ID NO: 569601 - DNA, 50 bp, Homo sapiens
aacccggccttcaccaaactccctcctaattcagtggtttgagacagcac

SEQ ID NO: 569602 - DNA, 96 bp, Homo sapiens
atgctgtttgccctgaacatcatgaattcccaagaaggagctgcccatgatggggggagctttcatggactcgcccaacgaggacttcagcaccga

SEQ ID NO: 569603 - DNA, 75 bp, Homo sapiens
cgccggcaagagctcggtgctggagaacttcgtgggccgagtcatttgatgtggtcacaaaatgtgtgagtttca

SEQ ID NO: 569604 - DNA, 75 bp, Homo sapiens
ctgctctgaagcgcacgacctccgactactttctccttcaaggttggcatggatcctattagctgtgtaatactg

SEQ ID NO: 569605 - DNA, 104 bp, Homo sapiens
gccctctggacaaatacaagattcaggcgatcgacgccaccgactcttgtatcatgagcattggatttgatcacatggatggagtcttgccctgttgcccaggc

SEQ ID NO: 569606 - DNA, 98 bp, Homo sapiens
gtggggccgtgtctcagtccacccaaggtctcctcggatcgcctggagaggcactcggacctggtagtcaaaccacacactccattaataaggtttcc

SEQ ID NO: 569607 - DNA, 75 bp, Homo sapiens
gaattacagcagccaacctatgttgccctgagttacataaataggtgcccaacgctctgggagagccccaggtgc

SEQ ID NO: 569608 - DNA, 101 bp, Homo sapiens
ctcaaacagcagtatgatgaactggaggctgagtacgacagcctcaaacaggagctggagcagctcaaagagcgccggcatcggccgcacaggcaccatca

SEQ ID NO: 569609 - DNA, 102 bp, Homo sapiens
cccaagaaatcaaaataaaggaaacacatttcatatactgcagaattaccaccagccagccattttgaattcatcggctcttcggcaaattgcagaaggcac

SEQ ID NO: 569610 - DNA, 106 bp, Homo sapiens
aaaaaactggaaattgtgactgcactcctgattacacaagaaaatcctgtaccatatttgtatatgaacacagatcaagattagagaaatccttgcaaaaagaaag

SEQ ID NO: 569611 - DNA, 80 bp, Homo sapiens
aaatgttccaccaggacttgatgaatataatccattctcggattctagaacaaaacattgcttctcagactgtagccaga

SEQ ID NO: 569612 - DNA, 128 bp, Homo sapiens
gcagctggaagaaattcatctggaactcagagaagaaggagtttctgggcaggaccggtggcagttggtgtgctggagaatctggtaaaagcaccattgtgaagcagatgaggatcctgcatgttaat

SEQ ID NO: 569613 - DNA, 100 bp, Homo sapiens
agtcaccactggacctccaaggaagccacgtgcagacatctacaaccttcgatctcctgacgactgtggatggaaaagcaccacttgctactggagagga

SEQ ID NO: 569614 - DNA, 98 bp, Homo sapiens
cagacctgccaactacagccctggggggctgcccctctgactggatccagttcctcaacaagagtacaggggctcaggtccaggtggcaggggatatg

SEQ ID NO: 569615 - DNA, 100 bp, Homo sapiens
catgagctgccaggaattcataaccaacctgaatgggctgagggatggcgggaacttccccaaggagctgctgaaggacttgttctttaagtacacctgg

SEQ ID NO: 569616 - DNA, 101 bp, Homo sapiens
tccttcggccccgccatgggctgctgcagctccgcctcctccgccgcgcaggaaggagctcattgccaagttagatcaggcagaaaaggagaaggtggatg

SEQ ID NO: 569617 - DNA, 75 bp, Homo sapiens
caaaatcagaaattaagattctaagcataggcggaggtgcaggtgccgtgagcgatgtggagatgcaggaacact

SEQ ID NO: 569618 - DNA, 98 bp, Homo sapiens
ggctgggagaggaaacttgatgcttctgggccaccatttgccagggcctcgctcgagtttcccagagctatggggacttcccatccggcgttcctggt

SEQ ID NO: 569619 - DNA, 75 bp, Homo sapiens
tgcttttaaaagtacatcaacagctcttccaccaagagaacggagaccaacctgggctgaagaaagaagattaaa

SEQ ID NO: 569620 - DNA, 75 bp, Homo sapiens
ctcatgtctcctgggataattccaccaacagctgaaaatgtgtgtctgacatgcaagctcagtggggcagagacc

SEQ ID NO: 569621 - DNA, 73 bp, Homo sapiens
cttcccttcaaagaaaatacatttgacctggtggttagcagtttaaggtcttaaagaaagtgcagaagagatg

SEQ ID NO: 569622 - DNA, 79 bp, Homo sapiens
tcagcctcccaggtagctgggattacaggttatttcttatgagggtcatggatatcccctatctaaacttggaaggacc

SEQ ID NO: 569623 - DNA, 76 bp, Homo sapiens
ttaaatactcatctactaggcaagcatggagttggcaccccaaaagaaaggtgctggagaatctggtaaaagcacc

SEQ ID NO: 569624 - DNA, 50 bp, Homo sapiens
acggtgtggggcggtcccggccccgcagttttccaagagataacttcacc

SEQ ID NO: 569625 - DNA, 75 bp, Homo sapiens
agcggattgagcagcagaaagaacagaggcgacggctagaagaggtggctacagtcaacgacttccaaatgcaag

SEQ ID NO: 569626 - DNA, 90 bp, Homo sapiens
gggtgaccgacatcccaactagagttcagttgattccaccatctctagttcttcttccactaaaggaataaagaggaaagctacagaaat

SEQ ID NO: 569627 - DNA, 89 bp, Homo sapiens
aggtctgctgatggccatgaggcgcctgggtctagcgggagaatttctgcttctgggcagaaaaacagttggtgttttctgttgtggac

SEQ ID NO: 569628 - DNA, 89 bp, Homo sapiens
gcctgtgccccgccagctaccggggggactcatgccagcgagaaggcactgcagagcaaccactttgaactgagcctgcgcactgaggc

SEQ ID NO: 569629 - DNA, 51 bp, Homo sapiens
agctggccgagcaggctgagcgatacgacgatttggagcaagaggtggtgg

SEQ ID NO: 569630 - DNA, 97 bp, Homo sapiens
gacctgaaacagaaattctggaacacctatatggtggccatggtggaggtgcagctggagagtgaccacgagtacccaccaggcctgctggtggcct

SEQ ID NO: 569631 - DNA, 100 bp, Homo sapiens
tgcgaggaaaatggcggcgggaggtttttcgttggaatatacgttgcacatttatggcgattctgagtgtgagggcagacttctgccaggctcagcacag

SEQ ID NO: 569632 - DNA, 98 bp, Homo sapiens
tgatccagtggacaaaagaggggaaactatgggagttcccaattaacaatgaagcagactcccaagacagctgggctgcgaccaatggaaacaaagga

SEQ ID NO: 569633 - DNA, 100 bp, Homo sapiens
cttatagccagtaatgtcaccgaaaccatgggcattaacggcagtgcctaccgagtatttccttacagaatgcatacttggaatgaatccttctagagac

SEQ ID NO: 569634 - DNA, 100 bp, Homo sapiens
gagaagtgccttgaagatccagaaaaactaggatccctttttgttaaacacgttcactggttgaggacccagttcccatctttggatatagaggtcgatg

SEQ ID NO: 569635 - DNA, 90 bp, Homo sapiens
ccgccaccagctcctggaccaccatggccaagaaccgcagggacagaaacagttgggaatctacctgttactcgtattttggacaatctt

SEQ ID NO: 569636 - DNA, 80 bp, Homo sapiens
caacctttaagcagcagaggagcacgaggatcgtgggagctaagaagtgtaccaacagtaccgttattgccaccacaagt

SEQ ID NO: 569637 - DNA, 82 bp, Homo sapiens
gatcaaaatgttggagtatgctcttaaacaggaaaggtcagcgttgaagttttggtagagtatcctttttttgtgtttggac

SEQ ID NO: 569638 - DNA, 83 bp, Homo sapiens
aatacagaaccacagtttatcatcccttcctggacttatgtacagcatttgggaaggatgtactgaaattagtagaagctagg

SEQ ID NO: 569639 - DNA, 100 bp, Homo sapiens
gtccctcttcactttcctcggcaagaaatgtgtgaatggagatttacagacagtcatctgggtggaggacacccttttgggatcagcactgaaagtgacg

SEQ ID NO: 569640 - DNA, 53 bp, Homo sapiens
gtacttggagtctggacatctgaaacttgggtctcactctgttgctcaggctg

SEQ ID NO: 569641 - DNA, 74 bp, Homo sapiens
cggtctctgagtcggagtccactccccagctaatgcacaagctgagtgtggaagccccacccaaaatcctggtg

SEQ ID NO: 569642 - DNA, 100 bp, Homo sapiens
gtgtggatgtcatttccatgaggcatttctcattgcaattgtggtaccagatgttgagacattatgttcctgggcccaaaagagaggatttgaagggtcg

SEQ ID NO: 569643 - DNA, 98 bp, Homo sapiens
gaggacatgggcagccgcggcgcgcccaccccccgcgccgtttcaccagtgatcattaaagaatgggcagcttacaaaggaaagtctcctcaaacccc

SEQ ID NO: 569644 - DNA, 100 bp, Homo sapiens
ctcccggcccggattatagtctctcgccacagcggcctcggcctccccttggattcagacgccgattcgcccaggaccctggttaggagtagaatgggac

SEQ ID NO: 569645 - DNA, 98 bp, Homo sapiens
agaagacagcagaggggttgccgagagccactgctggtgaagctggtctcggagctgacaccactcactgtccacgagggcgatgatgccacgttccg

SEQ ID NO: 569646 - DNA, 100 bp, Homo sapiens
attgggagatccacagctaagacgccaggacccactggaagcctagaaatgattacaggtccaccaggttgtggaaaaactcagttttgtataatgatga

SEQ ID NO: 569647 - DNA, 100 bp, Homo sapiens
caaggctaagattagaacagctcataggagagtcatgattttgaatcacccagataaaggtttggggcaagatggaaagacactgctaattacgaatatt

SEQ ID NO: 569648 - DNA, 90 bp, Homo sapiens
catgaagtcggcggatgtggagaaggtctcgctctcacccaggctggagtgcagtgacacagttgcagctcactgcagcctcgacctcct

SEQ ID NO: 569649 - DNA, 51 bp, Homo sapiens
cgacggtccaaatttggaatgaaggaatagtccttatcagtggcagaagat

SEQ ID NO: 569650 - DNA, 88 bp, Homo sapiens
agacagcaaatgtttacacgtatatttctcctgagtgaacctgatgttttacaatagcctacccgttccatcccgggctatcccagtt

SEQ ID NO: 569651 - DNA, 51 bp, Homo sapiens
ttcagttgttgtgcctcatggaggtccagatagtctccaaaaaagtgagct

SEQ ID NO: 569652 - DNA, 96 bp, Homo sapiens
agggaagaaataaaattttcccatactgaactgcagagtgggatgaacttgcagatatgctttgtcaacgacagtggcagtgataaggacagtgat

SEQ ID NO: 569653 - DNA, 100 bp, Homo sapiens
cagctgcttccattggccagtatgaagtggtgaaggagtgtgtgcagcgctctgtgcctcagacaaaattctggagtttgatcgagattttcgaattcga

SEQ ID NO: 569654 - DNA, 82 bp, Homo sapiens
ttcactccagtgcctccgacgcctcctgatggtgcgcgcggagccatggttatcatgtcggagttcagcgcggaccccgcgg

SEQ ID NO: 569655 - DNA, 100 bp, Homo sapiens
tgaaaacgaagatgacgtgtatggaaactcatcaggacggaagcacaggggccactcagagtcgcccgagaaggatggcatagagtttgcatttaaatac

SEQ ID NO: 569656 - DNA, 82 bp, Homo sapiens
tccttactcaagttctcagaagactcatctaactagacatatgcgtactcattcagttttgattacgaagatgcaggctacc

SEQ ID NO: 569657 - DNA, 75 bp, Homo sapiens
cgccaggacgaaggccctactgggcaaggcactgggacgttcgggcgggtgcacctggtgaaggagaagacagcc

SEQ ID NO: 569658 - DNA, 86 bp, Homo sapiens
gcttggtgtcctcctggcctcagcaacctgacaattctgtcgtgtcccggataccgttaaccctggataaagagaatggaggttac

SEQ ID NO: 569659 - DNA, 82 bp, Homo sapiens
agttgatgaatcaagaggaatgcacatctgtgaagatgctgtaaaaagattgaaagctcaaccatctttcctgtgaaaaatt

SEQ ID NO: 569660 - DNA, 80 bp, Homo sapiens
tacctgcagaaggtctctggagacatcttcagcagaacaagttgaaatcatcgcagaaggataaagttcgtcagtttatg

SEQ ID NO: 569661 - DNA, 74 bp, Homo sapiens
taccccaaagctgcccttcactcagagcatctacacccactaccgctgtcggaaaaggtaacagaagatggaac

SEQ ID NO: 569662 - DNA, 83 bp, Homo sapiens
gtcgcgttacgggcggtacggaggaggatttcttacaatctccagctacaacctgcttagcttgctactcagtacgtgaatta

SEQ ID NO: 569663 - DNA, 95 bp, Homo sapiens
tgctagacaccaagaaggacgcactgactcgcctcaagcacctgcgcatcgtcatcgggagaaggtgtgacgtttcttggtcataggagggagtg

SEQ ID NO: 569664 - DNA, 100 bp, Homo sapiens
attgtgaagaagaatttcgatctccgccctggggtcattgtcagtgtccacaggatgaaatgtccgagtcaggccagtcctcggcggccgccacacccag

SEQ ID NO: 569665 - DNA, 97 bp, Homo sapiens
gatggctgggcccgcgtggatctctaaggatctcatggtccggaatgacaccccctgtggaaccaccattggacctatcttggcttctcggctgggg

SEQ ID NO: 569666 - DNA, 74 bp, Homo sapiens
gaattgcttcgtttgccattttcttatggagaactgtccttgttacgccacaggtcatcatctggatcatccca

SEQ ID NO: 569667 - DNA, 75 bp, Homo sapiens
gctatggtgaaacaccactgaagcattgccaaggcatttcactgaaagcagaagctgtctcagtcaagaaagaat

SEQ ID NO: 569668 - DNA, 75 bp, Homo sapiens
ggacaagacccatctttatgcaaagccagcgttacagtaatgttccagggtcagtatagaccttctgatttgctg

SEQ ID NO: 569669 - DNA, 50 bp, Homo sapiens
ctcaaaatgtttgcctcacccaggaggtttctagagaggaaggatctccc

SEQ ID NO: 569670 - DNA, 101 bp, Homo sapiens
gagagggccgcgggcggcggaggcagcggggccgggatggaggacgttaactctaacgtgaacgcggaccaggaggtgagcgagtgctgtgctttcatggg

SEQ ID NO: 569671 - DNA, 101 bp, Homo sapiens
accagcgaggaggtggcggtgctggtgcagcgggttgtgaaggacatcactaacgccttcaggaggaacccacacattcctagactggtcttctacactaa

SEQ ID NO: 569672 - DNA, 100 bp, Homo sapiens
ctaaacaaattcatcccagaaatctaagaggtgttggatcccagaacaagaatgattttattcaagatgttgactagaggaatcataacagagataaatg

SEQ ID NO: 569673 - DNA, 98 bp, Homo sapiens
gcagattatatcgcatcctatggctcaaagaaagatgattataatttacagaaaattccagtatctattaaatcctcgtcaggtttacagtctttctg

SEQ ID NO: 569674 - DNA, 101 bp, Homo sapiens
cctggcagcagagaccaccagaagggctaacctctgctttgtggacattgacaaccacttcattgagttgccagaggacttgccacagttccccaacaaat

SEQ ID NO: 569675 - DNA, 96 bp, Homo sapiens
tctgcgatcccagtgtcaagtttggctgcaaggactcaggccaggaatgagccagatgtttatgaaactagcgacctacctgaggatgatcaagcg

SEQ ID NO: 569676 - DNA, 96 bp, Homo sapiens
ggccgcgacctggttctcccggagtctacaactgtgccctgtccacggtgcctcctgcatgtcctgctgccctgagctgtcccgagctaggtgaca

SEQ ID NO: 569677 - DNA, 100 bp, Homo sapiens
gtgccgcgaggcgagcggcctgagcgccgacagcctggcgcgggcagagccgctggacaaggtgctgcagcaggccggagctattgggagtggcggatcc

SEQ ID NO: 569678 - DNA, 100 bp, Homo sapiens
gcttcttcccacactgtgagcctcagcagctccagccagcggacccgacggctgagaggtcggattgtttgtgctgaacgaactgtcctcttgcttcaga

SEQ ID NO: 569679 - DNA, 100 bp, Homo sapiens
ctctggagacggagaaggtgcagtacacgttgccagacggcagcacgcttgataggcatttcatccttcatgaagccattcaggattttgaattgcatat

SEQ ID NO: 569680 - DNA, 99 bp, Homo sapiens
gaaaagattttgcatctagaggaattgaaaggaaggtggagttgcagcaagggctacgggctgtgtaccacaacatgcctctgatatggaaaccaggct

SEQ ID NO: 569681 - DNA, 98 bp, Homo sapiens
aaaaatgtctctctatccatctctcgaagacttgaagacacagactgcaatatcggtagttgaagaggatctaaagcttttacagcttaagctaagag

SEQ ID NO: 569682 - DNA, 100 bp, Homo sapiens
aagcatctcattgagagaagtcaagtgtttaatattctaaggatgatgccaaaaggtgccgtgagcgatgtggagatgcaggaacactatgatgagtttt

SEQ ID NO: 569683 - DNA, 103 bp, Homo sapiens
attggatcaactttaaattctacaacacagacaccaaataaaatagccatctcacctttgaaatcgccaaataagcaggatgaagttaaaggaagtagatcgt

SEQ ID NO: 569684 - DNA, 111 bp, Homo sapiens
ctcacgcttcccctccatcggaagccagccaggccaaaacccagcaagatatgcagtccagtgactcatcaagtgaatattctgattggacagcagatgctggaataaatt

SEQ ID NO: 569685 - DNA, 75 bp, Homo sapiens
cagggcaggaaggtggtggtgtgcgacaacggcaccgggggattaaagcctgtggtttccacagaagcaccacct

SEQ ID NO: 569686 - DNA, 100 bp, Homo sapiens
cgcccacaacggccacccccataaggcataggccaagaccatacccgccgaatgtaggacaactgtccattccattacaacccagctcagtatgactatg

SEQ ID NO: 569687 - DNA, 50 bp, Homo sapiens
aagagcttccccagtggacattcttcctaccccaccaacaactgaacgct

SEQ ID NO: 569688 - DNA, 100 bp, Homo sapiens
gggactctacctggggatatacatgcatgcaccaaaacgaggacagatttgccacttgacactgacctggaaaatgaaaaaacatctactgtcccattgg

SEQ ID NO: 569689 - DNA, 75 bp, Homo sapiens
gcgctcgccatggccgacgaaaagcccaagggatagctgggagtatggccaccctgctccacgatgcggtaatga

SEQ ID NO: 569690 - DNA, 74 bp, Homo sapiens
cagataggtgatagttgggaatggagaccatcaaaggagaggagttcattacttcggaagtggtacaatttaat

SEQ ID NO: 569691 - DNA, 100 bp, Homo sapiens
ccagaaaatgggacaactaatggatacaaatcaggattcactcagacaggaaggatctgagtctctccctgcggagacagccctgaagaactcctgtaac

SEQ ID NO: 569692 - DNA, 75 bp, Homo sapiens
gccttccatagggctgagtctgggaccgaggcccagacatgtccgtccttgtaagttaaaagcttccatgggagc

SEQ ID NO: 569693 - DNA, 101 bp, Homo sapiens
tgatccaggaggcttgtgtcatctgccagcatttatgaaactgtgctccaagtagggtcctatggcagcgtatacaaagctattcataaagagaccggcca

SEQ ID NO: 569694 - DNA, 82 bp, Homo sapiens
acgcccgcgcgacgagcaggtggcggcggctgcaggactgatcctttgaaatactccagccatgactaaaagagaagcagag

SEQ ID NO: 569695 - DNA, 75 bp, Homo sapiens
tggccgcacagtatagtgaagataaagccaggcaaggggacttcgggatatgggaacgtggagacaagaccaacc

SEQ ID NO: 569696 - DNA, 90 bp, Homo sapiens
aaggagacggaattctacctgtgcatgaaccgcaaaggcaagctcgtggggaagatgatgcagaacttactcttggaagaaggcggcctg

SEQ ID NO: 569697 - DNA, 100 bp, Homo sapiens
cctcggtgtcggtggccggcagtcatctcgcggccgttcagtttgtggggacattcatggacaattctttgatttgatgaagctctttgaagtcggggga

SEQ ID NO: 569698 - DNA, 98 bp, Homo sapiens
gaaaagtgaacttttcgaggcatttgacttgtttgatgttcgtgactttggaaagtaggtcccattagtccaccacagccaccttcagtcagtgcatg

SEQ ID NO: 569699 - DNA, 100 bp, Homo sapiens
tatgtgcacccagatgagttcttccagtcccctgaggtgatggcaggattcactccttctccagttgcacagccacacccttcagctggccttaatgttg

SEQ ID NO: 569700 - DNA, 75 bp, Homo sapiens
gagcaagcccccgttccgctacctgcacgacatcatcacggaggtgccgtggccagcacagaagtgaagatgaag

SEQ ID NO: 569701 - DNA, 75 bp, Homo sapiens
atttatgtcatcaagaagaatgacgatgacgtgccaaatactggtgtaagcaaacctagagtttctgacgctgtc

SEQ ID NO: 569702 - DNA, 100 bp, Homo sapiens
gccaaggaaagatgggacctcccggcccagcaagagtgagccatggagctacgtgtggggaacaagtaccgcctgggacggaagatcgggagcgggtcct

SEQ ID NO: 569703 - DNA, 105 bp, Homo sapiens
cagcgacacctctactagccgagccggccgctgtgcccgctcggtcttcggcaacattaagaaagctacatccatattggaattttaccgggaacttggattgcc

SEQ ID NO: 569704 - DNA, 88 bp, Homo sapiens
ttataatggaattggagtcagcagaactgaaatagcaacgaaggttttgggaacagtaaaatggttcaatgtaaggaacggatatggt

SEQ ID NO: 569705 - DNA, 75 bp, Homo sapiens
ggccatgggcgtgaacctcaccagggcggtagtcatggtttgtttggaaacagcacagcacaatcgagaggtctg

SEQ ID NO: 569706 - DNA, 82 bp, Homo sapiens
acacatcactaaaaattatccctactacaggactgcggacaagggctggcaggtgacttaagagattaaaattaatttggtt

SEQ ID NO: 569707 - DNA, 82 bp, Homo sapiens
gcctagtaaacggggctgctggtgggccgcgtcgaagacatggaccagggctacggaggacaagatcgcagaggaaggtggg

SEQ ID NO: 569708 - DNA, 76 bp, Homo sapiens
agggtcaccttccagccctgtggatggcagtggaatcaggacaagtgggtgctgaaccatgaggacctggtgttgg

SEQ ID NO: 569709 - DNA, 75 bp, Homo sapiens
aaagggaccacggtcaccgtctcctcagatttggagcaagaggtggtggtggccttcccccgaagaaatttggta

SEQ ID NO: 569710 - DNA, 98 bp, Homo sapiens
gtggtggccaagtatgcgcccagcggattctacattgcctccggaggttcatcatgcctagtggcgtataagaagaccccgccaccggtccctccacg

SEQ ID NO: 569711 - DNA, 100 bp, Homo sapiens
ggccgatgaggaagtactgagcctgttggaggaactggcccggaaacaggaggacgatgccggctccaggagcagcagtggaggtcgggaacgcctcatt

SEQ ID NO: 569712 - DNA, 100 bp, Homo sapiens
tacagtatgcctttcaggacaaaaatcacctttatctgtgatgtccttgcattgcccatttttaagcaagaagagtcgagtttgcctcctgataatgaga

SEQ ID NO: 569713 - DNA, 90 bp, Homo sapiens
cctgagaaacatattgtgatgaagtggaggtttaaatcttggccagaggttcaatcccctgtctcccctttactccctggatgttcttgc

SEQ ID NO: 569714 - DNA, 100 bp, Homo sapiens
aaccccagccgaccttgagctccaggagttcgtctcttacgtctgcggaagtgcagctgcctcagttcttagcgcaggcagtggatataacttcttgtgg

SEQ ID NO: 569715 - DNA, 51 bp, Homo sapiens
atgcacttgtccaatcctcaatcctggcaagccaaattagagctgagagtt

SEQ ID NO: 569716 - DNA, 96 bp, Homo sapiens
ccgctccgcgccgagggctggaggatgcgttccctggggtccggggtttggacagaggagccaaaggccaaatttccactttcagcagttttattt

SEQ ID NO: 569717 - DNA, 101 bp, Homo sapiens
gctgggagcgagcgcagcaaagcgcccagcctgccgcctcgctgtccctgcggcttctgggggtggttctaactttgatggtttgagaccaaatgggaagg

SEQ ID NO: 569718 - DNA, 51 bp, Homo sapiens
agatgttcctgtggaccccagtccagaactgataaatttcaaacggaagag

SEQ ID NO: 569719 - DNA, 75 bp, Homo sapiens
tttctatctcacaatgggattctctccagccttggtggtgacatcaatggttgcactgctgtgatccatcctcat

SEQ ID NO: 569720 - DNA, 82 bp, Homo sapiens
atgttaatgaagactttaaagacaaatatgaaagtctggttgaaaaggtcagaagagatcaattctacagaaatttccagtg

SEQ ID NO: 569721 - DNA, 96 bp, Homo sapiens
gcaggagctggatccggcttccggaagcccgtggaccgggagcccgtggaccgggagccggtggtgtgccaccccgacctggaggagcggctgcag

SEQ ID NO: 569722 - DNA, 90 bp, Homo sapiens
gctgaggagagtgagcgtcccctatccaagtagcctgctgtcgcccagccgcgaatgattacggacctgaagccaaagaacaagatgcgc

SEQ ID NO: 569723 - DNA, 80 bp, Homo sapiens
tacctctaacacagtacctgttaacaacgttcaagcactgtcttcctgttggccctgacaatcatagccagcacctgggc

SEQ ID NO: 569724 - DNA, 98 bp, Homo sapiens
gggaaaccaggcatctctgggtgggcaacttacccgagaacgtgcgggaagagaagatcatcgagcatttcaaacgattggtttatcttggaagctaa

SEQ ID NO: 569725 - DNA, 100 bp, Homo sapiens
cccggggagacggacgcgtttggcaacagcgagggcaaagagctggtggcctcaggtgaaaaacataaaggtgagatggcctacatcgtggtgcagaacc

SEQ ID NO: 569726 - DNA, 80 bp, Homo sapiens
ccggggtcccaggaagggcggcccaggtggacgacatccttggagaaggcagcgacgacagcgacagcgagaagaggagg

SEQ ID NO: 569727 - DNA, 58 bp, Homo sapiens
gttgaaacaggagagaattagtcgatatcagtacaatgccagtgtttcagtcccagac

SEQ ID NO: 569728 - DNA, 100 bp, Homo sapiens
cggaggcgttcagctgcttcaagatgaaggtgatagtagaaaaggctcccaaagctcggataggagacctggacaaaaagaaatacctggtgccttctga

SEQ ID NO: 569729 - DNA, 88 bp, Homo sapiens
tggagtcggggccccatcgagaaatggccgcgtcggcagggggatatgagactttctactcggaatatcctgagtgttgcgtggatgt

SEQ ID NO: 569730 - DNA, 100 bp, Homo sapiens
ccttttgccacctttccctttatttccggagtggcttacagaagagacgaaatgtggtctgagggacgatatgaatatgaaagaattccgagagaacgag

SEQ ID NO: 569731 - DNA, 100 bp, Homo sapiens
cccgccagaacccggcccggaccgtgtcgccgacgccaaaggggacagcgagtcggaggaggacgaggacttggaaggttctcttacatctgatggaaaa

SEQ ID NO: 569732 - DNA, 100 bp, Homo sapiens
ccaactgcgggacaggaagtggccgtagcggcttgttggataagggtgcctctgccaactggtggaatcatcgccacttccagcaccacgccaagcctaa

SEQ ID NO: 569733 - DNA, 96 bp, Homo sapiens
ggctttccgccagggccttgccaatgtcgtcagcctcgagtggctccgaatgtttgatcagcaagaaattcagagacggggtttcgccatgttggc

SEQ ID NO: 569734 - DNA, 75 bp, Homo sapiens
aggcagttctgcaagaggagctattctgatcttgctccatgtgcaagaagcttccggcaaccacctgaacccaga

SEQ ID NO: 569735 - DNA, 101 bp, Homo sapiens
cctggaccctgcccagcagaatttgtatagagatgtgatgttggagaactacagaaacctggtctccctagggcaagttaaagtcttcagagccctgtata

SEQ ID NO: 569736 - DNA, 100 bp, Homo sapiens
gcgagaagccccagctgcactacgcgggaggacaagctctttggggctaccaaacagaagcagcaatgcctgttgtgtggccaacccttctggatctcag

SEQ ID NO: 569737 - DNA, 51 bp, Homo sapiens
caagacaccacagaagccctccgagcccagtgtccaggggcctgactggag

SEQ ID NO: 569738 - DNA, 75 bp, Homo sapiens
gatcagatgtggggaatgccatcacacctgcggaacctgcgtggaactttccatgactggatcacagggaaaaac

SEQ ID NO: 569739 - DNA, 75 bp, Homo sapiens
agctatgtcttcagaggaacaaaagatttgtctgccaaacaactgcaggcacagaaaactgaatctgtagataac

SEQ ID NO: 569740 - DNA, 99 bp, Homo sapiens
aggaaagcccccgacaaaagaacccattagccaggcttatgtacagaagtacgtcgtgaagaattatttctactattacctattccaattttcagctgc

SEQ ID NO: 569741 - DNA, 83 bp, Homo sapiens
gcctcaccatcgctgagttcaagattatcgcaatctgacctttgatccagtcagcgccaaccgtcacttctatctgtcgcgcc

SEQ ID NO: 569742 - DNA, 82 bp, Homo sapiens
aaacatgctagaattacctggaacttcatcatcatctacttcacaggaattgccatttagccttgcttcctgttttacatca

SEQ ID NO: 569743 - DNA, 51 bp, Homo sapiens
cgatccagcctgcggagcctgtggggcaggaagaattttaaatcgtttctc

SEQ ID NO: 569744 - DNA, 128 bp, Homo sapiens
ccgattatcaaaaacaatgggcaagtctacacatacccagatggtaaatctggcatggggagatgcacttatttacatggaaccagagaaacaagtgatgtccaggtcgtcagatgaatgtgttgtgg

SEQ ID NO: 569745 - DNA, 75 bp, Homo sapiens
caccgttatgtgggaagcgaatccattacgccccatggtgtccatcctgccagcagactgattcagaatgggagg

SEQ ID NO: 569746 - DNA, 95 bp, Homo sapiens
ctatagtcttgtattgatggttttgcactatttacaaattttctggatatgccgcagaaggatccgtgccagaagcaagcctgtgagatacagaa

SEQ ID NO: 569747 - DNA, 90 bp, Homo sapiens
ctaaaattagggcatgattaaggagtccttcaataatgttaaacagtggctgcaggaaatagatcgttatgccagtgaaaatgtcaacaa

SEQ ID NO: 569748 - DNA, 146 bp, Homo sapiens
ggtgatggcaacggccaacttcggcaagatccagatcgggatttacgtggagatcaagcgcagcgatggacccagatgatgtggtaccagttggccaaagaagagcctggtgttggtgcatgtgctttggactagcatttatgctt

SEQ ID NO: 569749 - DNA, 50 bp, Homo sapiens
agtattgccgcggtggaaatggagggagaaattggctttacgatgaacat

SEQ ID NO: 569750 - DNA, 90 bp, Homo sapiens
ggcccctgtcaagaaggtgccggtggtgcgagtcttcggagcgaccccggcagctcttttggtacaccagaaggccagaatggaacgact

SEQ ID NO: 569751 - DNA, 75 bp, Homo sapiens
gtgacgtcctgcaggaacccgaacagttccccctggtgcagggagtggccataaaaaagcttgtggtgaaggggg

SEQ ID NO: 569752 - DNA, 83 bp, Homo sapiens
ctggccttgctcctgcagatccccacgcagaatgcacagacaatgcagatcttcgtgaagactctgactggtaagaccatcac

SEQ ID NO: 569753 - DNA, 90 bp, Homo sapiens
ctagagagatcccggctcccagcccactgagtggcttcagcctcgctgaaataacatctgctttgctgccgagctcagaggagaccccag

SEQ ID NO: 569754 - DNA, 75 bp, Homo sapiens
gtcccacttgttcgcggcctataggtcagcccaaggccaaccccactgtcactctgttcccgccctcctctgagg

SEQ ID NO: 569755 - DNA, 100 bp, Homo sapiens
ctgtcccagccgatgggttgtccgactgggagcagaggaagccttgaggacctactcacagataggaattgaaggtaggatccatgccaaaagagcttct

SEQ ID NO: 569756 - DNA, 96 bp, Homo sapiens
gagccactgagatgaggaggcgtcgcgcgcgcctgtagctcgcgggcctcgcagaaaacaacagttttgttggcatgtgaagctccagtttcctca

SEQ ID NO: 569757 - DNA, 75 bp, Homo sapiens
gtgcaataatggcgtgttccagtccacggttattcctagacatggcttacagagtcttgggaaagttgctgcagc

SEQ ID NO: 569758 - DNA, 50 bp, Homo sapiens
gtaagattgtcttggaaatactaagttggttctgtggaagcaaatcattg

SEQ ID NO: 569759 - DNA, 98 bp, Homo sapiens
gccgccgggcgcttctagtcggacaaaatgcagccgagaactccgctcgttctgtgcgttctcctgtcccaggcaagttgctccctgagctgctccaa

SEQ ID NO: 569760 - DNA, 100 bp, Homo sapiens
gagaaggtgaaacgatcatcgagctaaaatatcgtgttgagagctgtagtacacatggatgaacgacgagaagaacaaattgtacagttactgaattctg

SEQ ID NO: 569761 - DNA, 75 bp, Homo sapiens
gacggctcacctgtgcgggatggaacaaaaggtgagaattatgaagatgatgacctagtaaattctgatgaggtt

SEQ ID NO: 569762 - DNA, 97 bp, Homo sapiens
ctactaccactgcatctgtgtcagcaacagcagctccaaggatcactactcttggaatcaaagataaatccaaatactgcatatcagaaacaacagg

SEQ ID NO: 569763 - DNA, 100 bp, Homo sapiens
gcctcttcatattggcgatcctgttgttgtgtcccggcatggatatccggaacaacctcactaggttgcatgagctggagaattgctctgtcatcgaagg

SEQ ID NO: 569764 - DNA, 98 bp, Homo sapiens
ttcgtaatgcgactcaaagctgcacggcagtctgtttatgagagctggaagtcgagtgtgctactcaactcaggagatttggagacaaactgaacttc

SEQ ID NO: 569765 - DNA, 100 bp, Homo sapiens
ggcggcatgcagcagttacttccactcaagaatcgtaggccaggctgatggagagctgaacattactcttccagaagagcatgctacaagtgaaaactga

SEQ ID NO: 569766 - DNA, 90 bp, Homo sapiens
attggacatatgtaaagggacatcagtatatctggatcatcagctgatttgaataggatgcacagacaaaatatagatgcctaccataac

SEQ ID NO: 569767 - DNA, 74 bp, Homo sapiens
taaaagcaaatgatgatgtagctcaagagattgctgaaagatctgactgcagccatgagcagcaatgagtgctt

SEQ ID NO: 569768 - DNA, 100 bp, Homo sapiens
agaacatcggcaatgggattatttcctccccactgactggaaagaggagaaggcagagcccccccaggctatgaatgccctgatgcggttgaaccagctg

SEQ ID NO: 569769 - DNA, 82 bp, Homo sapiens
cgagaggccgtgcgggacgcgggcgccaggaccggccgaacgcagaggagccttcacgtaaatgggtccagtcatgcctccc

SEQ ID NO: 569770 - DNA, 88 bp, Homo sapiens
aagaacctcatcgctgcgacgaaaaagtgggtattaaggacattgctggtatccatttgccaacaaatgtgaaatttcagagtccggc

SEQ ID NO: 569771 - DNA, 75 bp, Homo sapiens
gggggatgtgggccgagtgcggagctctttgttcaatgcctagccacctattcctacagacacggcagtggaaag

SEQ ID NO: 569772 - DNA, 100 bp, Homo sapiens
gccaggcgtggaggaagaggcattgaggactttccttacctgtttttccagctcacccactgccagcagagagtgtgaacatggctacgcctcttcattc

SEQ ID NO: 569773 - DNA, 75 bp, Homo sapiens
gaaccccaactttgtccgctgcatcatccccaaccacgagaagaaggtctctggacctctgactgacactgtgcc

SEQ ID NO: 569774 - DNA, 75 bp, Homo sapiens
ccgcgcctgaggaacactccatgcatcactgtaagcgataccgctcccctgaaccagacccgtacctgagctacc

SEQ ID NO: 569775 - DNA, 75 bp, Homo sapiens
cgacctgctaacagaactggaccttttcggtaaaccccagtgataggtaccatcttatgcctataattacaccag

SEQ ID NO: 569776 - DNA, 90 bp, Homo sapiens
ctctcttggcagccttcctgatttctgcagctctgtgtgaagtgcatactccttccacgttactgcagacggtcagatgcagcctgtccc

SEQ ID NO: 569777 - DNA, 86 bp, Homo sapiens
tgggccgggagctgtacttctatatctacaagggggtccgcaagcagtctctggtcccagcccaccccatggcccctcccagtccc

SEQ ID NO: 569778 - DNA, 101 bp, Homo sapiens
agcagctgaacgagtgcaagcagctgtccgagtcccaggtcaagagcctctgcgagaaggtcatcactccccaaaatggacgttaccaaatagattccgat

SEQ ID NO: 569779 - DNA, 100 bp, Homo sapiens
ctggaggtggacgccatcgtcaacgccgggaaatcctcattgacgattcaatttgttgaaggccaatttgtggactcctacgatccaaccatagaaaaca

SEQ ID NO: 569780 - DNA, 90 bp, Homo sapiens
ggatcgggggcaagcggaaggtgatgcccaagatggaccagggctttgttcgcgggggtcacagctctcatggctgcagctagcgtgacc

SEQ ID NO: 569781 - DNA, 82 bp, Homo sapiens
aaattgcgctggaccgtcgccttgctcctcgccgcggcggggactgcagaattcagtttgcctgttctgtatgcaagttccg

SEQ ID NO: 569782 - DNA, 100 bp, Homo sapiens
gccatgcggcccctgctgctactggccctgctgggctggctgctgctggccgaagcgaagggcgacgccaagccggaggctcagtcaaaggccaactgtc

SEQ ID NO: 569783 - DNA, 83 bp, Homo sapiens
ccggaggcggcgcgggcggcggcggcgcagacaaagatgtgaagttcatttccaatccgccctccatggtggcagcggggagc

SEQ ID NO: 569784 - DNA, 99 bp, Homo sapiens
acttgtcctcctgtttctatagaaactgggttggaagtcagagctgcacaaagggaaaggccatgaaccagagaatcagtcagagtgctccagtgaaac

SEQ ID NO: 569785 - DNA, 82 bp, Homo sapiens
taggaagatgtagtccaacccacatcagcagtgttctgaaagtctccctgttcgcacactaagcattgcaccaggtcaatgt

SEQ ID NO: 569786 - DNA, 100 bp, Homo sapiens
ctgaaaccccagattcctttgaaaagcatattagaagcattttgcaacgtagtgttgccaatccagcatttttgaatactatactggcaattgctggaga

SEQ ID NO: 569787 - DNA, 100 bp, Homo sapiens
gaagcagccaagaaaaaaagacgaaagaagaagaagagcaaagggccttctgcagttctcacagctggtgaacggggatgtggctttgctgggcgggggc

SEQ ID NO: 569788 - DNA, 75 bp, Homo sapiens
cggcaaaatggcggaccgcttctcccgcttcaacgaagaccgagactttcagaaacctctgcgccatgagagcca

SEQ ID NO: 569789 - DNA, 82 bp, Homo sapiens
cgcgccccccgggacccccacgccgccgccagagacaagaggagcagcagcggcaccgcccctcaccctggagggtcctgta

SEQ ID NO: 569790 - DNA, 80 bp, Homo sapiens
ggaatccctccagaacaatccttggaaactgctaaggcagtaaagacctacgtctaccagtggccctggacgctcctgct

SEQ ID NO: 569791 - DNA, 96 bp, Homo sapiens
ctagcagaggaaaataagaacacagtggatgtcgagaacggtgcttctatggcaggatatggtggggagcattaagcgggaaatgaccttcacatt

SEQ ID NO: 569792 - DNA, 98 bp, Homo sapiens
gactccaaaatggcgtcagttggtttggaaagcagagtggagaacaaagagttgattccaatgcaacaaattttagaagaagcggagccacaggggca

SEQ ID NO: 569793 - DNA, 100 bp, Homo sapiens
ctcctggtgacctctcccgctaaggtccctcagccactctgccccaagatgggccgtgggggtgagtcagatgattccattctccgattggccaaggccg

SEQ ID NO: 569794 - DNA, 100 bp, Homo sapiens
atttgtttgtcatccttgtacagcaatctcctcctccactgccactacagggaagtgcatcacatgtcaggctgatgtttcagacaccgcaggaaatggg

SEQ ID NO: 569795 - DNA, 101 bp, Homo sapiens
atgcctgggtttggaggccgcacctgcagcgagtgccaggaactcttctggggagaccccgacgtggagtgccgaggttcacctttccttgccagtgaaga

SEQ ID NO: 569796 - DNA, 122 bp, Homo sapiens
ccgacacttagggaaaatagaacctacgctgaaattttgggggcaggttctcttgctagacctgtcaccatggcccaccgatttccagccctcacccaggagcagaagaaggagctctcaga

SEQ ID NO: 569797 - DNA, 83 bp, Homo sapiens
cgcggcggcagcagcagtgagagacggttgatgatgaagcgccggccgtgtaaatgaagatcgggtgaggagcaggacgatgc

SEQ ID NO: 569798 - DNA, 125 bp, Homo sapiens
tggccatcgtcaccgagagcgcagggggcggctccttcctcgtcatccccctggagcaggtgactgaacttgaatgtgttagtagccaagcaaatgcagtacatactcataagacagaattaaat

SEQ ID NO: 569799 - DNA, 75 bp, Homo sapiens
cggctgggcgttcatctaccacgctttcgtcataagctgtggccatgactactgaagtaggctctgtgtctgaag

SEQ ID NO: 569800 - DNA, 100 bp, Homo sapiens
aggctctgtgcaatcctcacattcaagctgataggctgcgctaccggaatgtcatccagcgagtgattagggttctccaaaaaatgtggaatcctttgca

SEQ ID NO: 569801 - DNA, 59 bp, Homo sapiens
aggacttacggcagtgggggctgacagaaatgaatactgcattgagggacggacttctg

SEQ ID NO: 569802 - DNA, 100 bp, Homo sapiens
ggaacacgtagaaagtgcaagcaaaggtgtgatgaatgcagactctgctaccattttggctgtttggatcctcctttgaaaaagtctcctaaacagacag

SEQ ID NO: 569803 - DNA, 83 bp, Homo sapiens
atctaccttctggaagctactactacgtggtgcttggaaaggccaagtttcttcctaacagtggtgattctactctggccatg

SEQ ID NO: 569804 - DNA, 100 bp, Homo sapiens
cgcttttttacctgccaatcaaactgctacaagacaacaccctgatctggcatggacatgtgctggagaatctggtaaaagcaccattgtgaagcagatg

SEQ ID NO: 569805 - DNA, 101 bp, Homo sapiens
cagacaagcaggctgagctggcttacaatgaggaagaagatggtgatggtggagaggaagacgtccaagttttacatgtggcacccataaaagatgaggct

SEQ ID NO: 569806 - DNA, 83 bp, Homo sapiens
caagaaggccctggacacagcaatatctctgggctttcacaggattgtttgatggtgggtctccacacttgtggtgatctggc

SEQ ID NO: 569807 - DNA, 75 bp, Homo sapiens
aggagcatcccggctggagcagagccaggagtccccggcgtgcagtggagcctcgctgggggaaatgacagcttg

SEQ ID NO: 569808 - DNA, 97 bp, Homo sapiens
catgtttcccatcctggtggccttcggagtcttcattccaaccctcttctgcctctgccggtttgcacctgtggcgattctcaggtggctacccagc

SEQ ID NO: 569809 - DNA, 95 bp, Homo sapiens
catcaacctgcgtgaggtcaacctgcgcccccagatgtcccaggtcctggtgcttgatggtcgaggccatctcctgggccgcctggcggccatcg

SEQ ID NO: 569810 - DNA, 75 bp, Homo sapiens
ggccttgctgatgaacctgactgagatggcccactgcgtgaccttggttcagctgtccatttcctgtgaccatct

SEQ ID NO: 569811 - DNA, 76 bp, Homo sapiens
gggaaacccgtactctgacctgggtaaccataccacatgcagtgcagtcattggagaaatcgatgaagaaacagat

SEQ ID NO: 569812 - DNA, 98 bp, Homo sapiens
tggaggccgtgaacacctacgaagtaggagagaagtttgctgaggaatgccttcaagcacaaagtgatgaatgactgccttcaagtctcaagaaaaca

SEQ ID NO: 569813 - DNA, 74 bp, Homo sapiens
tccgaggacgccctgacggtcatcaaccagcaggaggactccagcgagacaatgcagatcttcgtgaagactct

SEQ ID NO: 569814 - DNA, 101 bp, Homo sapiens
aaattggggaaagctgtagaaaccaaagatgaacgatttgaacaaagcgctagcaacttctaccaacaacagggtgaaaatcctatttataagagtgccgt

SEQ ID NO: 569815 - DNA, 75 bp, Homo sapiens
aggaaatggctttgggagttccaatatcagtctatcttttattcaacggattggcagccaccatttgcatgtgat

SEQ ID NO: 569816 - DNA, 60 bp, Homo sapiens
ccggagactttggggcctaactaggaagactatgaccgtctgaggcctttatcttaccca

SEQ ID NO: 569817 - DNA, 108 bp, Homo sapiens
tccggatcaatccagatggcagccagtcagtggtggaggacataagcagctctatgaccaatagcacagctgccagtagacccccggtcaccctgaggctggtggtcc

SEQ ID NO: 569818 - DNA, 100 bp, Homo sapiens
catttgtgcaggaaaaccagtccaataggtctgcggatcaatggagagctaatcactgcctacccacaagtggtggtagtcagagtaccaaccccttggg

SEQ ID NO: 569819 - DNA, 90 bp, Homo sapiens
aggccgatgaggaatttggaaacacatgtgggacatacaagcgttggatatagagctacctggaccagccctgccttgagaccgtcaacc

SEQ ID NO: 569820 - DNA, 90 bp, Homo sapiens
ctccccagccatgtggaactgccagcgaccccaatgcatatgagctgatacagaaaattcacaccctgcagaagcgtctcatcagcaaga

SEQ ID NO: 569821 - DNA, 98 bp, Homo sapiens
agaacctcaagcttttcaggcatcctcatataattaaactattagtgacaagagctggggttaggatccggttggactctgacatcggatgccctcaa

SEQ ID NO: 569822 - DNA, 99 bp, Homo sapiens
gccgccccgcccaacccctcctcccagtgctgaagtcccaaggagccgccctgcagaggaatgtttgctgggggattgaaggagatggaacaggaagag

SEQ ID NO: 569823 - DNA, 96 bp, Homo sapiens
ggaagatttggaacctcactgaaaattggtattgttggattgccaaatgttgggtttcatggcatgatctccagagaagcagccgaccagctcttg

SEQ ID NO: 569824 - DNA, 100 bp, Homo sapiens
ccatccactgccgcggccgtgggcccgaccgcggggacccgcttacagcttcgccatgggctgctggcccaagaatggacttctagacatgaacaagggc

SEQ ID NO: 569825 - DNA, 86 bp, Homo sapiens
tttgcgcatttcaagaagaacaacctaactccagatatctacctaattgattgacctgcctagagctggaacgttacctccagagc

SEQ ID NO: 569826 - DNA, 98 bp, Homo sapiens
ttcgtcgtggcaacgttgctggtgacagcaaaaatgacccaccaatggaagcagctggcttcactgctcaggttctggaggacacgtgccggcggcag

SEQ ID NO: 569827 - DNA, 82 bp, Homo sapiens
cccatcaggtggtggtggccaagtatgcgcccagcggattctacattgcctccggagggtctcctatggacagaagtgcggg

SEQ ID NO: 569828 - DNA, 97 bp, Homo sapiens
taacccctgcacagagcagattctgaaacttcttgacaatttgcttgcgcttataaggatctgcaatcagaactattgaacttctccattcagaccg

SEQ ID NO: 569829 - DNA, 98 bp, Homo sapiens
tgggcggcgaaaccgacggcgccgggaggacgagggacggcgcagacggaggcggcggagccgggagcgcaggtccctagctgttggtagtaagtccg

SEQ ID NO: 569830 - DNA, 75 bp, Homo sapiens
cttcatatggacagatggacttcaaatgctgtttgtattccagagactaggtggaagagatcatgcagctggtga

SEQ ID NO: 569831 - DNA, 83 bp, Homo sapiens
cgcggctcctgagggatcggtctcagccgcgcgggacttgcaattgtgaccaaatatattacaaagggctggaaagaagttca

SEQ ID NO: 569832 - DNA, 82 bp, Homo sapiens
aaattcatcccagaaatctaagaggtggatccataaagaacccagccaacccgcagagggaggggaggggctgagctgtgag

SEQ ID NO: 569833 - DNA, 100 bp, Homo sapiens
tgcatgaccgagatgacctctatgctgagcagataacgtgaaggactggagcaaggtcgtcctggcctatgagcctgtgtgggccattggtactggcaag

SEQ ID NO: 569834 - DNA, 83 bp, Homo sapiens
ctctggagctgacagcgcgcacttcacccgcagttggcaccatgactcctgtgaggatgcagcactccctggcaggtcagacc

SEQ ID NO: 569835 - DNA, 98 bp, Homo sapiens
cgtcctcgggggccagagcccgccagccctcgcggatcccggctcgcggccagcccgagcggctcggtattcatgggctgccctgggcaagagccagc

SEQ ID NO: 569836 - DNA, 119 bp, Homo sapiens
ctttgggaaactggaatcctcaaaatgctgtggctcttcttccagagaatgacacaggtgaaagcaaagctgtggggatgccttcccctgtttctccaaagctgtcaccaggcaattca

SEQ ID NO: 569837 - DNA, 101 bp, Homo sapiens
gtgagggcgaggcggcggcggcggcggccagagagcagcagccgcctgctttggctagatcagagtctaagagagatggaggttttaaaaataattggagc

SEQ ID NO: 569838 - DNA, 100 bp, Homo sapiens
cgccttgtgtcaatggaggcacctgtcggcagactggtgacttcacttttgagtgcaactgccttccagaattataaggctgtctgcagagatttgaaaa

SEQ ID NO: 569839 - DNA, 100 bp, Homo sapiens
gatcgcccggctgcgtgcggtccagcggaaggcccgctttgccaagctcaaggtttattcagtcaccatgaagctgctgctgctgcacccggccttccag

SEQ ID NO: 569840 - DNA, 83 bp, Homo sapiens
actcctcatacttactgccggctgccccgcaacctcaaccctggcatggaactgtggctgcaccatctgtcttcatcttcccg

SEQ ID NO: 569841 - DNA, 73 bp, Homo sapiens
ggacgtttcaagggtgaagcttcttcagtaaacagttaagacatcagaattttatagatactcccgacagctc

SEQ ID NO: 569842 - DNA, 51 bp, Homo sapiens
attcgcagtggtcgcttcttctccttgcggctatgtgactacgtttgtgac

SEQ ID NO: 569843 - DNA, 101 bp, Homo sapiens
tggaagcgctttgatttacagcagctgcagggatcgcttacacctgagacgaactacagaacagcacgtaccagaggtggaagtccaagtcaaacgcagaa

SEQ ID NO: 569844 - DNA, 89 bp, Homo sapiens
ggagctcatgcagtggtacaaggaccagaagaaactgcaccggaaatgtgcctaccagggcacattcgcctcccaggtgacgctggagg

SEQ ID NO: 569845 - DNA, 75 bp, Homo sapiens
agactgtggtgcctacccccatcactgcttccctcagccataacaggagtccaatgtgctgattgctgctaacag

SEQ ID NO: 569846 - DNA, 100 bp, Homo sapiens
gtccaggccgtggtcagccgcttcgacgagcagacgttggacctctcgaacaaccagctgagcgagatccctgcagagcttgcggactgccccaagctca

SEQ ID NO: 569847 - DNA, 100 bp, Homo sapiens
aggtggtctgactaccagtggctctgcagaggaacgggaggatgaaattgctactatggagtgcatcaacaatggcaagtccatctttgaggcccgcttg

SEQ ID NO: 569848 - DNA, 117 bp, Homo sapiens
tcccgcgtccgccgattcctcctccttggtcgccgcgtccttggctggcgtgtttggtgcacctcgatttggaggaagtagggcagggcccttatctggaaagaagtttggaaaccc

SEQ ID NO: 569849 - DNA, 98 bp, Homo sapiens
cagcaacagcagcaactgccgcacccttgaaaggaggcccctgccgtgtggacccgtaaaataaaatggtccaagtggtaagaagttcagaagcaagc

SEQ ID NO: 569850 - DNA, 82 bp, Homo sapiens
agcaggaaggtctcacctgaggtgaaccttcgaccttggacttctcagcctccagaatgggaacaacttaattctttattga

SEQ ID NO: 569851 - DNA, 82 bp, Homo sapiens
cgcggagtgagtttttccgtgctgtgtagattacctaggaacagtacgatttggggttatcacaaataaacatcttgcgaaa

SEQ ID NO: 569852 - DNA, 78 bp, Homo sapiens
cgcctccaggccaagagggatccttcacccgtgtctggctggtgtgtgacagctctgtgctgctgtgcctcaagaaga

SEQ ID NO: 569853 - DNA, 82 bp, Homo sapiens
ctcagttggaagcagccgatccagcctgcggagcctgtggggcaggcctgatcacttgaacggacatatcaagcaggtgcac

SEQ ID NO: 569854 - DNA, 100 bp, Homo sapiens
gagcaagcggacattattctgggaccagcaagcctcggtcactgcagccaccacactacgtggagatgctgcctatggaagttgcaatttctacattaca

SEQ ID NO: 569855 - DNA, 90 bp, Homo sapiens
cgctgcacgagctccacgcccgtaccccggcgtcacgctcagactgcaataaggtcactgatcagtgcctgtccttcttcaaacgctgtg

SEQ ID NO: 569856 - DNA, 75 bp, Homo sapiens
aacatcctgtcacaggccatgctctggcaaaaacggcatcttctctgcattcagtttcatccaagtcattccggg

SEQ ID NO: 569857 - DNA, 73 bp, Homo sapiens
gacggacggtgatggtggtcgccgcggcggcgtgtgcgcccctcaggtgacagagctgaatgaacctctctcc

SEQ ID NO: 569858 - DNA, 88 bp, Homo sapiens
gcagcacgtgtacatccccgtgctgccgccgcatctgctggactactgctgcgaagggagcaatctgaccccagcacatcactaccca

SEQ ID NO: 569859 - DNA, 75 bp, Homo sapiens
gaggagccgctggggctgccgccacggccgcccggagaaatggcgaaaagtcttttgaagacagcctctctgtct

SEQ ID NO: 569860 - DNA, 98 bp, Homo sapiens
ttgcctaaatcagccaaacacaggcctctacggcagacacatgcaggccaacccagaaccaccgaagaagaataatgacaaatcgaaaaagatcagcc

SEQ ID NO: 569861 - DNA, 89 bp, Homo sapiens
aatttgttgaaaatttcaagcaggaacataaactccatgttctgtagagatcagagagttgtgacatctgaggaccaagttcaagaagg

SEQ ID NO: 569862 - DNA, 100 bp, Homo sapiens
ccgggacacgcctagcgcgggctccagagtgatcagcagctggactgtgccttggacctaatgaggcgcctgcctccccagcaaatcgagaaaaacctca

SEQ ID NO: 569863 - DNA, 74 bp, Homo sapiens
ctgagtgcccgggaggagccttaacaagcgcacggagccctcaagctaaaagatggcggcaaggcagcccaggc

SEQ ID NO: 569864 - DNA, 50 bp, Homo sapiens
ccttgatcctcctcctaattgcaggccataaagaatgctgatgggagaac

SEQ ID NO: 569865 - DNA, 82 bp, Homo sapiens
gggaacgcggcgaccgccaagaaaggcagcgaggtggagagcggtggttgtgggaagagaagtttgcagaactgaaatggag

SEQ ID NO: 569866 - DNA, 100 bp, Homo sapiens
aacacctccctacaaggaccttcctcccaagccagcaaattctggactcgaaaccgaccaggtgataaaatgcgagatcgatataatctaaaccttttac

SEQ ID NO: 569867 - DNA, 50 bp, Homo sapiens
ctctaatatgagcagcatggtagttacagctacccaggtggatttagaca

SEQ ID NO: 569868 - DNA, 101 bp, Homo sapiens
gaagataaagtctaccttacagggtataactttacattagcagatatactattgtactatggacttcatcgctttatagtattcagaaacgtgaagccagc

SEQ ID NO: 569869 - DNA, 100 bp, Homo sapiens
aaaattgctgtcaaagccattgaagactctgatatgttacaggaggttcgagaacttgtcttggacaattgcaaatcaaatgatggaaaaattgagggct

SEQ ID NO: 569870 - DNA, 95 bp, Homo sapiens
gcgaggttcgggctggttgttccgttgcgagctgcagctgcgatctctgtggtaggcccaggtgtcatggagaaactccagctgggcccagagat

SEQ ID NO: 569871 - DNA, 83 bp, Homo sapiens
gcagcccgcgcacagctgctcccttcgccttcgccctttccacctcgcggcagttcgatctgaagaagacacttgaatcatgg

SEQ ID NO: 569872 - DNA, 51 bp, Homo sapiens
taaaagcattggacaccttatttttggggtggcaaaatatgcctgacggat

SEQ ID NO: 569873 - DNA, 73 bp, Homo sapiens
agaactacctgtaaattatgtgaaacctccaaatgtgggacgtttttactgtaagtgttggaaacttaccccc

SEQ ID NO: 569874 - DNA, 83 bp, Homo sapiens
gaaagagtcaacagcagtggcaacagatgtccagaaggcttcttgggggaatattgtcaacatcgagacccctgtgagaagaa

SEQ ID NO: 569875 - DNA, 113 bp, Homo sapiens
ccgctctttgccgtgacaacaccgttcccccagccgggctggtgtcgtgaaaactacccctaaaagccaaaatgggaaaggaaaagactcatatcaacattgtcgtcattgga

SEQ ID NO: 569876 - DNA, 49 bp, Homo sapiens
tttggcatttggtgctgtggcaggttcctccagaagaaattaattattt

SEQ ID NO: 569877 - DNA, 100 bp, Homo sapiens
ccccacctgcccggtgcccgaggaggcagccaagctcgtagcctgccactccgtgcctacatctggtaccttggctggcattatgggaatgaggttctac

SEQ ID NO: 569878 - DNA, 100 bp, Homo sapiens
aggcggaggaggacccggaggccgcggatagcggggggtaactaaggaagtggatgctacatctaaagaggccaaatccttcttcaagcagaatgagaaa

SEQ ID NO: 569879 - DNA, 143 bp, Homo sapiens
cgggcttcccaacaccatgccgtccgccttctctgtcagctctttccccgtcagcatcccagccgtgctcacgggtttcggggaagacgtggacggatactgcgacaccatcgtggctgtggccgaagtgatcaagctgacag

SEQ ID NO: 569880 - DNA, 100 bp, Homo sapiens
gtggacggcaaagccattcctgacctcaccgcgcccgtggccgccgtgcaggcggccgtcagcaacctcgtccggcgtgacgacagcatgtacgatccct

SEQ ID NO: 569881 - DNA, 83 bp, Homo sapiens
atgcgcccagcggattctacattgcctccggagacctgcctagagctggaacgttacctccagagcgagccctgctatgtttc

SEQ ID NO: 569882 - DNA, 75 bp, Homo sapiens
cgcagatgttgtcaaggtggcctaccaggaggccaggggtgtcgccatgctcctgacccctgaggattaccagcg

SEQ ID NO: 569883 - DNA, 50 bp, Homo sapiens
gtcaccaggaggggcccaggagctcaggtagagaccttggagtgtcggga

SEQ ID NO: 569884 - DNA, 100 bp, Homo sapiens
tttctggccagtggagagaggaattcctcaagacaccattccaggggtgtcgccatccagatgtgttggaagcttcccctcctgccttatgctcacctgt

SEQ ID NO: 569885 - DNA, 96 bp, Homo sapiens
ggctacaggcgtgtgtcactgcgcccagcaaagtggaagatgctttctacaaaggtgaactcaggctgaatgaggaaaaattatggaagaaaagca

SEQ ID NO: 569886 - DNA, 100 bp, Homo sapiens
gggcatcgaccataagggacaggtgtgtgtgatgatccacagtggaagcagaggcttgggccaccaagtagccacagttttaaccaagattgacaactac

SEQ ID NO: 569887 - DNA, 83 bp, Homo sapiens
ccgctgccgtcgccgccgccaccatgcccaagagaaagatccagagacaatggccccgatgggatggagcccgaaggcgtcat

SEQ ID NO: 569888 - DNA, 98 bp, Homo sapiens
cggcggagtagagcggagcctggcgggcgtgggaacccaggccccgccgaggcggccagatgctgagggttggaaaagcaaaagcagatgtgtggccc

SEQ ID NO: 569889 - DNA, 51 bp, Homo sapiens
ttttgactctattatgaaacagcaaagaccttcactgcctggtgtaactcc

SEQ ID NO: 569890 - DNA, 102 bp, Homo sapiens
cgcaaacaagccaatcccaggaggaaaaacgctgagatctgtatctgtggacctgaatgttgatccctcgcttcagattgacatacctgatgcgctcagtga

SEQ ID NO: 569891 - DNA, 75 bp, Homo sapiens
ggcgcagccggacatttagccgctcatcttcggcctccggtgtggctgtctctgatggtgtcatcaaggtgttca

SEQ ID NO: 569892 - DNA, 75 bp, Homo sapiens
gcagagcccatttcagaacctgagaaagtagagactgtctacctcgagacctatggctgccagatgaatgtgaat

SEQ ID NO: 569893 - DNA, 100 bp, Homo sapiens
atcggtcgcctggaggaccagtatttcccatggaggagaatggatcttggagaatgtctgaaagtccatgacctggctttaagagcggattatgaaattg

SEQ ID NO: 569894 - DNA, 83 bp, Homo sapiens
aaccaaccctgccagcacctggaccttggacattcagacttcagaatggcaaaatcctgacagatgactttgcagacaaggag

SEQ ID NO: 569895 - DNA, 100 bp, Homo sapiens
gaaatttatcccttcactatggagcattttacaagggaagctgagttttggagcaaactaatgcttaaagaaagtggttattgtacaggtcatgaaccag

SEQ ID NO: 569896 - DNA, 90 bp, Homo sapiens
cctttgctacgcatggcacggcctttgacaagaggtttccattaactttggaccatgcttcaagtatcctccgaaggatctcacttaccg

SEQ ID NO: 569897 - DNA, 50 bp, Homo sapiens
aagcatataagtggtcaaacaagttacatcatgctgatgacagcttcctg

SEQ ID NO: 569898 - DNA, 100 bp, Homo sapiens
cttctcagcctcctgtgaccactgttgattgccatcagtttccaaacttaatggcagcgttgttactgatggtgaacgagaagattctgagagatttttt

SEQ ID NO: 569899 - DNA, 98 bp, Homo sapiens
aagcacagccccgaggtgtgcgaagccaccaaaaccttgatgctctgcacgaccaccttgctaccatctacccaggaatgcgtgcaccttcctttagg

SEQ ID NO: 569900 - DNA, 109 bp, Homo sapiens
cctttgcaccccgcagtggtgaagccccacctgggccatgttcctgactacctgggactcgtacctgcttgactatttcctctttctgaaccgctacttcgaggtgggg

SEQ ID NO: 569901 - DNA, 90 bp, Homo sapiens
agaatattgatggtacaatagaggtcatatatcagttatgtgcatgctctgatacatctggtcctactatgaggtacttgagaaccagcc

SEQ ID NO: 569902 - DNA, 100 bp, Homo sapiens
tattgcaagacgtctattccttggagaccaaactataaatttgccaatattcaagtcaaacaacgttgaaatggattgggtgttgaagcatactggtcca

SEQ ID NO: 569903 - DNA, 90 bp, Homo sapiens
atttttccctacgtggaattggatctacataggctgtagcaaggtgctgctgaggccacggacgtcggaggaggtgtcccacatcctcag

SEQ ID NO: 569904 - DNA, 74 bp, Homo sapiens
tacggaccataataatcaggagtgaagtcccagggatattctgtgctggtaaaagtacacctgtaagccagctt

SEQ ID NO: 569905 - DNA, 74 bp, Homo sapiens
ccttatttatccagaagattgatcatcatatgggttgctcaccagctggattccctcctgggggcttcattccc

SEQ ID NO: 569906 - DNA, 100 bp, Homo sapiens
cattaaattcccgaactggggagatctgtggacccaagtggagagattgtggaactggcgaaaggtgcatgtccctggaaggagcatctctaccacctgg

SEQ ID NO: 569907 - DNA, 100 bp, Homo sapiens
tttgggatcaccagtcggagcccttcgtgttacaggttatcaatactctggctgaccatcatcatcgtgggactgactttggtggaagtccttggttaca

SEQ ID NO: 569908 - DNA, 50 bp, Homo sapiens
cgatttcatgactaaccagtgaaacttttgagaagaactttgaaagagaa

SEQ ID NO: 569909 - DNA, 100 bp, Homo sapiens
gcggcgtcttttgtgagttcagcaagaggaggaacgacgtagaagagaggaagagatgatgattcgtcaacgtgagatggaagaacaaatgaggcgccaa

SEQ ID NO: 569910 - DNA, 74 bp, Homo sapiens
attcagtacagttgtcattcacttcttagacaaagaattgacaggcttgaaatggagtttcgctcttgtcgccc

SEQ ID NO: 569911 - DNA, 100 bp, Homo sapiens
cgtcaagcacctcttcaccacagcacccgacagacgtggactacagggtcatggccaccttcaccgagttctacaccacgctgctgggctttgtcaactt

SEQ ID NO: 569912 - DNA, 75 bp, Homo sapiens
ctgcagaggtgctggagctggcaggagtgggaatagctttgcgaaaaatgggcgcaatggccaagccagattgta

SEQ ID NO: 569913 - DNA, 100 bp, Homo sapiens
cgggatctcaggtcctcgggggcggcggccacgccaaggacgggcagcctcctgtcagtgagtctcattggagaacgttgctgcaagacatgttaactat

SEQ ID NO: 569914 - DNA, 98 bp, Homo sapiens
ggcgcgaagcgctggtggcgggcccgggctgcggcgtgtgcgcgcccgccagctgctccggagatacgttccctgtattgaacactgatatacaagga

SEQ ID NO: 569915 - DNA, 74 bp, Homo sapiens
agtgtggatatggatgagacagagagggaagtggaatatttcaaaagcgactccagctcggacacagacagctt

SEQ ID NO: 569916 - DNA, 98 bp, Homo sapiens
gtgcgccggcctttggtcgcctccgtgggcctcaatgatattaataaggcagcggaaagaagaaatatgaatacggctccatcaagacccagccccac

SEQ ID NO: 569917 - DNA, 100 bp, Homo sapiens
ggcttctgcctggtgctctgcgtcctcatcgggcttatgttcgagcttggattccttagcaccaccacagctcagccagaacagaaggcctcgaatctca

SEQ ID NO: 569918 - DNA, 97 bp, Homo sapiens
tcggagtggactttgcctttgcagaactctgtgttgttcctttgcggatcttctccttcttcccagttccaggtgaccaccattgacctctcagcct

SEQ ID NO: 569919 - DNA, 100 bp, Homo sapiens
aaatcaactacctaatgttatacaggctctggaaaaacatgaagatgatgatgtgcctgcagatatggttgcagaagaatcaggtcctggtgcacaaaat

SEQ ID NO: 569920 - DNA, 75 bp, Homo sapiens
tgatcatgatacagttgataaaattgttgatttcttcggtgcagaaaaaaaatgaagatttaggacaggaggaaa

SEQ ID NO: 569921 - DNA, 102 bp, Homo sapiens
gataggccatggagcaattctaggggcttatagctccaataatggaatgggctacttctacaagtccgaacagccagtccagcaaaatgaacagcattgtct

SEQ ID NO: 569922 - DNA, 90 bp, Homo sapiens
aaatatggatctttacatgttgaatccttgcagcactaaaatttggataaaatggaccagttgctacagatgctgcaaagtacagacccc

SEQ ID NO: 569923 - DNA, 82 bp, Homo sapiens
caaggagctaaagcagcgtgcgttcagccctgggacccgggaaaaggagaagatgaaggaagccaaggatgcccgctatacc

SEQ ID NO: 569924 - DNA, 100 bp, Homo sapiens
ggaaatggcacctatggacaagtctataagtgtcttgggacaaggtgcgcattcctggtgtgctgcagcgattgggagtgacatactttgtggttgctgt

SEQ ID NO: 569925 - DNA, 74 bp, Homo sapiens
caagatgatgagggcgcggcagtatccttggggcactgtgcaggtttaattggttggggtcagataagaagagg

SEQ ID NO: 569926 - DNA, 74 bp, Homo sapiens
caattcgggaaatttctctattaaaggaacttcgtcatccaaatatagtcagtaatccttcccctctaccaccg

SEQ ID NO: 569927 - DNA, 100 bp, Homo sapiens
ctcaaaaacaaagagtatcatcaacgggaagtgagagccctgaaaaccactcgcttgcagagcgctggatcagcaatgcctactagttcttcattcaaac

SEQ ID NO: 569928 - DNA, 100 bp, Homo sapiens
ggaaattgctacaagcaactcttcggctaacttcaaagcctcccgcgacgatgcccctcaacgttagcttcaccaacaggaactatgacctcgactacga

SEQ ID NO: 569929 - DNA, 90 bp, Homo sapiens
atggtttcctgccagctttgtgagggtgaaaggtgtagcagtcactcggcctacacccacagcatcgaccttgtgaacccagcgacctga

SEQ ID NO: 569930 - DNA, 100 bp, Homo sapiens
gcttcctttccgccactgcccaaactgctgaagcagctcccgcgaggaccacccgttccaattgctaatccagcatttgtggatagctgcaaactgcgat

SEQ ID NO: 569931 - DNA, 83 bp, Homo sapiens
cataccccgtaccaagccgagggcaactttggaggccccctggaaggctttaggatccaggatgaccgagtgggagacagcag

SEQ ID NO: 569932 - DNA, 75 bp, Homo sapiens
tattatttggtgcaaccatctccttctcatgtaacacaggtgtgtcaaacagtattcttgaatgttataccccag

SEQ ID NO: 569933 - DNA, 99 bp, Homo sapiens
acccaagtgattttgcagttacagcctgtgcaacaagggttctccgtggaggagccagccaacgtcctttgaccccaaaccagaaccagcagggacagc

SEQ ID NO: 569934 - DNA, 75 bp, Homo sapiens
tgtggctcattgaggtcaacggtgcccctgcatgtgctcagggcaagctctgtgtgattgattggaagacatcag

SEQ ID NO: 569935 - DNA, 80 bp, Homo sapiens
gtgggtagaggacgtgttagacaagttcatgaggttctcccatgggcaggtggtctctctggatgagctgcgccccttcc

SEQ ID NO: 569936 - DNA, 100 bp, Homo sapiens
cgcacgccccgaccttccatcgaggaggtggagcgggaaatcatcaagcaggaggagaacgtggaccccgactactgggagaagctgctgcggcaccact

SEQ ID NO: 569937 - DNA, 83 bp, Homo sapiens
accaaggagacgctcctggcactgcaggatttttagactctgaggagcagttggagctaatccacattatggaaatggaaacc

SEQ ID NO: 569938 - DNA, 100 bp, Homo sapiens
cggcctgtgactgctgtggagatccagctgcattaaagggcagtatttaaagtcagttggcaagcagtggaataagatttttgtaaagaaaccttgtgca

SEQ ID NO: 569939 - DNA, 100 bp, Homo sapiens
agtgtagttgagagctcggccccaggagccaataacctgcagtatgtgggtgccccggtggcttatgtccagcagatatttgtgaagtcctcagtgtttc

SEQ ID NO: 569940 - DNA, 100 bp, Homo sapiens
tggaggacatttcgaacacaccgtgagggggaagggaagctgctgtgttgaagcaccctcatcacatgtgtggattctgggattctcagagtctggcatg

SEQ ID NO: 569941 - DNA, 100 bp, Homo sapiens
cacaaaagagtctccgcggtggaggtctgcgttgctcttgcttttcctcgctggggtgtacgtttcagagactcctccactctctgggaatgacacggac

SEQ ID NO: 569942 - DNA, 90 bp, Homo sapiens
tgaggatcgaggaacgttgtctgatatccttggaacagaagatcttattgtggaagtgacttccaatgatgctgtgagattttatccctg

SEQ ID NO: 569943 - DNA, 82 bp, Homo sapiens
gccgggaggacgagggacggcgcagacggaggcggcggagccgggagcgcaggactggaagctgaccctgatcaccagggtg

SEQ ID NO: 569944 - DNA, 83 bp, Homo sapiens
atgtctcgccgcaagcaaggcaaaccccagcacttaagcaaacgggaattctcgcccttatgccagcctggaccatcttggag

SEQ ID NO: 569945 - DNA, 82 bp, Homo sapiens
gagaggttaaggaactcgtcctacgtaacacagccagttaggaggaagacaatggtcctataatgcccttggataagaaaag

SEQ ID NO: 569946 - DNA, 100 bp, Homo sapiens
ttaaccagcatggctacttcatattttggaaagcagtttttaagacaatgtaaacaggaacatcgataagtagtgtaaaaacttgcacaatgaaatccga

SEQ ID NO: 569947 - DNA, 83 bp, Homo sapiens
cgcttcggccgaaggcccgagcgcccgaggcgtctgggatggtgtgggaccggagggatttaaagatccagctctgtatactt

SEQ ID NO: 569948 - DNA, 50 bp, Homo sapiens
cttccagctgtttgaccgaacaggagttgagaagaggaggaagaataatg

SEQ ID NO: 569949 - DNA, 75 bp, Homo sapiens
tcatcctcgaggacagaccagcggctggaggaaaagccagacggagccctggctgcccagcctccgccttcccag

SEQ ID NO: 569950 - DNA, 75 bp, Homo sapiens
caaagaatcaagttgcaatgaaccccaccaacacagtttttgatgtcatcagcattgacaagacgggagagaatt

SEQ ID NO: 569951 - DNA, 75 bp, Homo sapiens
aggattccaagtaactcttatttggagccatgtctgaccaggacgtttggaagatcatatccatgccagaggctc

SEQ ID NO: 569952 - DNA, 100 bp, Homo sapiens
gacgagttctcccggggaaatgtaccgtccagcgagttgcagatctacacttgaaagacgagaatccaggacttgaatcgtatcttcccactttctgagg

SEQ ID NO: 569953 - DNA, 75 bp, Homo sapiens
catgctggtggctctacccagaattcaattaaagtggctcaggtgaactgtcacccctacaactcagcttgcaac

SEQ ID NO: 569954 - DNA, 75 bp, Homo sapiens
ggatgaactggtgtgtatcctaaatatggaaggaaggtcatttttggatgaattaaaggcatgtgtggcttctaa

SEQ ID NO: 569955 - DNA, 75 bp, Homo sapiens
caatgccactacctacttcactagtctctggatggtcgtcagatccgtgtggatcatgcaggcaagtctgctcgg

SEQ ID NO: 569956 - DNA, 75 bp, Homo sapiens
gaggaacccagcagggtcaccatttgcagcgcaacatggcagggtgaggtggctttgaccccgggttgcccggcc

SEQ ID NO: 569957 - DNA, 100 bp, Homo sapiens
gtgtacacactgcgagctactttctgactgcccgcctggcactgaagccgagctcaaaggttggatggcaagcatgtggtgtttggcaaagtgaaagaag

SEQ ID NO: 569958 - DNA, 82 bp, Homo sapiens
tcctgctgccttcccgtcgccgctcccgaagcttttccaggaaacttcctcctggccaaccctgtgtctggcagccccatcg

SEQ ID NO: 569959 - DNA, 49 bp, Homo sapiens
tttggtgccatcaattatgtcgcgaacaggcctttgagagcagccagaa

SEQ ID NO: 569960 - DNA, 100 bp, Homo sapiens
aaagatctcgtacaagatccttctttcactattcatggccgaattgatcaagtcaaccaactccttgaactggatcatcagaagaggggtggtgcacgat

SEQ ID NO: 569961 - DNA, 75 bp, Homo sapiens
agaagagtatcctggagcggaaggaggtgctcgtaggtggcctctgtcagcctcttgcagctgggccaggagact

SEQ ID NO: 569962 - DNA, 101 bp, Homo sapiens
agatgggttttccagagatgcaaaaatgcaccctactccagcatcgcaccccaagaaaccaggtggtgtgtgatgagaacggctctaagggttatgccttt

SEQ ID NO: 569963 - DNA, 75 bp, Homo sapiens
cttcactttgctggctacaacaagcagaacacaactcttggggaaacatacctacagaccattctgtttctgtgg

SEQ ID NO: 569964 - DNA, 83 bp, Homo sapiens
gaagaagggacacctttcacagctatcagggaaggggcactatgaacgaagaggagcagtttgtaaacattgatttgaatgat

SEQ ID NO: 569965 - DNA, 100 bp, Homo sapiens
gcagcaacggcggaatatgggcgggaaccactcccacaagccccccgtgtttgacgagaatgaggaagtaccttctccaggcaaattccgttcccctgca

SEQ ID NO: 569966 - DNA, 82 bp, Homo sapiens
cctggtttccgggcatgagctgagagcaccacgccgaggccacgagcacaaacacagagcagtctaaagcaaccgagcactg

SEQ ID NO: 569967 - DNA, 75 bp, Homo sapiens
gtatggacacagcttctagtgttgctttggatcttgtggaaagtcagagttcaaggtgtttgcagactatgaagc

SEQ ID NO: 569968 - DNA, 75 bp, Homo sapiens
tccttttccctctccctttccctaaggatctcccagccatccagccccggctagtggcggtcagcaaaaccaaac

SEQ ID NO: 569969 - DNA, 98 bp, Homo sapiens
tttctttgtcatgtagccaagactggagaaacaatctttggctagatcagagtctaagagagatggaggttttaaaaataattggagctttgatcatg

SEQ ID NO: 569970 - DNA, 82 bp, Homo sapiens
catcaagaagaaagtcaacgacaagaacccacacgtcgccttgtatgccctggagaaatctgacccggtcgtctcgtaccgc

SEQ ID NO: 569971 - DNA, 82 bp, Homo sapiens
ggagattgcgagggagcgatgcggtgcagcgcgtcttgctctgttgcccaggctggagtgcagtggtgccatcatgccaacc

SEQ ID NO: 569972 - DNA, 100 bp, Homo sapiens
agccacacaactaggagagtgtccccatccggtgagactttgcagacgagcactgcagtttcctcctgaaggctggctccggctctccctcaataatggc

SEQ ID NO: 569973 - DNA, 96 bp, Homo sapiens
tggcacagaagtgctgccaggagaaactaagttgctgaacggtaattcgccaaaatgacgaacacaaagggaaagaggagaggcacccgatatatg

SEQ ID NO: 569974 - DNA, 87 bp, Homo sapiens
ggcggcgccatcttcgaacttagacttccggaaggactttggcgaggtacgaggatgtcgtccaggaaagattgtgcagatgactga

SEQ ID NO: 569975 - DNA, 139 bp, Homo sapiens
ggaagagactgagccttgagcagaggaacctatacaaagaagtgatgctggaaaatctcaggaatctggtctcattggggggtaactacggggatgatcgtcgtggtggcagaggaggctatgatcgaggcggctaccg

SEQ ID NO: 569976 - DNA, 75 bp, Homo sapiens
ctcacagcccagctcgggaagtggacagactgggcgtcatgaccctttcccatgaagctgaggtcttgaagcagc

SEQ ID NO: 569977 - DNA, 100 bp, Homo sapiens
cctacatcttcggcctgggccttaccatcttcatcatgcacatcttcaagcatgctcagactgtgcaacttacatcatctgaattggagtccacacttga

SEQ ID NO: 569978 - DNA, 100 bp, Homo sapiens
gaaattgcagccagggatattgagaaacttctgagcaacagatctaaagccctggtgcttgcagttccccacaatgatgaatggacccgatttgccagga

SEQ ID NO: 569979 - DNA, 98 bp, Homo sapiens
tgctgaaagcactgaagtccttatttgaacaccacaaagctctggatgaaaaggatactgctggtcaagagaggtttagaacattaactcccagctat

SEQ ID NO: 569980 - DNA, 82 bp, Homo sapiens
ctttctttgtggtcttcatttgtgaatacatagacaaatttacatgtattggagaccagaccagaagcccttctgaattaag

SEQ ID NO: 569981 - DNA, 75 bp, Homo sapiens
aggccatgtcaggagacggagccacggagcagtactgcctcctgtgctcgtgccaagacacagtgaatataaccc

SEQ ID NO: 569982 - DNA, 89 bp, Homo sapiens
cacctggcgagtcctcggtgtcggtggccggcagtcatctcgcggccgttcagattgcttatgggagatgaacgtgtaaagaatggcct

SEQ ID NO: 569983 - DNA, 101 bp, Homo sapiens
gtccctgctgaatcacacgccgccatccgggaggcccagggaaggaatactcccccagttgcaagaggcgcaggaccgtggaagacttcaacaaattctgc

SEQ ID NO: 569984 - DNA, 75 bp, Homo sapiens
agaggaacatgaagatgaaagccgtgctggctcagagaaggttaacgtggctcctgtggctgttccatccctgag

SEQ ID NO: 569985 - DNA, 98 bp, Homo sapiens
tggagttcatggtgttagcgcaaaagttctgaatggcatccgtcctaccggaaacctaggaaaagtgcctccagaaagagtcgagaagataatggatc

SEQ ID NO: 569986 - DNA, 83 bp, Homo sapiens
ctgagctgccgcctcctccgccgcccgaaaacccggagtgccccgcacagttcaaatctgaacatcaatgatgtactagggaa

SEQ ID NO: 569987 - DNA, 75 bp, Homo sapiens
atgatatgaaccaaagatggaatgacttaaaagcaaaatctgctagcatcagaacctaatccaccaatagatcaa

SEQ ID NO: 569988 - DNA, 83 bp, Homo sapiens
gaaactatggcctccaggcttccgacggcctggtcctgtgtttacaaaggaggaaaacgacttcttctagatttttttttcag

SEQ ID NO: 569989 - DNA, 74 bp, Homo sapiens
aagtagagtatttcaaccataaagacatcttaattgggcacgaaagaggaacgaatgcaggaatttgggaactg

SEQ ID NO: 569990 - DNA, 100 bp, Homo sapiens
cgcgcggggcagccaagagacgaggctattgcattacctcctatagccaaatggccataccagaatggttttacatttcatacatggcttagaatggatc

SEQ ID NO: 569991 - DNA, 75 bp, Homo sapiens
atgctgaggatcgaggaacgttgtctgaggaggagctccggaagctgcgagaagaaaccaacgcggagatgctgc

SEQ ID NO: 569992 - DNA, 98 bp, Homo sapiens
caggaggcaaccacactagtttaggagccgcccaggaggctcctcaggccgaccccagaccctggctggccaggatgaagtatctccggcaccggcgg

SEQ ID NO: 569993 - DNA, 100 bp, Homo sapiens
atttagttctggggagcgcctcgtcgacatgagtgatgtggaggaaaacaacttcgagggcagagtacaagaaaattccccaggacacagagctggtttg

SEQ ID NO: 569994 - DNA, 90 bp, Homo sapiens
cacatggtgtggatgtgacagcccaagatactaccggccctggccaacgtcaacattgggagcctcatctgcaatgtaggggccggtgga

SEQ ID NO: 569995 - DNA, 100 bp, Homo sapiens
ctgctttcttttcctcagaactactatattcagtggctaaatggctccctgattcatggtgaaaaaccatacaagtgtcaaatttgcaatcagtctttta

SEQ ID NO: 569996 - DNA, 123 bp, Homo sapiens
ctatgttcgatttattgaagatgagcttcaaattccaggagatgcctacatagaagagtgacagcagctagactaaatgtttaactgctgaactagttcctcaggtatcctggctctagagat

SEQ ID NO: 569997 - DNA, 100 bp, Homo sapiens
agacgggagtattatgaaaagatcaactctcttgatagagcccaagcagccaagaataaaggcaataaatattttaaagcaggaaaatatgaacaagcta

SEQ ID NO: 569998 - DNA, 75 bp, Homo sapiens
gagccctggatggttgtgagggatgagaaaagaagatggactctaggttcttgggtgtctctggggagtccctgg

SEQ ID NO: 569999 - DNA, 98 bp, Homo sapiens
taacacaaggcatattggattacgtagtagaaaccaccaaaccaatttctcctgcaaaccagggtatcagaggtaatttcatctgtgccaaagcctcc

SEQ ID NO: 570000 - DNA, 99 bp, Homo sapiens
ctggaagcttcagagaaagggaacacagaaatctggtatgctggtaaaaaggttgtatcacggactgattcaccgagcccaaccgtactcaactcacat

SEQ ID NO: 570001 - DNA, 83 bp, Homo sapiens
tgtcttctcctcagtattctccgtgggaactgacggaactgtggaaactgaaggaacgtggtcgtttttcaatgagctagaga

SEQ ID NO: 570002 - DNA, 50 bp, Homo sapiens
aagcatctgaagaattttatgtttctataatccaggaacttgttactaat

SEQ ID NO: 570003 - DNA, 83 bp, Homo sapiens
ccccgctcactcgcggatcccgaccgcccatctccgcctcgcttccagcccagacaatgcagatcttcgtgaagactctgact

SEQ ID NO: 570004 - DNA, 96 bp, Homo sapiens
agagcatgaccttaatgatgtttgtctctaccccaactcaggtgtcatggagaaactccagctgggcccagagattctgcagcgggaaaatccaag

SEQ ID NO: 570005 - DNA, 100 bp, Homo sapiens
ccgaagaagaaaggattcgttacagccagagattgatggagtctcgccctgtcacccaggctggagtgcaatggcgtgatctcggcgcacttcaacctcg

SEQ ID NO: 570006 - DNA, 90 bp, Homo sapiens
aagactttagagtcaaagaaagtatctgcatctaccttaaacttgccaattctgtaactccttgggatatcttgctgagcttaattgcag

SEQ ID NO: 570007 - DNA, 100 bp, Homo sapiens
catcccactccggaaatgtcactcccaccgccccaccgtacttgcaagaaagcagccccagagaaggacagaataacgggctcccagattcacaagcccc

SEQ ID NO: 570008 - DNA, 50 bp, Homo sapiens
ggaaaaagcagtaaagccagaggaaggttactcactataaacaatatcca

SEQ ID NO: 570009 - DNA, 100 bp, Homo sapiens
agcaccgttaccagggcaagatgtttgacgaggacagcatcctgggcgagctcaacgggcccctgcgggaggtctgctcaccaggtggccagataccgcc

SEQ ID NO: 570010 - DNA, 82 bp, Homo sapiens
ccgccgcccgtccacacccgccgccaggactatcggacaaaacctttctgctgcagcgcttgtccattttcctcaaaattct

SEQ ID NO: 570011 - DNA, 97 bp, Homo sapiens
gtgggatcgactggcccttaatttacaccagcacttgaagcgcctggaaccggtacatggactatatcgcacaacaggtgctagttttgagaaggcc

SEQ ID NO: 570012 - DNA, 74 bp, Homo sapiens
gctcacttcttacagattgcaaccctgggcttcgtgggacacatatgcaacatgcctatgatttttacaagcct

SEQ ID NO: 570013 - DNA, 98 bp, Homo sapiens
caaacgcagagacaaaagaaacgggccccgactggtgcactacatcctccaggaggtggtgatgggtgggatggtgttggaaacaaacatgaatgaaa

SEQ ID NO: 570014 - DNA, 90 bp, Homo sapiens
ttcaagatcttgaaactagcaggtggcagagctggggttcatctgtctccatgtgctcagaatcgctgccgttttgcccttgggagtagg

SEQ ID NO: 570015 - DNA, 100 bp, Homo sapiens
agcgatacctgaccacctacaaccaagggtaactcacgtagtgctccacctacacgagggcccccgccatcttatggtggaagcagtcgctatgatgatt

SEQ ID NO: 570016 - DNA, 82 bp, Homo sapiens
tacctctccttttccctctccctttccctaaggactttgtgttttatgccccacgtctgagaatcaacaagcggatcctgca

SEQ ID NO: 570017 - DNA, 90 bp, Homo sapiens
aaccccatggcggaccacacgctgcgctatatgtgccaagtgctctctgctgccccagcagagccagtatcctgacaggaaagtacccac

SEQ ID NO: 570018 - DNA, 98 bp, Homo sapiens
gcctgcacgtgtcccaactgcaaggatggggagaagaggcatttgaggagactcatctgacctcccttgacccagtgaaacagtttgctgcctggttt

SEQ ID NO: 570019 - DNA, 96 bp, Homo sapiens
cacagaaatggtatcaagaaaccccgatcacaaagatacgaatctcttaaggggtacgtttcaggagacggcagcgaggctaccttgcatggtgtg

SEQ ID NO: 570020 - DNA, 83 bp, Homo sapiens
ctgccgtccttctccactttcgccagcccgtgccgcgagcgcggcctgcaggagttcctccgtgtcacaaagcagtacctgcc

SEQ ID NO: 570021 - DNA, 75 bp, Homo sapiens
gtcggaatcagatttgaaaatgaaagttgtaaagaaagaatgaggcctgttaaagcagctttgaaacaacttgat

SEQ ID NO: 570022 - DNA, 144 bp, Homo sapiens
ccagcgccaccatccacgccagccgcaccatgccgctcctaagcctgcacagccgcggcggcagcagcagtgagaggtatcgagaaccttccctgcgaacttcagaggaacttccagctgatgcgagagctggaccagaggacg

SEQ ID NO: 570023 - DNA, 83 bp, Homo sapiens
gctgcgccgcaacgccgagcgcaccgacatctgcctgctcaaaggtcagcccaaggccaaccccactgtcactctgttcccgc

SEQ ID NO: 570024 - DNA, 101 bp, Homo sapiens
ccccctgctcggcgggcagtgaggaggaggatatggatgcacttttgaacaacagcctgcccccaccccacccaggagtctatattctgatcggagccggc

SEQ ID NO: 570025 - DNA, 127 bp, Homo sapiens
gcctgtatcaactctggtatggacacagcttctagtgttgctttggatcttgtggaaagtcagagagtttaccgtgaagaagctgactgctatgaacagcatgtgaaggtggaggaattccagccca

SEQ ID NO: 570026 - DNA, 82 bp, Homo sapiens
accccgttgacaaggcactgctttttcatgacgagatgtggtactggatcttcctctgggctctcttctcttctctgtttgt

SEQ ID NO: 570027 - DNA, 100 bp, Homo sapiens
atgtttaatcacacacaacatattcgaattgagtcaagcccatttcctcttgaggagttggaaactctggagagcaacctcttagcacagcagaattcac

SEQ ID NO: 570028 - DNA, 74 bp, Homo sapiens
aggccaggctttatgggagcatgggttaccagcgacgcaccctagatggctggagccgtgtggatgggcataaa

SEQ ID NO: 570029 - DNA, 83 bp, Homo sapiens
cgggagcaggagcccgcggccggccagccgaagatggtggcggctactcctcctggattgaaagaaggtggcaagaggaagaa

SEQ ID NO: 570030 - DNA, 75 bp, Homo sapiens
agactggcaagattactgatttcatcaagttcgacactggagctcagggcaagtggcagtagccagaggatgttg

SEQ ID NO: 570031 - DNA, 82 bp, Homo sapiens
aagaaatccattctcatgaagcagctgcagcagcagcagcacagcgacaagacggtactccaaagattcaggtttactcacg

SEQ ID NO: 570032 - DNA, 85 bp, Homo sapiens
cttatattatcagtacatggagacatatatgggtcctgctctttttgcatttttgaatcagagccgacaggcacttgaattgaaa

SEQ ID NO: 570033 - DNA, 98 bp, Homo sapiens
ctggacaccagcaatgagaggacccgcgtgggcaccctgcaggtggtcagacatgtcatcaactcagctggtggctccgctgccggatgggagtgccc

SEQ ID NO: 570034 - DNA, 100 bp, Homo sapiens
gaataccgagacgggcctctgctgttccctgagcttgctgtcagcaaatgtttgcaaaagctggcaggctgacagaggcggcctcaggacggaccttctg

SEQ ID NO: 570035 - DNA, 82 bp, Homo sapiens
attggtgttgacaatccagcagctaaagttttagttgggctggtgggcttgtcgctgtcttatgccctgtccctgacgggcc

SEQ ID NO: 570036 - DNA, 100 bp, Homo sapiens
cagtgccaagtaccgaggtgccttctgtgaggcaaagattaagactgtgaaaaggctggtgaaagttaaggtacatcgaggaggccattgagaaactaag

SEQ ID NO: 570037 - DNA, 74 bp, Homo sapiens
agcagttactgggaaggtgagggcgagaaggcctccggaggtcatgacgccagtcagatcacactagccttggg

SEQ ID NO: 570038 - DNA, 100 bp, Homo sapiens
aaacgcctcattgctggttgcattgggactctgatgccagtatggactggagatgatgggagccagttggatagccccatggaaatccccaaagagctct

SEQ ID NO: 570039 - DNA, 132 bp, Homo sapiens
gaaagacaccacacattgcgcagtcgggaccatcgccggagcctgaggacacttctctgtcgtcacagttagacttgcaaccttatttctcgaaagagggcccaacaggataggcagtatttacaaaaaggc

SEQ ID NO: 570040 - DNA, 101 bp, Homo sapiens
ctcctcggcactgtattctttacctgcttcccaatcccactgatgaggatcagcccatgatcccccagattagttatgcatcaacggcacccgagctaagt

SEQ ID NO: 570041 - DNA, 95 bp, Homo sapiens
ttgctgattgttggaggttcttttggtcttcgtgagttttctcaaatccgatatgatgctgtgaagagtaaatgacctacggcatgatgagctcc

SEQ ID NO: 570042 - DNA, 83 bp, Homo sapiens
cgttaatagaaagaagaacaggcaagaagtggtccagccggcgaaggatatccgacatgaagccagtgacttcccatgtagag

SEQ ID NO: 570043 - DNA, 74 bp, Homo sapiens
gccctacttcaaggataagggcgacagcaacagctctgccggctggaagttgatattcactgatggactccaaa

SEQ ID NO: 570044 - DNA, 51 bp, Homo sapiens
gaacaagaagagaaccttgaagcaagtgagaaaagacgagatcccccaaat

SEQ ID NO: 570045 - DNA, 90 bp, Homo sapiens
ctccaacagcttcatatggacagatggacttcaaatgctgtttgtattccagagactagttgattcgggaggagcatacttacctcgaca

SEQ ID NO: 570046 - DNA, 100 bp, Homo sapiens
gatcactgcccagggtcacccaatgataacatgcatgcatatggaacttgctgcatgccagcaccatattctgaaaaagagttccacgtcctcccttatc

SEQ ID NO: 570047 - DNA, 100 bp, Homo sapiens
cccaggacctccatctcccaatgttggaggtttgtcaagggctatttaatgagttactagaaaatgggatttctgtgtggcctggttatttggaaactat

SEQ ID NO: 570048 - DNA, 110 bp, Homo sapiens
acccggtggtcgtccgcggctccggtcacgtcaccgtctgtaaaggtgcctcccactacggcctgaccaaagataggaagaggcgctcacaagatggctgtccagacggc

SEQ ID NO: 570049 - DNA, 76 bp, Homo sapiens
aacttgagctgaaagcgaaaaactatgctgaccagagagctacagaaggcccaaaagaagaaatatatcaagaaga

SEQ ID NO: 570050 - DNA, 50 bp, Homo sapiens
ctttttgcaccatccgtactaccaggtataagtgtgctagcggagtgtct

SEQ ID NO: 570051 - DNA, 83 bp, Homo sapiens
cttggactgagtcctgcaggacacagttgcagaggaaagtggtcgcttatggtcagaggagcagcctgctcaccctctccagg

SEQ ID NO: 570052 - DNA, 90 bp, Homo sapiens
cttaaaaagacggacagcccatcgtgtgaactatagagtttgtggacagatttatattgggtacccagtgtgttgaacaaattcaagagt

SEQ ID NO: 570053 - DNA, 50 bp, Homo sapiens
actcagctaaaagtggaactcaatgaggagctggagacaagagcccacag

SEQ ID NO: 570054 - DNA, 89 bp, Homo sapiens
tttatgggaaaattaagcagatgctccagtttgagaaacctggatctgcgatctgtttgtggtcatttggatccaggattcctagcaag

SEQ ID NO: 570055 - DNA, 101 bp, Homo sapiens
cgccgccatcctcggcgcgactcgcttctttcggttctacctgggagaatccaccgccatccgccaccatggtcatcatcagatttgaaatatttaaagtg

SEQ ID NO: 570056 - DNA, 82 bp, Homo sapiens
gctgcattgcaggcacagggcccgatgagccagagaagcttgatactccatcttctaaaccaacactcctagccaatggtgg

SEQ ID NO: 570057 - DNA, 49 bp, Homo sapiens
aaaatcctgttaccctagcaacagacctgtggatatctgggctttgggc

SEQ ID NO: 570058 - DNA, 100 bp, Homo sapiens
gggggttccatctcccaacttgtccatagtagcaaaagtggacggactatgcctaacattcttgatgacataattgcttcagttgttgaaaacaaaattc

SEQ ID NO: 570059 - DNA, 101 bp, Homo sapiens
gcctgggggactggggcgccgaggcgtgcacatgctcgcccagccacccccaggacgccttctgcaactccgacatcgatggaacccctccaattgatgcc

SEQ ID NO: 570060 - DNA, 98 bp, Homo sapiens
cgattgcatcacaaccatcaaacactggatcaccatcatccgagctcgcttcgaggagatgatgaggagtctgatgaggaagctgtgaagaaaaccaa

SEQ ID NO: 570061 - DNA, 100 bp, Homo sapiens
ctgcaaggtggtggaagtgggcagcaagatctacgtggatgatgggcttatttctctccaggtgaagcagaaaggagacgccaaccaacgagctgagcgt

SEQ ID NO: 570062 - DNA, 75 bp, Homo sapiens
cagcaacagcctggggcgctccccctccgcctcggcgtacctgaccgtgcagtatatggaatgtgcagatgtccc

SEQ ID NO: 570063 - DNA, 101 bp, Homo sapiens
gaccgggaccgccgccgccgccgccaccatgtgacagctggagtatcagccttggaagtatatacgccaaaagaaatcttcgtggcaaatggtacacaagg

SEQ ID NO: 570064 - DNA, 50 bp, Homo sapiens
cttcagtgtgctgctcaaaaacaggctactgcagcactggggtgtcagtt

SEQ ID NO: 570065 - DNA, 98 bp, Homo sapiens
tcggcctggaccttgcagccgcaatggaagatgagaatgtgcctactgctcctgatcctccaagtcaacatttacgtgggcatgggacaggcttttgc

SEQ ID NO: 570066 - DNA, 95 bp, Homo sapiens
tagagaccactggattagcagaccctgatgagcaatggcaggcgctggtgagcgcaaaggcaagaaggatgacaatggcattggcacggccattg

SEQ ID NO: 570067 - DNA, 75 bp, Homo sapiens
gcgggcaggtggcggcgcggcgcgggctggcggtggctccacgatgtgttcagagcaacattgttttgttgacac

SEQ ID NO: 570068 - DNA, 74 bp, Homo sapiens
agctgctggccaagctcgaagagcagaaccggccgttaattaaggaaaagttgagccagggcgtgaccctcgtc

SEQ ID NO: 570069 - DNA, 90 bp, Homo sapiens
acgtcctgatgactgacaccagcttcaaggacttctctctcgtggagggcactccacagaaggatgttattatcaagtcagatgcaccgg

SEQ ID NO: 570070 - DNA, 87 bp, Homo sapiens
tcaccataagccattgagatccacatggagccaactctctgcgagagctgtagtacacatggatgaacgacgagaagaacaaattgt

SEQ ID NO: 570071 - DNA, 90 bp, Homo sapiens
gcgggagccacgcagaggacgccggaacaccctggaagccgagaaatgggtgtgggccgaagatatgctcatgtggtgttgaggaaagca

SEQ ID NO: 570072 - DNA, 86 bp, Homo sapiens
agccgcccgccccccaccgccgccccctccggcgtgttcatgcccccggggatgatcggctgaatgtaacagaggaactaacgtcc

SEQ ID NO: 570073 - DNA, 108 bp, Homo sapiens
cagcaggttgctgaaaaatattatggcaacaaatgcattattccatggtaaatacggcatcatctgcatggaggatttgattcatgagatctatactgttggaaaacg

SEQ ID NO: 570074 - DNA, 82 bp, Homo sapiens
ataaacatgcaatgaacccaaaagggaaaggggactaccacaggtatctggcagaatttgccacaggaaacgacaggaagga

SEQ ID NO: 570075 - DNA, 101 bp, Homo sapiens
cgctcgcgttggaggccgccttttcagaagcggctgcgcacggactgctggagatggtggagtccgtcagagctccagaaagctgtggaccaccgcaaagc

SEQ ID NO: 570076 - DNA, 75 bp, Homo sapiens
ctaaacctggtaaaatttcacggcaggatcctgttacatacatttcagaaacagcttctagaacattccctggaa

SEQ ID NO: 570077 - DNA, 101 bp, Homo sapiens
tttatgataattggatcaaagatgctgatccagacatttaatgtggatgcaccatgccagaccgtggaagatttaacgaatggggttgtgatggcccaggt

SEQ ID NO: 570078 - DNA, 100 bp, Homo sapiens
ctgcccagcagaatttgtatagagatgtgatgttggagaactacagaaacctggtctccctagcaatcaaagccttagatgggagatctcaagtttcaac

SEQ ID NO: 570079 - DNA, 95 bp, Homo sapiens
atcaagctgaacttttccaagaacagtgaggataatcaggacacccggagcaacctggacataactgtcggctctcggcaacaagccacccaagg

SEQ ID NO: 570080 - DNA, 51 bp, Homo sapiens
caacagaacttagcataaatgctgaagcttcagataaaccagtcgatcatt

SEQ ID NO: 570081 - DNA, 49 bp, Homo sapiens
tgaatctctgcccgcaacacatatcagggttactttgaaagttgcaata

SEQ ID NO: 570082 - DNA, 90 bp, Homo sapiens
ggcgaaaggaacggctgaaggccctacgggagaaaaccgggcgcaaggaagatgaagatcctgccaaaggtgatcagagtcgatcagttg

SEQ ID NO: 570083 - DNA, 50 bp, Homo sapiens
atatctacacggaaatgggccgacggagggagccatggatttgctgcggg

SEQ ID NO: 570084 - DNA, 80 bp, Homo sapiens
gaaggggtcgtcactgtactggtatagcaatcaaatgcacacgacggttctgccctttatattaatcgagatgaggacat

SEQ ID NO: 570085 - DNA, 90 bp, Homo sapiens
agaatcctatagaccagtgtaataccctgaatcccatttccatggtgtcagtgattcatattcctgataggacttataaactatcctgca

SEQ ID NO: 570086 - DNA, 100 bp, Homo sapiens
taccgtgtgcctgactttggtgtctgggaaagaggaagcaaatataataatggcagcacagagctacattcgaggttatgaagacagtatggagtttcca

SEQ ID NO: 570087 - DNA, 100 bp, Homo sapiens
ctcttatttagttctggggagcgcctcgtcgacatgagtgatgtggaggaaaacaacttcgagggcagaaagtgcctagctgccactccatttatatgag

SEQ ID NO: 570088 - DNA, 51 bp, Homo sapiens
tcaacaccaaaaagctttctgctagggagaatgtaactggtcactacattt

SEQ ID NO: 570089 - DNA, 98 bp, Homo sapiens
gagctgggcttcccgtacatgacgccggtgcaggacgtactcatagatcaaaccaagttactgctcctgagtatgtctttctgatatctgaactggca

SEQ ID NO: 570090 - DNA, 99 bp, Homo sapiens
ggccggagcttgagatacgccgctctgaatcttgccgccctgcactgccgcttcggtcactattttaagacaattatctcctatattgatgagcaattt

SEQ ID NO: 570091 - DNA, 90 bp, Homo sapiens
catcatttcagcaacaaggaaataaattagtggcagagtaagggtgacttggagaaatatggggagttgatgagcatcagaaaaaccagg

SEQ ID NO: 570092 - DNA, 75 bp, Homo sapiens
gtgtctgttgcagcttgcgtttggggctttcgacatgacaggtcactagaggcatgttatttgaaagcaattgag

SEQ ID NO: 570093 - DNA, 97 bp, Homo sapiens
gcttcctcatcagagcattccttttaaatggttcaattgatggcattcgccacatgtttacccctaaggcttgcattgatgacaatgttgatatggt

SEQ ID NO: 570094 - DNA, 51 bp, Homo sapiens
ggagaaaagcaaaaaaatgctcttggtgatgatgatgatgattttgatgat

SEQ ID NO: 570095 - DNA, 75 bp, Homo sapiens
gaccctacagaccaggcactccgtcagtgagatggcctccaacaagagcctgcattgattctaatgaagatgggg

SEQ ID NO: 570096 - DNA, 74 bp, Homo sapiens
gaagagagccaatgaaaggttggagttactacttcagaaacgcaaagagatattaacctggctgcagagccaaa

SEQ ID NO: 570097 - DNA, 128 bp, Homo sapiens
cgttgatattcctggcgctgtccctgaatggctttggtggcatctgcctaacgttcacttcactcacgtatttgtgtggaagtaatcgaaaagacaacatatttattgatcctggataccaaacattt

SEQ ID NO: 570098 - DNA, 83 bp, Homo sapiens
cttcggcagtccacccaccgccgccgcctcccagtgacttttttgaacgaaccattctgtgcaacagccttgtgtggagttgt

SEQ ID NO: 570099 - DNA, 100 bp, Homo sapiens
ctcagaaccattagacacatcagtggagtccatgctacctgattgcccccgggtctcagcagcaatgcatctgctcggactcaattggcaactccagcct

SEQ ID NO: 570100 - DNA, 100 bp, Homo sapiens
agaggatctggtgtaccaggcgaagctggccgagcaggctgagcgatacgacgggccaagaccagcttcaagtctccatggtaccagaaaacaacaacct

SEQ ID NO: 570101 - DNA, 87 bp, Homo sapiens
cagaggaattttgattgatacatccagacattatctgccagttaagattattcttaaaactctggctatggagttactagtagagaa

SEQ ID NO: 570102 - DNA, 75 bp, Homo sapiens
acgagaggcagcgccatggcggagcagacctactcgtggagaggcagatgcgaaccagaacaatgggacctcctc

SEQ ID NO: 570103 - DNA, 82 bp, Homo sapiens
gctaggaagcccctatcgccgagctcgttggagcttgaacccattgtcacccctccggctaatggtcgatttgaagtgggca

SEQ ID NO: 570104 - DNA, 50 bp, Homo sapiens
aaaatgtcaacaaattgatggtgttgaagggctccatgccattgttgtgt

SEQ ID NO: 570105 - DNA, 100 bp, Homo sapiens
gtcaagagcggcctgggaatttctacgtttcctcagagagcatcaggaaaggatcactactcttggaatcaaagataaatccaaatactgcatatcagaa

SEQ ID NO: 570106 - DNA, 90 bp, Homo sapiens
gtcaggtactattcggggaaagaattgaaccttcaccatataagggaggaatgatcaattggaatcgtctttttcctcctttacgtcagc

SEQ ID NO: 570107 - DNA, 74 bp, Homo sapiens
tgcaccccagcagtacatcgtggtcactgtctctgcaacgaaggttttgggaacagtaaaatggttcaatgtaa

SEQ ID NO: 570108 - DNA, 78 bp, Homo sapiens
gccatggcgaccggagcgaacgccacgccgttggaagttccacctggtgccaagcatcaacaccatgagtggcagtca

SEQ ID NO: 570109 - DNA, 100 bp, Homo sapiens
cccgctacaggatacgtgatggacgcccagagacaccgccctccagctggtgggggaggagccccagccaccaagaaggttttggccaaattgggcgagg

SEQ ID NO: 570110 - DNA, 50 bp, Homo sapiens
agtgcggggaagagctgggtcgactcaagtgggctcgggatgagtttgaa

SEQ ID NO: 570111 - DNA, 75 bp, Homo sapiens
agagaatggagggatataatgagtggaactgagcatttcagcaggaacttgatgcaaggcatgacaaatatgaga

SEQ ID NO: 570112 - DNA, 90 bp, Homo sapiens
tctgctcttcagtacaatcctgtgcgagaagatgtactaaattcattgaataacaactttcttcaaacgctaaatcaagcttggaatgat

SEQ ID NO: 570113 - DNA, 75 bp, Homo sapiens
ctactttttccagaattcatacaaagagtgtgtatggctgctgctttaaaagatgcaggtgtgcagcctgaggag

SEQ ID NO: 570114 - DNA, 75 bp, Homo sapiens
agattgaagcatgctctggaaatgttcccagaacattgcacgatgcctcctgcttattgcaggagtgaccaggac

SEQ ID NO: 570115 - DNA, 82 bp, Homo sapiens
ggtgttggtcgttcagaggacgaggagaagaagatgattctttggccatcaaaccaccccagcaaatgtctcggaaagaaaa

SEQ ID NO: 570116 - DNA, 73 bp, Homo sapiens
aaaggagaaagttaactgaattggtgacacttcgggtctctcacagaggaagcccaagacatggagaatatga

SEQ ID NO: 570117 - DNA, 87 bp, Homo sapiens
ttagggtcctttatatagaagggagagtagacacctgaaagaccccgccgtggcatcccagggcttcctgatggccgcttccatctg

SEQ ID NO: 570118 - DNA, 120 bp, Homo sapiens
tttgaacgagctacatcatttgaggaatcagaacgcaagcaaaatgcgttaggaaaatgtgatgcatgtctcagtggtcaaacaggatttatgcatcatccatcattttttacgtctgag

SEQ ID NO: 570119 - DNA, 50 bp, Homo sapiens
gaggcatggttgaaattgaattagccccacagtcttcgttataacctcac

SEQ ID NO: 570120 - DNA, 83 bp, Homo sapiens
ttaagagactccactgaggtcacacagccggtcagcccaaggccaaccccactgtcactctgttcccgccctcctctgaggag

SEQ ID NO: 570121 - DNA, 80 bp, Homo sapiens
tggctaacaaattgaaagatatcatcaaacgacatcaggaagaaaaaatgctgggcatcttggtgcagcacaaagtccgg

SEQ ID NO: 570122 - DNA, 100 bp, Homo sapiens
cttcacccagcatttcatccctcgtcgaaaggattggattggcatctttagacggttggattgcagccctgtctacactggataatcattccctggccat

SEQ ID NO: 570123 - DNA, 83 bp, Homo sapiens
ccctgagcagctttcagcactggagtgtaggaagaatgatgatggagacacagttgttgtggttgagaaagatcatttcatgg

SEQ ID NO: 570124 - DNA, 100 bp, Homo sapiens
tgagcttcattcagatgtggtggaatatgccaaggaaaaactggagagcttcatcaaaaatagtgatagctttgataatggagtcattgggcgaagctgg

SEQ ID NO: 570125 - DNA, 128 bp, Homo sapiens
ccggaacccctccctgccccactcacaggtgggccaaaccgaggcttctgggcgccgcggatacacattctagatatgtgcagtcagcctcagtttccaaagccggaaaaggatcctctagtagccac

SEQ ID NO: 570126 - DNA, 100 bp, Homo sapiens
tgtcccatgtttttgagtatatccgttctgagacatacaaatagtcgttgaggacttccacatggagattggcacaggaccagactcaagacacacaact

SEQ ID NO: 570127 - DNA, 75 bp, Homo sapiens
tccttgcgtcccgcctccctgggagctccgcacgggtacaggacatctgcttcagccatgactgtcgctgggttg

SEQ ID NO: 570128 - DNA, 95 bp, Homo sapiens
gtacgagctggttaggaggcacagggcgtcggacctgcacgagctgtctggcttcttccccgggagctcgcagggctgcgacgccttcctgcggc

SEQ ID NO: 570129 - DNA, 82 bp, Homo sapiens
gaaggaataagcctggaagaaaaagatacaacgaactagcacaacgaggggtgtccggtggagagctgtttgaccggatagt

SEQ ID NO: 570130 - DNA, 75 bp, Homo sapiens
gggtactgtggacaagcccagggctgctgaagcctaaagaaactgttccaactcttgctccaaaaactctttcag

SEQ ID NO: 570131 - DNA, 100 bp, Homo sapiens
aaaacggcgagagtgggcgagaacgtccactgcgggccggcgaaagctgtgcctccggagccagcgtggtggccatagacaacaagatcgaacaggccat

SEQ ID NO: 570132 - DNA, 98 bp, Homo sapiens
gggttgatacagcagagacgtcatacttggaaatggctgcaggttcagagcctgggcggatgatgtggagcggtttcagaaaatgttcagacacccaa

SEQ ID NO: 570133 - DNA, 49 bp, Homo sapiens
accaggccgggaagcccatcgggccttggatggtatactgtaaattcag

SEQ ID NO: 570134 - DNA, 96 bp, Homo sapiens
tgtcaccatctccaagccctgtggcaaactgaccaagcccaaacctcaaggaatggcggcgctagatagtaaggcatcagggaagatgggaatgcg

SEQ ID NO: 570135 - DNA, 50 bp, Homo sapiens
cggagctcccccaagagccggaaagtgtactaatggtcacttgatgtgcg

SEQ ID NO: 570136 - DNA, 101 bp, Homo sapiens
gcagaggacacgaggcggcgggctggagacatggaccgcggcgagcaagtggtacaggagctgcagcaggccatctccaagctggaggcccggctgaacgt

SEQ ID NO: 570137 - DNA, 75 bp, Homo sapiens
cagccttagccctagtgtagaggtggcgacctgcacatgacccagtttttccgaggcaatctggctggcttaact

SEQ ID NO: 570138 - DNA, 83 bp, Homo sapiens
acattctggtggctggtggaatgctgggaaacgtaaatattttcaccacgatcgattagactgggatgaacacagttctgccg

SEQ ID NO: 570139 - DNA, 100 bp, Homo sapiens
cgacgaggtgagaaagcttctggcaagaggtgctgatatcaacacggtcaacgtggacggcttgacagccctgcaccagcccatgcagaatgccaccaag

SEQ ID NO: 570140 - DNA, 100 bp, Homo sapiens
gaggagctggaagatgacgacgaggacgccagttactccacggaaagcagcttcagcagcactccaggtattagaaaactactcggatgctccaatgaca

SEQ ID NO: 570141 - DNA, 90 bp, Homo sapiens
ctgccccttcccaaagatgtggtttaacaggagatatgtcagtattgaattctcccagacatcagagctgtataatgcatgttgatatgg

SEQ ID NO: 570142 - DNA, 100 bp, Homo sapiens
cccggcgccgccactgccgcagccaggagatggttcgggcctagcggagccgggactggaggtgctagactggatcgagaaccacggagaagcatttctg

SEQ ID NO: 570143 - DNA, 82 bp, Homo sapiens
ggtgggaagtgaagtcagtgcctcagttgctggtttccaatacttatctacaggaatcgccatgaccccagctctgagggag

SEQ ID NO: 570144 - DNA, 96 bp, Homo sapiens
agcaggcccggggagggtggttaccgctgaggagctgcagtctctgtcaaggaagtatcaaaactccgctgtcagcttgctaaaaaaaaacaaagt

SEQ ID NO: 570145 - DNA, 75 bp, Homo sapiens
ccagctccgtctcggcggcggcggggggggccctcagcctcttggccttgaacgggctgttcatcttgattcaca

SEQ ID NO: 570146 - DNA, 83 bp, Homo sapiens
gctctcagcaagcaactttgagctgcacgttgcacaagaacttaaggcatacagaacgatggagtatatggcagaatccaccg

SEQ ID NO: 570147 - DNA, 90 bp, Homo sapiens
gctgtttgtcgtggttatctgtcagtctattatcctcccagtccacaacgctgaaccgtggctggacgaatgtttgaggtctgttttgca

SEQ ID NO: 570148 - DNA, 100 bp, Homo sapiens
tggggttcttatggtgggacccaacttcagggttggcaagaagataggatgtgggaacttcggagagctcagattagaccttcataagttcttattatgg

SEQ ID NO: 570149 - DNA, 80 bp, Homo sapiens
ggcgcctcaggcacctcggcccggaggctgggaggcggcagaatgcagccagaggagggcacaggctggctgctggagct

SEQ ID NO: 570150 - DNA, 98 bp, Homo sapiens
tcccctaactgcaattcaagactgctgtactatcccaccttccatgatggattactccaaagatggaataggggtaccatttatgggaagtttggcag

SEQ ID NO: 570151 - DNA, 75 bp, Homo sapiens
aaaaggcaaactcttcacctggtttttagaacttcagccataaaaatgggcagaattttccttgatcatatcggt

SEQ ID NO: 570152 - DNA, 100 bp, Homo sapiens
cttccctgttgctggagatcctgggcctcctgtgcaaaagcatggaatggaagttggatacactttgtgacttgtacgagacactgaccattacacaggc

SEQ ID NO: 570153 - DNA, 96 bp, Homo sapiens
gaaaccggggaccttaacaatccacctaagaaattcagagttttctggatatgccgcagaaggatccgtgccagaagcaagcctgtgagatacaga

SEQ ID NO: 570154 - DNA, 74 bp, Homo sapiens
gatgatccaccagcggttccatcctacacttggggtgtggccactgtaagaaaatgaagccggagtttgagaag

SEQ ID NO: 570155 - DNA, 80 bp, Homo sapiens
gatgccacaaccataatagaatgtctacattcctgaattacatgaacgacagccttcgcaccgacgtcttcgtgcggttc

SEQ ID NO: 570156 - DNA, 114 bp, Homo sapiens
cgagcacagagcctcgcctttgccgatccgccgcccgtccacacccgccgccagggcgaagctgtgctcaggcccgggctggacgcagagccagagctgtccccagaggagcag

SEQ ID NO: 570157 - DNA, 100 bp, Homo sapiens
aaaataattgctgacatgctcttcaaccttttgctgcaggctcttttcctcattcaggtctctctgaagaggctatcatggagctgaacctgccgactgg

SEQ ID NO: 570158 - DNA, 75 bp, Homo sapiens
ccatgatgcctggtgccccattacaacccgtggaaaggcagcaacaggtggaagctgttgagttggaggctaaag

SEQ ID NO: 570159 - DNA, 100 bp, Homo sapiens
gttcagcctggactcattcagaaaagttcccttagagctagccaaggagatagaaatggcatcagaagagaggccaccagcacaagcattggaaataatg

SEQ ID NO: 570160 - DNA, 97 bp, Homo sapiens
gtgggcgcttcgcgttttgttccaaggcgaagtactatactggcaattgctggagaagattttgcaattgttgcttctgatactcgattgagtgaag

SEQ ID NO: 570161 - DNA, 90 bp, Homo sapiens
tgttgccaacaagttggaagggaaggtgatggggacgttcagcagtgaaggaaatacaggtgctgcagaatcttctttttctcaggaggt

SEQ ID NO: 570162 - DNA, 101 bp, Homo sapiens
ccggcagctccggagctgcccgcgccatgtccgcgcacaatcggggcaccgagctcggaagccagcagacctgcagaacttggctcccgggacccacccac

SEQ ID NO: 570163 - DNA, 100 bp, Homo sapiens
cgactgcagacccatggacaagagcgcaggcagtggccacaagagcgaggagaagcgagaaaagatgaaacggaccctatggcccactgcgtgaccttgg

SEQ ID NO: 570164 - DNA, 102 bp, Homo sapiens
tgattcaagtgttggcggatggaagggaggagactcctgaccctcagaatgaaagggatctggtaaaacctaaatatgacctggatagaacagatccattag

SEQ ID NO: 570165 - DNA, 83 bp, Homo sapiens
gtctggaggagtgagagccggcaggtgatgtgtccaatctagatcccaacttctcatttgaaggcaccaaactggatgtgggg

SEQ ID NO: 570166 - DNA, 80 bp, Homo sapiens
gcttcggagcgggagtgttcgttgtgccagcgactaaaaagaggtgctgactgggttacttttttaaacactaggaatgg

SEQ ID NO: 570167 - DNA, 106 bp, Homo sapiens
cagtcccttggacagtctgcaccttctcttactgctggcctggtgttggtaaatcatgcttattgctacagtttacagacaagaggtttcagccagtgcatgacct

SEQ ID NO: 570168 - DNA, 90 bp, Homo sapiens
ctggcttatgcagcacctgagttaatacaaggcaaatcatatcttggatcagagagttgtctgatgtcctgtgggccatgctgatgcgcg

SEQ ID NO: 570169 - DNA, 98 bp, Homo sapiens
aagaagctggaggccggcaaagccaaggatgaagaatacttgcaggcttatggtgggcaacaagggctgcaagagcaggaagactgtgtggctgaaga

SEQ ID NO: 570170 - DNA, 100 bp, Homo sapiens
gcacaacataacaatcattgctactgaaattaggagactcatgcatctgtatgccgtgtgcgtggactgcctggaaggggttcacaagatcatctgcatc

SEQ ID NO: 570171 - DNA, 100 bp, Homo sapiens
cggacgcctgggcgccccgaggcgccgggatgtggagcggatcgagcctgcgtgctgccgaagcagggcgccgagtccatgcgaactgccatctgatccg

SEQ ID NO: 570172 - DNA, 96 bp, Homo sapiens
tggacaaggaccctgacctgcctgtcgtcgtggtggccaacaagcaggagtcaactgagagttcaaatacaacaattgaggatgaagatgtgaaag

SEQ ID NO: 570173 - DNA, 100 bp, Homo sapiens
gtgtccaacatgctagcacaggacagccacctgctgtcgggccagctgcccacgcctcccaaagtgaaatgcctgaccaagatctggcaccccaacatca

SEQ ID NO: 570174 - DNA, 83 bp, Homo sapiens
cttctcccaggaggggaggcacgattttttatcaagcagaaatgcatcgaacaacgagaatcaagatcactgagctaaatccc

SEQ ID NO: 570175 - DNA, 96 bp, Homo sapiens
cccctccgtggtgacagcctctgggtcctcggtcggtacagtctctgcacctcgcgccccagcaggggcccagatcattgatctgatgatgctggt

SEQ ID NO: 570176 - DNA, 100 bp, Homo sapiens
ctctgttcctgggagcaccttttccaagctggcttcatggtttgctcagaattctcggggcggcacagttccaggaactctaagaaggagctgatgtgga

SEQ ID NO: 570177 - DNA, 99 bp, Homo sapiens
aagaggttctgaagactgccctcatccacgatggcctagcacgtggaattcgcgaagctgccaaagccttagacaacagtgagcccaaagagatagttg

SEQ ID NO: 570178 - DNA, 95 bp, Homo sapiens
tgagctgagaaacaaagccacccagccaatgaaggaatcagagatcattgatttcttcctgggggcctctctcaaggatgaggttttgaagatta

SEQ ID NO: 570179 - DNA, 109 bp, Homo sapiens
ttcagccagtggtcacagctggatgtttgcgacatcccagagagcttccagaagtatgccaagatggaaggaagcctcatacagtgagattaataatccgtcggtattc

SEQ ID NO: 570180 - DNA, 100 bp, Homo sapiens
cagtataatcctacctatgagaccatgtttgctcctgaggcattatccaattggtttgctatttgatcttcttgcatcaagttcagctcttccttggaac

SEQ ID NO: 570181 - DNA, 83 bp, Homo sapiens
ctgccatggagcccagcagcaagatcccagatgcagtgactggttactacctgaaccgtgctggctttgaggcctcagaccca

SEQ ID NO: 570182 - DNA, 100 bp, Homo sapiens
gagtacttcagacccctggccatcgtttgactgggctggcttagatgaagatgaagatgcacatgtctgggaggataattgggatgatgacaatgtagag

SEQ ID NO: 570183 - DNA, 90 bp, Homo sapiens
tgcgcagcagaaagcatttaaccagcatggctacttcatattttggaaagcagtttttaagacaagtccaggtgcaggtacagcagtctc

SEQ ID NO: 570184 - DNA, 100 bp, Homo sapiens
gcattgactgggaccatggtctacagcatcactaacaacttcccattcagataacaatgaagatggtgccaaaactgctttctcctttggttaaagattg

SEQ ID NO: 570185 - DNA, 100 bp, Homo sapiens
tcgtcagcactgactttcagctatggaatcgatgacgtccggttgtttgccttcgtgcgcttcaccaccggggatgccatgagcaagaggtccaagtttg

SEQ ID NO: 570186 - DNA, 100 bp, Homo sapiens
gcatacaccgagagagtgaggagccagacgacaagcacacactatggcgctgaaacggattaataaggcaatcctttatcacaggatattctcaacttat

SEQ ID NO: 570187 - DNA, 83 bp, Homo sapiens
tggtctccatgaaggctactggcaggagcacatgagagaggtcctctcagggtgcgccatcattgtccgaggtcagcctcgtg

SEQ ID NO: 570188 - DNA, 82 bp, Homo sapiens
agaaccacatccgtttccccaaattcaacttctccaacaaattgtggctactaatttgccccctgaagatcaagatggctct

SEQ ID NO: 570189 - DNA, 50 bp, Homo sapiens
cctaagcaggcccggcgcggccccagaatgtggccccgtcccagagcacc

SEQ ID NO: 570190 - DNA, 90 bp, Homo sapiens
cagtgggtgggggccacctgccagctggtctacgacgacgagctgggcgagtgctgccagcgcccaggccctgacctccacccgtgcggc

SEQ ID NO: 570191 - DNA, 100 bp, Homo sapiens
tactattatggataagatgatgatgctggagagcatgattaccaagccccggccaacgagggcagagacaagcgatgtcgccaatgctgtgctggatggg

SEQ ID NO: 570192 - DNA, 74 bp, Homo sapiens
gtccagagactcatccccgccctgtgggagaagcacagtccacaggcccagctctggttccccggctctgggct

SEQ ID NO: 570193 - DNA, 75 bp, Homo sapiens
actcgccaaactgcaggcacaagtgcgcattggtgggaaaatggttccatgggaagatttccaaacaggaagctt

SEQ ID NO: 570194 - DNA, 75 bp, Homo sapiens
caaaaagtcctgattttctgctcaatagagagggtgatgagacaggagtgatggataatctgctggaggccttgc

SEQ ID NO: 570195 - DNA, 100 bp, Homo sapiens
tcgccgagcacctctccgcgcacatcactcccgagtggaggaagcaatacatccagtatgaggcacaacagggttctatcaaggaggaaatggactgggc

SEQ ID NO: 570196 - DNA, 82 bp, Homo sapiens
gccaaaccagatttagataaagtcatcagtttgaaagaagctaatgtgaaggcacagaaaactgaatctgtagataacgagg

SEQ ID NO: 570197 - DNA, 98 bp, Homo sapiens
aagaaagcccagtatgaagctaataaagtgaaattatggggcctcaacacagaatatggaatgggccttgacgaaggagaagtcggtgaagcacatgg

SEQ ID NO: 570198 - DNA, 99 bp, Homo sapiens
agtgccaccgggttgactgcagattgctcctaccaaagttatttctctgagataaaagcaacagtgtttgatgactgcaagaaagaaggcgaatggaag

SEQ ID NO: 570199 - DNA, 75 bp, Homo sapiens
ttacagcttcatatgcaccagaaggagatgaaggtgtggatgaggtcaccattgtcaacattttgaccaaccgca

SEQ ID NO: 570200 - DNA, 100 bp, Homo sapiens
aaatcagacagaacagttaatcctcaatttaagcctgatctaacccctagaaacaggaattgaatgatctggcacgggaccctccagcacagtgttcagc

SEQ ID NO: 570201 - DNA, 100 bp, Homo sapiens
caagagaaactttatgtgcctgtaaaagaatacccagataagaatcggactctgaaatacctaagaatgactggaaacaaaattgaaaataaaggtggaa

SEQ ID NO: 570202 - DNA, 97 bp, Homo sapiens
gtgcattcatgaagcatctgaaaaagctgtggaaggctctggataaggaccagtacctgcccaggaaactgacattcactactttcactgcctaaga

SEQ ID NO: 570203 - DNA, 83 bp, Homo sapiens
tcatctcgctcggctgcgggaaatcgggctgaagcgactgagtccgcgatggagaagaggactgtcagaaggacgtagaaggc

SEQ ID NO: 570204 - DNA, 100 bp, Homo sapiens
aaggcagaggcccaggagaatggagaccacagggaagtcaaaggcagagctgcaaccctcttgtcctctttgaagcagaaattgaaaagtactgcccaga

SEQ ID NO: 570205 - DNA, 82 bp, Homo sapiens
ggccaggaagcggagggcgcgcgagggtatcgagaaccttccctgcgaacttcagaggaacttccagctgatgcgagagctg

SEQ ID NO: 570206 - DNA, 100 bp, Homo sapiens
agaaattccagtgactagtaatggagaagttgatgactctcgtgaacatagctttaataggatctacaatggattcaagtatctgattccaaagaagcct

SEQ ID NO: 570207 - DNA, 100 bp, Homo sapiens
gaaatatctttggcttgcagccaacaatgggttcctctgtgacgagggtgcaggtatctctggggactacatcgatcgcgtggacgagcccttgtcctgc

SEQ ID NO: 570208 - DNA, 100 bp, Homo sapiens
ggatcatccacccgtacagcgacttcagccggcacagtcttcactaccgtagaagaccttggctccaagatactcctcacctgctccttgaatgacagcg

SEQ ID NO: 570209 - DNA, 75 bp, Homo sapiens
catgaggccaaaggcagttgtattgtttggctggacccatgtgacattgctgattgttgtaacacagtcacatct

SEQ ID NO: 570210 - DNA, 83 bp, Homo sapiens
tgctgctgaagtaatgcaatggtctcaatctctggaaaaacttcttgccaaccaaaatgtgtgcaacagcaccgatcttccgg

SEQ ID NO: 570211 - DNA, 100 bp, Homo sapiens
cggaagctgcccttcaccgcgggcgccaatggggagcagaaggactcggacacagagtccttagccaggatggaggctgttgtgaacttgtaccaagagg

SEQ ID NO: 570212 - DNA, 78 bp, Homo sapiens
gtagctaagacttcgcgacacccttgaagctgagaaatgtgttctaagaacggaagcatctgggctggatggaattta

SEQ ID NO: 570213 - DNA, 75 bp, Homo sapiens
gcatgacgtaccaaacaggcacgagataagcatgtagagcgcatgaagtacaggacaataaagcttcctacacat

SEQ ID NO: 570214 - DNA, 100 bp, Homo sapiens
ctctcagttgaaacacccctgtccatccaggcacaccctaacaaggagctgggctgaggatgagaaacagaaggcagagacagtacaggcagcactggag

SEQ ID NO: 570215 - DNA, 96 bp, Homo sapiens
tgaaggacagctctgtgaagaggggctacttccagaaggccagcaaggtgcctttctgcaagttccacctgggtgaccgacccatccccgtcacct

SEQ ID NO: 570216 - DNA, 83 bp, Homo sapiens
aaagtaaaacttgctgctgatgaagatgatgacgatgatgatgaagaggatgatgatgaagatcagtggaaaaccgatgggga

SEQ ID NO: 570217 - DNA, 83 bp, Homo sapiens
atttcttcggcattctgcaacagaaaaagcttgtggtgaaggggggcaaaaaaaagaagcaagttctgaagttcactcttgat

SEQ ID NO: 570218 - DNA, 100 bp, Homo sapiens
agcctgggatctgctgtggaagaacgtccgggagaggcggctggcaggtatggaaacctgacaagcccaaactgtgaagaagatggaagccaaagttcat

SEQ ID NO: 570219 - DNA, 75 bp, Homo sapiens
gagcctgcaggatggcgcggccgagtccccgtacggccacccggcgggattgtcagtggcttcgccccgaggaga

SEQ ID NO: 570220 - DNA, 75 bp, Homo sapiens
aaagaagtgaagctgctgctactcggctacttgaaattgacatttccagcaacaagttgtcccacctccctcctg

SEQ ID NO: 570221 - DNA, 90 bp, Homo sapiens
gaaaacaaggcgattccgcagtccccccgttccctggaggtcctgtggaatgaaaccaatagagccatggcgactccctctgctgccttc

SEQ ID NO: 570222 - DNA, 85 bp, Homo sapiens
agtggtgatgcaagaagtttctaggaaaggccggacaccagattaaatctcttgatgaacagtgtgtggttggcaaaatttccaa

SEQ ID NO: 570223 - DNA, 50 bp, Homo sapiens
acccaagaatgccagtcaagaagacagacttaattcagtgcacaaatgag

SEQ ID NO: 570224 - DNA, 50 bp, Homo sapiens
cggcggccagcccgtacatcaggttaaaaagatcaagtggcatgagcagc

SEQ ID NO: 570225 - DNA, 116 bp, Homo sapiens
cacgagggctatgaggatgtctattattacgcttcagagcattttcgaaccggcagcaaaagtggaccaagaaaccttgacagaaatggtgaaacccagtattgattatgtgcgcc

SEQ ID NO: 570226 - DNA, 100 bp, Homo sapiens
accagatcaacgtcctccgggaccggagtcagaaccctccgcagagtaaagaagaaacatggcggctatccttctctcacatcgaaaaggaaattttgaa

SEQ ID NO: 570227 - DNA, 82 bp, Homo sapiens
ggcggcctcggctgaagaaagaaggtgggagcggagagcgcaggcgtgcttttacccagcacctgtccagtgaaacaacttg

SEQ ID NO: 570228 - DNA, 100 bp, Homo sapiens
aacaggaaaggcaatgttatattaagcctttctgagaaaagtctacagcattctttctctgcaggttctcttaactacagtgacttcaacagttttttta

SEQ ID NO: 570229 - DNA, 82 bp, Homo sapiens
tccccagcgtcgctcccttcgaggctctgcgaacatcaatagatgcttatgacaactttgacaatatctcgcttgctcagcg

SEQ ID NO: 570230 - DNA, 90 bp, Homo sapiens
ggtttgtggcagccctgcatggagcaagtctgtcagcaccatctttctaacaaatagctgaaacctttggacttcaagaaaattatatca

SEQ ID NO: 570231 - DNA, 100 bp, Homo sapiens
gcagatgatcgccgggtgtcgatccttttccctccagtcaggctttacaggaagtatggtgctggcatctgcttggcttctagagagtcttacaatcgtg

SEQ ID NO: 570232 - DNA, 50 bp, Homo sapiens
ctgaactcccaaagccactgaggagaagggctgcaaagtatgccagggga

SEQ ID NO: 570233 - DNA, 50 bp, Homo sapiens
ctcaactaattggcatcatcacagagtggagtcaacatatcaatggagca

SEQ ID NO: 570234 - DNA, 75 bp, Homo sapiens
atcgacatcagtgaagaagatcagatacgggaatatgaatggattcattcccaaaccaaaagattgaagttcaac

SEQ ID NO: 570235 - DNA, 136 bp, Homo sapiens
caaggatccggggatcaaagagcagtgggggttgctgacccagaggagagttctccaaacatgatcgtttactgcaaagctggagtgcagtagtggaaccttggctcgctgcagcctctgcctctccacctcaagc

SEQ ID NO: 570236 - DNA, 90 bp, Homo sapiens
tctacatctcccacaggaagtgtcacacagcagtcaagtatgtcccaaacgtctacgagatcatcagatgttcattcatctggatcttca

SEQ ID NO: 570237 - DNA, 101 bp, Homo sapiens
ccctggtgaaaatggaactccaggtcaaacagctatgtggttgatgttgcagaatgatgagccggaggacttcgttatagctactggggaggtccatagtg

SEQ ID NO: 570238 - DNA, 100 bp, Homo sapiens
tgctgatgtgaaaaataccacgacaaaaccaccctaagctggaagtcgagtgtgctactcaactcaggagatttggagacaaactgaacttccggcagaa

SEQ ID NO: 570239 - DNA, 90 bp, Homo sapiens
ctagtcttgactaccttccatgtaccactggtaattatgacttttggacagtccaagctatatcgaaggattaaactgcaaatatctcat

SEQ ID NO: 570240 - DNA, 88 bp, Homo sapiens
tggtttcattcagaacacctcaaagttcaattttccaaaaaggtggcccaggcaaatagtgtcatcgattggcctatgtcgttatggt

SEQ ID NO: 570241 - DNA, 90 bp, Homo sapiens
tggctgtgcagggccccgagccggcccgggtcgaggttttctgtctcaactggtctctgacaagcctctgactgaatgtatccgtgctgg

SEQ ID NO: 570242 - DNA, 100 bp, Homo sapiens
ctcgcccaccacgtccagcttcaccacgcggctgcacaactgcaggaacaccgtcacgctgctggaggagatgtgtgttaaaagagctagaaacattggg

SEQ ID NO: 570243 - DNA, 100 bp, Homo sapiens
gtccataaactgcccctcagctaccttcagacccaggatacagatccgggagacacggaggactgttcgggattcagacagtggactggagcagatgtcc

SEQ ID NO: 570244 - DNA, 75 bp, Homo sapiens
cagctgcctcatctgcagtccggactcatctagcctcgggcctcattgctacgatttcagagtaccctggtaata

SEQ ID NO: 570245 - DNA, 82 bp, Homo sapiens
cccttccccacgcaaccccagatccatttacactttacatttttatgactacgcaagcaaagtgaatgaggagagtttggac

SEQ ID NO: 570246 - DNA, 97 bp, Homo sapiens
gttccagcaacagcagcaactgccgcacccttgaaaggaggcccctgccgtgtggacccgtaaaataaaatgggcgcacctatgttggcagcatgcc

SEQ ID NO: 570247 - DNA, 100 bp, Homo sapiens
aaaatctaatctcagcagcacatcagttactacaaatgggacaggaggtcagaatggcggcagtggagcatcgtcattcttcaggattgccctactggcc

SEQ ID NO: 570248 - DNA, 82 bp, Homo sapiens
gcggggtcacccctcagcacatggtgggggccacaccatttgccgtggccaggctagagtaatctcaggggcgatataatca

SEQ ID NO: 570249 - DNA, 80 bp, Homo sapiens
atcccatgggcaaacctcctttgcctagaggctatcacacgatgttaaggacatgttcacttccagatctctcaaagctg

SEQ ID NO: 570250 - DNA, 100 bp, Homo sapiens
ggcttcataaactgtaccaggagaagcttccctttgctgaaggtctgtaccacttttatcacaatggccttgcaaaggccaagagaagacgcagcctaca

SEQ ID NO: 570251 - DNA, 75 bp, Homo sapiens
aattaaagtaacactggcaactttgaaaatgtctgtacagccaacgctctgatccagtatatacggcctgtgttc

SEQ ID NO: 570252 - DNA, 88 bp, Homo sapiens
aaagactggatggtatgggctgtctggagtttgatgaggagcgagcccagggaggtggggaagacagggctccagctaccacaggacg

SEQ ID NO: 570253 - DNA, 122 bp, Homo sapiens
ctacactctcctccatcttgctcaactcccacacggatgtggtgcctgtcttcaaggaagtggagttcttgtccacgtccattgctcagctcaaagtggtacagaccaagtatgtggaagcc

SEQ ID NO: 570254 - DNA, 75 bp, Homo sapiens
gcggcgtgtcaggtggttgcggagctggaattttggagagtaaaaggctgaaccttgttaaagagaaaaccatta

SEQ ID NO: 570255 - DNA, 100 bp, Homo sapiens
agtgagcctcaggctttaggaactgaagagtgccaacaatatgcccaagcaggtggaagtgcgaatgcacgacagtcatcttggctcagaggaacccaag

SEQ ID NO: 570256 - DNA, 89 bp, Homo sapiens
gtggcttccatgaagataacattccccagctggaagacgtttctcagttcctgcagaaagagtcaagtaccattggccaggatcaaacg

SEQ ID NO: 570257 - DNA, 75 bp, Homo sapiens
cgactggaccgggaaggagcatcccaggacctaccagaatctggaaaaccagtagattcccagacatcgcgaagt

SEQ ID NO: 570258 - DNA, 87 bp, Homo sapiens
gattttaccctgaaaatcacaaggacatccatgtgcacgcatggccgaaacagaagccctgtcgaagcttcgggaagacttcaggat

SEQ ID NO: 570259 - DNA, 74 bp, Homo sapiens
cagcctcagcacctgcagttgaagaccaggtacctgaagctggtgcaggtgatggtcctaccagtgtgtctgtt

SEQ ID NO: 570260 - DNA, 83 bp, Homo sapiens
tctgtgaaagcgggcgttttggaagataccggaagtagagtcacggagaggtgtctgcttttggggcagagttttcatcggag

SEQ ID NO: 570261 - DNA, 93 bp, Homo sapiens
ggaagatgcctagcacagaccttctgatgttggaactcgaatcatttatgacagaaagtttctgttggatcgtcgcaattctcccatggctca

SEQ ID NO: 570262 - DNA, 100 bp, Homo sapiens
agtggagcaaatatcatgtgtccaggcttaacttctcctggagctaagctttaccctgctgcagtagataccattgttcacggatgataccatcggggac

SEQ ID NO: 570263 - DNA, 75 bp, Homo sapiens
gatggcagccagtcagtggtggaggcagacaccacccatcctttaaccaagcacagaaaaatagcctcttctttt

SEQ ID NO: 570264 - DNA, 96 bp, Homo sapiens
cagctgatgacaaaaagcttcagagttctctaaaaaaactggctgtgaataatatagctggtattgaagaggagctggtgagcaggctgctgcacc

SEQ ID NO: 570265 - DNA, 74 bp, Homo sapiens
taccaaacttattaataggaataccactattccaaccaagaagagccaggtctataagaaggagaaagctcgag

SEQ ID NO: 570266 - DNA, 50 bp, Homo sapiens
tacccgggatacggaggaggggaagtcctgacggccacgctggatctgga

SEQ ID NO: 570267 - DNA, 155 bp, Homo sapiens
ccacccactgtggtctgttgtaccccactgctggggtggtggttccaatgagacagggcacaccaaactccatctgatgccatggacaatattaccaggcagaaccaattctacgatacccaagtcatcaaacaagaaaacgagtcaggctacga

SEQ ID NO: 570268 - DNA, 50 bp, Homo sapiens
aaaataatctgtaatactaaagacaatacattcatgctcttcgacctcac

SEQ ID NO: 570269 - DNA, 134 bp, Homo sapiens
ttggctgccaatggaatacagagaaacactctcaacattgacaaattgaaaatagaaactgctcagccctggtacctgacagtgtaaagaaggagctcctacaaagaataagaacattccttgctcagcatgcc

SEQ ID NO: 570270 - DNA, 100 bp, Homo sapiens
cgacgaggaaccgcccaacatggcctcggaggcagaggtggaggagacactgaagcgactgcagagccagaagggagtgcagggaatcatcgtcgtgaac

SEQ ID NO: 570271 - DNA, 100 bp, Homo sapiens
cttaggatacaacatagaacctattatgctctatcagggtctaggcattatgatgccacctcttcattttggatataactatgaagaaatctattaactg

SEQ ID NO: 570272 - DNA, 100 bp, Homo sapiens
gcccagcagatggagaatagaccctctgtccaggcagcattaaaacttaagcaggtagttgatgtcacttggcgatattcctgcaaacatgaagaggtga

SEQ ID NO: 570273 - DNA, 74 bp, Homo sapiens
gtttgagatgaaggaggacgagccgtggtacgaccaccaggacctccagcaagacaatgcagatcttcgtgaag

SEQ ID NO: 570274 - DNA, 98 bp, Homo sapiens
gcaagcccgcggggccaagggactttcctggcatcaggcttctttcaaacccattgatgggcggcctggagctgctgaagactgctattgggaaagct

SEQ ID NO: 570275 - DNA, 85 bp, Homo sapiens
cgccccacttgctcgtgcactttacacacatgagaaagccatatcttggaagatgtcaacaagtgtatcatagccttaagagacc

SEQ ID NO: 570276 - DNA, 74 bp, Homo sapiens
caataatgaatcattagtatcggacacagaaacctaaaccaggtggacaggtgaaatgtcagtatatctctgct

SEQ ID NO: 570277 - DNA, 100 bp, Homo sapiens
cttattgggaactgcctcacctgaaaatgaattcaacataccattaggatcttaccgcctattgaagagatgcgacacacgattgtagatattctaacaa

SEQ ID NO: 570278 - DNA, 76 bp, Homo sapiens
atgcaacatgctcagcaggagcttcatcaacgatatatgtcagatctaaagcctgtggacatctctacagcaatga

SEQ ID NO: 570279 - DNA, 100 bp, Homo sapiens
cgaacatcttctggacctttgtccagctgttctccatagtggtgttcggctccatcgtgaacgagggctacctcaacagcgcctccgagggggaggagtt

SEQ ID NO: 570280 - DNA, 100 bp, Homo sapiens
tgatcatcctgctgggcttcgtccagatcgggaaggttgtcgccgtgatcctgaaggcgctgacctacgacgagaagcggggtgcctgcagcgtgggcac

SEQ ID NO: 570281 - DNA, 90 bp, Homo sapiens
caagtgcctcacccctttctacaaggagggcaagtttgcttccaagccgtggtccttcagcatatctctgtgctgcagacaacacacctt

SEQ ID NO: 570282 - DNA, 83 bp, Homo sapiens
cggagagaaccctgtcctgatcttcctagatgaaggatttgggggcagagcacttggcaggtcatgaaggggtccaacttctc

SEQ ID NO: 570283 - DNA, 83 bp, Homo sapiens
cgcactgacagcgggaggcagagggaggaacctggacgccggaagccgggaaatggtccgcgggagagctgtggggcttggtg

SEQ ID NO: 570284 - DNA, 71 bp, Homo sapiens
attccaagtaactcttatttggctgtaggttccatgaggacaggccttgagtctgtcctggtctctggaat

SEQ ID NO: 570285 - DNA, 100 bp, Homo sapiens
ccactgtgactgtcatcagtgaaaaggctctgaccagtggaagatggccgagaggaagctgttcaacaaaggcattgccatctacaagaaggatttcttc

SEQ ID NO: 570286 - DNA, 91 bp, Homo sapiens
cgagcttcggagaagcagtggtgggttccatgtgatggtggagtaggaggcaggtctccgcgttataggtgcacagcgaaggagaagcccc

SEQ ID NO: 570287 - DNA, 87 bp, Homo sapiens
catctggaattttgccgatttcatgactaaccagtgttcacagctgtaaagaacttgcctggagtctcagatgagactttggacttt

SEQ ID NO: 570288 - DNA, 50 bp, Homo sapiens
ctcagcgagaacctcaagagagtgggacttcaaggatgttgaagccgcct

SEQ ID NO: 570289 - DNA, 83 bp, Homo sapiens
ttaaggaacagcgagctgtttgacccctttgacctcttcgatgtgcgagactttggaaagactctcagcgttctcatctctct

SEQ ID NO: 570290 - DNA, 100 bp, Homo sapiens
gtggtcttcatttgtgaatacatagtatcttaaatagtgaagatggagaaatattcaataatgaagagcatgaatatgcatcgaaaaaaaggaaaaagga

SEQ ID NO: 570291 - DNA, 96 bp, Homo sapiens
aagaggggacttgatgttaacaaatgtgagattgccaggaaatgcttccagactgcacacttttacttagaggacagtacatcccctagagttata

SEQ ID NO: 570292 - DNA, 100 bp, Homo sapiens
agctgagtggttgtgtggtcgcgtctcggaaaccggtagcgcttgcagcatgactgcagcagaagttggaataattgagagtattcacctaaaaaacttc

SEQ ID NO: 570293 - DNA, 90 bp, Homo sapiens
gtgatggaaggcacagctcactccagcactacgtgaccagcacgttcctggagccgagagaatggtcagaacagctttgctgagccatca

SEQ ID NO: 570294 - DNA, 74 bp, Homo sapiens
gcgaaagaaaccctctctgagttcttgggcacgttcatcttgattgttgatgccggcccaggatggatcagacc

SEQ ID NO: 570295 - DNA, 101 bp, Homo sapiens
gtaaatgttgagcctttttggcctggcttgtttgcaaaggctccttctcctgaaaaagccgaggaggagagtgagaggcttctgagggaactctatttgtt

SEQ ID NO: 570296 - DNA, 100 bp, Homo sapiens
ctgggattctggccgaccctcgccttccttctctgcagcttccccgcagaaggaagaggcccagcagaagggactcgctgagccaccccccgccccactc

SEQ ID NO: 570297 - DNA, 100 bp, Homo sapiens
cggaggacggggccgggcgacctgggcaccagcaggacccgaggccaggagccaggggcccagaagtattctaccttgtaaatactgttatttgtatata

SEQ ID NO: 570298 - DNA, 83 bp, Homo sapiens
accaggctgagactcggggcgccagtccgggcaggggcagcgggagccggccgggtgctcttacagcctgttccaagtgtggc

SEQ ID NO: 570299 - DNA, 75 bp, Homo sapiens
cggcctcgtgcgccgcgctttgaggtttctcctctgcctcctacttaaaggtccatgttaaaacccaccacggtg

SEQ ID NO: 570300 - DNA, 100 bp, Homo sapiens
gaggccggcacggtggccacgctggatcaacaaactccatttatgtaaacccctaattagagcaattgacagctcaaacctgaaagacgattacagcact

SEQ ID NO: 570301 - DNA, 87 bp, Homo sapiens
tctagctggaggattgtaaatgcaccaatcagcatgctgtgtctagctcaagagactctacaggggcaggtaattcactggtccaca

SEQ ID NO: 570302 - DNA, 101 bp, Homo sapiens
tttcgccggggcccaggcccagggaccaggcggaggcgtcgcgggagcctttggggcaccacagagatgcgggagatacaactcgtcaacgaatcaaattc

SEQ ID NO: 570303 - DNA, 100 bp, Homo sapiens
aaaacaacttcgagggcagagtggatcatccatgccatggagtatgaacttcagatccgtggcggagacaagccagccttggacttgtatcagctgtcac

SEQ ID NO: 570304 - DNA, 75 bp, Homo sapiens
aagagccaggtggtcgcggggacaaactacttcatcaaggtacaagaactcggataatgataaagtccagaagtg

SEQ ID NO: 570305 - DNA, 88 bp, Homo sapiens
ttggaacttcgttgcttgcttgcctgtgcgcgcgtgcgcggacatggcctcaaacggtattgttgcagcatctggcagtgagactgag

SEQ ID NO: 570306 - DNA, 88 bp, Homo sapiens
tctatgaggcgggaaaggagcacggcctgaagccggtggtgggcgaagtgtacgatcaaggaatgggtaccacagaccatgtcatcgt

SEQ ID NO: 570307 - DNA, 90 bp, Homo sapiens
gagctccacgcagttcaacaagggcccctcgtacgggctgtcggccgaggtcaagaaccggaatggcattgtgcccatcgtggagcctga

SEQ ID NO: 570308 - DNA, 96 bp, Homo sapiens
gtgctgacgagacggagctcctggcccccgaggaggagcagaggatcaatgcggttcaagaatcgattccagcggatctctctaggagctgacact

SEQ ID NO: 570309 - DNA, 90 bp, Homo sapiens
atcttggacttccagcctccggaactgtgagaaaataaatgtttgcaattcagtcaaaccggcacgatgtccaggcaccagaaccagaac

SEQ ID NO: 570310 - DNA, 90 bp, Homo sapiens
tggaagtggctgagtacctgaccccggtcctcaagaatccagggcctgaaaacccagaatgaacttgtgtccatcccagagatcactgca

SEQ ID NO: 570311 - DNA, 82 bp, Homo sapiens
cgcaccttgtgttccggaagttccaggtaatcattaccaaatgaggaggaaaggacgatgtcatcgaggctctgcagcgagg

SEQ ID NO: 570312 - DNA, 51 bp, Homo sapiens
ggaacagcacccccttctttaagctcatgatggagcagtccaagaagtcct

SEQ ID NO: 570313 - DNA, 97 bp, Homo sapiens
gaccaggcagctgcgctcttgacagccaggtaccagccaacaagtcccaaatttggaaaagctgactcatatgaaaagctggaaaaactaggggaag

SEQ ID NO: 570314 - DNA, 75 bp, Homo sapiens
aagactcttgtcacactaattgccaacaacaatgactatgtgaaagggtttggaggaaaatttggtgtgcagaca

SEQ ID NO: 570315 - DNA, 83 bp, Homo sapiens
ggggtgcacctcagcactatcccaagactgctggcaacagcctgctcaacctgctgatgaacctgcagaaaaggctgatgaac

SEQ ID NO: 570316 - DNA, 75 bp, Homo sapiens
aagtgaagcaaaagccttccatgattacagcactgcagtttcctcctgaaggctggctccggctctccctcaata

SEQ ID NO: 570317 - DNA, 100 bp, Homo sapiens
tcctctggggctcccaggacgccgtgacttcctggccgcggtgcttaccagtggaaagaggccagaagatcagtgagcagattgtcattggcacccctgg

SEQ ID NO: 570318 - DNA, 83 bp, Homo sapiens
ctccgcgttcccagcccgggtccccgcgttcacagccccagcgcagaacatccagtcatggataaaaatgagctggttcagaa

SEQ ID NO: 570319 - DNA, 90 bp, Homo sapiens
agaaatattggctacttccaatattttcaaggtggacccaagtggagagattgtggaactggcgaaaggtgcatgtccctggaaggagca

SEQ ID NO: 570320 - DNA, 50 bp, Homo sapiens
ggccatgagcctggctcaggcctgcatgatgtccagctcgccgctgtcca

SEQ ID NO: 570321 - DNA, 80 bp, Homo sapiens
ctggctgaagacaatcaacagcaggcctattatctgttccgtggtgactgctacattgagaaacttggttgattcatcat

SEQ ID NO: 570322 - DNA, 100 bp, Homo sapiens
agaaaatcacagcctttgtacccaatgacggttgcttgaactttattgagaatgtgacagtgatgataacatgggtgccaaaaatacttcaataggagaa

SEQ ID NO: 570323 - DNA, 75 bp, Homo sapiens
ccctgctggaccagctcatgggcacggctcgggacgttctttaaggaaaaacagtagtgctctgcatagtttact

SEQ ID NO: 570324 - DNA, 75 bp, Homo sapiens
ggggactccaaagtgaaagtggcggtgcggatacgacccatgaaccggcgagttccagtgtctcgccccatcctc

SEQ ID NO: 570325 - DNA, 100 bp, Homo sapiens
aaacacacagaagtagaaacagtagaccttgtcttgaagctgaaaaataagctgatgcagattttcttttacaatccagatgactttgacagctttcaaa

SEQ ID NO: 570326 - DNA, 100 bp, Homo sapiens
tgtcgtgaagaagcaggaggctaagaaagtggtgaatcccctgtttgagaaaaggcctaagaattttggcattggttacctgtcctgctgccgattcctg

SEQ ID NO: 570327 - DNA, 83 bp, Homo sapiens
gctccttccagatgaccaacgagacggtcaacatctggactcacttcctgcccacctgtaaggtacctgccgtgggcagatct

SEQ ID NO: 570328 - DNA, 83 bp, Homo sapiens
tgtttagatgaccagtctcctgatgagtgatgtgtctgcaggaggagccactgtttttcctgaagttggagctagtgtttggc

SEQ ID NO: 570329 - DNA, 75 bp, Homo sapiens
atgtgaccgttgccagcctggattccattctctcactgaagcaggatgcaggcttcttctcatatcggtaattcc

SEQ ID NO: 570330 - DNA, 98 bp, Homo sapiens
ggcaagataaagctgcgaaagagaaagtctaccttgtacttcaacacccaggagaagagcgccaggcgccgcggggtggccagtttgccatcgtgaag

SEQ ID NO: 570331 - DNA, 83 bp, Homo sapiens
cctccgggtcggagctggacgggagctgaaactagaggaccgttctgtggtgccccgagatgtggtccggcacatgcgatcca

SEQ ID NO: 570332 - DNA, 50 bp, Homo sapiens
tctatgcctactctcaagaaatggacgaaggggaggaccaggctggcgat

SEQ ID NO: 570333 - DNA, 97 bp, Homo sapiens
tcgggaagaagtttcagactacaaggtactctatcatcacccccaacatcttgcggctggagagcgaggagaccatggtgctggaggcccacgacgc

SEQ ID NO: 570334 - DNA, 88 bp, Homo sapiens
tctgagggagggtccgagccagccgctgttttgccggaggagcccctcaggcctgagtgacctgcaggaagaaggcaagaatgccatc

SEQ ID NO: 570335 - DNA, 101 bp, Homo sapiens
aaggcactggatgatgcaatcaaagctcgacttctcaatcccaagtggccaaaggaagctgacctggttacaactcatgaattgggacataattttggagc

SEQ ID NO: 570336 - DNA, 82 bp, Homo sapiens
cgactgctagagccgagcgaagcgtctctaattaacagaagatggcaaagcccagccacagcagctatgtccttcagcagct

SEQ ID NO: 570337 - DNA, 75 bp, Homo sapiens
tctcaatgaatggattgctgtgaacaaaaccgaaacttcattgccccttcaatgtgggaatccagccagacccta

SEQ ID NO: 570338 - DNA, 101 bp, Homo sapiens
aggtgcgggtactgacacttcccctgcaagcccaccacgccatggagaagatggaagagtttgtgtacaaggtgtttgtcccagagatggcagcgcggagg

SEQ ID NO: 570339 - DNA, 100 bp, Homo sapiens
aagtgattcattccaaggacaggcagcccagtctggtgtttggaatgacgacagtatgtcttccctattcattggggaaccttcatttgaaatttttggc

SEQ ID NO: 570340 - DNA, 100 bp, Homo sapiens
gtaaaacttgctgctgatgaagatgatgacgatgatgatgaagaggatgatgatgaagagatcgccccaggacattcgacatgcactcactggagagttc

SEQ ID NO: 570341 - DNA, 100 bp, Homo sapiens
agctggagaagctgggattggagattccacccaaacttgctggtcactgggaggtcccaatattgaagcccatggatcttatggtagaagcgagtccacg

SEQ ID NO: 570342 - DNA, 100 bp, Homo sapiens
ccatggtgaagtataggctgaggctacctgtgaacagtacgcagtgaatgtttttgggcgcaccgaagtcatcgacaacacgctcaatcctgacttcgtg

SEQ ID NO: 570343 - DNA, 97 bp, Homo sapiens
atggtggtctggggcaacgcggaagtggtgaactatgacaatgtagtggacacaggttctgaaacagatgaggaagacaagcttcatattgctgagg

SEQ ID NO: 570344 - DNA, 100 bp, Homo sapiens
ggctggagcgaccccttgttctttggtggcgctggttatatcgaagctgccgtcattcctgctggagctcggaggatccgtgtggtggaggataaacctg

SEQ ID NO: 570345 - DNA, 51 bp, Homo sapiens
atgcaacttcttatggacagcctcccactgatgctgagctttttataccac

SEQ ID NO: 570346 - DNA, 90 bp, Homo sapiens
agcaaaacacactaaagattgggcagtcactggggagaacaacaagttgaaatcatcgcagaaggataaagttcgtcagtttatgatctt

SEQ ID NO: 570347 - DNA, 100 bp, Homo sapiens
ggaggctgagcaaagtgcagtttgtctacgactcctcggagaaaacccacttcaaagacgcagtcagtgtggatccaaacttctacagcaaaaacttact

SEQ ID NO: 570348 - DNA, 82 bp, Homo sapiens
attgcccatgcacttgttgcagaaacagccaagcaacaaggcgtgcaggtattttgatgaaggacgtgggagctgcccattt

SEQ ID NO: 570349 - DNA, 123 bp, Homo sapiens
ttcaggtcacaatttctacagcagagaccttgagggatatctttcttcactcctcttcacttcttcaaaagatggatactatgatgctgaatgtgcggaatctgtttgagcagcttgtgcgcc

SEQ ID NO: 570350 - DNA, 87 bp, Homo sapiens
tgcctccgccggctacagcgggaagagcgaacactatggctatgcatcctccaacgtcagccccgccctgccgctccccacggcgca

SEQ ID NO: 570351 - DNA, 100 bp, Homo sapiens
gtcactgtcttgcagaacactgatgataatcatggacatattgatccctctctgagactcatctgggatttggctttccttggaagctcttacgtgatgt

SEQ ID NO: 570352 - DNA, 98 bp, Homo sapiens
gaagaaggaatcagttacctaacggacaagggctgcaatgttattcagcttctcaaggctggaaaagcgaaggaagtttcctacaatgcactagcctc

SEQ ID NO: 570353 - DNA, 50 bp, Homo sapiens
ctgggtaacagatccccgttttctaatagataaacaacttgatgcagatg

SEQ ID NO: 570354 - DNA, 72 bp, Homo sapiens
catggaggatgatttcatgtgcgatgatgaggaggactacgacctgggagagtggtgaacgtatctagcatc

SEQ ID NO: 570355 - DNA, 100 bp, Homo sapiens
ctgctgggagaaactggcaaggagaagctcccgcgggactgtgagcaggctgtggtccacgtggagaccaccttgtacctggtgccctgtttgaacgatt

SEQ ID NO: 570356 - DNA, 74 bp, Homo sapiens
aattgacaacggttcaaaaatcaccaactaccttttagagtgggatgaggaatccttcaactgctttctaccaa

SEQ ID NO: 570357 - DNA, 95 bp, Homo sapiens
cccaggcgtgccttgtttttggattcagttctcctgtgtgcatggctttccaaaaggagaaagcagagatccccggaaacttcactggctttttg

SEQ ID NO: 570358 - DNA, 75 bp, Homo sapiens
gaagttaattttgtatccgtcgaggctacagtagagagtgtctggaggagagctcttcgatttcctggcccagaa

SEQ ID NO: 570359 - DNA, 106 bp, Homo sapiens
gaatgcccagccccctatacgggatgccacagatctgagagaaaacatgcagcttagcagtgtctgcaaaaacgaatcttttcctacaacctgttaactgactgga

SEQ ID NO: 570360 - DNA, 100 bp, Homo sapiens
cgggtgcgtggccggtgctggctgggagttctggtctcaggcaaggtggggactgggcacatcatcaatacggatgaagtgtcctcttgctagcaccaat

SEQ ID NO: 570361 - DNA, 90 bp, Homo sapiens
tgagctagcagtgagcaccttttggcccaatgaatatcaggggctttgttatgcacctaaagccatattggaagctccagaagaaagagc

SEQ ID NO: 570362 - DNA, 100 bp, Homo sapiens
ctactgcacctgccctccaagccacacagggccccagtgccaaaccagcactgactactgtgtgtctgggcttgtagggggagagaccaggatcatcaag

SEQ ID NO: 570363 - DNA, 75 bp, Homo sapiens
atgagttcaccgacccggggcaccccagagtggatatcttgacctacgtggcttggaagataagtggttttccca

SEQ ID NO: 570364 - DNA, 90 bp, Homo sapiens
aagcaggccctccagttcttctgctacatctgcaaggccagctgctccagccagcagggtgagaggtccatcggctgcctctcctcatgc

SEQ ID NO: 570365 - DNA, 101 bp, Homo sapiens
agttcgtctcttacgtctgcggaagtgcagctgcctcagttcttagcgcagtaaagatgacggcgccttgaggtaagctacaggcaacaccacttccgcgt

SEQ ID NO: 570366 - DNA, 95 bp, Homo sapiens
gggggttgtccacgaggaacaaattgtacatttgcccattctcaggaagagcttgaaaagtgaagtggaggttctggatccgaacgaccctttag

SEQ ID NO: 570367 - DNA, 90 bp, Homo sapiens
gcacaccatccaggagtcagtttattactggaaaatcttgtggagaattttgatgaggcttccaagaatgaggcaaactgaattgagtca

SEQ ID NO: 570368 - DNA, 83 bp, Homo sapiens
ctctggacaagctggaatgcatccaagagaatccctcaacatgctggataagccagagacatgggaaaaccaatggaagtgtt

SEQ ID NO: 570369 - DNA, 100 bp, Homo sapiens
gtcacagtgttgctgcaacatagagctgacattaactgtcagacttacaataacagcactaggagaaaagctgaatgattactggaatgaaatgaaagtg

SEQ ID NO: 570370 - DNA, 101 bp, Homo sapiens
aactttggatgtgattatcatcaataccgagataaattttccaaacacctgactctgtgtgtttttaccaaccatacaggcaagaaactatattcagtctt

SEQ ID NO: 570371 - DNA, 96 bp, Homo sapiens
tggatccacttccccatctgtaacgaggtgttgagacgagaaatgcactcggtgatggaaagagagccactattctgaagaacacttggccaaagg

SEQ ID NO: 570372 - DNA, 100 bp, Homo sapiens
ctaccactgctggcgctgaccttcatcacagacaacagcctggtggcagcggcaaccaaaggaggtactgtcaaagctgcttcaggattcaatgccatgg

SEQ ID NO: 570373 - DNA, 98 bp, Homo sapiens
ggaaaccaaaaattctggctctgattcaccttataaagcaaatgactccaatgggatcaggtagcaatcgacctcaggaaatagaaattggagaatct

SEQ ID NO: 570374 - DNA, 101 bp, Homo sapiens
ccagtttgagccatcggatctaagatccaaaaggtgcactacatcctccaggaggtggtgatgggtgggatggtgttggaaacaaacatgaatgaaatcgt

SEQ ID NO: 570375 - DNA, 74 bp, Homo sapiens
tgagcgtcccggccttcatcgacatcagtgaagaagatcagtttaagctatgaagaaggacatccctcacactc

SEQ ID NO: 570376 - DNA, 100 bp, Homo sapiens
cccagttccccggcagcgggacccggcgaagacgcgaccgcggcgcgagtcaccatgttcaaatctgaacatcaatgatgtactagggaactactcattg

SEQ ID NO: 570377 - DNA, 87 bp, Homo sapiens
agaggagccgccttctgcctcagaacggcgtgactcggaggaatgtcgttgtctgctgggtcttcccctcttcattcccccaagatt

SEQ ID NO: 570378 - DNA, 102 bp, Homo sapiens
atgctttgtggtattaaacatctgcattcagctggtataattcatagaaatacaaatggagagatttgcatgggatgcagaaatatggaagactaaccaagc

SEQ ID NO: 570379 - DNA, 100 bp, Homo sapiens
tcacaacctccggggatgcgaaaacacccggccttactgaggaacaaagggttgttcctcaaagtcattcaagctgtactcgccgaaggagcccccgaac

SEQ ID NO: 570380 - DNA, 100 bp, Homo sapiens
cggagtcctgttccaccttcagagcgtcacggcgtacgccctcatggggaaaatctccccggtgactttcagacccaagcaccagccgccgcttcacacc

SEQ ID NO: 570381 - DNA, 74 bp, Homo sapiens
aatagaagctctccgtgcattcactacttcactggaacccctgatccttccagacctggaatggccaaatatca

SEQ ID NO: 570382 - DNA, 90 bp, Homo sapiens
gctctaaagcccttcacagcaagacccaggaagccgcgggcaaactcagactcgaagggagtttgaggacatcaccaatgcgagctttca

SEQ ID NO: 570383 - DNA, 78 bp, Homo sapiens
tgtgagcgcccctgagcgccggcagcggccgcggtgggttcttcagattttgatgcatacgaaagagatggtacaaaa

SEQ ID NO: 570384 - DNA, 101 bp, Homo sapiens
cggacttggggaaacatcagcatatgcatgaccgagatgacctctatgctgagcagatggcctctccagaggagaagtgtcaacaagtcttggaaccccct

SEQ ID NO: 570385 - DNA, 98 bp, Homo sapiens
ttcagggccattcagcttctattacttccatacagggctacaataaggcagtggattggtgggcattaggagtgctaatctatgaaatggcagctggc

SEQ ID NO: 570386 - DNA, 75 bp, Homo sapiens
ctcatcttgttctcgagttttctctgccatgttgctattgcaggacggaacaaatttacatgtattggagaccag

SEQ ID NO: 570387 - DNA, 90 bp, Homo sapiens
gctgcttgacctttccactgaggatgacgggacagtggccttcgcgctaacgaagatttttcaagaggtaaaaagtagtgatattgccaa

SEQ ID NO: 570388 - DNA, 75 bp, Homo sapiens
gagctgggcgacgagctgaccctgggagacatcgacggtgacagagctgaatgaacctctctccaatgaagatcg

SEQ ID NO: 570389 - DNA, 98 bp, Homo sapiens
gcaaatccttaaaagagtcttaacgatcctaattatctcatggctaatgaacgcatgaacctcatgaacatggccaagctgagtatcaagggcttgat

SEQ ID NO: 570390 - DNA, 98 bp, Homo sapiens
ctactctctctttctggcctggaggctatccagcggatcacaactgtgctgacaatgacaaccatcaacacccaccttcgggagaccttgcccaaaat

SEQ ID NO: 570391 - DNA, 76 bp, Homo sapiens
atgacgatttggatgaatatacccttagaaaaaatgtggcagtagtgttgcggagataggaacatgggagagaaac

SEQ ID NO: 570392 - DNA, 75 bp, Homo sapiens
ctggcaggaaggagctggacaagattacagccaagcacgcggccaaggggaagatcctggtgcacctgagccgtg

SEQ ID NO: 570393 - DNA, 100 bp, Homo sapiens
tgatcaagtggaagagattttaagtgtggcatacaagaaagcgagggtgggtcctgggccccaacaactactacagttttgccagccagcagcagaagcc

SEQ ID NO: 570394 - DNA, 100 bp, Homo sapiens
gcgagtagagacccagaaatttgaggtgttggggatgtcctttgcactgaccctgaactgccagattgacaaaaccagccagaccatagggctatgatct

SEQ ID NO: 570395 - DNA, 82 bp, Homo sapiens
aaacagcccgcccgaccccgtcccgaccctggccgccccgagcggagcctggagctggtaggtgagtgctgtcctcggctca

SEQ ID NO: 570396 - DNA, 101 bp, Homo sapiens
ccacccgccagcgcctgagcatccccgtcatggtggtcaccctgggtcgtaatctgaaggagtggctgagggagcaattttgtgatcatccgctggagcac

SEQ ID NO: 570397 - DNA, 103 bp, Homo sapiens
agctggctcccatcacctacccgcagggcctggcactggccaaggagattgggagtgcatccgccccaacccttttccccctcgtctcctgtgagaattcccc

SEQ ID NO: 570398 - DNA, 80 bp, Homo sapiens
ggttctatgacatgaagaaagtttgggagggatatcccatacagcggagcgtgctttggacaccatgaattttgatgtta

SEQ ID NO: 570399 - DNA, 75 bp, Homo sapiens
tcctgtacagcctgcagaactatgctgcatcccctttttggaattgctcaaccaggtggtaaccggcgccgcttc

SEQ ID NO: 570400 - DNA, 75 bp, Homo sapiens
cagagatcggcggagaccctcgaagtgcgcaaacttgacactcaccctgaccggagagattaaacagattctaga

SEQ ID NO: 570401 - DNA, 90 bp, Homo sapiens
ggacagttcgctacacagcaatgcatcgagcaattgtaccagacgttaacagactatgatattcgattttacatgtatgagattctgaag

SEQ ID NO: 570402 - DNA, 99 bp, Homo sapiens
ctgagcccagcccccagaaaggattgtgacatatcgttggacccagaattgaggaagaaggtagataatgactataatgcccttcgagaaagactcagc

SEQ ID NO: 570403 - DNA, 74 bp, Homo sapiens
caagggattcaggtgtggtgccggtgggaactgaggaagcgcccaaggcatacccagatggaagtagcaaagaa

SEQ ID NO: 570404 - DNA, 75 bp, Homo sapiens
ggacaatggcgcaagatcgtcttcagctgttcatagcctgccactgcagagccccgccatggaagacacgccgtt

SEQ ID NO: 570405 - DNA, 82 bp, Homo sapiens
atgtatgaatctgcaaacaatcgagctaccaagcagtttctcgaagagattaacaagtggacagttcagtacaatgtttccc

SEQ ID NO: 570406 - DNA, 98 bp, Homo sapiens
gagaacgactgcatctttgacaagtttgagtgttgctggaacggttcggatagggtcagtatagaccttctgatttgctgtgccctgagacatatgtt

SEQ ID NO: 570407 - DNA, 90 bp, Homo sapiens
gagcaaaagatgcttaccgaatccggagatcctgaggaggcgtgtgcttagggatgcagttggcagtggttgaattctcaagaaacgtgc

SEQ ID NO: 570408 - DNA, 75 bp, Homo sapiens
tagctctgaccacccggcgaagaaaggcctaaagaatgtatttgacgaagcaatattggctgccctggagcctcc

SEQ ID NO: 570409 - DNA, 90 bp, Homo sapiens
aaggtggctaaggacctcaacccaggagttaaaaaggccaagatcaaggctcgagatcttcgcgggaagaagaaggaggagctgctgaaa

SEQ ID NO: 570410 - DNA, 100 bp, Homo sapiens
cgaccccgagaagccctgcaagatgtgtgaggcccgtcacaagatccaggccaagtatctggaccagatggaggtgcagcgccggccctggttagtgaag

SEQ ID NO: 570411 - DNA, 75 bp, Homo sapiens
tatagaaaatatggatctttacatgttgaatccttgcagcactaaaatttgtcttgctctgttgccaggctggag

SEQ ID NO: 570412 - DNA, 100 bp, Homo sapiens
agacactgaagcaaataaagagaaaaatctggagcagtataataaaataatgttgagtttccatgaagaacaggaagtactgccagaaactttccttgct

SEQ ID NO: 570413 - DNA, 90 bp, Homo sapiens
tattaactatggagtcaaaggggatgtggcagttgttcgaattaactctcccaattcaaaggtggatccataaagaacccagccaacccg

SEQ ID NO: 570414 - DNA, 75 bp, Homo sapiens
aaaaatacatatctggttttgatggccgccaagaacgagtcatgtttgacaaaattacatctcgaatccagaagc

SEQ ID NO: 570415 - DNA, 88 bp, Homo sapiens
agtccggagtaacttggccaggctggccccgagcggaactggagaaagctgagggggtaaaagcatgtctacgaagaaaagtatgtga

SEQ ID NO: 570416 - DNA, 83 bp, Homo sapiens
cgactcgcttctttcggttctacctgggagaatccaccgccatccgccaccatgattgcagccaaaattggaggcgatgctgc

SEQ ID NO: 570417 - DNA, 82 bp, Homo sapiens
cctcaaggaggaggagtgtccagcaggttctcttgctgcaaatggccctaccaccttggttgataaagtttcaaatcccaaa

SEQ ID NO: 570418 - DNA, 83 bp, Homo sapiens
gggcaagaccaaagccgaacagttttactgtggcgacactgaagggaaaaagtctattatcctcccagtccacaacgctgaac

SEQ ID NO: 570419 - DNA, 83 bp, Homo sapiens
cagctcgcccagctcgcccagcgtccgccgcgcctcggccaagattgacgagatgcctgaggctgccgtgaaatcaacagcca

SEQ ID NO: 570420 - DNA, 98 bp, Homo sapiens
acctgctaacagaactggaccttttcgatcctgtattaaaagtaactctagcagtgtctgatcttcaaaagtccttgaactactggtgtaatctactg

SEQ ID NO: 570421 - DNA, 75 bp, Homo sapiens
cgggagttcagaaaacagttccccctgcatgaaaaggttgctccttgagggcaggacagttcttatggctttatc

SEQ ID NO: 570422 - DNA, 51 bp, Homo sapiens
ggggctacgactctgatgggcagcaaggatggaacattactgtggacctgg

SEQ ID NO: 570423 - DNA, 89 bp, Homo sapiens
ccacctcctgctgccttcccgtcgccgctcccgaagcttttccagaaaaatggctacaaacttcctagcacatgagaagatctggttcg

SEQ ID NO: 570424 - DNA, 100 bp, Homo sapiens
ggcgcctccttcctgcaggccaggccctggccaacgtcaacattgggagcctcatctgcaatgtaggggccggtggacctgctccagcagctggtgctgc

SEQ ID NO: 570425 - DNA, 90 bp, Homo sapiens
gcaaaaactccaaactcctctccaccagcgccaagagacaagccaaacggctcctgggacagattgtggaccgctgtcgaaatggacctg

SEQ ID NO: 570426 - DNA, 59 bp, Homo sapiens
tgaagtgctccgccgcccttgcctccagatgcctttggtgcttcatgaagaatatttcc

SEQ ID NO: 570427 - DNA, 100 bp, Homo sapiens
ggattcaaatgaaagtgaaaatgttagaagaactcgtgagccggattgatgttctgacccagtgggtgatatatgccatccgaaaccttaccgaagacaa

SEQ ID NO: 570428 - DNA, 89 bp, Homo sapiens
gaagagtcatccctcagaaagtcttgacacagatagtcttcttattgctgttatcaggaactgttgccgttattacatcagatgggaga

SEQ ID NO: 570429 - DNA, 98 bp, Homo sapiens
gagtcgcggcccgagaacgaggaggagcggccaaagcagtacagctgggatcagcgcgagaagttgatgcggatgaaattaaaaggctaggaaagaga

SEQ ID NO: 570430 - DNA, 98 bp, Homo sapiens
cgaccccggccgcccgcgccagcaagaggatcgtcctgccggagcccagggcccagtcatatatgcacagttagaccactccggcggacatcacagtg

SEQ ID NO: 570431 - DNA, 101 bp, Homo sapiens
tgcagagcctgcggggcaagatctggggaaatttgcagtggtgagaaaatgtataaagaaagattctgggaaagaatttgctgcaaagttcatgagaaaaa

SEQ ID NO: 570432 - DNA, 50 bp, Homo sapiens
tggcctacccgggatacggaggaggggccttccggagcagtactacagcc

SEQ ID NO: 570433 - DNA, 98 bp, Homo sapiens
ctttctcctcggcactgtattctttacctgcttcccaatcccactgatgaggatcagcccatgattgaagaattagggtctgaaggaaaagtagaaga

SEQ ID NO: 570434 - DNA, 74 bp, Homo sapiens
agacgccgtggcagcctgaacggagtgtgcgacggattgggaggactgaagatggaggaggaaggcacagaaga

SEQ ID NO: 570435 - DNA, 95 bp, Homo sapiens
cctggtccaaggacacctacagccccgacgaacatttctgggtgacactcaacaggattcccgattgtagaaggcatgaaacaaaaaatgtggag

SEQ ID NO: 570436 - DNA, 73 bp, Homo sapiens
gattccgttggagtagaagtgtccagcgacagcttctgggagggaacccgagcgtcatgttagggtgaagcag

SEQ ID NO: 570437 - DNA, 100 bp, Homo sapiens
gccgaccagaatgatagccagtccctggagctggtgcacaggttccagggaccattgcaatttagagatgtggccatagaattctctctggaggagtggc

SEQ ID NO: 570438 - DNA, 100 bp, Homo sapiens
ttgtggtgagattctctcccaggccacaagacatttcctgctcggaaccttgtttactaattgaaaacagttcctcctgaggatttcagagaagagctgg

SEQ ID NO: 570439 - DNA, 100 bp, Homo sapiens
acaacaccctgatctggcatggacatattccaacaatgtctcacccatcttggctgccacccaaaagcactggtgagcccctcggccatgtgcctgcacg

SEQ ID NO: 570440 - DNA, 83 bp, Homo sapiens
tgtgaaaaataccacgacaaaaccaccctacaaacagctaccggacatccagcatcatatttaagtgtgatgaagatgaggac

SEQ ID NO: 570441 - DNA, 100 bp, Homo sapiens
ctggttctacttcacactgcagaactgggttctggactttgggcgtcccattgccatggttggtgaactcttgaaagattggcgacgtcttaatgttgct

SEQ ID NO: 570442 - DNA, 82 bp, Homo sapiens
atactactacatcccgcagtacaagaactggagaggtttcgacacagccccaactgctggtacctgagaaactggactatcc

SEQ ID NO: 570443 - DNA, 50 bp, Homo sapiens
acgtgagggtgtaacttacaaaaaggaagctcttcgtgggcggtcttgac

SEQ ID NO: 570444 - DNA, 100 bp, Homo sapiens
caaccgcaaccattgacgccatgtcgggttattcgagtgaccgagaccgcggccgggaccgagggtggccatggtggaggtgcagctggagagtgaccac

SEQ ID NO: 570445 - DNA, 136 bp, Homo sapiens
ttttgagcgtcgcagagaacttagaaggcaaaagagggaggagatgcgactcgaagcagaaagcattgatatgaaccatggacaagtatattctgctgccacaaagactgtaaagtgcttcatttcaacagctgag

SEQ ID NO: 570446 - DNA, 100 bp, Homo sapiens
cgccttgttgcccagttccccagttctggcagattctggaaactgtacattgaagcagagagaccgtccaggctggacttgaactccttcctcggctgaa

SEQ ID NO: 570447 - DNA, 50 bp, Homo sapiens
ggattccaagtaactcttatttgagcctcattctgttgcccaggctggag

SEQ ID NO: 570448 - DNA, 95 bp, Homo sapiens
cacacctaccaagaagccagtcaagcggccaggtgacaaaatatctgaacagaagaggacttaggagagatctgaactccagctgccctacaaac

SEQ ID NO: 570449 - DNA, 98 bp, Homo sapiens
tgaaaacagtcatgtgaaaactcatcaccttaaggtgttaagtgtaaggatcttcatgatgaaatttctgtaaatgttccaagagcctctgagttcct

SEQ ID NO: 570450 - DNA, 82 bp, Homo sapiens
tcgccagcccgtgccgcgagcgcggcctgcaggaggcgtccggcaccccaacatcatctgtgactgctgcaagaagcacggg

SEQ ID NO: 570451 - DNA, 87 bp, Homo sapiens
atgataagctgagcagagccctgcgatactattatgacaagggggcggaggaaagcgcaaagggaaaagcaagaagtggaaagaaat

SEQ ID NO: 570452 - DNA, 101 bp, Homo sapiens
attcctcacgtctaccccgtggctgctaagacacagcttggccggtgcttccaggaaaccattgggtcacagaaaaatccagttacactcttaaaggaatt

SEQ ID NO: 570453 - DNA, 100 bp, Homo sapiens
ttggaaaaccttggacagacaattgtccccgatttgggatcactggaaagtcagcatgattttcgaaccccggagtttggttttggccaaattgggcgag

SEQ ID NO: 570454 - DNA, 100 bp, Homo sapiens
tcaggggccatggcgaagcacgagcagatcctggtcctcgatccgcccacagacctcaaattcaaagattcccaacttcttctggagcctggggatcggt

SEQ ID NO: 570455 - DNA, 82 bp, Homo sapiens
ctgacaatgatgagcagtttgtaccagactatcaggctgaaagttggagatcttgtgcgaaaactcaaagaagataaagcac

SEQ ID NO: 570456 - DNA, 83 bp, Homo sapiens
gctgctgctgcccggcctcggggagcatcagatccatgctgctgctgactcggagccccacagcttggcacaggctctctcag

SEQ ID NO: 570457 - DNA, 101 bp, Homo sapiens
gctcaggtcttctgtgaggaatctggattgtcacctttgctgcaaaaaattacggacttatcagatgtagacttcctagatgattcttcaacggagagttt

SEQ ID NO: 570458 - DNA, 82 bp, Homo sapiens
ccatgtccatcattatcgtcggcgtgggccaggcagagttcgacggagtcgatagcagcagttggtgacgagatggcactca

SEQ ID NO: 570459 - DNA, 75 bp, Homo sapiens
gtccagcttcccttcctcaaataaggaaattgacacctggcgtggttaaagctgaagctcaacaaagatatagtg

SEQ ID NO: 570460 - DNA, 100 bp, Homo sapiens
cccggacggcgcctctcgaacgagtgtgggcgcgaggcaggctgaccccgcactacatctacccaccagccatcgtgcagcccagcgtggtgatcccagc

SEQ ID NO: 570461 - DNA, 83 bp, Homo sapiens
tacacggccagttttgaaatcgacacacaaagaatagagttgagcctgtgggacacttcgggcccagctgagagccagcctgg

SEQ ID NO: 570462 - DNA, 99 bp, Homo sapiens
tgatgaagaagatccttcaaaattaaaagaggagcagcatggcatttcagtcactggtttgcagagtccaggtatgctccgtatagtgattgtagctgt

SEQ ID NO: 570463 - DNA, 100 bp, Homo sapiens
catgggcgcgtcacacaggcctccgtgaagaacttccagatcatccatggcaatgaccatattgatgatgttaagaagttcaaaccgggttacctggaag

SEQ ID NO: 570464 - DNA, 100 bp, Homo sapiens
gcctcatcccaggttgccttggaaaatgccaacgccgtgtctgaaggtgaatactgatggtctggtgctaagaggctggtataactgtctgacactggca

SEQ ID NO: 570465 - DNA, 90 bp, Homo sapiens
caccattgaatctgaaggaaaaggttccacctttgctaaggcgcccaggatacatctgatttaatgtcacctagcaaacgtagctctcag

SEQ ID NO: 570466 - DNA, 89 bp, Homo sapiens
gcgggcggcctggcgcggcgctccgatatgagggaaggcaccattggagatatggctatcctgggtataacagaaagttttcaagtgaa

SEQ ID NO: 570467 - DNA, 75 bp, Homo sapiens
ccatagccaccttctatgggttaaggcaacagatggcagaaacggtggacacaagcgaaatggtcaacggcgcta

SEQ ID NO: 570468 - DNA, 82 bp, Homo sapiens
ccagagtattgccgcggtggaaatggaggttaatttggagtggcccctggagtcagtttcctacaccatccgaggccccacc

SEQ ID NO: 570469 - DNA, 73 bp, Homo sapiens
tatggaaaagtgatacactctggactgccttccgggaaaatctggatgcttgccgtttaaaagccaatgaagc

SEQ ID NO: 570470 - DNA, 100 bp, Homo sapiens
tgtgagtgctctggcgaagtttggagcccagaatgaagagatgttacccagtatcttggtgttgctgaagagtccagggaccttgacccagcccctctca

SEQ ID NO: 570471 - DNA, 51 bp, Homo sapiens
gagctgagaagctcaggaaagaggccataggaaaaggatacagagtagagt

SEQ ID NO: 570472 - DNA, 100 bp, Homo sapiens
cctggatcaccgacagcacagacagaatccctgctaccagagaaattgtcgtaaatgaagtcaattttgtgagaaaatgcattgcaacagacacaagcca

SEQ ID NO: 570473 - DNA, 76 bp, Homo sapiens
gtgatatttgatgttgcaagtatcatcctgggctccaaggagagggatatgctgcaggctgctagtcattatcgcc

SEQ ID NO: 570474 - DNA, 100 bp, Homo sapiens
gtgcagaaggaggtcctgccgtccatgcggaagatcgtcgccacctggatgctggaggtacatgtactggacagactggggtgagacgccccggattgag

SEQ ID NO: 570475 - DNA, 100 bp, Homo sapiens
gaactctttcaagatctaagtcaattacaggaaacatggcttgcagaagattcctcctgcatggaaaaactactttcaaaagattggaaggaaaaaatgg

SEQ ID NO: 570476 - DNA, 90 bp, Homo sapiens
tggccacgggcttcggctgtgcaaccatcttctggcttttgaaatatcgacttaagcccttagatgtggcgtttatgaaggcaatacaca

SEQ ID NO: 570477 - DNA, 75 bp, Homo sapiens
gaaaatccgcaagaccatcatgcagggtttccaggcctgaggtgcccgccctggccccaggagaatgaaccagcc

SEQ ID NO: 570478 - DNA, 100 bp, Homo sapiens
gcctgcagagggtcccacggtggaagcgagagaggaggagcggttctggtgaggttggaaggatgcagccacccggttgtcatgaaaggcctgtgtgctg

SEQ ID NO: 570479 - DNA, 74 bp, Homo sapiens
cttatatgaaccagttcctgatgatgatgagataagctccgaagaagtatgcctaacctagcccggatgccaag

SEQ ID NO: 570480 - DNA, 74 bp, Homo sapiens
cagagtccgcggcgccaccgctcgccctccaggaactcttggtgtaataacagaagctacaataaaaatcagac

SEQ ID NO: 570481 - DNA, 90 bp, Homo sapiens
ataatcttctagataaaccacagttacaaggaattccaggctacttctacaagtccgaacagccagtccagcaaaatgaacagcattgtc

SEQ ID NO: 570482 - DNA, 82 bp, Homo sapiens
ggcatttgatggagaaaaactcagaactggaatgatgaatgggacaatcttatcaaaatggcttccacagacacacccatgg

SEQ ID NO: 570483 - DNA, 90 bp, Homo sapiens
tgaagagcgacaagccgctggcagccgcggatctcaccgccgctcaggccccatggctgggggttatggagtgatgggtgacgatggttc

SEQ ID NO: 570484 - DNA, 82 bp, Homo sapiens
gcagacgttagcgtgagtgatcactctcaatcccggtgtacaagtccccagagtatgagtcccttggttttgagcttactgt

SEQ ID NO: 570485 - DNA, 98 bp, Homo sapiens
aaaagcaaggcatgcggacacacgccgtctctgtgtcagatacactctgtgcagttttagagagagacacactcagtattcgagaaagtcgacttttt

SEQ ID NO: 570486 - DNA, 98 bp, Homo sapiens
caagcagttcagaagagccaaggaataaacatgcaatgaacccaaaaggtttttccagaaaggaggagtcaaggaagcccttagtgaacgagaactct

SEQ ID NO: 570487 - DNA, 100 bp, Homo sapiens
cacgcacggcccgggccggcgctccaaggcccgcccgggagggccggggccgcgctcaggtttacccaaggtccagcctagcccctaggcaccatgtcgg

SEQ ID NO: 570488 - DNA, 88 bp, Homo sapiens
aagtgacacaacacatgttttcttctggtatctggctaaaaaacttattggagaagtgtttaatattgtgagccaacagtctactgct

SEQ ID NO: 570489 - DNA, 50 bp, Homo sapiens
ccttggcatgggctacaaggaaaacggggtattgaatggacaagtttgac

SEQ ID NO: 570490 - DNA, 101 bp, Homo sapiens
gccggagccggtgccgcagctgcgatggccgtggccgtggggagaccgtctatcttggcatatacagaagggctgcatggaaaatggctgttcacagagat

SEQ ID NO: 570491 - DNA, 100 bp, Homo sapiens
cccctggccttctgtatcttcatggtgcggctcatcttcgagaggttggtcaaagaaaaagtgatgtatgaaaaagaggcaaaacaacaagaagaaaaga

SEQ ID NO: 570492 - DNA, 87 bp, Homo sapiens
agtaatcaaaaatcttgtacctgatgccgatattcaacgctttcgcaaagtggaagatgctttctacaaaggtgaactcaggctgaa

SEQ ID NO: 570493 - DNA, 90 bp, Homo sapiens
gcttccagacattctcagctgtcagccgtttccctggggagatggtaaccatactctattccataaccctcatgtgaatccacttccaac

SEQ ID NO: 570494 - DNA, 74 bp, Homo sapiens
cccagccgcttctgaccttccaggcctacgagcagattctcgggatcaccttctgcagatctccaggggagccc

SEQ ID NO: 570495 - DNA, 94 bp, Homo sapiens
gggagcaaaaccaacgcctggctcggagcagcagcctctgagggaaatcctcattgacgattcaatttgttgaaggccaatttgtggactccta

SEQ ID NO: 570496 - DNA, 100 bp, Homo sapiens
atcaggaagaaatggaggaagaagcagaaatggaaattgacagaattctctttgaaattacagcaggtgaccaagaatatggcccaggtgaccaaagccc

SEQ ID NO: 570497 - DNA, 100 bp, Homo sapiens
ctacggcccgagacacaccaggccggcaggctgagaaaagcgagaccgcgtgcgaggaccgggtgagaactctgtctcagtcgacgggaagtgcagtgac

SEQ ID NO: 570498 - DNA, 100 bp, Homo sapiens
acggagtattcgatgacttcctcagtcatgaggagaaatgaacagctgaccctacatgatgagaggtttgagaagatagtcgcagaggaccagttttgtg

SEQ ID NO: 570499 - DNA, 100 bp, Homo sapiens
ggcttcctcatcgtggccgagatcagcctgttcatccgagcagtgcgggcatacaacggtgagaactggagaacatccatcacagacatggagctggccc

SEQ ID NO: 570500 - DNA, 98 bp, Homo sapiens
tttgatgtggatgatgccaaagttttattagattttaccaaatgttgcaagaactctggagttcttatggtagtaaaatgccggaaagaaaattctgc

SEQ ID NO: 570501 - DNA, 51 bp, Homo sapiens
tagggtcctttatatagaagggagagtaggcatccgtgtacaagatttgca

SEQ ID NO: 570502 - DNA, 101 bp, Homo sapiens
tttctcctccccctcccggccaagatgtctgacatggaggatgatttcatgtgcgatgatgaggaggactacgacctggaaacttggatttaactggccag

SEQ ID NO: 570503 - DNA, 100 bp, Homo sapiens
gccccctgcaggaactctacaacccaatccagggcaggtgtttgtttgccagtggcagtccatttgggccagtgaaacttacagatgggcgagtctttac

SEQ ID NO: 570504 - DNA, 75 bp, Homo sapiens
tacagcatggtggagtcgcctctgatctgcaaagaaggagaaagcgtgcagggtctcgctctgtcgcccaggctg

SEQ ID NO: 570505 - DNA, 100 bp, Homo sapiens
cagctggtcagcgacgggagccccatggtccggaaggacgtagacaagtttggcaacgagatcacccagctggcccggcccctgcctgtggagtatctca

SEQ ID NO: 570506 - DNA, 82 bp, Homo sapiens
tggtcatcgaggagctcacgcgcgaggcggtggccgtggacgtggctgtgcccaagaggattttgcaagaacgaggctcaag

SEQ ID NO: 570507 - DNA, 74 bp, Homo sapiens
gctggccttggtgacagatgcagacaggctccagccactggaagtgaaaactctgctgttaaccagaaacctac

SEQ ID NO: 570508 - DNA, 75 bp, Homo sapiens
ccagattcaaacctttgtgacaagcaaggggagagccagttgcgcagagccctgcaaccagcagtccagggagaa

SEQ ID NO: 570509 - DNA, 74 bp, Homo sapiens
cggccgcgcgggccgggaggggacggccgccggagccgcgaggccaagttttgggatttgagattgacgcggtg

SEQ ID NO: 570510 - DNA, 71 bp, Homo sapiens
cggggcaagatggaggcgctgattttgaaaatatttacaccagcagctccagttcataccaataaagaaga

SEQ ID NO: 570511 - DNA, 100 bp, Homo sapiens
ctttcgtccaggacagtatgtggatgtcacagccaaaacgttacattggcgaatttgaaatcattgatgaccacagagctgggaaaattgttgtgaacct

SEQ ID NO: 570512 - DNA, 100 bp, Homo sapiens
tggggcagtatcaacggagtctccggggacttcgcaggtgagcagtaacggaaatcagccccgtttattcctcccagcacctgccttatccaactcccca

SEQ ID NO: 570513 - DNA, 83 bp, Homo sapiens
agagagactattttcgttattacaaggaaaactcactaccatgagaattgcagtgatttgcttttgcctcctaggcatcacct

SEQ ID NO: 570514 - DNA, 97 bp, Homo sapiens
ctcagttggaagcagccgatccagcctgcggagcctgtggggcaggagtctaccatggctcaagaatctcccaaaaattcagcagcagaaattccag

SEQ ID NO: 570515 - DNA, 75 bp, Homo sapiens
tcgtctgtattcccacttccttccagcagattatgagcttacagaaagcctggcctacattttactctttttgga

SEQ ID NO: 570516 - DNA, 97 bp, Homo sapiens
ctggagcatcccggattgcttctcgcacctgtctggcacctagatttagtatacactgccagacccgatgaaagagccataatgacttatgtttcct

SEQ ID NO: 570517 - DNA, 82 bp, Homo sapiens
cagcttcatgatattactgtaccgttagaagtttttgactcctgtcagtggacagtttggtgagttctcctgtctttggctc

SEQ ID NO: 570518 - DNA, 75 bp, Homo sapiens
acggactctccgttattttaggagcacaacaccccgatcccccaaggaggcagaggagccatccagtttgtcacg

SEQ ID NO: 570519 - DNA, 90 bp, Homo sapiens
ctgatgcaaaacagtcggtgtgtgctgagcaaatggaagaacaaatatgtctgtcagggcaaactctttgattctacaatagctgatgag

SEQ ID NO: 570520 - DNA, 82 bp, Homo sapiens
ccgccatggatagcgacgacgagatggtggaggaggcggtggaagtggaagcatcagttcacagcagtaatgcacactgtac

SEQ ID NO: 570521 - DNA, 75 bp, Homo sapiens
aaagtaacagtggaaaatgcaaagtgtgtgcaagcaaatgcttttattcagcactgttgcaagaattcaattccg

SEQ ID NO: 570522 - DNA, 90 bp, Homo sapiens
acccgagagccgcgagcgcccggccgaacccgcgatggaataatgcccagcggcccgccaggtcccggtcttatcgaatgttacttagcc

SEQ ID NO: 570523 - DNA, 90 bp, Homo sapiens
cctaaacaagacagtgactccaggatttctgaagactattgtggaagaagcatccattaagttgattatggaagattcccacaagagtac

SEQ ID NO: 570524 - DNA, 75 bp, Homo sapiens
cctcaatgggagctgactcaggagatgactttcggctatgtgactacgtttgtgacctcctcttagaagagtcaa

SEQ ID NO: 570525 - DNA, 100 bp, Homo sapiens
cagtgatgaatgcaagaggcgtttctataagaattgccccaccatggctgcaatccgaaagaagctggtgatcgttggggatggtgcctgtgggaagacc

SEQ ID NO: 570526 - DNA, 100 bp, Homo sapiens
accgagaccgtgaccgagagcgtgaccgagagcgcgaatatcgtcatcgttagaaggttgtccgagcggaactgcattgagattgttaataaattgattg

SEQ ID NO: 570527 - DNA, 81 bp, Homo sapiens
acactcaagtgaagcaaaagccttccatgattacgtcagtactcctgcatttgtaccaacgaaaactcacgtgctgcttca

SEQ ID NO: 570528 - DNA, 80 bp, Homo sapiens
atcagtttcgcagatttattccggctcattgctttctactgcatcagcaggttgtctttgaagcttggtgatgctggaaa

SEQ ID NO: 570529 - DNA, 90 bp, Homo sapiens
ggaagacctaggctgtagacgtggggatttcagtaggaaacattatggatctgtggagctgagctttcacctggccctgctgcggcagcc

SEQ ID NO: 570530 - DNA, 96 bp, Homo sapiens
gatgactacgacccctacgcggttgaagagcctagcgacgaggagccggctttgagcaggtttgttgataagccggggcccttcgtgggaccctgc

SEQ ID NO: 570531 - DNA, 87 bp, Homo sapiens
cccgcacccctccgagcagcccggggatccagcacgcaggtctctaattaacagaagatggcaaagcccagccacagcagctatgtc

SEQ ID NO: 570532 - DNA, 75 bp, Homo sapiens
cacccaggcgcggagggaagacgccctggtgctcaccaagcaagatcaccagaagctggagagagaggctcggat

SEQ ID NO: 570533 - DNA, 83 bp, Homo sapiens
ctacacttgcgcaaatgtctccggtttcccaaatgtggggaaaagcagcattatcaatagcttaaaacaagaacagatgtgta

SEQ ID NO: 570534 - DNA, 82 bp, Homo sapiens
tggccgggggcgcgggcggcggcgccggcaggaagccccactgcaggccccaccatggcgccgttcctgcgcatcgccttca

SEQ ID NO: 570535 - DNA, 100 bp, Homo sapiens
tttcaattactctacatttcatcaatgttggagtggcaagaaaaaggaggaacagatttggggtgaaaagttgccttagaagtggtgagatgggaagctg

SEQ ID NO: 570536 - DNA, 75 bp, Homo sapiens
cgggaccaccctgggcacagcaggcatcggaggtgatgtgtccaatctagatcccaacttctcatttgaaggcac

SEQ ID NO: 570537 - DNA, 75 bp, Homo sapiens
ggcctaccaggaggccaggggtgtcgccatggtccagaggtgtccttctaaagctggtagaggtttcacgagtca

SEQ ID NO: 570538 - DNA, 90 bp, Homo sapiens
ctttgtggcaactggagaaggcaaggcagctgttctgaagcacttttcaggattagaagaggctgtgtatagaaacatacaagcttgcaa

SEQ ID NO: 570539 - DNA, 99 bp, Homo sapiens
cagttgtgcgttgcggccagtcgccactgctgcttatcaggagggcagacttcaaaagctactaaaaatgaacggccctgaagatcttcccaagtccta

SEQ ID NO: 570540 - DNA, 75 bp, Homo sapiens
cgctacctctttctgggtgactatgtggacagaggctatttcagtatagaggctcatgctgaagattcggttatg

SEQ ID NO: 570541 - DNA, 100 bp, Homo sapiens
ggagaggcctggaggacaccaacatgttgctgatcatctgggctgtgatccacaaacccggttctttgtccctcctaatatcaaacagtggattgccttg

SEQ ID NO: 570542 - DNA, 100 bp, Homo sapiens
gctacactcaggcaccctggtgcccagccgggaactccccatcgcgttttgccagcgataatacgcctcagtattctaccttgtaaatactgttatttgt

SEQ ID NO: 570543 - DNA, 50 bp, Homo sapiens
gcgacggcgaccatagctctcttctgcctcctgggggcattgctggcccc

SEQ ID NO: 570544 - DNA, 82 bp, Homo sapiens
gacagattcgcagtggtcgcttcttctccttgagaaaatgctgctgtgaagacccaattaaagctttcacataaatgaagct

SEQ ID NO: 570545 - DNA, 100 bp, Homo sapiens
gataggcaggttaccatcactggatctgctgccagcattagcctggctcaatatctaatcaatgtcagagtctgaggctcctgcgtggggaccagcgtgg

SEQ ID NO: 570546 - DNA, 98 bp, Homo sapiens
cgtcactgtcggcggccatgacaccgctcgtctcccgcctgagtcgtctgtggttctacttgtccaattctgaaaaggaacgttatgaaaaagaattc

SEQ ID NO: 570547 - DNA, 83 bp, Homo sapiens
ctggaatttagcgctcgcccagctagccgcagactgcctcttcaaggtgtgccccatgaaccgctactcggcccagaagcagt

SEQ ID NO: 570548 - DNA, 100 bp, Homo sapiens
actgttagaagctgaagggatgtcaaagtcatactgcagtgggacggaacggacatttgaagacagtgatttgttccatttgattggtgttatctgtggc

SEQ ID NO: 570549 - DNA, 85 bp, Homo sapiens
gaaaatagcctttgccatcactgccattaagtctggagaggtgttggtgaatgttaaggagcactcccggcagatcaacgacatc

SEQ ID NO: 570550 - DNA, 75 bp, Homo sapiens
attacaatctagcagacggaactgaactcaggtggttttaatggaaaatggagatgtctatacatttggttatgg

SEQ ID NO: 570551 - DNA, 100 bp, Homo sapiens
ttgactttgcaggaaggaagatcctggaagaagaaaattcactagcagagtatcatagcagctttcaagatgttagaaagttcaagccagaagtttcttc

SEQ ID NO: 570552 - DNA, 100 bp, Homo sapiens
gcacatccacactccgctgctcgacagctattgacctgaaaagtggttctggaaaagtgtaccaaggccctgcaaaaggtgctgctgatacaacaatcat

SEQ ID NO: 570553 - DNA, 83 bp, Homo sapiens
agcgggaccccagttcctccgccaagcgcggccgccgcccccgcctcagggcagctggtggaatttttgaagaaaatggaatc

SEQ ID NO: 570554 - DNA, 82 bp, Homo sapiens
cccgactcaacgtgagacgcaccgcccggactcaccatgggacaaaagtggctctcaatccagcacatgcacattgaagcaa

SEQ ID NO: 570555 - DNA, 88 bp, Homo sapiens
ttcggaatgcactacaacaggaaaatcatattatagatggagtaaagaatggagatgtatgcatttcgattcttcatccgcctgtaga

SEQ ID NO: 570556 - DNA, 100 bp, Homo sapiens
cagttttcaactatgctgacagcatttatcttcagatactatgatttggagcaagaggtggtggtggccttcccccgaagaaatttggtaatcctgggga

SEQ ID NO: 570557 - DNA, 83 bp, Homo sapiens
ttatggactcatctgtcattcaaaggaaaaaagtagctgtcattggtggtggcttgagtgttgcggagataggaacatgggag

SEQ ID NO: 570558 - DNA, 75 bp, Homo sapiens
tggcaaatgtaaaaagaagaattgcacttacacacaggttctcttaactacagtgacttcaacagtttttttata

SEQ ID NO: 570559 - DNA, 74 bp, Homo sapiens
caccacccgcctctgggccccagacaggagctcaatttggaaatggaagaccaacaggagaacctagatactct

SEQ ID NO: 570560 - DNA, 112 bp, Homo sapiens
ctgggagtggagtgatgatgaatttgatgaagaaagtgaggaagggaaagcagcaatttcacaactcaggatggcaggagaggagaacttcaaggaagagctcagatcccag

SEQ ID NO: 570561 - DNA, 100 bp, Homo sapiens
gctcccagtccagtgctaggaaacattcccccaggagatggcatgccagtaggtcctgtaccaccagggttctttcagtgctctctcagaggaggagaaa

SEQ ID NO: 570562 - DNA, 100 bp, Homo sapiens
tatgtggcttggagctcaaaatggctggttctacaggcgcggcagggccccggctgttcaccatccacctgatagacgcgaacacagacaaccttccgaa

SEQ ID NO: 570563 - DNA, 100 bp, Homo sapiens
gtccgtgcgcccagcgtcccagggcccaggccgagcaggtgtttgtaaaatgtatgaagaacatctgaaaagaatgaatcccaacagtccctctatcaca

SEQ ID NO: 570564 - DNA, 98 bp, Homo sapiens
tgaaggaagatggcggacggcgtggaccacatagacatttacgcggatgtcggcgaagagttcaaccagagtatcctgagctccagctggaccctaaa

SEQ ID NO: 570565 - DNA, 98 bp, Homo sapiens
cttgaagtcaaccatctcacacctttccaaaggacgcgaccataactctaaaagacaatgcagatcttcgtgaagactctgactggtaagaccatcac

SEQ ID NO: 570566 - DNA, 75 bp, Homo sapiens
agggaggagactcctgaccctcagaatgatatgagatcctgactccaaactccattcccaagggtttcatggacg

SEQ ID NO: 570567 - DNA, 100 bp, Homo sapiens
tcattttcagtggtgccaagttcatatcctgctggtttaacaggccactcgctctggtgggaccctcgtgcttgtggggctgggctctgagatgaccacc

SEQ ID NO: 570568 - DNA, 75 bp, Homo sapiens
cctccaggccaagagggatccttcacccgtgtctggccgtcctcatcgtcagcgggaacctcagcttcctgaact

SEQ ID NO: 570569 - DNA, 100 bp, Homo sapiens
ccggcggtatggccttccactcctacttcatggaggccatcgcacccccactgctgcaggagctcaagaaggtgcagtctttgcaagccacatttggaac

SEQ ID NO: 570570 - DNA, 75 bp, Homo sapiens
cgggagtcagccactgcagatgctggctatgccatcctcgagaagaaggctgctggcaaaggggacgtcccaacg

SEQ ID NO: 570571 - DNA, 90 bp, Homo sapiens
aaggagttctccaggaagcagatcaaggacatggagaagatgttcaagcagggcgtgaatactttttctcccgaaggaagattatttcaa

SEQ ID NO: 570572 - DNA, 75 bp, Homo sapiens
agcgtttcttgcaagaatgggaggacctttgcaagaatgtggaactgctgagtgcaaagctaaggatgtatcaaa

SEQ ID NO: 570573 - DNA, 100 bp, Homo sapiens
gggaggatcgtgaatgacgaccagtccttttacgctgatgtgcacgtggaagatggcttgataaagaagaggatcacctagcccgggtagaagaggcaat

SEQ ID NO: 570574 - DNA, 73 bp, Homo sapiens
tcagcccttccctgaactacactgtgctgccttaaaagtgtttacggactcaggtacttctgccctccctttg

SEQ ID NO: 570575 - DNA, 95 bp, Homo sapiens
tctgggtgcccgtggaccacaggccctcgttgcccagatacctcctgccccccgaggtctgcagtctcctgaacccagcagccatctacgccaac

SEQ ID NO: 570576 - DNA, 98 bp, Homo sapiens
ggatctctggcggggtgcagaactgagcccaggccacagtaccctattcacgctctgtgcttgtgccaagtaaaaggcaatcgcaaatgtgagttgaa

SEQ ID NO: 570577 - DNA, 126 bp, Homo sapiens
tccaaaatgtggccagattgcagggagtatcaaatatgagaaagctaggccatctgaataactttactaagctgtacaggaagaggcacatacaaagaaaagaatccccgaaagggcggtttgtga

SEQ ID NO: 570578 - DNA, 83 bp, Homo sapiens
gagagcccatggcaggaccggcacggcgaaaccttcaccttcaggttgcctgttcactctgatcgtagtattggaagttctgg

SEQ ID NO: 570579 - DNA, 50 bp, Homo sapiens
ctccagtcgacactctcgcgcccggagggctggttgatatgtgaagagcc

SEQ ID NO: 570580 - DNA, 90 bp, Homo sapiens
cgcgagcgaggcgccctagacatcttctccctcccttgcctcaggattatagctgagaaggtaaaggacgttctgtttatccgaccccgg

SEQ ID NO: 570581 - DNA, 100 bp, Homo sapiens
agactccttgggggtcgagcacataacggggttcgggtgtctcgtgtgtgaacatcacaggaaaaatgctttctgaaagcagctcctttttgaagggtgt

SEQ ID NO: 570582 - DNA, 100 bp, Homo sapiens
ggcagaaggagctctacaagcacgtgatgaggggcaactacgagacgctggtctccctggttgtggacatcggatacccaaggagacgaagctgaagcag

SEQ ID NO: 570583 - DNA, 82 bp, Homo sapiens
gctacagcagctgcgagacagtggcgagaagacaatgcagatcttcgtgaagactctgactggtaagaccatcaccctcgag

SEQ ID NO: 570584 - DNA, 98 bp, Homo sapiens
gcctctgctccttcctcctcctcctcctcctccaagtgtcttccagctatgcagacatggcccatgaacatggacatgagcatggacatcataaaatg

SEQ ID NO: 570585 - DNA, 125 bp, Homo sapiens
aaagttgcagcgaggagaagcgcagcgacggcgtcgggagagcgcgcctagccggctcgcgagtactccaaagattcaggtttactcacgtcatccagcagagaatggaaagtcaaatttcctga

SEQ ID NO: 570586 - DNA, 75 bp, Homo sapiens
agcgggagcctcgctggtccccatttcaggtgccgtgagcgatgtggagatgcaggaacactatgatgagttttt

SEQ ID NO: 570587 - DNA, 100 bp, Homo sapiens
gtcgtgagctgctacaacgccagcgatcatgtctacaagggctgcttcgacggcaacgtcaccttgacggcaggtacctcatggcagggccaggttccag

SEQ ID NO: 570588 - DNA, 82 bp, Homo sapiens
gccatgaacaactcgggcgccgacgagatcggacaggccgacggtcgcaaggtcctacggtcaagcatccgggagtttctat

SEQ ID NO: 570589 - DNA, 50 bp, Homo sapiens
ggcgcgagtgaggaaaggaggtactgtagtcctattttgtaacggattat

SEQ ID NO: 570590 - DNA, 101 bp, Homo sapiens
ttgattctgctgatcctgtgcgtggggatggttgtcgggctggtggctctggggatttggtgttgcatctggaggtggtggggttggagatggtgttcaag

SEQ ID NO: 570591 - DNA, 90 bp, Homo sapiens
agactgggaatgagcaagaatggaagatcaagctgcaagtgcttggaaccctaaggactctgcaatatgaataattccctagagaacacc

SEQ ID NO: 570592 - DNA, 75 bp, Homo sapiens
caagcaggaagaggacctggaaaccatgaccatcctcagggctcagggaaactatattcagtattcaggggaccc

SEQ ID NO: 570593 - DNA, 74 bp, Homo sapiens
ccgcaaccgaagcacaaaagttatcaaacccggtggaccatatgtagggcaagaatatcacggcatgggcatga

SEQ ID NO: 570594 - DNA, 100 bp, Homo sapiens
atcggcaagggcaacttcgcggtggtcaagcgggccacgcacctcgtcaccaaggccaagcggcgccaccctggccccctgctgtagctgccgccttggt

SEQ ID NO: 570595 - DNA, 98 bp, Homo sapiens
cagacccccgtccagtgaattctgtttggtgcacctcgatttggaggaagtagggcagggcccttatctggaaagaagtttggaaaccctggggagaa

SEQ ID NO: 570596 - DNA, 50 bp, Homo sapiens
ggcttgtccatctgtaacttcattaagcaactttcatcctttgaaacgtg

SEQ ID NO: 570597 - DNA, 96 bp, Homo sapiens
tacataccgatgtcggaatgtggcaaaattactgtatatgcacatgctgggctaccctgctcactttggacagatacttacggcaataaagcaaag

SEQ ID NO: 570598 - DNA, 98 bp, Homo sapiens
gcacgtcttcgaaacctgctataaccccaaaggaatgtctgatcacagatacggggatggtggctctactttccagagcacaacaggacactgtgtac

SEQ ID NO: 570599 - DNA, 50 bp, Homo sapiens
tgataaaggaaacccaggagagatataggctgtggtccaaggccattttt

SEQ ID NO: 570600 - DNA, 80 bp, Homo sapiens
atgggaaaccatatgagccagagtttacatctgatgatttactagcacaaggcacagaaaactgaatctgtagataacga

SEQ ID NO: 570601 - DNA, 75 bp, Homo sapiens
tggtttgatactgacctgtaaatcatcctttagccttatttagtgtctctgacaaaaccggccttgtggaatttg

SEQ ID NO: 570602 - DNA, 88 bp, Homo sapiens
ttttaaagaaacagtctgtctctgtcacccttttaatcctagacatctccagaagtgagttatcactgtgaatataagatgcggacag

SEQ ID NO: 570603 - DNA, 51 bp, Homo sapiens
cgaatatcgtcatcgttagaagtttcagcaagaaaaacatctgccagccag

SEQ ID NO: 570604 - DNA, 75 bp, Homo sapiens
gggtcttgggtcctccgagagcagcagcgatagaagatggtgagatttttgcaagtattaaccagaaggacggta

SEQ ID NO: 570605 - DNA, 96 bp, Homo sapiens
agtttctggaagttataacgctacacgaagaactaagaatattattagcacaagagcaccatactttgagggagccctctggcacaaatggaagaa

SEQ ID NO: 570606 - DNA, 75 bp, Homo sapiens
aaatttaaggagttatatttggctaaagagggtgtaatcctgagagattcacatggtgttgcacaagtacgtttt

SEQ ID NO: 570607 - DNA, 74 bp, Homo sapiens
ctttcacctgatccaggccaacaaggctcaccagctggattccctcctgggggcttcattcccaaaacggccac

SEQ ID NO: 570608 - DNA, 104 bp, Homo sapiens
gctcatcatcggctggtacatcttccgcgtgctgctgcaggtctcctctgagcctccggcctccataagacccaaaacagatgacacctcttcccagtcccccg

SEQ ID NO: 570609 - DNA, 90 bp, Homo sapiens
tgggaatttccaaggggattcaaacttcaacagaatgtggcaaccaggaatcgtgcgggagctgaaaagtcgaggagtggcctacaaatc

SEQ ID NO: 570610 - DNA, 82 bp, Homo sapiens
gcacctcctcgccagcagccgtccggagccagccaacgagcgattcttctgctgatcgacattgagcagtcctacatcaaca

SEQ ID NO: 570611 - DNA, 100 bp, Homo sapiens
agcctggagtctgcgaaggccgggacccggttccccggcccacagtgggggtgtgcaaacccgagagaactggtgcacttgccggcggtcccaacccagc

SEQ ID NO: 570612 - DNA, 124 bp, Homo sapiens
gaaaagatccctggaatatgaagagacacagtatggtagccacacccccaggatacagttgatatattagttggatggcatatagatcatactcagaaaccttcgctcacgcagcaggtatctg

SEQ ID NO: 570613 - DNA, 100 bp, Homo sapiens
gggtactctttcctcgtggaatttgaagattctacagataaatcaggagttgggctgtgaagctggaaacatcagaggctgtctccttggaacttcatac

SEQ ID NO: 570614 - DNA, 83 bp, Homo sapiens
aaagacccagtgaacaaatccgggggcaaggccaaaaagaagctaatgatggaaactggccaacattaaaacagaattctagc

SEQ ID NO: 570615 - DNA, 83 bp, Homo sapiens
cataaacgctgtgcatcaaaagtaccaagagactgccttggagaggttactttcaatggagttttgcacagtaataagttgac

SEQ ID NO: 570616 - DNA, 51 bp, Homo sapiens
actgcaggcattaatgtccgaaaggagtccttcaataatgttaaacagtgg

SEQ ID NO: 570617 - DNA, 50 bp, Homo sapiens
caacggtggacacgtcattctgagaggaaagatatgatccgccaaatgat

SEQ ID NO: 570618 - DNA, 51 bp, Homo sapiens
cgaaaggattggattggcatctttagaggagatacatctggggactataag

SEQ ID NO: 570619 - DNA, 99 bp, Homo sapiens
ggctgagagctagcaaggaaaactcaggaccatgatggctcagtttcccacagctatgaatggagcagaggtttaataggcaagagaaagagaaaggaa

SEQ ID NO: 570620 - DNA, 83 bp, Homo sapiens
tggcaccccgaacgggttgcttcccccgctgcgagcatctgggctgatgggccgtaccctgcaccgtgagccacccgcaggag

SEQ ID NO: 570621 - DNA, 74 bp, Homo sapiens
tgtgaaaaataccacgacaaaaccaccctagtatgtgatagtggaatgtgaagatcaagatactcagcagagag

SEQ ID NO: 570622 - DNA, 100 bp, Homo sapiens
cgggagcaagatggcgattccgggcaggcatgttcgatgagtatctgaagaccacagggaagccgattgaagccagcatccgaggggagctgtctgggga

SEQ ID NO: 570623 - DNA, 100 bp, Homo sapiens
cacggatcggattcctcagctacgaggaggcgctgaggagagtggtgaagcagcgcttgcagatgtacaactcgcagcaccggtcagcaatcagctgcat

SEQ ID NO: 570624 - DNA, 82 bp, Homo sapiens
ctgtcgcgatacgctcctcagcggcggcgccagctcctgtgcggggatctgacgagcttttctctacttgtgtcactaacgg

SEQ ID NO: 570625 - DNA, 98 bp, Homo sapiens
gcgggacctggccagcgctgctggcgggcgttagggttgtgggtctgtcttgaacacaaatggtgaggttgaaatggatgctagtatcatggatggaa

SEQ ID NO: 570626 - DNA, 75 bp, Homo sapiens
gcgcgtcgtgccctgcgctgcccagactagcgaacaatacagatgcccattcaccagaatctcaaggagctgctg

SEQ ID NO: 570627 - DNA, 100 bp, Homo sapiens
caggctccactaactggggctacgactctgatgggcagactggcacagcctccaggttggcgggctcatctgcgctggggttctgtgcgccatgggcatc

SEQ ID NO: 570628 - DNA, 83 bp, Homo sapiens
gcctgcgacctgcccgcctgggcagttgtgaaaaacttcaggacaaaaatgtttcatttaaggacttgtgctgctaagttgag

SEQ ID NO: 570629 - DNA, 90 bp, Homo sapiens
agaactgaggagcaccaggagacgcaactcatcggataagaatgtgccttttgatgaaagaactttatctttctacaatgaagagtggaa

SEQ ID NO: 570630 - DNA, 75 bp, Homo sapiens
tgcgacgcctgcaaggactggttccacggcaggtgttggggcgatgtttcctgactgtggtgcaagtccatttcc

SEQ ID NO: 570631 - DNA, 82 bp, Homo sapiens
caaaacgaaaaagctcaatgcctcagaaattcattggtggccctcatgacactgacgctcttcccggtccggctcctggttg

SEQ ID NO: 570632 - DNA, 83 bp, Homo sapiens
gttcgccgccttctggcagcggtacccgaatccctatagcatcaacaacagcaacttgtgattggcggtgaccggatattcag

SEQ ID NO: 570633 - DNA, 100 bp, Homo sapiens
gattaaatactggtttcacactccaccaagcatcccattacagatagaagaggacactcaatcacttgtcggaagtccctcaacccgtatagcacctcat

SEQ ID NO: 570634 - DNA, 83 bp, Homo sapiens
agttgaatgccagccaccagccatggtgccttgctttccatgacatttcccctcaagcaccaacacattttctggtgataccc

SEQ ID NO: 570635 - DNA, 82 bp, Homo sapiens
aaggaggcgaattttcagttgatagcatctagtaagtcaacagaaagatccagatacagaagaatatcggaagctcctttct

SEQ ID NO: 570636 - DNA, 101 bp, Homo sapiens
ccttcggcgggcccctgctgaaagaccggcatgccctattctgtgggcttccgcgaagttctgaagaaagtctccaaatacattcaagagcagaatgagaa

SEQ ID NO: 570637 - DNA, 113 bp, Homo sapiens
ggaggagctgtgcagccgcgaggaggcgcgggaggtgttcgagaacgaccccgagacgtaagactttgaccccgacgcaggcttcagtgattgccgcggatcagaagcctgag

SEQ ID NO: 570638 - DNA, 75 bp, Homo sapiens
atattcttctccgcttacactctctgaccaggcaggttggtctcctcttcatattgcggcttctgctggccggga

SEQ ID NO: 570639 - DNA, 75 bp, Homo sapiens
tcagtctgcggccaagactccgtcctgcaagatctggaaagcatgaagactgggctttttttcctatgtctcttg

SEQ ID NO: 570640 - DNA, 75 bp, Homo sapiens
gtctccgttgggtccggccgctctgcgggactctgaggaaaagctcgcaccagagcactgcagtttcctcctgaa

SEQ ID NO: 570641 - DNA, 75 bp, Homo sapiens
cacttctactggacctcagactcctgcccgaggcctggcgtggttgactgtgaagtgctgaccacactcacccca

SEQ ID NO: 570642 - DNA, 82 bp, Homo sapiens
agcaggactgcgccgcgtcttcctcaaggtccgcgggagagctgtggggcttggtgagtgtttcgtggcctctcgggttggt

SEQ ID NO: 570643 - DNA, 85 bp, Homo sapiens
tgaggcgcgcgcagccacccagctcccggaagtgcgcccggagccggcgccgcgggccgagtagagacggggtttcaccatgtta

SEQ ID NO: 570644 - DNA, 99 bp, Homo sapiens
ctggaggtggtggtggagctgcagatccgggcggcaaaaactgattattccaagtggaagttgccctgttattctgaatacttacttttgtgagaaagt

SEQ ID NO: 570645 - DNA, 75 bp, Homo sapiens
cctggatgggcactcaccctaagttttgagtatccgaggagcccaggaggaggaacccacagacccccagctgat

SEQ ID NO: 570646 - DNA, 83 bp, Homo sapiens
ctcatgatgaaatgaaaagtccccgggaacctggctacaagttggtttccagtaataaagtcatgttgtctgaagctgggtgc

SEQ ID NO: 570647 - DNA, 112 bp, Homo sapiens
agcaggagctggccagtgaggtggtggtgaagaacctgcggctgggtttggctctctgccctgcatcctcaacgcctgctccggagatgccaagtccacctcctgcatcaac

SEQ ID NO: 570648 - DNA, 76 bp, Homo sapiens
aggtggtcgcggggacaaactacttcatcaaggcatcctgggctccccatcccaggaggacctgaattgtatcatc

SEQ ID NO: 570649 - DNA, 82 bp, Homo sapiens
tcgaccattccaaaaaaatcgaacatgagcctttgactgctcctcagctcttggtcccagatgtctatctaaatctgaagct

SEQ ID NO: 570650 - DNA, 75 bp, Homo sapiens
cgagccacccgaatggcattttgacagagtacaccttaaagtatcagccaagttttccgaaattctctgtatgca

SEQ ID NO: 570651 - DNA, 75 bp, Homo sapiens
tgggcctcgcgccggctatggccgtgccctggggctgagccctcagataatggcatcagctgctaaggaatttaa

SEQ ID NO: 570652 - DNA, 82 bp, Homo sapiens
gttgaaagtgatcttcctggagaactaccgtgtgtccttggctgagaaagattattttcgaaataccagtatttcgactcca

SEQ ID NO: 570653 - DNA, 100 bp, Homo sapiens
ctggactgcgcgatgactggacggatggagaacctgttcatcaaccgcttcatgcacatgttccagtcttcttggaatgacttcgccgactttgagaaaa

SEQ ID NO: 570654 - DNA, 101 bp, Homo sapiens
gtaacgtcatggaggatgaacgacagacaattgtggcaattaataaagacccagaagctccaattttccaagtggcagattatggaatagttgcagattta

SEQ ID NO: 570655 - DNA, 75 bp, Homo sapiens
accagctgcggcggccggaggaccggcctgccggcccccagaacaagggctttgttcgcgggggtcacagctctc

SEQ ID NO: 570656 - DNA, 90 bp, Homo sapiens
gctggcgtgggcaggccagctgtacctggcctggagctccagtaatagttatgcacgagtgcgagctgtggtgatgacccgagatgactc

SEQ ID NO: 570657 - DNA, 50 bp, Homo sapiens
gctgtttctcatctttatactcttccagtcaccttcaggccattcagagg

SEQ ID NO: 570658 - DNA, 101 bp, Homo sapiens
cggagatccgctacgagggcatcctctacaccatcgacaccgaaaactccaccgtagcccttgccaaagctatgctaagaaggaatctgatcttaatggcg

SEQ ID NO: 570659 - DNA, 100 bp, Homo sapiens
aagagagacggcgaggcgcgctccctgcccggcagcgactcggaggcaagaggcgcagatgttccagagattcctggagatcttactcttaagacgtgtg

SEQ ID NO: 570660 - DNA, 83 bp, Homo sapiens
tgtcaccccgactcaacgtgagacgcaccgcccggactcaccatggtattagaaaactactcggatgctccaatgacaccaaa

SEQ ID NO: 570661 - DNA, 50 bp, Homo sapiens
gccgccgccaccatgcccaagagaaagggacctcaggatggaaaccagca

SEQ ID NO: 570662 - DNA, 125 bp, Homo sapiens
ggcttcacccttaaggggggtctggaacactgtgagccgctcacagtgtctaaggtgctggagaatctggtaaaagcaccattgtgaagcagatgaggatcctgcatgttaatgggtttaatgga

SEQ ID NO: 570663 - DNA, 82 bp, Homo sapiens
ctgcgcatcgtctgcaagaccgcgaggcgagacctcttgtgtcccgacccaggctaagcttgagcatggctgagcaggagcc

SEQ ID NO: 570664 - DNA, 90 bp, Homo sapiens
tttagtagtcgatatccttttgactctcctcaggaaacggaggtggagctgtacaacgaatttcctgaacctatcaaactggacaagaat

SEQ ID NO: 570665 - DNA, 82 bp, Homo sapiens
cgctcccttccccgcgcagccccgcacggcccgggcccacgaattgaatgatctggcacgggaccctccagcacagtgttca

SEQ ID NO: 570666 - DNA, 73 bp, Homo sapiens
aaacccttcacagactgctctggtgtttgagaagtcccccctgcgggtgaagaacttcgggatctggctgcgc

SEQ ID NO: 570667 - DNA, 83 bp, Homo sapiens
aacgacgttccatctgtggaaggacctaccaaccagatgatgataattccgaagaaggcttccacactattcattcaggaagg

SEQ ID NO: 570668 - DNA, 98 bp, Homo sapiens
gcggccgctgccattgcccggagatggccggcagagccgccgagacgccgaagagcccgccgcccgcgcgagcaatatgttaaggatacctgtaagaa

SEQ ID NO: 570669 - DNA, 82 bp, Homo sapiens
ggctggtatctttcagagtgtaaagtaatcttggaatataaagggaataccttggcaagcagctccagtccgagcagcccca

SEQ ID NO: 570670 - DNA, 100 bp, Homo sapiens
tccaaggagttcaatcacttggcgtgacttcactacttttaagcaaaagaggttctccaaaaaatgtggaatcctttgcatctatgctgagacattctcc

SEQ ID NO: 570671 - DNA, 50 bp, Homo sapiens
cgaaggcgggcggcagaggcgatcagcagcagccgctcttctaaaacatt

SEQ ID NO: 570672 - DNA, 100 bp, Homo sapiens
cggcccagcaacgaggaaagctgggaggtggggaagacagggctccagctaccacaggacgggctctgggtatagccgttccagtcagggacagccgtgg

SEQ ID NO: 570673 - DNA, 75 bp, Homo sapiens
ctccgtcgtggaagcaggactgcgccgcgtcttcctcaagagtctgtagaagaggcgacaccagggcttccaaat

SEQ ID NO: 570674 - DNA, 97 bp, Homo sapiens
cgtggtggagctctgcgtgtgtgaatctggattgggaaagtcgacattaatcaactcattattcctcacagatttgtattctccagagtatccaggt

SEQ ID NO: 570675 - DNA, 100 bp, Homo sapiens
ggcaagactggcacccagcacagcaggattatatgcgtcaggcaggagaagtgacttatgcagatgctcacaagggacgcaaaaatgaaggggtgattga

SEQ ID NO: 570676 - DNA, 82 bp, Homo sapiens
ctgcacagccgcggcggcagcagcagtgagagatataacacgtgggaaccggaggagaacatcctggaccccaggctgctga

SEQ ID NO: 570677 - DNA, 75 bp, Homo sapiens
cctgtacagcctgcagaacctgtgtcccggcatggatatccggaacaacctcactaggttgcatgagctggagaa

SEQ ID NO: 570678 - DNA, 74 bp, Homo sapiens
gccctcaatctgctcttttggtcaccaggtgtcaagatgctgcaagtacataggactggactgggcaggctggg

SEQ ID NO: 570679 - DNA, 90 bp, Homo sapiens
gcggctgcgggaagcgtaccgcgagctcaaggaggacctcacgcccttcaaggatgaccgctactacagtttggaaattttagcattcag

SEQ ID NO: 570680 - DNA, 90 bp, Homo sapiens
taatggcaacgctaagctcctctaatcctttctttgttcgctgtatcaagccaaacatgcagaaggaagcatctcgaagaacagccctgc

SEQ ID NO: 570681 - DNA, 100 bp, Homo sapiens
gcacacccctgcacctgctgcaccgccaccgccgccgcctgcggaggaggcccgctgaccgacagcgtgcatcgcttcaaggccgggacagtgtggccga

SEQ ID NO: 570682 - DNA, 90 bp, Homo sapiens
ctcggccgcccagcgtggactccttgtccagaaatgagccgtcagactgctacagcattacctaccggtacctcgaagtgtccaccatcc

SEQ ID NO: 570683 - DNA, 100 bp, Homo sapiens
ctgccgcctgacggggctcccgagcacgtattcctgtgcacacaatatttgacagctgccctgaagggaatggcatcatggccatggccatgacccacga

SEQ ID NO: 570684 - DNA, 75 bp, Homo sapiens
ctttgctgcaccaggtgtcctggagacagacaatgcagatcttcgtgaagactctgactggtaagaccatcaccc

SEQ ID NO: 570685 - DNA, 75 bp, Homo sapiens
ctcttggcaggagtagctgatcaaaccaaggatggaatttttgacagcagctgtatatcttctaagattccgctc

SEQ ID NO: 570686 - DNA, 100 bp, Homo sapiens
cggatcatggacaatggcttcgccgcgggaccctgtcagatgagcatgctggagtgatatctgttctagcccagcaagcagctaagctaacctctgaccc

SEQ ID NO: 570687 - DNA, 98 bp, Homo sapiens
tggcgctggccggatggaaatcctaatgacagtctccaaattcgcctccatctgtaccatggatgaaacgaggaggaagagatagtgaccgtaattca

SEQ ID NO: 570688 - DNA, 100 bp, Homo sapiens
tggacagatcctttgcctgtcagtgtcctgagggacacgtgctccgcagcgatgggaagacgtgtgcaagccctcgggaccaaggatcacgtcatgactc

SEQ ID NO: 570689 - DNA, 75 bp, Homo sapiens
gtttttctgttttgcctgaatacatgatttaaacaagagatttccacagaagaatggcatgcattttccacaata

SEQ ID NO: 570690 - DNA, 100 bp, Homo sapiens
gttgtgtacgttgcacccgcaaaggacccagtggtcttcagcgtgtagtaaaaccaacctcaattactgttcatgattcagagagtgatgatgaagaaga

SEQ ID NO: 570691 - DNA, 82 bp, Homo sapiens
ttcagtggcttcctgaagtgactaattgccaaaacaaaggggatttggtgatggaggctttgttagaaggaatacaaaatcg

SEQ ID NO: 570692 - DNA, 52 bp, Homo sapiens
gggtgcaatcctggagccccccagtgagggcttatgcaagcaaagatctgga

SEQ ID NO: 570693 - DNA, 100 bp, Homo sapiens
ctcgactcggtcctgtttcgacagcgaacatgtcgcggcctgtcaggtgccgccatgccgccattgccaagtacttcggggatgcgctgcctgcctgcgc

SEQ ID NO: 570694 - DNA, 100 bp, Homo sapiens
gttgccatgaggcgaggctagggaggacctcacttccccggggtgtaataatgttaactgagaatgccacccagaggatgtttgaaattgactatagccg

SEQ ID NO: 570695 - DNA, 83 bp, Homo sapiens
accgggccgtgccccagatgcccaccgggatggagaaggaggaggaatcgattgtgcttcaagaagaccatagggaagaacgc

SEQ ID NO: 570696 - DNA, 100 bp, Homo sapiens
gacgacttcaactatggcagcagcgtggcctccgccaccgtgcacatccgaatgggatcaactcactatcctgaaggtccattctcccaagaagagggga

SEQ ID NO: 570697 - DNA, 100 bp, Homo sapiens
gtgtcctgagatcaaatggcacttcattggccacctacagaaacaaaatgtcaacaaattgatggtctatcaggtgtttgaaagtgtggctaagaagtat

SEQ ID NO: 570698 - DNA, 75 bp, Homo sapiens
tcaaggcagccgggatttgtccacatcgtgagacgtggtcttgtaacacagtggttaagaatgtgactttggagc

SEQ ID NO: 570699 - DNA, 75 bp, Homo sapiens
cccaagtgccaagttatttactttcccatcaggtttcctgatgtgagcagcagaaaaagtcctacctggagcgaa

SEQ ID NO: 570700 - DNA, 98 bp, Homo sapiens
cggaatccagggccgacccgggccggaccgaccccaggcggcgtgactgcattattgaggagaagacggtggtcctgcagaaaaaagacaatgagggc

SEQ ID NO: 570701 - DNA, 100 bp, Homo sapiens
gaactcggcgccgccaaacagcccagctcgcgcttcagcgtcccggcgccgtcgcgccactcctccgagactatacaggctccaacccaagttccagtgg

SEQ ID NO: 570702 - DNA, 110 bp, Homo sapiens
cttctagtgttgctttggatcttgtggaaagtcagaggacagagcagaatgggctgatatagatccggtgccgcagaatgatggccccaatcccgtggtccagatcattt

SEQ ID NO: 570703 - DNA, 74 bp, Homo sapiens
agacagaacagttaatcctcaatttaagcctgatctaacccctagaaacaggagtggcaaaattctattcagaa

SEQ ID NO: 570704 - DNA, 95 bp, Homo sapiens
aaaggatagtcaaagctgatgagcatgtcattgaccaaggagatgatggagacaacttttatgtcatagaacgtgtcatcttgcattacaacata

SEQ ID NO: 570705 - DNA, 98 bp, Homo sapiens
ctctgcttgaaaggagaagacttggattctcaggttcatcagttcagtaacaagtcaacagagatggctttaagagtggcatctcttgattaccttgg

SEQ ID NO: 570706 - DNA, 98 bp, Homo sapiens
agaggagcagctcaaaaagaaatgtttcactctgctctgctactatgatcccaattcagatggccgccctgctcccccaatgaaaggccagcttcgaa

SEQ ID NO: 570707 - DNA, 98 bp, Homo sapiens
tccatgtgagtgaccatgcagcaaaagaaggagggtcctctcagtgattaagaatgttcgcatcttaccacatacagttctttacatggctgattcag

SEQ ID NO: 570708 - DNA, 74 bp, Homo sapiens
agaaaatgcaggaacaacagatgcaggtgaatgaaaactttgccattgatttgatagcagagcagcccgtgagc

SEQ ID NO: 570709 - DNA, 100 bp, Homo sapiens
gggaaaatctccccggtgactttcagagctgaccatggcggagatgcggcagagcctggagcaggagcgggaccggctcatcgccgaggtgaagaagcag

SEQ ID NO: 570710 - DNA, 82 bp, Homo sapiens
cccaaatgtctgactctgactctcggactgagaaacgcaaggtgtaccttccggtttcccagcacggccatcaagatccagt

SEQ ID NO: 570711 - DNA, 75 bp, Homo sapiens
ccccatctgaggcgtttgttgcagctacctgcacttctagatacaaagaaacagccttggtataatagcacgtta

SEQ ID NO: 570712 - DNA, 120 bp, Homo sapiens
acagcctcgtcaaccagcagagcttccaggacatcaagcccatgcgggaccagatcatccgcgtgaagcgcaacatggctgacaaggccaagcctgccaaagctgccaacaggacgcccc

SEQ ID NO: 570713 - DNA, 146 bp, Homo sapiens
ctccggagcccgctctgcgttttgttttcccctcggcactaggcagcggaggagcccgaccgacccggtactccaaagattcaggtttactcacgtcatccagcagagaatggaaagtcaaatttcctgaattgctatgtgtctgg

SEQ ID NO: 570714 - DNA, 82 bp, Homo sapiens
ttagctggactaacagatttggtcatcatcagatttgaaatatttaaagtggatacaaaactatttcagcaatgcagacaat

SEQ ID NO: 570715 - DNA, 100 bp, Homo sapiens
aggtgctgatgaagccttacaaaaagcaataaagtcagactcctccagcccccaaagagtgcagagacctcactaagccctacaggtggcaactactagc

SEQ ID NO: 570716 - DNA, 75 bp, Homo sapiens
ccgggagttacaccgccaccgccaggcacgtctgagaatggtggatgtggtggagaaagaagatgtgaatgaagc

SEQ ID NO: 570717 - DNA, 100 bp, Homo sapiens
acgaggcgctatcttaatgagctcaagattcagagttccagacaggcacttcactcgcggctgcgcggccctgtcaggagggaacgcagtgccaggtgcc

SEQ ID NO: 570718 - DNA, 75 bp, Homo sapiens
gttggcacccctttgaagagaagattgtcagcagttcggatgatgatgacgacatgggagaggatgaagatgagg

SEQ ID NO: 570719 - DNA, 82 bp, Homo sapiens
cgacccagggcccgcgggccaggagagcgctcggcgggggaacgcccttttgcttgtgactggcagggctgcgacaagaagt

SEQ ID NO: 570720 - DNA, 83 bp, Homo sapiens
atgggcaccgcggatctggggccgtcctcaggttaacacagaaatctgcctcctgggccatgccgcttctaaggcctgtttct

SEQ ID NO: 570721 - DNA, 75 bp, Homo sapiens
ccctgcctctccctgggctctggtggaaaacgaagctcattcccaacgtgcaaagccaaggcagcgaccccagga

SEQ ID NO: 570722 - DNA, 74 bp, Homo sapiens
cagctccggccgcctggctccccatactagtcgccggtatgagaagatgatcagtggtatgtacctgggtgaaa

SEQ ID NO: 570723 - DNA, 75 bp, Homo sapiens
gcccccgcatgacacccagcgacctgcgcaacctcgacgagctgacaacgtcaaggcctacttcaagcggggcaa

SEQ ID NO: 570724 - DNA, 75 bp, Homo sapiens
tgatggaaccagaacaccccgagatgagaggagaagagcccagcacaacgaaggcattgagatgttccacaagag

SEQ ID NO: 570725 - DNA, 78 bp, Homo sapiens
cgcaaacaagccaatcccaggaggaaaaacgcagctcttcagtgggtcatctgtgtgtcacagcctcagaagaccagc

SEQ ID NO: 570726 - DNA, 100 bp, Homo sapiens
gtggacccccagatctgaggtgttgtttactgcatcagaaactacaggaaaaactggaaggttggttagtgtctattaaaatagcttttgataagaaggc

SEQ ID NO: 570727 - DNA, 75 bp, Homo sapiens
tgaaacaccactgaagcattgccaagcatgcagccagtaaagatcccagagaagttcgagaagctagagatcata

SEQ ID NO: 570728 - DNA, 100 bp, Homo sapiens
cacatatctatgcccttgcagataatatgtacagaaacatgatcattgacagagagaaccagtgcgtcattatcagggacttcagtactagtgctaataa

SEQ ID NO: 570729 - DNA, 90 bp, Homo sapiens
agataacctgtctggatgggtttgaagttgtggaggacgtggagaacagcttcttcttgaatgtcaattcccaagtaacaacagtgtgtc

SEQ ID NO: 570730 - DNA, 83 bp, Homo sapiens
gggcgggggatgtgagcgctgagcccttggcaggtcagcccaaggccaaccccactgtcactctgttcccgccctcctctgag

SEQ ID NO: 570731 - DNA, 82 bp, Homo sapiens
cctggaggagaatcaagagctccgagatgatatcatcaagttgaatcgaaaggaagggaagaagcagaattttccaagacta

SEQ ID NO: 570732 - DNA, 75 bp, Homo sapiens
tggacccaactgtggaatatgtgaagagacttccagtgtcctactattgaagcctgcacctgctgcattgctgtt

SEQ ID NO: 570733 - DNA, 100 bp, Homo sapiens
aaggagcgggaacagatgagtgaagcagaggtgggggtgtttgtccagcgactccggggcctgatgaatgacatcgctgtttttcagagtgacggatgac

SEQ ID NO: 570734 - DNA, 100 bp, Homo sapiens
cctcctacgtttacctgtccatggtggcagtagagaagagcatcacagaagttgctcaggagctgacagagctggtggaacatcttgtagacattgtcag

SEQ ID NO: 570735 - DNA, 51 bp, Homo sapiens
actttccaaagtggatgcctccggggagtcagaatctggagatgtgagtag

SEQ ID NO: 570736 - DNA, 100 bp, Homo sapiens
tatttgaagatggagcagatactacttccccagagacacctgattcttctgcttcaaaagtcctcaaaagaggggtcggcaccaggaattattatagaaa

SEQ ID NO: 570737 - DNA, 120 bp, Homo sapiens
ggcgcggggaagtcatgctcgcttcacggaggcaatagctagccggtgtacattccaagcagagtggccctcatccttcagaatgtggatctgccgaattgaagaggcctgatttcagct

SEQ ID NO: 570738 - DNA, 101 bp, Homo sapiens
atttgctccagccagtgttagctcctcttcatcgatgtttgaatacagcagatcccatgcgaggcccaagaaaactagaagtagtggaggtcaaatctcgg

SEQ ID NO: 570739 - DNA, 74 bp, Homo sapiens
cggcggcgctcggcgatggtaggcgtccctggagcggccgccttccagcgtgtttgtggagctgaatgagttgc

SEQ ID NO: 570740 - DNA, 49 bp, Homo sapiens
ttgcggcaccgagggctcaggccattcctgagactggcccagacgctgc

SEQ ID NO: 570741 - DNA, 100 bp, Homo sapiens
ttggaatttaagtcccatcagtggtttggagcatctgtgaggtcgaaacaggataaaattttggggccacctacagatgctcctgcagtggacacagcag

SEQ ID NO: 570742 - DNA, 100 bp, Homo sapiens
ctatggatctattcgactttttcagagactgggacttggagcagcagtggcatttgtaaaggatgttcatgaagattcaataacagttgcatttgaaaac

SEQ ID NO: 570743 - DNA, 75 bp, Homo sapiens
ccccaaaagagtattcttggatcttgcacaggaaggaattaaaggcaaaatttggtttctctaatattactggaa

SEQ ID NO: 570744 - DNA, 101 bp, Homo sapiens
ctggtggaaggagggtatgatgcaggtgccagatttggagctggggctactgctggcaacattcctgcagaaggccacaagctgtacaaggacctgaagaa

SEQ ID NO: 570745 - DNA, 74 bp, Homo sapiens
cgactgctccatcgaggcagccatggtgaaggcaccatgactcctgtgaggatgcagcactccctggcaggtca

SEQ ID NO: 570746 - DNA, 100 bp, Homo sapiens
atcgaggagctgcggctctaccccccggaaaaggaagctgttgaagttattgaagtacctgttgctatattctaagaaattaaaatgtccagaaatctgc

SEQ ID NO: 570747 - DNA, 100 bp, Homo sapiens
aacttgaatttctgcaaacgaacacagcaccgggagctctgcagacctgtgtcggcgcggaacccggactgagacatgccatggcggacaccgacctgtt

SEQ ID NO: 570748 - DNA, 100 bp, Homo sapiens
cctggagtacaatgtcagtgtttacactgtcaaggatgacaaggaaagtgtccctatctctgataccatcatcccagcaaccatgtccaagggacctgca

SEQ ID NO: 570749 - DNA, 96 bp, Homo sapiens
cggcgaggtgcacattggaggcgtgatgcttaagctggtggagaaactcggtgctggagaatctggtaaaagcaccattgtgaagcagatgaggat

SEQ ID NO: 570750 - DNA, 82 bp, Homo sapiens
cccaaggccgagccggagccggggcccgggcccgcgtccgctcccgcgcccgatgtgaagttcatttccaatccgccctcca

SEQ ID NO: 570751 - DNA, 75 bp, Homo sapiens
cctgcagcggaaccggacccagtccctgagccgcccctacacccacagcctcgaagcggaggatccctgtgtccc

SEQ ID NO: 570752 - DNA, 99 bp, Homo sapiens
aggggagcaagagcccggagccgtcagatggttttcgtgactgcaagaagggggatcccaagcacgggaagcggaaacgaggccggccccgaaagctga

SEQ ID NO: 570753 - DNA, 112 bp, Homo sapiens
acaacatgaaacagcatctcagacttctttcccagatgtttataatgagggcacacagattgagaggatccagaatccagatctctggaatagctaccaggcaaagaaaaaa

SEQ ID NO: 570754 - DNA, 96 bp, Homo sapiens
ggtcattacagaccctgaaaaactggaccaaattagacagagctggatcatcattgaactaaaacacaaagcaagagaaaaaccttatgatagtaa

SEQ ID NO: 570755 - DNA, 109 bp, Homo sapiens
atatcacccataatcggaatgtgatcacagagcctatttacccagaagtagtccatatggtatggaacgccgtggactccgggcactgcctgcagacctactccctgca

SEQ ID NO: 570756 - DNA, 75 bp, Homo sapiens
ccttgctgaagagactttccgttacatgagagtggttaatgtgttgctaacaactccactctgggtggtaaacac

SEQ ID NO: 570757 - DNA, 100 bp, Homo sapiens
tgagggctgagttctgcacccagtcaagctcaggaaggccaagaaaagacaggtgatttggcttctgcacagttaggaggagcaccaaaccgatgggagg

SEQ ID NO: 570758 - DNA, 75 bp, Homo sapiens
gactcattattttaacatttgggagaaacacagccagaagaaattgcaggtgctgcagtgtctgaaatttccggg

SEQ ID NO: 570759 - DNA, 75 bp, Homo sapiens
cccattattgtacctttaattccaccacctttcataaagccaccagcaggtatggcatttcaaatatagatacaa

SEQ ID NO: 570760 - DNA, 100 bp, Homo sapiens
tcgaggccacagcccaggtcacagtgaaagtatccctctgaagaagatatgatcgaatgggccaagagggaaagtgagagagaggaagagcagaggcttg

SEQ ID NO: 570761 - DNA, 49 bp, Homo sapiens
ctgcaagaacttcttgactgaggctcgcatgtcttgggatagagagtcg

SEQ ID NO: 570762 - DNA, 100 bp, Homo sapiens
ccctcccctggcagtgtgacggctgggcgacttgcgaggatgagagcgacgaagccaactgtccaggatataccttctcagaagctgcacaggaggaaag

SEQ ID NO: 570763 - DNA, 51 bp, Homo sapiens
gcgtgctctctcggaataagacagagcccagaagaatcagtgcggtttctg

SEQ ID NO: 570764 - DNA, 96 bp, Homo sapiens
gaatctgcccaccttggctgggagctggagcagctgtccaagaacgcagacttgtcagacgctatcatggtgaacttacttcagattgtgcgggac

SEQ ID NO: 570765 - DNA, 83 bp, Homo sapiens
ccttagctgtgctcgcgctactctctctttctggcctggaggctatccagcgtggctattatcatggaaaactaatttttccc

SEQ ID NO: 570766 - DNA, 71 bp, Homo sapiens
acttcggagcacgtctttgagtggccccagcagatggcttctctgatcttgccatgcaagtaatgacgtct

SEQ ID NO: 570767 - DNA, 98 bp, Homo sapiens
gaagattctgccgctgattgctatcacttctgcagaatccagtggatcatatactcctatgaaaggaggaatctccaatgtatggtttgacagattta

SEQ ID NO: 570768 - DNA, 51 bp, Homo sapiens
cttccgcaccatcacctccaccagggaaaaggggtcgaggccggtcctgac

SEQ ID NO: 570769 - DNA, 75 bp, Homo sapiens
caaggacctgacaagccagcagaaggatgtcaccgggtgcgcatcaatgtacctccacacagagggcttctctgg

SEQ ID NO: 570770 - DNA, 78 bp, Homo sapiens
aattaatgaagctgtacctcaggtgaagttttatgaagagccaaaagaatgcaatggtgtaaagattccagttgatgc

SEQ ID NO: 570771 - DNA, 90 bp, Homo sapiens
cgaagacagtccctggatcaccgacagcacagacagaatccctgctaccaatcctgaacttcacagatgagctcacaccacccagattga

SEQ ID NO: 570772 - DNA, 82 bp, Homo sapiens
aatatggaatgttcttaacccagaagtagctgaatgtgttactccattgctgaggagtgcaaatgcagccctgaggatttgg

SEQ ID NO: 570773 - DNA, 75 bp, Homo sapiens
tctggcatgtttctacacaacaaaacattcatggagggggaatttgaaaaagtaccagaaggtcctatccctcca

SEQ ID NO: 570774 - DNA, 90 bp, Homo sapiens
gcagcaccgaggccagcaagacgctgcccgccatcgagcataaagatagggaggtggtgatggagcacccctcttctggaagtgactggt

SEQ ID NO: 570775 - DNA, 96 bp, Homo sapiens
gcggcggcggcggcggctgcggcccaatataggtaccttgtggtctataatcctttagaacaagaccgaatctcgttggtctcagtctatgtgagt

SEQ ID NO: 570776 - DNA, 75 bp, Homo sapiens
aaggacaaacccaccttcatcaaaggggctggtgggccaccaaaaaaggggaaaccagctgcaccaggaggcgca

SEQ ID NO: 570777 - DNA, 105 bp, Homo sapiens
ggccatctacctggacatcgatggacgcattcagaagctagatgaggaagaggagcgaaggaaaaggcgccgggagaagaacaaagtcgcagcagcccgatgccg

SEQ ID NO: 570778 - DNA, 75 bp, Homo sapiens
gcagctggagcagtggcgtttggaggagactcggaggcctgtgcaacctgtgcccagacagggccaacaaggagc

SEQ ID NO: 570779 - DNA, 99 bp, Homo sapiens
tcacacaagtggtcagtttggttgtggaaagactcagcccaagtctccatgtccatcacctgggacactgtctgaggaactctgtgaggagagcctttt

SEQ ID NO: 570780 - DNA, 98 bp, Homo sapiens
ccaaaggagactttttctgggatgatggagaaactaaagataacaacgaacttgatgcaagtgataggtttgccaaggtcagacctctcatcatccgg

SEQ ID NO: 570781 - DNA, 100 bp, Homo sapiens
tcaagcgcatcggggacgaactggacagtaacatggagctgcagaggaggatgaaattttgaacagatcaccaagaaacagaaagccacgaagagagtga

SEQ ID NO: 570782 - DNA, 100 bp, Homo sapiens
gttcgcgtggtagcagaggagcttgagagtgcttgtgatttcacgtatttttgctgaactcgtaaaagagacacttggatggtggattaaccagaacact

SEQ ID NO: 570783 - DNA, 51 bp, Homo sapiens
ggacacccctgaagccgagaaatggttgaaatcacaaagattagacacctt

SEQ ID NO: 570784 - DNA, 100 bp, Homo sapiens
tggctgtcgtgaagacatctgcgtgtgcggggtgcgtgggtgcctggagatgaagctggaaaggttataccttattggtgtggacgttgtctaaatttcg

SEQ ID NO: 570785 - DNA, 75 bp, Homo sapiens
ttcaccagcaccggctccagtgggctctggttctgagcaaggttcaaccagtcaagaacaggccttatctgctca

SEQ ID NO: 570786 - DNA, 75 bp, Homo sapiens
attcgtcttattgctgcagtgaaaggagaagagaagtttacctttattgagaaatgtaacaaccctcgttctgtc

SEQ ID NO: 570787 - DNA, 80 bp, Homo sapiens
ctctaaagacggaaccgccacagcactcaagatgcactgcgcaactctggtggcgatgggctggggcagatgtccttgga

SEQ ID NO: 570788 - DNA, 82 bp, Homo sapiens
cctgcattgcttatccacacggtcaaaatgcagatcttcgtgaaaacccttaccggcaagaccatcacccttgaggtggagc

SEQ ID NO: 570789 - DNA, 97 bp, Homo sapiens
tcgatgcatttgagtgtatggtgtgcaccaaggtgtgggctaatatcaggcttcaggaaaagggagagtcccgtattctcagagtaaaagttgtttc

SEQ ID NO: 570790 - DNA, 50 bp, Homo sapiens
tcaggatcaacttgaacgaatatttctgatccatgttcactagcggcctt

SEQ ID NO: 570791 - DNA, 74 bp, Homo sapiens
ctcatatgtctcaggcttccatgcagcctgccttaccggcagccctgaagcagcttcctaggaacaaggtcccc

SEQ ID NO: 570792 - DNA, 76 bp, Homo sapiens
gggagctacagcgttgaacaaccacagctctattcccatggacccagatatgagagatagcacagatggaccaaag

SEQ ID NO: 570793 - DNA, 100 bp, Homo sapiens
tgcccaacttctctggcaactggaaaatcatccgatcggaaaacttcgaggaattgctcaaagtgctggatcatggaagggaagtggttgctgtgtatgt

SEQ ID NO: 570794 - DNA, 73 bp, Homo sapiens
tatactgggcacaatccatctggtggcaggttctgcggggagtgtctccagccctgcctgcaggtgccatccc

SEQ ID NO: 570795 - DNA, 90 bp, Homo sapiens
tagagagaaaaatcctggatctgtatgctttgagcaaggatttgcctcaaagggcactgcaaaaattgaacagaggaatcccaaggaagc

SEQ ID NO: 570796 - DNA, 89 bp, Homo sapiens
tgcagacatggcgcgtcttctggagcaatgggagcacactgatttatgtcagtacatggacaagcaccctggggggctgcatccagata

SEQ ID NO: 570797 - DNA, 48 bp, Homo sapiens
cacccattgtgtcttctcaagaagtacatagtggaatgtcatgggatc

SEQ ID NO: 570798 - DNA, 75 bp, Homo sapiens
tgctcttccaacaccagtggaagatgatcacatcccaggatcataaaaggattcctctgtactagcacactcccc

SEQ ID NO: 570799 - DNA, 90 bp, Homo sapiens
gacaccccggaagctgggaaatggaacctagaaagattgtacaatgaatggtgattctcgtgctgcggtggtgacctcaccacccccgac

SEQ ID NO: 570800 - DNA, 82 bp, Homo sapiens
gacaaaaagtttgtcattaaacccatcgacaagaaggcacctacttgctacatttgtgatgaacaaggaagagaaagcaaag

SEQ ID NO: 570801 - DNA, 90 bp, Homo sapiens
gccgtaggaacgggcctgtcgaagtgcgcctgacaggtgacagagctgaatgaacctctctccaatgaagatcgaaatctcctctctgtg

SEQ ID NO: 570802 - DNA, 101 bp, Homo sapiens
ccgggaactcagagtcaaagaagaaaccgtgctcagaaactagccagattgaagatggcaccgaaagcgaaggaagctcctgctcctcctaaagccgaagc

SEQ ID NO: 570803 - DNA, 80 bp, Homo sapiens
gaaccctggggactacgacgtccctcaaaccttgcttctaggagataaaaagggttgtgagtcccggcccagcccctcca

SEQ ID NO: 570804 - DNA, 98 bp, Homo sapiens
ccgagttctgctacttcctagtaagggacgtctctggagagattctgaggtgtttgagctctggcaggctgccctgagcacgctcaaccccaacccca

SEQ ID NO: 570805 - DNA, 75 bp, Homo sapiens
ggcgaaaggagctggtgcctgtgcaagttgttgagttttcagatgcttcaagtgttgtgaacagagacttgtttg

SEQ ID NO: 570806 - DNA, 100 bp, Homo sapiens
tggatttagtggacggcatctttttgaaccaaattatgctgcaaatgaacattatacatggcagtgattctgtggagagtgcagagaaggagatcggctt

SEQ ID NO: 570807 - DNA, 82 bp, Homo sapiens
ccaccagcgaccccagccggaagccgctggacagccgggtcctgaacgctgtgaaatgcctgtttaaagaagaaaacccgta

SEQ ID NO: 570808 - DNA, 100 bp, Homo sapiens
atcaagaaacaaatcttgaagcacctctccagattggctcacagtggttgattgatcaaccccattggacgttggttctgtggtacaaatggagtacagg

SEQ ID NO: 570809 - DNA, 75 bp, Homo sapiens
gattttacaagatcacaagatgttgatcagcttcgtgatatcaaagaggtgagcagggcagcatttccttctccc

SEQ ID NO: 570810 - DNA, 98 bp, Homo sapiens
acggatctggccaacaagacgcacccgtccatcttcgggatcttcgacgggcacgggggagaggaatgctgtctctgcaatttgagaggaggtgctct

SEQ ID NO: 570811 - DNA, 50 bp, Homo sapiens
gcccagtggcttccagatgtaaccaggtttctacgataaagacagttcag

SEQ ID NO: 570812 - DNA, 78 bp, Homo sapiens
acatttttgaaaagacaagccatcaaaactgccttcagaagcaaaaggaagaggatcacctagcccgggtagaagagg

SEQ ID NO: 570813 - DNA, 74 bp, Homo sapiens
gacagtttatcttgtccatgggtgctgttccctcgtcacaccaatgccagtgctcgagacaacaccatcaacct

SEQ ID NO: 570814 - DNA, 51 bp, Homo sapiens
ttctgtacagcctgcagaactagacagaacctcgcctgtttcctcacaaac

SEQ ID NO: 570815 - DNA, 75 bp, Homo sapiens
aatttagagccaaactgtccaaggctttggcagttgacctgacagttcaagaaaaggagaaatatcttaatgtgt

SEQ ID NO: 570816 - DNA, 75 bp, Homo sapiens
cccccgagaggaagctacagcgctacccttggtcatctataatttcctgagcctgtgctatgagtacctaggagg

SEQ ID NO: 570817 - DNA, 51 bp, Homo sapiens
atggctcaaagaaagatgattataactgataaatttcaaacggaagagagt

SEQ ID NO: 570818 - DNA, 87 bp, Homo sapiens
aactagtgcaaaagctggatacaatgtaaagcaggacaaccctccatatgataagggagccttcagaatcgaaatcaactttccagc

SEQ ID NO: 570819 - DNA, 111 bp, Homo sapiens
tgggggccagaagacaagagagacggcgaggcgcgctccctgcccggcagcgactcggagcaaatgaagctcgtgaccgagaacctgaaggaggaaccaatggaaagcggg

SEQ ID NO: 570820 - DNA, 100 bp, Homo sapiens
gcctgggagcttgctgcagcttcaggcctccggtgtggctgtctctgatggtgtcatcaaggtgttcaacgacatgaaggtgcgtaagtcttcaacgcca

SEQ ID NO: 570821 - DNA, 100 bp, Homo sapiens
ctaccatctaaaatacgaaggtttctggctggagtgggctccacctcaaccagaatatttctatcagcctaaaggaaatgaaaaggtaccagagattgta

SEQ ID NO: 570822 - DNA, 76 bp, Homo sapiens
ggtcaggaggatgatgaagaggaggacgaagaggaagaagcagcagcaggtcaatgagctgaaggagaaaggcaac

SEQ ID NO: 570823 - DNA, 75 bp, Homo sapiens
catcagattctgagctgctgcgggatattttgcagaagatgtgtcgtggaggccgaatgtttgcaccaaccaaaa

SEQ ID NO: 570824 - DNA, 101 bp, Homo sapiens
cacagaggaggaggcagcagaaccccatgtaataatagacgtggatggaatacaactagccagagatattccaatgtcatccagccatccagtttctccaa

SEQ ID NO: 570825 - DNA, 50 bp, Homo sapiens
cttttttcttgctgaaacattaaagagctgtttacttggagggaagcctg

SEQ ID NO: 570826 - DNA, 100 bp, Homo sapiens
gaagcagccaaggtgtttggccttcggagcaggaagctaaagctgtttctgaatgagacccaaacgcaggggaatctaagggaggaaattatcaactgtg

SEQ ID NO: 570827 - DNA, 75 bp, Homo sapiens
ctgagaaacatattgtgatgaagtggaggtttaaatcttggccagaggggaagaaggagaaagggccaacccctg

SEQ ID NO: 570828 - DNA, 51 bp, Homo sapiens
cccagttccaaagtgtcttaaagcttcttggacacttaatgattgttggca

SEQ ID NO: 570829 - DNA, 75 bp, Homo sapiens
cagcagcgagccattctaccttgtatcaaggaaacccttggaagatcagacccagctccttacccttgtctgcca

SEQ ID NO: 570830 - DNA, 90 bp, Homo sapiens
ctcggaactgcttgggaatcagtgacttgggtgtgctgggcatcaaggtgaagatcatgctgccctgggacccaactggtaagattggcc

SEQ ID NO: 570831 - DNA, 100 bp, Homo sapiens
acagttcttcttcagaggttacgagcaaagggaataaggaatccggatcattctagagctttaagatcttatggttggtgatgaggcaagtgaattacga

SEQ ID NO: 570832 - DNA, 82 bp, Homo sapiens
cccccttccccacgcaaccccagatccatttacactttacaccagatgaaaactcgctggatttttcctcctgtatgttacg

SEQ ID NO: 570833 - DNA, 100 bp, Homo sapiens
gatacatgtgcaggcttgttacctgggtatattgtgtgatgctgaggtttggggtgcgttgtagaagacaagaactcaaaggtggcctggttgaaccgtt

SEQ ID NO: 570834 - DNA, 75 bp, Homo sapiens
ccaaggtttgaaaagcagctggcctgcaagcagcaagatgaagagcgacgtcggcagctgagagagagagctcgt

SEQ ID NO: 570835 - DNA, 50 bp, Homo sapiens
gaagcgcggcgggcaggcgctacgagaagagaagctgaatttggacgaca

SEQ ID NO: 570836 - DNA, 82 bp, Homo sapiens
cgccgcggggcccaggccgggagccgaccggcacagcaggaacaagcacatcatgattgacttggggactggcaacaacaac

SEQ ID NO: 570837 - DNA, 100 bp, Homo sapiens
gactgcaccatgacttcctatggaggccctgtctgcaatgatcggcctgcggcctcaccatggacccagaatgcgcccagctgctcccggctctctgtgc

SEQ ID NO: 570838 - DNA, 82 bp, Homo sapiens
cagatcatctacgacgagaaccgggtgagaagccctaccactgcaactgggacggctgcggctggaagtttgcgcgctcaga

SEQ ID NO: 570839 - DNA, 49 bp, Homo sapiens
gaagcctttgaagaattaagagctccagggagttccacgctgtccagtt

SEQ ID NO: 570840 - DNA, 100 bp, Homo sapiens
gagactcgaggaaatttaagaccatttatatgttcaactgatgaaaacactggtcctcagaatggttggaatgaccctccagctttgaacagagtaccca

SEQ ID NO: 570841 - DNA, 100 bp, Homo sapiens
acgcagaacgtcaacaccaagtgcatcaccatccccaggatggctaaaggtgaccccaagaaaccaaagggcaagatgtccgcttatgccttctttgtgc

SEQ ID NO: 570842 - DNA, 98 bp, Homo sapiens
tttccgcagacagaagtggggagaagcggaggaatactcccccagttgcaagaggcgcaggaccgtggaagacttcaacaaattctgcacctttgtct

SEQ ID NO: 570843 - DNA, 100 bp, Homo sapiens
cccgtaaagtggttggttgcagttgtgtagtagttaagatagtcatttttacttgaaggaagctgcttctacttgggagtggcaggagaagtgagaaaac

SEQ ID NO: 570844 - DNA, 95 bp, Homo sapiens
gccaagacagaatgtttgagacaatggcgattgagattgaacaacttttggcaagggtctttgtgcatcatgatgcagctagttctgtggtgata

SEQ ID NO: 570845 - DNA, 114 bp, Homo sapiens
ggaggtgtcagtgttaaaggaacctctacaacgaaggtgaagccacggaagataaggttttgacctgtagcagagaaccaattctggagaacagcctcacttctttgattgaat

SEQ ID NO: 570846 - DNA, 75 bp, Homo sapiens
gcgaatttaaagctcatgaaaacagcatgaatacaactttgtctgagagccccttcaagtgtgatcctgatgctg

SEQ ID NO: 570847 - DNA, 122 bp, Homo sapiens
aggaggagacaacttactaccaaacagcacttcctggcaatgatagatacatcagtgtgggaagccaagcagatacaaaacactgatatttgcatttaatggggaacaaaagatgaagaagg

SEQ ID NO: 570848 - DNA, 75 bp, Homo sapiens
agtctctccggcaggcagtcacaagcagcagaacttcgggttttcctcctaagatatatgacatctcaaatgata

SEQ ID NO: 570849 - DNA, 100 bp, Homo sapiens
ccccccaggcaacccacccctgattggacagtctcatcaagaaggccctttctggttactgtggctttatggcagccaacctttatgctcgttccatatt

SEQ ID NO: 570850 - DNA, 75 bp, Homo sapiens
gccagggaaccctggtcaccgtctcctcaggtgtggtatctgtgcgctttgaagaagatgaagacaggaacttgt

SEQ ID NO: 570851 - DNA, 83 bp, Homo sapiens
agagtcgaattggagaacttgttggagtgctggtgaatcatttcaagaggctttctgtgaagaattggaatcaatgatacagg

SEQ ID NO: 570852 - DNA, 100 bp, Homo sapiens
tgtgtacgagattccggttgagtaccaaacagtccagagactcatccccgccctgtgggagaagcacagtccacagtaagaagactgttagaatgccctc

SEQ ID NO: 570853 - DNA, 75 bp, Homo sapiens
tcagcagtgtgctacagtttttagatgatgcagaacttactcttggaagaaggcggcctggtccaggtggagagc

SEQ ID NO: 570854 - DNA, 101 bp, Homo sapiens
tgaatcccctgtttgagaaaaggcctaagaattttggcattggcaacacccaggacacctactgtgtgaaagaatactagaagatcttcctattcaaggac

SEQ ID NO: 570855 - DNA, 82 bp, Homo sapiens
cacagtattcgacatcaaatacagagtgcctggtgaagaatgtgatgggatcactagcatgtctgcggagagcggccctggg

SEQ ID NO: 570856 - DNA, 97 bp, Homo sapiens
ggagcagaagggaggctccaagacctcatcaacaattaaggttggtgttcgaggaagagacattgttgttcttggtgtggagaagaagtcagtggcc

SEQ ID NO: 570857 - DNA, 90 bp, Homo sapiens
gcaaaagttgcagtcatacaagatctctcctggagggataagccagtttgcaatggattttggataaacaagatctgttgaaggagcgcc

SEQ ID NO: 570858 - DNA, 82 bp, Homo sapiens
gccctcgctgtcatcctcattgctactgccctctgcgctcctgcatctgcctccccataccaagatcactccatggatgaaa

SEQ ID NO: 570859 - DNA, 82 bp, Homo sapiens
aacatgcaatgaacccaaaagggctagcatcccattctctgtggttggatccaatcagttgattgaagccaaaggaaagaag

SEQ ID NO: 570860 - DNA, 100 bp, Homo sapiens
taatgtttgaacactacaacatccctgccttcttcctttgcaaaactgcagttttgacagctgtggcgggcgtgtttgtgtgcctgctggagtacccccg

SEQ ID NO: 570861 - DNA, 95 bp, Homo sapiens
aacgggtccatctgatgaatcctatggttccaggattaacaggcagcaaaatgagctcttcagaagagaactgataaatttcaaacggaagagag

SEQ ID NO: 570862 - DNA, 100 bp, Homo sapiens
tgggagatccacagctaagactccaggaccctctggaagcctagaaatggccttgaaccggggcattgctgctgtcaaggaggatgcagtcgagatgctg

SEQ ID NO: 570863 - DNA, 51 bp, Homo sapiens
gaagccatcacgtacatagtcaacaaagggttaccatccattgacccatca

SEQ ID NO: 570864 - DNA, 98 bp, Homo sapiens
tcttaacccctagaccggtttttagtccattgactatgcagcctaatggtccttttggaataaatcatgggattgagcttcattcagatgtggtggaa

SEQ ID NO: 570865 - DNA, 83 bp, Homo sapiens
ggcctccctcaccttggacacctcgcttggacggccgaagccctgcagcccacgctacagccggagatgcagctcgagcacgg

SEQ ID NO: 570866 - DNA, 100 bp, Homo sapiens
ctcctccgggggacccgcggtccccaccgtgcagcggggcatcatcaagatgcacttctcagaacttctggatgagttttcccagaacgtcttgggtcag

SEQ ID NO: 570867 - DNA, 97 bp, Homo sapiens
accgaattcagaaggatatcgacgtcgtgatccagaagtccagagctgaggactgcctgtttgcagcacatgattaagtaccggtacatcccgttca

SEQ ID NO: 570868 - DNA, 80 bp, Homo sapiens
caccgacctcgacgtcttgcctgtgtcccacttgttcgcggcctatagggtgaatcctggttctttcgttggctacctgg

SEQ ID NO: 570869 - DNA, 82 bp, Homo sapiens
cgcgccagcaagaagatcctgctgcccgagcccaggtgatcaatgttgatgggacgaagaggcggaccctcctggaggacaa

SEQ ID NO: 570870 - DNA, 98 bp, Homo sapiens
gcaccaacacattttctggtgatacccaagaaacatatatcccagatttctgtggcagaagatgatgatgaaagtgctggagtgcaatggcgcgatct

SEQ ID NO: 570871 - DNA, 100 bp, Homo sapiens
gcttattttcccttcctttttaggccatgatttctggagagcttgacattctcaaagactggtgctatgaagctgaatggaagttggatacactttgtga

SEQ ID NO: 570872 - DNA, 100 bp, Homo sapiens
tcttttgagaaggtggggtgccaggtgaaggctgttcggctcttgaatcccagcgatgaaaccaggaactcactttcccgggatgccgagtctccattcc

SEQ ID NO: 570873 - DNA, 100 bp, Homo sapiens
ctggaacttgtgattgagcagtttgaagacttgctagttaggattttattactggcagcatgtatatcttttagtggagactgctgcacggactctggaa

SEQ ID NO: 570874 - DNA, 101 bp, Homo sapiens
gctgaggaaccatgtctccatccccgaccgccctcttctgtcttgggctgaagaagatgcagagcagcctgaagctggtggactgtatcatcgaggtccac

SEQ ID NO: 570875 - DNA, 82 bp, Homo sapiens
tttggatgtgggatccggttccttggtgtcatccagccttagcaaaccagagcaaagttctcatatagatgtggttcgtttt

SEQ ID NO: 570876 - DNA, 100 bp, Homo sapiens
atgtcatctcgtccttcacagagctcaaggcatatgacctgctctccaaggcctcggtgcagtttgtggaatcgtgttcgacgagtgtcacaaagccaag

SEQ ID NO: 570877 - DNA, 82 bp, Homo sapiens
cgctggcagccgcggatctcaccgccgctcaggtgaataaccctataccttccaatttgaaatcagaagcaaaaaaggctgc

SEQ ID NO: 570878 - DNA, 100 bp, Homo sapiens
gaaagcaggcgaacccgcggcgcaataacgatgctaatcctgaggtgacgatgacaatgcttcgctggatctatacagatgagctggagttcagagagga

SEQ ID NO: 570879 - DNA, 83 bp, Homo sapiens
ccgagtgcagaagatctgggtgcccgtggaccacaggccctcgttgcccagatgtgagcgagtgctgtgctttcatgggcctc

SEQ ID NO: 570880 - DNA, 100 bp, Homo sapiens
gaggctttcaacatgattgaccagaaccgtgatggcttcattgacaaggaggacctgcacgacatgctggcctcgctggagaatctcgatgctggcctgg

SEQ ID NO: 570881 - DNA, 94 bp, Homo sapiens
aaacacaccagtctttcgagatgatgtttgctttttccttagtcaatcaggtgtgaggacttctgcatcttacagtcagcacagaacacactga

SEQ ID NO: 570882 - DNA, 100 bp, Homo sapiens
cacttactccaaaatgagtctacagttataccaagtggatagtagaacttatctactggatttccgtagtattgatgttggttggcagagaatttgaact

SEQ ID NO: 570883 - DNA, 75 bp, Homo sapiens
caccagtgttccagatgcttctgactaagctcccaacaattagtcaggtcctggatgcctcatcccttagtttca

SEQ ID NO: 570884 - DNA, 102 bp, Homo sapiens
gaccgagagcgcgaatatcgtcatcgttagaaggttcggctttccagtttggcagcagcactacaaatttcaacttcacaaacaacagtccatcaggagtgt

SEQ ID NO: 570885 - DNA, 90 bp, Homo sapiens
ggacgccactacagttcatcaacatcaactacgtccctctgaagggaatgggtactgttcaaaaaggaatgccccacaagtgttaccatg

SEQ ID NO: 570886 - DNA, 51 bp, Homo sapiens
cgaggaacgagagcgcgaagctaagctttggggccatttggatcacacgat

SEQ ID NO: 570887 - DNA, 100 bp, Homo sapiens
caccctcagctcccagtcctacagacacagcgtggagattggtgaaagcgtgagaggggaagatgtctacatcatccagagcggctgcggggaaattaac

SEQ ID NO: 570888 - DNA, 101 bp, Homo sapiens
gcacgagctgcagcaccacttccgggcccaggaagtacacgagaagctccgaggatggctgaagtccaacgtctctgatgcggtggctcagagcacccgta

SEQ ID NO: 570889 - DNA, 100 bp, Homo sapiens
gggctggattcactaactgaacttaacttgcgacacaatcaaatcactttcgtgcatgcagcagattggaataaatatgatgaccgattgatgaaagcag

SEQ ID NO: 570890 - DNA, 76 bp, Homo sapiens
agtggcgtttggaggagactcgtctttcccataaaggtaatgaattttggggcactacacaaacactgaatgttaa

SEQ ID NO: 570891 - DNA, 100 bp, Homo sapiens
agaaaagagatatgaatgaagtggaaactcaattcaagatcactttcaggaaagatcaccttgaggcctgcctcctttccctgggttgtgatgtgatggc

SEQ ID NO: 570892 - DNA, 50 bp, Homo sapiens
gccgggcccggcttcccagcctgacgtattctaccttgtaaatactgtta

SEQ ID NO: 570893 - DNA, 75 bp, Homo sapiens
ggccgagcaggaggcgccatcatgttagagatgtttatgattacttccgagctgtcctgcagcgtgatgaaagaa

SEQ ID NO: 570894 - DNA, 75 bp, Homo sapiens
attctgttcagaaggaagccgaattttaagtcatcgttctaggataggaaaaatgccagctgtgggacaaggagt

SEQ ID NO: 570895 - DNA, 90 bp, Homo sapiens
agattctggagatgaccaacaagttcatgaccgacccaatccgcatcttggtgaaacgattgctggactcgctgaagagagactacgcag

SEQ ID NO: 570896 - DNA, 74 bp, Homo sapiens
caagtgccatcctctttacaggtgaaacaaagagtcctcttcgtggaaaagaaaaaaatacgctccctttaaac

SEQ ID NO: 570897 - DNA, 75 bp, Homo sapiens
caacaggcacgacaagtttctggacactctccgagaggtgaagaagtctcaggggatccagaactgcagccagtc

SEQ ID NO: 570898 - DNA, 76 bp, Homo sapiens
cacccagcagagcccgttcatggttgatctccacgagcagcgagaaattaggcaacagctagcagaaaaagctaaa

SEQ ID NO: 570899 - DNA, 95 bp, Homo sapiens
gtcctgcctcaccaaggctggctcctcaagaaagaagaacccagcgggtgccgcttctccacccgaggcttccacctccaacgagccatgttcca

SEQ ID NO: 570900 - DNA, 100 bp, Homo sapiens
cccgcccttagcggcccggcgttgaattccgggaagtgggagcttcaggctcgctccgtgcggaatccaactcaagtcggaacagctcttcaggttttct

SEQ ID NO: 570901 - DNA, 51 bp, Homo sapiens
gggggagaggagccccttactgtcccagatcccagcatggtgagtgcctac

SEQ ID NO: 570902 - DNA, 100 bp, Homo sapiens
gtcacttacatgtcccaggtcctgattcagtgtgccggaagtgaggtagcaaattatggagttggaggacagtatgaaccccattttgactttgcacggg

SEQ ID NO: 570903 - DNA, 100 bp, Homo sapiens
gcagacatctccaactgtgggaactctttccagcttgtgtctgtttggcctgtcactgctcctcatcctcctgagccgtggtgaagacctacagagttca

SEQ ID NO: 570904 - DNA, 100 bp, Homo sapiens
gatctcttcagaggggtgaagatcttcagtttgatcaggagatctattgggaaactgattataaccactcgggcaccatcgatgcccacgagatgaggac

SEQ ID NO: 570905 - DNA, 100 bp, Homo sapiens
gtggctgctgggtttgaacggaatgctggagtcagtggaagacggagctggtcggcccgaagatgaaggatttgggggcagagcacttggcaggtcatga

SEQ ID NO: 570906 - DNA, 74 bp, Homo sapiens
cttttgcagaaagaggagcgttagttgttgtttcttcactagttgaagaaggagaaaaacagaacaaacgtttt

SEQ ID NO: 570907 - DNA, 75 bp, Homo sapiens
ggaaaagatccctggaatatgaagagacacagtatggtagccacacccccagcactgccagtgaaagatgtagaa

SEQ ID NO: 570908 - DNA, 98 bp, Homo sapiens
atcacacaaaatgtgctggttgatggtgttaagaaactctcagtttgtgtttctgagaaagtgtccatctatggaatttggttttatgataaggaaga

SEQ ID NO: 570909 - DNA, 95 bp, Homo sapiens
cccaacctcatgaatctcatcgccaccatctttgtctttgcagtggtcatctatttccaggccgctacctgtctgaggaacccgagccctacctg

SEQ ID NO: 570910 - DNA, 96 bp, Homo sapiens
tcgagcatcggcagctccggaggccggggtaactggcaggaaactgttaaggcagcaataatagaagagcagaaacgaagtgaaaaggctgtggaa

SEQ ID NO: 570911 - DNA, 142 bp, Homo sapiens
cagggtccgggctccgtcggtgcgaggagccgacgccgacgccacggagtcagcacaagtctcatcaggtgatggttggattcataatgtcacaacaaattgttggaaacaacttacacatttacctaaaacaagacctagg

SEQ ID NO: 570912 - DNA, 100 bp, Homo sapiens
tgaaggaggactgtaacaacactgagaacaaagaacggaagtccttccagaaggagcttgtgatgatgatgataattccgaagaaggcttccacactatt

SEQ ID NO: 570913 - DNA, 80 bp, Homo sapiens
cttggagttgctgaagggactccgagcacttggtgaaatgacaatggatgctctgttggctcgattgaaacttctgaatc

SEQ ID NO: 570914 - DNA, 90 bp, Homo sapiens
tctagcttcaccttcacgatgtttcccttggtcaaaagcgcactaaatcgtctccaaggaataaagggattcattcctcattttaactga

SEQ ID NO: 570915 - DNA, 100 bp, Homo sapiens
aggagaagaaatagatgcaatggatgttcagcagctttcacaaatagtaccaaagtcacccacaaaagctgtatataatgccagacattggaatcatcca

SEQ ID NO: 570916 - DNA, 50 bp, Homo sapiens
gccatgtccgggagaagacagtcaccgacgatgagggcgcacctgctgtc

SEQ ID NO: 570917 - DNA, 100 bp, Homo sapiens
tggcagacccgtagctaagacgccaggatttcctggaagcagagaaatgtgtcgtgtgggagccaatgggagatgggaagaaaatcatttccttggctga

SEQ ID NO: 570918 - DNA, 75 bp, Homo sapiens
cattgtaagaggtgacaacgtgaaatgcttccagactgcacacttttacttagaggacagtacatcccctagagt

SEQ ID NO: 570919 - DNA, 89 bp, Homo sapiens
caaactgctcatacagaattacgcatttccacttctaatgggaccgtttggagggagccattcacctacaggagcaggacatggagaac

SEQ ID NO: 570920 - DNA, 90 bp, Homo sapiens
ccagcgctgtgggattggtgaccattgtggaatgctgtcctgtcctcctggggccaccacttttaggtcagtcttcactgtttccaatgg

SEQ ID NO: 570921 - DNA, 75 bp, Homo sapiens
gggttattcacttgcttcacttttggctaaagttgcagcaggcaaggagatttcgcagtggatgtttactcacat

SEQ ID NO: 570922 - DNA, 50 bp, Homo sapiens
cagagcccggagaaaagccacatggtttacccaaggtccagcctagcccc

SEQ ID NO: 570923 - DNA, 101 bp, Homo sapiens
ctgatcatcaagccagacaacttctggcagaaacagaggactaattttggcagttctaaatttgaatttgagataggagcatgctgctatgtggaatgttc

SEQ ID NO: 570924 - DNA, 50 bp, Homo sapiens
caacagcctggcgtccgccacgtcatgcggaggaatccctttggtgtgga

SEQ ID NO: 570925 - DNA, 96 bp, Homo sapiens
gtttattcaccatcaacaaagaagaccacacactgggaaacatcattaaatcggccgacgagattgaaatgatcatgacggaccttgaaagggcaa

SEQ ID NO: 570926 - DNA, 101 bp, Homo sapiens
aggagctgctgctgaaacagctggctgagggacgacaggctcaggttggcagttggaagtctctgaaattctgaaatagccctctaacatcagaagaaaag

SEQ ID NO: 570927 - DNA, 83 bp, Homo sapiens
ccagctcatctgtgtgctggccatcatcgtacccattcccaagtcccacgaggcggtttttagaacttcagccataaaaatgg

SEQ ID NO: 570928 - DNA, 75 bp, Homo sapiens
atctctccccaggcttcaacttcagaacctcaagaaggcatgaagccagcccctgcagtgccgtccacccgcccc

SEQ ID NO: 570929 - DNA, 101 bp, Homo sapiens
tcacagaagccgacaaggcgttcaagcgaaaacatgaccgctgagcccatgaggtaagaagcgcaattccacactctacataaccatgttactcattgttc

SEQ ID NO: 570930 - DNA, 100 bp, Homo sapiens
ggaagacggagctggtcggcccgaaggcacaaatcctgaagagcccgtgggcgtggactgctcatctgtaaagaaagtggagacatgaccttgagatttg

SEQ ID NO: 570931 - DNA, 75 bp, Homo sapiens
aactcgcgggtcctcgtggatcagactacagcaaacggggattcagcgtccgatcctttggaacagggactcacg

SEQ ID NO: 570932 - DNA, 50 bp, Homo sapiens
acaagattgaccacattgatcacaatttggagcaagaggtggtggtggcc

SEQ ID NO: 570933 - DNA, 83 bp, Homo sapiens
cagaaaatcgtcttatagttgagaatttatcctcaagagtcagctggcaggccaggcacctcattgagaagtcagtgcgtaag

SEQ ID NO: 570934 - DNA, 111 bp, Homo sapiens
tccggggcttgccctggtcttgctcggccgatgaagtgcagaggtttttttctggttcaaaccttgtactactcagctgatcacaagctgcttgatgggaacctactagat

SEQ ID NO: 570935 - DNA, 100 bp, Homo sapiens
agaaggactgggggcatctgaagcagtggccgacatcaagttttcctctgcaggggatggcattcctactgtatttgtggcagtggcaggcagaagtaat

SEQ ID NO: 570936 - DNA, 90 bp, Homo sapiens
gtgccaccgtggaaggacagaatgtcaccaggagactaaagtccatcaaaaacatccagaaaattaccaagtctatgaaaatggtagcgg

SEQ ID NO: 570937 - DNA, 100 bp, Homo sapiens
tgcggacactgagctcacccacagagcccgtgaagagcatgggcctcctacatgaccaactccccgactctgatcgttatgattggtttgccagcccggg

SEQ ID NO: 570938 - DNA, 74 bp, Homo sapiens
gagagaaaggggtgcgcatcaaggagaatggcaacatcacagagctcctcctgaaggaaggtttcgcacgctgt

SEQ ID NO: 570939 - DNA, 100 bp, Homo sapiens
cagcatgcggaaggcattgctgggagcctgaaaactgtgaatgatccacatcttcatttgaatattgaggaatcaaaccaagagtttatggtgaaaagtg

SEQ ID NO: 570940 - DNA, 83 bp, Homo sapiens
gaggcgaaggagcggccgggagcccgccgcgctggtagcggaaggtgggagtcaatcattttgacaagtctcctgaaaggaac

SEQ ID NO: 570941 - DNA, 100 bp, Homo sapiens
ttaccgaattgttcctgaggaagagcaaaaattgtatcgcattaagttcaaggagagctttgctgagatgaacaggggctcgaacgagtggaagacggtt

SEQ ID NO: 570942 - DNA, 97 bp, Homo sapiens
tcgttgctgtaattgaacgggtcgagatgccgactctgtagatggacggcagatccgagtagaccaggcaggcaagtcgtcagacaaccgatcccgt

SEQ ID NO: 570943 - DNA, 100 bp, Homo sapiens
gagaaggatgatggtgaagctaaagaaatttctacacctacccattggtctaaacttgatccaaagacaatgaaggttcgaatgaaatccatgtttgcta

SEQ ID NO: 570944 - DNA, 51 bp, Homo sapiens
gcgatctcttctgaggatccggcaagatggagttaaagttcctcgtaattt

SEQ ID NO: 570945 - DNA, 51 bp, Homo sapiens
agcagccttcagggagcgtggagacagtgaggagaatgaataccttccaag

SEQ ID NO: 570946 - DNA, 73 bp, Homo sapiens
ctcaactgatgaatttaaagatgtttctgcaacagaaccacagcaatggtggaacaaagcggcaaaagatatc

SEQ ID NO: 570947 - DNA, 98 bp, Homo sapiens
cggacggcgtcctcagctatcagcttcagtatcagacacagcacagcagccatctgaagagcaaagcaagtctcttgaaaaaccgaaacaaaaaaaga

SEQ ID NO: 570948 - DNA, 95 bp, Homo sapiens
gcagaaagtacgaatctgctctgagggcggatgggacaggcgacactaacaggtgaagatctcgggagaccatgactaagaaaagaattgctgtg

SEQ ID NO: 570949 - DNA, 100 bp, Homo sapiens
ggatcgctgtgatcgtcacttgatatggctcgtggacagcagaaaattcagtctcagcagaaaaatgccaaaaagcaagctggacaaaagaagaaacaag

SEQ ID NO: 570950 - DNA, 99 bp, Homo sapiens
aacgttgctggtgacagcaaaaatgacccaccaatggaagcagctggcttcactgctcagccttttttagcaaaacttcagtctccgattaaagaggag

SEQ ID NO: 570951 - DNA, 75 bp, Homo sapiens
agtctggaaaactgggccaaagcagtgaaacgctccatgaattggttggtttgacttccacaaatgcagaagtaa

SEQ ID NO: 570952 - DNA, 100 bp, Homo sapiens
agacaggctgtcttcactgccaaggttgattcttcaccacactgaaaccattaggaaaaatccttgtggttaacagcagaggcttcagagtgtaacctgt

SEQ ID NO: 570953 - DNA, 114 bp, Homo sapiens
ggacagctgtccctccactacagaaacctcacagaacacagcaaaggcattgtatgagaggaaatttccagttccaaagccaattgattacaatcgtcatgcagtggtcatgga

SEQ ID NO: 570954 - DNA, 101 bp, Homo sapiens
gaccataagggcttaactcatatatttaacccccctccaaaaaacgtaaaattcatcctgatcagaaaaatattaatgcctatgttgtgtttaaggaggag

SEQ ID NO: 570955 - DNA, 96 bp, Homo sapiens
tgcgcgtgcgcctgggggcaccgctgccgttccgaggaatactcccccagttgcaagaggcgcaggaccgtggaagacttcaacaaattctgcacc

SEQ ID NO: 570956 - DNA, 100 bp, Homo sapiens
ttgttactcttcagtacaatgtcaccctcccagcaacaggttatcaatagtctggctgtctatcgtcatcgtgagactgactttggtgtaggagttcgag

SEQ ID NO: 570957 - DNA, 50 bp, Homo sapiens
cggaagaggaaagaaccaatccatccatcggctagccttgatgtaccgaa

SEQ ID NO: 570958 - DNA, 100 bp, Homo sapiens
cgcgagtgaggaaaggaggtactgtaggatttatggttggtagagagtatgaagctgaaggaattgccaaggatggtgccaagatggtggccgctgtggc

SEQ ID NO: 570959 - DNA, 88 bp, Homo sapiens
ctgctggtgaccagaagcctgcatttctgcattctgcttaattccctttccttaggaagctgccacttttgctagagagcaaggcttt

SEQ ID NO: 570960 - DNA, 100 bp, Homo sapiens
cctggccctcatgtacgagtccgagaaggttggggtcgcctcttccgaggtttgtgaaatggctgctgacatttctgaatccagcggggctgactgcaaa

SEQ ID NO: 570961 - DNA, 100 bp, Homo sapiens
gttccgctcccagtgcctgcaggtgccagagagagaggcgcaggacgctcaggaatttggagtagtttcaaatacaagattgattgctgctgctacttct

SEQ ID NO: 570962 - DNA, 74 bp, Homo sapiens
ggaaaccgcaaccgagggaaccgaggcagcggaggtggtggtggaggtggagtggggatggctataatggattt

SEQ ID NO: 570963 - DNA, 85 bp, Homo sapiens
catgactcaggacgcccagaatgccttgagaagaggtggccacgtcttttattagaacaatagagcttggagggaaaggatatgc

SEQ ID NO: 570964 - DNA, 107 bp, Homo sapiens
aatcagcgagactccgtgggcgtaggaccctccgagccaggaactccttcacagacatccttcgtgccatcctgctgtcattggaagtcctaatcgaagatccggag

SEQ ID NO: 570965 - DNA, 74 bp, Homo sapiens
ggacgggtacgcgcggctggtgcagcaaaccatcctgtgttaccaggggtgacagtccaaagattgacttggcc

SEQ ID NO: 570966 - DNA, 51 bp, Homo sapiens
ggccaacttcctgcttgtcaacagcataagcagtactataatggatgtaga

SEQ ID NO: 570967 - DNA, 74 bp, Homo sapiens
acagaaggtatccaggaccgctagctcagcaggcacagcgttttaggtctgtttatgatggtgaagaacatgga

SEQ ID NO: 570968 - DNA, 100 bp, Homo sapiens
gaacatctgggagaatatttaatggaaaatcgcttggttaaaacctgacacttttaacaggtgatggcatcagctgagaagggaaggaagcccatgtgag

SEQ ID NO: 570969 - DNA, 101 bp, Homo sapiens
gaagaaaaacggggactatggggagaaaaaagattcagattacgaggattatggatgaacgtaacagacaggcatttaaacttccctcttagaactgcttt

SEQ ID NO: 570970 - DNA, 100 bp, Homo sapiens
ttgtgacaagaaaagctgtggcaaccgaaatgagactccctcagatccagtgataattgacaggaacactgagactccgttcctgcttgtcttgtcctac

SEQ ID NO: 570971 - DNA, 101 bp, Homo sapiens
cacaggtccagggcagaggaccaacatgggcattttgtttatgagcaaggttgacttctggcattccgatcagtgcaacatgatcaatggaacttctgggc

SEQ ID NO: 570972 - DNA, 101 bp, Homo sapiens
gaggagcgaggcagctgtactaggactgggaacggtgccggtggtggtgtgcacattgagccccggtatagacagttcccccagctgaccagatcccaggt

SEQ ID NO: 570973 - DNA, 73 bp, Homo sapiens
gattttgaaccttacttgagtccacaggcaaggcccaccaatgatgcgagctcagagtcaatagcatccttct

SEQ ID NO: 570974 - DNA, 75 bp, Homo sapiens
cagaaactcccagtttgcaggaggaccattaggaaatccaaatgagaaagatcagtctaaagaaaaggagaagaa

SEQ ID NO: 570975 - DNA, 76 bp, Homo sapiens
cagagttagagagagggatggtgaaccttctgaggaaaggaggccatacagaaattgaacctcagcacttctgtca

SEQ ID NO: 570976 - DNA, 75 bp, Homo sapiens
actggcgggcctcaaagagctttaggacatgctccaaagaagagcggagtttaagagagctgtgaaagtagcaac

SEQ ID NO: 570977 - DNA, 102 bp, Homo sapiens
cacacttatagatcttctgcactgtttacaggcacagctgttcgggggtcttgtctggattttggttgcctcctccaatgttcctctacctctactacaagg

SEQ ID NO: 570978 - DNA, 100 bp, Homo sapiens
gcgcctggcagggcagccagctggccaggggggcccgtctgggccagccacctggtgtccgcatccctaggccaacacccccaggattacacagtggaga

SEQ ID NO: 570979 - DNA, 86 bp, Homo sapiens
accaggagctcctccaccaggccaaagacttcggcatgtgagccactgccccatgttgtgttgatgccaatctgccatgctagcct

SEQ ID NO: 570980 - DNA, 83 bp, Homo sapiens
gcagacttctaactggaacgcctggctcttggacaaggtttactcctggcttgggggcattaggaagcactggaggctcttcg

SEQ ID NO: 570981 - DNA, 75 bp, Homo sapiens
aggccgggatggcctccatccttgccaccgcagtgatcaacaggctggaccccaatggagaacaggtggtgtggc

SEQ ID NO: 570982 - DNA, 100 bp, Homo sapiens
tctgctggcctttcatttggtggaggagccggaaagtattaataggggaccctattaccacatgtctttctccctcagtgtatgatataatttgtaatct

SEQ ID NO: 570983 - DNA, 50 bp, Homo sapiens
tgggaaacaaggcttccagtgccaagagggtgtttgtgagatatggttga

SEQ ID NO: 570984 - DNA, 101 bp, Homo sapiens
aaactctgaagccgaccagttgggcaaaatctttgaagctgtaggtaaaacttgcctactgatcagttacacaaccaatgcatttcctggagaatatatcc

SEQ ID NO: 570985 - DNA, 105 bp, Homo sapiens
cgaggagaagcgcagcgacggcgtcgggagagcgcgcctagccggctcgcgaggggatatgagactttctactcggaatatcctgagtgttgcgtggatgtaaaa

SEQ ID NO: 570986 - DNA, 82 bp, Homo sapiens
aggattccaagtaactcttatttgttgacgaaggatcagagattggtgtattcgggcagactgcttcccgatcatctgcagc

SEQ ID NO: 570987 - DNA, 90 bp, Homo sapiens
tgtttctcatctttatactcttccaggtgtgcctaccgcatgttgccgctgctgtttctgctgggacgtctgactccagttccttctccc

SEQ ID NO: 570988 - DNA, 75 bp, Homo sapiens
gccgccatgggggcctgcctgggagcctgctccctgctcagctgcgtgatcgaggagttctacaaccagacatgg

SEQ ID NO: 570989 - DNA, 82 bp, Homo sapiens
cgcccatggtggcaatgacgtaaggaaataatgcaaaaggtgtcccaaggctcctgaccagtgaacaaagatttgagaaaga

SEQ ID NO: 570990 - DNA, 97 bp, Homo sapiens
ccaagaggaggacagttcgctacacagcaatgcatcgaggtctatcagccacagtctctgcaagtttccaagagcagcagaaaatgaacacattgca

SEQ ID NO: 570991 - DNA, 90 bp, Homo sapiens
gacctgacccaaccactgtctacgtggacatgagagccctgagacacgacaggaaaatgtttataggaggccttagctgggacactacaa

SEQ ID NO: 570992 - DNA, 100 bp, Homo sapiens
ccagggcaccagttcgacgcgctttttgggttcatcaccagcagccagtcggcagcttatgctatcagcaagtttgtcagtggggtgctgtctgaccaga

SEQ ID NO: 570993 - DNA, 74 bp, Homo sapiens
gccatcccgtcaagctccatccctttgggcagacagcccatggcacagccgctgtacaaccagccctccgacac

SEQ ID NO: 570994 - DNA, 73 bp, Homo sapiens
gaagctgcaaatgaagcattacttactaaacctaataaggatgttgtggaacaaatggaaaaatggtaagagt

SEQ ID NO: 570995 - DNA, 90 bp, Homo sapiens
aggacagcggcaccgccagacggccagaaagttccgccatgagctggggcacggagctgtggaaaattcttgctgctgtattgagaacag

SEQ ID NO: 570996 - DNA, 100 bp, Homo sapiens
tcggagttttgccattgccagtgggacgtctgagactttctccttcaagtacttggcagatcactctcttagcagttttcggctttgtgagaaaccttac

SEQ ID NO: 570997 - DNA, 51 bp, Homo sapiens
attccagttaccgtccatctcaaaagattgccaccaaggagccaatgaatc

SEQ ID NO: 570998 - DNA, 99 bp, Homo sapiens
aaaggaacctgaagaattttcaaaggaacgtcaaggtcgtgggaaataaaaggcagttctacacagactgcagcaacggttgcatctgcatatcctaag

SEQ ID NO: 570999 - DNA, 90 bp, Homo sapiens
gcagatgtgaataaaactgaccatagccagagaacagccctccatcttgcagcccagaagggaaatttgtgcacagagataacacagggg

SEQ ID NO: 571000 - DNA, 100 bp, Homo sapiens
cactgagctgacagggttaaaagatggagaaacaaaggcagcgctgccctcgggggagcattggccctggcggaacgcagcagccgcgaaggatccagcc

SEQ ID NO: 571001 - DNA, 100 bp, Homo sapiens
ccgagacgcagctgccgcgccggggcctgagctgccgcctcctccgccgcccgaaaacccggagtgccccgcacaggtgagccctattcccagaggcagg

SEQ ID NO: 571002 - DNA, 75 bp, Homo sapiens
gactccggcgctcgccatggccgacgaaaagcccaagataccggggagaccacgacgctgcctcctgggcgccat

SEQ ID NO: 571003 - DNA, 80 bp, Homo sapiens
ggatttctggaaggttctttgtctctgactgtgtgagacaatgcagatcttcgtgaagactctgactggtaagaccatca

SEQ ID NO: 571004 - DNA, 82 bp, Homo sapiens
cactttcgccagcccgtgccgcgagcgcggcctgcaggaggtcctcgagtacgactactacggggcttacgggagccgcgcg

SEQ ID NO: 571005 - DNA, 75 bp, Homo sapiens
gctggaaaaagtgaatttcgtaaccagaagccgaagccggagaaccaagacaaatttacatgtattggagaccag

SEQ ID NO: 571006 - DNA, 51 bp, Homo sapiens
acttcaacagaatgtggcaaccagtcactgtatatatgccttatttcctgg

SEQ ID NO: 571007 - DNA, 80 bp, Homo sapiens
gtcctccacagggcgacggcggcaggagctcgggaaccgggactgcgagcgggtatcgagaaccttccctgcgaacttca

SEQ ID NO: 571008 - DNA, 90 bp, Homo sapiens
accgtctcctgagcgccccaggtagaatttcaaactgatgactatcagccagttcgtctgctcagtaaacctggggaactgagaagagaa

SEQ ID NO: 571009 - DNA, 75 bp, Homo sapiens
gaaatccttcggatggtgaactcattagaagaggaagaacgtgcaaaacgtgaggagctagagcgaatactggaa

SEQ ID NO: 571010 - DNA, 110 bp, Homo sapiens
cttcagccccgtgctcaagctcaatgctgtgctcatccgctctgtggccacaggcttgcagggtggcccccgctccgacttcgacatggcctatgagcgtggccggatct

SEQ ID NO: 571011 - DNA, 75 bp, Homo sapiens
gttgaagtgttcctagaaaaatttactacagaatgggataacttggccaggagccgggtgtgggctgagccctgc

SEQ ID NO: 571012 - DNA, 98 bp, Homo sapiens
gaagagccaaggaagagaaacttcagcaggcgatagcaatgcacagccaatttcatgctccactataggcaccttcttactgagatacgtaatgagaa

SEQ ID NO: 571013 - DNA, 82 bp, Homo sapiens
catgaattcacctttgattccagtgtgaactgtcaatcataagccttatgccagcctggaccatcttggaggcagtgtagga

SEQ ID NO: 571014 - DNA, 100 bp, Homo sapiens
ccacatcttctggacccaactgtggaatatgtgaaggctacccacctttctgttctgagacccctcaagagacatataagaaggtgatgaactggaaaga

SEQ ID NO: 571015 - DNA, 100 bp, Homo sapiens
cggagatcatgagcatgatctggaagcggctcaatgaccatggcaagaactggcgtcacgtttacaagcgtccgtctccaagagagtatgaagagagtgc

SEQ ID NO: 571016 - DNA, 100 bp, Homo sapiens
gctgataatcagaaggtggatcaagtggtacgaattttgcggttattaagaattttaggacgaaatgatgatgattcaagtgaagctatgaatgatatat

SEQ ID NO: 571017 - DNA, 100 bp, Homo sapiens
agtggagacaggctgacaccgccaaggagaaggacgctgccattgaccacgggacgaccctgggacagtctccactggggcagatccagctgaccatccg

SEQ ID NO: 571018 - DNA, 100 bp, Homo sapiens
atgggatccaacgacagtaagtacaggtgacagccgtgagggtgtatgtgaacagttcctctgagaatctcaactacccggtccttgttgtggttcgcca

SEQ ID NO: 571019 - DNA, 50 bp, Homo sapiens
cggcttcccccaaggaatatacagactatgaagaaatcgggagtgcactt

SEQ ID NO: 571020 - DNA, 100 bp, Homo sapiens
ggcggcggcggcggcggcagcggcagcgcggcggggccggaggatcgtctgccttattgaaaccatctaattggagatccgcagattaggctaccaagac

SEQ ID NO: 571021 - DNA, 100 bp, Homo sapiens
aatcagaaacctgaagttagaaaggctcaacgagaacaagctatcagaaaaatctggtccttcatcagaactaggaaagcactgatttaaacatttggtc

SEQ ID NO: 571022 - DNA, 100 bp, Homo sapiens
aacagcccaagaagcaggccaaggagatggacgaggaagtaaaaggcctacaagcccagattgccagctctgggttgaccgtggaggtagatgcccccaa

SEQ ID NO: 571023 - DNA, 82 bp, Homo sapiens
gcacgtgtttgcggttcagccctttgatgaccgcagcaggggttggtgccatctacatccgtcgccggccccgtgtgcgtgt

SEQ ID NO: 571024 - DNA, 82 bp, Homo sapiens
gatgttggtagaaaaagcaagagtttgttatatagcagtgaaaggtgtagcagtcactcggcctacacccacagcatcgacc

SEQ ID NO: 571025 - DNA, 85 bp, Homo sapiens
ttacggcatcccctccgcctgcttctctcagcctcccacagcagcccaactcctgagagagtcacctaaggtcctgcgagtacaa

SEQ ID NO: 571026 - DNA, 97 bp, Homo sapiens
gaaaactgtatgtaccctaaatatgggagataagaagtatgaagacatggaaggtaactataactacccaatattgcagccatggagtccatgctta

SEQ ID NO: 571027 - DNA, 76 bp, Homo sapiens
caagtactgcgccgactgcgaggccaaagatcgtctggggaatatttttcatcttagttgcattgctgtttgtaat

SEQ ID NO: 571028 - DNA, 100 bp, Homo sapiens
tttcttcagaagaaggacttcggaatgcactacaacaggaaaatcatattatagatggagtaaaggatgctttcattggatttggaggaaatgtgatcag

SEQ ID NO: 571029 - DNA, 76 bp, Homo sapiens
gaagcacctacactggcaacattagatccacctcatacaggagcagcatttctttctattactactatctatgctg

SEQ ID NO: 571030 - DNA, 88 bp, Homo sapiens
gcagcggaggaagggccacgccggcgatggaggcggcggcggcggactggcgggtcagtactcctgcatttgtaccaacgaaaactca

SEQ ID NO: 571031 - DNA, 97 bp, Homo sapiens
aagggaagtcttgcagcctggtgggaatgaaggttctacagaaagtcaccagaggaaggtatctagaagagcagaagacagagaatggaaaagataa

SEQ ID NO: 571032 - DNA, 82 bp, Homo sapiens
cgccgccgctcgcggtagacccgggcagcgcttccattccgcggagctggtcatcatcagatttgaaatatttaaagtggat

SEQ ID NO: 571033 - DNA, 74 bp, Homo sapiens
tgcagtgtttctttataatacattccatgggaggagagtggaacagatgtgcattcagattaaagaagttggag

SEQ ID NO: 571034 - DNA, 90 bp, Homo sapiens
gggctggagatgccaccccggcaaagttcgccctagtcatttgcttcacgtgtggttcccaacaaaggtcagtttcccttggctgtggga

SEQ ID NO: 571035 - DNA, 100 bp, Homo sapiens
tcaaagtgaaaggaccagttcgaatgcctaccaagagcattgaatgaaatgtggaaatgtcaaaatctgctccgacatcaagtaaaggatttgcttgact

SEQ ID NO: 571036 - DNA, 50 bp, Homo sapiens
catctacaaccttcgatctcctgacgagtctgtctcgttggaaaatccag

SEQ ID NO: 571037 - DNA, 100 bp, Homo sapiens
gttgaattgtatttagtaactcaaaaggcatataccaagctgtcagaagcagcttcatttaaaaggtagtcggtcttctcttgcccaaccagacactggc

SEQ ID NO: 571038 - DNA, 75 bp, Homo sapiens
gcaaaaccatgtccaaaccaggaaatggacagaaatacccacctcggaaagacttggtccgagctgtgtccatcc

SEQ ID NO: 571039 - DNA, 100 bp, Homo sapiens
tcgggaagagatgcgaggatgacaagggacacttgacattcagggacgtggccatagaattctctcaggaggagtggaaatgcctggaccctgtgcagaa

SEQ ID NO: 571040 - DNA, 100 bp, Homo sapiens
cataatggtgggataacatggacacttgtcttcttccttactgtaatgggactatttctactccacataatctgagacttccagtgtcctactattgaag

SEQ ID NO: 571041 - DNA, 88 bp, Homo sapiens
tcccggctctcggtccgggacgtgcgcttccccacgtcgcttgggggccacggcgcggacgccatggactcacaccacccggcaagaa

SEQ ID NO: 571042 - DNA, 87 bp, Homo sapiens
cagtgccaagttagatgccgattacccacttcgagtcctttattgtggagcttcttggacacttaatgattgttggcaagaaatgtg

SEQ ID NO: 571043 - DNA, 100 bp, Homo sapiens
caattttccaagtggcagattatggaatagttgcagatttatttaagtccatggcagaagtccttgctaaaaaagaagagctagcagatcgtctagaaaa

SEQ ID NO: 571044 - DNA, 101 bp, Homo sapiens
acctgcgtcctttttcgtttttcggatgatgccttcaatactacctttatttccaccatagtctgaacaagtgtcggaggccgagttactcccacagctga

SEQ ID NO: 571045 - DNA, 90 bp, Homo sapiens
aacgaagattcgaaaagccacttgaagaaaagggtgaaggaggcgaattttcagttgataggtacatgactcaaggcttggacatgtctg

SEQ ID NO: 571046 - DNA, 122 bp, Homo sapiens
ggcaggcaaggttgtgcggatatgagtgtccagtctccagcttcgtgggtgcctggaggcaggtgcggagaatttcgctaaggagtttgtgatcagtgatcggaaggagctggaggaagatt

SEQ ID NO: 571047 - DNA, 83 bp, Homo sapiens
cgcatgcaggactgccagcgggagctccagagcctgctggtggaggagggaattggctcgggaaaaggtaatgcgagaagtta

SEQ ID NO: 571048 - DNA, 98 bp, Homo sapiens
ggatagcgtggagtgacggtgccaccgcggcgcgtgtttgctgactagcactttggagagtgtatgcttatctgccatgtccataacagaacgaactg

SEQ ID NO: 571049 - DNA, 90 bp, Homo sapiens
cagaaccagaacagccacccagaccagagccccatgaattaggtcccctcaatggggacacagttaacaagcacaagccctggctggagc

SEQ ID NO: 571050 - DNA, 74 bp, Homo sapiens
ggtggccccgcgctgcgcccgccctcgcctcacctggcgcaggctactgcagcactggggtgtcagttgttggt

SEQ ID NO: 571051 - DNA, 50 bp, Homo sapiens
ccccacatcaatgcactgccaatgacggagtttcactcttgtcgcccagg

SEQ ID NO: 571052 - DNA, 92 bp, Homo sapiens
gacggattcatttagagctgcggaacaggacgccctctgatggggatatgagactttctactcggaatatcctgagtgttgcgtggatgtaa

SEQ ID NO: 571053 - DNA, 100 bp, Homo sapiens
cggcaagagggagttaaggacattccaggcagaggcaagggtgatgaattagaagacaatggaaagaatttctacgaatctgatgatgatcagaaggaaa

SEQ ID NO: 571054 - DNA, 74 bp, Homo sapiens
gaccgtgaccgagagcgtgaccgagagcgcgaatatcgtcatcgttagaagcagggaaaaggggtcgaggccgg

SEQ ID NO: 571055 - DNA, 98 bp, Homo sapiens
ggccgtatttgggtctatgacgttggagaggctggaggctcccaggtgattttcacaaatcctttagaaatcgtcaagatccgtttgcaagtggcagg

SEQ ID NO: 571056 - DNA, 80 bp, Homo sapiens
gacccagtgcgcccgcatcgtcgagagctcaggccccggggcctccagcggcaccagcggagaccacggtgagctcgtcg

SEQ ID NO: 571057 - DNA, 137 bp, Homo sapiens
cctgctgcacccacgaatctgcccacccctcctgtaacccagcctgtttcacttcttgacttaattcagtgcacaaatgagatgaatgtgaacatcccacagttggcagacagtttatttgaaagaactactaatag

SEQ ID NO: 571058 - DNA, 100 bp, Homo sapiens
atgaccactagacccacagctgttaaagcaacagggagaagatacccattatcagaaaaaaaaattatgcactatatgtaccagttatgtaagtccctgg

SEQ ID NO: 571059 - DNA, 100 bp, Homo sapiens
gttttagaaaatcataacaagcggttctctaccctgtaaagcctatgctattggcatgatacttacatttgttgttctggtgctgatgaaaaaggggcaa

SEQ ID NO: 571060 - DNA, 111 bp, Homo sapiens
ctgctgcccgcgtccgaggctcgcgggcggcgggcccgggtgctggagaatctggtaaaagcaccattgtgaagcagatgaggatcctgcatgttaatgggtttaatggag

SEQ ID NO: 571061 - DNA, 75 bp, Homo sapiens
ccgcccaccagttcgcccgtccccctgccccgttcacaattatgtgccaagtgctctctgctgccccagcagagc

SEQ ID NO: 571062 - DNA, 95 bp, Homo sapiens
ctcaatcacatgaagagagcaactcagataccaagctacaaaaaactcatcatgtattctgcgaaactcagagaatatttggaaggcagtaatct

SEQ ID NO: 571063 - DNA, 75 bp, Homo sapiens
gtgcggagccagcctgagttgggagaagagctccagagagttcccaaaggtgggggcctacccatgaccactgaa

SEQ ID NO: 571064 - DNA, 75 bp, Homo sapiens
gagttcgggcgagaggaggcgagaggcgcaaaggctgttactgaggcggagacacgggtgatgattggctttctg

SEQ ID NO: 571065 - DNA, 50 bp, Homo sapiens
cagactcggtgctgtacccgccgaagctgccacttttgctagagagcaag

SEQ ID NO: 571066 - DNA, 75 bp, Homo sapiens
gctaaaaacaagactggggctgctcccatcattgatgtggtgcgatcgaccctgtcattaattccatgtgtcaat

SEQ ID NO: 571067 - DNA, 90 bp, Homo sapiens
caagttgctgccaccttatcttagagttattcaaggggatggagtagatattaataccttacaagaggaaagaccacagcaagattcttt

SEQ ID NO: 571068 - DNA, 99 bp, Homo sapiens
gatatcgacgtcgtgatccagaagtccagagctgaggactgcctgtttgcagtgtactaatggtcacttgatgtgcgctggctgttttatccacctact

SEQ ID NO: 571069 - DNA, 87 bp, Homo sapiens
caaccgcttcgtgcaactctccgggcggccgcacctgccagtctcaaaccatgaattatgtgggacagctggctgggcaggtgattg

SEQ ID NO: 571070 - DNA, 107 bp, Homo sapiens
caaggatgcttgaggactcagatgagcaactggattatactgtactgcccatgaaaaaggatgttgaccggacagactttatattcagagcaccaatcaaattaagc

SEQ ID NO: 571071 - DNA, 100 bp, Homo sapiens
cgtccctggagggcgagcgtggcaagaggcccccgccggagggcgagcctgcagccccggcgtccggagttctggagcaccaagctatggatcatcatgg

SEQ ID NO: 571072 - DNA, 83 bp, Homo sapiens
cccagatatagccgttggtacaaagtacctggagtagaacagaaaaattattatgtctgtgttcccttgggactcattggaaa

SEQ ID NO: 571073 - DNA, 76 bp, Homo sapiens
aaatacgtggcctacatagagtcgcagggagcccaccgggcgggcctggccaagttgattatggaagattcccaca

SEQ ID NO: 571074 - DNA, 75 bp, Homo sapiens
agggacagcacctcatcccctggatgggggaccacaagatcctcatcgacaggtatcgagaaccttccctgcgaa

SEQ ID NO: 571075 - DNA, 50 bp, Homo sapiens
tggggatcttcgcactatcccaagcaccgaacaagatttgtgatgaaatg

SEQ ID NO: 571076 - DNA, 101 bp, Homo sapiens
gaaggcatatgaatccaaaattgattatgacaaggaaattgatgaagcctgtaagagaataaagcgtgaagttgatgatttgggccctgaagttggtgaca

SEQ ID NO: 571077 - DNA, 100 bp, Homo sapiens
ccagcagcagtcggcttctctacgcagaacccgggagtaggagactcagaatcgaatctcttctccctccccttcttgctacaagcaggggggtgtcgcc

SEQ ID NO: 571078 - DNA, 90 bp, Homo sapiens
gtggaagaaaatcataccatatcagatgcctcgcagagcaccaggcccaccgtgaaagccagatgaattatactttgaggaaggtgatat

SEQ ID NO: 571079 - DNA, 75 bp, Homo sapiens
gtattctccagggactggatgtcagtaacatgtggaaagcagatgtgcagataatttgcaagtaccttttgagtg

SEQ ID NO: 571080 - DNA, 101 bp, Homo sapiens
aagaacaagagaagacctcagatgtgaagtccattaaaggtttgtccagaggggttgcgtttatccggtttgacaaacggtcggaggcagaagaggcaatt

SEQ ID NO: 571081 - DNA, 75 bp, Homo sapiens
tcgccagcagccgtccggagccagccaacgagcgttgctgatgtatattcaagatgagtggattaggagaaaact

SEQ ID NO: 571082 - DNA, 75 bp, Homo sapiens
atcctggtgggctacaaattacgatttaagcgagagcctcactggttcccaggacatcaacctgaactggatcct

SEQ ID NO: 571083 - DNA, 97 bp, Homo sapiens
tattcatctcaaaaacaaaattctgaactcaggacttggcaactcattcagaccaataagctgaagcactaccccagcatccacggagacttcagca

SEQ ID NO: 571084 - DNA, 82 bp, Homo sapiens
agcagccgatccagcctgcggagcctgtggggcaggtgcagctgcaggggatgacaccgaagatacaagcactgagttcact

SEQ ID NO: 571085 - DNA, 101 bp, Homo sapiens
cagtgtcagaaaatggacatccctttccttggggaaatgcccgcagagacaaggacgagtgctccaaggataacggcggctgccagcaggactgcgtcaac

SEQ ID NO: 571086 - DNA, 100 bp, Homo sapiens
gcgtgctgaagagtgtggctgtgaagctggggaagacgcagaaggtgaaggtgctcacgggcacgggagaccagcagcagagcatgaagctgggcacagg

SEQ ID NO: 571087 - DNA, 75 bp, Homo sapiens
tgactccatcaaccaggccccactggaaatcgtctcgaaactgctctcagagaatgctgaccccctgaaggtgta

SEQ ID NO: 571088 - DNA, 74 bp, Homo sapiens
tggattgctgcaaggctgagggacgagaacgaggtgagactgctgctcctcgggccattttgaccggccatgac

SEQ ID NO: 571089 - DNA, 51 bp, Homo sapiens
ctgggtaggaggacctgaaattgaggatttggggtggaaggcaggcatggt

SEQ ID NO: 571090 - DNA, 87 bp, Homo sapiens
acagacaaccgccccctaaagaaactggaggcccaagcactagagacccccatcatccagggtcaggatgggtcccctgagctactg

SEQ ID NO: 571091 - DNA, 75 bp, Homo sapiens
gcggagaggagagcggtgcggaggactgagatcgcaccccctccctccctggcggagcccctgaaggagctgttc

SEQ ID NO: 571092 - DNA, 124 bp, Homo sapiens
ctggacaagaagattatgacagattacgccccctatcctatccgcaaacacttgaaatggcgattgaaaacctccaaaaaagcgaaggaatcacatcacacaaaagcggtttactcaacagcca

SEQ ID NO: 571093 - DNA, 82 bp, Homo sapiens
atctgtggaaggacctaccaaccagctgtgttccagatcatctccctggtaatttaccccgtgaagtacacccagaccttca

SEQ ID NO: 571094 - DNA, 82 bp, Homo sapiens
aacgacctggcggtggggctgcggcgcctgggactgcaccgcaccgagggcgagctccagcccaagaagatgaaaggattgt

SEQ ID NO: 571095 - DNA, 76 bp, Homo sapiens
ggatacgaatatgcctacctgaaggcaatagtactcttcagtccaggtatttaacgttaatgcacctctgcctcca

SEQ ID NO: 571096 - DNA, 50 bp, Homo sapiens
gaaatctttactgattccaatgtggaaccgtcccaaaatgtcccttgctc

SEQ ID NO: 571097 - DNA, 82 bp, Homo sapiens
agaccctggagcctcagttggaagcagccgatccagcctgcggagcctgtggggcagcagcttcatggagtttggccacaag

SEQ ID NO: 571098 - DNA, 78 bp, Homo sapiens
agaggtggccaataagttcgccaaagcgacaggagctgtcttccactgccacttcaacagcaacttcttccctctctt

SEQ ID NO: 571099 - DNA, 82 bp, Homo sapiens
cctggacacatgtggtgtgggctcctttggaggctgttgtatcccttctgaatacaatgcagatcttcgtgaagactctgac

SEQ ID NO: 571100 - DNA, 113 bp, Homo sapiens
gctacgcgcggggcgggtgctgcttgctgcaggctctggggagtcgccatgaaatgagccgtcagactgctacagcattacctaccggtacctcgaagtgtccaccatcccag

SEQ ID NO: 571101 - DNA, 97 bp, Homo sapiens
tgctcctttcctcttgaaaccaaaagccaagggcacaagagactatagtccccggcagatggcagttcgcgagaaggtgtttgacgtaatcatccgt

SEQ ID NO: 571102 - DNA, 96 bp, Homo sapiens
aggaagaggattcccagggtttccaggggccaaaggagacaaaggtgttcaaatctcgaacgccgccagaggccatcgcgctctgctctagcctgc

SEQ ID NO: 571103 - DNA, 82 bp, Homo sapiens
ttccgcagacagaagtggggagaagcggagggtgtgtccgcagccggccaggtggtatccctgaaggtgtggctgattgacg

SEQ ID NO: 571104 - DNA, 75 bp, Homo sapiens
agagcgccgcgcgttcgcgctcaagatcaacagcatttgacattgtgcagcaaagaaatggttatggagaagccc

SEQ ID NO: 571105 - DNA, 75 bp, Homo sapiens
cagtggttgatgtacgcatccctcaactagcacctccagctagaactgataaatttcaaacggaagagagtggca

SEQ ID NO: 571106 - DNA, 83 bp, Homo sapiens
gcagagtcctgccttcctttggtggatccaaacttctacagcaaaaacttacttcttttaggaaagacatacttgaaactaca

SEQ ID NO: 571107 - DNA, 82 bp, Homo sapiens
gagatgattatcgtaggaggagtcctccacctcgtcgcaggcctgaagctgcccagcaggcattccaaggcctgggtcctgg

SEQ ID NO: 571108 - DNA, 51 bp, Homo sapiens
tgtggacatcgatggcaccacctatgcagctatgctgggactcatgtatgt

SEQ ID NO: 571109 - DNA, 100 bp, Homo sapiens
tgcctacgcgccatggagcatcgcatcgtggggcccgggccgtaccgagctaccaggctggttcagccgtctgtatatctccccagatacctgaaactga

SEQ ID NO: 571110 - DNA, 100 bp, Homo sapiens
ataatgactactttgaagaccttaaaaagtactgtttccacaggaagcagatgaagccaccctggcccgtctggatctggagaggaagattgagtcgctg

SEQ ID NO: 571111 - DNA, 90 bp, Homo sapiens
atggagaaaattaagagttatgtgaattatgtgctaagtgaaaaatcatcaacctttctaatgaagggcacaagagactatagtccccgg

SEQ ID NO: 571112 - DNA, 101 bp, Homo sapiens
gcaaagtgggacgcggcacctacggtcacgtctacaaggcgaggcggaaagatgggtactaggttttgacaagcttgcatcatgcgtgagtataagctagt

SEQ ID NO: 571113 - DNA, 71 bp, Homo sapiens
accctggcagaagtcagagctgtacaggaaatcaagccgggagaggaggcgccttcatgttcccctacttc

SEQ ID NO: 571114 - DNA, 100 bp, Homo sapiens
aaactgttggagtttatatacacaggaactttaaatcttgacagaatgacatcttcgagtggtccagggaccaccgagcccaccacaagtactcagagac

SEQ ID NO: 571115 - DNA, 51 bp, Homo sapiens
cagattttgaagctaaagttaagcaggggcaccaccacgaggcgatttgtg

SEQ ID NO: 571116 - DNA, 88 bp, Homo sapiens
gagaatgaagccatccaatggatgcaggaaaactggtgttgacttcaaaatcaaaactgtagagctaagaggaaagaaaattagatta

SEQ ID NO: 571117 - DNA, 112 bp, Homo sapiens
ccttcaaaattaaaagaggagcagcatggcatttcagtcactggtttgcagagtccagggtggccgtgaattaagtgattttattagctatctacaaagagaagctacaaac

SEQ ID NO: 571118 - DNA, 50 bp, Homo sapiens
caaaccccatttggccctcaaacagttcgatcctttggtacagaagacag

SEQ ID NO: 571119 - DNA, 126 bp, Homo sapiens
ctccaggacagcacctagtcgtggccggaggagtctcagagctgtcagaaagctaagggagaacattgagcaattcttcaccaaatttgtagatgaggggaaagccactgttcggttaaaggagcc

SEQ ID NO: 571120 - DNA, 100 bp, Homo sapiens
gcggctgcagtgcccctttgagcaggagctgctgagacggcagcagaggctgaaccaggtgatccggacggacacgttcaagcacctgcggcacctggag

SEQ ID NO: 571121 - DNA, 112 bp, Homo sapiens
cccagaccctggagcctcagttggaagcagccgatccagcctgcggagcctgtggggcaggctggacggcagtctggaaacgaccaatgagatcttggactctgcctctcac

SEQ ID NO: 571122 - DNA, 75 bp, Homo sapiens
gcactgtctctccgacgcaagactgtcccggcccggtcattcctgtattccatcaaccagacaatctgcttgcgg

SEQ ID NO: 571123 - DNA, 87 bp, Homo sapiens
gcccctcaccagacagatcgctgtcaaaaccctagtcgtgagatggagaataaagaaactctcaaagggttgcacaagatggatgat

SEQ ID NO: 571124 - DNA, 89 bp, Homo sapiens
tagccgagagattttactaccaagccctgtcagtagctcctcagattgaaatccaccatggagagtaaggatgaggtcagcgacaccga

SEQ ID NO: 571125 - DNA, 49 bp, Homo sapiens
gcctcctaagtagctgggactacagacacgttggtcgtcattgcctccg

SEQ ID NO: 571126 - DNA, 96 bp, Homo sapiens
cccgggtccccgcgttcacagccccagcgcagcagcgtgcagggtcaaagacagccggccccccatgtcagtggtctaggatggccagtgaaggca

SEQ ID NO: 571127 - DNA, 133 bp, Homo sapiens
atcgtctgtctcctgttttctaggtggaaagaatctgatgagccttttaggcctgttcaggacctctttgtttttagacatgaattggccataatgagactagcagcctttatgggcattactatgttagttg

SEQ ID NO: 571128 - DNA, 100 bp, Homo sapiens
gacgggagctacttccaaattaaccaaattttgcaagaacgaggctcaaggatgtgagggacacagtattgacagctgaagaaatgatttacgttttccc

SEQ ID NO: 571129 - DNA, 100 bp, Homo sapiens
tttggtaacattacattatgctttccagacagaaaccaaacttcatctcattttaggaatcattaaccaatggcaacaggaatccaaggataaagtgatt

SEQ ID NO: 571130 - DNA, 75 bp, Homo sapiens
gtgtgtgctgcgttcacaggtgtttctgcggcagggaaccttctgaccagcctcatgggctcctcagagcaggag

SEQ ID NO: 571131 - DNA, 100 bp, Homo sapiens
cccgaagcggcctgtgacctgtgaacagggctgtggtctattatcctcccagtccacaacgctgaaccgtggctggacgaatgtttgaggtctgttttgc

SEQ ID NO: 571132 - DNA, 83 bp, Homo sapiens
gtggcggcggagaggaaccggtggcatcgtctcccgagcctgctcctgccgccgagggtgtacagcaagctgtgattcctggg

SEQ ID NO: 571133 - DNA, 75 bp, Homo sapiens
agagaactcaaggtctggcagggagaaaggagcaagagttttccagaaaaagaccttctgcactgtccatctaag

SEQ ID NO: 571134 - DNA, 75 bp, Homo sapiens
tgctggcgctctggctgtgctgcgcgacccccgcgcatgatgccttcaattaagttgcagagttctgatggagag

SEQ ID NO: 571135 - DNA, 100 bp, Homo sapiens
gcgctgccccgccggaccgtggacttgacccaatgaaagaagcatatggcacttgtgaagataaatgttactcctccctttttaattggaacttctgctt

SEQ ID NO: 571136 - DNA, 89 bp, Homo sapiens
caggaggtgctgggccacgcggcccggctggcctcctccggtctcctcctgcaggccatcgagtcagtggaaaggaaaaagcaagagaa

SEQ ID NO: 571137 - DNA, 80 bp, Homo sapiens
accgaggctgaggatgatggtagattgccaggagtgcgccggtctcggggaaatgcccggttccttcgtgcccacggtca

SEQ ID NO: 571138 - DNA, 75 bp, Homo sapiens
acaaagaagaaaacatttcttttaatttttaaacttggtttgaaagagccgcccacctgctccccggaccagttt

SEQ ID NO: 571139 - DNA, 82 bp, Homo sapiens
gacatcaagccggataagtgtccccgtagagtcaaccggtatggctcccatggtgcattttaccgctataagaacagcatgg

SEQ ID NO: 571140 - DNA, 75 bp, Homo sapiens
tgacattgatgcagaatcaataacctctggggttgattattataagtataggcctcatgttttatgtagttcatc

SEQ ID NO: 571141 - DNA, 87 bp, Homo sapiens
cacaaagaagaaaacatttcttttaatttttaaacttggtttgaaagatgccttcaattaagttgcagagttctgatggagagatat

SEQ ID NO: 571142 - DNA, 95 bp, Homo sapiens
cctatgacagagagatgatatacccgaagctgctggataattttatcccagggtggctgaatcacggaatgattcccagaagttgtgcatgagtt

SEQ ID NO: 571143 - DNA, 75 bp, Homo sapiens
gggctctgatctgtgcgacagaggtacagctctgccggggggggaaaaagtggtaccattttgggcgttcttgag

SEQ ID NO: 571144 - DNA, 83 bp, Homo sapiens
ggaggacggagagaaggcggcgcgggaggtgaagttgctgctgttgggtgtggacactgccagcggctgcagccgacttggaa

SEQ ID NO: 571145 - DNA, 88 bp, Homo sapiens
gctagctatgtggtgtcagtgattgaacaaattttgcactacatgattcacaatggactcaggacacccctgcacggcggccgaccct

SEQ ID NO: 571146 - DNA, 83 bp, Homo sapiens
ggcgacggcgccttcggcaaggtttacaagatgcctgaggaaacccagacccaagaccaaccgatggaggaggaggaggttga

SEQ ID NO: 571147 - DNA, 100 bp, Homo sapiens
aggcggtgctgccgcgcgagctctacccagtcgagggatggtgccttgagtgaatgacccccttggagaacattcttccgcatccctcgcctcaagccag

SEQ ID NO: 571148 - DNA, 100 bp, Homo sapiens
ccggaaggggcaagacgggttcagttcgtcatggggctgtttggaaagacccaggagaagccgcccaaagaactggtcattagtaattatcagcacttta

SEQ ID NO: 571149 - DNA, 100 bp, Homo sapiens
ccggagaatagggcctctttatggcatgtggctggtaactttcctcctgctcctggactctttacacaaagttgcaaccaaggcaatgtcttactacctc

SEQ ID NO: 571150 - DNA, 76 bp, Homo sapiens
cagtggccctggaggaggccaagattgtctacaacctgttgtctctgcgcttcaactcacggatccgtgtgaagac

SEQ ID NO: 571151 - DNA, 141 bp, Homo sapiens
acggccagaatgaattctatggacaggcacatccagcagaccaatgaccgactgcagtgcatcaagcaggtgacagttcagtacatgcaggacaatggcgcagtcatccctgtgcgcatccacaccatcgtcatctctgtg

SEQ ID NO: 571152 - DNA, 96 bp, Homo sapiens
gcctgcaggtctctgtcgagcagcggacgccggtctctgttccgcaggatgatatgaagatcaatgatgcagactgatggttttgatgaagctggg

SEQ ID NO: 571153 - DNA, 80 bp, Homo sapiens
ggcctcggcggctgaggaaagcaggaggaggtggcggcggcgggaagatgtaactaggatttctacctcaaccgcgagac

SEQ ID NO: 571154 - DNA, 100 bp, Homo sapiens
ctttcattgaggatattttgaatagaatacaagatttattagagctttctccacctgagatctattgggaaactgattataaccactcgggcaccatcga

SEQ ID NO: 571155 - DNA, 102 bp, Homo sapiens
tgcacctccaactcaatcttggacctcttccgaaccccggccatccgcaaggtcacatgctgtctcatggtgatttgagtctcgctctgtcacccaggctgg

SEQ ID NO: 571156 - DNA, 100 bp, Homo sapiens
gcctagtcctgctgttcctgatccgcactgccctttttgcaccccagggagctgctgctgtgctacctgggcgatgccttccgctgtgccagctgcccct

SEQ ID NO: 571157 - DNA, 75 bp, Homo sapiens
agttgaaacacccctgtccatccaggcacaccctaacaagattaaactcccatcggtcacatccttcatcctgga

SEQ ID NO: 571158 - DNA, 90 bp, Homo sapiens
ttgggtttctttcttaaaggactgatttttagaactccacatttgaggtctggccgtgggcctgggcttcggggcactggcagaggtcgc

SEQ ID NO: 571159 - DNA, 75 bp, Homo sapiens
attccccccagagctggacagccggagatcgagatggtgatcatggagcgtagcaagctctcagagctggccgcc

SEQ ID NO: 571160 - DNA, 100 bp, Homo sapiens
catctctccaccatcgactacgtggaggacgatggtgaagagcgctcgcccggtagcagaaccgaacccgggcttctggtctcagctccagaagtatgag

SEQ ID NO: 571161 - DNA, 100 bp, Homo sapiens
cagagactgctcctgaagtaaagagagactcacctgcaagtactagctctgataacttgggttctttacaagttctgggggctggtttgactggatgatg

SEQ ID NO: 571162 - DNA, 90 bp, Homo sapiens
ccgccatcttgtgggagcaaaaccaacgcctggctcggagcagcagcctctgaggcttcaacggaccacaccaaaatgccatctcaaatg

SEQ ID NO: 571163 - DNA, 83 bp, Homo sapiens
gcctacgtgaacaacctgaacgtcaccgaggagaagtaccaggaggcgttggccaaggaattactttcctagtaagcaagata

SEQ ID NO: 571164 - DNA, 100 bp, Homo sapiens
tcttgccacagacccggtatgtggagctgttcattgtcgtagacaaggaaagggctttaaatgaagaaattgttaatagaaagaagaatgtagatcaagc

SEQ ID NO: 571165 - DNA, 100 bp, Homo sapiens
aaggggtcccgaagccccctgcaggaactctacaacccaatccagcttgccgggattgctgtccttgccattggactatggctccgattcgactctcaga

SEQ ID NO: 571166 - DNA, 51 bp, Homo sapiens
cgatgcctcaatggccaactgcaggtctcagcttgactatgaagttcccag

SEQ ID NO: 571167 - DNA, 114 bp, Homo sapiens
acgtggtccagcggctccaccgaggccatttaccggcgctacagcaagttttttgacctccaggtcagtttaggggctggtgcaaaggatgagttgcacattgttgaagcagag

SEQ ID NO: 571168 - DNA, 83 bp, Homo sapiens
acaggattccatggtagctgggatgttagggctcagtgccggtggtggtgtgcacattgagccccggtatagacagttccccc

SEQ ID NO: 571169 - DNA, 100 bp, Homo sapiens
gcgcccttcggccgcctacttcggattgtctccagctttaagaccacgacatcgagagctgcctgccagctcgtgaaggagtacatcggccaccgggacg

SEQ ID NO: 571170 - DNA, 50 bp, Homo sapiens
gacatttcttcggcattctgcaacagagttttgcggcctccaggtggtgg

SEQ ID NO: 571171 - DNA, 46 bp, Homo sapiens
gaccctctggaagcctagaaatggcatagagattttatgagaatgt

SEQ ID NO: 571172 - DNA, 75 bp, Homo sapiens
gatcttctgcactgtttacaggcacagcaaagaacagtctgaacttgatcaagatttggatgatgttgaagaagt

SEQ ID NO: 571173 - DNA, 80 bp, Homo sapiens
aatcaactgagagagatgcttaaaaatcaccagttactttaatgatgacgagtagcacagcccctctatggtttagatgg

SEQ ID NO: 571174 - DNA, 95 bp, Homo sapiens
tgctgcaggctcttttcctcattcagaagtcctcgcagagaatggctgaggctgattgggacgcattaactggggctctggtgagccgactgagc

SEQ ID NO: 571175 - DNA, 75 bp, Homo sapiens
agctgcacgacgtggacttctacaaggcccgcatggagatgttctcaaatagtgatgaagctgtaatcaataaaa

SEQ ID NO: 571176 - DNA, 101 bp, Homo sapiens
tattttggaaacaagctgactttggatatgccagagagaggctggaggagatgcatgtgctctgtcagcctaaggaaacgtcaacgaaacggaatattcca

SEQ ID NO: 571177 - DNA, 93 bp, Homo sapiens
ctgtgctcgcgctactctctctttctggcctggaggctatccagcgggccaaaccagtgctcctgccacctctctggctgccccctagagcct

SEQ ID NO: 571178 - DNA, 51 bp, Homo sapiens
gcagcggagagcgagagaggggagcagaggaattccagggaagaaatgtgg

SEQ ID NO: 571179 - DNA, 82 bp, Homo sapiens
ggacatcccagagtctgggaaatggtgatgtgtccaatctagatcccaacttctcatttgaaggcaccaaactggatgtggg

SEQ ID NO: 571180 - DNA, 75 bp, Homo sapiens
gaaacaaaaaaagaatcgctgtttcatgtgcaggaagaaagtgggacttactgattttcctgagagaactgattt

SEQ ID NO: 571181 - DNA, 100 bp, Homo sapiens
aaggagctggcggacatcactttagaccctccacctaattgcaggacatagtgtgatggacaccttggctgtggccctacgggtggctgaagaggccatt

SEQ ID NO: 571182 - DNA, 95 bp, Homo sapiens
cagccgggccaattccaatctcacactcaccgacaccgagcatgaaaacactgagactggatcaccccttctgtgtcattctctgaggaaaacaa

SEQ ID NO: 571183 - DNA, 75 bp, Homo sapiens
ctgagaggaagagggagctgcccagcggcctcacgctgtaaccctctgctgctgggatctagcaattgggaggca

SEQ ID NO: 571184 - DNA, 100 bp, Homo sapiens
cttgtcctcacctggtctctggctgtccagagttgcttcctgttgacgacagctctcctcaggctgaaggggatgctaagggagataaagcaaaggtgaa

SEQ ID NO: 571185 - DNA, 97 bp, Homo sapiens
agtttctgacttaagccgatcccagaggctctttgctgctgtcagtatcaccactggtcaagcagtgtttgtcaggttcaactccagccatggtttc

SEQ ID NO: 571186 - DNA, 75 bp, Homo sapiens
tctctccaggacatctaccaaggcccaggaagtacacgagaagctccgaggatggctgaagtccaacgtctctga

SEQ ID NO: 571187 - DNA, 96 bp, Homo sapiens
gacgacagactcagatccaagtcaacagtttttctggatatgccgcagaaggatccgtgccagaagcaagcctgtgagatacagaaatgtttacaa

SEQ ID NO: 571188 - DNA, 75 bp, Homo sapiens
cgatgtcatcaagttgcaagagattccaaccttccagccccttttgaaagcttcaggatgagttagagaaaggtg

SEQ ID NO: 571189 - DNA, 100 bp, Homo sapiens
cggcggaacccgtgggcctgtggactgcagcctcggcggtcagcagctgtcgcctggttgggcccggaaatgggacgtcgcgctttctcagggagcgtag

SEQ ID NO: 571190 - DNA, 90 bp, Homo sapiens
gccgttgtgtaaaagagctctggaaatccgagaaaaggaaacatgttcaaccaaatggcaaagtgggtgaaacaggacaatgaaacagga

SEQ ID NO: 571191 - DNA, 100 bp, Homo sapiens
gggcaagccccgctccggccaacaaacagttgcatctataaaaaggtttgcccctttaatggtggctcttttttggttcaaccttctgcgtcagatttcc

SEQ ID NO: 571192 - DNA, 98 bp, Homo sapiens
gacggtacttctgccactgctgctccgtggagatcgtcccgcgcctgccggttacttcctggcagacggagctgacctgctgtggaaccagaccttgg

SEQ ID NO: 571193 - DNA, 100 bp, Homo sapiens
tgggctgggctgcagcaaaatgagggtgtactcagtgcactgaggcccatgtaccatgagagatggtaacacaagtggcaagacagccgggaacccctac

SEQ ID NO: 571194 - DNA, 100 bp, Homo sapiens
ctaaatttgaaaaggagaaaatgaatgccaaatgggacacgaactattatggagctgctaagatgatattttctgacaacccacttggtctgacttgtgg

SEQ ID NO: 571195 - DNA, 96 bp, Homo sapiens
cgcccccggcccgggccgccggcaccatgtaacccggccggagcccgagccgggccagtgtactccttggatgggattctggtgtttggtttgctc

SEQ ID NO: 571196 - DNA, 100 bp, Homo sapiens
ttctccagtgactgggaaatccaggaagacagtaggggcgcaaaccagaagaagagggtgtggaagataacgggctggaggaaaactctggggatggaca

SEQ ID NO: 571197 - DNA, 75 bp, Homo sapiens
ggggtgtcggacgcagggcgctgggccgggtttcggcttcggccacaggttcagcttgttggtttagatgaggag

SEQ ID NO: 571198 - DNA, 98 bp, Homo sapiens
tggattagctcaagttagctttgacaaggaagaaccccacagacgaatacctggagggcatgatgagcgaggccccggggcccatcaacttcaccatg

SEQ ID NO: 571199 - DNA, 75 bp, Homo sapiens
gactgtggaataatatggaagaagatggaaaaaacttgtttaatggctcatcatgtcactacagtgaacagtaca

SEQ ID NO: 571200 - DNA, 83 bp, Homo sapiens
gggagcttgcagcccctttgccactcaggaacaggcctttgagagcagccagaagtacaaagaggggaagtacatcattgaac

SEQ ID NO: 571201 - DNA, 100 bp, Homo sapiens
aacgcagtgaccgaaggctccgctcacgcccgggaagatgttaccgagtacttcagtgaattccttagtgcaggggaacggagtcttgaattccagggat

SEQ ID NO: 571202 - DNA, 75 bp, Homo sapiens
cgctgaacggatggctgagggagccccgcggatcgtttaggaaagccggccaggctatgaccagggccagagcac

SEQ ID NO: 571203 - DNA, 100 bp, Homo sapiens
gaggtctgtggcaaagttggagaaaaccatcgatgacctagaagggcgtccccctggataccagtaaactgtccactgaccagcggttacccccataccc

SEQ ID NO: 571204 - DNA, 120 bp, Homo sapiens
gccatgtctaccctcaatgacactcatggaggaaatgctgagagaagcattcagatgcatgacacaagtgtggtttattgacaatcatttacaatgccgaagagtgctgtagtgagccag

SEQ ID NO: 571205 - DNA, 100 bp, Homo sapiens
tgacattccccgctacatcgttagccagctgggcctcacccgggatcccctagaagggtgtgaatctccagaagcttctggaagctggaaactttatctg

SEQ ID NO: 571206 - DNA, 82 bp, Homo sapiens
ggccgccggggccgccatggagcccgactcggtgattgaggacaagaccatcgagctcatgacccagccgatgcccaatcct

SEQ ID NO: 571207 - DNA, 100 bp, Homo sapiens
ggcggtcagcggacttcgtggtagaatccattggctctgaagtggggtctctgggtgcaggtgatggtcctaccagtgtgtctgttgaggtcacccgtcc

SEQ ID NO: 571208 - DNA, 50 bp, Homo sapiens
gagcgagcggaggagcaggcgccggagtgatcggcatgttggtaaaattt

SEQ ID NO: 571209 - DNA, 100 bp, Homo sapiens
cattcagatgggatctttccggatcaatccagatggcagccagtcagtggtggagccatccgcagagccatcctgtgcaaaggaaggagctaggctgtgc

SEQ ID NO: 571210 - DNA, 100 bp, Homo sapiens
ggaagatcgggtctggctccttcggggacatctatttggcgatcaacatcaccaacggcgagcctcttagcaaatatccggctgtgatcaatgatatttc

SEQ ID NO: 571211 - DNA, 75 bp, Homo sapiens
cgtgaactcattttatctgccacgacccagaagtgcattcccttattcgtggaagcagccttagaaagactgaca

SEQ ID NO: 571212 - DNA, 97 bp, Homo sapiens
ggacttgcaggatgacttagacgactgtgaaggacttaactaagtacttggatcccagtgggctcggcgtgatcagctttgaagacttctaccaagg

SEQ ID NO: 571213 - DNA, 90 bp, Homo sapiens
gccatgagcatcaaggcaggcacggtggatgaggactcgtcaggctccgagcctatgagagctacaagaagaaggactacacccaggtgg

SEQ ID NO: 571214 - DNA, 50 bp, Homo sapiens
taatccaccatcaatatatctggaggttcattttccagacactgaaagag

SEQ ID NO: 571215 - DNA, 100 bp, Homo sapiens
ccttcaagaaagacttgatggtctggtagaaacaccaacaggatacattgaaagggaccagttactctccacaagaaaattcacacaaccacagtgctct

SEQ ID NO: 571216 - DNA, 103 bp, Homo sapiens
atttcttcttccaaaatcctcggattctctacttctgcttaggataagttctgaacgtcgaaaagaaaagtctcgagatgcagccagatctcggcgaagtaaa

SEQ ID NO: 571217 - DNA, 98 bp, Homo sapiens
aagcagcgtgcctggttacagctgtttccacgtgcggtgctcgtcgggagtgatcacctaccctacaggtggccctcatgacactgacgctcttcccg

SEQ ID NO: 571218 - DNA, 75 bp, Homo sapiens
agggtcctttatatagaagggagagtaggcattcccatcaagagcaccatggacaaccccaccaccacccagtat

SEQ ID NO: 571219 - DNA, 98 bp, Homo sapiens
tcaaatccatcaagctcatcaaaaggtgaatacatcaagacctggaggccacggtacttcctgctgaagagcgacggctccttcattgggtacaagga

SEQ ID NO: 571220 - DNA, 100 bp, Homo sapiens
gctgctacactgaagatgaagcaaggcccaatgacccaggcggaggggcaacccccttcatttatctcgtgagcggtatcggaagctccatttggtctgg

SEQ ID NO: 571221 - DNA, 50 bp, Homo sapiens
tcttccaatgaccagacactgccttaccccctcccacatgtcatcagcag

SEQ ID NO: 571222 - DNA, 76 bp, Homo sapiens
ggacatcaggaaagcagtgctgatgataaggatgttcgccgaggaggaggctgagctgacccaggagatgtcccca

SEQ ID NO: 571223 - DNA, 82 bp, Homo sapiens
gggaggaggccggggaccacacaggtggcagtagagaagagcatcacagaagttgctcaggagctgacagagctggtggaac

SEQ ID NO: 571224 - DNA, 80 bp, Homo sapiens
aggaagatctactgtgaccaagagtattgtggaggatgactcactggttgtgtggaaggaagtcgatttgacccggctgt

SEQ ID NO: 571225 - DNA, 75 bp, Homo sapiens
cttagatgcaagtgatgatggaatcttggccaaaatcgtgctgacaagctctctactgatgatctgaactccctc

SEQ ID NO: 571226 - DNA, 110 bp, Homo sapiens
cgcgggcatcttgctgttcgtgattatatttcttggagttgtgttggtaatgaagaaaagtattctaccttgtaaatactgttatttgtatatactgtaaatgatgacat

SEQ ID NO: 571227 - DNA, 82 bp, Homo sapiens
cacaaagtgaccaagaacgtgagcaagcccaggcacagccgacgccgcgggatgaagatctccttcaacgacaaaagcctgc

SEQ ID NO: 571228 - DNA, 114 bp, Homo sapiens
cagagaaggacaaaatggtgtgggaaatcctggtgtctgagcgggacatcagagcccttatcccactggccaaggtcatccatctccagccccacctgaccagctcaacaccag

SEQ ID NO: 571229 - DNA, 82 bp, Homo sapiens
ggcagcaacacgatcggcgcccgcctgaaccgagtagaagacaagggaactcgctgtcggcgctgctggacggcaaagccac

SEQ ID NO: 571230 - DNA, 85 bp, Homo sapiens
cgcagatgttgtcaaggtggcctaccaggaggccaggggtgtcgccatgtctattatcctcccagtccacaacgctgaaccgtgg

SEQ ID NO: 571231 - DNA, 76 bp, Homo sapiens
ccgggtaccatggacgtgggcgaacttctgagctaccaggttcatcatgcctagtggcgtataagaagaccccgcc

SEQ ID NO: 571232 - DNA, 97 bp, Homo sapiens
agaaccaagtgcggacgctgtgcgagaagtatcatggtacagtcaccagaaaaagcttacagttcctcacagcctgttatttcggcacaagagcagg

SEQ ID NO: 571233 - DNA, 100 bp, Homo sapiens
gctgtctaccctcaggcaacccaaacgtatggactacctccttttgttcttttccctggttcagcctgaactatataccaggccctgctgaaaataccac

SEQ ID NO: 571234 - DNA, 90 bp, Homo sapiens
aagcaggcgaacccgcggcgcaataacggcggaagcccggctcgctgcaaaacgggcggcccgcgcggaggctcgcgagatccgcatgaa

SEQ ID NO: 571235 - DNA, 75 bp, Homo sapiens
ctggcaggggttgaactgtggagtgtgtgggaatgtatcctgtcaggtataatgtcagtgaatggcaagaaagtt

SEQ ID NO: 571236 - DNA, 75 bp, Homo sapiens
tcaaagagctcattaaggacgggaagaacctcatcgctgcgacgaaaagaggactcacgaatggcagtggaagat

SEQ ID NO: 571237 - DNA, 87 bp, Homo sapiens
gggatacagcctggaaggtgcgtgtggggctgggtctcggagtgggagacgtggagtgcaggtatgatctcgtgaaaccttgagaga

SEQ ID NO: 571238 - DNA, 74 bp, Homo sapiens
ggggttcctggtgctgaggacggacgccattggagttcccgagaaggtgaaagaacttgtcctggacaacagtc

SEQ ID NO: 571239 - DNA, 99 bp, Homo sapiens
cgacttcgagccgctgcccaccctccccgaggacgaggtggaagagattagaaactcatgatgttgtgatcgagtgtgccaaaatctctctggatccca

SEQ ID NO: 571240 - DNA, 96 bp, Homo sapiens
cagctggaggaggccagctctacaggcgggtgttttgaatgctgtatcaaatgcctggggggcattccctatgcctctctgattgccaccatcctg

SEQ ID NO: 571241 - DNA, 50 bp, Homo sapiens
ggaacagacaagcaggttgtcttgatgatccacaagctggcagcccgagc

SEQ ID NO: 571242 - DNA, 98 bp, Homo sapiens
gcgaaggcgggccagcagaggggagcagagatacccctgggggccgagcagccatggaggaggtggtgattgccggcatgtccgggaagctgccagag

SEQ ID NO: 571243 - DNA, 74 bp, Homo sapiens
gttgggtgcccgcggccacttttgccttcccggatatgtgttgagacggattctccgccgagctgtccgatacg

SEQ ID NO: 571244 - DNA, 75 bp, Homo sapiens
gctcgcgctactctctctttctggcctggaggctatccagcttcctgtgccttaagaacattagaaccttcctgt

SEQ ID NO: 571245 - DNA, 74 bp, Homo sapiens
cctggctgaaggccttaccgaggaggagtatcagctaagggagaacattgagcaattcttcaccaaatttgtag

SEQ ID NO: 571246 - DNA, 101 bp, Homo sapiens
cttggcgcctgaggttctcccattaggcatccgtgtacaagatttgcagagaaatgtatgacgatggagtgggtttaccctttcaaagtcagcctgatctt

SEQ ID NO: 571247 - DNA, 100 bp, Homo sapiens
aagaaaaaaagtcttggatgatctaaccaaggtagcagaggctcaacgggcagagtttagccctgcccagttctctggtcctaagaagatcaacctgaac

SEQ ID NO: 571248 - DNA, 74 bp, Homo sapiens
ttcagcccactactctgaaccagagcggttctggtgaggttggaaggatgcagccacccggttgtcatgaaagg

SEQ ID NO: 571249 - DNA, 100 bp, Homo sapiens
ccagagctgcatcattccttggggcaaaatgtggacaagggttgaaaggattgttgacaaaaggaaaaataaaaaagggaagacagagtatttggttcgg

SEQ ID NO: 571250 - DNA, 50 bp, Homo sapiens
cgaggacgcggactgcgaaggcagagatcctgaaggagctagacgagtgc

SEQ ID NO: 571251 - DNA, 83 bp, Homo sapiens
cgaagcaggacccgaagcctaaattccaggagggtttttagaacttcagccataaaaatgggcagaattttccttgatcatat

SEQ ID NO: 571252 - DNA, 100 bp, Homo sapiens
ggaataccgcaaaaagcaccgggaggagagagaatgtcttttcgaggcggaggtcgtggaggctttaatcgaggtggtggaggtggcggcttcaaccgag

SEQ ID NO: 571253 - DNA, 100 bp, Homo sapiens
aaagtattaaacgacacaagtggaatgactttgcggaggacagcttggagacagagctactggatctcagccttgtcaaagatgccagatgtgggagaca

SEQ ID NO: 571254 - DNA, 50 bp, Homo sapiens
ctgctgggtccgggaggctcttggaggttatgatgtgattgctcaagccc

SEQ ID NO: 571255 - DNA, 83 bp, Homo sapiens
atttcaagagtcacttctttacttggtgcaggaaggcagtctttgctacgtacagcaaaaggctattgagggcacctacattg

SEQ ID NO: 571256 - DNA, 80 bp, Homo sapiens
cagcagttggcacacatggttaaggaacaggaggaaaccattcagaggctgaaggggatgctaagggagataaagcaaag

SEQ ID NO: 571257 - DNA, 51 bp, Homo sapiens
caaaattctgaactcaggacttggcaaggaacagagttcagaggcagcaga

SEQ ID NO: 571258 - DNA, 96 bp, Homo sapiens
ggagtgtatgaccacaaacagccatcaaggagttcatgatcaagtgttgcccacaccaaatgcttcatccagagtcatagtacatgtggatctgga

SEQ ID NO: 571259 - DNA, 100 bp, Homo sapiens
cgggtacagcttttcgctgactacattcaggtgggaagaagagcgctatcctgaaggcatcaagtggaaattcctagaacataaaggtccagtatttgcc

SEQ ID NO: 571260 - DNA, 100 bp, Homo sapiens
tgatgaagaagtgggctttgctctgccaaatccacagttggagctcagctgcatggaaggcagctgcacgtgttcgttcccaaccagtgagctggagaag

SEQ ID NO: 571261 - DNA, 97 bp, Homo sapiens
cggcacctacggtcacgtctacaaggcgaggcggaaagatggtgccgcagaatggaattcggcattgttcctacacagcttctcggcaacatctcta

SEQ ID NO: 571262 - DNA, 100 bp, Homo sapiens
gacaggcctgcagataccccaggtgtactttcggctccatgcttccatcctgaagctcctggggaagcccgattctggggttggtgcagaggtcctggtc

SEQ ID NO: 571263 - DNA, 98 bp, Homo sapiens
cgacccgtggccttgtgtttcagtgttctaagaacggaagcatctgggctggatggaatttagcatcaagcagagtcccctttctgttcagagtgttg

SEQ ID NO: 571264 - DNA, 102 bp, Homo sapiens
ccctgactcctgaactcatggttccccgcctggaacatgtcgtggaagaagagaagaaattacattgctgtaggaaacatgacccctgttattgaagtgtgg

SEQ ID NO: 571265 - DNA, 90 bp, Homo sapiens
ctggacccggacccaaagtgccatgtctttaatatgcagagcaaagcggcagtccccggacagggatgggctctgaccaggaggacagca

SEQ ID NO: 571266 - DNA, 80 bp, Homo sapiens
caaaattactgtatatgcacatgctgggctaccctgctcactttggacaggttgctgcagcaactggtcacacagtagtg

SEQ ID NO: 571267 - DNA, 75 bp, Homo sapiens
aggacatgatccaggaagagcagtaagggactgagctgctgagtcactcaagggaaaggattaatgccagatggt

SEQ ID NO: 571268 - DNA, 99 bp, Homo sapiens
aaaaagagaggatttgcttttgtaacttttgatgatcatgatacagttgataaaattgttgcgctgggatatgaagcttcgtcatcttggactcagtaa

SEQ ID NO: 571269 - DNA, 90 bp, Homo sapiens
acctgcgcgaagctggccaaagcctgcccagacggctcacctgtgcgggatggaacaaaagcctccacgttcctctatccagttcccgca

SEQ ID NO: 571270 - DNA, 78 bp, Homo sapiens
cccgtgccgcgagcgcggcctgcaggaggtgaaagaacttgtcctggacaacagtcggtcgaatgaaggcaaactcga

SEQ ID NO: 571271 - DNA, 82 bp, Homo sapiens
cggtgagcgcccatatgggggttctggagagcggggtgtgggctgagcgggctttggacaccatgaactttgatgtgattaa

SEQ ID NO: 571272 - DNA, 98 bp, Homo sapiens
ttcacagactgtaataggcatacacaagtgtgcattaatgggagctggaaacaacttctggtggattcctgtagtgggccctttggttggtgctgtca

SEQ ID NO: 571273 - DNA, 100 bp, Homo sapiens
agatccaagagattcagtatcactcgctcccttgatgatcttgagctcccaggtgcccacgtgctgcgctggctggaggcagcaaggggacgagtgtggg

SEQ ID NO: 571274 - DNA, 100 bp, Homo sapiens
cagcgacccgctgctcagcgtcctcatgtggggggtaaaccactcgacaaggagccccaaactgtctcacagtcctcaaccacccagtctgggtgacccg

SEQ ID NO: 571275 - DNA, 75 bp, Homo sapiens
ggagactattgataagcagcgagaagagatggccaagagcagcagggaacctcagggcatcatagcttgctgcaa

SEQ ID NO: 571276 - DNA, 74 bp, Homo sapiens
gatgctcgggagggagactgttgttcccggagatgcggcgcgcagaaacattgctgaggctcttgtcagcaaag

SEQ ID NO: 571277 - DNA, 104 bp, Homo sapiens
cagggcaaccatgaccgaggagagctctgacgttcccagggagttgatagcaattctgtggtgttcttggtcacacatttatggagtttctgaagggcagtgga

SEQ ID NO: 571278 - DNA, 50 bp, Homo sapiens
ccgcaacgtaaaatccttggaaaagggagctctttgttcaatgcctagcc

SEQ ID NO: 571279 - DNA, 82 bp, Homo sapiens
agccgcaaggcgagagctgcaaaggtaaggggcctggataccaagaagtgactgctcatctaatccataaagctatgttaac

SEQ ID NO: 571280 - DNA, 100 bp, Homo sapiens
gaaggactggggccacgtggagctgctggaggatgaagatgacgccaacagactcggggagaaggtgatcctgcgggagcaggtgaaggaactcttcaac

SEQ ID NO: 571281 - DNA, 98 bp, Homo sapiens
ctgagggagcaagaggtgtcggaggtctcatctttgaactactgccggagcttctgccaggccctactgaagatggactgccagggcctggtggtcag

SEQ ID NO: 571282 - DNA, 80 bp, Homo sapiens
actgttgtcattctggaggcaaagaacctgaagaagatggatgtgggtggcttatccgatgttaccagacctaaaagcag

SEQ ID NO: 571283 - DNA, 96 bp, Homo sapiens
ctatgaatacttaggaaacagccctcgactagtgatcactcctctaactgacaggtatatggctccatccctcgactccgtgctgatggactgcag

SEQ ID NO: 571284 - DNA, 99 bp, Homo sapiens
cccgcctccgggcatcttcaactcctgatgttcaccaaggtgaagctggagcaggtgctgaaaggcccagaggaagccctcgtgacctgcagacaagtg

SEQ ID NO: 571285 - DNA, 87 bp, Homo sapiens
aactgtgggctcctggtgtctctggaaagatgtgtcatggcaatgctgagaaggaggatcagggatgagaagaccaacgttaggaag

SEQ ID NO: 571286 - DNA, 101 bp, Homo sapiens
aaaaaggggccagactgtgttgccttcttgagcctggtctgactcctgagtggaagtctgattccaggggctatcaacagcaggacgcccatgaattcatg

SEQ ID NO: 571287 - DNA, 100 bp, Homo sapiens
gctgcagagacaggcgttcgaggagatcatcctgcagtattgtgaataagtggaatacagctctcattggccttatgacatactttcgggaggctgtggt

SEQ ID NO: 571288 - DNA, 50 bp, Homo sapiens
cgccggtctctgttccgcaggatggacctccacaaaaagtactcgtacat

SEQ ID NO: 571289 - DNA, 75 bp, Homo sapiens
tttccttgcttaaacactacagtgatttcttccaaggtcaaaggacgaagaaaaagatgctatggacgtatggtg

SEQ ID NO: 571290 - DNA, 100 bp, Homo sapiens
gaacgaccactaatgcaaggaccaaggacgagaccacggaaacctatccgatgtggggaagtactctttgcagccaaaccaaacaggaagcttacttttc

SEQ ID NO: 571291 - DNA, 122 bp, Homo sapiens
gccagccccacccttagaaaagatgttttccatgaggatcgtctgcctggtcctaagtgtggtgggcacagcatggtatgttgctaccagagacaactgctgcatcttagatgaaagattcg

SEQ ID NO: 571292 - DNA, 82 bp, Homo sapiens
atattgacaagtgcagacagcagcttcatgatattactgtaccgttagaagtttttgacagtgtttggccagcgcttggatg

SEQ ID NO: 571293 - DNA, 90 bp, Homo sapiens
ttcacagcactctgggcgaaaattggatgtgaaaatgaagccagaccgaggccccttcacagatgtagtcactacaaatcttaaattgcg

SEQ ID NO: 571294 - DNA, 50 bp, Homo sapiens
gatccgggagcacgtcatctccatcgaggaagaagctcattcacacagaa

SEQ ID NO: 571295 - DNA, 75 bp, Homo sapiens
gaagggagttggtaaacgctgtagcactttaagccctcaggaggaccattctaacagaaagtctgcctatgatcc

SEQ ID NO: 571296 - DNA, 74 bp, Homo sapiens
tgcgcctcgtccagcctaggttccacccttttctgggaacttcgtgccctcgtgaggctggcatgcaggatggc

SEQ ID NO: 571297 - DNA, 100 bp, Homo sapiens
gagaactacaggaacatggtcttgctgggatctgaacgtctatgacactctttcgagctgacacagtgaagaacatagaaggagaactcacccagtctgc

SEQ ID NO: 571298 - DNA, 98 bp, Homo sapiens
cagcaagaaggtccagcagcagctgtggctccagtatcagaaaggagtcgggtgggagaatgtgctgctaaaggaaggtgagtcagcctcgaacgcca

SEQ ID NO: 571299 - DNA, 88 bp, Homo sapiens
cgtgggcgtaggaccctccgagccagggaaagaagccctcgtggatggaggaagaagatttatcttttctctacaagagcagcccagg

SEQ ID NO: 571300 - DNA, 83 bp, Homo sapiens
caagaggaccagactttgttaatgaagggtggcccagttgaaatccttcccttcctctaccttggaagtgcctaccatgcatc

SEQ ID NO: 571301 - DNA, 100 bp, Homo sapiens
ctgagtctccccagaagaggaagtttgtgtttgatcagtatgtaaagaccagggcagaggaagaacgcagggaaaagaaaaataaaataatgcaagccaa

SEQ ID NO: 571302 - DNA, 74 bp, Homo sapiens
acaggactaatagctggcaaatttctgttccatcagcgtttgtttggtgctgacgtacagaaaggcaaatattg

SEQ ID NO: 571303 - DNA, 100 bp, Homo sapiens
ttcagccattgggtcacaagcgatgaaaagagcaccttgaagggcagagcggcttgggtaaatccaccttaatcaacaccctcttcaaatccaaaatcag

SEQ ID NO: 571304 - DNA, 90 bp, Homo sapiens
gaggttgaactggggtgaaccggaggagatgttaaagtaacccatcttgcaggacgacattgaagattggtcttctgttgatctaagatg

SEQ ID NO: 571305 - DNA, 83 bp, Homo sapiens
ctcctcgaactgctgagggagctgtcaatctcatctcaagattgacgtgagtgaattcagatataactcaagcttgttagagg

SEQ ID NO: 571306 - DNA, 50 bp, Homo sapiens
tgcatatagatggccttgatgatacggggcttacggtgagacatatcctg

SEQ ID NO: 571307 - DNA, 83 bp, Homo sapiens
ctcgggaccggctgtatgattaggccacaatcttcaatgagtaaacatattcctgcggcggcggcggcgcccgggagccggag

SEQ ID NO: 571308 - DNA, 80 bp, Homo sapiens
agctgaaagcctctaacacccacagatccctctatgactgcaatgtgagaaaatgtgccagaggaacttcaagaaccatt

SEQ ID NO: 571309 - DNA, 96 bp, Homo sapiens
cgaagctggccgagcaggctgagcgatacgacggtgagagaacgccgagccgtcgccgcagcctccgccgccgagaagcccttgttcccgctgctg

SEQ ID NO: 571310 - DNA, 98 bp, Homo sapiens
cacccgaagaagagaccatccatatttccagtcaagtccatcatctccagaaccagctagtcttcctgcagaagatattagtgcaaactccaatggcc

SEQ ID NO: 571311 - DNA, 50 bp, Homo sapiens
gctggattgaactcagagaagccggggtgcagtagacattgttgcaatca

SEQ ID NO: 571312 - DNA, 100 bp, Homo sapiens
tggaggcggcccgcttcctggaatggcaagcgcagcaacaacagagagcacgtggtgacttaagagattaaaattaatttggttgctgttggttctgaac

SEQ ID NO: 571313 - DNA, 98 bp, Homo sapiens
ggctcggcggcggcggccaggtccctgctgaatcacacgccgccatccgggaggcccagggaagatgagtgtgggtcagagagccaaactgactatat

SEQ ID NO: 571314 - DNA, 82 bp, Homo sapiens
gccgtgggcagcggctgccgcgcctgtctgcccgagggagggactggtgattgcagctggaagtgcccatgaccgagctggc

SEQ ID NO: 571315 - DNA, 100 bp, Homo sapiens
ctttgttggtggactactctcagcctactatctgtctggagaagagaacccttaggagaaatcttgagagtggacagcaattgtgaagatcgccagagag

SEQ ID NO: 571316 - DNA, 97 bp, Homo sapiens
ggttgtaaacttgacctaaagaccattgcacttcgtgcccgaaacgccgaatataatcccaaggtccacaaggagaatccagaacaggtccaccagg

SEQ ID NO: 571317 - DNA, 99 bp, Homo sapiens
caatcggaaaccacgcgtcctactacaaagatgctctgcggtttttgggctgtgttgacatcaaggatctaccaggctgaactccagtgcacccagtta

SEQ ID NO: 571318 - DNA, 74 bp, Homo sapiens
cttgtccagttactctaacaagtctggagaacattctagtatgccagtagaaaaaaatatcactttagaaaggc

SEQ ID NO: 571319 - DNA, 75 bp, Homo sapiens
atttgtttctcattctcatatttcaccaataaagagctggcggagttgcctttgatacggttagacttctcatgc

SEQ ID NO: 571320 - DNA, 75 bp, Homo sapiens
ccgcctccgcctgccttctgccgccggccggcgcgtcgtccccacagttggaatcgaagcctcttaaaatggcag

SEQ ID NO: 571321 - DNA, 50 bp, Homo sapiens
cctcagccaccgctccctcttcccacgcaatggcaccagcatgatatcat

SEQ ID NO: 571322 - DNA, 98 bp, Homo sapiens
agagtgggacctagatatcaagcagacattccagaaatgctgttagaaggtggagccgccaccaaaatgcagattttcgtgaaaacccttacggggaa

SEQ ID NO: 571323 - DNA, 100 bp, Homo sapiens
gttgcagctgattaaggactatcgggagaaagtggagtccgagctgagatccatctgcaccacggtgctgaaatatggctacacacacctttctgcagga

SEQ ID NO: 571324 - DNA, 99 bp, Homo sapiens
aaactgcttgaacatcctttgactggttagccagatctgcgagtgaagagggacgagggaaaagaaacaaagccacagacgcaacttgagactcccgca

SEQ ID NO: 571325 - DNA, 90 bp, Homo sapiens
tgggattccagtagcaattttcataactctggtgaatgtattcattgatcagaatcaagctttgcgactctgtctgggtagcactagtgt

SEQ ID NO: 571326 - DNA, 76 bp, Homo sapiens
ggtttgtgctaaagccccagagagagggtggagtgacttctgacagctctctccatggaaggaggcggcggccgcg

SEQ ID NO: 571327 - DNA, 90 bp, Homo sapiens
ggctgggctgaggcgccgcggtaccatgaggcgccggggatggtttagacaacagtgtagcttcacctggtacaggtgacgatgatgatc

SEQ ID NO: 571328 - DNA, 82 bp, Homo sapiens
ctcggaaggcgcgggcaggagcctggcgaggatgcaccttcccctgccttggaaagccattcaaactcctccccacgacact

SEQ ID NO: 571329 - DNA, 90 bp, Homo sapiens
gagagggaggaaggatctcaagagcaggacgaattgcatcacagagacaccaagctttatcttcaagccaggatgaagggagactgggca

SEQ ID NO: 571330 - DNA, 96 bp, Homo sapiens
catccttcctacatcagcaacagtacaagccagctgccatgttgtgagcacataccacatagctccatggagatgcccatgtgactgtgatgaaga

SEQ ID NO: 571331 - DNA, 100 bp, Homo sapiens
aactatcagtacttggacaagatgaacaacaatatcggcattctgtgctacgaagtttccctgaaacctgggctcttgaagacgcatcactggagcagat

SEQ ID NO: 571332 - DNA, 50 bp, Homo sapiens
tgccggaatttgaaaagtgcctggccatggagttggggagagaatgtcta

SEQ ID NO: 571333 - DNA, 90 bp, Homo sapiens
gaccgagagcgcgaatatcgtcatcgttagaagacacttcgtgtatgatcatgtgttcgctgagaagatcacttccttgcaaggtcagcc

SEQ ID NO: 571334 - DNA, 100 bp, Homo sapiens
ggagaggagcatgaatggagcaaaatggcggatcatgtgcaggtaaatcaacagactgggaagatgatggttggggagcatgggaagaaaatgaaccaca

SEQ ID NO: 571335 - DNA, 80 bp, Homo sapiens
agcctatgattgggctggtacccatcctcaagggaggccgtttctaccaggacaatctctatgggaagcagaaggcaagg

SEQ ID NO: 571336 - DNA, 100 bp, Homo sapiens
atcgacctggtcaaccgcgaccctaaacacctcaacgatgacgtggtcaagtgtactaatggtcacttgatgtgcgctggctgttttatccacctactag

SEQ ID NO: 571337 - DNA, 75 bp, Homo sapiens
cttcctcaagccatctcagcccttccccaaggtgcgccaagttgctgctggaagcaggagcgacggtgaacctgg

SEQ ID NO: 571338 - DNA, 95 bp, Homo sapiens
tgtcacgacggacaaatatgtctctgggatctttcagtagaactgcaagtgtgatgaatgcagactctgctaccattttggctgtttggatcctc

SEQ ID NO: 571339 - DNA, 80 bp, Homo sapiens
ctggggctgcctgccgggcggccgggcgcggcgagcccaggtgagttgctacagtggctggagagacgacatctgctcca

SEQ ID NO: 571340 - DNA, 82 bp, Homo sapiens
ctcggcggcggcggcggcgggcatcgcagtggcgcagggcgaactttctgaccaagtatacaactacccagagggcctagga

SEQ ID NO: 571341 - DNA, 83 bp, Homo sapiens
tcagagtcggagagctccagtgagtccagctcctctgacagcgaagactccgaaacaggtgtttcccattaaacactaccagg

SEQ ID NO: 571342 - DNA, 75 bp, Homo sapiens
tacagcttagcttccaggatgatgactctcgtgctcattcccccatgatcgccgtaggaagtgatgacagtagcc

SEQ ID NO: 571343 - DNA, 88 bp, Homo sapiens
tcaagatggcggacaaaacgccaggcggatctcagaaggccagttcaaaggggaacagggaacgtgtctgccaggagaacagacagtg

SEQ ID NO: 571344 - DNA, 100 bp, Homo sapiens
ccaggacgatttaaggatttttaccagtttacttttaattttgcaaagaatccaggacaaaaaggattagtaacaaatgtggcaattattttggatctat

SEQ ID NO: 571345 - DNA, 100 bp, Homo sapiens
agagcgaagggggagtgtccggttgatcccagtttgtcaggcaggccactgtagctacagcaagctgggtagcaggcagatccaaaggatatcatgaagt

SEQ ID NO: 571346 - DNA, 74 bp, Homo sapiens
ggtattgccgctgttactgatatacctttagggtaagggactgttctgaagaacctttccatttagtgatcaag

SEQ ID NO: 571347 - DNA, 100 bp, Homo sapiens
catcaccaattgcaactgcttcaggacaaagggcggcgactggcggcgcgatggacctgaccgggctcctgctggacgaagaaggcaccttctccctcgc

SEQ ID NO: 571348 - DNA, 75 bp, Homo sapiens
gaagggaacgtggaaagcgcatacaggaccctaaacaggaacatgtttgacaagctgaaccgtgatgcctttcat

SEQ ID NO: 571349 - DNA, 75 bp, Homo sapiens
tgctcttccaacaccagtggaagatgatcacatcccaggtgtctcttttgacaagacttcagctacctggcttgc

SEQ ID NO: 571350 - DNA, 96 bp, Homo sapiens
aggcgggcggccccggagcgctggtgccggcagaggcggcgacggtggcgcccctcctcatcatgagcctgtcatagggaactgcatggatagaag

SEQ ID NO: 571351 - DNA, 75 bp, Homo sapiens
agaactcgcgtttccacttcagagatctggttaatttggagtggcccctggagtcagtttcctacaccatccgag

SEQ ID NO: 571352 - DNA, 90 bp, Homo sapiens
gttgaaaagtactcatctcctggtctgacatccaaagagtcactctttgttcgaatgctctccccggaggctcagccccctctgctcccc

SEQ ID NO: 571353 - DNA, 90 bp, Homo sapiens
gcaccatgagcgtcccggccttcatcgacatcagtgaagaagatcagtggtcagcaagtccatctgggcagcgcagagggaccaaaggtg

SEQ ID NO: 571354 - DNA, 75 bp, Homo sapiens
agagtacgagtctgaggcggagggagtaatgaataactgaagtgaagtgatggactccgatttggagagtagtaa

SEQ ID NO: 571355 - DNA, 74 bp, Homo sapiens
acaaagtgaccaagaacgtgagcaagcccaggcacagccgacgccgcgggaatgctgaccccctgaaggtgtac

SEQ ID NO: 571356 - DNA, 75 bp, Homo sapiens
tattttgttttacgagatgggtttctctttctttacaaggatgtgaagaaaaagttagctgctatgcctgaccat

SEQ ID NO: 571357 - DNA, 74 bp, Homo sapiens
ttggatgtgaaaatgaagccagaccgaggtactccaaagattcaggtttactcacgtcatccagcagagaatgg

SEQ ID NO: 571358 - DNA, 82 bp, Homo sapiens
ccattggatttaaaagacagtcctcgtcagcactgactttcagctatggaatcggctcccgtagggccattgaaatgtgaag

SEQ ID NO: 571359 - DNA, 98 bp, Homo sapiens
tcctctccaagatgcagttttttgatgctgaggagctcctggtcgatgaagaggatgatgtttttggtgaagggtgtcgtagtcattcttcagcacaa

SEQ ID NO: 571360 - DNA, 100 bp, Homo sapiens
tgtctcttatttagttctggggagcgcctcgtcgacatgagtgatgtggaggaaaacaacttcgagggcagagtactttggaagttcgtcttatgggctg

SEQ ID NO: 571361 - DNA, 101 bp, Homo sapiens
atcaagctggaacaggagttccgatcgacccggtaccaagaaggggagtgcccgcggcaggttgttgatcattatgaaaatcctagaaacgtggggtccct

SEQ ID NO: 571362 - DNA, 100 bp, Homo sapiens
cagccctcacccctgccaggactcctctgggcttgcagtcgctcccccgtacctctcctggccccctcagttctcccagcgccgcccctggctgggggca

SEQ ID NO: 571363 - DNA, 51 bp, Homo sapiens
ctggagcagaaattggaggctcagcatagtggacgtgatgctgaatccagg

SEQ ID NO: 571364 - DNA, 83 bp, Homo sapiens
atttaagagagctctggacaagctggaatgcatccaagagaatccctcaacatgctgctccaagcccagccctcagccatggc

SEQ ID NO: 571365 - DNA, 100 bp, Homo sapiens
aatttaggaaccacccatttgctgcgtcttacatccagtctgggccgactaaatgaattgatgtctcaaatcaggatgcagaatcattttggagcagtca

SEQ ID NO: 571366 - DNA, 91 bp, Homo sapiens
cgttccctgagctggagcgggtgctgcaggcgccgccgccggacgtcggcaacggagaaggtttgcatcgccagcttctatatattacggc

SEQ ID NO: 571367 - DNA, 100 bp, Homo sapiens
gaggatgaattcgacctggagaacgcagtgctcttcgaagtggcctgggaggtggctaacaaggggtctgttcctggtttcccagatgcataaaggaaga

SEQ ID NO: 571368 - DNA, 82 bp, Homo sapiens
ggatcctttatcctggtcatcttctatttccaaagtgctacctttttacccacacttaagtgacgcaaaatgcccttcaatg

SEQ ID NO: 571369 - DNA, 98 bp, Homo sapiens
ggcgacggcgtcctcaggagctgtggggtcccctgctagaagtgggggactcggcgggctctgtcagattcagggagttttgtatcttctcgagcccg

SEQ ID NO: 571370 - DNA, 88 bp, Homo sapiens
aggagcggaaagactagatgccgatccaaaaggtaaaccgtcctattggcagggtacagatcttcactgcagacttatctgaaatacc

SEQ ID NO: 571371 - DNA, 51 bp, Homo sapiens
aaattctgaactcaggacttggcaagtgatgtggaaacagctgtaaaattt

SEQ ID NO: 571372 - DNA, 82 bp, Homo sapiens
agtccacccaccgccgccgcctcccagtgtatccctggatatcgggctgaggaagcagtggaaatgttaaagaccttctaca

SEQ ID NO: 571373 - DNA, 100 bp, Homo sapiens
gggagcgcctcgtcgacatgagtgatgtggaggaaaacaacttcgagggcagagcagtggagctactgctgtggttcaggcagccctatgcaaacccagg

SEQ ID NO: 571374 - DNA, 51 bp, Homo sapiens
tcttcttcactgcctctggcatggatgagggcaagaagaggcagagctgga

SEQ ID NO: 571375 - DNA, 75 bp, Homo sapiens
ctgctcttcctgaggttttcctaagccatcccctggcggaaccgcccccagatacactctgtgcagttttagaga

SEQ ID NO: 571376 - DNA, 83 bp, Homo sapiens
cccgaactccaggacagcatccaggcctcattggacagcattcgaggctactgcagcactggggtgtcagttgttggtccgac

SEQ ID NO: 571377 - DNA, 107 bp, Homo sapiens
tgccccaccatgtcagacgcagccgtagacaccagctccgaaatcaccaccaagagcccactgcggaagagggcagcccggcaagcccgggccctgagcctggaccc

SEQ ID NO: 571378 - DNA, 100 bp, Homo sapiens
tatgctatgaggatgacaaactctggagtaattggagccaagaaatgagtataggtaaaattgcggagttgctctctccgggctcagtggatccattgac

SEQ ID NO: 571379 - DNA, 100 bp, Homo sapiens
tgtttgacacaactgtagagcagctgtatagcatcttcactgtaaaggaggaacgagaatgaatatgactcaagcccgggttctggtggctgcagtggtg

SEQ ID NO: 571380 - DNA, 74 bp, Homo sapiens
tgagttcctgctggagaaaggctatgaggagcaagtaatactgcagacacattgtttcaagaagtattaggtcg

SEQ ID NO: 571381 - DNA, 73 bp, Homo sapiens
acaggctgtgtgtcggccggcggggattcagtaatctatgccagcaattatgacaatgttagcagaccatgca

SEQ ID NO: 571382 - DNA, 82 bp, Homo sapiens
ggtgatggagacacccgtgggtgatgcagacgcaagcttaactctgctgtttgctgcatgctgcatgagacccagggtcctg

SEQ ID NO: 571383 - DNA, 100 bp, Homo sapiens
tggaaaaactcagtgagacacaatttatcattgaataagtgttttaagaaagtggacaaagagaggagtcaggactttgtttggagaagctgcctatttc

SEQ ID NO: 571384 - DNA, 75 bp, Homo sapiens
ccgggcctatcgtagtccactgcagcccagatggctacctgtatgagcgtgaggccatcctggagtacattctgc

SEQ ID NO: 571385 - DNA, 75 bp, Homo sapiens
gagaaggatgacaccggagtttgacgaagaggtggtttttgagccttatgccagcctggaccatcttggaggcag

SEQ ID NO: 571386 - DNA, 87 bp, Homo sapiens
ggactggaaatcaaatgttacagactctaaaatagagctcaagcttgagaagagagaaccactaaagggcagagcaaagactccagt

SEQ ID NO: 571387 - DNA, 88 bp, Homo sapiens
cgtggcaggttcaaatggctggtataattataggcaccagagttatgcccagccaagtcttcagtatatccaggggcaacagattttc

SEQ ID NO: 571388 - DNA, 50 bp, Homo sapiens
acatcctcaggatccagaaaagactattttgacatcgtaaagaatcccat

SEQ ID NO: 571389 - DNA, 100 bp, Homo sapiens
gtaggagccactatgaggagggccctgggaaggctgctggtggtctacccttggacccagaggttctttgagtcctttggggatctgtccactcctgatg

SEQ ID NO: 571390 - DNA, 83 bp, Homo sapiens
cgggtggagctgagccggagacagatgatatcatcaagttgaatcgaaaggaagggaagaagcagaattttccaagactaaat

SEQ ID NO: 571391 - DNA, 100 bp, Homo sapiens
ccgtcctgaggagcctcctggcctgcagcttctgtgtgctcctgagagttttttcaagggggaacatggcaaaggtgttcagtttcatccttgttaccac

SEQ ID NO: 571392 - DNA, 75 bp, Homo sapiens
ttgctcttcgagggcgagaagaagcatccattctggacttgcactcaggggccctgtctgtcgggaagcactttg

SEQ ID NO: 571393 - DNA, 85 bp, Homo sapiens
aacatctagccgaattggtagctctatgaaaagtgtaggagaggcggaccttgccaagtatatctgtgaaaatcaagattcgatc

SEQ ID NO: 571394 - DNA, 74 bp, Homo sapiens
atggatattgaaatggacagtggagatgaagcctaagaatatgatcaggacatcaaaggccagttctggaatga

SEQ ID NO: 571395 - DNA, 75 bp, Homo sapiens
ctaatagaactggaaaaaaacatgtcggatgaagagaaacagatgagctttgatccaaaccttctccacaacaat

SEQ ID NO: 571396 - DNA, 101 bp, Homo sapiens
tcaatgccagaatggtgtttgaaaaggttcctggtagagttacacagttgtgccgccagtatagcgacatgcctcctttgacgttagagggcatccaggac

SEQ ID NO: 571397 - DNA, 75 bp, Homo sapiens
gagagagtcactttatctgtccaggcctataaggcatcccaggatttggaattcagctgtgagctcatgagctga

SEQ ID NO: 571398 - DNA, 80 bp, Homo sapiens
tgcaccactggcatggatggcggcatgagtatctgggatgtgaagataacgaaggaggcccaacttcattcaataaggag

SEQ ID NO: 571399 - DNA, 100 bp, Homo sapiens
tccggatccaggatggtactgctgtccctttccccccaacacatcgcttgacatctgaagaagtatttgatttggatgggatacccagggttgatgttct

SEQ ID NO: 571400 - DNA, 98 bp, Homo sapiens
gagctcggaggcggcgaggagcgcctgcctgaggagagcagatccaacttagaaataatgtttcattcaagataaggctcgtggcttaggagattgtg

SEQ ID NO: 571401 - DNA, 100 bp, Homo sapiens
gtgacatcaatgaaaggagggttctgacacgttctcacctcgcgggatggcagctgctgatttgtcccatgatgttttcaaactgcagtaaacaatcaat

SEQ ID NO: 571402 - DNA, 51 bp, Homo sapiens
aagtgcgcgccctggcgggtccggaccaagatgacgtccggttgtttgcct

SEQ ID NO: 571403 - DNA, 101 bp, Homo sapiens
agcgctcccagggctcgtcgcagtttcgcagccagggcagccaggcagagctgcacccgctgccccagctcaaagatttagtacctcaagacaaactctta

SEQ ID NO: 571404 - DNA, 100 bp, Homo sapiens
gagcactgcgctgtcagcgatagcccagtggatggccattccaggccctggccaacgtcaacattgggagcctcatctgcaatgtaggggccggtggacc

SEQ ID NO: 571405 - DNA, 74 bp, Homo sapiens
ctagattccagccaggatacagatcttaaatttgtcagggaggagtctgctactagtcttatcagctcttaaaa

SEQ ID NO: 571406 - DNA, 100 bp, Homo sapiens
actcggtcttgggtgatacggcgtcttgccaccgggcctgtcagttgacctaccccttgcacacctaccctaagggagctgtgatacacaagttgggcat

SEQ ID NO: 571407 - DNA, 75 bp, Homo sapiens
ctgggactttcttcgttgccatgaggaaagaattctccgaggtaacggcgactgtgactgtggtgaatgtgtgtg

SEQ ID NO: 571408 - DNA, 74 bp, Homo sapiens
agcgcctgcgaccccagtcggtgctccggggaggtcacctgacgaggaggtactccaaagattcaggtttactc

SEQ ID NO: 571409 - DNA, 90 bp, Homo sapiens
cgtggaggtggccgtggaggcagaggtggcatggggtgagctgtcagggagaaatgtcgaaacaggtcaagagatgttctgctcaggttt

SEQ ID NO: 571410 - DNA, 82 bp, Homo sapiens
gaattttccaaatgaatttgcaaaacttactgtaggtgatgatgaacagtctacacagatggctgcaagttgggaagatgat

SEQ ID NO: 571411 - DNA, 98 bp, Homo sapiens
cgggcctcaggggctgctctgaggaccgatgactcggaaagcgctcagaagaacgcttcgcccgttggtgctatataacgtcctcctctcccagccac

SEQ ID NO: 571412 - DNA, 98 bp, Homo sapiens
cttaatggaagaagatgaagatgcttacaagaaacagttctctcaatacataaagaacagcgtaactccagacatgggtttttaatgaccacaacaag

SEQ ID NO: 571413 - DNA, 100 bp, Homo sapiens
cgtggacgagctccaggcctacgcgcagctcgtgtccctggggaatcctgacttcatcgaagtgaaggtcatttattggggaggcagtgttccctaaaca

SEQ ID NO: 571414 - DNA, 75 bp, Homo sapiens
ctcaaatttcattgtgggcatgtgcttccagtatgtggagacagaggaactgaaccgcgaggtggccaccaacag

SEQ ID NO: 571415 - DNA, 74 bp, Homo sapiens
acaaaattctgaactcaggacttggcaattccttcctgtgtacagcccttctgaggaggagaagaggaaccccg

SEQ ID NO: 571416 - DNA, 75 bp, Homo sapiens
cgggccagagacgacaacccgggcctccgaggtcagttcaccgggacctggaggcccagattgcgatcgtgacgg

SEQ ID NO: 571417 - DNA, 80 bp, Homo sapiens
gctgccgtcgccgccgccaccatgcccaagagaaaggaaattcagttcatgaagataagaagtttcttgacaaatacatg

SEQ ID NO: 571418 - DNA, 97 bp, Homo sapiens
aagactggtccacggagtgtatgaccacaaacagccatcaagaccaccaaatcccattgaatttctagcatcttatcttttaaaaaacaaggcacag

SEQ ID NO: 571419 - DNA, 100 bp, Homo sapiens
gtggatcgctgtgatcgtcacttgggtttggaaatcccttgtctccaggttgctgggattgacttcttgctcaattgaaacactcattcaatggagacaa

SEQ ID NO: 571420 - DNA, 100 bp, Homo sapiens
ggagtgagaagcaagaaggccctggacacagcaatatctctgggctttcacaggttcgaaatgtgaggtgcattaaatgtcacaaatggggtcatgtcaa

SEQ ID NO: 571421 - DNA, 124 bp, Homo sapiens
gagcgttctaaaggaaggcgtccgttggccttcgtacccgtcttgattgaggtcatcatcagatttgaaatatttaaagtggatacaaaactatttcagcaatgcagacaattaagtgtgttgt

SEQ ID NO: 571422 - DNA, 51 bp, Homo sapiens
ctggccagctgtcggaattaaaggatcagactgctgatcttggacttgata

SEQ ID NO: 571423 - DNA, 75 bp, Homo sapiens
ataggattagatgatccaagtcaccaagaaattactgtctcaagtgatacgaagcctattgttctacattcaaga

SEQ ID NO: 571424 - DNA, 83 bp, Homo sapiens
gtactacgcccgctccgaggactacgtggagctggtgcagcggaagcgagtgatgagccccaagagcctcaagaacccaacaa

SEQ ID NO: 571425 - DNA, 100 bp, Homo sapiens
tttttctggaatgtcattatcagacacaatggaatacaaacagaagcttgcacgagtaacccaggtccgcaaggaactgaaatcccatattcagagcttg

SEQ ID NO: 571426 - DNA, 98 bp, Homo sapiens
aggtttaaagtctttgcagactacgaagcctatgtcaagtgtcaagataaagtgagtcagctgtacatgatctgtgtcgagggcaatattgcaagtgg

SEQ ID NO: 571427 - DNA, 100 bp, Homo sapiens
ctggggttgcttgtcagtagcgggcaagatacagaattcgttgttgggaaggactggggaaacagctgtaacatttgccaccctcagaagctgctggtcc

SEQ ID NO: 571428 - DNA, 104 bp, Homo sapiens
gcaaaatgggcaagaagaaaacactcgtagtgaagaaaaccttgaatcctgtgtataacgaaatactgcggatgagctttgatccaaaccttctccacaacaat

SEQ ID NO: 571429 - DNA, 75 bp, Homo sapiens
tattcttttaagaggtctgcctggttctgggaaaacaacattgtctcgttctcgaggctggacagtccaagatca

SEQ ID NO: 571430 - DNA, 74 bp, Homo sapiens
tcacactggccttgatttggcagctaatgagaaggtttgtttggcagctgtgggcttagtgggagacttgtgcc

SEQ ID NO: 571431 - DNA, 98 bp, Homo sapiens
caggaactctacaacccaatccaggaggacaaagacactgattctaccaaagagcctctggatgaccttttccccaatgatgaagacgacccagggca

SEQ ID NO: 571432 - DNA, 96 bp, Homo sapiens
aattatcatctggaagtaaaagatgttctgaagactttagtcctctctcacctgatgtgcctatggtggttatcactaggctaaaactggacaaag

SEQ ID NO: 571433 - DNA, 96 bp, Homo sapiens
gtccgtgccagtgaccggaggcggcggcggcgagcggttccttgtgggctagggtggcattaacaccagtgtgccatatggtggtatctatgtgaa

SEQ ID NO: 571434 - DNA, 100 bp, Homo sapiens
acggtctgtgagcaaggaatcagttgcctcaatgggagctgactcaggagatgactttgaactggaagaggaggcaacagtatttggggcaagaagtttg

SEQ ID NO: 571435 - DNA, 82 bp, Homo sapiens
gtgagtgccgaggtgtacaccgaggaggacgccgtgtcctacgtcaggaagatgtgaagttcatttccaatccgccctccat

SEQ ID NO: 571436 - DNA, 82 bp, Homo sapiens
cttgggacccaccgctgccctcagctccgagtccagggcgaggtgttggagagcacaatggctgaacaagtccttcctcagg

SEQ ID NO: 571437 - DNA, 75 bp, Homo sapiens
agtgcccaaactgaaaaagctggatgagtgtgaacatggctacgcctcttcattcccgtccatgccgagcccccg

SEQ ID NO: 571438 - DNA, 74 bp, Homo sapiens
ttggaccccgcggcgcccctcggcctcggagcaacgagcgcagcgccgccctgggcgctgcctatggcacagcc

SEQ ID NO: 571439 - DNA, 74 bp, Homo sapiens
cccaggatagaagagtcaataactgaagacttaagaaactgggagtgatttttccatgtttgaagctttgcgag

SEQ ID NO: 571440 - DNA, 109 bp, Homo sapiens
gccggagcgcggagcccggctcccgcaccatggaggaggacgacagctacggtattgttgcagcatctggcagtgagactgaggatgaggacagcatggacattccctt

SEQ ID NO: 571441 - DNA, 75 bp, Homo sapiens
gcaaataatcacagattagctctctctgatgtaaaggatggagtaaatcaagcagcacctgcatttggatttggc

SEQ ID NO: 571442 - DNA, 90 bp, Homo sapiens
ccatcctccagcacgcctggttcttcttccagctcatgatcctgaccaagatgaagcagcagggtcatgagacagccgcctgtccggaga

SEQ ID NO: 571443 - DNA, 100 bp, Homo sapiens
cataccacccaggtgttccggtctttcacgatgcattaaaggaatgtatacaaagactatcgcttccttgagctggcatgtgattcccaggaggatgtcg

SEQ ID NO: 571444 - DNA, 100 bp, Homo sapiens
tgaaagggaaagtgatgtccctctgaaaactgaggaatttgaagtgaccaaaacagcagtcttaggaaaagtcctcagtgctgtgggcagtgcccagcta

SEQ ID NO: 571445 - DNA, 101 bp, Homo sapiens
cttatggcccccctcagccctggggccaccctgacgtccacatcatgcagcaccatgtcctgcctatccaggccaggatttgtacacacagatatgacgaa

SEQ ID NO: 571446 - DNA, 51 bp, Homo sapiens
cgcgttacgggcggtacggaggagggacagaatgatgctgctgaaattgga

SEQ ID NO: 571447 - DNA, 83 bp, Homo sapiens
ctcggcgccagcagcccggaggcccggcccgcgcaggaggcgctcctccttcccaccgggtattacttatgaccatgtcgaat

SEQ ID NO: 571448 - DNA, 82 bp, Homo sapiens
gtggttgtgtggtcgcgtctcggaaaccggtagcgcttgcagcatggtggacgacatccttggagaaggcagcgacgacagc

SEQ ID NO: 571449 - DNA, 146 bp, Homo sapiens
tcctgagtttcccacttgattacccgttaagtcccccaaagatgagatttacctgtgagatgtttcatcccaacaacctgcgccccctggacatcctggcggaagtggtcccttctgatggcgccacaagcgggatcaggatagtt

SEQ ID NO: 571450 - DNA, 50 bp, Homo sapiens
tctacttccacagcagtatttggcacagaaacagattgtctcagtttacc

SEQ ID NO: 571451 - DNA, 75 bp, Homo sapiens
cccccaccttcaatgtcactgtcaccaagactgacaagagaggctgagagagaagaggttcgagactgggtgctt

SEQ ID NO: 571452 - DNA, 100 bp, Homo sapiens
tgggggacccctggccccccgagcgccgggaccatgtcccagctgcagctgtggctgcagtttgaggctctgaacaagaaatgttcttttggggccagag

SEQ ID NO: 571453 - DNA, 87 bp, Homo sapiens
gtttacctggcactcctggacaggatggattgccagggcttcctggcccgaaaggagagcctaatctgaaagcggctgatactgacc

SEQ ID NO: 571454 - DNA, 97 bp, Homo sapiens
ccatgacagaagcagaacggtttcagcctccagtactggggatttgccaaaagccctttctaaggcacaaaatgatgtgatggaaatgaagatgcag

SEQ ID NO: 571455 - DNA, 100 bp, Homo sapiens
caagggttcggccgtgccctccgacagccaggcccgcgagaagccaagactaaggggctgcagagcggggtggacattggcgtcaagtactcggagaagc

SEQ ID NO: 571456 - DNA, 97 bp, Homo sapiens
gttgagtggtcggcttggtgtggtgtgcggaggagctccaggcccgtcggcgcggagcatttaaatcaaacggtattgagatggattgggttatgaa

SEQ ID NO: 571457 - DNA, 75 bp, Homo sapiens
ccaggagcctcaaggcggcccggcgggcgactggacggccggacaggaattacatgaacgacagccttcgcaccg

SEQ ID NO: 571458 - DNA, 100 bp, Homo sapiens
ctgatggcaaaatcatgtatatatccgagaccgcttctgtccatttaggcttatcccaggctgaaggtgatgtggccgccctcaaccgacgcatccagct

SEQ ID NO: 571459 - DNA, 100 bp, Homo sapiens
cagagcgcgagaagctgccgcccatcgtatcggcgggcgccggcgcgaccgcggtccagtggtttacgtcttggatcttgcagatagactgatctcaaaa

SEQ ID NO: 571460 - DNA, 89 bp, Homo sapiens
ccgagaacgtgcgggaagagaagatcatcgagcatttcaaacggatgataatgaagataattcaaatgatgggacccagccatccaaaa

SEQ ID NO: 571461 - DNA, 100 bp, Homo sapiens
agttgtaaattacagagaacctaagtctgtttgcaaagcacctgaactgatggaggatacctctttcccaagtggagggaatgctattggtgtgaactcc

SEQ ID NO: 571462 - DNA, 89 bp, Homo sapiens
gctcatacagaattacgcatttccacttctaatggtttggaaagcagagtggagaacaaagagttgattccaatgcaacaaattttaga

SEQ ID NO: 571463 - DNA, 100 bp, Homo sapiens
agacgctgatcaccgtttccagtcattttaaaaattcaggatattgactgggtacagacagagaagcacgtgtttgagcaggcatccagcaaccccttcc

SEQ ID NO: 571464 - DNA, 50 bp, Homo sapiens
gaagctttgagtaacattgccagagagtatcctggtgtgaaccagctatc

SEQ ID NO: 571465 - DNA, 75 bp, Homo sapiens
cctcgcagaacgcctttatgcagaaggcccgacaacaagctcaaatacgtcaccaaatggcagaggacagcaaag

SEQ ID NO: 571466 - DNA, 117 bp, Homo sapiens
aaagtgctgggattataggcgtgagccaccgtgcctggctgaaggtgaccaagaatatggcccaggtgaccaaagccctggacaaggccctgagcaccatggacctgcagaaggtct

SEQ ID NO: 571467 - DNA, 83 bp, Homo sapiens
agggtggacgaccccgaactccaggacagcatccaggcctcattggacagcattcgaggccgccatggcatcagatgaaggca

SEQ ID NO: 571468 - DNA, 107 bp, Homo sapiens
cccgcgtccgccgattcctcctccttggtcgccgcgtccttggctggcgtgctcttgtcaggatggtgaagctgttcatcggaaacctgccccgggaggctacagag

SEQ ID NO: 571469 - DNA, 75 bp, Homo sapiens
attgatgatgatgatacaatttctgactggaatctaagtggagccgccaccaaaatgcagattttcgtgaaaacc

SEQ ID NO: 571470 - DNA, 75 bp, Homo sapiens
ctgggcagcctgcgcaggctggcacacagcttccgcccagcataccgcaagtttggcaatgaggagcagcagctg

SEQ ID NO: 571471 - DNA, 98 bp, Homo sapiens
caccgatgatggccgtgtcttcctctggggctccttccggaggatgtggatccctcagttggtcgattcaggaacatggtgcaaactgcagtggtccc

SEQ ID NO: 571472 - DNA, 110 bp, Homo sapiens
ccggtactcagacgctggcgggcgcagtttctcacgacgggccgagcctgccactgttacttcctcagaatgttggcctcctgtatgttggaggttatgaaagacccttt

SEQ ID NO: 571473 - DNA, 100 bp, Homo sapiens
cgggcctactcggagcttatggtgttgacggacctgaattcgatgtcttctttccgtcctgggagaggacataatgatagtcggaggactgtgttttata

SEQ ID NO: 571474 - DNA, 100 bp, Homo sapiens
catctcttcagagatgaaccaggaagcgttgttgacgaccatggacatcatccacgatggatttggattcatgctggcttttggagacttggtgtgggtt

SEQ ID NO: 571475 - DNA, 83 bp, Homo sapiens
ccgatccagcctgcggagcctgtggggcaggactgagcagggggaggaacatttaagctgatggaagtggaagtggaagttgc

SEQ ID NO: 571476 - DNA, 73 bp, Homo sapiens
tgctgggcttcgtccagatcgggaaggcgtccgtctccaagagagtatgaagagagtgcgtctgtagggcagg

SEQ ID NO: 571477 - DNA, 82 bp, Homo sapiens
gaggctgcagggcagtgcgacggcggcggaagcggcggcaaaagcaaatccgtggagctggaggatgtgaagttccaccagt

SEQ ID NO: 571478 - DNA, 98 bp, Homo sapiens
cgacctcgacgtcttgcctgtgtcccacttgttcgcggcctatagagttcggaatccagcattaagaagaaatttctcaagaggaaaggaaagaccga

SEQ ID NO: 571479 - DNA, 50 bp, Homo sapiens
ccaactcctatgagctcctctctggcaggaagctgttttaggttatgtga

SEQ ID NO: 571480 - DNA, 51 bp, Homo sapiens
cctgagtagctatgactacggatctgcaggagcatgtacagctgcagcatt

SEQ ID NO: 571481 - DNA, 116 bp, Homo sapiens
ggaagggggggcggaaccagcctgcacgcgctggctccgggtgacagccgcgcgcctcggccaggttaaaaatctgtaagagcctgattttagaattcaccagctcctcagaagtt

SEQ ID NO: 571482 - DNA, 82 bp, Homo sapiens
ggctcttctactgacagcctctgaaagaggggttgcggggcagcccgccggggccccaggagttggacgtgtggctgctggg

SEQ ID NO: 571483 - DNA, 75 bp, Homo sapiens
ccccagagcgtcttgatccttttgcagatggagaaacatcagatggagtgaggaagtcagttcacaaggtctttg

SEQ ID NO: 571484 - DNA, 75 bp, Homo sapiens
cgtgtgttgtacagacccttaaggagtcccgacctctacatgttgtgctgggaaatgaagcctgtgatttggact

SEQ ID NO: 571485 - DNA, 50 bp, Homo sapiens
acaagttccatcccacctttgagtcagaaaccaaagcccaaaccccggcc

SEQ ID NO: 571486 - DNA, 75 bp, Homo sapiens
agttttgtgccaagagttgagacaaaattgtattccaagtgggctttccttaaagtttcccatgtctcaatggac

SEQ ID NO: 571487 - DNA, 74 bp, Homo sapiens
gggcggccggccgacccttcctgtcgctgacggcgactgcgggaggccagagtatggtgtttgcgaaaacttgc

SEQ ID NO: 571488 - DNA, 50 bp, Homo sapiens
catgagtccttcctgttctataaagaaggcatttattttgaaccagactg

SEQ ID NO: 571489 - DNA, 100 bp, Homo sapiens
aagaagggccggagcccagatgagctgccctcggcgggcggcgacggcggcaaatctaagaaatttatgccttcaattaagttgcagagttctgatggag

SEQ ID NO: 571490 - DNA, 83 bp, Homo sapiens
ctgtcactttgggagcggttctgtgccaacatcataaaggaactgtggctgcaccatctgtcttcatcttcccgccatctgat

SEQ ID NO: 571491 - DNA, 74 bp, Homo sapiens
ctccagcatgggctcgcctgtcaacgcgcaggttgatgataattagaagcatgctttccactgaacttcccgac

SEQ ID NO: 571492 - DNA, 90 bp, Homo sapiens
ccgactttgaggatctggaggacggagaggacctgttcaccagcactgtctccaccctagagctatagaatgtgctgtccatacacaaga

SEQ ID NO: 571493 - DNA, 90 bp, Homo sapiens
cctgccctgcgcccggggcgcgcccaccgcgccgcatccatgttcgagagatggtaacctgcacctcaatgtgacggcggaggccttcag

SEQ ID NO: 571494 - DNA, 75 bp, Homo sapiens
agaagttgaaccagctgtgggagaaggcccagcgagttcgagaacttgtcttggacaattgcaaatcaaatgatg

SEQ ID NO: 571495 - DNA, 74 bp, Homo sapiens
ggattccaagtaactcttatttggatgaattacaaaggctgctggggttgctaagagaccaagatcccctctca

SEQ ID NO: 571496 - DNA, 83 bp, Homo sapiens
gtgacctgcttttcggttccgggtcttggccccgtccttacctcacaggaactgtggctgcaccatctgtcttcatcttcccg

SEQ ID NO: 571497 - DNA, 74 bp, Homo sapiens
ttggctttcctgctgagtctccgaggagctggggccatcaaggtgaagctgtggtctaccaatctagacaactc

SEQ ID NO: 571498 - DNA, 73 bp, Homo sapiens
ggccatgctgaagcggaggcggccgctgctcgagagaacaccttctgcagtggggaccatgtgtcctggcaca

SEQ ID NO: 571499 - DNA, 131 bp, Homo sapiens
tgggaggcctctcacaggtgaatctctcctttcttcattccatggacagcaataagggtgtgataggtatacagctggttgttaccatggtgatggccagtgtcatgcagaagattatacctcactattct

SEQ ID NO: 571500 - DNA, 100 bp, Homo sapiens
aggcacggctgccatacggtgattgccagtaggagcctgccgcgagtgctgacgttctgggaggtgatcagtgatgaacatggcatcgaccccaccggca

SEQ ID NO: 571501 - DNA, 75 bp, Homo sapiens
ctcttttttggagcaatcatctctgccactgacccagagacagagtttcaccatgttgcccagactggtctcaaa

SEQ ID NO: 571502 - DNA, 115 bp, Homo sapiens
gcatcagtgactcacaaatcagcaacacagaatttctgcaagtaattgggagttgaccacatttggccatttcccagaagggccccaccccaagggtgagtggccaatggggagc

SEQ ID NO: 571503 - DNA, 100 bp, Homo sapiens
gctgttttggaaagaattagcagattggccgatgattcagaatgatatggaacctagcaaagctgttccactgaatgcatctaagcaagatggacctatg

SEQ ID NO: 571504 - DNA, 90 bp, Homo sapiens
cgcggggtccggacagccgcgcgctgagggtctcggggcgggcgccgcgggacctctccgggccatggatttatcagcaagactgttgaa

SEQ ID NO: 571505 - DNA, 75 bp, Homo sapiens
agcggcgggtcgtgggcacctccagaccctacagcttggggcctgggctcctctgaccatcctcattgagaaagg

SEQ ID NO: 571506 - DNA, 100 bp, Homo sapiens
ccatgccgctcctaagcctgcacagccgcggcggcagcagcagtgagaggtgggccgtaccttgtctaaggtccaacaagtgctgagctggtcgtatggg

SEQ ID NO: 571507 - DNA, 75 bp, Homo sapiens
tccttgatggtcaaaagattaagggttgttatgaagatttaaacaagataagctgaaaacacattacacagtgct

SEQ ID NO: 571508 - DNA, 75 bp, Homo sapiens
gaggagcaccaggagacgcaactcatcggcatgttggcagataaattgaacatgactccagaagaagctgaaagg

SEQ ID NO: 571509 - DNA, 100 bp, Homo sapiens
cgagaagaagttgaggcgctatactatcttgctaatcatggccggttaaatgagtctgaagccaggcgaaaattctggcaaatcctgtctgctgttgatt

SEQ ID NO: 571510 - DNA, 82 bp, Homo sapiens
gtgggcagtagaacactctctccccagaaatccaacttctcaaggacagtcattttgtttactcattcagccctgttgcagg

SEQ ID NO: 571511 - DNA, 74 bp, Homo sapiens
gctgggacttcccgtccgcggcgtggagggatatacacatgacaccatccactgacttctataagaaattagcc

SEQ ID NO: 571512 - DNA, 82 bp, Homo sapiens
gctactctgcctcggggacgaaagcagactgagaactatgagcagagaatacgtgaacaacaggaacagctgtcacttcaac

SEQ ID NO: 571513 - DNA, 100 bp, Homo sapiens
gactttcctccaagagcacattgcctggtaagatgaatacctcagtactggaaaatcaccactggagatctgcagtgggcttattgagagaatcaggctt

SEQ ID NO: 571514 - DNA, 75 bp, Homo sapiens
actagagaacttatgaaagatccggtcatcgcatcagtgctgaggaatgtaaacaagtttgctgggccttgcgag

SEQ ID NO: 571515 - DNA, 100 bp, Homo sapiens
gacacgctgggccgaccccagagcggcgctggacagtattggatacaaatgaccgatttctacgaaaaataaccatcgggcagggaaacacagagaaggg

SEQ ID NO: 571516 - DNA, 101 bp, Homo sapiens
ctggatttaagcactgctgcactttatgagaaattgataaagaaggtgtgattgaaccagacactgatgctcctcaagaaatgggagatgaaaatgcggag

SEQ ID NO: 571517 - DNA, 50 bp, Homo sapiens
aagatctccattcctgaggaggaggtgggaagaagagcgctatcctgaag

SEQ ID NO: 571518 - DNA, 50 bp, Homo sapiens
gtttgagaccagcctgaacaacatagtgccacttctccacttttaagcag

SEQ ID NO: 571519 - DNA, 100 bp, Homo sapiens
gaaaaaacaaattgaagcactccaaggagagcttaaaattgctgttttacagaagagggagacgtggtgggcggtccttcctgtgacacgacccttgagt

SEQ ID NO: 571520 - DNA, 99 bp, Homo sapiens
cctgtcctccggcccgagatgaatcctgcggcagaagccgagttcaacatcctcctggccaccgactcctacaaggaacttgctactaccagcaccatg

SEQ ID NO: 571521 - DNA, 82 bp, Homo sapiens
gaagggccggcccgcctccctggccggggcgcagttcggaggttcaggagcatcagatccatgctgctgctgactcggagcc

SEQ ID NO: 571522 - DNA, 98 bp, Homo sapiens
gaacagcaacgatattgccctggtccacctctccagtcccctgcccctcacagcaactagaagccatttgtgtcaaggtaacgtctggagaaacaaaa

SEQ ID NO: 571523 - DNA, 74 bp, Homo sapiens
gggagctgctctgttgatgcttatcggtaagtcaaatctcatggatgccatcagctttgtgctaggtgaaaaaa

SEQ ID NO: 571524 - DNA, 50 bp, Homo sapiens
cggcgccgagtgggaggatggcggaaattgacgagatgcctgaggctgcc

SEQ ID NO: 571525 - DNA, 83 bp, Homo sapiens
cagattcgcagtggtcgcttcttctccttgctgaggcaacttctcctagaatctcaatctcagctcgatgccgccaagagcga

SEQ ID NO: 571526 - DNA, 101 bp, Homo sapiens
tagagcggggcccggtatggaggtgggctagaggccgacgccagccagagagcggtgctggagaatctggtaaaagcaccattgtgaagcagatgaggatc

SEQ ID NO: 571527 - DNA, 98 bp, Homo sapiens
gctccgcagccccgggcacggcggaggcagcggagccctgggccatcgctcatcagcgatggcagtgtggtctgcgctgaagcactctgggaccatgt

SEQ ID NO: 571528 - DNA, 96 bp, Homo sapiens
gagctgtagaccggagctgttcctattcggccatctttgctcctccctgcaactaactccattcttaattggccctgagcctgtgcaattatttcg

SEQ ID NO: 571529 - DNA, 50 bp, Homo sapiens
aagtattgcaggacaagagatttaagccctgggcgctgcctatggcacag

SEQ ID NO: 571530 - DNA, 75 bp, Homo sapiens
ggaagaacaatgtgccaaggctgaaattatcctacaaaggcgtccgacctccgatcatgaacgggcccctgcacc

SEQ ID NO: 571531 - DNA, 100 bp, Homo sapiens
agttacatactgattctttaagaaaatcagataacttgtactggagagaaatcctacaagtgtgtcttcccatgcacaagatgattaatacagatcttag

SEQ ID NO: 571532 - DNA, 83 bp, Homo sapiens
acggcggcaggagctcgggaaccgggactgcgagcggcaaaagctggcaggctgacagaggcggcctcaggacggaccttctg

SEQ ID NO: 571533 - DNA, 98 bp, Homo sapiens
tctcttagcagcgcgcggagaagaacggggagccaggttgtggcagcactgcctgaaggtatgagaccagattctaatctttatggttttccatggga

SEQ ID NO: 571534 - DNA, 87 bp, Homo sapiens
tctcctgtaggaagcaaccagtctcgatctggcccaatctctcctgcaagtatcccaggtcacggtctagatcacattctcgatcca

SEQ ID NO: 571535 - DNA, 98 bp, Homo sapiens
cggcgtccagggcagctagggcctgggccgcggttcggccgcgccggccggaaacaatgtgatgagaaccattcatggggtgggagagatgatgaccc

SEQ ID NO: 571536 - DNA, 83 bp, Homo sapiens
ctgacctattcacctcctgcctcaccacccccatcaagatcgccctgcgctggcaccatgactcctgtgaggatgcagcactc

SEQ ID NO: 571537 - DNA, 114 bp, Homo sapiens
gcgggagccgccgccgccgccgccgccgccggagctaacctcggggaccgagatgcagacaatgcagatcttcgtgaagactctgactggtaagaccatcaccctcgaggttga

SEQ ID NO: 571538 - DNA, 88 bp, Homo sapiens
gacatgagccccctgaggccccagaactatcttttcgaagaatggctacgtgactgtcagtgagatcaaagccagtcttaaatgggag

SEQ ID NO: 571539 - DNA, 75 bp, Homo sapiens
cagaatcaacccagaacggatagctccctcctggaaaagaatgtgacagtgatgataacatgggtgccaaaaata

SEQ ID NO: 571540 - DNA, 100 bp, Homo sapiens
gcgacgctgctcaaaacctcgctccggaaaggggacacctgtaagcactatcctttgtactccctcaacgtggcctccatgtggttgaagctagggagac

SEQ ID NO: 571541 - DNA, 75 bp, Homo sapiens
gtggcagatatcgaggtggatggaaagcagtaccgtgtgactgtgccgctgatgggggctgtgtccgacctgtgc

SEQ ID NO: 571542 - DNA, 101 bp, Homo sapiens
cttgtatggtctccatatcacagtatcccagatgccaaattcatgatgctatggactcctactacgactacatatgggatgttaccattttggaatacttg

SEQ ID NO: 571543 - DNA, 100 bp, Homo sapiens
cacaatgacgcccacgcagccagaatcctttagcagtgggtcccaggacgtgcaccagaaaagaggtttgagtacaagctcagcttcaaaggcccaaggc

SEQ ID NO: 571544 - DNA, 75 bp, Homo sapiens
cgcagtggtcgcttcttctccttggtgaatgaggcctctggggatggggatggagaggatgccgttgtgatcctg

SEQ ID NO: 571545 - DNA, 73 bp, Homo sapiens
tgaaagctcttcttgaaaaatgcaaagatgtagatgagagaaatgagatggataatcaaatagtggtttctga

SEQ ID NO: 571546 - DNA, 100 bp, Homo sapiens
catctgcgatgtgaggaaaggcacctccaccagatcatgaatcggttcagtggtgttatgacaacttcattaactacaggtccctgatgtccgcagacaa

SEQ ID NO: 571547 - DNA, 82 bp, Homo sapiens
tttgctatttactctgctcgagatgatgaggaattggtccatgttgctgaagcagaagattgttataatacagctctccgtc

SEQ ID NO: 571548 - DNA, 104 bp, Homo sapiens
gagggagcggaggccacggggcgccagctctgcaggagaggcctctgagaaggaacccttgaaaggaggagtgagatgtggatgttgcttttgcacctacgggg

SEQ ID NO: 571549 - DNA, 75 bp, Homo sapiens
ctaaggcaacacttccttgaagaaacaagcttacagagacccactgctaaggagttattgaagcacaagtttata

SEQ ID NO: 571550 - DNA, 75 bp, Homo sapiens
gaagaagtggtacaggagagaatttgtgatgatgagctgatcttaatcaaaaaggatcctggagcgggttgtgag

SEQ ID NO: 571551 - DNA, 75 bp, Homo sapiens
gtggtgctggcctccttcctgctcctgctgctggggctggaaaaagagccgggaggagtctagtggtgagggcag

SEQ ID NO: 571552 - DNA, 97 bp, Homo sapiens
ctggccccgagatcagaatgccgatgccctgctctctgacctggagactaccacctcgcacatgccaaggtcaggggctcccaaagagcgccctgcg

SEQ ID NO: 571553 - DNA, 83 bp, Homo sapiens
gcacttcctgcagtgggcattagccacgtccagggtactggaagatgaaagagactatacaagggaccgggtcctgggggcct

SEQ ID NO: 571554 - DNA, 100 bp, Homo sapiens
tggaaaactgcaatgaagaacgcctgaaagctttacagaaaggagatgaagttgctggagcaggcaggttctctgaaaggctccctgagtgtggaagagc

SEQ ID NO: 571555 - DNA, 50 bp, Homo sapiens
ctcaggcgtgcgcggacggtgtgcggttcctgttaaaggtcaagacactg

SEQ ID NO: 571556 - DNA, 75 bp, Homo sapiens
gaaggggtacctgctaaagaaaagtgacggcatgttggcagataaattgaacatgactccagaagaagctgaaag

SEQ ID NO: 571557 - DNA, 75 bp, Homo sapiens
ggcgtgcaacatggggcttgagaaaggcgagggtgggtcctgggccccaacaactactacagttttgccagccag

SEQ ID NO: 571558 - DNA, 75 bp, Homo sapiens
ccccatcctatccagagattagttttagttgcagcatggaacaattacagacatatctgaagagatggattaaga

SEQ ID NO: 571559 - DNA, 73 bp, Homo sapiens
tcctaaggacctccgaggaacagaggggtttgttaaagttgttaagaataaggcctactttaagagataccaa

SEQ ID NO: 571560 - DNA, 90 bp, Homo sapiens
accactgaggatcagattttgaagagagatatgccaccagcatttattaagaggcagcacccagggtcattcctggagcataaacgatcc

SEQ ID NO: 571561 - DNA, 75 bp, Homo sapiens
acactccccagggcagaaatagcgaccatggcgagcaaattgtggctactaatttgccccctgaagatcaagatg

SEQ ID NO: 571562 - DNA, 98 bp, Homo sapiens
tccgggcagcgcgggcgcagggcacgcgttcgcgcacaccctagcacacatgaacacgcgcaaggatatcactactttaactggagttccagaagagc

SEQ ID NO: 571563 - DNA, 75 bp, Homo sapiens
gaatataaacaaggaaaaacggatgtagccaagacattgctatttaaatgatggagaggagaaaacctatggtgg

SEQ ID NO: 571564 - DNA, 50 bp, Homo sapiens
aggtcttccagtttctgaacctagcggttgctgatgctattagaacaagc

SEQ ID NO: 571565 - DNA, 101 bp, Homo sapiens
ctattatcatggtagttgccttcctgggctgcatgggctctatcaaggaaaacaagtgtctgcttatgtcggtcaaaatgcagatcttcgtgaaaaccctt

SEQ ID NO: 571566 - DNA, 51 bp, Homo sapiens
cgagcaggaggcgccatcatggctaccacatactgttgattgtgatgaaat

SEQ ID NO: 571567 - DNA, 50 bp, Homo sapiens
gcgtgaagacgcagagggagacagatctccatttgccaggagatgcccag

SEQ ID NO: 571568 - DNA, 83 bp, Homo sapiens
tgacgcttcgctccggtcctcggatcccgagcgcggggaggcagaccgtgtggacgaatgtggaacctcgctctgtggctgtg

SEQ ID NO: 571569 - DNA, 100 bp, Homo sapiens
ttcagtgtcctgctgttaagctgtaaggatcacgtggggtacatttttactaccgaccgattttgactaaaggagaagttcaagtatcagataaagacac

SEQ ID NO: 571570 - DNA, 100 bp, Homo sapiens
cagtgaagacacagatgttcctgttcagagcaaccagctaatactgcttttggcttctggatgccctcctccagtacacatcgtatggggtgacaccgcc

SEQ ID NO: 571571 - DNA, 100 bp, Homo sapiens
gatggcggatgccctgcagtacctgcagaaggtctctggagacatcttcagcagcttcctggacaagatcgacgtgatcaagcaggctgactatgtgccg

SEQ ID NO: 571572 - DNA, 80 bp, Homo sapiens
agatcttcacagcacagttcctgggaaggtggagccaccagcctctccttgagaaaacctcttgtgttggaagggattga

SEQ ID NO: 571573 - DNA, 50 bp, Homo sapiens
gctaatgaccgtggttcccactgaggcagaagcaacaaattacccacctg

SEQ ID NO: 571574 - DNA, 100 bp, Homo sapiens
cgagtgggaggtgctgagccgctcagaagtccaaggcttgcgagaaggtcatttccgtgggtcaaacggtcatcacgaagcatcggaacacccggtatta

SEQ ID NO: 571575 - DNA, 100 bp, Homo sapiens
cacggctccatcatcacccaggcgcggagggaagacgccctggtgctcaccaagcaagccactttgcctgcctctcctccaagtatatgtgcccaggggt

SEQ ID NO: 571576 - DNA, 83 bp, Homo sapiens
cggtgcaccgtccgggattttatccaccggcactgccaagatcagacaatgcagatcttcgtgaagactctgactggtaagac

SEQ ID NO: 571577 - DNA, 97 bp, Homo sapiens
ttagtggatatagcacaccatccccagccagtctcctctgagcctccggcctccataagacccaaaacagatgacacctcttcccagtcccccgcgc

SEQ ID NO: 571578 - DNA, 83 bp, Homo sapiens
tctctggcagcagacatcagccacgcatctgaccttgttgtttgatgaaggccggaacaactttgaaggggaggtcaccaagg

SEQ ID NO: 571579 - DNA, 100 bp, Homo sapiens
ttcgacctcagttacttcatcgtctccatcctctacctcaagtatgagccaggctgtgggtgagcgtggaggatgctcagatgcacaccgtcaccatctg

SEQ ID NO: 571580 - DNA, 100 bp, Homo sapiens
caggacttagaggtggagctggtccccctggtcccgaaggaggaaagggtgatgctggtcccaaaggtgctgatggctctcctggcaaagatggcgtccg

SEQ ID NO: 571581 - DNA, 98 bp, Homo sapiens
tttggaccttttttcatttccatttctaccttgtatgcctcaatttgctggatttaagcactgctgcactttatgagccgtgcttcctcaaagactgg

SEQ ID NO: 571582 - DNA, 74 bp, Homo sapiens
tggcattacgaacctttggccacttggaggataagatcaatgccctcattaaagcagccggtgtaaatgttgag

SEQ ID NO: 571583 - DNA, 100 bp, Homo sapiens
cgaccagaccatgctctccatcctgctcttcttccacagtaagtacaaatggatcctaggtgaagaaccggtggagaaacgaagaaggctccagaatgag

SEQ ID NO: 571584 - DNA, 99 bp, Homo sapiens
tgatccacaagcccaggagaaattccaggatctgggtgctgcttatgagcagccctccggagagctgtttgagattgaaatagacaccctggaaaccac

SEQ ID NO: 571585 - DNA, 78 bp, Homo sapiens
aaattgaactaagaaatggagagaaaaatccagttacactcttaaaggaattgtcagtgataaagtctcgatatcaaa

SEQ ID NO: 571586 - DNA, 73 bp, Homo sapiens
gaagagcagctcaaacagtacagggtgaagcgccagcaggagaggtggttcagcactgagtcatgcttgcttc

SEQ ID NO: 571587 - DNA, 100 bp, Homo sapiens
ggccacccgaacagtctctcctcctcacagaagcctgactcggcccagccttctgccatccctgaggcctccaacccagcctccaacccagcctctgatg

SEQ ID NO: 571588 - DNA, 100 bp, Homo sapiens
caggggcctgtggccgctgcacatcgtcctgtggacgcgtatcgccagcacgatcccaccgcacgttcagaagtcggttgtcatggatgcactggtagaa

SEQ ID NO: 571589 - DNA, 88 bp, Homo sapiens
ctcttacgtctgcggaagtgcagctgcctcagttcttagcgcaggagctgaagaagaagctgttcaaacgccggcgggtgttgaatcg

SEQ ID NO: 571590 - DNA, 83 bp, Homo sapiens
ccggaagcggatcgggtggagtgtaggtcatatcgccgcggtgtccctggccagtgtccttccacctgtccacaagcatgggg

SEQ ID NO: 571591 - DNA, 83 bp, Homo sapiens
ctccggcgtgttcatgcccccgggggaacggcaggagcagctgatgggatatcggaagagagggccgaagcccaaaccgctag

SEQ ID NO: 571592 - DNA, 96 bp, Homo sapiens
gggcaacgctgctgctgctgctggagaccccatagattgtggcccagaagaaggtgacccgcccgctgctgctcaagtttggcaggaacgctggca

SEQ ID NO: 571593 - DNA, 109 bp, Homo sapiens
ctcaatgtcaatatatactcctacatataaaatccatcttctaatcataatcactaggaccttgtaaagtcaaaaatgtcagaaacttccaggaccgcctttggaggca

SEQ ID NO: 571594 - DNA, 98 bp, Homo sapiens
tggctgcctgcacagcatcatggccctgctgcctgagcccaaggaggaggacggaggctgccagaagatccaagagctcctgtctccccaggagcccc

SEQ ID NO: 571595 - DNA, 100 bp, Homo sapiens
tgagtgtctgtccccagagcctcagtttgtgcaggacaccgacatggaacagggactcactgggggtactgtccaagaagctggaacattattatccagc

SEQ ID NO: 571596 - DNA, 75 bp, Homo sapiens
caaaatatggcaaagaaacctattctgagccgcggcccatggagcccgccggcccggcccccggccgcctcgggc

SEQ ID NO: 571597 - DNA, 80 bp, Homo sapiens
tggcccccgcttcagtcccagggcagattatgacaacgaggagatcttaacctatgaggaaatgtcactttatcatcagc

SEQ ID NO: 571598 - DNA, 74 bp, Homo sapiens
ccccagaaaggattgtgacatatcgttggacccagaattgagctcgttctccgaaaatggtgtgaattgattcc

SEQ ID NO: 571599 - DNA, 90 bp, Homo sapiens
gccgaggagaacctgcccttcgccaaggagatcgtctctctcatcgaggcccaaaccgccaaggcctggagctgctgaagactgctattg

SEQ ID NO: 571600 - DNA, 75 bp, Homo sapiens
gggcgtccgagtcaacaaccgcttcgagctggccgggctctcgccatgggtcactgtcgcctctgccacgggaag

SEQ ID NO: 571601 - DNA, 75 bp, Homo sapiens
tttctgatggtgataaatgggaagttctgaatgcagtgatggggaatggtctgcttctttgcctcatcgattttc

SEQ ID NO: 571602 - DNA, 76 bp, Homo sapiens
atcagccgctacgtgactcttttctccagaacagtgcaaccctgaaactcgtcctgttgagaaaaaaataagatca

SEQ ID NO: 571603 - DNA, 83 bp, Homo sapiens
cctgagaatatttcacaaagaatttccttaagagctggactggagcattggggagtcagcaatgtccgttgtgttaaatcagc

SEQ ID NO: 571604 - DNA, 100 bp, Homo sapiens
agagcgcgaatatcgtcatcgttagaaggtgctgtaaaatacctggagtgctcggcgctcacacagcgaggcctcaagacagtgtttgacgaagcgatcc

SEQ ID NO: 571605 - DNA, 83 bp, Homo sapiens
gtattttatcactgccggattgagggaaaaagacctcgatgaagttctgcagacccactcagtgtttgtaaatgtttctaaag

SEQ ID NO: 571606 - DNA, 83 bp, Homo sapiens
ccgggacagcggcgagacgcgcgtgtgtgagcgcgccggaccaagcgggcccagaagcgggttttataggatcacattgacaa

SEQ ID NO: 571607 - DNA, 75 bp, Homo sapiens
aactgctgacgcttgatgagaaggacccacggcgtctgttcgaagagcatcctgatgtccaggagtcagtgggtc

SEQ ID NO: 571608 - DNA, 100 bp, Homo sapiens
aggacgagaacgtgcgcggggtgatcaccatgaacgaggagtacgagacgaggttcctgtgcaactcttcacagggacaagaatccttcaagaaacagga

SEQ ID NO: 571609 - DNA, 83 bp, Homo sapiens
ggcaagtcgaccagctcctcccacacggattctgtgtagaaatccacgaggaagaacttgtcgcttttcctaagcattagttt

SEQ ID NO: 571610 - DNA, 100 bp, Homo sapiens
cgacacaattgtctgtgacagtaacagtacttgggatcccccagttccaaagtgtcttaaagatgtgatgactgaagcccaccacaaatatgaccactct

SEQ ID NO: 571611 - DNA, 100 bp, Homo sapiens
tcgggggccccgggcgcatgaagcagagctgcatcatgcggcagtgcatcgcgcttagcagtgtctgcaaaaacgaatcttttcctacaacctgttaact

SEQ ID NO: 571612 - DNA, 100 bp, Homo sapiens
ccctacgagattcacaccgtcttcggtctcctggggtcggcgccgagtgggaggatggcggaaattttcatcttcattggagagaccctcctgtccatga

SEQ ID NO: 571613 - DNA, 75 bp, Homo sapiens
aactaaagccccacatttgcagctcattgaaggaaagattctctcgggcctagccgtccttggaacccgatattc

SEQ ID NO: 571614 - DNA, 75 bp, Homo sapiens
gcggcgcggggaccgctgtgctctcgcacctggctgagcacgcagacactgtgcagctggtgtccggcttcgagg

SEQ ID NO: 571615 - DNA, 97 bp, Homo sapiens
gggagcgcaaggtcgccctcaaggccatgatcaaaacgtcagcccaaggccaaccccactgtcactctgttcccgccctcctctgaggagctccaag

SEQ ID NO: 571616 - DNA, 100 bp, Homo sapiens
gaccttctccctgcctggacccctactattgcaacaagcattccccgtcggagccctttctagagaaaccagtgccggatatgactcaggttagtggacc

SEQ ID NO: 571617 - DNA, 75 bp, Homo sapiens
gcctcggagcaacgagcgcagcgccgatgatatcatcaagttgaatcgaaaggaagggaagaagcagaattttcc

SEQ ID NO: 571618 - DNA, 90 bp, Homo sapiens
ccagtggctcctggggccttgacttatttaggtcagttaacgtccataccaggatacctgaatccctccagtaggactgaaatcctgcat

SEQ ID NO: 571619 - DNA, 82 bp, Homo sapiens
caccatgtcagacgcagccgtagacaccagctccgaaatcaccaccaagaattgaagatgttcctgctccttctacatctgc

SEQ ID NO: 571620 - DNA, 100 bp, Homo sapiens
tgattcttctcggtcaaacctttttgaagatgcaacgagtgcacttggttcagccctatgtagctacaacctaaagccttctgaatacactacatctcca

SEQ ID NO: 571621 - DNA, 100 bp, Homo sapiens
cacacggggtgttcctgctaaacagcaatgccatggcatcgagaaggtgtccaagatcacgtctcccgtgctcatcatccacggcacggaggacgaggtg

SEQ ID NO: 571622 - DNA, 75 bp, Homo sapiens
agcaatgcctcctgcaccaccaactgcttagcacccctggccaaggtggtcttccgggatccgtatcggtttaag

SEQ ID NO: 571623 - DNA, 75 bp, Homo sapiens
gaagtattgggcagcattcttggagcactgaaggccattgtaaatgtcatagccttgttagatgacttggataaa

SEQ ID NO: 571624 - DNA, 80 bp, Homo sapiens
ctccatcgtgatgaaggcagagagcagagacatcccgatctggggaaatgaggacggggacttggttgccttttccagtg

SEQ ID NO: 571625 - DNA, 75 bp, Homo sapiens
caatcatcctgaatgaatttagagccaaactgtccaaggctttggcaattctgtttcctaaaatgccaaaacgac

SEQ ID NO: 571626 - DNA, 75 bp, Homo sapiens
aaccatgtttggattgaagccgcctctgtattacttaccaggtattgttgcagcatctggcagtgagactgagga

SEQ ID NO: 571627 - DNA, 83 bp, Homo sapiens
gcacttggcgtaaagccgcttccctcaagagtaactacaagaagatgagaatgtgcctactgctcctgatcctccaagtcaac

SEQ ID NO: 571628 - DNA, 100 bp, Homo sapiens
ggacctcggtggaaaggaagcgggagaagggggcgaccgtgttcgcaaacgtagcagccgcttacaaacacgcagatggcaagaagattgatggcaggag

SEQ ID NO: 571629 - DNA, 86 bp, Homo sapiens
ccgctcctaagcctgcacagccgcggcggcagcagcagtgagagtgcagagcagagcgggcggaggaccccgggcgcgggcgcgga

SEQ ID NO: 571630 - DNA, 98 bp, Homo sapiens
gccggactccgggccgcaggcagtcccgcggcagcaggatcacagatcactggggtgatcctgctggctgttggagtctggggcaaacttactctggg

SEQ ID NO: 571631 - DNA, 100 bp, Homo sapiens
ttgcagaataacctccagtatgttgccatctctaacctaccagctgccactttccaggcccagctgtgagatacagtaagttcaagatgtcagaggccag

SEQ ID NO: 571632 - DNA, 100 bp, Homo sapiens
agtgatggatgcacctggaaggggaccctgaaagaatacgaggcttacctgcgagccatcgatgtgaagatcctgcagcagctggtgaccttgaatgagg

SEQ ID NO: 571633 - DNA, 100 bp, Homo sapiens
gccacacagccaccagccgcagcaccaggatcatttgaaaagaaatttcagtctgagaaggcagcaggctcggtgtccaagagcacgcagtttgagtacg

SEQ ID NO: 571634 - DNA, 75 bp, Homo sapiens
ggggaagaatcaaagagcagtgaatcctcactatggatgggctcattgaggacattaagcatcggcggtattatg

SEQ ID NO: 571635 - DNA, 100 bp, Homo sapiens
tggctggtctcctactcccagatgcatccgtgtcataatctatgccagcaattatgacaatgttagcagaccatgcagctcgtcagctgcttgatttcag

SEQ ID NO: 571636 - DNA, 80 bp, Homo sapiens
aggccctatcaggacatggagtatgaaagacgggtccaattggttccaagacgcgtaggcgagttggtctgaaagccccc

SEQ ID NO: 571637 - DNA, 100 bp, Homo sapiens
ccgttcttgcctcaggccagtcgcctccaggccaagagggatccttcacccgtgtctggaagtcctgacggccacgctggatctggaggacgtccggagc

SEQ ID NO: 571638 - DNA, 90 bp, Homo sapiens
ctctcccgagctcagagagtaaatgtttgacttctccgtgacagtgttcgccttcctgggactgctggcgctggccctcaacatggagcc

SEQ ID NO: 571639 - DNA, 75 bp, Homo sapiens
cctctcgggagaagcagcgcctgttcccggggcagatccaggttcaggtcctcctcgactggattaatgacgtgc

SEQ ID NO: 571640 - DNA, 80 bp, Homo sapiens
tctgaccgagcaggtcgtacgccgccgcctcctcctcctctctgctcttcgctacccagcagacaactaaactggtaggt

SEQ ID NO: 571641 - DNA, 100 bp, Homo sapiens
aaagtcagggggactgcaaaggccaatgttggtgctggcaaaaaggagctcgaggccatgagcagatataccagcccagtgaacccagctgtcttccccc

SEQ ID NO: 571642 - DNA, 75 bp, Homo sapiens
gagtgaatataaaaggacttcatctcctcaacatggaaactaaggagctgcatgctgtttcccttgaacaacatc

SEQ ID NO: 571643 - DNA, 83 bp, Homo sapiens
cgtcgccgccgccaccatgcccaagagaaaggccctgtttgtgctcttcgtcctggcctacatccacatcgtcttctcccgct

SEQ ID NO: 571644 - DNA, 99 bp, Homo sapiens
gataaatcccgaaaaggagaacttcttaagaagagtggtcaacagatttgaatcccaatgatgtgacactctcaggctgtactgatgcgatactgaagt

SEQ ID NO: 571645 - DNA, 102 bp, Homo sapiens
gagcccacaggtgctaaagagagcagtaccctgatggagtcccttgcaggtgctggagaatctggtaaaagcaccattgtgaagcagatgaggatcctgcat

SEQ ID NO: 571646 - DNA, 82 bp, Homo sapiens
tggagagcttcatcaaaaatagtgatagctttgataaaaattgcatctgatggtctcaagggtcgtgtgtttgaagtgagtc

SEQ ID NO: 571647 - DNA, 100 bp, Homo sapiens
aacagagagcagcatttcagaaccaggttctccttcgaggaacagagaaaatgaaaccagcagacagaatttgtcaggtctgaaggggcgtctcgattac

SEQ ID NO: 571648 - DNA, 73 bp, Homo sapiens
agggctggccaacttctgctacagacgactcagctcatccattctttagacacattaactgggaagaacttct

SEQ ID NO: 571649 - DNA, 100 bp, Homo sapiens
aaatgccaaggcagtttgccccacagagcttgtacaacatgatgggtatgactgattttcccaaaatattttgtgaaacttctcagaagttggtgagtgt

SEQ ID NO: 571650 - DNA, 100 bp, Homo sapiens
gctgtccaagtgaataatggggatgctggaagggagatgccctgcccgttgccctgtgatgaagaaagaaatttgtacatagattctaggcaaaatctcc

SEQ ID NO: 571651 - DNA, 100 bp, Homo sapiens
gggcttccccatctggtgcttttcccatggagaacacacaaccactgagatctgtatctgtggacctgaatgttgatccctcgcttcagattgacatacc

SEQ ID NO: 571652 - DNA, 78 bp, Homo sapiens
ttgtatgaacgggttttgttagccctacatgatcgaggtggtgtgcagatcctgccttactaaactgtttgaagcaaa

SEQ ID NO: 571653 - DNA, 75 bp, Homo sapiens
tctggggatcttcgcactatcccaaggtgaaaacttttggcccgtttggaagcggcagccaggacaacctgacta

SEQ ID NO: 571654 - DNA, 80 bp, Homo sapiens
tgtcatcggttcggtaaagtttctgttctctggtacatgtcccagagcaagcacacggaggcccgggagctcatgtactc

SEQ ID NO: 571655 - DNA, 100 bp, Homo sapiens
agatttggggaatctatagttaatcttggcgacattgacaatgatggctttgaagatttgttcccgacaaggagttttctggttcagaccgtagacagag

SEQ ID NO: 571656 - DNA, 100 bp, Homo sapiens
ggacccctactattgcaacaagaacctgcacttgttgccaagtcttccatcttactagatgtgaaaccttgggatgatgagacagatatggcgaaattag

SEQ ID NO: 571657 - DNA, 74 bp, Homo sapiens
ttttcacgttttaatgccgagaggtctctgtgacgattttggcgttcgtggcattcagggatgtggctgtgtac

SEQ ID NO: 571658 - DNA, 90 bp, Homo sapiens
ggactagcgagatggcaaggctgaggacgggaggctgattgagaggcgaaggaaggaagcagccaccctcgccatggcctccccgcccgc

SEQ ID NO: 571659 - DNA, 75 bp, Homo sapiens
ggaagcaagcagttcagaagagccaaggaataaacatgcaatgaacccaaaaggtgctcttattaaacaagtgaa

SEQ ID NO: 571660 - DNA, 98 bp, Homo sapiens
tctagtctttccgcttcttgaatttctctctgtaaaggaggactacaaagctgatgaagacccagcattattccagtcagtcaagaccaagagaggcc

SEQ ID NO: 571661 - DNA, 50 bp, Homo sapiens
cgggggtcttcctcctccgccgttgacagttctgggaggtgatcagtgat

SEQ ID NO: 571662 - DNA, 97 bp, Homo sapiens
agaggaaggaacagagccacagagaaaaatgacttgctcacaacagaagagccagtagtaaaacacagagctgaaatatgctaataccgtgatgcgc

SEQ ID NO: 571663 - DNA, 75 bp, Homo sapiens
ggttgccgacgccatcaggctcaacgaggaactcaaagtggatgaggaaaacaaatttacatgtattggagacca

SEQ ID NO: 571664 - DNA, 100 bp, Homo sapiens
ctctgtctgaactggatcataaatgacaggtatcattgcccagtgcctaagatcttttatgttcagctcactgtaggaaataatgaattttttggggaag

SEQ ID NO: 571665 - DNA, 98 bp, Homo sapiens
attgacgcggcgttagtattggccgtgtacccgaaaaactgattgactgggctggcgttaactgtgcggaggcaggacaagactgtggtggtggcaga

SEQ ID NO: 571666 - DNA, 75 bp, Homo sapiens
ctcctgccagatccctggcttggccccagactgggtggacgctgaggaatgccaccgctgcagggtgcagttcgg

SEQ ID NO: 571667 - DNA, 73 bp, Homo sapiens
agagcgtgaccgagagcgcgaatatcgtcatcgttagaaggcaagaaacctattggaattcgagacttaatta

SEQ ID NO: 571668 - DNA, 90 bp, Homo sapiens
atttgatcctggggagtctgattcagatgacaactgtacagatgtcactggtttcctatcctgggagcaggagagtgtgcctatttgaat

SEQ ID NO: 571669 - DNA, 79 bp, Homo sapiens
cagcactagactatggtcgggatgacttggcattggtgcttgtgaatgacttcttcttggtggcttgtcttgaggattt

SEQ ID NO: 571670 - DNA, 90 bp, Homo sapiens
cgtgtctcaggagcttgatccagacctctacaagcaaatggagaagttcaggaagctggagaatgctggaggagaccttaaggatggcca

SEQ ID NO: 571671 - DNA, 83 bp, Homo sapiens
cacttttactctacgcaactgttgctttttcatgctccagaaacatgacaaggaggactttcctgcctcttggagatcagagg

SEQ ID NO: 571672 - DNA, 98 bp, Homo sapiens
cagtattgaaatgcatttgccttatacagctaaagccatggaaaggtttttagaacttcagccataaaaatgggcagaattttccttgatcatatcgg

SEQ ID NO: 571673 - DNA, 100 bp, Homo sapiens
caggccatgcctttcaagtgcatgcagctcactgatttcatcctcaagtttccgcacagatccctttggaaccttagatcccttcggaagtgggtccttc

SEQ ID NO: 571674 - DNA, 149 bp, Homo sapiens
gattccggagtggggaagacctgcgtcctttttcgtttttcggatgatgccttcaatactacctttatttccaccatagttaattggccttggtcctcacagctccaaaaagaaacaggatctcgataagctctatgagctgaagtcca

SEQ ID NO: 571675 - DNA, 100 bp, Homo sapiens
aaccaaagccccagccaacagatcaaactgagtttatagccagcaccatctctgctgttagaccctacagcttggggcctgggctcctctgaccatcctc

SEQ ID NO: 571676 - DNA, 75 bp, Homo sapiens
accatgatggaatgcttgacagagatgagtttgcagttttgtccagtgtacagaagcttactggaaggagtggcc

SEQ ID NO: 571677 - DNA, 75 bp, Homo sapiens
aaactgttcggacttccccgttagaactcgcgtttccacttcagagatctgggccatgtttatgagtggactaag

SEQ ID NO: 571678 - DNA, 97 bp, Homo sapiens
ttcgatgtgctctactgtcacctgtatggataccagcagccccggaccccccgattcaccaacgagccctagtaaccttttaaggtggagaccggtg

SEQ ID NO: 571679 - DNA, 100 bp, Homo sapiens
gactcctgtgatgtaaatgactgtgtccagcaagttgtggaacttctacaggaacggcacaaacgtgcagatatctgatagccctttccgttgcactcaa

SEQ ID NO: 571680 - DNA, 87 bp, Homo sapiens
ttccactggacgctcatcagagggaagatctttttcctcaattggcttactagaaagcagcacccgcctgaaacctcacgaagccca

SEQ ID NO: 571681 - DNA, 100 bp, Homo sapiens
ccaaggcggtcaccaagtacaccagctcgaaaatggatgatgaacttgttgttggacatagtgcaagatcagacatctccagcttcccttgtacatctgg

SEQ ID NO: 571682 - DNA, 100 bp, Homo sapiens
tcaaggttgaagcagaagaataaggagaaggataagtcgaaggggaaggcgcctgaagaggacgaagtgaagatagtgatccggggagacaggaacacgg

SEQ ID NO: 571683 - DNA, 123 bp, Homo sapiens
agactttgcccttctccaggaagagcactcaggagaccaggaaaatggccacagggctcctgagagccaaaaaagagagaactggaccccatcctgactgaggtcaccctgatgaatgcccgc

SEQ ID NO: 571684 - DNA, 90 bp, Homo sapiens
accggtcatcgtggacaagcaccgccccgtggaaccggaacgcagggtgctttccttctgccttgcttgtctctgctgccggcatccgtg

SEQ ID NO: 571685 - DNA, 88 bp, Homo sapiens
ggcgccgggttagggcagacgctgtgctcgctggcaccccgaacgggttgcttcccccgctgcgaggacctcagcagccatgtcgaag

SEQ ID NO: 571686 - DNA, 100 bp, Homo sapiens
gatgcagccctgttggaagctgcccgtgccaacaatatgcaagaagtcagcaggctcttgtcaggatggtgaagctgttcatcggaaacctgccccggga

SEQ ID NO: 571687 - DNA, 95 bp, Homo sapiens
gcacactggcagcccgtgtggacagtttccacgagagcacagaagggaagcgtccgtctccaagagagtatgaagagagtgcgtctgtagggcag

SEQ ID NO: 571688 - DNA, 100 bp, Homo sapiens
agaagatgcatttaagaactttccttttctagaagagctttccaccaggtgagaagagtgatgaccatccttttccttactatggttatttcatactttg

SEQ ID NO: 571689 - DNA, 75 bp, Homo sapiens
gggaccttaacaatccacctaagaaattcagagacttaattcagtgcacaaatgagatgaatgtgaacatcccac

SEQ ID NO: 571690 - DNA, 98 bp, Homo sapiens
aatctcatccgaaaccacacaggatccctggctgtagcgaacaacaacccaaccattactgatattgatgatgttaagaagttcaaaccgggttacct

SEQ ID NO: 571691 - DNA, 101 bp, Homo sapiens
agtggtcacagccgcatctttgaaggaaattgccaccgccacttcaactttcagcaaccaccgccctgatcagtcaatagccattaacgtcaaggcgagat

SEQ ID NO: 571692 - DNA, 100 bp, Homo sapiens
agaagcgtcccgcgaggcccgcgccaaggcactacctggcagcaccatctaaacctgtatcatctgctgtggtcccagttactcaggaggctgaggcagg

SEQ ID NO: 571693 - DNA, 75 bp, Homo sapiens
agctagtagtttgggaagctgctcagaatggtgcagatgagggaactggaatgggaaaaggacagcacaggatgc

SEQ ID NO: 571694 - DNA, 75 bp, Homo sapiens
cgaggtcaccatctccagcacacttggataaacgaagaggctggggacactgagaggacccagtcggcattggca

SEQ ID NO: 571695 - DNA, 83 bp, Homo sapiens
aggagctcgaggtggactatgaggctatccgcagcgagatggagcagctcaaggaggatcagtttgacaacttagaaaaacac

SEQ ID NO: 571696 - DNA, 76 bp, Homo sapiens
gtcctccgggaccggagtcagaaccctccgcagagtaaagataaccagcccgagtcatgcagtcttttcgagaaag

SEQ ID NO: 571697 - DNA, 75 bp, Homo sapiens
cagtgctcaaactcaccgaccagatttcaactattgcagaaagtgaagattcacaggagtcagtggatagtgtaa

SEQ ID NO: 571698 - DNA, 100 bp, Homo sapiens
gctggaacaggcttcacaccaatggttaaaatactgaattatgctttgactgatatacccagtctcagggaccacgggatcattcgaactctggatttac

SEQ ID NO: 571699 - DNA, 89 bp, Homo sapiens
cggccagggccgggagccgggccggcctagccagtaagactttgaccccgacgcaggcttcagtgattgccgcggatcagaagcctgag

SEQ ID NO: 571700 - DNA, 90 bp, Homo sapiens
gtcaactcttctgaagctgctaactggagagagatggacagagacgtatgtgcgttggtctcctaagggcacctacctggctacctttca

SEQ ID NO: 571701 - DNA, 100 bp, Homo sapiens
agcttttcaaccacgcctgggagatgtgttcgccgaagtcatcagaaaaccagggtacagtggaacgaggctcttttccccttcctcagctccgccttga

SEQ ID NO: 571702 - DNA, 100 bp, Homo sapiens
agacttttccaatgaagagcgttttacggggtttgctgcatactatgttgccacaggtgactcagttgttgtggctcctgcccagacactctccaatgcc

SEQ ID NO: 571703 - DNA, 88 bp, Homo sapiens
cgcagcgacaacatggaggccgtgaagaccttcaatagcgagggtgtgaacggcatgtctgtggatgagaagcctgactcccccatgt

SEQ ID NO: 571704 - DNA, 75 bp, Homo sapiens
ctggacccggaccggttttggccaaccatctgtcactacttcatgcgcctgctgaaggacaaggggctactcctg

SEQ ID NO: 571705 - DNA, 83 bp, Homo sapiens
ctaaagcagcgtgcgttcagccctgggaaatgaaagctcattagcatctacactgaagacgctcctgttcttcacagctttaa

SEQ ID NO: 571706 - DNA, 100 bp, Homo sapiens
atctgcccaaactggaacttatgctgtagacatttctttgtggtttatctaaaaaccaaaggtgctggagaatctggtaaaagcaccattgtgaagcaga

SEQ ID NO: 571707 - DNA, 75 bp, Homo sapiens
ggcctctgacagctcttggaaggtcagcccaaggccaaccccactgtcactctgttcccgccctcctctgaggag

SEQ ID NO: 571708 - DNA, 98 bp, Homo sapiens
aggccagccgggacggacgccgatgcccggggctgcgacggctgcaggaagaagagtgacaggaccaccctagattcacaggaaggggactacacaac

SEQ ID NO: 571709 - DNA, 100 bp, Homo sapiens
ttccactaatggcgtgaatggccatttaccaggagatgcacttgcagcaggaagattgccagatttgaggcttaagcaacttcttccggggaagagtgcc

SEQ ID NO: 571710 - DNA, 89 bp, Homo sapiens
ccaggcggcggcggtcctggtgcggaccctccggccgcagccatgtgggacccgcgggcagctagggaactctaatgatccaggacaaa

SEQ ID NO: 571711 - DNA, 74 bp, Homo sapiens
acttgctcgtgccttagacaagaaactcctttccttaaaggttatcaacgaaacttctcagcatcacgatgacc

SEQ ID NO: 571712 - DNA, 100 bp, Homo sapiens
gcctagatggctttggtcacggtccagcggtcacctacccccagcaccacctccagcccctgcgcctcggacccccgcagcaaacacaagtttaagatcc

SEQ ID NO: 571713 - DNA, 74 bp, Homo sapiens
ctggagctggtgcagcaggaattgggatcgtgtcgctgcggcccaagtctgttttggtggtctgagaggaaaaa

SEQ ID NO: 571714 - DNA, 83 bp, Homo sapiens
gccatggcgaggggtgcacggcggccacctgagtggcgcggcggtgtcagggctgaaatctctttaatgatggagggaagcag

SEQ ID NO: 571715 - DNA, 82 bp, Homo sapiens
ttggcccttgttcccccaaatgtctgactctgactctcggactgagaaacgcaaggagcagctgatgagccagatccgggag

SEQ ID NO: 571716 - DNA, 98 bp, Homo sapiens
gatgaacactggacttcagaaatgctcacagtgcacagggctgttcagcaccacagtgctgggtggctcctccagtgccccgaatcttcaggactacg

SEQ ID NO: 571717 - DNA, 100 bp, Homo sapiens
tggagtttgtgatgaagcaggctctaggagtcgtcattgaattttgagaagcattctgaaaactttgcatggacagagaatcgttatgatgtgaaccgtc

SEQ ID NO: 571718 - DNA, 116 bp, Homo sapiens
cagtcagaaaggatttgccagtggagtagaacagattattcttggagctggaccagtacttgagaatccagcaactatcacaagaatactccttagccacttcaattgggataaag

SEQ ID NO: 571719 - DNA, 90 bp, Homo sapiens
gccattcaaggaccccctgggcaaaaaggagagatgggcactccaggacccaaagtgacgaggaattgacaatggccatgtcctacgtga

SEQ ID NO: 571720 - DNA, 95 bp, Homo sapiens
cagcagaatttgtatagagatgtgatgttggagaactacagaaacctggtctccctagttcaggagcgccttacaaaacaaattgctgtagcaat

SEQ ID NO: 571721 - DNA, 90 bp, Homo sapiens
cagcgcagtgcagatccgcaggcgcaaggcttcaggcgacccgtactgggcctactctgatgaagctactgaatctttacatcaaacgtg

SEQ ID NO: 571722 - DNA, 75 bp, Homo sapiens
cccggagtccctggccgccgttgcttacctgctgaaccttgtcctgaagcgactgctggagttaataccaccgac

SEQ ID NO: 571723 - DNA, 96 bp, Homo sapiens
ccgccggggagccgtccagtcttcgaatcccagcatgtgggcacattccatgacagtacaggattatcaggatctcatagaccgaggatggcgaag

SEQ ID NO: 571724 - DNA, 96 bp, Homo sapiens
ctgcacatttttacagttctccagtccttctctttcgtgatcaagttgttcctgcagcacagtcttcacctataaactgtgagaagagagaaaact

SEQ ID NO: 571725 - DNA, 75 bp, Homo sapiens
gcatttggctttgcctttctggacacagaagtatttgtgacagagctcctgaaggaagcactaaacatggaaagg

SEQ ID NO: 571726 - DNA, 100 bp, Homo sapiens
aagagagcaacgccagagcccaggtgcccagaggactttcttccagcttctgctgtccttctttgtggagagcaagaaaaatcctgggtagaagctggat

SEQ ID NO: 571727 - DNA, 100 bp, Homo sapiens
acaagagcttactggtgaaggaatgggacaagacccatctttatgcaaagccagcgttacagtaatgttccaggtggatgggaagagagtcccaagggat

SEQ ID NO: 571728 - DNA, 101 bp, Homo sapiens
gtggaatatgccaaggaaaaactggagagcttcatcaaaaatagtgatagctttgataagtactactgagcgagtgtgcttgatccagggaacggttgaag

SEQ ID NO: 571729 - DNA, 99 bp, Homo sapiens
agccttggaagactatgtagtattgatgaaaagagggactgccataacattcccaaaggtaatgcgatggagataagtagagacagggtttcgccgtgt

SEQ ID NO: 571730 - DNA, 75 bp, Homo sapiens
aagaccttcaagcagcgccgcaccttcggtgaacaaatagaagctgagggtgaaggacctacagctgtcaccttc

SEQ ID NO: 571731 - DNA, 100 bp, Homo sapiens
tgcggagctgcttcgccgctgcgtgtctttggtgcaacactaacaaggcttgtctggactacccagttacaagcgtcttgccaccggcttccctttgtaa

SEQ ID NO: 571732 - DNA, 100 bp, Homo sapiens
cagtgatgttgcattccttgtggttggtgatccatttgggaaattcgaaatgagtcccatgactatcctcatagagtggccaagtttccagaaaacagaa

SEQ ID NO: 571733 - DNA, 90 bp, Homo sapiens
gtcaggactattttcacgttttaatgccgagaggggatcccaacaagccctcaggattcagaagtgttaaagctcctgtcactaaagtgg

SEQ ID NO: 571734 - DNA, 95 bp, Homo sapiens
acacagcttacgtggacctggaaaaggactttgctgctgagatgatgaaaaactctcagaggtagaagaagctcaggaagcaagcatggaaacag

SEQ ID NO: 571735 - DNA, 75 bp, Homo sapiens
gtacggcaagtcgctgtaccacgacatctcgttggaagctgaaggtgttcctgaagtatctgaaaaatatgaaat

SEQ ID NO: 571736 - DNA, 100 bp, Homo sapiens
tgatgacggcactgttagaatctgggactttcttcgttgccatgaggaaagaattctccgagtggctgctaatttacagaagattgtagatgatcccaaa

SEQ ID NO: 571737 - DNA, 100 bp, Homo sapiens
cctgtgctcagtaaggactcggcggacatcgagctaaagtctccagtgaatattgaattgctgaggattttgggaaaagacaaatcaaagttcccattcc

SEQ ID NO: 571738 - DNA, 98 bp, Homo sapiens
tcaaggggatgtcgctgctggttcgggcagagtccgacgattccacctgctcctacgaagcccgactttgatggtcctcgagagaagatgcagaaact

SEQ ID NO: 571739 - DNA, 83 bp, Homo sapiens
aaggaataagcctggaagaaaaagatacaacgaactagcacaacgaggcaaaatgatgcttcaacacccaggccaggtctctg

SEQ ID NO: 571740 - DNA, 100 bp, Homo sapiens
cggcgggcatcttcttcgtgaggctgctcttcgagcgcctctcccactaggtctggatggaggataccttaaagtgaaatgacagaccaggagaataaca

SEQ ID NO: 571741 - DNA, 74 bp, Homo sapiens
aacttgacactcaccctgaccggtttgtgaaatggctgctgacatttctgaatccagcggggctgactgcaaag

SEQ ID NO: 571742 - DNA, 50 bp, Homo sapiens
atgctgagcgcctctcacacaggacctgatcccaaccttgaagaaagtcc

SEQ ID NO: 571743 - DNA, 102 bp, Homo sapiens
catgttctccaccaactactcacacatggagaactaccgcaagcgagaggacctggtgtaccagtccactgtgaggacaaggagtagatgaacctctttcag

SEQ ID NO: 571744 - DNA, 51 bp, Homo sapiens
cggaatctccttgcaaacgtagatgggaaaagaatcccgcccactaagacg

SEQ ID NO: 571745 - DNA, 75 bp, Homo sapiens
atatcaactgtggccttaatgagcatgttgacagcatcgatgctagacagacaagtccgaaattgaagttcagag

SEQ ID NO: 571746 - DNA, 75 bp, Homo sapiens
atccttttctgggtgctatgggtgatcattccaagacttcctgcctgacacagctcacttcaagaagtgcacaat

SEQ ID NO: 571747 - DNA, 98 bp, Homo sapiens
aagagtactgaacagcagcaagccgcccctgagccagatccctctacgatgactccacaggacagaactgtaccgctctctttttggccagctccacc

SEQ ID NO: 571748 - DNA, 74 bp, Homo sapiens
cggcaccctggccaggaagcggagggcgcgcgaggccagagactgctgctactttgaaacgtacgatagaggcc

SEQ ID NO: 571749 - DNA, 75 bp, Homo sapiens
gacaaagcggctcggggccaaggatgacttcccagggaaagaatagttggctggtaccacacaggccctaaacta

SEQ ID NO: 571750 - DNA, 76 bp, Homo sapiens
acatccccacatcaatgcactgccaatgaacatgccagcagaagcattcaccaactgacatgtgccctgaaagaag

SEQ ID NO: 571751 - DNA, 83 bp, Homo sapiens
cgccgaggcaccgaggcactcagaggagaactccatccggcacaacctgtcactgcatagtcgattcatgcgggtccagaatg

SEQ ID NO: 571752 - DNA, 90 bp, Homo sapiens
ggcactttattatgcaggtggtctgtgaagccacacagtgtccagatacgagggcctttgcccagtttgatgctgagggtgatgggacag

SEQ ID NO: 571753 - DNA, 76 bp, Homo sapiens
gttgggctgtgacgctgctgctggggtcagattgacgtgagtgaattcagatataactcaagcttgttagagggct

SEQ ID NO: 571754 - DNA, 100 bp, Homo sapiens
ggctggccgagcaggcggagcgctacgacgacatggcctccgctatgaaggcggtgatctgcaactctttcaccatctgtaatgcggagatgcaggaagt

SEQ ID NO: 571755 - DNA, 75 bp, Homo sapiens
aacaacagatggatcccttcagatgtgtcgtggaggccgaatgtttgcaccaaccaaaacctggcgccgttggca

SEQ ID NO: 571756 - DNA, 100 bp, Homo sapiens
tcgatgccaatctctgcttgaaaggagaagacttggattctcagatggttccaatccctatacattgaagctttgcttttctacatcatcccatttataa

SEQ ID NO: 571757 - DNA, 98 bp, Homo sapiens
aaacctgtcaggaatacgagcttctggaaaacatggtaagaggcttagatgaagatgagaccaacttccttgatgaggtttctcgacagcaggaacta

SEQ ID NO: 571758 - DNA, 75 bp, Homo sapiens
gacgtctgcgtgagaatagagaccaccgagctgggagtgtccactcgccttccaccagcatggcaacgtcttcac

SEQ ID NO: 571759 - DNA, 83 bp, Homo sapiens
cgaagaagcatcgttaaagtctctcttcaccctgccgtcatgtctaagtcagagggaaactctatggagacgcagactacttg

SEQ ID NO: 571760 - DNA, 96 bp, Homo sapiens
tctgcggccaagactccgtcctgcaagatggaggtgcagcgccggccctggttagtgaagtacggggacagcggggagcagattgccggcttcgtg

SEQ ID NO: 571761 - DNA, 82 bp, Homo sapiens
gacgagtttgaagagttccctgccgaaggttacctgtcctgctgccgattcctggatgacaatcagatcgtcaccagctctg

SEQ ID NO: 571762 - DNA, 87 bp, Homo sapiens
tggtggtgaccccgcccagttggcccagaggatctcttctaacatccagaagatcacacagtgttgcaatggacctcatcatgaccg

SEQ ID NO: 571763 - DNA, 83 bp, Homo sapiens
ttatataataggaagaaaaagaaagactcttcagctctcacataagtctgtaaaacgtgtattgttcgttacctggagaccag

SEQ ID NO: 571764 - DNA, 50 bp, Homo sapiens
acaagcgagaggaggaggaggatgatgaaaccaaaaacttttgctagaaa

SEQ ID NO: 571765 - DNA, 83 bp, Homo sapiens
cagaccccttcaagttctagtcatgcttcctgcctgacacagctcacttcaagaagtgcacaatgtcagaacgtggaattaag

SEQ ID NO: 571766 - DNA, 96 bp, Homo sapiens
ggaaataaaaacagaacaggaggtggtagagggcatggatatctctactcgctccaaagacaaatggttatgatggagaattgtatggatcacagt

SEQ ID NO: 571767 - DNA, 83 bp, Homo sapiens
gtgtgtgctgcgttcacaggtgtttctgcggcaggtttggtgcacctcgatttggaggaagtagggcagggcccttatctgga

SEQ ID NO: 571768 - DNA, 75 bp, Homo sapiens
ggtgactcgactaagagaattaaccagaacctgtacattgatccaaagagggggaagaaggaagggaaatgatgg

SEQ ID NO: 571769 - DNA, 83 bp, Homo sapiens
cggagctggcgactagaccccaaaacatcgagacgctgcagaacgcggcttccgccctgcgctgccagtctcctacctgcagg

SEQ ID NO: 571770 - DNA, 80 bp, Homo sapiens
ataaactgatgcgtctacacaacagtgaagtggggagacagctgtcccccgaggcagcctatgatgtgctgagcgtcgcc

SEQ ID NO: 571771 - DNA, 98 bp, Homo sapiens
ctccaggtcttcagcacccacccaccgtggtacagcgcttctctgaagtagctttggaaagtagagaagaaaatccagtttgcttcttggagaacact

SEQ ID NO: 571772 - DNA, 100 bp, Homo sapiens
ggagtaggtcctgacactgtccataaatgtgcagagaagaaggattttccaggcgagcagttcttcgtggtatttgtgataaagcctgaagattatgcct

SEQ ID NO: 571773 - DNA, 98 bp, Homo sapiens
gccatcgagccttggcggcggacgtgcagctcccctgggacctgtggccgccgcccacagaccatgctcctggggcgcctgacttcccagctgttgag

SEQ ID NO: 571774 - DNA, 76 bp, Homo sapiens
tatgcttatctgagacaacttgagtatcgggaaaattgcctggcagcaaaagcactttttcctgacttctgcctac

SEQ ID NO: 571775 - DNA, 90 bp, Homo sapiens
cttgtggagccggagctgggcgcggattcgccgaggcaccgaggcactcagaggaggttgtggcagcactgcctgaaggtatgagaccag

SEQ ID NO: 571776 - DNA, 101 bp, Homo sapiens
accaaccattgtgtgctgtgaggtaaaggatatgttcaaggaatgagtgatttactttcccctcttttatatgtgatggaaaatgaagtggatgccttttg

SEQ ID NO: 571777 - DNA, 100 bp, Homo sapiens
gccctggctcgctacgccagcatctgtcagcagggacatattctcccagggatttgggcctttccgctgggtgtgcacatcgggggacccccaggacctg

SEQ ID NO: 571778 - DNA, 107 bp, Homo sapiens
tgggggagctgctgggcgaagcacgctactacctggtgcagggcctgattgaggactgccagctggcgctgcaggcttctccagggaaagtgaccgaggcagtgaaa

SEQ ID NO: 571779 - DNA, 101 bp, Homo sapiens
gaaggcggctttagtggcagcatgaagcgcaccccgactgccgaggaacgagagcgcgaagctaaggattttgacacttcatgacatgtcattatttagag

SEQ ID NO: 571780 - DNA, 83 bp, Homo sapiens
cccaccgccatccctgacccatggcgctgaagaggattcagaaaatgcggtgacctgccagcacctgccgcagccttcgtccg

SEQ ID NO: 571781 - DNA, 100 bp, Homo sapiens
cgcggccggcaggaccatgctgctgaaagagtaccggatctgcatgccgctcaccgtagacgagactcattctgatgaaggaaagagcgtccctgtgcag

SEQ ID NO: 571782 - DNA, 100 bp, Homo sapiens
cccgctgctgctgccgctgccgccctgagtcactgcctgcgcagctccggccgcctggctccccatactagtcgccgtacgaggatgtcgtccaggaaag

SEQ ID NO: 571783 - DNA, 98 bp, Homo sapiens
cacctcctcctccaccaccctcaccagaaagagtttattaaccacttaacctctcagaactgaacaaagacaacattgttcctggaacgccctctttt

SEQ ID NO: 571784 - DNA, 83 bp, Homo sapiens
cgagggctccagaacccaggaagggaaatcctcattgacgattcaatttgttgaaggccaatttgtggactcctacgatccaa

SEQ ID NO: 571785 - DNA, 101 bp, Homo sapiens
aagggcagtcggcggagcttcgccaaggctggcgcagtcgcaggaacgaatgcaggaatttgggaactgagctgtgcaagtgctgaagaaggagatttgtt

SEQ ID NO: 571786 - DNA, 80 bp, Homo sapiens
ccccaagctggctggccattttgctgctgtgtgtggaggaactgtggctgcaccatctgtcttcatcttcccgccatctg

SEQ ID NO: 571787 - DNA, 75 bp, Homo sapiens
ggaaaatgcccaggaggaagcaggagcagcccaagcgccttccctcacgttaaacccatccagagtaatggctgc

SEQ ID NO: 571788 - DNA, 100 bp, Homo sapiens
gtaacttggcaatgaatgacagcactgtagaacagctttatgaaacagcttgcttcctacagttgccagtagtcatcagagtaccaaaactgatctattt

SEQ ID NO: 571789 - DNA, 100 bp, Homo sapiens
cccgccgctgagccgtcgcggagccgcgcagccctcggagcacgagctgagctcaatgtgcagcaatggatgacgacagcctggatgagcttgtggcccg

SEQ ID NO: 571790 - DNA, 100 bp, Homo sapiens
ggcagccactcaaggtagaaaatgaagagcatggggccccagaactgtggtgccatccagcttgccggcttgctctgtcaccatcgccccggaatcctgc

SEQ ID NO: 571791 - DNA, 80 bp, Homo sapiens
tcaaggacgggaagtcactcataagcgcgctcaagagttttaaaatcaaagatgggaaaatcggagaaaattgcccttcc

SEQ ID NO: 571792 - DNA, 96 bp, Homo sapiens
catctcagagcatcagggtcacatggaaggttggttcttacttgaaatctccaaaattccctatttggattgttggcagtgagactcacctcaccg

SEQ ID NO: 571793 - DNA, 101 bp, Homo sapiens
ggcgtgaacgctctggggctcagccaggcctgcgcgggcccgaggccggaggaacccggactccggcgtagcgggacttcaaaatgagcgtccctgactac

SEQ ID NO: 571794 - DNA, 82 bp, Homo sapiens
gttaaactacagaacaacatatcgtatcagatggcagacatacatcatttaaagggttccacttccaaacatgagttccagg

SEQ ID NO: 571795 - DNA, 82 bp, Homo sapiens
cagagggctctgatctgtgcgacagaagtgaagacatttccacctggacacctgaccatgtgcctgccctgagcagcgaggc

SEQ ID NO: 571796 - DNA, 100 bp, Homo sapiens
ttctggacgtgcttctgcccgaggacgctgccaaggtctgcagagaattcaccgagcgtgagcaaggagaagtccgcttctctgccgtggctctctgcaa

SEQ ID NO: 571797 - DNA, 100 bp, Homo sapiens
gaaattcatggaagatatgatgccaaaggctagcatcccattctctgtggttggatccaatcagttgattgaagccaaaggaaagaaggtcagaggccgc

SEQ ID NO: 571798 - DNA, 98 bp, Homo sapiens
atcaaggctaccatagctgggggtggcagtaagctcctacaggacattttaaaactacataaatgtgccatccccagctcaaccgattataaacaact

SEQ ID NO: 571799 - DNA, 75 bp, Homo sapiens
gtgtggggcggtcccggccccgcaggatgtacagttacccagcacgtgtacctcctcctcctcctattgctcggg

SEQ ID NO: 571800 - DNA, 90 bp, Homo sapiens
ggctgggccacttgtctccaactcataagggcttgcagcccagttgacccggctgtcagccagatgaaacagcaaaaatatccaacaaaa

SEQ ID NO: 571801 - DNA, 82 bp, Homo sapiens
ctccttcggcagtccacccaccgccgccgcctcccaggagggtgaggacaaaatcttcttaatcaacaagcttcactccatc

SEQ ID NO: 571802 - DNA, 74 bp, Homo sapiens
aaaaaagtgcttcagagtgagttttgtacagctattcgagagcacttttccagccattaactccaggctctcga

SEQ ID NO: 571803 - DNA, 75 bp, Homo sapiens
agcaggcgatgacgagccagagtacgaggtacgacaacatggcagagctgtttgcggtggtgaagacaatgcaag

SEQ ID NO: 571804 - DNA, 148 bp, Homo sapiens
ggcagctacttaatcctactcagaagaacttgtacagagatgtgatgttggagaactatagcaatctggttttcttggtgttgacccgaatgatcagaaaaagacagcttgttatgacattgatgttgaagtggatgacaccttgaag

SEQ ID NO: 571805 - DNA, 75 bp, Homo sapiens
ttatactcctcccagtgacgggtctggagtgcgtgggggaccggctgttggcggctgtgagccgtgagctttgag

SEQ ID NO: 571806 - DNA, 100 bp, Homo sapiens
tggtggtaaaaggagtctgctttaaagcgcataagaatgtcctggcagcattcagccagtattttagtgagaaagatcagtctaaagaaaaggagaagaa

SEQ ID NO: 571807 - DNA, 100 bp, Homo sapiens
ccggccccgctgccgctgctgctgggcctcttcctccccgcgctctggcgtagaggagctatgaagacatgattggtgaggaggtgccatcggatcaata

SEQ ID NO: 571808 - DNA, 75 bp, Homo sapiens
caggactaaaaaccgaaaactgtattgagaacctagtctgtcccagaacaacatcactgacctgggtgcctacaa

SEQ ID NO: 571809 - DNA, 118 bp, Homo sapiens
cgccagtccgcccgcccgccctctccccgtggcgcggcggcggggaggcgagcatcttcatgatacagttaagaggaatcttgacagcgccacttcccctcagaatggcgatcaacag

SEQ ID NO: 571810 - DNA, 107 bp, Homo sapiens
cttagacccgttaatcagacagccagaccgaagacaaagatggagagtgttggcgtgtacggattctgtgggtgtaaagcaaagaacaaaatgaagtgtgattcaag

SEQ ID NO: 571811 - DNA, 75 bp, Homo sapiens
catcatgagcgatgttaccattgtgaaagaaggttgggttcagaagaggggatttttttcccaggaagccatccc

SEQ ID NO: 571812 - DNA, 98 bp, Homo sapiens
attactctgatcgctccgttaggctgtgtgtctgttacagaacctcaacctactggcttactcgcatccagtcttttctctactgcaatgagaacggc

SEQ ID NO: 571813 - DNA, 85 bp, Homo sapiens
cgccccgttccccgagctgtgcagacaatgcagatcttcgtgaagactctgactggtaagaccatcaccctcgaggttgagccca

SEQ ID NO: 571814 - DNA, 100 bp, Homo sapiens
tttgtattttggctgctgcaggagccattttagatggcccactgcgtgaccttggttcagctgtccatttcctgtgaccatctcattgacaaggacatcg

SEQ ID NO: 571815 - DNA, 83 bp, Homo sapiens
ccgctggcagccgcggatctcaccgccgctcaggaggttgacggatatattcagacgttacgacacggatcaggacggctgga

SEQ ID NO: 571816 - DNA, 50 bp, Homo sapiens
ggagaacaaatccaagattagcacagaatgattgtcacataatgtgtaga

SEQ ID NO: 571817 - DNA, 75 bp, Homo sapiens
tggaattctgcccactctgcggagttagcagtcacgacctccagcacagtactatactggcaattgctggagaag

SEQ ID NO: 571818 - DNA, 100 bp, Homo sapiens
ggacctggtgcaggctaaagacacgctctaccatgtactctacattggcaccgaggcaagagcaggctacggaggagaatgctggtgtacctgttggccc

SEQ ID NO: 571819 - DNA, 98 bp, Homo sapiens
atgagagaagaaatacaggatgcctctcagctgccacctgcctttgacctttttgaagcctttgcaaaatgtaaacaggaacatcgataagtagtgta

SEQ ID NO: 571820 - DNA, 87 bp, Homo sapiens
tattatgtagaatacttgggtgacatctgcctgagagatctccaagaattacaggtagtgggcagcagtcagtgacaggtgtaacct

SEQ ID NO: 571821 - DNA, 101 bp, Homo sapiens
cgcagggttcggatgagaccagatatcaatgatgtcaaacggctgaaacctggctacttagaagctactgtggactggtttagaaggtataaggttcctga

SEQ ID NO: 571822 - DNA, 100 bp, Homo sapiens
agcaggctcggagcctacggggctggcctcggactggatggggatgccacaccacatgaagcccttgccatattacagctatgaccagcctgtgatcggg

SEQ ID NO: 571823 - DNA, 100 bp, Homo sapiens
tcctggagaaggcacagcggctgtatccgacgccgcgagttcgcgttgtatcacggactgattcaccgagcccaaccgtactcaactcacatatttctac

SEQ ID NO: 571824 - DNA, 97 bp, Homo sapiens
ctcaatctccttttccttggctacccaatcagcatgattcttcagaggctcttcaggttctcctctgtcattcggtcagccgtctcagtccatttgc

SEQ ID NO: 571825 - DNA, 89 bp, Homo sapiens
gaaacataaagtaatgaatgagatcaagaaagagaatggagaagtaaagattttgctgaaaaccaacaaatggaattttcttgagcatg

SEQ ID NO: 571826 - DNA, 78 bp, Homo sapiens
gctgcgcgacccccgcgcatgaacaccttccaccatgaccacctcagcaagttcccacttaaataaaggcatcaagca

SEQ ID NO: 571827 - DNA, 100 bp, Homo sapiens
gaggagtatcagttcagtatcgctacttcaaagggtactttttagaaccaaagggttattttggagctgttggagcactccttgagctgttgaagatccc

SEQ ID NO: 571828 - DNA, 74 bp, Homo sapiens
ctcagccactccctagcactcacagacttcgattttcagaattcctcctgggaatgctgactccttgcttggtg

SEQ ID NO: 571829 - DNA, 90 bp, Homo sapiens
ggttacagctgtttccacgtgcggtgctcgtcgggagtgatcacctaccctacaggtcccaccgagtgtggatcagtgggaagacgaagg

SEQ ID NO: 571830 - DNA, 83 bp, Homo sapiens
acgggctgcaacctgcagcacatcagcgaccgggagaacatagacgaaaacctcggatcaattctcagctggtggcacaacaa

SEQ ID NO: 571831 - DNA, 100 bp, Homo sapiens
ggagtgttcaagatgctctctctggaccgatcccactgtcctagcttactctgccaccactgcccggcaggaggaagttccccagcagacagtggcccca

SEQ ID NO: 571832 - DNA, 75 bp, Homo sapiens
caaacaccgacccaaaggtttctttgccactgagcacccgacagacgtggactacagggtcatggccaccttcac

SEQ ID NO: 571833 - DNA, 75 bp, Homo sapiens
ttgaatgactggaaactgattggaaactctttgggaaagccactcgaaaaggtggtgagagcggctgaggaggct

SEQ ID NO: 571834 - DNA, 82 bp, Homo sapiens
cggaggctgaggagaaggaggagcgggccgtggaggcttcgccgcctaggtacggagatacaagggcctcatggactgtgcc

SEQ ID NO: 571835 - DNA, 100 bp, Homo sapiens
cttcctcttctctcaatatattctcacttatgggtataaaggttattaatgctgcactggctttagcagcaaaaccacagagtaaactggcccaagagaa

SEQ ID NO: 571836 - DNA, 100 bp, Homo sapiens
tacttggcagatcactctcttagcagaccttcacggcatggtgcaactcccacctgcggaaggcaggcacacagatcgagaacattgatgaggacttccg

SEQ ID NO: 571837 - DNA, 88 bp, Homo sapiens
cggagctcccccaagagccggaaagacacgatgaggcgagtggtacgacagagcaagtttcggcatgtatttgggcaagcggtgaaaa

SEQ ID NO: 571838 - DNA, 82 bp, Homo sapiens
tttcctttctccctcgcgttagaaacgcttcgttaagggactcaggcagtacgggaagaacttcttcagaattagaaaggag

SEQ ID NO: 571839 - DNA, 75 bp, Homo sapiens
attttggtctgagatttatggattcagcacaagtagcatgttccttgcctgtatctccccttggttcaatagcta

SEQ ID NO: 571840 - DNA, 101 bp, Homo sapiens
agactttagaggaagtttggattatagaccattaacaacagcagatcctggttgagttccagaataaattctacagcgggaccggtttcaagttcttaccc

SEQ ID NO: 571841 - DNA, 74 bp, Homo sapiens
cccgagaaagggaatttcaggaacaaatgaaagtagctcttcctctacactctgtcaagttgaacctgtgggaa

SEQ ID NO: 571842 - DNA, 149 bp, Homo sapiens
ctttgtatccaagatagttgacagtgggcctgcagccaaggaaggaggcctgcaaattcatgacaggattattgaggaggaaggctgaacaaggacctgcgacattttctcaatcagcgattccagaaggggtctcctgatcatgagct

SEQ ID NO: 571843 - DNA, 75 bp, Homo sapiens
ggaaagtcatgttacgacagcaatttgaggtcaatgggcatttcttcaaaaacaaaccagtccagctacgggggc

SEQ ID NO: 571844 - DNA, 100 bp, Homo sapiens
ttagaaaggagctgcttcccaataaggaaacaacacgatgaggcgagtggtacgacagagcaagtttcggcatgtatttgggcaagcggtgaaaaatgac

SEQ ID NO: 571845 - DNA, 105 bp, Homo sapiens
accggctgtatgattaggccacaatcttcaatgagtaaacatattcctgtcaaaatgcagatcttcgtgaaaacccttaccggcaagaccatcacccttgaggtg

SEQ ID NO: 571846 - DNA, 101 bp, Homo sapiens
aagaaccccgaaatgtgccgagtgctgctcacccatgagatcatgtgcaggctgatggtgcgctcagggggcagccccctatcccccgtgatctatgattc

SEQ ID NO: 571847 - DNA, 100 bp, Homo sapiens
ggacaggaggcagtgccgcttcggccgaaggcccgagcgcccgaggcgtctgggatggtgtgggaccgggctaaatggcggcatctggcagagggctcag

SEQ ID NO: 571848 - DNA, 101 bp, Homo sapiens
caaaagaaagctggattgccttaccaaatctccaggtttttcgttatacctcttcactcaggctctgcccagaactcaagttctggaggctgggaagtcca

SEQ ID NO: 571849 - DNA, 98 bp, Homo sapiens
cggaccctccggaaggacattgccaactacaacaaggaggatgacattgtatccacaaattacccattatcaaaaacaaatagttcatcaaatgattt

SEQ ID NO: 571850 - DNA, 82 bp, Homo sapiens
cgaaaggaagcaagcagttcagaagagccaaggaataaacatgcaatgaacccaaaaggtgctactatatcggggccacaga

SEQ ID NO: 571851 - DNA, 80 bp, Homo sapiens
atactccacagaatcttatcacagtgaaggagctccagaaagctgtggaccaccgcaaagccatcatcctctccatcaat

SEQ ID NO: 571852 - DNA, 75 bp, Homo sapiens
gacaggctcttacagtgcactcggcaggcagtacccctcttctctggtcattatcgttattgtgatgctctttct

SEQ ID NO: 571853 - DNA, 82 bp, Homo sapiens
ctgtgcagccgcgaggaggcgcgggaggtgttcgagaacgaccccgagacgttggaatcgaagcctcttaaaatggcagatg

SEQ ID NO: 571854 - DNA, 96 bp, Homo sapiens
gatgagaggatgtggtggtctactctgatgtcaatcttgagggctaggtgtgtgcagtggcctcagggatccggaaagtctaggactgaacttctc

SEQ ID NO: 571855 - DNA, 98 bp, Homo sapiens
cactgccctggggcagctgaactgagcgtatgtgccacgccgcccaggagacccctctgctgcaccacttcatggggaacgcccttttgcttgtgact

SEQ ID NO: 571856 - DNA, 100 bp, Homo sapiens
cctggcacccgtgcctacgggtggctcccagaacatcctggtgcctctggccaacactgcctttttccaggttggagaggctgctgctggtcgtggctcg

SEQ ID NO: 571857 - DNA, 75 bp, Homo sapiens
gccgtcggtgccgagaccccatcaacgtggagggcctgctggtggcagaactggtgaagccattgtagatgctgc

SEQ ID NO: 571858 - DNA, 98 bp, Homo sapiens
tctggactgatctccatgtcctgttgtggggcttttacagcctttggaggtcctgctgtactagccaccaaagcagctgctggtactaagaaatatga

SEQ ID NO: 571859 - DNA, 73 bp, Homo sapiens
catcaacttccggccgcagatgtcccaggattacacagtgcgtggcctcctgggcaaagctacagatgacttc

SEQ ID NO: 571860 - DNA, 88 bp, Homo sapiens
gggagactcccccaaaattcttcaagacattgcttcgggaagccatccatttagccaggtcatgcttctcatcgatatcgagctggct

SEQ ID NO: 571861 - DNA, 90 bp, Homo sapiens
agacagagctgagggagcaagaggtgtcggaggtctcatctttgaactactgccggagcttctgccagagaatgaagaaattgatgttgt

SEQ ID NO: 571862 - DNA, 74 bp, Homo sapiens
ctgggcctcccggtccgcaagcagaacattatgctatggaagataaacaacatggagaatttgctttattaaca

SEQ ID NO: 571863 - DNA, 50 bp, Homo sapiens
gagagagtccgggagcccgagcttgagagtgatcagcagctggactgtgc

SEQ ID NO: 571864 - DNA, 100 bp, Homo sapiens
tgatactgaaggggtcgtcactgtactggtatagcaatcaaatgttcgaaaagatataatccgcatcctccccagtctagatgtcgaagtcaaagacatc

SEQ ID NO: 571865 - DNA, 140 bp, Homo sapiens
caggactatgagcggcgcctgcttcgccagatcgtcatccagaatgagaacacgatgccacgcattggtgctgaagacatggacggcttccaggcagacacggaggaggaggaagaggaggagggcgactgtatgatcgt

SEQ ID NO: 571866 - DNA, 89 bp, Homo sapiens
agcggcgcagcggcggcagcggagagcgagagaggggagcagaacactctgctccagccaaggtggtgagggcagctgttcctaaacag

SEQ ID NO: 571867 - DNA, 124 bp, Homo sapiens
gcggacgaggcggaagaccgcgcgcagggcctgcagcgggagctggacggcgagcgcgagcggcgcgagaaaatccggaacatggtggcggtgctggaagtcatctccagcctggagaaatacc

SEQ ID NO: 571868 - DNA, 149 bp, Homo sapiens
ccatggtcaaccccaccgtgttcttcgacattgccgtcgacggcgagcccttgggccgcgtctcctttgagatcggcttcaccaccgaccctcggatggcccgctcctccccctaccccactgacgtggcccgagtggtgaatgccccc

SEQ ID NO: 571869 - DNA, 100 bp, Homo sapiens
gccgactgagcaggagtcgtccgcttatagtggaggctgctaggagccggtcagagggagccatgtggctagaaatcctcctcacttcagtgctgggctt

SEQ ID NO: 571870 - DNA, 51 bp, Homo sapiens
ggatccatttctcctattgaggagtcaacctgtgctgtacctgcttctctg

SEQ ID NO: 571871 - DNA, 100 bp, Homo sapiens
ctcctgagtagctgggactgcagctggaacagatggtgatcaaaatggacttgatcacccatctgttgaagtttccttggatgaaaactcaggaatgtta

SEQ ID NO: 571872 - DNA, 100 bp, Homo sapiens
cacgagaatagacacggcagcgcagtgcagatccgcaggcgcaaggcttcaggcgacccgtactgggcctactctgactttgctaccaggacttgctggc

SEQ ID NO: 571873 - DNA, 75 bp, Homo sapiens
cggcagacggcgacagtggcggcggcgccatggcagggcttgcaggatcaggtcatccagctgatgaacgcgatc

SEQ ID NO: 571874 - DNA, 50 bp, Homo sapiens
ggagcagtagatgatgatgtagcagaaggctgttaccttctcctctcaag

SEQ ID NO: 571875 - DNA, 100 bp, Homo sapiens
cggatggtggtgatggaagcaggtggaattatgccctgttggttccaatgctgggattggctgcttttcgtggccctcatgacactgacgctcttcccgg

SEQ ID NO: 571876 - DNA, 82 bp, Homo sapiens
ggatacatgccctacctcaacaagtacatcctggacaagagtgttctgccagttctggataatccactgtccaagaaggttc

SEQ ID NO: 571877 - DNA, 100 bp, Homo sapiens
atctgtgtcgccgccgcccgcggcgtccccggtttggtgttgcggcgcccaccttcgggaggatcaggtcccttcaccgatgttgtcaccaccaacctaa

SEQ ID NO: 571878 - DNA, 100 bp, Homo sapiens
agttcctgagagtggagatctggtacttggtaatcaaataatgcctggatttcttaatatgaagataaagtttgtgtgcgcccagtgtctgagaaacggt

SEQ ID NO: 571879 - DNA, 90 bp, Homo sapiens
atgatacctttgatccagaacttgcagcaacaatagatctgaattctacaaacacattgtgctttctggagggtctactatgtatcctgg

SEQ ID NO: 571880 - DNA, 100 bp, Homo sapiens
caagtcaaatctaagcatttaaaagacaggaggcctcatgggacctgtcaggatgatttcatctggacacgagttaacaacagattatgatgaaaaagca

SEQ ID NO: 571881 - DNA, 87 bp, Homo sapiens
agggaatggccaagtgacaaagtactggtaagtccttatggcttaaatgggacgctaacaggccaagcatacaagatgtcagaccca

SEQ ID NO: 571882 - DNA, 80 bp, Homo sapiens
tctcacctatgatattcagtctttcacagatacaggaagtgggaaaactcttgcctttgccatcccaatgattcatgcgg

SEQ ID NO: 571883 - DNA, 75 bp, Homo sapiens
cttttcatgagtgttcctgtggtctctgcacctcctttctgggtattgtccagtcagaagaaaaacttgtcatca

SEQ ID NO: 571884 - DNA, 83 bp, Homo sapiens
caaaaactctttgagtttcggagaggagtaaagagatctgaagaagacacttgaatcatgggtgacgttaaaaattttctgta

SEQ ID NO: 571885 - DNA, 88 bp, Homo sapiens
ggggaaactatgggagttcccaattaacaatgaagcaggcaccaagtatagatgagaaagtagatcttcattttattgcattagttca

SEQ ID NO: 571886 - DNA, 100 bp, Homo sapiens
cgtccgcaaccttctcagcgcctatggcgaggtcggacgcgtcttctttcaggctgaggtacgaattggagcaatgttggcttatacacctctggatgag

SEQ ID NO: 571887 - DNA, 101 bp, Homo sapiens
aagttctcgaatcattctttgtacagaaattgaaaggcttcaaagctagcagctttctatgggaggattctcgtaacagcagcacaccaactgaaaagccc

SEQ ID NO: 571888 - DNA, 89 bp, Homo sapiens
tttttggagcatctccacccaggaacctcgccatccagaagtgatggtaatgcccgaaggagcagacacggtgtccaggcccagtcccg

SEQ ID NO: 571889 - DNA, 90 bp, Homo sapiens
ccccggccgctaccgctcaggtgctgcaggcacagcccgagaaaccgcagcactacacgattcaagttcgaaatatggcaactttgaaag

SEQ ID NO: 571890 - DNA, 82 bp, Homo sapiens
ggagcgggaagagttgctggggtgaaaggtgtagcagtcactcggcctacacccacagcatcgaccttgtgaacccagcgac

SEQ ID NO: 571891 - DNA, 90 bp, Homo sapiens
gcatgattggaaaccaagttaatcgaaaagttctcaattttgaacaagctatcaaggaaagccagccattgctcatagagatttgaaatc

SEQ ID NO: 571892 - DNA, 82 bp, Homo sapiens
agcgccgtcccgtccgacagccaggcccgggagaaaaagtttcctacactactgaggtttaggggcactgtgaagcaaaagc

SEQ ID NO: 571893 - DNA, 75 bp, Homo sapiens
ggtgagagacacagccacactcagcggccccaggtccacgctgcttttatgagctgtaacactcaccgcgaagat

SEQ ID NO: 571894 - DNA, 100 bp, Homo sapiens
ggcggagccgagagccacactttcaagtaaaccagaagcggagcagttccagccgcgggctcccccacacaggagcctcctatgtcagggcctcccagcg

SEQ ID NO: 571895 - DNA, 75 bp, Homo sapiens
ggtcgccgcagtcacggagcgcacgaatactcccccagttgcaagaggcgcaggaccgtggaagacttcaacaaa

SEQ ID NO: 571896 - DNA, 97 bp, Homo sapiens
cccgccggcctccgcggtgcctgccttcgctctcaggtatatttgccttccctccatgatctccaacactatccgataaagtagaagcaactgaggt

SEQ ID NO: 571897 - DNA, 51 bp, Homo sapiens
agcaggcatcatccgctatgcaattggggtggtgatctttgtgaagtctgt

SEQ ID NO: 571898 - DNA, 50 bp, Homo sapiens
ggatcacggatgtaggaagtggtcgcgtctccttcttcacctcggggtcc

SEQ ID NO: 571899 - DNA, 82 bp, Homo sapiens
ggtgggcaacgggaccctgtgccccaactctacttccctctgctccttcccagtccctgaagaggaaggagaaggaatatga

SEQ ID NO: 571900 - DNA, 75 bp, Homo sapiens
ttaggacttgggaccttccttctgggtggaccttatttaatgaactgaggattgttgttgaacacataataatga

SEQ ID NO: 571901 - DNA, 100 bp, Homo sapiens
aagaaccaaagcgaccccatcatgctgaacgtaaactagcaaatttttcagaacataaaacaagaatatagtcgttatcagaggtggagacatttagaag

SEQ ID NO: 571902 - DNA, 51 bp, Homo sapiens
agaactggatgggctggtggaagtccctgtgaagcaggaagagtgagggca

SEQ ID NO: 571903 - DNA, 75 bp, Homo sapiens
ctcaggacaccatccgttcaattggtacaaagctgggtgatcagcccatgacctaaacctccagacaaaataaaa

SEQ ID NO: 571904 - DNA, 100 bp, Homo sapiens
ctttgacagggacatcagtggagccttctcagacccacaggagccaaaaacctgtatatcatctccgtgaaggggatcaagggacggctgaacagacttc

SEQ ID NO: 571905 - DNA, 74 bp, Homo sapiens
ggctctgcaggcggaaggcggtggctccgagataggagggcatcctggctgtttcacccgtggacttgaacttg

SEQ ID NO: 571906 - DNA, 101 bp, Homo sapiens
aggagagcccacaggtgctaaagagagcagtaccctgatggagtcccttgcaggacagctggcctgaagctcagagccggggcgtgcgccatggccccaca

SEQ ID NO: 571907 - DNA, 74 bp, Homo sapiens
cagatagatgttaaggacatctgcaaatctttcaccaatattgcccccgaggaattagcacttgttcacaactt

SEQ ID NO: 571908 - DNA, 74 bp, Homo sapiens
acgcaaaccaaggatctggggatcttcgcactatcccaagagcttttgtgctgccttgcaccaggaactcagag

SEQ ID NO: 571909 - DNA, 50 bp, Homo sapiens
atcgtaacaacttatgacatgagcctcctgagagtctgctttggcatccc

SEQ ID NO: 571910 - DNA, 100 bp, Homo sapiens
cccctggaggagctggatcacctcctgctgctggcgctgatgaccgtgctcttcactatgtgttctctgcccgtaattaatctccctggggtgccctccc

SEQ ID NO: 571911 - DNA, 98 bp, Homo sapiens
ccagcggcgcgtgagcggcactgatttgtccctggggcggcagcgcggacccgcccggagatgaggagtagatcccataatagatcacgttcaagaca

SEQ ID NO: 571912 - DNA, 99 bp, Homo sapiens
gcagcaggccaatgcctacgcagcctgcacagacaaggagttgcggaaccttgcctcccggctgaaggattggtttggagctctccacgaggatgcgaa

SEQ ID NO: 571913 - DNA, 100 bp, Homo sapiens
ctttgaatgcatcagaaccatgcacggagtacttttcgtcagggtttggtgattggaagtaaacctgtaatttacccagtgctccactggcttcttcaga

SEQ ID NO: 571914 - DNA, 104 bp, Homo sapiens
ttctacgttccatcgtgtggttaaaaactttatgattcagggtggggacttcagtgaaggtctgaagaactgttgcccaattcaacagtgccagcattccaact

SEQ ID NO: 571915 - DNA, 90 bp, Homo sapiens
cgggccatacccaataaccaggtgcttggcaaaatcgagcgggccattgaccaagatcactccatggatgaaatgacagctgtggtgaaa

SEQ ID NO: 571916 - DNA, 100 bp, Homo sapiens
gagcaatatggaatattttgtgccacacacaaaaaggttatgatgtgattgctcaagcccaatctgggactgggaaaacggccacatttgccatatcgat

SEQ ID NO: 571917 - DNA, 92 bp, Homo sapiens
gagtggatgggtaaaacctatcatcataggtcgtcatgcttatggggatcaaattcaattagcagagcctcacagacaatggccaaatgtgt

SEQ ID NO: 571918 - DNA, 98 bp, Homo sapiens
ggagatgaacctctaacacagtggaaaggaaccgttctggatcagattcgctcaattgaaggccagtatggcacactacaagcatatgtgactccaag

SEQ ID NO: 571919 - DNA, 51 bp, Homo sapiens
ttcgcagtggtcgcttcttctccttgacatgtgcattgccattgcgatttc

SEQ ID NO: 571920 - DNA, 100 bp, Homo sapiens
gccagggactacgacggcaaggtcttctacattgaccacaacaccaggaggaccagctggatcgacccccgggacagggtgttttgaatgctgtatcaaa

SEQ ID NO: 571921 - DNA, 83 bp, Homo sapiens
cagcggttccatcctacacttgggttcatctgcagaagccagcggacgcctctgttcaacttgtgggttacctggctcatgag

SEQ ID NO: 571922 - DNA, 51 bp, Homo sapiens
acagtcctgacagcagcccccagggtcctgacttgtcctgggcaagccaag

SEQ ID NO: 571923 - DNA, 101 bp, Homo sapiens
cggtcgcctgggtccgcgccgaggtctggctctgggagaggagtggacagcagctggttgagatacatccccatctggagacaggactgccactgacagaa

SEQ ID NO: 571924 - DNA, 76 bp, Homo sapiens
tttcctcgcagaacgcctttatgcagaagttccatgccattgcagtgtcaactaggcctcagttacttttcagttt

SEQ ID NO: 571925 - DNA, 100 bp, Homo sapiens
acagttttgcattttggaaagtaaattatgcaagctccaggaagcactgaaggtcagccccagttgatgctgacagcaggacccagtgttgccgtccctc

SEQ ID NO: 571926 - DNA, 100 bp, Homo sapiens
ctacgacctcattttctgctggaactggaagcagcgagctccgtgtagacctggtggactttgagggcaaccaccagtttgctaagtacaaatcattcaa

SEQ ID NO: 571927 - DNA, 74 bp, Homo sapiens
agagagaacagtggaagaaactgcggagggaaagctgggaacgagaggagaagacagactgctgctttggacct

SEQ ID NO: 571928 - DNA, 76 bp, Homo sapiens
ctgcggaagtgcagctgcctcagttcttagcgcagatgtgactacccctgaatctacaaagaatcttgtggagtca

SEQ ID NO: 571929 - DNA, 100 bp, Homo sapiens
tggagctgcacagcgagggcaccaccgtcctgctcttccagttcgggatgagcgtcctccaggctttgaccgtgtccgaaatgctgagattgggaataaa

SEQ ID NO: 571930 - DNA, 75 bp, Homo sapiens
catcatcactgtcatcttcttcaccgtctttgtgcaggagtctactcttcatcttgtgttgagacttcgtggtgg

SEQ ID NO: 571931 - DNA, 85 bp, Homo sapiens
gggctgtgctgggtgtcttctccctcgccagctgggctttcttctagtcaagatgagtgataaaccagacttgtcggaagtggag

SEQ ID NO: 571932 - DNA, 75 bp, Homo sapiens
acacctactgggattccttgggcaatggtgaatttgaaaaggagtccaatgtgctgattgctgctaacagtcagg

SEQ ID NO: 571933 - DNA, 90 bp, Homo sapiens
ggacttcaacatgaatatgcagctcctgctgaaaaaacacaccttgactttagtcagatacatcactgtctgttaaaggaaaccaagcgt

SEQ ID NO: 571934 - DNA, 100 bp, Homo sapiens
ttagaaggaggttcaggctacggtgagccgaaggcccagtttgagatgccttatgtggtacggctgcacaacttccaccagctctctgcaccccagccct

SEQ ID NO: 571935 - DNA, 90 bp, Homo sapiens
tgtgctgatgcagacagtggacccgtacacaccggactaccaagaccagctacggtcaccaggaggagatgttaaagtaacccatcttgc

SEQ ID NO: 571936 - DNA, 141 bp, Homo sapiens
caataccaagatgccatccgagcccacaaggctggccgagccgtggatgtcgctgaattgcccgtgcccccagatcaccggggaacccttgatccgtcgatcagatgataatgaaaaggccttgaaaatccgcctgcaagc

SEQ ID NO: 571937 - DNA, 100 bp, Homo sapiens
gggacccgcccgccatggccaccaagatcatggaagggaagtggttgctgtgtatgttactggtgcttggaactgctattgttgaggctcatgatggaca

SEQ ID NO: 571938 - DNA, 75 bp, Homo sapiens
acggatagctccctcctggaaaagatctgtgacttcctccgcggagccacagtccatagaatcctcggccagcag

SEQ ID NO: 571939 - DNA, 101 bp, Homo sapiens
cgcctgcaaggactggttccacggcaggctactgcagcactggggtgtcagttgttggtccgacccagaacgcttcagttctgctctgcaaggatatataa

SEQ ID NO: 571940 - DNA, 96 bp, Homo sapiens
tcatcgtcaaagaagaagaaaacaaaggtagaacatggaggatcgtcaggctctaaacaaaattctgaaacgcttcgttaagggactcaggcagta

SEQ ID NO: 571941 - DNA, 50 bp, Homo sapiens
gcaagaggaagtcagggggaaatgaggccaaactgttttcagatagtagt

SEQ ID NO: 571942 - DNA, 100 bp, Homo sapiens
cgccgctttgccattggctcccaggtgtctgagcacagcatcatcaaggacttcaccaagcaggttgggggccgtcccgctcctaaggcaggaagatggt

SEQ ID NO: 571943 - DNA, 101 bp, Homo sapiens
ggaggagtagtggtttgcgagcaggttctcggagggaccgggatagagatttaccgcattgtttctcagaagcaaatgtcagacagacgcgaaaatgacat

SEQ ID NO: 571944 - DNA, 83 bp, Homo sapiens
agcgacaacatggaggccgtgaagaccttcaatagcgagacctgatggccaaaagaaaggaagaaaatttttcctctcctaaa

SEQ ID NO: 571945 - DNA, 100 bp, Homo sapiens
ccggaggtctccgccggctcccgggtgatttggatattgaagatgacatgaaagcacagatgaattgcttttatttgaaagccttggatggttttgttat

SEQ ID NO: 571946 - DNA, 75 bp, Homo sapiens
ctgacacgaatgcactggtctaatgttgggggcttaagtggagatcccccgagacctcacgctggatgccctgct

SEQ ID NO: 571947 - DNA, 98 bp, Homo sapiens
ctctgcctaccatccataaaatactcattcccctctcagaaagctcctcctgagcttggataaactgcaggagcgaaggggctgaccgtttgtcggga

SEQ ID NO: 571948 - DNA, 90 bp, Homo sapiens
gtttgatccagaacttgcagcaacaatagtgtggcaaaggagcagagaactttgacaagttcttcacacgaggacagcccgtcttaacac

SEQ ID NO: 571949 - DNA, 90 bp, Homo sapiens
cccggacagaggcaagcaggggcgccgtgggtgccagagaggcggaagaggaggcctgatggggatgccgcagctgagcctgtcctggct

SEQ ID NO: 571950 - DNA, 90 bp, Homo sapiens
ggcgtccggggctcctgcgcactcacttggcggccgcgcccgctggcgtcctcttgttctcttccagcctcatgccgtttactgtaagga

SEQ ID NO: 571951 - DNA, 104 bp, Homo sapiens
tcgacagggaaagggatccagctacctatgatctcctggtggaagctaaggatggggaggtacagaaacattctgtacacacccttgtgttcaggtcgttgaag

SEQ ID NO: 571952 - DNA, 96 bp, Homo sapiens
taatatgcagaagaaatccatataggatctttgagtatttgcaactcagcctagaagaggcttgggaaacagtgagattggagtacctggaaggcc

SEQ ID NO: 571953 - DNA, 100 bp, Homo sapiens
gacgcagtagaaaaggtggcgtggctggcgattcgtgttcgtgagggccttttctgttacccggctgtatgtgaattcttacagcacaataacttgttat

SEQ ID NO: 571954 - DNA, 90 bp, Homo sapiens
ccccaggtgtagtacagagcggactgcagacttgaaagaggagattgatattcgactctccagggttcaggatatcaagtatgagcccca

SEQ ID NO: 571955 - DNA, 100 bp, Homo sapiens
gctgcaggactgggcacagcatgagatccaaaggcagggcaaggaaactggccacaacaatcccaggacccaccggctcagaagggcccaacgctcacca

SEQ ID NO: 571956 - DNA, 100 bp, Homo sapiens
taaacatcagaacctcaattctgttgatcttcaaaatgctgcagaaatgctcactgcaaaagtgaaagatatttggagttcttacaacatggcagacatt

SEQ ID NO: 571957 - DNA, 102 bp, Homo sapiens
aacaatatcctggtattgctgtggagacggtgacagattctagccgctactttgtaatccggatccaggatggtactgatggagtttcgctcttgtcaccca

SEQ ID NO: 571958 - DNA, 100 bp, Homo sapiens
ctggccgagtgggtatgcctggagtctcagctggtggcaatacagtcctgttggttagcaatttaaatgaagaggaatattcaacgaagcagctgaccaa

SEQ ID NO: 571959 - DNA, 100 bp, Homo sapiens
gcctggccagcctggcaaaagatgtgccggtggtggtgtgcacattgagccccggtatagacagttcccccagctgaccagatcccaggtgttccagagc

SEQ ID NO: 571960 - DNA, 90 bp, Homo sapiens
gagcgcatccgggatcacgtctctggggtgactggacagaccttcaactttgtgctcatcaacaggcaactcatgcagcaattccagaac

SEQ ID NO: 571961 - DNA, 96 bp, Homo sapiens
gtgcggagctaggacgcggaacatcccagaggccagcatcaacatgtgtcatggagaaactccagctgggcccagagattctgcagcgggaaaatc

SEQ ID NO: 571962 - DNA, 100 bp, Homo sapiens
gcgggtgaagcgggagcgcgaggtcgatgaggactcggagcctgagcgggaggtgcgagggggctgttgtggttccgactataaacagtacgtgtttggc

SEQ ID NO: 571963 - DNA, 101 bp, Homo sapiens
aagttgatggaattacactgtgatacgactgactgtttatggctacaaatgatttgatgacggaactgcagaaagattccatcaagttggatgatgatagt

SEQ ID NO: 571964 - DNA, 96 bp, Homo sapiens
aggggtggcctgcccctccacatctgtgggatatctcatcaggccgctacctgtctgaggaacccgagccctacctggcagtctacctgcactcgg

SEQ ID NO: 571965 - DNA, 90 bp, Homo sapiens
gcattaccaagtctcttcttcatttacacaagaagaaaaaacctcccagcatcagtgcccagtttcagactcctgtggaagaggtccctg

SEQ ID NO: 571966 - DNA, 100 bp, Homo sapiens
gtgacactcaacaggattcccggtgactctgacatcattagaagcatgccagaacagactggtgaaaagtaaaccttttcacctacaaaatttcacctgc

SEQ ID NO: 571967 - DNA, 82 bp, Homo sapiens
tctctttcgaagccattcagtcctcaatctccttttccttggctaccccttgcagaccaggattctataaagcttttgctgg

SEQ ID NO: 571968 - DNA, 100 bp, Homo sapiens
tgttatgccaaaagatgaagacattctccaagtgagatttacaaacgaggaccacctggcagttcataaacacaagcatgagatgacattgaaatttggc

SEQ ID NO: 571969 - DNA, 100 bp, Homo sapiens
ggccggagccacgcagccgcggcttccggagccctcggggcggcggactggctcgcggtgcagaaacggccatcattcaagcaaatcatttcaatcctgg

SEQ ID NO: 571970 - DNA, 90 bp, Homo sapiens
ctcagcgccaggcatcagctgggaagctggcgtgggcaggccagctgtacctggcctggagctccaggcttattgtgtaacagaacctgg

SEQ ID NO: 571971 - DNA, 144 bp, Homo sapiens
attcaatgacatgaagaacgtgccagaagccttcaaagggaccaagaaaggcactgtctaccttaccccttaccggcttcaacattgctttatggcatgtgtggtcgtttttcactccattgttgttgtttacccagtttatgg

SEQ ID NO: 571972 - DNA, 109 bp, Homo sapiens
ttttcagacagaaaaaacaattatgttcagcatgttagaactcatacagatatgcaatatgatgaggatgatgatgaaatcaccccggatttgtggcaagaagcatgct

SEQ ID NO: 571973 - DNA, 97 bp, Homo sapiens
ctggaggaaggaagtgcggagccagcctgagttgggagaagagctccagagagctgttactgaggcggagacacgggtgatgattggctttctgggg

SEQ ID NO: 571974 - DNA, 98 bp, Homo sapiens
ggcagacgttagcgtgagtgatcactctcaatcccgggtgcactaggccttccaatgagggggatgagcaacaatacccctcagttaaatcgcagctt

SEQ ID NO: 571975 - DNA, 100 bp, Homo sapiens
cgctggattacccccacgtgcagatccccttcgagatcaccctttggatcctgctggcctccctggccaagattggatgaccatgaaagctgtggttcta

SEQ ID NO: 571976 - DNA, 100 bp, Homo sapiens
caccccagccacccccagctcttcagcattgtccgccaggcctgtgtccggagcctgagctgtgaggtcgggcccctcggggccgcgtggccaatcagat

SEQ ID NO: 571977 - DNA, 100 bp, Homo sapiens
ggcgggacggagcggccggggcctggggctgcctgccgggcggccgggcgcggcgagcccagttaattggccttggtcctcacagctccaaaaagaaaca

SEQ ID NO: 571978 - DNA, 83 bp, Homo sapiens
aaagagacatttccatatcaccagaccacaaacgtggagtaaccaacgagtagacctttacaagtggaaagacggcagtgggg

SEQ ID NO: 571979 - DNA, 100 bp, Homo sapiens
cacaacatgggcaaccacctgccgctcctgcctgtttgtgaatagcacaatggaagaagctggactttgtgggttaagagagaaagcagatatgttgtgt

SEQ ID NO: 571980 - DNA, 100 bp, Homo sapiens
cttcactccagtgcctccgacgcctcctgatgtgacctgaccaacggtgcagatgggatgctggccacaagctccaatgggtctcagtacagcggctcca

SEQ ID NO: 571981 - DNA, 100 bp, Homo sapiens
gtcttcctgctggggctcatgtttgaggttgtgatcaattattcaatcgtgaaagggctgaagtacaatcaggccacgccaaccttccaccagtggcgag

SEQ ID NO: 571982 - DNA, 97 bp, Homo sapiens
aaaactggagagcttcatcaaaaatagtgatagctttgataagttttgattcccaccatggccatcacccagtttcggttatttaaattttgtacct

SEQ ID NO: 571983 - DNA, 89 bp, Homo sapiens
gtcaccccaggatgatgaagcagaagaggacaggatcttgctatgctgcccaggcttgtctggaattcctggcctcaagtgatcctccc

SEQ ID NO: 571984 - DNA, 100 bp, Homo sapiens
tcctggtggatctgcagtacgaagttaaacacagtgggaatatcacttttgatgagattgtcaacattgctcgacagatgcggcaccgatccttagccag

SEQ ID NO: 571985 - DNA, 100 bp, Homo sapiens
agaagaggcagcatgcggaaggcattgctgggagcctgaaaactgtgaatggttctctacttaaaagacaatgactactgatgaaggtgccaagaacaat

SEQ ID NO: 571986 - DNA, 87 bp, Homo sapiens
cagggacagcacctcatcccctggatgggggaccacaagatcctcatcgacaggaagctcttcgtgggcggtcttgactggagcacg

SEQ ID NO: 571987 - DNA, 76 bp, Homo sapiens
ttcgacacctacgacgatcgggcctacagcagcttcggcggcggcagaggtcagagcaccataacatggtgtggga

SEQ ID NO: 571988 - DNA, 100 bp, Homo sapiens
atggcggatgccctgcagtacctgcagaaggtctctggagacatcttcagcaggttggagtccgtgcggctggagtaccgtgcggggctgaagaacatcg

SEQ ID NO: 571989 - DNA, 100 bp, Homo sapiens
ggagacctaagggcggcgactacgacggcgttgatatcggtggtaacgacggcctcagcaggcggggaagatgaaaggatgctaatactggagaccgtgg

SEQ ID NO: 571990 - DNA, 90 bp, Homo sapiens
ctggagacatggaccgcggcgagcaagatattgctatatggagatttgccaaaaaataaagaaaatataatatatttagcaaatcatcaa

SEQ ID NO: 571991 - DNA, 98 bp, Homo sapiens
cccccaagttatcaaatccaagggcggtgttgtgggcatcaaggttgacaagggtgtggtgcctctagctgggactgatggagaaaccaccactcaag

SEQ ID NO: 571992 - DNA, 82 bp, Homo sapiens
ccatcgctccaaccaaaaccgtgaatggtgtctggaggagtgagagccggcaggttctgcggggagtgtctccagccctgcc

SEQ ID NO: 571993 - DNA, 82 bp, Homo sapiens
cggccatggtgttgctgctgtactccttctccggttactataacaacagtaccaaggtggctgtgaaaaccctgaagccagg

SEQ ID NO: 571994 - DNA, 51 bp, Homo sapiens
ggaggacgccgcgctcttcaaggatccctttgtggccttccacatcaacaa

SEQ ID NO: 571995 - DNA, 100 bp, Homo sapiens
tgatgaagccaaagccaggaaatatgcctttccgatcactggttccacctggccagcgtcgtctcggagatgcagccaagaaagccatcagtaaattgac

SEQ ID NO: 571996 - DNA, 82 bp, Homo sapiens
cgcagcatccccaacggcctgcacggtttggtgcacctcgatttggaggaagtagggcagggcccttatctggaaagaagtt

SEQ ID NO: 571997 - DNA, 82 bp, Homo sapiens
aaaagatgaagatgaagccagagaagcccagtcttccgaaatgcggtgctcagcattgttggaaactgttactacattttta

SEQ ID NO: 571998 - DNA, 96 bp, Homo sapiens
ctggccagcacgctggactgcgagacggcccggctgcagcgagcgctggacggagaggaaagcgccttcaaaagtatgttcgggaacagattctac

SEQ ID NO: 571999 - DNA, 105 bp, Homo sapiens
gagtgaggtggccggttcttggtgggatctgagcaggatctagtgaaaagccatttgatgtatgcggtcagagaagaagtggaggtcctcaaagagcaaatcaaa

SEQ ID NO: 572000 - DNA, 96 bp, Homo sapiens
gcagggagaaggaagaggtgtttgaaaaggtgggcagcctcacaaaaggagaaagacctctgatgcaaatgaaactgaagatcatttggaatcttt

SEQ ID NO: 572001 - DNA, 82 bp, Homo sapiens
cagtccacccaccgccgccgcctcccaggaatgtatcctgtcaggtataatgtcagtgaatggcaagaaagttcttcatatg

SEQ ID NO: 572002 - DNA, 100 bp, Homo sapiens
ccaagcagtgcttctacgaggacatcgctcagggcaccaagtgcaccctggagttccagagtgctgcagcagctcccagtccagtgctaggaaacattcc

SEQ ID NO: 572003 - DNA, 74 bp, Homo sapiens
gggcttggcgcggcggccagaggaaccccgagttcccactagtggctgacttgtttcatgatgacaaggaccct

SEQ ID NO: 572004 - DNA, 100 bp, Homo sapiens
ggggaagtgactgggcggtgccggcgccggagacgatgccgttacagtgatctgacacaaacacagctgaagcaaacagaggtcctagtgacagctgaaa

SEQ ID NO: 572005 - DNA, 100 bp, Homo sapiens
acttcctgatctctctcgctgtgagacatgtctgagactcctgctcagtgtagcattaagaggaattccagggaagaaatgtggtacaatcatacttaca

SEQ ID NO: 572006 - DNA, 122 bp, Homo sapiens
ttggcgaagccttgggtttctttcttaaaggactgatttttagaactccacatttgagtgtaaacaggaacatcgataagtagtgtaaaaacttgcacaatgaaatccgaagccaaggatgg

SEQ ID NO: 572007 - DNA, 87 bp, Homo sapiens
ggaaacagttttattcactccttcaaaagcccccaaaccagtgaatgcatggttcagcagactgtacaggatctttttggcagagcc

SEQ ID NO: 572008 - DNA, 96 bp, Homo sapiens
cctggaggagcgcatgcaacagaagtatgaggccagccgggaggacatctacaagcggagaccacagagctgggcagcaagaaggagctcaagtcc

SEQ ID NO: 572009 - DNA, 98 bp, Homo sapiens
cggaacacttcagcacaagaacgctaccttttcttagtggtaatcactcaaggaaaaggaattatcagagtaacaatagttcctgttactgacttgat

SEQ ID NO: 572010 - DNA, 50 bp, Homo sapiens
ggcgcctcggccgccatggtcttcagcgctcaccatggatgatgatatcg

SEQ ID NO: 572011 - DNA, 87 bp, Homo sapiens
caacaccacaataatccacagccaagaaatgggcaagttcatgaaacctgggaaggtggtgcttgtcctggctggacgctactccgg

SEQ ID NO: 572012 - DNA, 51 bp, Homo sapiens
gggtggtgccagtttggagctcctggaagccttcagtttggaaacctgcag

SEQ ID NO: 572013 - DNA, 80 bp, Homo sapiens
gcattaattgatgagggagatgaagatgcttgaagcccacatgcagagctacaagggcaatgaccctcttggtgaatggg

SEQ ID NO: 572014 - DNA, 100 bp, Homo sapiens
tgctgtgtgacagcatcgcaacgggatctgcagaacctgaactcgatcggcgccaatggtgtgccatagccatcctctttgcagtcctgttggttgtgct

SEQ ID NO: 572015 - DNA, 137 bp, Homo sapiens
gagctcaggacagggctgaggaaccatgtctccatccccgaccgccctcttctgtcttggtgcggattgatgagtacgattactccaagcccatccaggggcaacagaagaagccctttgaggagcactggaggaag

SEQ ID NO: 572016 - DNA, 75 bp, Homo sapiens
ccctgctgatgtcagtgttatatcctccaggaatactggccaggttatcaatactctggctgaccatcatcatcg

SEQ ID NO: 572017 - DNA, 125 bp, Homo sapiens
ttggagtttaatgagaggaatatactcatcatcagtctatttagaagaggctgtcattatttgtatcaaaaacaaagaatttgaaaaggcttcaaaaattttgaaaaaacatatgtccaaggacc

SEQ ID NO: 572018 - DNA, 100 bp, Homo sapiens
tggaactcctttataagtgtcagctgtgagggtagtcagcagagtgcacacagcagctgtcatccctccttcgctcctgtcatcactggcctgcaaaacc

SEQ ID NO: 572019 - DNA, 51 bp, Homo sapiens
caaagtcagcccaggcagacctccagggaggtggggaagacagggctccag

SEQ ID NO: 572020 - DNA, 75 bp, Homo sapiens
ttacccgctggccctggtccggacccgcatgcaggcacaaggctttggaactgcgacataactagcgatggctgc

SEQ ID NO: 572021 - DNA, 89 bp, Homo sapiens
cgcattttggcattgacatttaattttagggtcctttatatagaagggagagtaggtgctgcgataagcggttgtggacccgcattgac

SEQ ID NO: 572022 - DNA, 98 bp, Homo sapiens
tgctgggtacctgccccgctggtcccaggcatctcgtccccggtgaagaagacagagatggacaagtcaccattcaacagcccgtccccccaggactc

SEQ ID NO: 572023 - DNA, 75 bp, Homo sapiens
gacgccgcctggcaggccctgcgcaccaggaggctactcacagtcgaactacaactccccggggtccggccagaa

SEQ ID NO: 572024 - DNA, 80 bp, Homo sapiens
aggtgcccagaggactttcttccagcttctgctgtccttctttgtggagagcaagacccttggcttctgcgttcgaagag

SEQ ID NO: 572025 - DNA, 123 bp, Homo sapiens
cacatcctctgccgggagctgggcttcacagaggccacaggctggacccacagtgccaaatatggccctggaacagatgtatcggcaagcagtgtaaacggaggacttggggaaaaaggacca

SEQ ID NO: 572026 - DNA, 75 bp, Homo sapiens
agaaagtgggaaccactgagaaggaacatgaagtcaactgcttggaccagcatgttcggaagtcccccgagagcg

SEQ ID NO: 572027 - DNA, 100 bp, Homo sapiens
cctgcctcaagagagaggacccacatgggacaagaacctcagccgggcgtgggtttggatgccatcaatgatgctaacctcctggaagcatgtatctacc

SEQ ID NO: 572028 - DNA, 75 bp, Homo sapiens
tatgcttataagagtggaacagagctgacatcgcgctgatcggattggccgtcatgggccagaacttaattctga

SEQ ID NO: 572029 - DNA, 87 bp, Homo sapiens
ttgttgcttttacgggcgcctgcattactcaagtccaccgtttatatcagagagccttacagaagttacctctttgtgcatcactgt

SEQ ID NO: 572030 - DNA, 101 bp, Homo sapiens
gcttcattcagatgtggtggaatatgccaaggaaaaactggagagcttcatcaaaaatagtgatagctttgataaatgtaacctcgggtatggtgaaagac

SEQ ID NO: 572031 - DNA, 100 bp, Homo sapiens
cagagcctaagagaactatggcaacatcaggtgactgtcccagaagtgaatcgcaggtcagaagagatcaattctacagaaatttccagtggttctgttg

SEQ ID NO: 572032 - DNA, 82 bp, Homo sapiens
tgcaggtgtctcttctcgccctggcggggaaggcagagtggctcctcacagcctgaagctcatccttctgcacgggccagcc

SEQ ID NO: 572033 - DNA, 82 bp, Homo sapiens
aagaccaccaccctccacagggctgggcccatgcacagccatccttccctaccttgagcttttggaaatgccaagacagccc

SEQ ID NO: 572034 - DNA, 100 bp, Homo sapiens
atgctattggtcaagagccatttcacccattgtcatctcgaacagtatcttcttcttcgctccctagcttagaagagtcactcagcctctgaagaagctt

SEQ ID NO: 572035 - DNA, 100 bp, Homo sapiens
gtccattcatctgatccacatgcgtgtggcagcccaaggctttgttgtaggagcaatgactgttgcttccttcaaaatgtctactgttcacgaaatcctg

SEQ ID NO: 572036 - DNA, 75 bp, Homo sapiens
ggacacagaagtatttgtgacaggtcacaaggcacttaaagcattgttgaggtcattggtaggtcttcaggaaga

SEQ ID NO: 572037 - DNA, 100 bp, Homo sapiens
ggggtgtgcaaacccgagagaactggtgaagtacatgcgagaagccacgccctatgtgaagaaaggatccccagtatccgagattgggtgggaaacacct

SEQ ID NO: 572038 - DNA, 131 bp, Homo sapiens
gggcgccgccgcgggcgccgggagcgagctgggagggagccgcgcgcctttgtgcgcgcgccgagaaaaaacactggacttggcatcagttgacctgcggaagatgagagtggcagagctgaagcagatcc

SEQ ID NO: 572039 - DNA, 98 bp, Homo sapiens
tttgctatggatgtatacaaaaacctttattctgatgatattcctcatgatttggtgcttccagatgtgagttatcaggtggaatccagtgaggagga

SEQ ID NO: 572040 - DNA, 100 bp, Homo sapiens
gtaatggaaaaggtggagaatcaatttatggtggatattttaaagcacgagtacacgagacaggattgagaaaggagagattcaaattgtgacttcagat

SEQ ID NO: 572041 - DNA, 75 bp, Homo sapiens
ggcgtgagccaccgtgcctggctgaagattaccccacattcctaagcatgttcatatctcaagctttttatgatc

SEQ ID NO: 572042 - DNA, 100 bp, Homo sapiens
gcccctgaattttacccttcaggttattcttccagttacacactgtctcctatatataatctggttccagtgaaaatgaaaaatgcacacctaaagaaac

SEQ ID NO: 572043 - DNA, 75 bp, Homo sapiens
aagatgaatacaaagctttctacaaatcattttcaaagggtgatcagcccatgacctaaacctccagacaaaata

SEQ ID NO: 572044 - DNA, 90 bp, Homo sapiens
cccacttcagcgacgacagcaagagggacgttgtgaagggtcgggaccctgagttaggcctgaagtctgtgcagaagctactggatgctg

SEQ ID NO: 572045 - DNA, 100 bp, Homo sapiens
agtcaactgatagatgaattggcagataaatttaaccggcttcttgaagattttctgcaagaggaggaagaggtggtggacaagatggatgatgatgtct

SEQ ID NO: 572046 - DNA, 100 bp, Homo sapiens
ccagcaagactatgaatctctgttccaaatgctttgctgaacaacgactatcgtctattccacaagatgagtaacagccaccctcttcgcccctttactg

SEQ ID NO: 572047 - DNA, 95 bp, Homo sapiens
aacctctcctctggatgctctaggcagaaatggtgcacagtgctttccaggcccagcgggctttccttctgatggcctctcagtaccaacaaccc

SEQ ID NO: 572048 - DNA, 100 bp, Homo sapiens
aatacaaagaagtaaaagtggtggctaatctcaagactgcagtgcagatgacgacaacttccttgtgcccatagcggtgggagctgccttggcaggagta

SEQ ID NO: 572049 - DNA, 82 bp, Homo sapiens
ctgaatgtcctggcccggatgatgaggccagtgagtgatcaagtgcttaccgtgacaatcagagctttgttgcagaacctga

SEQ ID NO: 572050 - DNA, 100 bp, Homo sapiens
gaaacccccaagctaggatttctgcagctcatgaagccttggagataaatgagaaatggctagtgatgagctgaaagagatgcggaaaaacttgaccaaa

SEQ ID NO: 572051 - DNA, 51 bp, Homo sapiens
ttactacaacctcgggcgtctggagatcatgaatcagacagataaaaatca

SEQ ID NO: 572052 - DNA, 101 bp, Homo sapiens
aagagctccacattcaggggaaccgcctcaccgttctgcccccagaactagactcagcccacctgcacccaggtgaaataaacagctttattgctcacacg

SEQ ID NO: 572053 - DNA, 100 bp, Homo sapiens
agaaaattgaaaaaatcttaaactctcaaagttctaaagaaacctctgcactagaagcaagcaggttattagtaatgttcatcatgtctgctggaacagc

SEQ ID NO: 572054 - DNA, 82 bp, Homo sapiens
caaggagctaaagcagcgtgcgttcagccctgggatataacacgtgggaaccggaggagaacatcctggaccccaggctgct

SEQ ID NO: 572055 - DNA, 95 bp, Homo sapiens
ctgctgctggacccggcctgggagaagcagcagcgcaaggacttgcaccttcgagatcccctgtgtttacccagctggaggatgatgaacagtcg

SEQ ID NO: 572056 - DNA, 71 bp, Homo sapiens
cgggctgtcgcggcccccacctcaggaggaagacaatgtgtggcaccctggactacctgcccccagagatg

SEQ ID NO: 572057 - DNA, 75 bp, Homo sapiens
cttccaggttacatacagcttacatcttgcatcctcaagcgataaggagggttcctgcccccaggtgaacattaa

SEQ ID NO: 572058 - DNA, 98 bp, Homo sapiens
ggaagaacaattaagaataatggatcagaccttgaaagcattaatggctgcagaggataagattgacatggtacatcgtaacaagtccgaaggattct

SEQ ID NO: 572059 - DNA, 96 bp, Homo sapiens
tgcggaaaacctgaagggccttgacgatctggacgccgatgccgatgatggctgggcaggaatggtcctcgtccgaagtgagaatgggcagttgtt

SEQ ID NO: 572060 - DNA, 89 bp, Homo sapiens
gcagccgccgagccggacgtgtccgcgaagatggcgggccgggctctgacgcccgctctgcggcttcggtgtttgaacaggccacagtc

SEQ ID NO: 572061 - DNA, 83 bp, Homo sapiens
ccttggcgaaggagtctgtttttcaacccaggaagcaattttccagattattcaaagtatcaggatgggcatgtgaagtgact

SEQ ID NO: 572062 - DNA, 83 bp, Homo sapiens
agggaaccctggtcaccgtctcctcaggtgcatctgcagacgcagcaggaggtgaagctgcgcatgacgggcatggcgctgcg

SEQ ID NO: 572063 - DNA, 75 bp, Homo sapiens
atgagttccagtgcgagtgccccacggccgaacgaccctgtcaccaacatttgccaagcagccgacaaacagctt

SEQ ID NO: 572064 - DNA, 83 bp, Homo sapiens
gtattttgggagtcgaacggagtgtttactacaatctggaggcaagatctttcctcagtatgtgctgatgtttgggttgcttg

SEQ ID NO: 572065 - DNA, 75 bp, Homo sapiens
ggaccccagcccctctccagctcgaaatcgcaaatacgccatgcgagacctagtccacaggcttccaggagggaa

SEQ ID NO: 572066 - DNA, 83 bp, Homo sapiens
ctgcctgagagatctccaagaattacagggtgactgtgaagatcacgctaaccttctgtgcagccttcttcttggatatggat

SEQ ID NO: 572067 - DNA, 82 bp, Homo sapiens
ggacgccgtcaacgccttcaaccaggaggtgagaagccctaccactgcaactgggacggctgcggctggaagtttgcgcgct

SEQ ID NO: 572068 - DNA, 75 bp, Homo sapiens
ccgcgcccgcggaaccagaccagctcagccagcagatctcctgaaggttctagattttcacaacttgcctgatgg

SEQ ID NO: 572069 - DNA, 95 bp, Homo sapiens
gaacttcagttgcttgactcgtttggatcacaaccgagctaaagctcaagaagagagaagggcacagttacctaagtatcaacgtaatcttcctc

SEQ ID NO: 572070 - DNA, 83 bp, Homo sapiens
ctgcaatgacgagggcctggagtgtgtgcccactgaggagtccaacatcaccatgcaggaggtatatcgaattccaaagaaaa

SEQ ID NO: 572071 - DNA, 75 bp, Homo sapiens
tgcttggcagcactgggcatccagtaccagacaatctgcgggccaggcatcgacatccgcaacgactatcagcag

SEQ ID NO: 572072 - DNA, 83 bp, Homo sapiens
cgcgcgcagggcctgcagcgggagctggacggcgagcgcgagcggcgcgagaaagtaatagcctgcagctggtgttttgagaa

SEQ ID NO: 572073 - DNA, 100 bp, Homo sapiens
agcctgcctttccagcccaagcagctttccctcaacagacagctttttctcaacagcccaatggtatgaatctccagaaatagctctaaattgtggaata

SEQ ID NO: 572074 - DNA, 98 bp, Homo sapiens
tctggattacaggccaaattagcaaagagtgtgacgcaggaaaggaggcctcccaaacttgcctttatgtcaagaggtgttggggacaaaggttcatc

SEQ ID NO: 572075 - DNA, 75 bp, Homo sapiens
cttggagtccggacatctgaaacttggcaatttgaatcaacccatagaagtgacagcgctgtattcatttgaagg

SEQ ID NO: 572076 - DNA, 98 bp, Homo sapiens
ggccggcagggtggacggtgggctcaccatcatggagcagttcaaccctagcctccggaacttcatcgccatggggaagaattacgagaaggcactgg

SEQ ID NO: 572077 - DNA, 90 bp, Homo sapiens
agctcacccactgccagcagagttgatcatggccttgccaggttggtgacagtatattgtgagcatggtcataaagctgccaaaatcaac

SEQ ID NO: 572078 - DNA, 82 bp, Homo sapiens
tgcgagccgaccatgtcttcatttgcttccacaagaaccgcgaggacagaggtcaaaatgcagatcttcgtgaaaaccctta

SEQ ID NO: 572079 - DNA, 80 bp, Homo sapiens
ggaaaaggtcgcctctttgctgcaccaggtgtcctggagacagctgcatcttcctcccgtgaggctggccgagctccacg

SEQ ID NO: 572080 - DNA, 83 bp, Homo sapiens
ccggagcttctcagaagacagagggttttcttttgagtttcactgttacatgccttgaagtgatgaggaggtttctgttacta

SEQ ID NO: 572081 - DNA, 75 bp, Homo sapiens
cagctggcaattgtaaataggtttccaggatcaaaactaacctttcagcgttgtagaatgaatgaagacactggc

SEQ ID NO: 572082 - DNA, 100 bp, Homo sapiens
tctcagaagacagagggttttcttttgaggaggctctgtcggtggtgagcgacgaccagtccctctttgactcagcgtacggagcggcagcccatctccc

SEQ ID NO: 572083 - DNA, 99 bp, Homo sapiens
gaaagacctggatgacatcagcaccaaaacaggcatcaccctcaagagctgccggagacagctatcagttgagggatttgcagttgataaaatggctgg

SEQ ID NO: 572084 - DNA, 100 bp, Homo sapiens
ctatctctgagaatgacccgttctggaatcagcttctctcattttctttccctgcaccaactagcagcagcctctagaagaccagcattctcgtgattat

SEQ ID NO: 572085 - DNA, 50 bp, Homo sapiens
ccgccggatcccccggaccccccgaccccgcggcgagtcctttgcacatg

SEQ ID NO: 572086 - DNA, 100 bp, Homo sapiens
agaaaggaatgaacatgtatttaaccaagttccaacaaaagaatgctgccgcaggcagaagtcaattcatctggaaagactatctctgagtcagacttaa

SEQ ID NO: 572087 - DNA, 100 bp, Homo sapiens
actccaggaccaaaagaggaagatagtcttgggacccttgcatggtgtttcaaagggtggtgaagaactaaggaatacaggagtttccagaaaatataaa

SEQ ID NO: 572088 - DNA, 83 bp, Homo sapiens
ggaagaggcgttgcggcgaaaggaacggctgaaggccctacgggagaaaaccgggcgcaagtgcctccggagccagcgtggtg

SEQ ID NO: 572089 - DNA, 100 bp, Homo sapiens
tacaatgggaagatccctcggttccgccgcatccggggcgagagtgagctgtacaccagtgatactgtcatgcagacgagtgatagacagccaagcagag

SEQ ID NO: 572090 - DNA, 74 bp, Homo sapiens
ttggattgaaacagctaatcgtagatatagttgtaggtactccgggaagactagatgacttggtgtcaactgga

SEQ ID NO: 572091 - DNA, 82 bp, Homo sapiens
ccgatccgccgcccgtccacacccgccgccagaaatgcttcggttacccacagtctttcgccagatgagaccggtgtccagg

SEQ ID NO: 572092 - DNA, 90 bp, Homo sapiens
cttggactgagtcctgcaggacacagcgaacacttgccaagtatttcaatccttgctatgccactgctaggttaaaaccaacattcatca

SEQ ID NO: 572093 - DNA, 73 bp, Homo sapiens
cggatgtggcagccccgagccatggctctcgccgtccgagtcgtttattggtttttcttcccccagtccctca

SEQ ID NO: 572094 - DNA, 127 bp, Homo sapiens
gtgccagaagccttcaaagggaccaagaaaggcactgtctaccttaccccttaccggagagatcaatgtcttattgtgatgagtctcgactgtcaaatcttcttcagaggatcacccgggaaaacga

SEQ ID NO: 572095 - DNA, 83 bp, Homo sapiens
caagcagctgcttgccggccccaacacggaccttggacctgctgaagctcacacccgtggaccacccagactgcctgccgcta

SEQ ID NO: 572096 - DNA, 90 bp, Homo sapiens
ggagcccgagtggatcggggacggagagaacacgagcccatcagatattctctaagccgctttcatcatgggagaaatagagcagaggcc

SEQ ID NO: 572097 - DNA, 100 bp, Homo sapiens
cccgatctggtgtccgagggccgcaaaagcttccccagcatccattcctcctgtgcgagaagatgtactaaattcattgaataacaactttcttcaaacg

SEQ ID NO: 572098 - DNA, 90 bp, Homo sapiens
gtttgtttgaaattgcattgacgactggtgaaaggtgtagcagtcactcggcctacacccacagcatcgaccttgtgaacccagcgacct

SEQ ID NO: 572099 - DNA, 73 bp, Homo sapiens
cggaagaggatttacaaggagctatatgaaatgtggcaactgtggtgagatttcggacaagtggcagtacatc

SEQ ID NO: 572100 - DNA, 74 bp, Homo sapiens
aaagttaagggatcactactcaagcataagggtcaaagaattgactgtagatccaactgctgctggtgatgttc

SEQ ID NO: 572101 - DNA, 101 bp, Homo sapiens
gtcctctctgagtcaaatccagtgggccatcgatgcacccctcggagctaatagcggagatgagaaacagtgggtttgcactgaaacgaaatgtactgggg

SEQ ID NO: 572102 - DNA, 90 bp, Homo sapiens
agcgagtacttcgttccaacatggacatcctgaagccaatcctggggtcgggccccggctcagtggtcccaggcagctcgggtgtcggaa

SEQ ID NO: 572103 - DNA, 98 bp, Homo sapiens
gtatcttatgttattcaggctgaaggaaaagagcatattattcacttggaaaggaacaagttgctccttgagggcaggacagttcttatggctttatc

SEQ ID NO: 572104 - DNA, 101 bp, Homo sapiens
cccagaaagcagttaacagtgccaccggtgttccaactgtttaaagtgaaacaccattcaaagtcgtagtcaaatctctttcacctaaagagttggtccgg

SEQ ID NO: 572105 - DNA, 100 bp, Homo sapiens
gtgcgcaaaggcctgcagtgcgcgcaccagcatctcagacatgtcgaaaaagatgttttgatccctaaaataatgagagaaaaggccaaagagaggtgtt

SEQ ID NO: 572106 - DNA, 75 bp, Homo sapiens
tgggaagagtggctggaggaattcagtttcttggggctaatcttccagtaccaacaattgcagcaatagatggac

SEQ ID NO: 572107 - DNA, 74 bp, Homo sapiens
accggcggtctgataggctacatcgcggcatgagatgaagctgtgacaggtgtgggccatgtttgaggattgcc

SEQ ID NO: 572108 - DNA, 96 bp, Homo sapiens
gtcgtggtggacgacctggagaacacggagctgccctacttcgtgctggaagagaagccagattgctccaaggcccgctgtgaagtccagttctct

SEQ ID NO: 572109 - DNA, 98 bp, Homo sapiens
actaacacagtccctatcaaacctttgatcagtactcctcctgtttcatcacagccaaagggtttttaccttaaataactaattactggccatatttg

SEQ ID NO: 572110 - DNA, 100 bp, Homo sapiens
cggagctctgatcgccgggaacccttgccgctgctgtcctgcgaccccaagcagcaaaatgatgcttcaacacccaggccaggtctctgcctcggaagtg

SEQ ID NO: 572111 - DNA, 137 bp, Homo sapiens
tttggaagtcctaggactgatctccaggaccagcactcttctcccagcccttagggtcctgctcggccaaggtgctggagaatctggtaaaagcaccattgtgaagcagatgaggatcctgcatgttaatgggttta

SEQ ID NO: 572112 - DNA, 100 bp, Homo sapiens
tacagagggacgatgtccaaaacaaaaaatggcatcacctgtcaaaaatggagttccacttctccccgcagacctagcccttcagcatgccggcaaacac

SEQ ID NO: 572113 - DNA, 99 bp, Homo sapiens
gaaagctcagggggaaaccgagggaatcgtacaagtacttcccttcctcggtgagtccagccccccagggtggggtggggcatgcgggcagggcggtca

SEQ ID NO: 572114 - DNA, 75 bp, Homo sapiens
ctcaccagccctcgcctcccgagtcactgcagccaacccttcagcaaggtccaggggcaagttcatcctactctc

SEQ ID NO: 572115 - DNA, 101 bp, Homo sapiens
gatgcggagcggcgggcgccggaggccgcggcccggctaggcccgcgctcgcgcccggacgcggcggcccgtgtactatgaggggctgcaggacaagctgg

SEQ ID NO: 572116 - DNA, 98 bp, Homo sapiens
cagaatctacaaattttgctactgtcagatggattgactatggaaaagttgccaaattggcctcattgctacgatttcagagtaccctggtaatagct

SEQ ID NO: 572117 - DNA, 101 bp, Homo sapiens
ctgatgcaaaacagtcggtgtgtgctgagcaaatggaagaacaaatatgtctgtcagatttattgctaaacatgggtgcatttttggataaacccaaaact

SEQ ID NO: 572118 - DNA, 88 bp, Homo sapiens
gcgggaaggccttctctaggccctggctgctacaaggccatgtccggacccacactgaaactggcgatggaatatgagaggagccctc

SEQ ID NO: 572119 - DNA, 82 bp, Homo sapiens
ggaggattcagggaataggagctggggagcccttctgcgccacaggtaacacgtacacagacctctcggccggaatctccag

SEQ ID NO: 572120 - DNA, 100 bp, Homo sapiens
ccatcaggtaggctgcgttgaggatctttgctcttccatccgcctttgatcgtcttcctcttcagccatccagatctgttagtcaagtgtattggtgaag

SEQ ID NO: 572121 - DNA, 100 bp, Homo sapiens
tgaacatctcgtcttccataagacacagcttcaaaagaaatgctgtctgcaaaatgaatgttcaccgtcgatgtgagaccaacgtggctcccaactgtgg

SEQ ID NO: 572122 - DNA, 83 bp, Homo sapiens
gcgggtgacatggaaggggcagtacaagcttacgtctctgctcttcagtacaatcctctcaaccaaatcccgggagatgagaa

SEQ ID NO: 572123 - DNA, 83 bp, Homo sapiens
ccgagaagtttactgggaaaactgccaggtgagaagccctaccactgcaactgggacggctgcggctggaagtttgcgcgctc

SEQ ID NO: 572124 - DNA, 75 bp, Homo sapiens
tgctcaacatgaccaagattgcccaaggggggcgcaagctcaggttatgggccaggaatccgggtcgatgaagtc

SEQ ID NO: 572125 - DNA, 98 bp, Homo sapiens
tggaatgcagtggtgtgatctcaactgactgcaacctccgtatcctgggttcaagcaactctcctgctgcagccaccttctagtggtacccgtgggct

SEQ ID NO: 572126 - DNA, 83 bp, Homo sapiens
cggaatgctggagtcagtggaagacggagctggtcggcccgaaggagctggtggtggctctgagtcatcttgtggttcagtat

SEQ ID NO: 572127 - DNA, 98 bp, Homo sapiens
tcttcgggaattccagcgaggaattcaattcgtcataatctgtccctacacagcaagttcattcgtgtgcagaatgaaggaactggaaaaagttcttg

SEQ ID NO: 572128 - DNA, 87 bp, Homo sapiens
cccttgaacatttcccaatgctccagaaggacaaactggtaggagcaattgtctactatgacgtggagtagggcgaaactggggctg

SEQ ID NO: 572129 - DNA, 100 bp, Homo sapiens
aaaatgaatcaaaagaaaatctctaaatgcagattccagaaaaattacagcacatctcagtgaatttgcaagtgctgaccatactccctggagccttctc

SEQ ID NO: 572130 - DNA, 74 bp, Homo sapiens
tcttcctgaggttttcctaagccatcccctggcggaaccgcccccaggtcacttggtacatatgaccgtggtct

SEQ ID NO: 572131 - DNA, 100 bp, Homo sapiens
gccaaagtgcactggcaattttacaggttccaatcgttgcacttactgctactgcaagttcttcaatccgggaagacattgtacgttgcttaaatctgag

SEQ ID NO: 572132 - DNA, 83 bp, Homo sapiens
gaaggagcaaccctgggtttcagtacagcctcgaaagatgcattatgttcaagataaattatttgtgggtctagaacatgctg

SEQ ID NO: 572133 - DNA, 98 bp, Homo sapiens
cggatattcctgaacgcaagaaaagctccactgtccctagtacccaacatgagtgaagtttcctgcaagaaacgggacgactatttggaatggccaga

SEQ ID NO: 572134 - DNA, 83 bp, Homo sapiens
ctgcaaggctgagggacgagaacgaggattcttactacagatttaatgaccttaactacagatgggtctctttggataactgg

SEQ ID NO: 572135 - DNA, 83 bp, Homo sapiens
ccaacaccctggaaacccccttcgatgacctccagagcctcccaaacgacgtggctctgaagggctccaagaagctggtgctg

SEQ ID NO: 572136 - DNA, 100 bp, Homo sapiens
tttttccccaattcagcagagaatattttcaagggggatgaggacggggacttggttgccttttccagtgacgaggaattgacaatggccatgtcctacg

SEQ ID NO: 572137 - DNA, 80 bp, Homo sapiens
gaagggcgactactacgaggcgcaccagatgtaccggaccctgttcttcaggattttttatcaagcagaaatgcatcgaa

SEQ ID NO: 572138 - DNA, 75 bp, Homo sapiens
caatggcagtgatgatggagctcagccctccacctccacagtgaggactcttgtgaagatatgagttgtggagag

SEQ ID NO: 572139 - DNA, 98 bp, Homo sapiens
agcgctgaagcagaagtccccggagctgcggtctccccgccgcggctgaaatgactgctgtccatgcaggcaacataaacttcaagtgggatcctaaa

SEQ ID NO: 572140 - DNA, 75 bp, Homo sapiens
aaggaaacttacccaaagggaagtctgtggagaccacgtagctttgcaaggccagagttaatgaagatcttatat

SEQ ID NO: 572141 - DNA, 82 bp, Homo sapiens
caacaattcccagaccttcagcccgtggcccggatgcaggacagacccctcaggaggctgggatgcagatggaaaaggccct

SEQ ID NO: 572142 - DNA, 100 bp, Homo sapiens
gtggaagatggcgcctgttgtgacagggaagagcttcagcttcaccttctttagatgtccttattactttattgtcacttggatcaaatggctataagaa

SEQ ID NO: 572143 - DNA, 75 bp, Homo sapiens
agacggcgacttctgacaacgatttaagctatgaagaaggacatccctcacactctgaaacagatctccttcaga

SEQ ID NO: 572144 - DNA, 75 bp, Homo sapiens
taagctgaacattatggcagccaaaagacaacagaaatttaagatccgcattgaagacccaccccgcagaaagca

SEQ ID NO: 572145 - DNA, 90 bp, Homo sapiens
tgatgatggaaatgaagtataataccaagaaagccccacttgacatggtggagctgctgctgctgcagaacgcacaggtgcaccagttgg

SEQ ID NO: 572146 - DNA, 98 bp, Homo sapiens
gaaggtgtattcagagattttttagtctaaatgatgggcagtcatggtcccagaaacgtcactatcaagaaggcggtggatgaattttattccaagat

SEQ ID NO: 572147 - DNA, 100 bp, Homo sapiens
cctccggcagctggagatgtccgagcccaaggcaattgatcccaagttgtcgacgaccgacagggtggtgaaagagagaagaagaaggaggttcctgctg

SEQ ID NO: 572148 - DNA, 51 bp, Homo sapiens
aagcagctgggccatgaggaaggcaagagacgctacaacatcaaactgtgg

SEQ ID NO: 572149 - DNA, 90 bp, Homo sapiens
gcaaaaacacattctgggatgtggatggaagcatggtgcctcctgaatggtaatattaacggctgctatttgaactattacttttttctt

SEQ ID NO: 572150 - DNA, 100 bp, Homo sapiens
ctgcggctgagtgtggcttccccggaagacctcactgaccccagagtggcagaaaggctgatgcagcaggtagcaatgtacagataaagagtactttaac

SEQ ID NO: 572151 - DNA, 98 bp, Homo sapiens
ggcctcccaaagtgatgggattacagagcacgtgcccccggagctgtgggagcccttctataccgaccagtacgcgcaggagcatgtgaagcccccgg

SEQ ID NO: 572152 - DNA, 101 bp, Homo sapiens
tgtcacgggcattgcaaggtacattgagcaggctacagtccactccagcatgcaatggtacagcagttccatgaaagtcatttgcgtgtggttgactgata

SEQ ID NO: 572153 - DNA, 50 bp, Homo sapiens
gcagaggacaacatgaactgccaggccaaacgtaccaagaaagtcgggat

SEQ ID NO: 572154 - DNA, 120 bp, Homo sapiens
ggagaggcgtactcggcggcggcggagcgggcggcagagcagggcggcggcgactcggtgttaagtgtgatgcttccataatacatttggatgctgtcagctaagttcacttctgaacta

SEQ ID NO: 572155 - DNA, 75 bp, Homo sapiens
ccatgcttcccagagcggagacaacagcagtgagcaagaagtgatgagagcctatttacaacagctaaggcaaga

SEQ ID NO: 572156 - DNA, 83 bp, Homo sapiens
cagcgacagagccaaaatcagagctggaacctgaggagagaggatgtctcagtggtacgaacttcagcagcttgactcaaaat

SEQ ID NO: 572157 - DNA, 96 bp, Homo sapiens
tttattttttttcctccaaaattttaccccctcccccctgagcccgaggtgctgacgtcgcaaaaaaattggataattctcttcaggggaagagtc

SEQ ID NO: 572158 - DNA, 100 bp, Homo sapiens
ggcggcgctgccgcctgaagtgcgggcgcagctggcggagctggagctggagctctcggaggggagccggcggcttgtggacgtgatggatgtgaacacc

SEQ ID NO: 572159 - DNA, 50 bp, Homo sapiens
gttcgtggtcatcttgggggactccagttctccccatgacaccacctgaa

SEQ ID NO: 572160 - DNA, 75 bp, Homo sapiens
tggtgaagctggtcgtcccggtgaagctggtctgcctggtgccaaggaggcgtctgacacagtatgatgatgaag

SEQ ID NO: 572161 - DNA, 74 bp, Homo sapiens
gggactagcatcttgcagtctgttaagattccatgcaagcatgttttttgctatgactgtgctattttacatga

SEQ ID NO: 572162 - DNA, 96 bp, Homo sapiens
atcggcccaaggccagttctccgcagatgagcaccatgccaggactgcccacccggccctgcttttatgacatagatcttgataccgaaacagaac

SEQ ID NO: 572163 - DNA, 74 bp, Homo sapiens
tccatcggggcagcgacaagatgcctcccgcgacgatgcccctcaacgttagcttcaccaacaggaactatgac

SEQ ID NO: 572164 - DNA, 74 bp, Homo sapiens
tctgggccacctcggccgcccctcggccggggctgtctgattgtctgtgcttcactaatttccataaccaagct

SEQ ID NO: 572165 - DNA, 50 bp, Homo sapiens
agtggcctgctgaaatcatccagctagtttttcgttggaatatacgttgc

SEQ ID NO: 572166 - DNA, 100 bp, Homo sapiens
agtatgatgaactggaggctgagtacgacagcctcaaacaggagctggagcagctcaaagagaaatatatgcaagaggcacgaagtttaggaaaaaacct

SEQ ID NO: 572167 - DNA, 75 bp, Homo sapiens
aggagaaaatgaatgccaaatgggacacggtcactcctggaagcaaggcggctctagctaatttatgtattggag

SEQ ID NO: 572168 - DNA, 82 bp, Homo sapiens
cggacgccgatgcccggggctgcgacggctgcagatgagcagcaccagcagtaagagggctccgaccacggcaacccagagg

SEQ ID NO: 572169 - DNA, 50 bp, Homo sapiens
acctttccctttatttccggaggaccaagaatcgccttcagccctgtctg

SEQ ID NO: 572170 - DNA, 83 bp, Homo sapiens
agggaccgatgcctccaacacagctatgcagacgttggacctctcgaacaaccagctgagcgagatccctgcagagcttgcgg

SEQ ID NO: 572171 - DNA, 83 bp, Homo sapiens
tctggcacccagtggtgacccctgccctcgtgtgcctcagtcagctgctcaccaagcaatggctgccatccggaagaaactgg

SEQ ID NO: 572172 - DNA, 73 bp, Homo sapiens
tcatccacgagttcgacccgtgaaatgagccgtcagactgctacagcattacctaccggtacctcgaagtgtc

SEQ ID NO: 572173 - DNA, 101 bp, Homo sapiens
cgcatttccattatgagaatgttgagttcggcagcatacaggggatcccaacaagccctcaggattcagaagtgttaaagctcctgtcactaaagtggctg

SEQ ID NO: 572174 - DNA, 88 bp, Homo sapiens
gtgcgagtggacagttcttcaggcttgggtgactacctagaactgcatatagatgtctccccgttcaatgttgtggcctggcacggga

SEQ ID NO: 572175 - DNA, 100 bp, Homo sapiens
cctgatcccaaaattattgaaaacactcgaaggctgctatcttggacgaccccatggagtgcagcagaggggagcggctctccatcaccctggccaagaa

SEQ ID NO: 572176 - DNA, 100 bp, Homo sapiens
gcgatttcttgataaagtcttggttgctgccaacaagcgccaagaagagggagggcgagcttacggtggcccagggccgtgtgaaggacctggagtccct

SEQ ID NO: 572177 - DNA, 91 bp, Homo sapiens
gtcagacgcagccgtagacaccagctccgaaatcaccaccaagagacacctatggctgccgatgaaggctcagcagagaaacaggcaggag

SEQ ID NO: 572178 - DNA, 82 bp, Homo sapiens
gcaggatcaagttgcggcaccttttcagcttgaaaacgaggcccactgcgactttgtgaagctgcgggagatgctgattcgg

SEQ ID NO: 572179 - DNA, 100 bp, Homo sapiens
cgggagacgagaagcctgaaaagtcgcagcgagctggagccgccggaggtgcgttgtagaagacaagaactcaaaggtggcctggttgaaccgttctggc

SEQ ID NO: 572180 - DNA, 74 bp, Homo sapiens
cttggagttcgcttgtattaccgagtaatggaatccatgcttaaatcaattgtctgcggttacgcacatactct

SEQ ID NO: 572181 - DNA, 90 bp, Homo sapiens
aggggcggcgcggcccggggtgtcagtgtggaggagactgagctctcgtggcattatccttcagtggggctattggactgacttttctta

SEQ ID NO: 572182 - DNA, 74 bp, Homo sapiens
actacctggcattgccttttgttgagataacagacgagtacctttggaaaggtcacgctctcgccacaatggag

SEQ ID NO: 572183 - DNA, 88 bp, Homo sapiens
gcggcggcgcggaggcggctgaggtgcgagccggagcccagtttcctccaattgcagcacaagaccttccttttgttctaaaggctgg

SEQ ID NO: 572184 - DNA, 75 bp, Homo sapiens
tgacagtgattttaaagttggagatgcctcagttgggacagaaataacccagagccctggaacaaactgggtccc

SEQ ID NO: 572185 - DNA, 90 bp, Homo sapiens
agccacccccagacgaggcccgcagggacatggccggggacacccagtggtccagatgtggaagcgtttgccaaagccatgcagaacaac

SEQ ID NO: 572186 - DNA, 100 bp, Homo sapiens
cttaaacctgaaagtggtagcaaggccccttcacagatgtagtcactacaaatcttaaattgcgaaatccatcggatagaaaagtgtgtttcaaagtgaa

SEQ ID NO: 572187 - DNA, 88 bp, Homo sapiens
acagctccgaagctggcaagaagagcaacagcgagctcgccatcctgtccaatgagcatggctcctacaggtacacggagttcctgac

SEQ ID NO: 572188 - DNA, 100 bp, Homo sapiens
ggctggaggtgcagggccaggaggaacatgagaagcccccgagcgcccacagcatgaaggaggaggccttcctccggcgccgcttctccctgtgtccacc

SEQ ID NO: 572189 - DNA, 88 bp, Homo sapiens
cattgtcgctcactctgcccatcacgtgccacatttgcttggggaaggtgtgcaactgaggaacatggctcaagaaactaatcacagc

SEQ ID NO: 572190 - DNA, 100 bp, Homo sapiens
gaccgagtctggcagatccagtcttgctcagctctcacaggagagggcgttcaggtactccgtggaaggcttcatcgacaagaacagagatttcctcttc

SEQ ID NO: 572191 - DNA, 100 bp, Homo sapiens
atgtattcagtggaggaagctgatgaagattatggaagagattcgggccctcccactaagaaaattcgatcatctccccgagaagctaaaaataagaggc

SEQ ID NO: 572192 - DNA, 97 bp, Homo sapiens
cacatcctacgtggctgagagctccacagcagaggacgcgctctccatccgctcggagatgatccagcgcaaagtttgctattggctccctgatgga

SEQ ID NO: 572193 - DNA, 100 bp, Homo sapiens
tgtgatgcgtccacagccaggagacacgtttctatgtgctctgccaagaagggaaggttatgagttttttgtaggacaatggacaggtactgaactccac

SEQ ID NO: 572194 - DNA, 83 bp, Homo sapiens
ctggcgcccagcgcgcccgtggccgctgccgcctccgccccaggtggggaagaaaacatgacagaaacagatgccttctataa

SEQ ID NO: 572195 - DNA, 124 bp, Homo sapiens
tgccgctgaatgggctgaaggaggaggacaaagagcccctcatcgagctcttcgtcaagggatggtgaccactatgatgccctgagggactgcctcaaggccatctccctaaacccatgccacc

SEQ ID NO: 572196 - DNA, 51 bp, Homo sapiens
tgggtgcctggagatgaagctggaaaggaattgaatgatctggcacgggac

SEQ ID NO: 572197 - DNA, 100 bp, Homo sapiens
ctgttccgcttctccgaggacgccttcaactccacttttatctccaccataggtgctggagaatctggtaaaagcaccattgtgaagcagatgaggatcc

SEQ ID NO: 572198 - DNA, 100 bp, Homo sapiens
cgctgagccctacaacacccccagcggccgccggctcccccacgaggccatctggctgctgtgcacaggcgctcgtgaggctgccttccggaacattaag

SEQ ID NO: 572199 - DNA, 74 bp, Homo sapiens
agcatttttatggacaacgaccacaggaatctggaattttattaaacatggtttcctatcctgggagcaggaga

SEQ ID NO: 572200 - DNA, 102 bp, Homo sapiens
cgtggtgaaggtccggggcttgccctggtcttgctcggccgatgaagtgcagaggtttttttctggtgacctcacaaagttcggccgtggggatgcctcctc

SEQ ID NO: 572201 - DNA, 88 bp, Homo sapiens
tgatagatatgatgactaccgagactatgacagtccagagaaaaatagtagtctagtcattcaagtgaaaggtccaagaaaggaagaa

SEQ ID NO: 572202 - DNA, 95 bp, Homo sapiens
ccaaaacctcacctcaagccacgcatatgataataccctcaatatagtaacctggtctccctgtgggcaatatttagctgcaggtagtattaatg

SEQ ID NO: 572203 - DNA, 96 bp, Homo sapiens
gcaaacagtgatatcttcagcgaaagtgaaaccaggataaccagttcaggatgtccatcctggaacgactggagcagatggagaggaggatggccg

SEQ ID NO: 572204 - DNA, 83 bp, Homo sapiens
caggtgctcatggagctggaaaaacctgtgctcatatcactgggaaaagggtttctctggaaacccccctggtaagtgtggag

SEQ ID NO: 572205 - DNA, 74 bp, Homo sapiens
ctggattagaagtggaggtggagttttagaagaacgaccattaaccctttatcagacagggtttcaccatgttg

SEQ ID NO: 572206 - DNA, 80 bp, Homo sapiens
gaggccggctgaggagcgccgctgcctcgcctcgcagttggaattgatcacaccttttcagttgtacttcaatcctgaat

SEQ ID NO: 572207 - DNA, 88 bp, Homo sapiens
cggcatgagccggtgaccaagctcggggccgagcgggaggcagccgtggccgagttgctgatcatctgggctgtgatccacaaacccg

SEQ ID NO: 572208 - DNA, 100 bp, Homo sapiens
actactggccgaaggggcgtctgcggctctccgccgtccccagccctgcctctccctgggctctgagctcttcagtatccccatcagccagtttccgagg

SEQ ID NO: 572209 - DNA, 93 bp, Homo sapiens
ggacgatgatggagaaatcgatgatggggaaatagacacaatgcagatcttcgtgaagactctgactggtaagaccatcaccctcgaggttga

SEQ ID NO: 572210 - DNA, 98 bp, Homo sapiens
gagcagtgtcatgccttggcgtttcagctcctcgttgtctagagctcccccatccaggaatccactgctcccgagctgccttcggagacccaggagac

SEQ ID NO: 572211 - DNA, 107 bp, Homo sapiens
acccttaacaggtatctgctcctcatggcgcaggagcatctggagttccgcctgccggagtacgagacccaatctagtgcagaagccaaatttgtgaagcagctaga

SEQ ID NO: 572212 - DNA, 50 bp, Homo sapiens
cggagacgggagtattatgaaaagatcttaccggtattgtaagaacaagc

SEQ ID NO: 572213 - DNA, 101 bp, Homo sapiens
aagaagatccttcaaaattaaaagaggagcagcatggcatttcagtcactggtttgcagagtccaggagttgtcacagcagaaatgtttagacatatgcag

SEQ ID NO: 572214 - DNA, 90 bp, Homo sapiens
cagggagaaaccacattagcttcagggtgtatgaaatatgaaggatctgattttcagtgcaaagcttattcaaacctccttagagctaac

SEQ ID NO: 572215 - DNA, 100 bp, Homo sapiens
atcaaaagaaaatctctaaatgcagattccagaaaaattacagcacatctcagtgaatttgcaagtggggacggtgctcattggttcagaacatggcctg

SEQ ID NO: 572216 - DNA, 90 bp, Homo sapiens
cacccgtacaggtagccccgccgccgcgcacctgccttcgctcccgcaccggtcgtttatacgcaatgcagactggaatgaagatcgata

SEQ ID NO: 572217 - DNA, 80 bp, Homo sapiens
ggctgcttaaaatggtctatggtctgtctctggagaagtggtgccacatgacccaggaggagcgcgacgacagcctccgg

SEQ ID NO: 572218 - DNA, 100 bp, Homo sapiens
ctggatccagatgatgtcttggcagatgttgttgaagataaagacaagtgcgattgtgccctgatcggatcagtctcatcaaggagtgtatttcccagtc

SEQ ID NO: 572219 - DNA, 98 bp, Homo sapiens
ttgcttcaccgacatagtcattatgccgaagagaaagatatttcacattttcaggaacaaaatgatttaaaagcattgctagaaaatctccttcaaaa

SEQ ID NO: 572220 - DNA, 100 bp, Homo sapiens
ctcgctgggagagaggtacctctccttttccctctccctttccctaaggctcacagaacatttcctgcctgttgctcacactctgttgtccacagcatac

SEQ ID NO: 572221 - DNA, 73 bp, Homo sapiens
gagagggggagtgcgcggcggccgcagctgccacaaaccaggtgatctgtgaaaatggttcgctattcacttg

SEQ ID NO: 572222 - DNA, 83 bp, Homo sapiens
ctgcgaggctcggagaaacaggcgccgcgggctccgcgcccggccggacccgggcccgagacctcctgccccccgaggtctgc

SEQ ID NO: 572223 - DNA, 83 bp, Homo sapiens
cgggggggagagccactgacgccgggaccgggaccgccgccgccgccgccaccatggtgaccctggcaaagatgagagtgcac

SEQ ID NO: 572224 - DNA, 100 bp, Homo sapiens
gccgctcctggcgctgctggccgcgctgctgctggccgcacgcggggctgctgcccaagccacagacccctttgcttctgtttttgggaatgaatcattt

SEQ ID NO: 572225 - DNA, 50 bp, Homo sapiens
actggcctgctgctggcccgcagggttcatcctaagttccactataaaca

SEQ ID NO: 572226 - DNA, 100 bp, Homo sapiens
gtatgagaaggtgcttgtggaagggggcccggctccctaggcgtcccatctcggtgagaagccctaccactgcaactgggacggctgcggctggaagttt

SEQ ID NO: 572227 - DNA, 75 bp, Homo sapiens
gatctggtgtaccaggcgaagctggccgagcaggctgagcgatacgacggttgaaccatgattccggtgacagag

SEQ ID NO: 572228 - DNA, 75 bp, Homo sapiens
cgggctggagacatggaccgcggcgagcaagcttgccttgcgccatggactggcagccagacgagcagggcctgc

SEQ ID NO: 572229 - DNA, 100 bp, Homo sapiens
agagccctccggccagcggggaggtgaaatgacaatggatgctctgttggctcgattgaaacttctgaatccagatgaccttagagaagaaatcgtcaaa

SEQ ID NO: 572230 - DNA, 100 bp, Homo sapiens
cggagtcggcgagcccccgcggcgacaggccatttcataattctgaatcatgtctgataacggagaactggaagataagcctccagcacctcctgtgcga

SEQ ID NO: 572231 - DNA, 75 bp, Homo sapiens
tgtgagtgttgtttgcccagaaacaggacacagcattgttggttttgccatgtactattttacctatgacccgtg

SEQ ID NO: 572232 - DNA, 87 bp, Homo sapiens
ttgatgcaaatgggaagatatatcttccttatctacatgaatggaaacacggtgttgaaagcagcaggggcctagaagacattaaac

SEQ ID NO: 572233 - DNA, 83 bp, Homo sapiens
acgagatgatcaaacgcctgaagtttcttgcagaacataaattattaggaaacattaaaaatgtggccaagacagctaacaag

SEQ ID NO: 572234 - DNA, 76 bp, Homo sapiens
tgtctgtgaatgcccctgaattttacccttcaggttattcttccagttacacaattgggaaaatgaggtacgttag

SEQ ID NO: 572235 - DNA, 83 bp, Homo sapiens
acgagcgaacgctggacgatgacagtgacaataccctcccctcccttgggctggacccctctctacagctaggagccaatggc

SEQ ID NO: 572236 - DNA, 100 bp, Homo sapiens
cgggaagtggcgtggccaagattcgcattgaagatgacgggagctacttccaaattaaccaagaatcagagatcattgatttcttcctgggggcctctct

SEQ ID NO: 572237 - DNA, 100 bp, Homo sapiens
ctggctaatggcatttacaggagggaaatgatgtcactctgaaactcaggctggaatacactggcatggtcatacctcactgcggcctcaaactcctggg

SEQ ID NO: 572238 - DNA, 100 bp, Homo sapiens
gtcagaagaggcctgccatactacattcgcttaaattttgcagagaaagggcagccattctacaaaagtggaagctgtggtcagaactctgatgaaaata

SEQ ID NO: 572239 - DNA, 83 bp, Homo sapiens
ggtccagggcagaggaccaacatgggcattttgtttatgagcaaggtgggatgcagatcttcgtgaagaccctgactggtaag

SEQ ID NO: 572240 - DNA, 100 bp, Homo sapiens
ggcgggagctgcgtgcagctcagcttctccggggcatttttttctacacgggatctgaacaaaatagatgatttgatgcaagagatcacagagcaacagg

SEQ ID NO: 572241 - DNA, 100 bp, Homo sapiens
agactcagaagccgacgttcgagaggaagattcttacctctttgatctcgacaataaggtcttattagtaggtaagaaacagctgctcctccacctccac

SEQ ID NO: 572242 - DNA, 100 bp, Homo sapiens
gagggaggtgcccctgcgttgtaccatccgcctgtgggacacctaccagctgcggataaccgtctggtccttgtgcacaaaatccgtgtcttacatcaaa

SEQ ID NO: 572243 - DNA, 76 bp, Homo sapiens
tccagatgttcctgtggaccccagtccagacagctggaaatgatccctattgttttgtggagtttcatgagcatcg

SEQ ID NO: 572244 - DNA, 100 bp, Homo sapiens
tgggggtcggccggggccgcttcaccacttacgaaatcagggtcaagggagccatggacaactgtttggcggccgcagcgctgaatggggtggaccgacg

SEQ ID NO: 572245 - DNA, 100 bp, Homo sapiens
atccttcgagttgaatattccttactggcatctctgggaaaggacctggggctggtgaggggcccggaggagcctttgcccgcgtgtcagactccatccc

SEQ ID NO: 572246 - DNA, 100 bp, Homo sapiens
cctctcagcttcggagaatggagtcttccatcaatcatatctcacaggttcttgggtgtctctggggagtccctgggccagaccttcctccagactccag

SEQ ID NO: 572247 - DNA, 100 bp, Homo sapiens
aaactagccagactggaatttgagtctttggaggcactcaagcagcagattgtggatttcttaaagaagaagcatgattttgtagaccttattataaagc

SEQ ID NO: 572248 - DNA, 100 bp, Homo sapiens
gcgctggccggatggaaatcctaatgacagtctccaaattcgcctccatctgtaccatggaacagatgttgttattgtaaagaatggaagaagaatatgt

SEQ ID NO: 572249 - DNA, 98 bp, Homo sapiens
tcatgctaaacaacaatacattgagcagagccaggcagaaatttatcataaccggtttgatgctgtggtttggagacttgaaggaggacaaagtgacg

SEQ ID NO: 572250 - DNA, 100 bp, Homo sapiens
gctgtaacctgccttgtgattgacagagagttatcctgaatacatgtctaacaattttccttgcaacgttagctgttgtttttcactgtttccaaaggat

SEQ ID NO: 572251 - DNA, 50 bp, Homo sapiens
caacttccaggttcccatcctgcgtggccgcaagaggaagaggacgtgga

SEQ ID NO: 572252 - DNA, 50 bp, Homo sapiens
gaccaattttgcctattggaatggtcagtcatatgaaattcggatgctgg

SEQ ID NO: 572253 - DNA, 97 bp, Homo sapiens
actcgttgtttgcgtgcaatgttcaccagtcagtgtttgaaggagaagagagcaaggtatgtgaggagcagcgctgtgaggaggaagtcttccccct

SEQ ID NO: 572254 - DNA, 101 bp, Homo sapiens
gtgtgcattaacctgccgccgcccctcaccagacagatcgctgtcaaaaccctagatcaatgaactgagccatgttcaaatccctgttatgttgatgccag

SEQ ID NO: 572255 - DNA, 101 bp, Homo sapiens
gaaccggcaggatgaaagtgagcagtccagaaagcggcttatcgaacagagccgggagttcaagaagaacactccagagtgacctgaaaaaaatgtctgga

SEQ ID NO: 572256 - DNA, 100 bp, Homo sapiens
tcaccaaggaacagcaccggcaactcaaatctctgcaagagaaagtctccaagaaggaggttatcagtgagctgaatggaaaaaacattgaagacgtcat

SEQ ID NO: 572257 - DNA, 101 bp, Homo sapiens
aaggccgccgtgtgtaccttccagtagctacgggctggtggaagcgctgctcacagtcagtgtcgagccgctcccgaggccccggcgcggcgcgagggcgc

SEQ ID NO: 572258 - DNA, 75 bp, Homo sapiens
acctaagtctgtttgcaaagcacctgaactgggaacagtgttgataaagactgctgaagaattgatgaattttag

SEQ ID NO: 572259 - DNA, 98 bp, Homo sapiens
attttaaccatgagggaaatcgtgcacatccaggctggtcagtgtggcaaccagatcggtgccaagccattcaaactcctccccacgacactctgaag

SEQ ID NO: 572260 - DNA, 131 bp, Homo sapiens
tggagtctgcgaaggccgggacccggttccccggcccacagtgggggtgtgcaaacccgagagaactgggcgccaagcccatctttgtgtgcttgcatccaactgtgatgagcctatgtatgtcaagttgg

SEQ ID NO: 572261 - DNA, 100 bp, Homo sapiens
cttacccgacctcagatgctcccttctgctcctggagagcttgtttcatatccatatcccactgtattcctgctaatctgctaatgcagtaaattggagg

SEQ ID NO: 572262 - DNA, 100 bp, Homo sapiens
ctgggagagtgtccgttgcttcccgtccgtgtcgcggccctgcggttggcggcctcctcgtggagcggagcaaggatcgaccttcagaagatgcccttgg

SEQ ID NO: 572263 - DNA, 101 bp, Homo sapiens
atgaatacaaagctttctacaaatcattttcaaaggaccaggcacgaaagtaagcgaacctcgatcctgaggtcttccctatccactcaccttgtattttc

SEQ ID NO: 572264 - DNA, 90 bp, Homo sapiens
actatacctactgtccctcaagagaacacaagaagtgctttaagaggaaggtgggagtcaatcattttgacaagtctcctgaaaggaaca

SEQ ID NO: 572265 - DNA, 75 bp, Homo sapiens
ccccggctgattggattcgttactgctttgcaacgcgcacctaactccagtgagaaagatcagtctaaagaaaag

SEQ ID NO: 572266 - DNA, 82 bp, Homo sapiens
ttttttactccattcaagagcagcattcataaatttccagttaattggccttggtcctcacagctccaaaaagaaacaggat

SEQ ID NO: 572267 - DNA, 50 bp, Homo sapiens
cgggggccggctgatgatccctaatacagctctatgatcgtcagttatac

SEQ ID NO: 572268 - DNA, 83 bp, Homo sapiens
tcgccgctcccgaagcttttccagatgatatcatcaagttgaatcgaaaggaagggaagaagcagaattttccaagactaaat

SEQ ID NO: 572269 - DNA, 97 bp, Homo sapiens
ctggaagcggatcgaagtgatggccctgcccaaaccgggcggggcccacagcctagatgcacactccggacatcgggggccagggcacaacatctga

SEQ ID NO: 572270 - DNA, 100 bp, Homo sapiens
tttgtggatcgctgtgatcgtcacttggctggcgcccatgcggctctacacgctctccaagcgccactttgtcctcgtgtttgtcgtcttcttcatctgc

SEQ ID NO: 572271 - DNA, 74 bp, Homo sapiens
acagatctcagagaaattggccatggaagctttggagcagtgtattttgacgatgttcaactttggctctccta

SEQ ID NO: 572272 - DNA, 100 bp, Homo sapiens
tccaccaacctgaccatgacctttaacaaccagctgaccactgtccacaaccagaccctgtattcagtggatcagctggcaccacccaaatagataaatt

SEQ ID NO: 572273 - DNA, 87 bp, Homo sapiens
aaaagtaaactacttgaaaaatttagccttgttcaaaaagagtactgtaagattgatgttaaaggcatggtgttcaccccacttcat

SEQ ID NO: 572274 - DNA, 101 bp, Homo sapiens
ggcaggttcaaatggctggtataattataggcaccaggatttattggatcattcgtgtacatcaggaagtggctctggtcttccttttctggtacaaagaa

SEQ ID NO: 572275 - DNA, 100 bp, Homo sapiens
agctgccaaagccttagacaagtacttctactcccgaaggattgacatcaccctgtcgtcagtcaagtgcttccacaagctggcctctgcctatggggcc

SEQ ID NO: 572276 - DNA, 90 bp, Homo sapiens
ggacaacatgtcccaacattacatcccaactggcacagcctccaggttggcgggctcatctgcgctggggttctgtgcgccatgggcatc

SEQ ID NO: 572277 - DNA, 100 bp, Homo sapiens
cgaggcccaagagcagtgatgcacagaccccacaggctcctcggacactgggtccatcacctcctgccccatcatccactccaacaccaacagcccctat

SEQ ID NO: 572278 - DNA, 75 bp, Homo sapiens
aagactcaggacggacaagcacagtcttcggaaggtcaaggaggttaaaaagactttgtcgggcttggaagtcag

SEQ ID NO: 572279 - DNA, 100 bp, Homo sapiens
gtcatcggttcggtaaagtttctgttctctgggaacacatgcccactttggaggaattctttgaagaagccattgaacaggcagaccctgaaaatatggt

SEQ ID NO: 572280 - DNA, 75 bp, Homo sapiens
tatataatgatcgagacagtcaagatagcaagaaggtagaaatcatcatagacggggaaatcctttacatttatg

SEQ ID NO: 572281 - DNA, 100 bp, Homo sapiens
gttaaagtctctcttcaccctgccgtcatgtctaagtcagagaatgaagaacaagctatggtacttcgaatttgccacatctgaatccatcttctcaaca

SEQ ID NO: 572282 - DNA, 100 bp, Homo sapiens
cgagatggagcgggcgcactgggaggtggaacgggccgaactgcaggaatgctgtctctgcaatttgagaggaggtgctcttaagcaaacgaagaacaat

SEQ ID NO: 572283 - DNA, 106 bp, Homo sapiens
ctgatcatgagctccagcagaccataagggataacctttaccgccatgctgtgccttacgaagttatacggaagcgtctcctcattgatggagatggtgctggaga

SEQ ID NO: 572284 - DNA, 100 bp, Homo sapiens
aaactccaccgtagcccttgccaaagggacccagacatggagctgcgggaagaagcctggtctccggggccgctggattctgaggaccagcagatggcca

SEQ ID NO: 572285 - DNA, 101 bp, Homo sapiens
tggaaacaccatggctgcggcggcccagctctctctgacacagaacatccagtcatggataaaaatgagctggttcagaaggccaaactggccgagcaggc

SEQ ID NO: 572286 - DNA, 101 bp, Homo sapiens
cagggctgtgatggaaataatgactaaaacaattgaataccttcaacccaatccaggtcctgaatctgtgcctccttcccttcttaaagtagtgatgaaac

SEQ ID NO: 572287 - DNA, 101 bp, Homo sapiens
tgcagctgcattttcagaagattgtgattcagcctctactaaagttgtcatccgtggagcaggaaaccagaaaaattgcttcgccccacaatgtcctgcgt

SEQ ID NO: 572288 - DNA, 88 bp, Homo sapiens
ggcctggtggataaccaacaagatggggaagaaaaggattgagaactttaagagtggtgtggttggatggcaagcatgtggtgtttgg

SEQ ID NO: 572289 - DNA, 98 bp, Homo sapiens
gcggtgcacagttttcgaaggaggatgccctggagacacacaggcagacccatactggtgcttttcagtgggaagaattggaagaagatatcaggaag

SEQ ID NO: 572290 - DNA, 101 bp, Homo sapiens
aagatattagcctaacaagatggaagcaggtttaaaattttacataagaagttacctttttcaggtcaataacaacggagttgtttccttcaatgtgctag

SEQ ID NO: 572291 - DNA, 98 bp, Homo sapiens
ctctgtcagcaaggaggagaaggtgctggaaacatgcatgaagagctgcggcaagcggttccacgacgaagtgggcaagttccgctttctcaacgagc

SEQ ID NO: 572292 - DNA, 97 bp, Homo sapiens
ggcgctacgacgggactcacccgtgcctggcggccgccacccaaacgggcaaggatgtacagttacccagcacgtgtacctcctcctcctcctattg

SEQ ID NO: 572293 - DNA, 90 bp, Homo sapiens
tcagctgcaagtccaaagccacaaggtgggtttgctgagttctctcgttgtttccctggcctctgtgaaggaaaatccactctagtccct

SEQ ID NO: 572294 - DNA, 101 bp, Homo sapiens
cgaaggtggagcaggtcctgagcctcgagccgcagcacgagctcaaattccgagatgtgcctggcatcagaagggatgaaaatggaagaatcaaagctaat

SEQ ID NO: 572295 - DNA, 100 bp, Homo sapiens
gccccagtagccgcgggccttgggcccgtaatctcacgacctccgcctgcggcctcctcgcaaaacaaggtggtgctggctagagtgtatacgtttggac

SEQ ID NO: 572296 - DNA, 100 bp, Homo sapiens
gttaaatccagatgtcagctgacttctgccatgacttctgccacagattcactgtgtaacctggggcagaactcacagtttggagatgaaaaaacattta

SEQ ID NO: 572297 - DNA, 51 bp, Homo sapiens
cgtcggtctgcagcgcggctgagagatcctacagtaaggaattgtttgaag

SEQ ID NO: 572298 - DNA, 75 bp, Homo sapiens
atgaagataagaaaggggtgcagctacaggccttcccttcttcttggtggtgttcttgagtaagataatctggac

SEQ ID NO: 572299 - DNA, 98 bp, Homo sapiens
ttggatgtcatcagagggaaattaggagattggctgcaatgccgtcagctgggcccctgctgttgtacctggaagcctcatagaccacccatcggggc

SEQ ID NO: 572300 - DNA, 137 bp, Homo sapiens
aaggatggagtgatgaaagacatcagggcgatttatcaggtttataatgcacttcaggagaaagttcaggggttataatgagaagaaactaacagacaatattcagtgtgagatttttcaagttctttatgaagaag

SEQ ID NO: 572301 - DNA, 100 bp, Homo sapiens
tcagtccggcacaggaaaaacagccaccttcagtatctcagtcctccagtgtttggatattcaggttgtttacattcagagctctatcaataagaggaat

SEQ ID NO: 572302 - DNA, 75 bp, Homo sapiens
gctttgcctttctggacacagaagtatttgtgacaggagtccaatgtgctgattgctgctaacagtcagggtaca

SEQ ID NO: 572303 - DNA, 74 bp, Homo sapiens
gaggaggaggggagaggcctggaggacaccaacatgagaatgactaatagtagcagctccccaagccttctaaa

SEQ ID NO: 572304 - DNA, 100 bp, Homo sapiens
cttttatattcatctcaaaaacaaaattctgaactcaggacttggcaaggagatacatctggggactataagaaagctcttctgctgctctgtggagaag

SEQ ID NO: 572305 - DNA, 97 bp, Homo sapiens
acgtgcccaacgccacgctggagagcagcgctggggccgagctgtctttcatccttcccagagagagcacgcacagcttccatgatgacgcccccaa

SEQ ID NO: 572306 - DNA, 75 bp, Homo sapiens
cagaacattgcacgatgcctcctgctcggattctgaaggtaattttgagactcctgaagctgaaaccccgatccg

SEQ ID NO: 572307 - DNA, 101 bp, Homo sapiens
gccccgaggtgtgggaagacatcaagttgcaaaagcttctcatttcagagagatgccaggatcctaagtgcctgccaaacttaccaattctaaggaataag

SEQ ID NO: 572308 - DNA, 100 bp, Homo sapiens
ggtggcgaacggggcgagcctggaggattgtcactccaacctcttttcgctgtggaggccatagtggagtttgactaccaggcccagcacgatgatgagc

SEQ ID NO: 572309 - DNA, 101 bp, Homo sapiens
atatctgggtttgttggagagatgtacgatggatggctggggagaattacagatgaaggttattctttcagcagtgtcctgtattatggaaatgaagctac

SEQ ID NO: 572310 - DNA, 51 bp, Homo sapiens
tctgtggctgctgctgctgatcctgagaggagatgttaaagtaacccatct

SEQ ID NO: 572311 - DNA, 89 bp, Homo sapiens
caccaggaactacctcaaacaaggcttcatggaaaagactgggccaaaggagttcattcaaaagtgcctgcagtctgagcctgctcgca

SEQ ID NO: 572312 - DNA, 52 bp, Homo sapiens
agccctctccacctcggaagagctatattgaccagtggaataaggtaattga

SEQ ID NO: 572313 - DNA, 86 bp, Homo sapiens
gacaagcaggtctaccgggccacgcaccgcctgctgctgctgggcgtccgagctgggccacagcctgaacgagaacgtcctcaagc

SEQ ID NO: 572314 - DNA, 74 bp, Homo sapiens
gcggctgtgtggatgtcggcgaagccgcgggcgaggtggtgatgatgtccagcaactctgtgaagcaggagaag

SEQ ID NO: 572315 - DNA, 100 bp, Homo sapiens
gatgtgatgttggagaactatagcaatctggttttcttggatttaatccagagactgacttcactatagaacccacagttgtatcaatggttggggaaag

SEQ ID NO: 572316 - DNA, 75 bp, Homo sapiens
tatctgtacagcagtttcctcatccctgcagctgtgtttgaacagtattctaccttgtaaatactgttatttgta

SEQ ID NO: 572317 - DNA, 90 bp, Homo sapiens
cccccaccccggccctgaagaggacactggattccatgaacagcaagggctgcaaggtgtgcatcaccttcgaccaggccaacctgaccg

SEQ ID NO: 572318 - DNA, 75 bp, Homo sapiens
actatctaccagccccccgagcccagaagcaggcacctctctgtcaatgttcccacaagcctgcatttccagagc

SEQ ID NO: 572319 - DNA, 110 bp, Homo sapiens
gcttgcagcggggacgcgaggacccgggctgggctttcctcacccgggaaggatctgagtctctccctgcggagacagccctgaagaactcctgtaacgtcaagctggca

SEQ ID NO: 572320 - DNA, 83 bp, Homo sapiens
ctgtgtcgcagcctctcgggatgacaccactctgaatgcactgaacacaaaaactttagaaactgttcctttggagaggaaaa

SEQ ID NO: 572321 - DNA, 98 bp, Homo sapiens
agaaggacaaggacagaatcaccagcactggctgaagtgcaaagagccgtctcactcttctctctgaacgacccggccctgagcccggacatcccgcc

SEQ ID NO: 572322 - DNA, 75 bp, Homo sapiens
aatcctcaatttaagcctgatctaacccctagaaacagggttgctttagacactcttgctgcattgctaaaatca

SEQ ID NO: 572323 - DNA, 82 bp, Homo sapiens
acggcgagagtgggcgagaacgtccactgcgggccggcgaaagctgacttcccaagtaagaagcggaagaggagccgctgga

SEQ ID NO: 572324 - DNA, 75 bp, Homo sapiens
aacagaggaccctggctgtctacggggttggccagagtcacagcggaaggagtttgcagagaagctggagtccct

SEQ ID NO: 572325 - DNA, 75 bp, Homo sapiens
cctgaaacagaaattctggaacacctatatgctttggggccatttggatcacacgatgttttttcaagattttag

SEQ ID NO: 572326 - DNA, 98 bp, Homo sapiens
ctccactccgccaatcccctgtgcctggcgttgggcggtttcccgaggagcttgggccgccgcaggaacgagtctttgggaacgtggtccacccaggg

SEQ ID NO: 572327 - DNA, 124 bp, Homo sapiens
aagactttaccaccaaacgtgagatggttgtccagtatatttctgccactgccaaatctgtgccagaaattatgggagttatctgtgcccagttatccataatcagccagcctagagtccgcca

SEQ ID NO: 572328 - DNA, 75 bp, Homo sapiens
ccgtggaagcggccaccgactactgtcagcagctgtgccaggaatctgcaagcagaatatgaccgtctaaagcag

SEQ ID NO: 572329 - DNA, 87 bp, Homo sapiens
cgcgggtgtcgctgggctgtcggcctggaccttgcagccgcaatggggcacggtggcgcacaagatcatgcagaagtacggcttccg

SEQ ID NO: 572330 - DNA, 100 bp, Homo sapiens
cccgcgtccgccgattcctcctccttggtcgccgcgtccttggctggcgtatgccccttggtgtggccactgcaaggctctggcccctgagtatgccaaa

SEQ ID NO: 572331 - DNA, 83 bp, Homo sapiens
gaggatgatttcatgtgcgatgatgaggaggactacgacctgacgttggaacttgccaggaatccagcaatgatgcaggagat

SEQ ID NO: 572332 - DNA, 75 bp, Homo sapiens
agaaaaacaagaattacagcagccaacctatgttgccctgagttacataaatagcggacaaggcaaaatctcagc

SEQ ID NO: 572333 - DNA, 83 bp, Homo sapiens
gttgttaaattctcaacagctcacaccaggtgagaaggactggcagaaatacgagactgctcggcggctgaaaaaatgtgtgg

SEQ ID NO: 572334 - DNA, 50 bp, Homo sapiens
gtcagaatcagagtatattgaggagaatgtgaaagatgttgcagaagtgt

SEQ ID NO: 572335 - DNA, 82 bp, Homo sapiens
cgatcagggcatacatctttcttcgacaaagggcctgtttaaagaagaaaacccgtatgctagatttgaaaacaactaaagc

SEQ ID NO: 572336 - DNA, 100 bp, Homo sapiens
cagaaaagccttccgagacaggaaaaatctcctcatgaagcatgaacagttgagaaaagatgctgctgccaactccactcgcgccggacacagggagcag

SEQ ID NO: 572337 - DNA, 75 bp, Homo sapiens
cacctggtgatgaccctcgtagtggctgcggcgcgggccgagaaggaaggttatcaagttatacccaaccagcag

SEQ ID NO: 572338 - DNA, 100 bp, Homo sapiens
aacgttctaaaaagaggcgaaaggaagcaagcagttcagaagagccaaggaataaacatgcaatgaacccaaaagggttgtctaccttcataacaacaat

SEQ ID NO: 572339 - DNA, 75 bp, Homo sapiens
gtgacctggggctgtggagagcgacccgtggccttgtgtttcaggcttctcacggcattcagcagcagcgttgct

SEQ ID NO: 572340 - DNA, 100 bp, Homo sapiens
ctccccagctggtggctggagcgaccccttgttctttggtggcgctggtatgataagtattatcagcaacataatagttctgggcatcttcattaagtac

SEQ ID NO: 572341 - DNA, 80 bp, Homo sapiens
tacctgaagttgcactcaaaagcaagatatactactaactttgaaatggaataaggtctcacttcatcacccaggctgga

SEQ ID NO: 572342 - DNA, 75 bp, Homo sapiens
gtttttccagctcacccactgccagcagaggcctccaactttaagaaggcaaacatggcatcaagttctcagcga

SEQ ID NO: 572343 - DNA, 82 bp, Homo sapiens
taacgtttaccctagcaaaccagaaattatggaagtggaaattacaatgattttggaaattataaccagcaaccttctaact

SEQ ID NO: 572344 - DNA, 98 bp, Homo sapiens
gcggcagacctcctgcgtcagggtgctgcctgtgactgcggtgcccgcctctgtgacgagctcacgggccagtgcatctgcccgccacgcaccatccc

SEQ ID NO: 572345 - DNA, 75 bp, Homo sapiens
agccgaaatcatgctgtgttaactgctaacttttctgtaaccaacctgaaagtatgctgaggccttggattacca

SEQ ID NO: 572346 - DNA, 73 bp, Homo sapiens
acttgctgcccgacactaatgtgttactgcaccaggcatttccctggaaatggcagctgtgacagtaaaggaa

SEQ ID NO: 572347 - DNA, 100 bp, Homo sapiens
agggaagaagcgagagcaggcagaaaggttgggcatgggcttggtatcccgaaggttgggttaacggcatggagaacagtcaccccccccaccaccacca

SEQ ID NO: 572348 - DNA, 76 bp, Homo sapiens
aggaagggaagctgatcatgggcattggtcaccgagtgaagtcgggttctgtgtagcctcacctagtgcatcgtaa

SEQ ID NO: 572349 - DNA, 82 bp, Homo sapiens
ggcgcgggcgccggcgaggagagcccgcggctgcagacggttgatgatgaagcgccggccgtgtaaatgaagatcgggtgag

SEQ ID NO: 572350 - DNA, 100 bp, Homo sapiens
actgtatgcagcagatcaggggaaacagcttgaatcccttgaccttactgatgagaaaaagaagagctggatattctttcgcccagttatggcagacaag

SEQ ID NO: 572351 - DNA, 50 bp, Homo sapiens
ttcagcctgagacccatccctagcgctctgctgcacttccaggaagtccg

SEQ ID NO: 572352 - DNA, 100 bp, Homo sapiens
cgctcattggctgggtcctgcgtgcggccctggattcaggggccttccagaggagatatctgaagagattataggatcacccatcccagaacctaggcaa

SEQ ID NO: 572353 - DNA, 100 bp, Homo sapiens
tttctgacaatgcagcttctcttgcagtgcagaataacaagcctttgtattcatttgaagataatgcagactatgtttatgatgttatgtggtcacctac

SEQ ID NO: 572354 - DNA, 100 bp, Homo sapiens
tcatcagcaactcctataaacacagtggacgtcaataatgaaagctcttcagagcctgcctagggtagttaaaagacgagtgaatgctctcaaaaacctg

SEQ ID NO: 572355 - DNA, 75 bp, Homo sapiens
tgtcattacagtgatcatcataggcttatgtcttgctgcaggtgaatactggattgatcctaaccaaggatctgt

SEQ ID NO: 572356 - DNA, 100 bp, Homo sapiens
catgggaaggattttggcagtgtcgaggtctgagttttagtccgttcccctctctgggtctcagtttctcgctggtatgagggtgctggttgatgctcga

SEQ ID NO: 572357 - DNA, 100 bp, Homo sapiens
atgaccacagtggaccagctcgagtctcaagtggacaatgaagcatcagatggtgaaggagaaggagacacagaagtgatgcagcaggagacagttccag

SEQ ID NO: 572358 - DNA, 75 bp, Homo sapiens
cactgtacaagctttcaaagtcaatatcccagatgcagtgactggttactacctgaaccgtgctggctttgaggc

SEQ ID NO: 572359 - DNA, 100 bp, Homo sapiens
cgggtccccgcgttcacagccccagcgcagatgggggctccggaggtggcgcccaggctctgagctaccctaggtctgcagactagcgggcattggccag

SEQ ID NO: 572360 - DNA, 75 bp, Homo sapiens
cgacagacttcgctgtgagtgcccaaggtttcaaagcattatatgaagaatatgacagatacctagcatctagca

SEQ ID NO: 572361 - DNA, 101 bp, Homo sapiens
cttgattctgtgattgaattcagcatcccagactctctgctgatccgaagaatcacaggaaggtacagcatcctgctgcaaaaatgattgtaatggcttct

SEQ ID NO: 572362 - DNA, 82 bp, Homo sapiens
cgactcatgagagcgcggccggaggacaggctcccaatcgtcaactcatgacttactggttacaggagcttcagcagaagag

SEQ ID NO: 572363 - DNA, 102 bp, Homo sapiens
ccggaaggtggtggtcgtacgctgtgaaggcatcaacatttctggcaatttctacagaaacaagtcctgagacagctgcctgtgtgggactgagatgcagga

SEQ ID NO: 572364 - DNA, 75 bp, Homo sapiens
cagagcggctcagccagcggcagacagaacgggacctgtgtcaggtacggggctgatgttgacgtcaaccaccac

SEQ ID NO: 572365 - DNA, 50 bp, Homo sapiens
ctcagaaaaagctgagggaatgtgaatcaacggagtctcgctctgtcgcc

SEQ ID NO: 572366 - DNA, 118 bp, Homo sapiens
ctcaatatctgtcttcggtggactccttcggcagtccacccaccgccgccgcctcccagactacatgaggaaataattgacttttataacttcatgtccccttgtcctgaagaagcag

SEQ ID NO: 572367 - DNA, 83 bp, Homo sapiens
gggaaaaataaagtgttgagtaaacagaccaagttggttgattatggaagattcccacaagagtaccacgtcagagacagcac

SEQ ID NO: 572368 - DNA, 98 bp, Homo sapiens
cgtgacaaactggacatccttggggctgctgagacagatagttttgaggcagctgtgccatcaaatagccacattgtttcggaacctggaaagaatgt

SEQ ID NO: 572369 - DNA, 90 bp, Homo sapiens
ccgcagcagatcagggaccggctgctgcaggccatcgacccccagagcaacttcgatcctttggtacagaagacagaccgacagatcgtc

SEQ ID NO: 572370 - DNA, 90 bp, Homo sapiens
aacccctcagacaatgaattcacaacctcaaacccgttctccgtgattcgcctttgccagtctcatctcgtgtctgctttgttaagttcc

SEQ ID NO: 572371 - DNA, 98 bp, Homo sapiens
gagagcctcacgagtcgaggtcctgcaggtggagctccggcagccgccctgggaagttaagatatgccaacaacagcaattacaagaatgatgtcatg

SEQ ID NO: 572372 - DNA, 74 bp, Homo sapiens
tctatgtgacagtcatcattgaagtggggagaatgcacatgcagtgggacagaatgacttggaagataacggag

SEQ ID NO: 572373 - DNA, 83 bp, Homo sapiens
ctcgcgcgcgcctccaggagcaaggatggagaggctgtcctcacacaggtattcaggaataccaggatggcgtgcccaagatt

SEQ ID NO: 572374 - DNA, 83 bp, Homo sapiens
tggagaacctattgatgaaagaggtcccatcaaaaccaaacacttcatctgccgtgaattggatgccatttccactaatgaag

SEQ ID NO: 572375 - DNA, 100 bp, Homo sapiens
ccgagcggccgcgagcagagccgcccagccctgccagctgcgccgggacgggagaagaaatgggtgaccgttggtgacacatccctacgaatctacaaat

SEQ ID NO: 572376 - DNA, 100 bp, Homo sapiens
gcagctacgaggaggccttcgaggctctggagtcctccacggctacgtttcgggagaatgtccaggatgtgctgccggccctgccgaatccagatgacta

SEQ ID NO: 572377 - DNA, 100 bp, Homo sapiens
cagggacgtgatgttggagaactacaggaacctgctttctctcgatgaggataacatccctccagaagatgtttgtcagaggaatggctgtgaatggatg

SEQ ID NO: 572378 - DNA, 55 bp, Homo sapiens
cttggacgcccgcgacagaaaagacaggactgttctacatttggcctgtgcccat

SEQ ID NO: 572379 - DNA, 100 bp, Homo sapiens
gtctgcgtgagaatagagaccaccgaggatgataatgaagataattcaaatgatgggacccagccatccaaaaggaggcgaatgggctcaggagatagtt

SEQ ID NO: 572380 - DNA, 80 bp, Homo sapiens
aagaaagagagaatcttcgttttgacttctatgaaacccacgtagtcgaacaccgtgatgcttctcctgcagggcgtgtg

SEQ ID NO: 572381 - DNA, 74 bp, Homo sapiens
aagaggtgaaccacgccgtggaggttacagccaagttctacttctgaatctatggatcaactactaaacaaaaa

SEQ ID NO: 572382 - DNA, 83 bp, Homo sapiens
gtacagagcccgaccccctgcttgccactctagaaaaatgatgctggagggtcttgaaatctttacagtaaaacctgcaactt

SEQ ID NO: 572383 - DNA, 88 bp, Homo sapiens
ttttaaagcctgcagagaaaaagaagccaaatgccacgagacctgtaacgcctccaagggcatggcatcgtgtgctgaaccctctgag

SEQ ID NO: 572384 - DNA, 75 bp, Homo sapiens
cccacttggtgaatggagatgcagctcagcaggctgtggatctttccattgatgagtccagcttgacaggtgaga

SEQ ID NO: 572385 - DNA, 74 bp, Homo sapiens
agaaaccccgttgacaaggcactgctttttcatgacgggtaccgtgagggttttctctggaagcgtggccggga

SEQ ID NO: 572386 - DNA, 75 bp, Homo sapiens
ttttgtgaatgattgtgctgataattcagatgagactactttcatttgccattggcagtatggagttactcaggc

SEQ ID NO: 572387 - DNA, 80 bp, Homo sapiens
aactgcttcaagccccgcgagtcgcatctgctcaacgacgaggacctgacgcagaccctacagcttggggcctgggctcc

SEQ ID NO: 572388 - DNA, 75 bp, Homo sapiens
agccagtgggctggggactcacggccgggacactcagggcaggacagctaacccccgcatcggtgacgtgatcca

SEQ ID NO: 572389 - DNA, 108 bp, Homo sapiens
gcgactcgcttctttcggttctacctgggagaatccaccgccatccgccaccatggtgagaagccctaccactgcaactgggacggctgcggctggaagtttgcgcgc

SEQ ID NO: 572390 - DNA, 123 bp, Homo sapiens
cccgccgcagggcgctgacggtcccgcacgtctgccgctgccaccggcgcgcccgacaacatggccaatctttcctaagctgctcagcttacaagaaaaggaatcatactgctaagaattcaa

SEQ ID NO: 572391 - DNA, 80 bp, Homo sapiens
gtgaaataagctggtcacagagagacaaatcctgggtgatcccacttacatgaggcgatcagtgggtgaccgcggctgcg

SEQ ID NO: 572392 - DNA, 100 bp, Homo sapiens
tgcttttcctcctgcagcccaccgtctacttgtttgttgcatattctaaggacccagacataggcttggtggcccgtctcttgtctttcctggtttatga

SEQ ID NO: 572393 - DNA, 87 bp, Homo sapiens
agattccaaaacttatgtcaagaaatgctcggaacttctttacgtttttcaaacgcagctggctctgaaactgctccagtgtctgaa

SEQ ID NO: 572394 - DNA, 83 bp, Homo sapiens
gcctgccccgccggagcagcatcatcaagaatctcattttcagcttctgccagagccagtagcagttgggaaagaaggctgtg

SEQ ID NO: 572395 - DNA, 75 bp, Homo sapiens
ctgcagaagtggatcatagacctggccatgatatccttctttccagagtcaggacagccagagtgcttaaaggag

SEQ ID NO: 572396 - DNA, 82 bp, Homo sapiens
caatgctgatgtttgataaaactaccaacaggcacagaggtcgagcctcttaggcagagtttaacacatgggagctgcctgc

SEQ ID NO: 572397 - DNA, 83 bp, Homo sapiens
agaagctccagatggcgtcttccgtgggcaacgtggccgacagcacaggtgttacagggtcttgattatttacataccaagtg

SEQ ID NO: 572398 - DNA, 98 bp, Homo sapiens
tcatccttgtttaatgactttggtgccctcaacatctctcagagacgaaagagaaagcagcagctgccaacatagatgaagtgcagaagtcagatgta

SEQ ID NO: 572399 - DNA, 90 bp, Homo sapiens
gcgtgacgcagccggatcggcgccagacggaaacctagcgcatcaacaacagcaacttgtgattggcggtgaccggatattcagttgcac

SEQ ID NO: 572400 - DNA, 100 bp, Homo sapiens
ggcgctggcgctgccggagctgtcgacccggcctggcgccggactagaatccggacaatcagatagttcaaaccagcaaggagatgcggacatcaaacca

SEQ ID NO: 572401 - DNA, 100 bp, Homo sapiens
gaggtggtaccttctgcacctcccctgcctgtgaggcccccgaagacatcaccagggctcagaggtggtgttcccactgatgaagagcaggcgactgggt

SEQ ID NO: 572402 - DNA, 96 bp, Homo sapiens
ggccccccagcatgaagaccccggcggacacagggtggagaatgaacccactttgaaccttgggaatggaattgctcttttggtcgactcccagca

SEQ ID NO: 572403 - DNA, 80 bp, Homo sapiens
ggtgtaccccaagctgtacttgtcacctcgaattgagcatttgcgcgataacaatatctcagaccgaggcatctgcaagc

SEQ ID NO: 572404 - DNA, 89 bp, Homo sapiens
gtccatggaacaagtttctcatggcactcaaaataggcatcgttggcttcacagtatgactgatgatcctccaacaacaaaaccactta

SEQ ID NO: 572405 - DNA, 74 bp, Homo sapiens
ctccgggcccggcgccgccgcccgcagccctgggcatttccagctcgagagttccttcgaaagaagctgattgg

SEQ ID NO: 572406 - DNA, 74 bp, Homo sapiens
gccattttctctacaaagctgggggaggctcatatattgctgcaggccatccgggtgttcttcatgctgcgttc

SEQ ID NO: 572407 - DNA, 100 bp, Homo sapiens
ctgccaagattaatgccatgctcatggcaaaagggaagctgaaaccaactcagaatgcttctgagaagaaatgttctttttccccagctcggactcaaca

SEQ ID NO: 572408 - DNA, 75 bp, Homo sapiens
gagaacggtgcttctatggcaggatatgaaaacgttgtgtgacgtgatcctcatggtccaggaaagaaagatacc

SEQ ID NO: 572409 - DNA, 50 bp, Homo sapiens
gtctcaggcctttagtgatgatggtggaaggaacagcatatttaagttct

SEQ ID NO: 572410 - DNA, 75 bp, Homo sapiens
aggagggaaaagaaagaatgtatgaggagaattctcagcctaggtgtagaatgagccaaggagactcaaacccag

SEQ ID NO: 572411 - DNA, 90 bp, Homo sapiens
tctcaaggcctgagtagccggtaacaaacgagggttcccgggattggaccgacgcagccatggaaagaccggcagagaccaatgccaatg

SEQ ID NO: 572412 - DNA, 100 bp, Homo sapiens
tgtaattacagctactccagcaacatcttgtccataaggctgaaccggcaaggtcttactgaagtaacacaaagcttaaaaatggaaaatgaagagttta

SEQ ID NO: 572413 - DNA, 97 bp, Homo sapiens
cgcgcccagagccccgcgtttcagccctagggaaggtgctggagaatctggtaaaagcaccattgtgaagcagatgaggatcctgcatgttaatggg

SEQ ID NO: 572414 - DNA, 88 bp, Homo sapiens
gcggcgggtgctcatcctggacaattcacctgcctcctatgtcttccatccagacaatgctggcactccacagaaggatgttattatc

SEQ ID NO: 572415 - DNA, 50 bp, Homo sapiens
ctggaggagccttctcaagaacagaggtgctggagaatctggtaaaagca

SEQ ID NO: 572416 - DNA, 100 bp, Homo sapiens
attctggaaatactaaatagtactggtttttgaatcagagccgacaggcacttgaattgaaaatggaaaaccctactgctggtggtgctgcggtgatgag

SEQ ID NO: 572417 - DNA, 82 bp, Homo sapiens
acgttacgctattcgttgtggtccaaaacagtttacctcttatctaacagtggaagatagatgataagcctgtaaaaattga

SEQ ID NO: 572418 - DNA, 100 bp, Homo sapiens
cagacgatattgatattgaagcaatgcttgaggctccttacaagaagctatgaccaagaaatgccatgtcccgtgccaccagcaaggatgtatttgcaac

SEQ ID NO: 572419 - DNA, 101 bp, Homo sapiens
gcagctagtaatttgccttctggattcgggacgaccctgggacagtctccactggggcagatccagctgaccatccggcacagctcgcagagaaacaagct

SEQ ID NO: 572420 - DNA, 50 bp, Homo sapiens
gaaatcggattttacgacattgcatcctaacgttagtcaaggctgccaag

SEQ ID NO: 572421 - DNA, 75 bp, Homo sapiens
aaagactatgcccaattcttcaactcctaccagccagatcaacacaattgataggaatgacagaggaagaggaag

SEQ ID NO: 572422 - DNA, 75 bp, Homo sapiens
agccagaagaggcgttcgctgcgcgtgcacattccgatggccaccatgtctgggagatggaagcgaaaactgacc

SEQ ID NO: 572423 - DNA, 100 bp, Homo sapiens
atcgctcagttgtctccagctgttagccagaagcctcccttccagtcaggggtagaagaccatgatggagaaggtgatgtggctggagatgatgatgatg

SEQ ID NO: 572424 - DNA, 75 bp, Homo sapiens
tcctgatcatgttttatgccccctgcaccatgactcctgtgaggatgcagcactccctggcaggtcagacctatg

SEQ ID NO: 572425 - DNA, 124 bp, Homo sapiens
aacaatgtgaagccaaggaagctgcggaaggattgaagtcaaagaattgaaaccctccaaaccacgtcatctgattgcagaagactgatttttggaaatatgtatttgggagacagtcacgtcc

SEQ ID NO: 572426 - DNA, 75 bp, Homo sapiens
gcctctttgagaggtctcgcattaaggctctggcagctctcctgccacagctcctcaccccctgaaaatgttcgc

SEQ ID NO: 572427 - DNA, 83 bp, Homo sapiens
atcagagccatcagaaccgccaccatgaaattagtgaatttccatcagaatgttgtagtgtgatggcaggaggtactctgact

SEQ ID NO: 572428 - DNA, 74 bp, Homo sapiens
aaaaagcagtttccaccatcctggagtgtgtgggccccatgctgattgagtttaacatgcctgtggacctggag

SEQ ID NO: 572429 - DNA, 100 bp, Homo sapiens
tacatcctctgccacatcttcctgacccgcttcaagaagcctgctgagttcaccacagagattctagactttggctacccacagaattccgagacaggcg

SEQ ID NO: 572430 - DNA, 75 bp, Homo sapiens
ggaggcaaagaaccatgaagtacacaacagccacagtggatgagtgctcgtctgactacacaattgtgcttcctg

SEQ ID NO: 572431 - DNA, 50 bp, Homo sapiens
aggagcacaacaagatggccatgtcccagccacaacaagttgttcagaag

SEQ ID NO: 572432 - DNA, 83 bp, Homo sapiens
aacagagccatcattcaagaagtttgcttcatggcactgggggccacagtgctgatctcagcagctccattttttgtcctctt

SEQ ID NO: 572433 - DNA, 100 bp, Homo sapiens
gttcactccaaagtgcctttgaaggaatttgatcatagtaactgcaagacagagggctgggctgaccaggaggctaaggagaagcgccaggaacaaattg

SEQ ID NO: 572434 - DNA, 90 bp, Homo sapiens
tgagtggaagccatgaggccaaaggcagttgtattggactcatggtttttccaaaaccagtgaccgcattggaatatacattcagtaggt

SEQ ID NO: 572435 - DNA, 107 bp, Homo sapiens
cctcctgaggatttctgtgcctggaaaatatctgttaacagactgcttttacacctacgtagaagatgacagattattgaggttgtcccaaaagaagttctgtgctg

SEQ ID NO: 572436 - DNA, 100 bp, Homo sapiens
ccgcccgagcccgggtcgcgtacttgctgaggcaactgcaacgcgcagcgttatttcttatgagggtcatggatatcccctatctaaacttggaaggacc

SEQ ID NO: 572437 - DNA, 80 bp, Homo sapiens
tggccttgatggacacttactcgccctctctgcccaagagcctctatcggagcccaggcccgtgggagtcagcatgccgc

SEQ ID NO: 572438 - DNA, 90 bp, Homo sapiens
tggcaatcgagttgagtacttggatagacttatacctcagccgccaccggcaactaacctatgaccttctgacctctgaactcttcaccc

SEQ ID NO: 572439 - DNA, 50 bp, Homo sapiens
cttttgagtgcaactgccttccagagagatgccaaaggccagtacctgtt

SEQ ID NO: 572440 - DNA, 82 bp, Homo sapiens
acaagctgcaccagcttctaaccgacacactgatttatgtcagtacatggacaagcaccctggggggctgcatccagataat

SEQ ID NO: 572441 - DNA, 82 bp, Homo sapiens
gactccgcctctatgtggagactgaggacgctgagcgggctttggacaccatgaactttgatgtgattaagggaaagccaat

SEQ ID NO: 572442 - DNA, 95 bp, Homo sapiens
atcttcgccatcgccagcatcgccaacccggactggatcaacaccggggagtctgcgggctggtccattcaggtccaggaaagggatcaccccag

SEQ ID NO: 572443 - DNA, 75 bp, Homo sapiens
ccaggctcgcctcgactccaaatggttgaaaacagatatacaggtgtacacttaaagcgttctgggaatatgaat

SEQ ID NO: 572444 - DNA, 97 bp, Homo sapiens
aaatgagacaattgaagctcaagcagagcttacagtgcaagttttacatgtggcacccataaaagatgaggctgagaacacggaaagcttctcagca

SEQ ID NO: 572445 - DNA, 113 bp, Homo sapiens
cggcggcctgatggagtaagaggggttggctgtgaatgcaatgcatgaaccattgcaaacttggcaagatgcaccatacatttttattgtacatattggcatttcatcctcaa

SEQ ID NO: 572446 - DNA, 76 bp, Homo sapiens
agccatggaaacaggaggaagaattcccaagccaaagctttccaggtgaccaagaatatggcccaggtgaccaaag

SEQ ID NO: 572447 - DNA, 50 bp, Homo sapiens
tggacatcctgaagccaatcctggggttgtagaaggtgatttagctgcca

SEQ ID NO: 572448 - DNA, 100 bp, Homo sapiens
ggcggctcagttgtccatgaccctgaaggtccaggagtacccgaccctcaaggctggttggaaggaaaatcatgcaacattcatgagcgaactaaaaaat

SEQ ID NO: 572449 - DNA, 100 bp, Homo sapiens
tcaaaggaccggacccagagaagaggaaaactctaccggtgcagggggtaaaggaagtggtatctttgacgaatcaacccccgtgcagactcgacagcac

SEQ ID NO: 572450 - DNA, 90 bp, Homo sapiens
gttttttggaggaggaggaaggatgcagagagaaaggagagaagagctggatattctttcgcccagttatggcagacaagttaacgagaa

SEQ ID NO: 572451 - DNA, 73 bp, Homo sapiens
aagccaatgcccaagacattataaacgctgagtatgagtttatcagctctggtctctacctagtggtgttatt

SEQ ID NO: 572452 - DNA, 75 bp, Homo sapiens
ctggatgacagcaaggagttgcagcggtgaaagaaaatggcccgaaccaagcagactgctcgtaagtccaccggt

SEQ ID NO: 572453 - DNA, 82 bp, Homo sapiens
tgcagcttcaagcttaggaccacccaccatgcctatccagccgccaccggcacggccaggccagcatggtggaccacttact

SEQ ID NO: 572454 - DNA, 105 bp, Homo sapiens
ccgagaggtggttacattcgttgaaggacaccagctgcggaatttgcggctttggcagaacattaaccaggtggtatttgttggaaatttcttgagaattaatac

SEQ ID NO: 572455 - DNA, 100 bp, Homo sapiens
ttctgagtccagccaacagcagaagagaaagccagttatccacggactggaagatcaaaagagggccaacagcaagctgaagcagattgagaaggaatac

SEQ ID NO: 572456 - DNA, 101 bp, Homo sapiens
ctgccgctggcgagcgccaccgcatggcttcccaaagttctgggattacaggcgtgagccaccgcacccggctgacaagtgtccttctaagaaacacacag

SEQ ID NO: 572457 - DNA, 96 bp, Homo sapiens
aaaaagaaggcattcaagatcaagatcacgttctaggaggaggaggactccctcatcttctagacacaggctacccacctttctgttctgagaccc

SEQ ID NO: 572458 - DNA, 100 bp, Homo sapiens
aaaagaatacattcctgattacctgccacccattgtgtcttctcaagaaggactcacggcagctgtgttctgatttcgtactactgctggggctgccacc

SEQ ID NO: 572459 - DNA, 100 bp, Homo sapiens
catccagttcccattcgtatgactccaagcaaaatccacatgcaggaaatggaacttaaaagaactggcagcgacattcaacgtctgcagttggatctgc

SEQ ID NO: 572460 - DNA, 100 bp, Homo sapiens
cttcacttccctcggtctgggcttctctgaggcggcgagagatggtcaggtctggagctcgaccgggccagaagaatcctgcaaaaatgtctctctatcc

SEQ ID NO: 572461 - DNA, 100 bp, Homo sapiens
cgagaaactcccaccgacccacagaggaactctaactccttgccactcaagaaatgtcctccctttcagaatatgccttccgcatgtctcgtctcagtgc

SEQ ID NO: 572462 - DNA, 88 bp, Homo sapiens
gaggtgtttaccatgacgataagcaaccagcatttagagctgtttatgaagcactgagaaatcatccacccaacccaccagtatcacc

SEQ ID NO: 572463 - DNA, 100 bp, Homo sapiens
agctgaccagctactgagtactcgcacagaagcattagaagccttacagagtgaaaaatcacggatttcctgtggatccacgaaaggtgctaatagtagc

SEQ ID NO: 572464 - DNA, 88 bp, Homo sapiens
caacaccaagtgcatcaccatccccagatggactcaccctgtcacccaggttggactgcactggcctcaacctcctgagttcaagtga

SEQ ID NO: 572465 - DNA, 75 bp, Homo sapiens
atttgttgtggagaagatcatactgctgctctaaccaaggtttttgaccaatatctcaattttattactttggaa

SEQ ID NO: 572466 - DNA, 101 bp, Homo sapiens
gggtcctgaatcttctgggagctgaggaaccagatatcttgaaaagctgccagaaaggtgacagctggatctgcaagtctgtcctttctgaaggccaccag

SEQ ID NO: 572467 - DNA, 100 bp, Homo sapiens
atagagccattgaagacaccagacctgctggatcacttaggaaaatggctgttggtatgatcctagcatgcctggcatttgcagttgcggcagctgtaga

SEQ ID NO: 572468 - DNA, 75 bp, Homo sapiens
ggagggaaagtgccgctttaaggagaactgcaggatgcggaagggagagctgtttgactatctcacagagaaggt

SEQ ID NO: 572469 - DNA, 51 bp, Homo sapiens
aaacaaaatgtcaacaaattgatggccaagacaatgcaaactccagtgaac

SEQ ID NO: 572470 - DNA, 82 bp, Homo sapiens
tggcgtgcactccgcacctcggggacattattgcgcgtggaacggctgcttttggaagcagcccctgtcaaagggaacagga

SEQ ID NO: 572471 - DNA, 83 bp, Homo sapiens
agcatgccttcgtctccgcattgcttaactggagcaactgagccccgttccaacaatcacatggatgaaggttaatggttata

SEQ ID NO: 572472 - DNA, 75 bp, Homo sapiens
ccacccggctggccaaggtggtgatgcagtggtcttatcaggtaaaggatggtcttaaccagaagccagaaaaag

SEQ ID NO: 572473 - DNA, 74 bp, Homo sapiens
gcatcacagccaaggaagccctcatctgcccaagtactccagtaattaaaggggatgaggaagaagacaactaa

SEQ ID NO: 572474 - DNA, 90 bp, Homo sapiens
ccagaacagaggactctaattgttactcattccaatcagctttatggccggcacaaggagtatctcagcagcctcgtaggcaccgacttt

SEQ ID NO: 572475 - DNA, 50 bp, Homo sapiens
ctgccctgagacggtgtcccgccgaaagaaaaggcgacggcggattgaca

SEQ ID NO: 572476 - DNA, 75 bp, Homo sapiens
ggctagcgcgagatctcctagaaggcttccacctctacctcggatgggatgctgaccttggacttgatccaagag

SEQ ID NO: 572477 - DNA, 75 bp, Homo sapiens
agccatgtgggtggtggttggctaaagttcggatgatgaaaggagaaatgaattttgataagaggcaacatgaag

SEQ ID NO: 572478 - DNA, 90 bp, Homo sapiens
cacaggagagccaggattcatgctctacatccccatagagcattggggctttccagctctcacagaaccttcagcatccccagctgccgg

SEQ ID NO: 572479 - DNA, 100 bp, Homo sapiens
agctgggggcaccgcagctcaccttgctgtggttggtggtggcgatggagactacagagcaccagagcggctaattcacctaaataagattgatcctcat

SEQ ID NO: 572480 - DNA, 51 bp, Homo sapiens
gcctctctccagcagactgcggacctcagcagccatgtcgaagccccatag

SEQ ID NO: 572481 - DNA, 75 bp, Homo sapiens
gaaaggaattctcaaaatccagcccttgagtggaatatggccagcagaatttcttcaggttgaattacctagaag

SEQ ID NO: 572482 - DNA, 94 bp, Homo sapiens
aatttttggatgatgatggatccatttctcctattgaggagtcaacgtgcgtggagatgctgatcaaggagcagatgaggaaatacaaagtgaa

SEQ ID NO: 572483 - DNA, 97 bp, Homo sapiens
cgagatgtctcgctccgtggccttagctgtgctcgcgctactctctctttctggcctggaggctatccagcgttcagcttgttggtttagatgagga

SEQ ID NO: 572484 - DNA, 75 bp, Homo sapiens
acagaaacaaaatgtcaacaaattgatgggatggtgccatgacaatggtgtgaactacaagattggagagaagtg

SEQ ID NO: 572485 - DNA, 100 bp, Homo sapiens
ctggaggatgcgttccctggggtccggtgatccgtatgtgaaactttcattgtacgtagcggatgagaatagagaacttgctttggtccagacaaaaaca

SEQ ID NO: 572486 - DNA, 96 bp, Homo sapiens
gcattctgatgggaacttgtgtgttaaagtaacagatgatttagttgttgtggggatgttccatccctccgttcagttgtgaagacctctgctctg

SEQ ID NO: 572487 - DNA, 100 bp, Homo sapiens
gagcattctccagggaaaggatgacatatttttggacctgaaacagaaattctggaacacctatatgaggttgacggatatattcagacgttacgacacg

SEQ ID NO: 572488 - DNA, 98 bp, Homo sapiens
tttggtcaatattgtcttaacatgcttcaaataaatcagagaaatctgacagaatattttgtggctgtggatgttaacaacatgttgcatctgtacgc

SEQ ID NO: 572489 - DNA, 100 bp, Homo sapiens
tgagtatagcgaccgctgcacgccgagcaatttacagcaatgagggatttatacatgaaaaatggacaaggatttgcattagtttattccatcacagcac

SEQ ID NO: 572490 - DNA, 50 bp, Homo sapiens
caagccaaagagaagggaatttgggccagagtggactgggcaaatcaacg

SEQ ID NO: 572491 - DNA, 90 bp, Homo sapiens
gcggggaccacagctcccgaaagcgacgttcggccaccggaggagcgggagccaagcagaatcctgttacacctgggatttaggcacttt

SEQ ID NO: 572492 - DNA, 100 bp, Homo sapiens
caggacccagttcgtgcagatggtggcggagctggcgactagaccccaaaacatcgagacgctgcagaacgcggtctcaggtatgtctttatcagcagtg

SEQ ID NO: 572493 - DNA, 51 bp, Homo sapiens
cgcagtggtcgcttcttctccttggtacggttcctggagcagcagaacaag

SEQ ID NO: 572494 - DNA, 75 bp, Homo sapiens
cactgcctgcgcagctccggccgcctggctccccatactagtcgccgacaacagaaaccagtggtaggactctgc

SEQ ID NO: 572495 - DNA, 75 bp, Homo sapiens
aattcccggaaccgcgattcggcgtgtcagagttgatctctctaatgtattagatcttcatgcctttgatagtct

SEQ ID NO: 572496 - DNA, 100 bp, Homo sapiens
cgaatcttcactcccgctgtctcagcagtctacagcacgggggagctgatcaccttctattactattggaagaagacccccgaagcagccagctcccgag

SEQ ID NO: 572497 - DNA, 88 bp, Homo sapiens
acaatccgtctggatcacggatgtaggaagtggtgtaatcctgagagattcacatggtgttgcacaagtacgttttgtgacaggcaat

SEQ ID NO: 572498 - DNA, 100 bp, Homo sapiens
gagcaattggatattattcagcgactagtaagcctatgtcatttcatccaccacattacttagatgaccgcacctcgagcaggagtggggatgccacgtc

SEQ ID NO: 572499 - DNA, 96 bp, Homo sapiens
atttgctaaaggagcttaagaatattcctatgaccctggaattactgcagatcatcccgatgatcggcttaatctgcctgggcatgggcagcgctg

SEQ ID NO: 572500 - DNA, 75 bp, Homo sapiens
aggatgaaggcagagcgtgtggcatctccacctcaaggcaatggctgccatccggaagaaactggtgattgttgg

SEQ ID NO: 572501 - DNA, 75 bp, Homo sapiens
aagatggtgctgtcccagagacaacgagatgaactctattgacctgaaaagtggttctggaaaagtgtaccaagg

SEQ ID NO: 572502 - DNA, 99 bp, Homo sapiens
acaccttcgtgggcaccccattctggatggcacccgaggtcatcaaacagtcggcctatgactcgaagggagtgcctggcaacattggtgctcccggac

SEQ ID NO: 572503 - DNA, 100 bp, Homo sapiens
gcggaacccgtgggcctgtggactgcagcctcggcggtcagcagtattgacttgaagctgaaagaaaagccttagttggccatgctggaagaagaggatg

SEQ ID NO: 572504 - DNA, 100 bp, Homo sapiens
gggaggcagcgcgggatcccagcctcaggcgtgcgcggacggtgtgcgggaccgtataatagacgctggccccaaaggaaactactctcgatttatgaat

SEQ ID NO: 572505 - DNA, 75 bp, Homo sapiens
gttgcagcctcccttccccacgacggggcgcctctgcaactcacagaacgaatgatcacacactttgaaaggtcc

SEQ ID NO: 572506 - DNA, 100 bp, Homo sapiens
agttcctgctctaagaggccatctgtgaggctcagtctcccaacacctctggtgggatgtgtgtgggctgaaattccgagctgcggttgtgcatgagaat

SEQ ID NO: 572507 - DNA, 90 bp, Homo sapiens
ggatattgaccttcatctagaaacaaagtcagttacagaagtggatactttaggagatcagctggttccaggagtcccaggcccctcctc

SEQ ID NO: 572508 - DNA, 90 bp, Homo sapiens
ctggaactatacacctctgcatgaagctgctattaaagggaagatcgatgtgtgcattggtgctggagaatctggtaaaagcaccattgt

SEQ ID NO: 572509 - DNA, 100 bp, Homo sapiens
tcagtacgccacctactattacccccagtatctgcaagccaagatttatcagcaagactgttgaacgcataactgcccaagatgcctgtccctccccctc

SEQ ID NO: 572510 - DNA, 80 bp, Homo sapiens
ttctcagcacagagtggggactgccttccattgtgaagtctgtcaaatgaagcgcaacagaggggaagaaatagattttg

SEQ ID NO: 572511 - DNA, 98 bp, Homo sapiens
caagattctgtttcagaatcagaaggagccagttgcggacaaggcaaaatctcagcaagttcggacctctagtacaataaggcgaacctcctctttgg

SEQ ID NO: 572512 - DNA, 58 bp, Homo sapiens
gcaggacttgtcagtacccgagtttccggaagcatttaaatcaaacggtattgagatg

SEQ ID NO: 572513 - DNA, 100 bp, Homo sapiens
gagaagagcttccctccgcagtccgggccgaggagggacagtccacgccgaggtggtgaaattgcctctacctttgatcacccagaactggtgaagcttg

SEQ ID NO: 572514 - DNA, 90 bp, Homo sapiens
ctgtttgcagggaggtgtagacgctgatcaccgtttccagtcattttaaaaattcagatctgccctccttggcactgtgcttccccagag

SEQ ID NO: 572515 - DNA, 98 bp, Homo sapiens
gttttggctgaggactgaagagatggccttggaagaaatggtgcagagattaaatgcggtttccaagcacacgggttcaatgatgaggtgaagcacat

SEQ ID NO: 572516 - DNA, 87 bp, Homo sapiens
agccagccgctgttttgccggaggagcccctcaggccggggggccctcagcctcttggccttgaacgggctgttcatcttgattcac

SEQ ID NO: 572517 - DNA, 75 bp, Homo sapiens
atgcggaggaccgtgtcggagatccgctcgcgcgccgaagaccaagcggagcagccagctggcagtagcgccctg

SEQ ID NO: 572518 - DNA, 82 bp, Homo sapiens
tctgagactttctccttcaagtacttggcagatcactctcttagcaggctgcgggaacaccatcgggccaccattaaggtca

SEQ ID NO: 572519 - DNA, 83 bp, Homo sapiens
ccgggcgctctcgcttcagtcagtcgggccgcgccgcgcctcagctctgcagaaaaatatggctcaggagactaaccagaccc

SEQ ID NO: 572520 - DNA, 95 bp, Homo sapiens
attggttctgccccctgacgtcatccaacaggaagcgtcagccctgagggaggagacagaagcctgggccaggtaccacatcgaggtgaaccgtg

SEQ ID NO: 572521 - DNA, 100 bp, Homo sapiens
ccgagggtaaaaaccccggaagggcggacacctccacatcgccttttgccacctttccctttatttccggaggtcttgagagctgatgacaataacatgg

SEQ ID NO: 572522 - DNA, 75 bp, Homo sapiens
taggcagctatttcacacttcagatgctgaagcgagtccctgagctcccggtgatggcatcagctgagaagggaa

SEQ ID NO: 572523 - DNA, 101 bp, Homo sapiens
cagcgccgcgtccgccgccgcggtggcagtcagcagccggcagcagcagcggatatgattgacaatctgctgtccccagatcttattgatggtgtgctcac

SEQ ID NO: 572524 - DNA, 82 bp, Homo sapiens
tacaccgacaactccatccggcccgaggagctgctgtgtggccgcaggacgagtacatcgtggagtactcactagagtatgg

SEQ ID NO: 572525 - DNA, 82 bp, Homo sapiens
actacgtgtacttcggcaccgtccgcgactgctatgagggtggcagtcacagaccagacaagaaagctgaagcgtcatccag

SEQ ID NO: 572526 - DNA, 74 bp, Homo sapiens
ccggggccgggctcaggagcagagaatatactgatgataatgctctgattcctaagaattcttctgtaattgtt

SEQ ID NO: 572527 - DNA, 83 bp, Homo sapiens
agacggcgacagtggcggcggcgccatggcagggcttgcagggggatatgagactttctactcggaatatcctgagtgttgcg

SEQ ID NO: 572528 - DNA, 84 bp, Homo sapiens
ctggacggcgagcgcgagcggcgcgagaaacgccgtgccgtccctgcagtgacaccgaggtgctcctagccgtctgcaccagcg

SEQ ID NO: 572529 - DNA, 100 bp, Homo sapiens
ggaggaggcagtggcgctcggcgtgggtctgtgcaacaatggcttcatgcaccacgttccagggtcacccccgagaggacaacaggcatctggaagtgct

SEQ ID NO: 572530 - DNA, 100 bp, Homo sapiens
gtgcagaggataactcggaggctgcagcaggaacggagggtgtccgcaatgttgccagtgtctgtctgcagattggctacccaactgttgcatcagtacc

SEQ ID NO: 572531 - DNA, 50 bp, Homo sapiens
ccacagaccactatcacctcgatcaggggcaagattcttgccaagagaat

SEQ ID NO: 572532 - DNA, 75 bp, Homo sapiens
ctggacaaaggaacaggtatctcagaggctgataaaataccagtaatgcgtggacagtggtttattgacggcact

SEQ ID NO: 572533 - DNA, 97 bp, Homo sapiens
cagagagatggagagagacctagttagttgctgttgctgatgcaaagaagtctctagaactcaatccaaataattccactgctatgctgagaaaagg

SEQ ID NO: 572534 - DNA, 74 bp, Homo sapiens
cggggctgaccacttaccgcagcatccaagtcggccctggtatcgagaaccttccctgcgaacttcagaggaac

SEQ ID NO: 572535 - DNA, 82 bp, Homo sapiens
tatgttaatatcattaagattctgcttaatgctggggcagaaattaattcaagacaatgcagatcttcgtgaagactctgac

SEQ ID NO: 572536 - DNA, 75 bp, Homo sapiens
ttcttcaaacaacctccctaccaaggatcttctttcagatattgatgatgttaagaagttcaaaccgggttacct

SEQ ID NO: 572537 - DNA, 100 bp, Homo sapiens
tttgcatcagccatctcttagtccagcaagtcctcatagccaggcttaatgcagataccgaaagagaagaaggcgaagagtttgaagataacatggatgt

SEQ ID NO: 572538 - DNA, 51 bp, Homo sapiens
ggattcgctcccagagcagctgcggccagtgtgcaccggcacagacatgaa

SEQ ID NO: 572539 - DNA, 97 bp, Homo sapiens
tctgcttctcttttcccgttgaaggtgctaccgctgacgacacccctggtggatggcgaggatgagaggaaatgagtggcttatactctcctgtcag

SEQ ID NO: 572540 - DNA, 82 bp, Homo sapiens
gaatgggagagagagcgcagaatatcaagtgctggtgatcccattaagatactaatgccatcactgtctcctacaatggaag

SEQ ID NO: 572541 - DNA, 114 bp, Homo sapiens
agccgtgaagtcagaggcgaacgccactcagcttttgcggcacttggaggtgaacgacgtgaatgagtacgcgcccgtgttcaaggagaagtcctacaaagccacggtcatcga

SEQ ID NO: 572542 - DNA, 99 bp, Homo sapiens
gtcgtcttccacttgcacgaaagctttcctaggccaaaaagaggtgttcccttcccaaagaacttccttcagatctgcaagaagatcctgtgccgcctt

SEQ ID NO: 572543 - DNA, 90 bp, Homo sapiens
aacccatttcagaccaatgccagaggagcaacagataagatttgtgaccaaatcagtgatgctgtccttgatgcccaccttcagcaggat

SEQ ID NO: 572544 - DNA, 100 bp, Homo sapiens
ccaacaaaagaatgctgccgcaggttcctgcagacagcagagatggtgaagccctccaccccatcccccagccacgagtccagcagctcatcgggctccg

SEQ ID NO: 572545 - DNA, 100 bp, Homo sapiens
gcagaagaacggagactacttgtgtgtgaaagtagataggactccgaaaggcacccaggagaaagccatgttcagttcgagcgccaagatcgtgaagccc

SEQ ID NO: 572546 - DNA, 85 bp, Homo sapiens
cccctttaaggatatgcctgccacccagcttggacgaaccttgacaggatgggtgcagcgaactttccagagcacccaggcagct

SEQ ID NO: 572547 - DNA, 100 bp, Homo sapiens
ggatggaaagatggagatgaacctctaacacagtggaaaggaaccgttctggatcaggagtctccccaggacagtgctatcacccgggatattaaccgaa

SEQ ID NO: 572548 - DNA, 75 bp, Homo sapiens
gaaaggcaggaacttgcttctaaaattaaagaggaccctcgagatgcccctcctccaactcgtgctgaaacccga

SEQ ID NO: 572549 - DNA, 90 bp, Homo sapiens
agcctgctcttgaggttcacagatgatacctttgatccagaacttgcagcaacaataggtactcatgtaatggaaggctctggaagaatg

SEQ ID NO: 572550 - DNA, 51 bp, Homo sapiens
cggtttcctggacccattccgactcagatggacgtgcacatcctccggcag

SEQ ID NO: 572551 - DNA, 51 bp, Homo sapiens
gctgaagaccactttagaaactcaattaagcggaattctccacgagttttg

SEQ ID NO: 572552 - DNA, 100 bp, Homo sapiens
gaacacccccccatggaggcgaggtagagttggggtcgcaggattggccatttgatgatggagctccaccccctaatcagatagtagatgattggttaaa

SEQ ID NO: 572553 - DNA, 51 bp, Homo sapiens
acgaacatcttctggacctttgtccagtggaaattgatgacttgaaaaaaa

SEQ ID NO: 572554 - DNA, 82 bp, Homo sapiens
attcaggatcaacttgaacgaatatttctgaaaccaatagagccatggcgactccctctgctgccttcgaggcccttatgaa

SEQ ID NO: 572555 - DNA, 96 bp, Homo sapiens
acagcaacccttcagcttcccagcctaccactggaccctctgctgcctctccaggtctggcccctctttgtgaaaatatgcccagcggcaaggcca

SEQ ID NO: 572556 - DNA, 100 bp, Homo sapiens
actacgtctcttatcgtcgaaatgaatttgtcctgatgaagctgccgaagtatgcattgccaaagtccggttccagttgttggcaaaggagaggaagagg

SEQ ID NO: 572557 - DNA, 51 bp, Homo sapiens
ctccaagacctcatcaacaattaagagatgtgctccggcatctattcgcct

SEQ ID NO: 572558 - DNA, 100 bp, Homo sapiens
cgaagaagaaaggattcgttacagccagagattgcaattctgtggtgttcttggtcacacatttatggagtttctgaagggcagtggagattactgccag

SEQ ID NO: 572559 - DNA, 100 bp, Homo sapiens
ggcctcctctgtgagcagcaggcccagtcggacaggactagagatggccacatgaacacagacacgcagggagaaggcagccgtgtgaaggagtcggaga

SEQ ID NO: 572560 - DNA, 142 bp, Homo sapiens
cggcagacctgctccacgctctcgggcctcctctgggagctcattaggaccatggtggatcgggcagaggcgcggaaggtgctctaccagcgtgcacccaggaatatccaccgccatgtgatcctctctgagatcaaggaag

SEQ ID NO: 572561 - DNA, 100 bp, Homo sapiens
ccgagaccgtgaccgagagcgtgaccgagagcgcgaatatcgtcatcgttagaaggaagcagacagtatgagcatgaccagtggagaaggtactagtcaa

SEQ ID NO: 572562 - DNA, 50 bp, Homo sapiens
tccaatgtagtgatgaagaatgatacactctgtgcagttttagagagaga

SEQ ID NO: 572563 - DNA, 101 bp, Homo sapiens
tgctgaactggggccgcctgcggaagaagtgcccgtccacgcacagcgaggaggttccagcaacagatagaaatgctttaagttcactctggggaaagctg

SEQ ID NO: 572564 - DNA, 75 bp, Homo sapiens
tactgtaaatgggaaggacaggcagagctaaacaagttatttctcaaactctgaggctgcggagttcacacattg

SEQ ID NO: 572565 - DNA, 82 bp, Homo sapiens
aaggagaaaaaagacagaggagtgacgagggtacaggtttgcagattccgccagcagcacagcaagctctacagatgagtgg

SEQ ID NO: 572566 - DNA, 75 bp, Homo sapiens
tgaacactctgtgcagcgagttacatgttgagccatttcagtttggatttaggtggcgagtagaaaaagaagtaa

SEQ ID NO: 572567 - DNA, 98 bp, Homo sapiens
tgggaaggtctatgtcagcacgcagaaggtttgaggagcattgcttctcatacagtaaggttcagccgtctgtatatctccccagatacctgaaactg

SEQ ID NO: 572568 - DNA, 100 bp, Homo sapiens
atcgatctgcaattctacacaattgttgggcagctatgaatgacaacttaattcagtgcacaaatgagatgaatgtgaacatcccacagttggcagacag

SEQ ID NO: 572569 - DNA, 83 bp, Homo sapiens
ccgctcagtccttccaccggaagtgtccgatcggaatcagccctgtccgagaggttttaaaatcaaagatgggaaaatcggag

SEQ ID NO: 572570 - DNA, 97 bp, Homo sapiens
ccgaggacggggacagcgacgacgcggaggcagagaagggaacgcccggcccagcccccgaatgacaacagagctgctcaaggcgggaactctgagc

SEQ ID NO: 572571 - DNA, 75 bp, Homo sapiens
cctcgacgtcttgcctgtgtcccacttgttcgcggcctatagcaatttcctgatcaaattgtaggatttgttcct

SEQ ID NO: 572572 - DNA, 100 bp, Homo sapiens
gtgcccaggtacttacaataacaagttggactgaacacattgtatctcaggaattaagaatttttcctaaaagaagtccatccgaaaaataatttgggag

SEQ ID NO: 572573 - DNA, 100 bp, Homo sapiens
gtgtgtggcagcaaggagcccgcagagccaaagtggaacaggtgaagttcgatgccacatccatgcatgtcaagcctcaggtggctgcccagcagaagat

SEQ ID NO: 572574 - DNA, 108 bp, Homo sapiens
cggctttggaagccgtgcggagcgagttacgagaattcccggccgctgcaagggatacctactggagcaggatttcccaggcatgaggattggtccggagcccaccac

SEQ ID NO: 572575 - DNA, 83 bp, Homo sapiens
tcaacaagtacatcctggacaagcaacacaggaaagtgttggataaaggaaaacctgaagatgtgatgccatctgttaagggg

SEQ ID NO: 572576 - DNA, 100 bp, Homo sapiens
ccacccctgattggacagtctcatcaagaaggcccaggctgcaagcacaaaggaagtttgctcagtctcagccgaatagtcccagcacaactccagtaaa

SEQ ID NO: 572577 - DNA, 75 bp, Homo sapiens
aaagggcaaagtttacttcagaggttctctattctcatgaaaaggtgaaaatggaaggcactatttctcaacaaa

SEQ ID NO: 572578 - DNA, 108 bp, Homo sapiens
gcaagcagttcagaagagccaaggaataaacatgcaatgaacccaaaaggtacataccgagcatcaaatattaaggcacccggagaacagacagtaccagccttgaac

SEQ ID NO: 572579 - DNA, 96 bp, Homo sapiens
tataggacatgctgtaatatggatcaccgccatgatggttgactacagacaaaaagctgctgcagcaggtagaattcccacaaactatctgagaag

SEQ ID NO: 572580 - DNA, 74 bp, Homo sapiens
gtttttggttgggacgcagtctcttaaatatgataatcagatccgatcacataggacagtatgcaccttaagat

SEQ ID NO: 572581 - DNA, 80 bp, Homo sapiens
gttgtctgtctttaaggacagactgtatgaactggacatctcgttccctcccaggtttcttggcgatctcacaacagaag

SEQ ID NO: 572582 - DNA, 100 bp, Homo sapiens
ctctggtctccaactagtattatgagaggagtcaatcagagatgcaaccttaaaatcagtgacaagaaacattccaaacaagcaacagtcttcaagaaat

SEQ ID NO: 572583 - DNA, 96 bp, Homo sapiens
ggaaccctgaagccctgggaatggctcctagtacttcaggttgaaatcacaaagattagacacctttttagataggtgttcttcagcaccactgac

SEQ ID NO: 572584 - DNA, 74 bp, Homo sapiens
tgaattgctttttaacacaattcaggcagctgacattgataccagttgatgatgttcagggatgtggctgtaga

SEQ ID NO: 572585 - DNA, 50 bp, Homo sapiens
ttgtcacctcgaattgagcaggttatgtaccgaaggactctaccgtgtca

SEQ ID NO: 572586 - DNA, 75 bp, Homo sapiens
agaacagttaatcctcaatttaagcctgatctaacccctagaaacaggaatatgatgaaccaatcttgaaacacc

SEQ ID NO: 572587 - DNA, 75 bp, Homo sapiens
tgaggacttaaatgaagccactgattagcaatttaaagatcctctccaagtctcagaccagtatccttcaggggt

SEQ ID NO: 572588 - DNA, 82 bp, Homo sapiens
tcaatatctgtcttcggtggactccttcggcagtccacccaccgccgccgcctcccaggaaactagcagagttgttcacatc

SEQ ID NO: 572589 - DNA, 100 bp, Homo sapiens
tgaaaaagctcaaaatgaggaaattctgtatgttcttcgccattatattcaggagccaaaaacctgtatatcatctccgtgaaggggatcaagggacggc

SEQ ID NO: 572590 - DNA, 98 bp, Homo sapiens
ccacacaaggtggatggaagagttgtggaaccaaagagagctgtctccagagaagaggtagatgacttctttgagcaagagaagaacttccttattaa

SEQ ID NO: 572591 - DNA, 101 bp, Homo sapiens
cttccagcagttcccagaaggactcttctatgaggttcagaaaatggtcttgcacagaagcatcgaacacctcgccgacgatgtcagcagcccaaaatgct

SEQ ID NO: 572592 - DNA, 87 bp, Homo sapiens
gacgtggatgtgctgttactgctttctaactctgcctactacgtggcctaattactgacagccctgtcctaggagcacaacgtccga

SEQ ID NO: 572593 - DNA, 83 bp, Homo sapiens
gccagatgtacatcaaggcctccggcagctatgcagtgttcagcctgcaggacctctgctgccgggccatcgtctcctgcacc

SEQ ID NO: 572594 - DNA, 100 bp, Homo sapiens
gagagaccaaagatcttgatgagcccgagggcaacatccttcgagaccggttcaagagcttccagaggaggaatatgatcgagcctcgagagagagccaa

SEQ ID NO: 572595 - DNA, 51 bp, Homo sapiens
ctctgcgggagatcatccgtcggctggagagaccatttgtttgtgactatg

SEQ ID NO: 572596 - DNA, 100 bp, Homo sapiens
acatccaggagagaatgctgacagtcctgcagaatcagacacaagtttggcagaaggaagtgtcagctgcttagatgaaagtcttggacataacagcaac

SEQ ID NO: 572597 - DNA, 142 bp, Homo sapiens
gaacagcctggacgccagcaggccagccggcctctcgcccacactgaccccgggggagcggcagcagcatcacaggacatggccccctcagccacctagctggggcccatctaggagtggcatcttttttggtgccctgaag

SEQ ID NO: 572598 - DNA, 83 bp, Homo sapiens
gctgtggggcaatccgggcttgcagacgaggtcagggaagtcaaagatgcatccctgagttcttcctagcaggcaagcagccg

SEQ ID NO: 572599 - DNA, 75 bp, Homo sapiens
aggcagaagaaatcttggagaagggtctaaagcttgacccatcttatcaccgtcttctctggcactcagtatttg

SEQ ID NO: 572600 - DNA, 100 bp, Homo sapiens
gtgcaccgtcggcaacctgcttcctggaaccgtgtatcgcttccgggtgagggctctgaatgatggaggggttcagtgtatctttgcctgcctacatcaa

SEQ ID NO: 572601 - DNA, 100 bp, Homo sapiens
ctggaatgtgtaaccaatatttccttggcaaatataattagacaactaagtagcctaaataccatgtttgtgtggaagtgccccgtgtttgctatgccga

SEQ ID NO: 572602 - DNA, 83 bp, Homo sapiens
tgacatttaattttagggtcctttatatagaagggagagtaggtctggtgtggcagatgtggatagctggaccctcctgggtg

SEQ ID NO: 572603 - DNA, 97 bp, Homo sapiens
tgttcctgctgcagcagcccctggcgccctcgggcctcacgctgaagtccgaggcccttcgcaactggcaagctggtggcgcggtggcgttctcccc

SEQ ID NO: 572604 - DNA, 50 bp, Homo sapiens
ctgtgacctgccccttctctttacgttcttgatcaatatgaacgagaagg

SEQ ID NO: 572605 - DNA, 90 bp, Homo sapiens
ctgggaaatccaaaaagaaaaaaaagaaaaagaagaagcaaggtgaagataactctactgcacaggaatacgtcgcctacagccacacgg

SEQ ID NO: 572606 - DNA, 74 bp, Homo sapiens
cacgggcttcaccttcaaatacagggagtgcctgcagcaccccggcggggccaccccagtctgcgtgtacacga

SEQ ID NO: 572607 - DNA, 82 bp, Homo sapiens
gaaagactcagatggttattaatacgttttagcggcagttgtgaaaaacttcaggacaaaaatgtttcatttaaggacttgt

SEQ ID NO: 572608 - DNA, 98 bp, Homo sapiens
agatttgatggccttcacaatccaagttccacaatatattgactactgccacaattccggatctcatagatcagaacatactggagcctgtaacccgt

SEQ ID NO: 572609 - DNA, 100 bp, Homo sapiens
cagagagatacgccagttccagcagacttcctacagaatagatcatcagccaaaggaaattcagtgaacattatcactccttgtgtaaagcagtgcatca

SEQ ID NO: 572610 - DNA, 100 bp, Homo sapiens
cacaaatgctccttctcctggagacgcaactcaaggctgaccggttccctgatgtgttacctgcttctgctactgatccaaactgcagaacttctcattc

SEQ ID NO: 572611 - DNA, 90 bp, Homo sapiens
aataaaagagacctctacttagctcagcaattcttaccttttacatggacacagaacagtatgaagaagcagtacgagactatgaaaaag

SEQ ID NO: 572612 - DNA, 82 bp, Homo sapiens
cttggagttttacagggaacatgtcaagccactcttcaatatggaagataaggttgatcgggatcgagatcttctcattcag

SEQ ID NO: 572613 - DNA, 97 bp, Homo sapiens
ccgctgccgccggtgatctacaccatggagaacaagcccatcgtcacctattagtgatgatgaaccaggttatgaccttgatttattttgcatacct

SEQ ID NO: 572614 - DNA, 90 bp, Homo sapiens
aggaggagggctggttccggctgcagcccgaccagtccaagagccggcggcatgacgatgctacctgggcgatgccttccgctgtgccag

SEQ ID NO: 572615 - DNA, 88 bp, Homo sapiens
cggaggaactttcttaatagaacatcactgttaaccctagagggcccttatattctcaagaccgaatccttcaagccatgggaaacat

SEQ ID NO: 572616 - DNA, 82 bp, Homo sapiens
gaggaggcagaagatttctggccagtggagagaggaattcctcaagacaccattccagtcctcatcaccgggggcatcgtgg

SEQ ID NO: 572617 - DNA, 100 bp, Homo sapiens
tcgaaagcgttggagaggtgttaccggaacggcggcgacaagggtgttcccgaactagagtgggatttaaaccggatgaggagtgaattgctggtgcctg

SEQ ID NO: 572618 - DNA, 97 bp, Homo sapiens
gctgaaaatctttgtcgtctgcatctgaggctgtggccaggccagctgggctcggggagcgccagcctgagaggagcgcgtgagcgtcgcgggagcc

SEQ ID NO: 572619 - DNA, 100 bp, Homo sapiens
cccagatatagccgttggtacaaagatcatgatgctgccgccaccgccgccaccacggagcgagaagcccagatagacgccccggcggccccgggtcctg

SEQ ID NO: 572620 - DNA, 124 bp, Homo sapiens
aaggaccaagggacggggcgttcccaggtgggagcctggagggcaaagcgtggtgcgagcaggtgcagtgcccgccacaggcttcctgaggcaaagcggcatcggtttggattcccgaggcttc

SEQ ID NO: 572621 - DNA, 74 bp, Homo sapiens
gagtggaagttcccgccccggagagcggcgaggcggcagccacaggttctctacttaaaagacaatgactactg

SEQ ID NO: 572622 - DNA, 96 bp, Homo sapiens
ccgtggacagcaacatttcccacaggacacgaagtttgtcggcccttgccttggcagagctgagatgaagatgacgccaacagactcggggagaag

SEQ ID NO: 572623 - DNA, 104 bp, Homo sapiens
ggcggatgccctgcagtacctgcagaaggtctctggagacatcttcagcagggggatatgagactttctactcggaatatcctgagtgttgcgtggatgtaaaa

SEQ ID NO: 572624 - DNA, 76 bp, Homo sapiens
gggaaggtgcggggagcggagccatggcctccggttgacaatggtctccaggatggtctctaccatgctatctggc

SEQ ID NO: 572625 - DNA, 75 bp, Homo sapiens
ctgatcggaggcttcgcaggtctcacctcgacggtgatttgcaggtgttacagaatgtctgaaggggacagtgtg

SEQ ID NO: 572626 - DNA, 100 bp, Homo sapiens
tgaacctgaagattaaaactgaagatttcctctggaagctaccacatgcaaacatacaagcagtctcacctcaggtgactgaaaactcctgaggcatttc

SEQ ID NO: 572627 - DNA, 98 bp, Homo sapiens
agggcacctgagcggctggagagcctgttggagaaacacaaagagctctcgctttggccatggagcgggatggctccagtggaggagtgatccgcctg

SEQ ID NO: 572628 - DNA, 88 bp, Homo sapiens
tacagccgctcgtcagactccagcagccaagatggtgaagcagatcgagagcaagacacagctgccacagcagaaactgcagctgcag

SEQ ID NO: 572629 - DNA, 50 bp, Homo sapiens
agcagattgcttctgtcatgaagcctttgtttagtaccagtcactctttt

SEQ ID NO: 572630 - DNA, 119 bp, Homo sapiens
agcaggtctggtgtgctggtgtttggggcacgtccagcctctttggagttggtagctggcagtgttgtgatggcttttgaagaagtatgcccggacagaatagatctgattcataaaaa

SEQ ID NO: 572631 - DNA, 75 bp, Homo sapiens
gaaatgccatgaacatgcaagaaacatatactgcttacctcattgaaacaaggttttcttctggaggcaaaaaat

SEQ ID NO: 572632 - DNA, 90 bp, Homo sapiens
cgggagagggggagtgcgcggcggccgcagctgccacaaaccagatgccacttcaaatgaacaacaagagcttttctgtcagaagttgca

SEQ ID NO: 572633 - DNA, 50 bp, Homo sapiens
ctagcggcgcggcgctcgctcctacggagaaaaacctttcaagtgcgatg

SEQ ID NO: 572634 - DNA, 82 bp, Homo sapiens
aagaccgtgctcatctcccgactcaagcaggcgtgtgctcgcccactgatatcggtgtactccgaaaagggggagtcatctg

SEQ ID NO: 572635 - DNA, 50 bp, Homo sapiens
cattgcagttgcgtgttgttcagaaagaggtggtagcccagtggtgcaca

SEQ ID NO: 572636 - DNA, 97 bp, Homo sapiens
ccacccagaagcaggagccacactcactcagtctgctccatctggacacaagcatctgacggtagaagagttatttggaacctctttgccaaaggaa

SEQ ID NO: 572637 - DNA, 82 bp, Homo sapiens
acggtttcgccggcagtctcgaccatcatcaaagaggggatgctgaccaaacagaacaattcattccagcgatcaaaaagga

SEQ ID NO: 572638 - DNA, 80 bp, Homo sapiens
gcccgccccagccccggccccagaagagtggctggacattctggggctctgtacacatatgaagatggctccgatgacct

SEQ ID NO: 572639 - DNA, 100 bp, Homo sapiens
gtcagaaggatgactatgtcttcagaaatgcaatcacagacgtcacaaggtttttacagaaagtgactgagaccgaagatgatagtgatagtgacagcga

SEQ ID NO: 572640 - DNA, 90 bp, Homo sapiens
gggctgcggcgcacgccttgcccgcccagattcgacggaggcgccttgcacgacttgctggtggacagacctctcagccaaccaccccac

SEQ ID NO: 572641 - DNA, 100 bp, Homo sapiens
cttaatctttgcaagcatttacaagattcttcatcttttagggaaagatagtgttcagttgctgggtctttacggaataaaggatgatgtcttccttagt

SEQ ID NO: 572642 - DNA, 100 bp, Homo sapiens
gagagtccgagagctatttcccgcaccaatgagaatgacccggacttctgtaacgataagagttatatttcagaagagacaagagtacttctgttaacag

SEQ ID NO: 572643 - DNA, 100 bp, Homo sapiens
agaacacatagcatttgtgacggagagcatttgggtacaaagtgagaatttacagagatcatcctcttcagaaacagatgcctggtgtgcaggagtatat

SEQ ID NO: 572644 - DNA, 50 bp, Homo sapiens
ggggcgcccagctgccaacaccaagctagaggaagcagagcactttgcca

SEQ ID NO: 572645 - DNA, 83 bp, Homo sapiens
tggcgccaccgcctcatgcactgtgtagctgtttttggaaggaagaaagatggaaagcggtgcagttctgctggaatccaaat

SEQ ID NO: 572646 - DNA, 98 bp, Homo sapiens
cccgtcgccacccgcgtacccggcgcagccagagccaccagcgcagcgctgccatggagcccagcagcaaggtactccaaagattcaggtttactcac

SEQ ID NO: 572647 - DNA, 83 bp, Homo sapiens
ccaaaatcagagctggaacctgaggagagaggcgatttgctgacctctctgaggctgccaaccggaacaatgacgccctgcgc

SEQ ID NO: 572648 - DNA, 50 bp, Homo sapiens
tgaggcctccccagccatgcagaacttaaaaaagcacgcttagattggaa

SEQ ID NO: 572649 - DNA, 100 bp, Homo sapiens
ttcagacaatggatgagcaatcacaaggaatgcaagggccacctgttcctcagttccaaccacaggatgaacagagagagtggaaactgtatataattgg

SEQ ID NO: 572650 - DNA, 100 bp, Homo sapiens
gaagcttagagaatacaccaaagctgttgaatgctgtgacaagtggccataatataattgtgataatgtaataaaatcaggaaacattacctgaagcaga

SEQ ID NO: 572651 - DNA, 96 bp, Homo sapiens
ggagcttgaacccattgtcacccctccggtcccctcttgctgttggctgcacatcaggaaggctgtgatgggaatgaaggtgaaaacttggagatt

SEQ ID NO: 572652 - DNA, 76 bp, Homo sapiens
ccggtccatgttttcagcacccattgcctgaagtgttagcaccttcactccggttggatttggtctagggagtccc

SEQ ID NO: 572653 - DNA, 75 bp, Homo sapiens
tatcgggagcaggaaagccagtgttgtggaccctagcacagagtaagactttgaccccgacgcaggcttcagtga

SEQ ID NO: 572654 - DNA, 99 bp, Homo sapiens
cacctctgagaagggagacgacgctgctgggtccgctgagcggggcgacccgagataacaacgaacttgatgcaagtgataggtttgccaaggtcagac

SEQ ID NO: 572655 - DNA, 98 bp, Homo sapiens
tacgccgctctgaatcttgccgccctgcactgccgcttcggtcactagtttgggtacccagaccccacctacctgacccgggtgcaagaggagctgag

SEQ ID NO: 572656 - DNA, 100 bp, Homo sapiens
aagggcctgaaggatggaactatcttatgcacctgcattaatactacattgtcaaagacaaagacgaacatgagacatgcgatatgagttttaaaaggag

SEQ ID NO: 572657 - DNA, 105 bp, Homo sapiens
atgcacacagttcatcagttctactgccctctgcctgcgaggatgtccggcttccagatcaacctcaacccgctcaaggagccactcggcttcatcaaggtcctc

SEQ ID NO: 572658 - DNA, 149 bp, Homo sapiens
cttttattcaccgcctccgaatttgcaaagaggaggaaggagggacttcttggcttctcccagcatagccccaggtgtctgacttccagcaactgctggcctgtgccagggtgcaagctgagcactggagtggagttttcctgtggaga

SEQ ID NO: 572659 - DNA, 75 bp, Homo sapiens
gtcagcatggcccaggctcctgctgacccgggcagagaagattgtgaagaggtctcttgaagtttggggtagtca

SEQ ID NO: 572660 - DNA, 82 bp, Homo sapiens
gcctggcctgcgcgccgctgcccgcgccacaggattctttctactaatccagatacttgttgaagtgctgactagtttcttg

SEQ ID NO: 572661 - DNA, 75 bp, Homo sapiens
accaattatgggagggctggccaacttctgctacagacgactcagttcctaaagagaaagatgaaatggtagagc

SEQ ID NO: 572662 - DNA, 115 bp, Homo sapiens
acacgtccggcagttgcaggagcggatggagttgctgcaggcagagggagccacagacttcccagactcccggccagccatcgaggacctcaagtactgcctggagaggacggac

SEQ ID NO: 572663 - DNA, 100 bp, Homo sapiens
agtcccctgtggtgagctggaggttggagcctgaagatggcacagctctgttttttgccctgacatctcttcgtcttgtgtttttacttgcatttggctt

SEQ ID NO: 572664 - DNA, 96 bp, Homo sapiens
tccatcacccaccaacaacaccacaataatccacagccaagcatatcgcacggatgactgccatccctgggttttgccagtagtgaagaaagtgga

SEQ ID NO: 572665 - DNA, 88 bp, Homo sapiens
gccggtgctgctgcgccctgcggagctccgaacacgtgcgcgaattgaatgatctggcacgggaccctccagcacagtgttcagcagg

SEQ ID NO: 572666 - DNA, 50 bp, Homo sapiens
tccatttctcctattgaggagtcaacgtcatcatcagatttgaaatattt

SEQ ID NO: 572667 - DNA, 100 bp, Homo sapiens
agattcgcagtggtcgcttcttctccttgggtactggaagatgaaagagactatacaagggaccgggtcctgggggcctgagcctcctggacccggcata

SEQ ID NO: 572668 - DNA, 83 bp, Homo sapiens
cctgctcaagctctcttaagagattatggacagagcgggatgccaccagcttgtccaaagggaagttccaggagctcctggtg

SEQ ID NO: 572669 - DNA, 82 bp, Homo sapiens
ctcaaggtgctctacaagctacaccttcccccagggccgggactgtcacttggtgatacagctctgcagaacctggagcagc

SEQ ID NO: 572670 - DNA, 89 bp, Homo sapiens
catgaatggagcaaaatggcggatcatgtgcagaccctacagcttggggcctgggctcctctgaccatcctcattgagaaaggaaagtg

SEQ ID NO: 572671 - DNA, 100 bp, Homo sapiens
gacggttgctaattagcctgcaacaaagagttccttgctcatctaaaagaggcaatcaccgttcagatgcgcctggagaaggacaggttctctgtcaacc

SEQ ID NO: 572672 - DNA, 98 bp, Homo sapiens
taatttcagtgactggattaaaaggtgtcgaagctcagaatgtcagtatctgcagaacagtaagcgaaagagccggcctgtgagtgtaaaaacatttg

SEQ ID NO: 572673 - DNA, 90 bp, Homo sapiens
tacgacccggagcacccgacccctgataagactttgaccccgacgcaggcttcagtgattgccgcggatcagaagcctgagcactttggc

SEQ ID NO: 572674 - DNA, 82 bp, Homo sapiens
ccaggagtcatcggacgccagaatctgtgctgctcacggccgtgaactgctacagcgtgaaggccgccacccgggtccagga

SEQ ID NO: 572675 - DNA, 100 bp, Homo sapiens
actggagctggtgcagcaggaattgggatcgtgtcgctgcgggaaattgtgggaaagagaaggtactgtttctaagactctacttacttcaagggatccg

SEQ ID NO: 572676 - DNA, 100 bp, Homo sapiens
acggggccggtctgggcgtcttcagcagggcagtgaccgagtacaccttgcagggaggtgcctggaaggggtccagatgggaatgcacacaacctccgct

SEQ ID NO: 572677 - DNA, 101 bp, Homo sapiens
acgaaccatgttcaagtcaaaactgcagctgctaccatggttttgaaaagtgaggtacatgacctgcgagtagtccttcattctgctgacaaggagctttc

SEQ ID NO: 572678 - DNA, 96 bp, Homo sapiens
gttgcgaccctgggctcctggggacctgagcgttatgtctttccgcgacctccgcactggagaatgctggaggagaccttaaggatggccaccacc

SEQ ID NO: 572679 - DNA, 82 bp, Homo sapiens
ctgcttctggcctctgggcatcgcagccttctacttgtcccatgagttttcggctttgtgagaaaccttaccatcaaacacg

SEQ ID NO: 572680 - DNA, 96 bp, Homo sapiens
gcagaaaccaacagacaatgccaatttacgtgtcattatggaactacttatgaggtattatgccggctgggctgataagtaccacgggaaaaccat

SEQ ID NO: 572681 - DNA, 97 bp, Homo sapiens
aaccacattcatgggacacttctccagggtatatttacttctggcacatgggaagagaaatcagatgaaatttcctttgctgacttcaagttctcag

SEQ ID NO: 572682 - DNA, 98 bp, Homo sapiens
cgaggaggagacgtaccggctctggaaaatccgcaagaccatcatgcagcgtgagtgcatctccatccacgttggccaggctggtgtccagattggca

SEQ ID NO: 572683 - DNA, 100 bp, Homo sapiens
aaaagccacttgaagaaaagggtgaaggaggcgaattttcagttgatagaggggtctggttgctgcttacagtggtgacagtgacaatgaggaggagctg

SEQ ID NO: 572684 - DNA, 50 bp, Homo sapiens
aactaggctgctcccagaagtgaattaaacaaccaccatgtcgagcaaaa

SEQ ID NO: 572685 - DNA, 74 bp, Homo sapiens
cagctcctgcccctgtccgggggatgactgattctcctccgccagggaagtaccactgcccagtgctgtttacc

SEQ ID NO: 572686 - DNA, 75 bp, Homo sapiens
aggctccaagacctcatcaacaattaaggtgccgtgagcgatgtggagatgcaggaacactatgatgagtttttt

SEQ ID NO: 572687 - DNA, 83 bp, Homo sapiens
tatgaattggatatcaagccagagaagtgcccgaggagagttaacaggagctctttgttcaatgcctagccacctattcctac

SEQ ID NO: 572688 - DNA, 83 bp, Homo sapiens
cttgagcgccctctactcagcatggatatccaggtgctgagccaggagcagcagcctttctgaaggtgctcgggtcttcgggg

SEQ ID NO: 572689 - DNA, 73 bp, Homo sapiens
ggcgtcctccgcggccggctgcgtggtgatcgttggcaggttataaacaacttgtgaaatgagtgatttggaa

SEQ ID NO: 572690 - DNA, 76 bp, Homo sapiens
tttcatttgcgacctcatcatccagaattacatgaatgacagtcttcgaaccaatgtgtttgttcgatttcaacca

SEQ ID NO: 572691 - DNA, 74 bp, Homo sapiens
gtcatgcaaagctgtcatttgctgtcggttgttgtcgggataccagatttcctactccgagaggccccgggtcc

SEQ ID NO: 572692 - DNA, 50 bp, Homo sapiens
ggccttgccccgggagcccgcgaggaatcctcactatggatgggctcatt

SEQ ID NO: 572693 - DNA, 100 bp, Homo sapiens
cgccaacaacaagaagattgccaaggatgtcttcaagaagggggaccaggcctaccttactgaggtggtgcggagctcctgtttgacggtattaagaaac

SEQ ID NO: 572694 - DNA, 101 bp, Homo sapiens
aaccatgcctcactgtcctaggcaaggttctgccctgatgtttcctggaataatgctgaggactgcctttcgggtagccgccctattcagttcacttcatc

SEQ ID NO: 572695 - DNA, 74 bp, Homo sapiens
ttaatcctcaatttaagcctgatctaacccctagaaacaggatcagttcttaagagcagccccggtaactggag

SEQ ID NO: 572696 - DNA, 82 bp, Homo sapiens
atcgtatgtccgctatccagaacctccactctttcgatctcataggaaatgttcaacaattctgtgaaaggtcacaggaccc

SEQ ID NO: 572697 - DNA, 87 bp, Homo sapiens
gcgctcgccatggccgacgaaaagcccaaggataaaagaatcagagtgtctcaacccttgacaagaggaccaagtgcctttattcca

SEQ ID NO: 572698 - DNA, 88 bp, Homo sapiens
gagcagcagcctggctcctggtggctccagcagcaggccatggtaggggaggagtgtgtaggtgccatcgtttgcaagttggatatgc

SEQ ID NO: 572699 - DNA, 80 bp, Homo sapiens
gctactctctctttctggcctggaggctatccagcagagcgcgccagccttggaaggaatccacggcattccagtgtgtc

SEQ ID NO: 572700 - DNA, 100 bp, Homo sapiens
gctaaaaacaagactggggctgctcccatcattgatgtggtgcgatcgagaagagcaagttagtaccttgtaccaaaacatcaaccttgtggagccaaga

SEQ ID NO: 572701 - DNA, 50 bp, Homo sapiens
gcagagtgggcggcggtggtgctccagggcccacaacggcagtgtcctac

SEQ ID NO: 572702 - DNA, 75 bp, Homo sapiens
cctgagttgggagaagagctccagagagatcatcctgaacatggggtcctgtttcttgttcgagagcttctcaac

SEQ ID NO: 572703 - DNA, 98 bp, Homo sapiens
tgtggaggagatgtactgtgcttggctggaaaaccccaaaagtgtacataagtttggaaattttagcattcaggtgccaggaatgcagatgggacagc

SEQ ID NO: 572704 - DNA, 90 bp, Homo sapiens
ggaggggaccgcgcccgcctcatttgcgccttgcagcactgctggaccagggcaatgtattccaagatgcagtcttcaatcaaacagtta

SEQ ID NO: 572705 - DNA, 75 bp, Homo sapiens
gagggagcttgccttgaaggacaagaacagcgccgtcaccagcagggaaccttctgaccagcctcatgggctcct

SEQ ID NO: 572706 - DNA, 124 bp, Homo sapiens
caagttcaatagttccagctccagtttggaagagaagattgctgcgctctttgatcttgaatattatgtccatcaggttgccaacttggcctgttccatctcaaataatgaagaaggtgtaaag

SEQ ID NO: 572707 - DNA, 80 bp, Homo sapiens
atcctggtgcagctcctggtgcgtggcccagcctcagaacaatgcagatcttcgtgaagactctgactggtaagaccatc

SEQ ID NO: 572708 - DNA, 75 bp, Homo sapiens
gtcccagctcggcccgcgggggagccccgggagccgcacggagtgtggccatctggggccgtgtggtatttgcca

SEQ ID NO: 572709 - DNA, 90 bp, Homo sapiens
cgccgctgtccggagccccacagggaatgtgcagcaatcagttaaccgcaaacagagctggaaaggttctaaagaatccttagttcctca

SEQ ID NO: 572710 - DNA, 82 bp, Homo sapiens
cgagtatctggtgaagtggaaaggatggcccccaaagagcatcagatccatgctgctgctgactcggagccccacagcttgg

SEQ ID NO: 572711 - DNA, 100 bp, Homo sapiens
cgagtacgaagcgggcgtttgcgaagggttttttgattaactcaaaaccagagaatgcctgtgaacccatagtgcctccaccagtaaaagacaattcatc

SEQ ID NO: 572712 - DNA, 80 bp, Homo sapiens
gttgtcccagctcggcccgcgggggagccccgggagccgcacggaagctcttcgtgggcggtcttgactggagcacgacc

SEQ ID NO: 572713 - DNA, 96 bp, Homo sapiens
cttcccggtgtcggagcagcggctgtggcgcggcggccgcgagctgtgaaagttgtgtagatttactgtttgtgagaggagctggaaactgccctg

SEQ ID NO: 572714 - DNA, 100 bp, Homo sapiens
catctaccagatgtacttgtgcttcctgctggccgtgctgctgcaggaaagaccggcagagaccaatgccaatgtggacaactcggcgtccccctcggtg

SEQ ID NO: 572715 - DNA, 75 bp, Homo sapiens
gcccccggcccaagggcgacttctccagccgggcccgcgaagtggggctatctgatgggttagagtgcctttgag

SEQ ID NO: 572716 - DNA, 100 bp, Homo sapiens
ggaaggtggcccgctggaacaggcctggtctccaagtcctctcctaagaagcctcgtggacgtaacatcttcaaggcccttttctgctgttttcgcgccc

SEQ ID NO: 572717 - DNA, 75 bp, Homo sapiens
gcagtctaaacctgtgaccacccctgaagaaattgcacaggaagctcataaaatggtgagagaagcaaatatcaa

SEQ ID NO: 572718 - DNA, 74 bp, Homo sapiens
ttgttgacattacttttatttgaaggaacgtatattagaggtcattttaaactctcagagtgaacgtcttgata

SEQ ID NO: 572719 - DNA, 100 bp, Homo sapiens
taatgaaaaggtactgataaactgcctggttgcagcatgcttgaaatctgggatgtggaagacccttccaatgcagctaaccctcccttatgtagcgtcc

SEQ ID NO: 572720 - DNA, 100 bp, Homo sapiens
ctgcctcagcctcccgagtggctgggactacaggccatgcccctcaacccttcctctacactgaaccagtgaactatcaagctccccgcaaattcttcag

SEQ ID NO: 572721 - DNA, 78 bp, Homo sapiens
gcctatgaaagtctaatattagatggagctgtaggtaaaacttgcctactgatcagttacacaaccaatgcatttcct

SEQ ID NO: 572722 - DNA, 88 bp, Homo sapiens
tggttggaaatggcacctatggacaagtctataaggtgtaatggataggtaacagagaagacctcgtcccttcctagtcagggcatca

SEQ ID NO: 572723 - DNA, 100 bp, Homo sapiens
cccgtgtattattgtccgagtggccggaacgggagccaacatggcagcggggttcgggcgatgctgcagggaaatactcctttacaccttgctgtgatgt

SEQ ID NO: 572724 - DNA, 100 bp, Homo sapiens
atcgttgctgccttcttcgtcaagggaaatggctcattccaagactagcttttcatgggcaacccctttccatccttgccttgagaacccagcactggac

SEQ ID NO: 572725 - DNA, 100 bp, Homo sapiens
ggtgcgaggagaactactccgtgacctggtacatcgccgagttctgtcatggaaaatggaagatttgcaaaatacaaatattttacccatgtcatgatca

SEQ ID NO: 572726 - DNA, 75 bp, Homo sapiens
caaaatgtcctgtccttgtttggatccccttttgagcaggattttatagctaccttgggaaaactttcaggatta

SEQ ID NO: 572727 - DNA, 75 bp, Homo sapiens
tgtacttgcaagaaacctcaggacttgagtaacagcaacatgcttctcaaaagtgaaataagaagattggaaagg

SEQ ID NO: 572728 - DNA, 100 bp, Homo sapiens
ttcttgcttcgctgctttaccatgtttgtgacctccctctccgtgccaggacaacacctgcagtgtactggaaaggatgctgaaaacgccattcaacaga

SEQ ID NO: 572729 - DNA, 75 bp, Homo sapiens
agcttggttttggctgtcaggcccctgttctgctgatggattgaggaagtcggacgcagtggaaatggatgagat

SEQ ID NO: 572730 - DNA, 100 bp, Homo sapiens
acccgctatcctgccaactctatcgtggtcgtaggaggctgtcctgtctgcagcaggtagatgaaactcaagagaaaaggtgtggataaatgaaactagc

SEQ ID NO: 572731 - DNA, 82 bp, Homo sapiens
agtcgtcttccacttgcacgaaagctttcctaggccaaaaagagccatccgcagagccatcctgtgcaaaggaaggagctag

SEQ ID NO: 572732 - DNA, 78 bp, Homo sapiens
gtgtgccaggatacagcggagaccagtgtgaacttgaggctggctatgtggctacccccatagctatggttcaggcag

SEQ ID NO: 572733 - DNA, 95 bp, Homo sapiens
ttcgctaccatagatttatatcatttgccctctatctggcaggtacaaattctgagctgtctaacccctctgaaacggaatctgagcgtaaagac

SEQ ID NO: 572734 - DNA, 75 bp, Homo sapiens
ggctggcaagattgggatatttgagagtccaactggcactgtcacggtctagatcacattctcgatccagaggaa

SEQ ID NO: 572735 - DNA, 100 bp, Homo sapiens
ccatatgtttcttgtaaccattttaaacaaagccgtctgtagaggatcctttccccattgacagagcgggatgccaccagcttgtccaaagggaagttcc

SEQ ID NO: 572736 - DNA, 75 bp, Homo sapiens
gcaacggtggacacgtcattctgagagaaactggcgatggaatatgagaggagccctctggaaagaaaaggacag

SEQ ID NO: 572737 - DNA, 100 bp, Homo sapiens
gatgcgcaaattcactccccagtacaaagcaacaacaggagatgctggccatgaagcaccagcaggagctgctggaacaccagcggaagctggagaggca

SEQ ID NO: 572738 - DNA, 100 bp, Homo sapiens
gataactcaggatttacttgaaatgaaaggagattccaacctacttcaggtttgttggcatccaaagctgttggggttgatggtgctgaaaaaaaggaag

SEQ ID NO: 572739 - DNA, 76 bp, Homo sapiens
ctatggtgacaacagagtccatgagtatctcccaataagtcaccccagattcgttcgaaccatcccggagctgagt

SEQ ID NO: 572740 - DNA, 90 bp, Homo sapiens
ctggcagcacttccctgagccactctccaggctgctccagtactcaagggaacggctccagtgatccacaagctcagaaatacatcgcgg

SEQ ID NO: 572741 - DNA, 98 bp, Homo sapiens
aggtctggagctcgaccgggccagtaaaagcagtctgggcgcaggctggggacccagatggaattcaaacttatgcctgctctcaaggtgctcacggt

SEQ ID NO: 572742 - DNA, 99 bp, Homo sapiens
gcctgctcttccccgtgagggaagcccaggagaccaggcagctgcgctcttgacagccaggtaccagccaactcagacagtaatgccaggacaagtcat

SEQ ID NO: 572743 - DNA, 101 bp, Homo sapiens
ggatttaagcactgctgcactttatgaggtatgggcactaggaaaagacttcttccatcaagcttaattgttttgttattcatttaatgactttccctgct

SEQ ID NO: 572744 - DNA, 100 bp, Homo sapiens
gttaccctgcacagccgtcaccctcaactttcccttcaggttcgacgaggtgctttataaatcatctcaggactttcaacccaggcatatcgtcagttac

SEQ ID NO: 572745 - DNA, 98 bp, Homo sapiens
ggtgctgttcggagacctcgctgtgcaatgggatgtccaaccgcttctggggctggggccgcgaggacgacgagttctaccggcgcattaagggagct

SEQ ID NO: 572746 - DNA, 90 bp, Homo sapiens
tgctccgtggagatcgtcccgcgcctgccggaccaagaatcgccttcagccctgtctggtgcatccttggcagaaagtgaggaggaaaac

SEQ ID NO: 572747 - DNA, 75 bp, Homo sapiens
tttgatactgttgaagacttttgggcagctcccagctcctccagcagccgacaggaggcccgtcaagatgcaggc

SEQ ID NO: 572748 - DNA, 134 bp, Homo sapiens
gctgggcagttagccagcccactccaactctcggaaccatgtttgcagacttggattatgacatcgaagaggataaactatttggagcaagaggtggtggtggccttcccccgaagaaatttggtaatcctggg

SEQ ID NO: 572749 - DNA, 74 bp, Homo sapiens
agtaggagactcagaatcgaatctcttctccctccccttcttggtggatggttcctgggccaaatgggatccct

SEQ ID NO: 572750 - DNA, 50 bp, Homo sapiens
tctcggtcaccatgtggtcctcaggttttgattcccaccatggccatcac

SEQ ID NO: 572751 - DNA, 90 bp, Homo sapiens
gccttcttctaagtgggttcacccagaaaatgcagttaatgctgaagcttcattaaggagggcacaactccagatgttccgagctcagtg

SEQ ID NO: 572752 - DNA, 90 bp, Homo sapiens
cgaggagacggcggccttcgaggaggtgatgatggacatcggctccacccgggctcgattccttttgtccaaagtgaacccatctcagac

SEQ ID NO: 572753 - DNA, 87 bp, Homo sapiens
ttatcctggtcatcttctatttccaaagtatgttgcacccaggcctcctcgctggggaggcagagtcctcgcgtggtctcctgcctc

SEQ ID NO: 572754 - DNA, 75 bp, Homo sapiens
aaaaatatagaggaatcttggatccaaaaatatgacagtggaagtagtggaggaagtggaagtcgagaaaacagt

SEQ ID NO: 572755 - DNA, 75 bp, Homo sapiens
cagcctgcggagcctgtggggcaggatttgtgtacatcaatggcagaatcatccagcgaatcagatcacttccgc

SEQ ID NO: 572756 - DNA, 100 bp, Homo sapiens
gaagacttcctacctgtgctcagggaatatattttatactctgactccatgaagaccaggatgaaagagcagctgagctcagcagggagcagaacgagaa

SEQ ID NO: 572757 - DNA, 97 bp, Homo sapiens
gagtaatcgcctgctttgattcattgaaagtcacagtaatgaaaggcagtaatagaaataaggatcattcagcagaaggagaaggggttggaaaacg

SEQ ID NO: 572758 - DNA, 100 bp, Homo sapiens
gatgttaccattgtgaaagaaggttgggttcagaagaggggcccttgatgagcctccctatttgacagtgggcactgatgtgagtgctaaatacagagga

SEQ ID NO: 572759 - DNA, 75 bp, Homo sapiens
tggaaaaagttcaaaataaagcagcatcacttattcagatataattgaccctgcaatcctgcgcccgggccgcct

SEQ ID NO: 572760 - DNA, 83 bp, Homo sapiens
gcgtcgtcggcctctgggcagcaggtagaacgtcatgacatgaataccttaagcctgcccctgaacatacgccgaggggggtc

SEQ ID NO: 572761 - DNA, 100 bp, Homo sapiens
gtggaacaaaatccattattagggtttggcgctatagctattgctgtattgtgctcaggatttgcaggctttttagaccccgagaagaagcttttttctc

SEQ ID NO: 572762 - DNA, 100 bp, Homo sapiens
ggccctgctggaccagctcatgggcacggctcgggacggtatggatcctggcgggagccagtcaacccctattatgtcaatgccggctatgccctggccc

SEQ ID NO: 572763 - DNA, 100 bp, Homo sapiens
cggaggccgacaggattcgttggctgccgtccccgctgctgtgcattgggccccttcatggctgtgctctttgccaaactcgagaacatgctgcagaact

SEQ ID NO: 572764 - DNA, 100 bp, Homo sapiens
agtcaactgcgtggaagagaagccaccaaaaccctcaacaggggcatctctgagttcatcgtgatggctgcagacgccgagccactggagatcattctgc

SEQ ID NO: 572765 - DNA, 100 bp, Homo sapiens
ctcgtgctacctgccctggccctgctcagcgccagcggcactggctccgccgcccaagagtttatgcgaattccatgtgtggatgctggattgatttcac

SEQ ID NO: 572766 - DNA, 100 bp, Homo sapiens
caggtccgggctcctggacttcgcctttcccgagccctggaggtggggagaaaagatgtagaaatccctgaaaatcctgaggcatatcttaaaatgacca

SEQ ID NO: 572767 - DNA, 101 bp, Homo sapiens
tgcctgcagtttttcaccctcacgctgatgaacttgtacttcacgcagaattcaactagagggcagccttgtggatggccccgaagcaagcctgatggaac

SEQ ID NO: 572768 - DNA, 75 bp, Homo sapiens
ggtgatgatggacatcggctccacccgggttcgagaacttgtcttggacaattgcaaatcaaatgatggaaaaat

SEQ ID NO: 572769 - DNA, 75 bp, Homo sapiens
gcgtcctctggggctgcttgctgaccgctgagatgaatgccctgagaggccaggtgggtggagatgtcaatgtgg

SEQ ID NO: 572770 - DNA, 76 bp, Homo sapiens
gaccgtctactggaaatctgaatgctgttatcacccaggtgactttatacacactttgggagatgcacatatttac

SEQ ID NO: 572771 - DNA, 101 bp, Homo sapiens
cggccaatgtgggatcgatgtttcaatattggaagcgctttgatttacagcagctgcagtgagcatgtttttgaacacattaacaccgaagttctacgtgg

SEQ ID NO: 572772 - DNA, 100 bp, Homo sapiens
atactttcgaatcttcatcgccctgtggaacatcttcatgatgttctgcatgattgtacctacgtctaccagtggccctggacgctcctgctcctggctg

SEQ ID NO: 572773 - DNA, 100 bp, Homo sapiens
gaagctggccaaagcctgcccagacggctcacctgtgcgggatggaacaaaaggtgaagcaaatcatggaggaggctgtcaccaggaagtttgtgcatga

SEQ ID NO: 572774 - DNA, 100 bp, Homo sapiens
tccaacatggaccgcctgggggactcggaactgtgaatcagtggctaacctggttagaaactgctgaagaagaagaatcagaggaagaagctgactaaag

SEQ ID NO: 572775 - DNA, 80 bp, Homo sapiens
tgaagctgttgcttatggtgcaggatgaagagactcggcacagccttgagtgcatccaggccaatcagatctttcccagg

SEQ ID NO: 572776 - DNA, 100 bp, Homo sapiens
cgggcgccgggagcgagctgggagggagccgcgcgcctttgtgcgcgcgccgagagttgaagtattgataacaccaaggaactctatcacaatttgaaaa

SEQ ID NO: 572777 - DNA, 73 bp, Homo sapiens
aatgtcagtcttaagtttcagcaacaccagcaaacagtggtctgtgtgaaaatgtgtgaccctgccaaaggag

SEQ ID NO: 572778 - DNA, 75 bp, Homo sapiens
gccagttgggtatcctcctcagtatccaccgacagcattccaaggtgacgcatccaaagaagacattgacactgc

SEQ ID NO: 572779 - DNA, 75 bp, Homo sapiens
ctaatgtcacagcatggatgtaatgcctggaaagtatacaatgagtgggaacatccagttgcgggaaaacaagct

SEQ ID NO: 572780 - DNA, 75 bp, Homo sapiens
ggcggcgagcggacggctgcatttacggggtctcccggagggccagagtcgactaggactcaatgaaattgctgc

SEQ ID NO: 572781 - DNA, 100 bp, Homo sapiens
gaaacagtcctggacggcaacctcattatccgctatgatgtggaccgggccatctccgggggctccattcaggcctgctacaacttcatccgaagcatgg

SEQ ID NO: 572782 - DNA, 75 bp, Homo sapiens
agaggaagtagccaaagagcaactaactgatgctgacaccaaaggcttctggagttacagtgaatgatgaagtca

SEQ ID NO: 572783 - DNA, 96 bp, Homo sapiens
tttgacatctgtacttcaagaaagaatcatgctcatgagcatttcctggatcttggagaatccaaaaagcaacagacaaatcaacacaattatcgt

SEQ ID NO: 572784 - DNA, 82 bp, Homo sapiens
gcaggagcaacacgtgatgtgtctacttatcagggcttgggcactgtttaaaggaaagttccgagaaggcatcgacaagccg

SEQ ID NO: 572785 - DNA, 74 bp, Homo sapiens
ctcagtgcgaagaagctgcagccgcacctggccaagggaatcgggcgcctgattgctgagtgtcatctcaaccc

SEQ ID NO: 572786 - DNA, 51 bp, Homo sapiens
aagaaactgacaaaaacatttctgagagctccaaacgagaatggaagccgc

SEQ ID NO: 572787 - DNA, 100 bp, Homo sapiens
cgccagggagaaaacaaaggcggccggcctggtgcgcaaggccccgaacaacagggggtccactggacggggcctgagctacaacttcacccacctggac

SEQ ID NO: 572788 - DNA, 80 bp, Homo sapiens
cttaatgatgactggaaactctctaaagatgaggaagatgagaatgtgcctactgctcctgatcctccaagtcaacattt

SEQ ID NO: 572789 - DNA, 74 bp, Homo sapiens
gattgccaccgcaaagcctacagcaccaccagtattgccagcgtcgctgctcatgatggagcagtccaagaagt

SEQ ID NO: 572790 - DNA, 101 bp, Homo sapiens
gagtcatcctcggctccctgctgggcgggaccctggtctccgcgtacggcttcggaaccaaaaagaagcttcccagagccggggccaggagccccaagcgc

SEQ ID NO: 572791 - DNA, 100 bp, Homo sapiens
aaaaaaatgaaaacaggcaggtctgcacttgttgtaactgacacaggtgtttcaggcctcacctgaagatcatgaaaaatacggtggggatccacagaac

SEQ ID NO: 572792 - DNA, 100 bp, Homo sapiens
tggatcagaagacattcagcattgtaagaagattgctgtatcaactcaagaaagcagtaacttcactgtctttgtattttgaattgcaacaacaactttg

SEQ ID NO: 572793 - DNA, 75 bp, Homo sapiens
tgtgagtggcgatcacgagaacaataagcttcacgagaagtttgaccttctaaagcggacacaccaagaagaaaa

SEQ ID NO: 572794 - DNA, 83 bp, Homo sapiens
cgctgactgtgcccctgtggaaggaggtttggtgcacctcgatttggaggaagtagggcagggcccttatctggaaagaagtt

SEQ ID NO: 572795 - DNA, 75 bp, Homo sapiens
gccgccgcagcccaggcgcgggggcgacgacaggtggtccgtactgagaagaacagtttgaacaaccgattctta

SEQ ID NO: 572796 - DNA, 80 bp, Homo sapiens
cgaacgaccaagagggtgttcgactgctagagccgagcgaagcgtcatgaaacgagtgcgtaccgagcagattcagatgg

SEQ ID NO: 572797 - DNA, 50 bp, Homo sapiens
cgcggcggcagcagcagtgagagcagatggactgctcccccacggccagc

SEQ ID NO: 572798 - DNA, 83 bp, Homo sapiens
aagcagaaccttagcaaagaggagctgatagcggagctgcagtaaaatgtttattggaggcttgagctgggatacaagcaaaa

SEQ ID NO: 572799 - DNA, 88 bp, Homo sapiens
gcagttaatgcacgtattttaaactcccgggcctgcggacgctatgcacaggcttcctttctgtctgaccagcctgagccttacctgc

SEQ ID NO: 572800 - DNA, 75 bp, Homo sapiens
cggtgacagcgtgagaggttcgcagaacctgaaagatgtctgaaaattccagtgacagtgattcatcttgtggtt

SEQ ID NO: 572801 - DNA, 90 bp, Homo sapiens
ctttggtccaacgttgttccagcacaatcctggaggaagagaaggctcagcaagaagagcgcatgaggatggagtccagaagacaggcca

SEQ ID NO: 572802 - DNA, 51 bp, Homo sapiens
gtcagcgagggcgccgagcaacttcggagccatgtgttcacatgtcatgtg

SEQ ID NO: 572803 - DNA, 90 bp, Homo sapiens
atttacaaactggccaagaagggccttactccttcacagatcgagaacttggcaaacaaggctgacagggaccagtatgagctgctttgc

SEQ ID NO: 572804 - DNA, 100 bp, Homo sapiens
atgcaatatgatgaggatgatgatgaaatcaccccggatttgtggcaagaagcatgctggattgtaatcagttgctctatatgcaatcagtgctgtctac

SEQ ID NO: 572805 - DNA, 101 bp, Homo sapiens
tcctgagagagagaattaaagtctaactctccaaatattttgactaaaggagaagttcaagtatcagataaagacacacacaactggagcagatgtttagg

SEQ ID NO: 572806 - DNA, 50 bp, Homo sapiens
ctcctgagaagctgggattacaggttagaaccatcagagagccttgagga

SEQ ID NO: 572807 - DNA, 100 bp, Homo sapiens
aaccgtggctgctcgataaatcagacagaacagttaatcctcaatttaagcctgatctaacccctagaaacaggctaaagaacgtgccaatggaatggag

SEQ ID NO: 572808 - DNA, 88 bp, Homo sapiens
gtcatgctgccgacaccctgacggccacgaacttccgagtggatacaaagccagcctgcgtatttaacaatgtggaatattatgatgg

SEQ ID NO: 572809 - DNA, 100 bp, Homo sapiens
gcggagcaagatggcggacatctccctggacgaactcatcaggaagcgcggggcggcggcgaaaggacgactgaacccggtgcctggctcctaccccaca

SEQ ID NO: 572810 - DNA, 100 bp, Homo sapiens
gcgagggacattggaccagggtcgggggtcgcggccgctccagcgagcaatggtacaacagctccatgaacgtgatctgcacctggttgacggaccggat

SEQ ID NO: 572811 - DNA, 101 bp, Homo sapiens
cagtctttgacaagtgatgagaagctgtcggagcttcccaagattgtagaaggcatgaaacaaaaaatgtggagtattgaaaatattgccttcggttctgg

SEQ ID NO: 572812 - DNA, 98 bp, Homo sapiens
cgccactcctcccggaggcgacatggggcacccggtgtaccgcggcgagaagccccagctgcactacgcgagttggccaccctgttcaagggcttagg

SEQ ID NO: 572813 - DNA, 100 bp, Homo sapiens
cggaacagggcggcactggcccgccacagcgacgccggcgccgagggacaccgcagtatgaggcagaggttggtcaaagaaaaagtgatgtatgaaaaag

SEQ ID NO: 572814 - DNA, 95 bp, Homo sapiens
acgcagatgcccgggccgtggctctagcaggctccactaactggggctacgactctgatgggcaggttaatttggagtggcccctggagtcagtt

SEQ ID NO: 572815 - DNA, 78 bp, Homo sapiens
cgcagtctggaaagctttaggagttcacagtattaaaggatcctggtcaaataaaagaggtaaagaaaattacaatcc

SEQ ID NO: 572816 - DNA, 83 bp, Homo sapiens
tttattggatagcttggaaccacctggagaaccaggaccttccaccaatattcctgaaaatgaataactgaagtgaagtgatg

SEQ ID NO: 572817 - DNA, 50 bp, Homo sapiens
ttaatgggcggaaccgtggacacggctccttgccagaggcctccactcac

SEQ ID NO: 572818 - DNA, 88 bp, Homo sapiens
cttcaccagctcttcagatcaatatgaacaagtaagaagtttgcgacagagcactattgccaagcgttcaaatgcagcaccattaagt

SEQ ID NO: 572819 - DNA, 80 bp, Homo sapiens
agaccgctgcagccgctggctgaatcaacagtacaaattctgaagtttgtaaacttgctgatggtggtggtaagccatgg

SEQ ID NO: 572820 - DNA, 134 bp, Homo sapiens
cagctagtggagagggagaggttgaaggaacagaaaaatgagaagacaactcactgccaacttctctttgcctgaaaaatgcgactatatggatgaggtgacatatggggagctggagaaggaggaagctcagc

SEQ ID NO: 572821 - DNA, 134 bp, Homo sapiens
ggagggcccggcggcgacagcggaggcagagaggaaggcggttctgagagcttcagagagcgatggaaagcactctcctttccaattcctcggaaacaggcactgccagtggactggttttcatccttagacca

SEQ ID NO: 572822 - DNA, 75 bp, Homo sapiens
tcccggggctcaagtggcttaacaagattgtccccttggggcggaaagaagccaaggccaaggagctggtgcggc

SEQ ID NO: 572823 - DNA, 48 bp, Homo sapiens
gctattggatcagctcagcaggcaacacgggattcccatcccggtcac

SEQ ID NO: 572824 - DNA, 75 bp, Homo sapiens
ctactctttcaactacaccagccagcccgaccagatgatatcatcaagttgaatcgaaaggaagggaagaagcag

SEQ ID NO: 572825 - DNA, 100 bp, Homo sapiens
cgagccccgtcctccttcgccgccgcgcacaaccgcacgtgcagccattgagacccagagcagcagttctgaagagatagtgcccagccctccctcgcca

SEQ ID NO: 572826 - DNA, 75 bp, Homo sapiens
cttcgttgagttcgaggacccgcggtgttggaaatcaatagctcttctagcctttgcattgtttaaatataatag

SEQ ID NO: 572827 - DNA, 75 bp, Homo sapiens
tttcaatgaactgtgggattatgaagaacttggagcgtgatgcccagaagtgtgtgaactggtctgtgaccacaa

SEQ ID NO: 572828 - DNA, 76 bp, Homo sapiens
gacagaacagttaatcctcaatttaagcctgatctaacccctagaaacaggtccagagtgtcaattcttgtcatag

SEQ ID NO: 572829 - DNA, 82 bp, Homo sapiens
ttaagttccgtgaactcagtactgatgcccagtggggcattcgtcttggtaaacttggtccacccacacagaatatgcctat

SEQ ID NO: 572830 - DNA, 83 bp, Homo sapiens
atgatggcaccacaagatccccatcaatagacagcattcagaaggaccccagggaagcagctcgagagtgtcgtagaaagaag

SEQ ID NO: 572831 - DNA, 100 bp, Homo sapiens
cagcactcaagcagcaggagcagcccgcggcgaccaagatcaggaacctgccctgattgtgaagaggtctcttgaagtttggggtagtcaagaagcatta

SEQ ID NO: 572832 - DNA, 82 bp, Homo sapiens
tgccacaggaagatatggaccatcacttggtgcagtcccagaggtgaggaagaagttcactcctaacccctccgccatcttt

SEQ ID NO: 572833 - DNA, 80 bp, Homo sapiens
ctccctccagctgcgagtgcggcctcggctggcggcggcaccaggaagctcttcgtgggcggtcttgactggagcacgac

SEQ ID NO: 572834 - DNA, 48 bp, Homo sapiens
ccctccgcgggggtcccccagaggcttcaacggaccacaccaaaatgc

SEQ ID NO: 572835 - DNA, 80 bp, Homo sapiens
gttggaagcagccgatccagcctgcggagcctgtggggcaggaaaaccagtagattcccagacatcgcgaagtgaatctg

SEQ ID NO: 572836 - DNA, 76 bp, Homo sapiens
tggcactcctaggctctatcagactgacccctcgggcacataccatgcctggaagaggcacagttgaatgctgttg

SEQ ID NO: 572837 - DNA, 100 bp, Homo sapiens
gcctgtgagcttggccttggagcgaggctatcacaagctgcaccagcttctaaccgagtctgccatcatggatgttctcgcagaagcaaatggcaccttt

SEQ ID NO: 572838 - DNA, 98 bp, Homo sapiens
gtgccagcacctttcggcttctgagacggcggcagcagcggcattcaggtcccaggtgtgacaccttcagcaggtctcagggaagatggcagccctag

SEQ ID NO: 572839 - DNA, 95 bp, Homo sapiens
gggggatgacggctccctgctgttcgagtacctgcccagaggggcccactcgctgtcccgcatgcggatcctggtcactctgctgctggatacgc

SEQ ID NO: 572840 - DNA, 82 bp, Homo sapiens
ccaagtcgacgccgcaacccggggaaagcagacctgcctagagctggaacgttacctccagagcgagccctgctatgtttca

SEQ ID NO: 572841 - DNA, 100 bp, Homo sapiens
ccgtatctgcctaggcattttgctgtctcctcctaatacgatggtatagctgcatgctgggaaagaaatgcagcctggcgcctctgaaggaggagcttcg

SEQ ID NO: 572842 - DNA, 90 bp, Homo sapiens
ctcaaaccctggctccagtgtcatgggtctaaaattcccaggactccacagctttgcaccagataagcctggaggaatactaatgatgga

SEQ ID NO: 572843 - DNA, 82 bp, Homo sapiens
gcattcgcagcactgtggctgaggaagagagagaaaatccttcaaaacggagtagaattgaacgtgatatagataacaattt

SEQ ID NO: 572844 - DNA, 75 bp, Homo sapiens
ggaataacatttcttggaattggactgtgggcatggaatgaaaaagaacttagtgatttggcccgtgaccctcca

SEQ ID NO: 572845 - DNA, 100 bp, Homo sapiens
gtgacccttcacctttgatcccctgacctgcattaccttggttctgaagaaagtctccaaatacattcaagagcagaatgagaagatctatgctccacaa

SEQ ID NO: 572846 - DNA, 96 bp, Homo sapiens
aagaacaagaagtcttaccctcaggtcaaagtaatgtgcattctgccttctaatcagaagacctattatgattccattaaaaaatatttgagctca

SEQ ID NO: 572847 - DNA, 101 bp, Homo sapiens
gctttctactttgaccctttgatcaacccaatctcccataggcactcagtcaaggcccaggaagtacacgagaagctccgaggatggctgaagtccaacgt

SEQ ID NO: 572848 - DNA, 75 bp, Homo sapiens
atgaagagtttgttgaagtgggaagattggggccttctgattattttggtgtctggccagaaggatctgatggga

SEQ ID NO: 572849 - DNA, 100 bp, Homo sapiens
ggccgaggctgtggctgcggtgcagcggcagtgccaagaggaggtggcctcgctgcaggccatcctgaaagattttcgacaatgaagccaaagacgtgga

SEQ ID NO: 572850 - DNA, 80 bp, Homo sapiens
tactgacgtattcctgctgttcccagaagcgaagtggagagcgccagagtaatggttttccaagagataacttcaccaag

SEQ ID NO: 572851 - DNA, 98 bp, Homo sapiens
ttcagcgctttagcctcaggaggcagctatccaagggcagagcggcttgggtaaatccaccttaatcaacaccctcttcaaatccaaaatcagccgga

SEQ ID NO: 572852 - DNA, 76 bp, Homo sapiens
ggggaacatggcagtgcctgtgagatatggctcgtggacagcagaaaattcagtctcagcagaaaaatgccaaaaa

SEQ ID NO: 572853 - DNA, 100 bp, Homo sapiens
atgctgtaggcagttgtaacgcaatggaccacagccgctttgtcaactgtgtgcgattctctcctgatgggaacagatttgccacagccagtgctgacgg

SEQ ID NO: 572854 - DNA, 90 bp, Homo sapiens
taggaatctgcctgataatcgattgcattggcaatgagacaggtcgagtctatgctgtcttgtcaaagagagaaggtcgggtacttcaag

SEQ ID NO: 572855 - DNA, 100 bp, Homo sapiens
aacattaatcagatactgcatttaaggcaccttctaaaaatgaacaagagcagctctgatttggaaaaagtgagccagggctctgcagaaagcctcagcc

SEQ ID NO: 572856 - DNA, 98 bp, Homo sapiens
gcgccctagacatcttctccctcccttgcctcagagtcagcaagccgcttacagatgattctgaatgagattcagcctcgagatactaatgattattt

SEQ ID NO: 572857 - DNA, 82 bp, Homo sapiens
cgccgcgcacttcgtcatgttcttcgcgccctggtgtcttataagactttgacacttcctgttttgtctgaaaaaaatgtga

SEQ ID NO: 572858 - DNA, 75 bp, Homo sapiens
cggctgctggatggaggggattttgtcagcttgtcgtcaagatgttagtaggcaggaagaggcggagggagagct

SEQ ID NO: 572859 - DNA, 87 bp, Homo sapiens
gatgctgaaaacctttgggcttcatggagtcgtcttagatgttgattcaaaaaatgttatggaattcctggcacccctgaaaccagt

SEQ ID NO: 572860 - DNA, 100 bp, Homo sapiens
gctgctgaccggcctccatgctgtcgccgacatccactgcgagaactgcaagaccactttgggctggaaatatagacgtgattggcagcagatggctgat

SEQ ID NO: 572861 - DNA, 74 bp, Homo sapiens
caatgattacttcagaattaccagtgttacagatattggtgctggaaaaggcaaatactatgctgtcaattttc

SEQ ID NO: 572862 - DNA, 97 bp, Homo sapiens
gattaaaacggaatttacactgacagaagcagtggtcgaatccagtagaaaactggtcaaggaagctctgagatctgtatctgtggacctgaatgtt

SEQ ID NO: 572863 - DNA, 83 bp, Homo sapiens
gcctggtgaagctgccgttctttaatatgctggatgagctgctgaagcccaccgaattaggagggccctcctggacccgggag

SEQ ID NO: 572864 - DNA, 80 bp, Homo sapiens
ctccccaggcccgccgcctccctgccaaggctactgcagcactggggtgtcagttgttggtccgacccagaacgcttcag

SEQ ID NO: 572865 - DNA, 82 bp, Homo sapiens
gtgaaaaataccacgacaaaaccaccctaattagcaagtggacccccagatctgaggtgttgtttactgcatcagaaactac

SEQ ID NO: 572866 - DNA, 76 bp, Homo sapiens
cctggaatctgatcctccacttcagagaacaggggagtgtaacatgactgccgccccatgtgtgtgagaggcgtcc

SEQ ID NO: 572867 - DNA, 51 bp, Homo sapiens
tcaccaatggggagatacagaagcaactcctgcagtatgaccccagccagc

SEQ ID NO: 572868 - DNA, 82 bp, Homo sapiens
cgggacctggcacccgaatccggcctgccgggtttggtgcacctcgatttggaggaagtagggcagggcccttatctggaaa

SEQ ID NO: 572869 - DNA, 90 bp, Homo sapiens
gctttacgtctcattcaagaaaccgaagtgatttccagaggatttacactaaagctgtatgtgatggcttctgtgtttgtctgtctactc

SEQ ID NO: 572870 - DNA, 75 bp, Homo sapiens; identical to SEQ ID NO: 387437

SEQ ID NO: 572871 - DNA, 103 bp, Homo sapiens
ctcatctcgctcggctgcgggaaatcgggctgaagcgactgagtccgcgatggagtgcctccggagccagcgtggtggccatagacaacaagatcgaacaggc

SEQ ID NO: 572872 - DNA, 100 bp, Homo sapiens
agaagaggcagcatgcggaaggcattgctgggagcctgaaaactgtgaatggtactccaaagattcaggtttactcacgtcatccagcagagaatggaaa

SEQ ID NO: 572873 - DNA, 82 bp, Homo sapiens
atcagcagctccggcagcagtgtcctgtgctgatggtgttggcaggaaacatgccctgaactgtcacagaatgaaaccagcg

SEQ ID NO: 572874 - DNA, 98 bp, Homo sapiens
tctatatgaacaatccgtctggatcacggatgtaggaagtggtctctaattaacagaagatggcaaagcccagccacagcagctatgtccttcagcag

SEQ ID NO: 572875 - DNA, 74 bp, Homo sapiens
cagcaatatctctgggctttcacaggttgaaggggcccggccaggactcggggaagggtggcctgagagcagcg

SEQ ID NO: 572876 - DNA, 83 bp, Homo sapiens
ataatttagaactgaatgatgtggttatcaccatcccactcccaaagtgacttcagtgatgattttagtgatgattttgtaga

SEQ ID NO: 572877 - DNA, 100 bp, Homo sapiens
cccagctggggtgggcttctcctactccgatgacaagttttatgcaactaatgacactgaggtctgtgcagacttttgcagacaaatcaaaacaagaagc

SEQ ID NO: 572878 - DNA, 98 bp, Homo sapiens
ggagttgctactaaaaagagaggtgcctttatctgatgatgatgaaagttacacagatggagttttaacattgaatgcggagaacactaattatgcct

SEQ ID NO: 572879 - DNA, 76 bp, Homo sapiens
cgaacgaggaggttctggctcagatgtatcctccactcctcgctggccaccatcctgctgcccaacagaagaagct

SEQ ID NO: 572880 - DNA, 112 bp, Homo sapiens
cgccgtgaggacccccgcagccggaccacatcctccagcagcaactgtagcgccaaaaaggaaggggacacttggcattcagggacgtggccatagaattccctcaggagga

SEQ ID NO: 572881 - DNA, 100 bp, Homo sapiens
ccggactctcatgaacttgcacaacaacgaggcaggccgaaaggttcagattcagaacaagaaagtggacatctctaaggtctcctccaagtgtgggtct

SEQ ID NO: 572882 - DNA, 101 bp, Homo sapiens
cgcggccggccagccgaagatggtggcggctactcctcctgcatcaagatggtgctcatgtggaccagtggtgacgccttcaagacggcctacttcctgct

SEQ ID NO: 572883 - DNA, 99 bp, Homo sapiens
ggtgaccattgaggaattcattgagtcttgtcaaaagctttgtgtccctggtgatgttggaacattaatgatggaacatggccaaacttcagtcatgat

SEQ ID NO: 572884 - DNA, 100 bp, Homo sapiens
ctacggatgaggaaactgaggcctggagaggttaaagagacccgttcagagtcctacagtggcagccatccttcccctgcggagtatgtcgaggtgctcc

SEQ ID NO: 572885 - DNA, 101 bp, Homo sapiens
atctaggcctacgagggccccgcccagtgtcccaagtaaaggcatgacttcctggcaccacagggaaaatcgggtgcaagcccagaaactatttccccacc

SEQ ID NO: 572886 - DNA, 100 bp, Homo sapiens
agaagatattgctccatatattcaggatttgtggaactgactatatttcccacagttgcaaacttgaatagaatcaagttgaacagcaaacagtgtagaa

SEQ ID NO: 572887 - DNA, 90 bp, Homo sapiens
cccgtggctatgccttcatcgagtacgaacacgagcgagacatgcactcggagcgtgctttggacaccatgaattttgatgttataaagg

SEQ ID NO: 572888 - DNA, 100 bp, Homo sapiens
agaaagagtcaacagcagtggcaacagggttaccgtaatttctatgatcgatacaggggagactatgatcgattttacgggcgagattatgagtacaaca

SEQ ID NO: 572889 - DNA, 74 bp, Homo sapiens
tctctacagagatgtgacgctggaaaccttcaggaacctggcctcggtcgggatactcatatttatgatgcaag

SEQ ID NO: 572890 - DNA, 98 bp, Homo sapiens
caaggagtgggaagtgtacaacttccccgcaggcggcgtgggcatgggcatgtacaacaccgacgagagtacaggggctcaggtccaggtggcagggg

SEQ ID NO: 572891 - DNA, 75 bp, Homo sapiens
ctgaactgaagaagcttgggctcacttccacaaatgagccaagccgccatggcctaccacagcttcctggtggag

SEQ ID NO: 572892 - DNA, 100 bp, Homo sapiens
gtaagaagtactccagggaaacctcccagggactttgaacatgtcggggatcgccctcagcagactcgcccaggagaggaaagcatggaggaaagaccac

SEQ ID NO: 572893 - DNA, 91 bp, Homo sapiens
tgctgagctgctggagaaattggaaaagctatttctcaacgcttattttgggagaggccagccgccatgtcatgaagacactcaagaagcc

SEQ ID NO: 572894 - DNA, 83 bp, Homo sapiens
ggctggagccgcagcgggagcccccgttactaaaagatgtaactgaactgcagatccttggtgaaatatctttcaacaaatct

SEQ ID NO: 572895 - DNA, 100 bp, Homo sapiens
agatcactgtcatgaagccatagaaataacaagcgatgaccacgtgattcagaatgtcaaaactggaccaatggggccaggctgaagtattgaactttct

SEQ ID NO: 572896 - DNA, 74 bp, Homo sapiens
tgttttggttttgatatggattatacccttgctgggatcctgaaactccgccacatctggaacctgaagttgat

SEQ ID NO: 572897 - DNA, 100 bp, Homo sapiens
ttacagtggccagaggactgccaaggctccttctcaagctgcttgagtcaatgagggacttgtcttacaaggaccggcactggcatgaagcctgtttcca

SEQ ID NO: 572898 - DNA, 82 bp, Homo sapiens
cgctgccagcatcgccgccgccaggcctccaggcccaaggtcagcatcccactgtcagccatcattgaggtccgcaccacca

SEQ ID NO: 572899 - DNA, 145 bp, Homo sapiens
cagatttcaatccagtacaggaaatgatccatttgccaatatataggcatctccgaagatttattttgtcagtgatgccagaccagtttgaccaggcggttgtgctgaaccagctgcggtactcagggatgctggagactgtgag

SEQ ID NO: 572900 - DNA, 115 bp, Homo sapiens
cacatccagcagaggaggcgggggcagccgctgagacggtttttcacaagacgagctcatctgcgcctttgtttagaacgcttaaaagttctgattccactaggaccagactgca

SEQ ID NO: 572901 - DNA, 95 bp, Homo sapiens
tgcccagacggctcacctgtgcgggatggaacaaaaggggattgcagtggcaaagctaggctaggtcttggaggctggtgtaaggcgatgtgggt

SEQ ID NO: 572902 - DNA, 141 bp, Homo sapiens
gagaagaggattggaggtgtcagtgttaaaggaacctctacaacgaaggtgaagccacggaagataagatctcggcctgatggacgcctggtgtggacgatgagggaagaacgtgccccccacacccaagaggtgacccct

SEQ ID NO: 572903 - DNA, 98 bp, Homo sapiens
gtatatcaaacggcaagatgtccagtaatgtcccggcggatatgaaatcatgaccaccccaggaaaagagaactttcgcctgaaaagttacaagaaca

SEQ ID NO: 572904 - DNA, 83 bp, Homo sapiens
gactctcaaagcaataccaggatagctgttgtttcagagaaagatgaagtggctgtaattgatgaaattcaaatgattagaga

SEQ ID NO: 572905 - DNA, 102 bp, Homo sapiens
gccatcaggggccttgacaacacagagtttcaaggccttcatgccccgaggactagcagacaaacaaggacctgaggaatgtgatgcagttgctcttttaag

SEQ ID NO: 572906 - DNA, 83 bp, Homo sapiens
tatgcaggctcctgctgttcggcaggtcaatccccaaaataattacctaggaacagtacgatttggggttatcacaaataaac

SEQ ID NO: 572907 - DNA, 82 bp, Homo sapiens
ccggcgtgttcatgcccccgggaaataaggttattgacctggaaagatgttcttcacataatgggaaaaaaacaaaaacagc

SEQ ID NO: 572908 - DNA, 98 bp, Homo sapiens
ggaaaaaccacacacaccagcaagatattgacgacctcaagcggcagaatgctcttctggagcagcaagtttctccacagacactacccaaagcagtc

SEQ ID NO: 572909 - DNA, 97 bp, Homo sapiens
atcttcccgaggcccagaatccaccgtcaggcataaattgattattcctcgcccacatctgtgccaggaagccaccattcttcagagggcaatgaag

SEQ ID NO: 572910 - DNA, 83 bp, Homo sapiens
cttcggtggactccttcggcagtccacccaccgccgccgcctcccaggtccccgttctccgtgtcctgctgtccgctgacctg

SEQ ID NO: 572911 - DNA, 84 bp, Homo sapiens
ggagctggacggcgagcgcgagcggcgcgagaaagtgagccaccagctgggcagcatcatggacctcttcaccaccagcctggc

SEQ ID NO: 572912 - DNA, 100 bp, Homo sapiens
cacatctccacctcatcaggaaacagctgagacaggtgtctccagtgaaaatctgtgactttgacttgggcagtgggatgaaactgaacaactcctgtac

SEQ ID NO: 572913 - DNA, 83 bp, Homo sapiens
ggatcttgctcagtctctgtcagaggaagatcccttggttcccctccagactctttgcaccaaagctccctctgaggaagatt

SEQ ID NO: 572914 - DNA, 82 bp, Homo sapiens
cgaggggctccgggtcttccagagcgtgaagatcaagatcggtaactaggatttctacctcaaccgcgagacctatgcaagg

SEQ ID NO: 572915 - DNA, 83 bp, Homo sapiens
gcagtcggcttgtcctggctcttgccctcatcctggttctggaatcctcagttcaagccgcttacaaacacgcagatggcaag

SEQ ID NO: 572916 - DNA, 75 bp, Homo sapiens
acccccggcggcggcacgatgccctttgacttcaggaggctttatgaaggcaaagaacagatggagtttgaagaa

SEQ ID NO: 572917 - DNA, 100 bp, Homo sapiens
cggcgcacggacctgggacgcggagtcctgaagccggcggacggttttcgtacgggcggccgtgcgcgaggcgaggtattgcattcctgctgaggaggag

SEQ ID NO: 572918 - DNA, 110 bp, Homo sapiens
ctgctgctcggggtccgcgcggcctccgcggagccaggtgtcatggagaaactccagctgggcccagagattctgcagcgggaaaatccaaggcttatttatgccaggct

SEQ ID NO: 572919 - DNA, 98 bp, Homo sapiens
ggatcgcccaagagttgcggcgtattggagacgagtttaacgcttactatgcaaggagggtcatactactagatattacactggaacttcagaagcaa

SEQ ID NO: 572920 - DNA, 100 bp, Homo sapiens
gggctgaagcgactgagtccgcgatggaggtgcctttggtggttttcaaaagggaaaaagaaatcgccaggaagctggagtttgatggcctatatatcac

SEQ ID NO: 572921 - DNA, 100 bp, Homo sapiens
tttggtgtggacatctgctgccggaaggggtcccgaagccccctgcaggaactctacaacccaatccaggaatctttccctgaaattaacaaaggacgtt

SEQ ID NO: 572922 - DNA, 75 bp, Homo sapiens
acaaggagggcatgatcaacctcgtcatgtcctacgcggtttggtgcacctcgatttggaggaagtagggcaggg

SEQ ID NO: 572923 - DNA, 100 bp, Homo sapiens
ggacccagtccttcagctcgcagaagttcgtgccctcgtgaggctggcatgcaggatggcaggacagcccggccacatgccccatggagggagttccaac

SEQ ID NO: 572924 - DNA, 75 bp, Homo sapiens
tgcccgcccgggagctgtcggccccggcccgactctatcacaagaaggttcctgcacttggccatcatccatgaa

SEQ ID NO: 572925 - DNA, 82 bp, Homo sapiens
agaatcttagagctttctggatccagttcagaggattcagagaagggatcatagacggtatttctatgtaaacgaacagtcg

SEQ ID NO: 572926 - DNA, 75 bp, Homo sapiens
caggcgctcaccatgttccctggaggaccgccgggagagcctgcccacctccccaccctggacgccgggcgcgtc

SEQ ID NO: 572927 - DNA, 98 bp, Homo sapiens
agtatgaatcccacagaaaccaaggtacaccaggggttggaaaaaccacactaggcaaagaacttgcgtcaaaatcaggactgaaatacattaatgtg

SEQ ID NO: 572928 - DNA, 75 bp, Homo sapiens
ccgcgccctgctccctctcagcacctgggcggacgggcaccctcatccagcatctgaaggagcacctgctgcacg

SEQ ID NO: 572929 - DNA, 98 bp, Homo sapiens
gccgccatcgcgacggccaaaaggagcggcgcggtcttcgtggtgttcgtggcaggtgcaggaactgcagggccagcggcaggaggaggccatgaagg

SEQ ID NO: 572930 - DNA, 74 bp, Homo sapiens
acaggatcagcagggcctcatcacactgggctggattcatatctggcaccactccttctacaatgagctgcgtg

SEQ ID NO: 572931 - DNA, 75 bp, Homo sapiens
agactccagcagccaagatggtgaagcagatcgagagcaaggtctgtcagtggcccagcggaagtttgctcattc

SEQ ID NO: 572932 - DNA, 100 bp, Homo sapiens
atcactgaagatcggcgagggaggacagggggttcatcatgggaaacctcgacctgtctcccagttggttgcacagcaggttactcagcagtttgtgcct

SEQ ID NO: 572933 - DNA, 75 bp, Homo sapiens
cgaggttgtttgcaacgaccgtctggggaagaaggtccgcgttaaatgaaactcaggttgaataattcatcaaat

SEQ ID NO: 572934 - DNA, 100 bp, Homo sapiens
gttctctgctcagcacagccaaggaacagaattagaagaaaaggaaccctggcctgaggttcagggagcaagtttccgaggttggaaagaagtgacttca

SEQ ID NO: 572935 - DNA, 100 bp, Homo sapiens
gcctcagcctcctgagtagctgggactacagagttctctgtggcccatgaccttcggcctggcctgctgcgccgtggagatgatgcacatggcagcaccc

SEQ ID NO: 572936 - DNA, 80 bp, Homo sapiens
cgcacgccatgagggccctgtgggtgctgggcctctgctgcgtcctgctgaccttcggttttgacaagcttgcatcatgc

SEQ ID NO: 572937 - DNA, 99 bp, Homo sapiens
gcaggacgtgcagctcgggctcttcatggccgtcatgccgactctcatacaggcgggcgccagtgcatcttctaggaattacatgaacgacagccttcg

SEQ ID NO: 572938 - DNA, 75 bp, Homo sapiens
aaccttctgcgttgcgaagacagaatcaagctggtgccatgcctctgcaactcctcctgttgctgatcctactgg

SEQ ID NO: 572939 - DNA, 82 bp, Homo sapiens
gccggacgtgtccgcgaagatggcgggccggcattttgaaagcgaagcagaagccgtagaatcagcggcgagcctgttgaaa

SEQ ID NO: 572940 - DNA, 82 bp, Homo sapiens
ttacagccaagatggtgctgtcccagagacaacgagatgaactagatgcagaggatgctatttatggaagaaatggttatga

SEQ ID NO: 572941 - DNA, 83 bp, Homo sapiens
gccaaggaaaaactggagagcttcatcaaaaatagtgatagctttgataagccgtttgagcaaggaagacattgaacgtatgg

SEQ ID NO: 572942 - DNA, 101 bp, Homo sapiens
tggaccacatgttcctgagcttgagatgctaggaagacttggatgggcctttgggtccccgaggattagctgaagctacagagatgtgcactcaagagtgc

SEQ ID NO: 572943 - DNA, 75 bp, Homo sapiens
ttacactgctgcataatggagaacctctctacattccagtaacccaggttatgatggagggtggtcgcagcaaag

SEQ ID NO: 572944 - DNA, 75 bp, Homo sapiens
cgcagaaggactgcctcactgagcaaccaagatctctgctggatgaaccgaatcctaacagtccagccaatagcc

SEQ ID NO: 572945 - DNA, 71 bp, Homo sapiens
ggcatgcggtgtactggaacagctccaaccagcatgccggatggagtgctgtgatgtgccagccgagacac

SEQ ID NO: 572946 - DNA, 100 bp, Homo sapiens
tgcaggactccaagatttacttccttccctttccagcagaattacctgagacgacaaagagattgttctgaagaccgtgctctaagggcatttgaaagac

SEQ ID NO: 572947 - DNA, 88 bp, Homo sapiens
ggagtcagatgcagggacccaggacaagggctcgcctaggcctgtatgaactcaatctcaccaccgatagccctgccaccacgggagc

SEQ ID NO: 572948 - DNA, 100 bp, Homo sapiens
ggtggaagtggttggaaatggcacctatggacaagtctataagctcttagaacaagctctggtgattgaggaacagctgcgccgggctgcttacttgaac

SEQ ID NO: 572949 - DNA, 90 bp, Homo sapiens
ccagcacaaactgacctgcttcagagttaaacatgaagtttctggagagacagtggtatttcaagggggagctcttggcaaaacaccaga

SEQ ID NO: 572950 - DNA, 100 bp, Homo sapiens
gtttgcttcagagtttgaggaagatgttggattgttaaataaagcagctccagtttcagggcttcctcagccgccgcctcaagggctccatcaagcgcac

SEQ ID NO: 572951 - DNA, 80 bp, Homo sapiens
cctctgtcctggatgtaaaaacagtatcccatattgcattgcaacaaggagttgaagccaaacagccaaattctgccatt

SEQ ID NO: 572952 - DNA, 80 bp, Homo sapiens
aaggagttgagaatgacctaagctatcagaatatagggatattccaatgcctttagttagctcaggagtagagcatggta

SEQ ID NO: 572953 - DNA, 98 bp, Homo sapiens
ggcaggagacgaagagcccgggcggcgctcgtacttctggccactgggcgagcgtctggcaggttgctcaagaaacagatgtgagagcccagattcgt

SEQ ID NO: 572954 - DNA, 90 bp, Homo sapiens
tgatgcaatcaaagctcgacttctcaatcccaagtggccaaagcactttcagaccatgctgaagtctaaattgaatgtcttaacactgaa

SEQ ID NO: 572955 - DNA, 82 bp, Homo sapiens
gccgtgttgctgatcgcctgggtggttgttggcgtgtccctgcagcgaaggatcctgatcgcagacctcggccttgcctcct

SEQ ID NO: 572956 - DNA, 96 bp, Homo sapiens
agggagaaccccttggatatcgccaggatgattgttcagattccattctgtggggaaattgactgtgaggactggatcaaaaagaccactgccagg

SEQ ID NO: 572957 - DNA, 50 bp, Homo sapiens
gaggcctccccagccatgtggaactaaccactctgaagcccctgactgtg

SEQ ID NO: 572958 - DNA, 90 bp, Homo sapiens
gaggaacagaagcggaacagccacagcagcctcccaaggagtctgcaagttgggcaactacactttccaatgcagtgtcttccctggcaa

SEQ ID NO: 572959 - DNA, 125 bp, Homo sapiens
ctcggcgccgccaaacagcccagctcgcgcttcagcgtcccggcgccgtcgcgccactcctccgagtgcaattaaaaactagcatttctagtcagtatgtaattcggatgcagccgactaataga

SEQ ID NO: 572960 - DNA, 100 bp, Homo sapiens
aagaaatgatggaaggagaaacaaacttcagctctgaaatagaagatcttgcaaggggcgatgccagtccctccactccagaggagaacgaaaccacgac

SEQ ID NO: 572961 - DNA, 50 bp, Homo sapiens
ttggagacggacttgcttccgcacacttttgttgcacagccaggtctctc

SEQ ID NO: 572962 - DNA, 82 bp, Homo sapiens
cgcacctttgccgtgtacctcaatagcactggctaccggacagagggtgatgagactggtgtgatggataatcttctagaag

SEQ ID NO: 572963 - DNA, 98 bp, Homo sapiens
cccataggaatctgacttcctccagtctgaatgacatttctgataaaccggagaaggaccagccaagagtcgaagctaaaccagaagttcaatctcag

SEQ ID NO: 572964 - DNA, 113 bp, Homo sapiens
ctgaagaatgtgacatgaaaaaaatgcattatgtggaccctgaccatgtaaaggataggatttttgggccttggtctcatgggaagtggaatcgtctccaacttgctaaaaat

SEQ ID NO: 572965 - DNA, 51 bp, Homo sapiens
ggctggggacacacccagtatggaggactgatcctttgaaatactccagcc

SEQ ID NO: 572966 - DNA, 88 bp, Homo sapiens
cgcggaacccggcgcggcggcggcacgatggtcatggcgtatttcgtcgagaatttttggatttggacacctcccacactgagtcccc

SEQ ID NO: 572967 - DNA, 100 bp, Homo sapiens
aggacggcaagctgatcaagaacaatgcctccactgactatgacctatctgacaagagcatcaaccctctggcgccctctatcgccctggggttccgtga

SEQ ID NO: 572968 - DNA, 73 bp, Homo sapiens
ctactcccagatgcatccgtgtcatttccaggaatatggatctactggaacagcccatgctgatagtgaatat

SEQ ID NO: 572969 - DNA, 106 bp, Homo sapiens
tacagaaacaaaatgtcaacaaattgatgggatgacacagcaagaaggccctcaccagatgctgagcagatgccggcaccatgcctgtggacttcccagcctccag

SEQ ID NO: 572970 - DNA, 74 bp, Homo sapiens
gaaaagactcaggacggacaagcacagtcttcggaaggaaggaagagggaatggtttaaaatagaagacgccat

SEQ ID NO: 572971 - DNA, 96 bp, Homo sapiens
ggatccggtgtgattaaagctggttttgctggtgatcagatccccaaatactgctttccaaactagcgggagcatccaatcaacttcgagagcgta

SEQ ID NO: 572972 - DNA, 75 bp, Homo sapiens
agcctgcagatttggcacatatggggcggtcaagagaagaccccgctgggatggattggtgctgaagacatggac

SEQ ID NO: 572973 - DNA, 75 bp, Homo sapiens
aaggaaggtgatacaatgatggggcagcaagtggccaagagagaagtttgctgaggaatgccttcaagcacaaag

SEQ ID NO: 572974 - DNA, 98 bp, Homo sapiens
ggaccccgacagctgcggttggcgggcaccataggccgaagcacccggagctgccatcagtcatgctcttaaacggggactgcccagagagcctgaag

SEQ ID NO: 572975 - DNA, 87 bp, Homo sapiens
tggacatcaccccggacaggctgcagctcgtgtgcaacgcgctactggcccaggtgaccaaccacataactcgagacagggacagcg

SEQ ID NO: 572976 - DNA, 100 bp, Homo sapiens
ctgaaatgattccccactgtgtgacaagaccccaactgtaaacttgaagacaagactgaagatggagaggcactagattgtaagaagaggccggaagacg

SEQ ID NO: 572977 - DNA, 100 bp, Homo sapiens
gcctgggtccccagcatgatcctcgaccgtggctgagcatggagctgtccccccgcagtcctccggagatgctggaggagtcggattgcccgtcacccct

SEQ ID NO: 572978 - DNA, 78 bp, Homo sapiens
cacagagaaggaggaagtaatggggctgtgcataggggagcaatcagaaaacttgtaggaaagagaaagaatatagaa

SEQ ID NO: 572979 - DNA, 101 bp, Homo sapiens
ccggggtcagacgcccactccagggcaagtgtccagagaatggctgggatgaaagtacacttgaactctttttacatgaacttgcaatcatggacagcaac

SEQ ID NO: 572980 - DNA, 75 bp, Homo sapiens
agagacggctcagaagagtcagctgcaccactgcgatccctacgacagtggcactggatggaaccctattccaga

SEQ ID NO: 572981 - DNA, 109 bp, Homo sapiens
gacaatcgagtatcacggaaaggagcacaaaggaggctgaagtgggaggatcgcttgagtctggaagcttgagactgcagcaagctgtgatcgtgacactgcactccag

SEQ ID NO: 572982 - DNA, 83 bp, Homo sapiens
aactatgttatacagaagttttttgaggtttttgtcatccattggagggacactgtatgaggttggaaagcctgaaatgcaac

SEQ ID NO: 572983 - DNA, 75 bp, Homo sapiens
actgaggctgttgggccaggccagtcatgctagaaccgcatggatttaggagaatgtaccaaaatccacgacttg

SEQ ID NO: 572984 - DNA, 98 bp, Homo sapiens
agtggttgcagtgctgaaaaaatctttagaaggagcagataaacactttgtgctactctgtggggctttggaaaagcatgttaaatgtgatattaggg

SEQ ID NO: 572985 - DNA, 76 bp, Homo sapiens
gtggaattcgtgaaacttgtccgtgccaaatttcctgaacacaccattatggccaacgcagacccgtcagtgataa

SEQ ID NO: 572986 - DNA, 97 bp, Homo sapiens
tcgtactggagcgaagagcggcctcctgaaggaggggaagggacgtgggggcggccacggcaggtacctgtggaaaagtgaaaagccactctactac

SEQ ID NO: 572987 - DNA, 89 bp, Homo sapiens
gagccctcagaatatggatggagagggcaagattcttgccaagagaattaatgtgcgtattgagcacattaagcactctaagagccgag

SEQ ID NO: 572988 - DNA, 99 bp, Homo sapiens
aaacaagggaggagaagacaagctaaaaatgattcgggaatatcggcaaatggtgatgtaaaattctcaaacaatgagatagataaaaagtacgcagcc

SEQ ID NO: 572989 - DNA, 75 bp, Homo sapiens
gcctgcagcgggagctggacggcgagcgcgagcggcgcgagaaaacacttggcatttcacctgaagaaaaatttg

SEQ ID NO: 572990 - DNA, 88 bp, Homo sapiens
ctgcataaaagagaggccaaagagccagagcaacaggcgtcctgcctctgcggctctgccccctgcatcctgtgcagctgctgccccg

SEQ ID NO: 572991 - DNA, 100 bp, Homo sapiens
catcggcttctgcctggtgctctgcgtcctcatcgggcttatgttcgagccaagaactacatcgcgctggatgactttgtggagatcactaagaagtacg

SEQ ID NO: 572992 - DNA, 82 bp, Homo sapiens
tgggaccgtgcgcgtgcgcctgggggcaccgctgccgttccgagaccctggctgggcatccatcagcaggggtgtgctggtg

SEQ ID NO: 572993 - DNA, 100 bp, Homo sapiens
aatgtcatccttgcagacctcaacctctcaggtatggaattgtttgaagaggcattgcgtcgatgggaacaagctctgacctttcgcaatagacaggctg

SEQ ID NO: 572994 - DNA, 83 bp, Homo sapiens
ctgacggagatggtgcagaagatggaggaggtacaatgactcttcttgcttttcacctaagttgaataagcaccctgtgcact

SEQ ID NO: 572995 - DNA, 87 bp, Homo sapiens
cagttctttggaattccattcttttccttattcttctgatgtggatccaggaatccagccatcatctgaggaagcagttcatgtcgc

SEQ ID NO: 572996 - DNA, 100 bp, Homo sapiens
ggatggagagctccagtaccatgggatgccagcctggaaggttgacatgacaactgaagagatagatgctcttgttcatcgggaaatcatcagtcataat

SEQ ID NO: 572997 - DNA, 101 bp, Homo sapiens
ctccagctggccctgaggcatctgagtcaacaacggatgaaaatgaagacgacattcagtttgtcagtgcatagaatgtcaagctaaccaggcgtccgcta

SEQ ID NO: 572998 - DNA, 90 bp, Homo sapiens
gacgagcagccttcagggagcgtggagacagatttacatgagcccagaggtcatcctgtgcaggggccattcaaccaaagcagacatcta

SEQ ID NO: 572999 - DNA, 100 bp, Homo sapiens
agagttcccggacagattgaagtgctaagaggctttctaggtcggattgtttgtgctgaacgaactgtcctcttgcttcagaagccccttttgagtgtgg

SEQ ID NO: 573000 - DNA, 100 bp, Homo sapiens
gtgtccaattttgctcaacttattgtgagagtactatactggcaattgctggagaagattttgcaattgttgcttctgatactcgattgagtgaagggtt

SEQ ID NO: 573001 - DNA, 83 bp, Homo sapiens
aatgctgctgtatcctcagttgactcattcactcaggtgagggagttcaatggtcagcactttattttggaggaagcaattac

SEQ ID NO: 573002 - DNA, 75 bp, Homo sapiens
gtgaaaatgtgctgcctcgagagccgctgcaaacggggattcagcgtccgatcctttggaacagggactcacgtg

SEQ ID NO: 573003 - DNA, 75 bp, Homo sapiens
gggcttagccactcgccatggactcccagaaaatattaataaggcagcggaaagaagaaatatgaatacggctcc

SEQ ID NO: 573004 - DNA, 80 bp, Homo sapiens
caaccttgtgggatgtgaaaactctgttactgaaggccagaagcggactcctagaagaggggagcagcaaggatggaatg

SEQ ID NO: 573005 - DNA, 75 bp, Homo sapiens
gtgacgatgagccagagacctacgtggcagctgtgaaaaaagccatttccgaagtgatgccatctgcagttttgt

SEQ ID NO: 573006 - DNA, 74 bp, Homo sapiens
tgcagcgccagcagctggactatggcatctatgttatcaaccaggaagctcttcgtgggcggtcttgactggag

SEQ ID NO: 573007 - DNA, 80 bp, Homo sapiens
accttcaagcagctggtggaggacctggaccgtgtccttaccgtgacgtccaccgactgtcaacagcatctccaccctgg

SEQ ID NO: 573008 - DNA, 96 bp, Homo sapiens
ggcctggcgtgaggaccccccaatccgcgtgaggaaagaccacagcaagattctttcattcgtctcctcctagcctgggggaccaggctcgaactg

SEQ ID NO: 573009 - DNA, 99 bp, Homo sapiens
gatctggtgtaccaggcgaagctggccgagcaggctgagcgatacgacgaaagtgttgtgaagagcgaagacttttcgctcccagcttatatggatcgg

SEQ ID NO: 573010 - DNA, 75 bp, Homo sapiens
tttcttctgcatggtgggtacccccatgctgtggcacggcttcaggcatacttttttgatgcaccagagatggac

SEQ ID NO: 573011 - DNA, 75 bp, Homo sapiens
tgtttctagggaacaacacaattcgattcaccgtatggtctgtttctgtcgactgtggaccacttatgtgcgatc

SEQ ID NO: 573012 - DNA, 90 bp, Homo sapiens
caagaaatgggaaaactcgaaacagattttattagagatggacaaccgaattgttatgtactaaagaataaagatttagaacaagctttt

SEQ ID NO: 573013 - DNA, 82 bp, Homo sapiens
gccgatccagcctgcggagcctgtggggcagggaatagcatttcaaggttcagtggaggagaaccccaagagcaccaaaatg

SEQ ID NO: 573014 - DNA, 75 bp, Homo sapiens
cctctcagtcaacatctccttcgcagccgcgcaaaaaaagttgatggacggatggctacatggatgtgatggaga

SEQ ID NO: 573015 - DNA, 111 bp, Homo sapiens
ctgcttatggcggcgctggagagggggcgctgagctgttgggagtgatagattcgtgtggcctttcaaatgattgtgaagtggtggaaatggatccaaaataataagtgac

SEQ ID NO: 573016 - DNA, 83 bp, Homo sapiens
ctgcgaggcctcccgggctccgggaaaactacactggccagtcattatttagaagcaaggtccttgaatgagcgagattatcg

SEQ ID NO: 573017 - DNA, 100 bp, Homo sapiens
gccactctcttcctgtagggagcacctttcagagtccacctcgtccaatgcaggcttgtatggccgtctatgacattcctgacttactgggaggcaatgg

SEQ ID NO: 573018 - DNA, 98 bp, Homo sapiens
ctgagacctgtcaccccgactcaacgtgagacgcaccgcccggactcaccatgtaagactttgaccccgacgcaggcttcagtgattgccgcggatca

SEQ ID NO: 573019 - DNA, 80 bp, Homo sapiens
gttctgtcaacaaaatggtccacaaaccaagtgggcaaataatggcagttaaagaagccacagatgatggacataacaac

SEQ ID NO: 573020 - DNA, 51 bp, Homo sapiens
tgaagagggaagacacgcggaaacagcagctaccaagggggtgccagctgg

SEQ ID NO: 573021 - DNA, 83 bp, Homo sapiens
aattgatcgctactggagacgtgtagcacctcaccccagcatgagaccagatgtaagctctcctccatccagctcctcaacag

SEQ ID NO: 573022 - DNA, 83 bp, Homo sapiens
caagacgctggccgcgggctccatcagcatggctgaggagtgtggccatctggggccgtgtggtatttgccactcaggagaca

SEQ ID NO: 573023 - DNA, 75 bp, Homo sapiens
ctgggtggcagagaagactgaaggtacagcttcttccattgagtattctactagaccaagagacactgaagaaca

SEQ ID NO: 573024 - DNA, 100 bp, Homo sapiens
ctggagctggagctgtcggaaggtaccagcaactaaggtttcagagctgaaccctaatgcagaagtgtggggggctcctgtgttacatctggaagcaagc

SEQ ID NO: 573025 - DNA, 90 bp, Homo sapiens
ggcaaataaatacaaggtcacctaaaagaaaccagagggttgcaatggttccacagggcgatttgatgaaactgttatcgaagagagaag

SEQ ID NO: 573026 - DNA, 88 bp, Homo sapiens
cttctcctcgccttcaggatgaaagctcagggggaaaccgaggaaactggcgatggaatatgagaggagccctctggaaagaaaagga

SEQ ID NO: 573027 - DNA, 82 bp, Homo sapiens
ggaaccttatgtgacctgggggtgaagtattacagacacttagcacctgatcacttgctgcaaatatgtcatcgactaggac

SEQ ID NO: 573028 - DNA, 82 bp, Homo sapiens
ggaggtcctgccgtccatgcggaagatcgtcgccacctggatgctggagagatcgggtctctccatgttgcccaaactgatc

SEQ ID NO: 573029 - DNA, 95 bp, Homo sapiens
gctccgggtcttccagagcgtgaagatcaagatcgggggcttcgccaccttctcctcctgcttccccggcctctgcgagggcaagcctgctgccc

SEQ ID NO: 573030 - DNA, 96 bp, Homo sapiens
gtcagtttggggcatctccgcggtccggcccggggccccgggatctcggctgtccttcctcccgtctcatataatggcagcaaaggctgtagcaaa

SEQ ID NO: 573031 - DNA, 75 bp, Homo sapiens
gcggcctgtctcccagcaggagtttgacaagaacaccttggatctcagcagatgataatatcaagacacctgccg

SEQ ID NO: 573032 - DNA, 100 bp, Homo sapiens
aagcaagtgaatacgagtcagaaggaagacagtgacccgcccattcatgaaagtctcagcatagaaaatacattgtgggcaagcaccattgttgcatcag

SEQ ID NO: 573033 - DNA, 83 bp, Homo sapiens
agaaattctggaacacctatatgagggtctccccagacacccgagcacccacccgcttcgtggatgatgaggagctagcgtat

SEQ ID NO: 573034 - DNA, 80 bp, Homo sapiens
ttcattttcagtctttagaaagaagtttttcagaagaagtgaagtcaagatgaagaaccatttgcttttctggggagtcc

SEQ ID NO: 573035 - DNA, 75 bp, Homo sapiens
gtctgggatgcactcaaagccgaccgggcaggtgtctgtactggtgatgtgtcacactcgggagttggcttttca

SEQ ID NO: 573036 - DNA, 75 bp, Homo sapiens
gcccgccccccgcccccccagtctcggagatctcagaggcaccgactgggaggccagaacacaaagcgtgaatcc

SEQ ID NO: 573037 - DNA, 75 bp, Homo sapiens
gctgcaaaccgagacaagttcaccccgaagtctgccggttgaaccatgattccggtgacagagctccgctacttt

SEQ ID NO: 573038 - DNA, 78 bp, Homo sapiens
cagtggtcgcttcttctccttgggtgaaagattgtctgctggatattctccatcatatgacaaggacaagagtgttct

SEQ ID NO: 573039 - DNA, 122 bp, Homo sapiens
gggctcagaggggagtcatcatgagcgatgttaccattgtgaaagaaggttgggttcagaagagggatggaagacgtcatagcacggatgcaagatgaaaaaaatggaattcctattcgtac

SEQ ID NO: 573040 - DNA, 105 bp, Homo sapiens
gtcagtccgccgctcaccccgcggccgcaccttcccgccttctcaggattttttatcaagcagaaatgcatcgaacaacgagaatcaagatcactgagctaaatc

SEQ ID NO: 573041 - DNA, 100 bp, Homo sapiens
ttactttcccatccgtgactcctggaatgcaggaagaattttaaatcgtttctccaaagacattggacacttggatgatttgctgccgctgacgttttta

SEQ ID NO: 573042 - DNA, 82 bp, Homo sapiens
cgcagccccctcctggcgacccgcaacggaaggagagttttacatggaagtggcttacagaaacttggcgctgaggtgcagg

SEQ ID NO: 573043 - DNA, 99 bp, Homo sapiens
ctcaaagtgaaaggaccagttcgaatgcctaccaaggtgagccaatggtggcagcagaagtaggcgtatgggataactattgtgtaaagaaacagcttc

SEQ ID NO: 573044 - DNA, 100 bp, Homo sapiens
gcaggggatcccggacgtgagtccgtgcagttggtgagggccccaaggctgttgcagctcctcgacctgatcggttggtcaatcgcttgaagaatatcac

SEQ ID NO: 573045 - DNA, 100 bp, Homo sapiens
acagctttatgaaacagcttgcttcctacaggtagtggtagcagagaattttgatgaaatagtgaataatgaaaataaagatgtgctgattgaattttat

SEQ ID NO: 573046 - DNA, 76 bp, Homo sapiens
tgaaatcatctgccccagctgtaataggactgcccatccactgagacataaaatgaccatggttgacacagagatg

SEQ ID NO: 573047 - DNA, 99 bp, Homo sapiens
agctttgaaacaactgatgagagcctgaggagccattttgagcaatggggaacgctcacggactgtgtgaccggaacatgaacattttgcagtactgcc

SEQ ID NO: 573048 - DNA, 100 bp, Homo sapiens
attctatctttcctcagacatactccatagatattaatggctatattcttgtgtattctgttacatcaatcaaaagaacaccttccaccatgaccacctc

SEQ ID NO: 573049 - DNA, 51 bp, Homo sapiens
attgaatagatgtctccctattgaaccaaatctgtttcttccatgtctgag

SEQ ID NO: 573050 - DNA, 90 bp, Homo sapiens
ggcctctgtgcgggtgctgctgcccctcgcccacttcttcctgagccacgaaatgattctggggaccattctgaccacatgcattactat

SEQ ID NO: 573051 - DNA, 87 bp, Homo sapiens
ccgccgccgagacagctgcgcgggcgagcatccccacgcattgctgcagcaaacgagattgctaaggaaaggaggaagcaagatgtg

SEQ ID NO: 573052 - DNA, 100 bp, Homo sapiens
gaaaaagcccgtgaggatgcagcccgggaaagagctaggtacttttagtgtttaccaaagaagataaccaatgtaatggattctgcagggcatgtgaaaa

SEQ ID NO: 573053 - DNA, 75 bp, Homo sapiens
gacgctgctggaggaaacacctcaggacacggcctacaacaccaagagacccaacatgagtgaagtttcctgcaa

SEQ ID NO: 573054 - DNA, 82 bp, Homo sapiens
cgcagccccgcaatctgcagacctcagcggcagcgcaggtggcagacttcaagggctaccactggacccttcccctgtcttg

SEQ ID NO: 573055 - DNA, 75 bp, Homo sapiens
gtaacaccacctgagggctcttctcgcaggaggatcattcatggcacagcgagctgacttttttgaagatgaggc

SEQ ID NO: 573056 - DNA, 75 bp, Homo sapiens
cgggagccgcccggggcagggctcgggagagcggggtccccagccccaccccagccccaaaggaggctgttcgag

SEQ ID NO: 573057 - DNA, 100 bp, Homo sapiens
ctggctgctcgagcagaggcacaagcacaacaaggcctgctgcccgctggagggggtcaggccatcaccccagcagatcctgagagtgagaagcctgact

SEQ ID NO: 573058 - DNA, 88 bp, Homo sapiens
cctggacctatgaatatccagtttgagccatcggatctaagatccaaaagtctagtgagatgcccaaattaacagaacaattagcagg

SEQ ID NO: 573059 - DNA, 75 bp, Homo sapiens
cgcgcacgttggaaccgaagagagctctgttgttgcatattggtaaaggttttcaaggtgtcatgaaaagatggg

SEQ ID NO: 573060 - DNA, 100 bp, Homo sapiens
cagacatgaatacatttcccaccttcaaatttgaaggttctgggttgacaaatatcaagacggaggagatctctgaagtgaagatggatgcagaattccg

SEQ ID NO: 573061 - DNA, 82 bp, Homo sapiens
atcagaggaagacttggatcttttcatgaactcctgctggagccacccaaggacttgtttacactgggcatgtaaacgaaac

SEQ ID NO: 573062 - DNA, 50 bp, Homo sapiens
ttccaggagaagatttccagtccacttgaaccatgcaagaagcgcagcca

SEQ ID NO: 573063 - DNA, 98 bp, Homo sapiens
acgcagtgatttgctccccctcgtgcagcaacccccacacccagcaccaggatgaagtgaagctgccggccaaactgagcatcagcaaatcgctgaaa

SEQ ID NO: 573064 - DNA, 82 bp, Homo sapiens
cgagggtactaaggccgtcaccaagtacaccagcgctaagtaaacaggcttcagataacagggagcgtgcttatgaacatag

SEQ ID NO: 573065 - DNA, 98 bp, Homo sapiens
gacatggccaacatcgcggtgcagcgaatcaagcgggagttcaaggaggtgctgaagagcgaggagcttatgttcctgaggaagaattgaaggcagca

SEQ ID NO: 573066 - DNA, 97 bp, Homo sapiens
ttggtgctgtccggctagtcaccgttggtggcctgcagcatggatggctgactttaagaggtacaggtttgcagattccgccagcagcacagcaagc

SEQ ID NO: 573067 - DNA, 50 bp, Homo sapiens
cgcttcctggcggccgggtcccagatatgattgacaatctgctgtcccca

SEQ ID NO: 573068 - DNA, 96 bp, Homo sapiens
tggtggacggaggctcaaacatcgcagaggccgactgggagagtgtctccagcatcctgcaagtggtcctgatccggttccccatgcagaggaact

SEQ ID NO: 573069 - DNA, 82 bp, Homo sapiens
tgccattgaattctccaacaatggaggccagtggctggtctcagattccatcacccagcacaaggtctgtgcccctgaaaac

SEQ ID NO: 573070 - DNA, 74 bp, Homo sapiens
catcttctatttccaaagtatgttgcacccaggtaaaagtacacctgtaagccagcttggttccgcagactttc

SEQ ID NO: 573071 - DNA, 78 bp, Homo sapiens
cctaacctcgctctcgcggcctagctttacccgcccgcctgctcggcgaccagggcaagtgtccagagaatggctggg

SEQ ID NO: 573072 - DNA, 82 bp, Homo sapiens
gctcctgcggctgtatggagcgattttgcagatgaacactcgtgaaactgctcaggccatcaagggtatgcatatacgaaaa

SEQ ID NO: 573073 - DNA, 101 bp, Homo sapiens
cttatggtgaagaaggattaaaagatggtcatcagagctcccatggagacattttttcacaatttcagagacaactgtctgaaccctgccaccccttccct

SEQ ID NO: 573074 - DNA, 88 bp, Homo sapiens
gggagtcgctgggtgcgtggggctgcctcgccgcgtctcgccacggtacacatccaagcctaaagaaaaattagtctatgccattttt

SEQ ID NO: 573075 - DNA, 75 bp, Homo sapiens
cgcggagttccaggtcgagcagttaggccgcgagcgactgcggcgccgagccggacaaatgaccagttggtggcg

SEQ ID NO: 573076 - DNA, 100 bp, Homo sapiens
cagtaatggtggatgaagttgttcattgtttgtcaccacaaaaaggacaggacaacgctgtggaccgcctggcacctggggacctggggagaacacgggc

SEQ ID NO: 573077 - DNA, 97 bp, Homo sapiens
agaatataaacactttcagaggatatatcccagcaaaacaaaccgagactgcccggagagcgcgctctgcctgccgcctgcctgcctgccactgagg

SEQ ID NO: 573078 - DNA, 100 bp, Homo sapiens
tcaaccaagaattctacagatctagttgaatatgttgacaaattgagaggatccagaatccagatctctggaatagctaccaggcaaagaaaaaaactat

SEQ ID NO: 573079 - DNA, 101 bp, Homo sapiens
gctatctccacaaccaaactagaaaaggaggaagaggaagatgatggagatttgcctgtggaaatccaggatgagtcagctgtgttatggttggatgaaat

SEQ ID NO: 573080 - DNA, 74 bp, Homo sapiens
ggtgggcctctgagatatgccgtttacgggtcattatccaacttttagaggtgatggatcatctgcatagaggg

SEQ ID NO: 573081 - DNA, 74 bp, Homo sapiens
gagatcctccgaggccgcctgctcttccggaggagggtctctccaggttcatcatgcctagtggcgtataagaa

SEQ ID NO: 573082 - DNA, 50 bp, Homo sapiens
tttaggacaagaggcgttgtttttcatcacaggacatggccccctcagcc

SEQ ID NO: 573083 - DNA, 82 bp, Homo sapiens
ctccacccacagagcctcaactgccagtgtctcctgcgtgcgagggcggcactgctcacaggacggctacccatccgcaatg

SEQ ID NO: 573084 - DNA, 100 bp, Homo sapiens
gagctagtgaaaattgagccaaagcacattggagttggaatgtatcaggtatggagagaaggggaaagccatccggatcgagaaggtcatctacacgggg

SEQ ID NO: 573085 - DNA, 100 bp, Homo sapiens
catgacgcccatgcactaccacctgcgggagatcatcatctgcacctaccgccagcacacgccaaagaagatgagtcaaggacctacacttttctcttgt

SEQ ID NO: 573086 - DNA, 90 bp, Homo sapiens
aacagcctatgtgggcttccacggaggcgatcattatttcgaagttctagtattctggatcaccgtgaaggaagtggacctatagccttt

SEQ ID NO: 573087 - DNA, 90 bp, Homo sapiens
cttttaaatgctcccactgtgacaggtgtgatgaatgcagactctgctaccattttggctgtttggatcctcctttgaaaaagtctccta

SEQ ID NO: 573088 - DNA, 76 bp, Homo sapiens
acgcttagaaagagatcacatctttcgacttgaaaaaattggagctggagtgagccttccaggaattttggctgcc

SEQ ID NO: 573089 - DNA, 50 bp, Homo sapiens
tgggcaccttgcgcttcttgcagtcgatcatgagcgtcttgttgttcatc

SEQ ID NO: 573090 - DNA, 83 bp, Homo sapiens
cactgcttcccactgagatgcaagagaatccacattcatctcaatggaaggatcctgccttaagtcaacttatttgtttttgc

SEQ ID NO: 573091 - DNA, 100 bp, Homo sapiens
cgcttctcatcctggacatctggtgtaagcagtgctcctgcacgctgcactcgggggcctacaaggccacaggagagccgggcaccttcgtctgcaccag

SEQ ID NO: 573092 - DNA, 75 bp, Homo sapiens
ggttaatcaagaattctctatttctgctccgtcatccatgccactgtatataaagaacaggttttagaacctatg

SEQ ID NO: 573093 - DNA, 49 bp, Homo sapiens
ccactgaacatatctacaaaactggtcagatgacttgtctgcaaagctg

SEQ ID NO: 573094 - DNA, 88 bp, Homo sapiens
tcagctgcgctcccctaggagtgctgagcccgcggaaccgcagccatggttcatacgttttatgaagctgtggggtacatgattggtg

SEQ ID NO: 573095 - DNA, 75 bp, Homo sapiens
agagacaggaggcagtagccaaacacccaggtgaaaggtgtagcagtcactcggcctacacccacagcatcgacc

SEQ ID NO: 573096 - DNA, 88 bp, Homo sapiens
taaccatgctgttggatttgcaaggaccctgatgctcccataagacagaaaatgccccttgatgatctggatagagaagatgaagtta

SEQ ID NO: 573097 - DNA, 50 bp, Homo sapiens
gaaacatgtttcacatgtcaaaggttcaaggaaaggacccttccgtggac

SEQ ID NO: 573098 - DNA, 100 bp, Homo sapiens
aactggaaaatcatccgatcggaaaacttcgaggaattgctcaaagtgctggaggaaggcggcaaattgtggaacagatggaaaagaaccaggaggagcg

SEQ ID NO: 573099 - DNA, 50 bp, Homo sapiens
gtcagctcagatccgctacctcacccagagtttattaaccacttaacctc

SEQ ID NO: 573100 - DNA, 88 bp, Homo sapiens
aggggcttgcctgaagcgagggaaaacctcggatcaattctcagctggtggcacaacaagtggcacaacagtatgccaccccaccacc

SEQ ID NO: 573101 - DNA, 98 bp, Homo sapiens
caaagctcaccctcccgagttgaaaaaccctctctgggagatggttcaggatggcattgacctcaagagcatcaagtggacccaacactagaagaata

SEQ ID NO: 573102 - DNA, 87 bp, Homo sapiens
aggaagccgtcttcgaactcaggagaaggccatggatcatctgcagtcattcattgcagattgtgatcgtagaacagaagtggccaa

SEQ ID NO: 573103 - DNA, 98 bp, Homo sapiens
ttagatgcaagtgatgatggaatcttggccaaaatcgtgaacagctttgctgagccatcaaggtctaatggaagcatggttcggcattcttcatctcc

SEQ ID NO: 573104 - DNA, 74 bp, Homo sapiens
tgtcacactaattgccaacaacaatgggctttttggtggtgctggagttggcaagactgtactgatcatggagt

SEQ ID NO: 573105 - DNA, 97 bp, Homo sapiens
cggcgagcaggagaggaggtcttccgggccgcggcctccgagcgcgcgggatttgcaggaaatgcttccagactgcacacttttacttagaggacag

SEQ ID NO: 573106 - DNA, 98 bp, Homo sapiens
cgggatctcggctgtccttcctcccggtgactccccggacagctcaacaccaaagctttcgcgggcacagcggccgcagtcgtgcacgtcagttggca

SEQ ID NO: 573107 - DNA, 97 bp, Homo sapiens
acccagcattttcggcaaccgctgctggcagttttgccaggtgtttgttaccttgataacatccctgaggacctcagagaccctttctacgttgacc

SEQ ID NO: 573108 - DNA, 98 bp, Homo sapiens
tacaatgcaggactgctctcctactacacggttatgatgtgattgctcaagcccaatctgggactgggaaaacggccacatttgccatatcgattctg

SEQ ID NO: 573109 - DNA, 100 bp, Homo sapiens
gctgaccccttgagcagcagtcagcacagtttggatgccgacatctggaaaaagtttttgtctcgcccagccttgccatttatcctaaggctgcttcggg

SEQ ID NO: 573110 - DNA, 112 bp, Homo sapiens
agtctgaaaggcactttattatgcaggtggtctgtgaagccacacagtgtccagatacgaggagacgagttgtactgctgtcacaggaaatggacgctggattacaagcatg

SEQ ID NO: 573111 - DNA, 100 bp, Homo sapiens
cttccccaggcctgcgtccgagtctccgccgctgcgggcccgctccgacgcggaaggcaatcctttatcacaggatattctcaacttataccaggaccca

SEQ ID NO: 573112 - DNA, 87 bp, Homo sapiens
tgctttcccaagcctggaagaactcgtcatgctctttgtagcgtggtgcttctgttgctcacaggttaaacactttaagatgagaaa

SEQ ID NO: 573113 - DNA, 75 bp, Homo sapiens
gagatgacgggctttctgctgccgcccgcaagcagaggtgggatgcagatcttcgtgaagaccctgactggtaag

SEQ ID NO: 573114 - DNA, 73 bp, Homo sapiens
catgggtcgggaagcagcatatgtttcggagcaacatcccctgtcacctggttgatatctcttgcggattacc

SEQ ID NO: 573115 - DNA, 100 bp, Homo sapiens
gacttatgctggaactgggttttagcaaggccaagatcaaggctcgagatcttcgcgggaagaagaaggaggagctgctgaaacagctggacgacctgaa

SEQ ID NO: 573116 - DNA, 97 bp, Homo sapiens
aacaagattgcttgcaacaattgttatgcttgtacaggtttgcagattccgccagcagcacagcaagctctacagatgagtggctctttggcatttg

SEQ ID NO: 573117 - DNA, 83 bp, Homo sapiens
ctgaaaagtcaaaagaagtttgtattaccattttcaatagcagtataaaagagcaatacttcaagtcagctgcaatgacccta

SEQ ID NO: 573118 - DNA, 82 bp, Homo sapiens
gcatccgtaaccacaaggaggacgaggtatcacctcttctgggctcaagatggacaacaagaagcgcctggcctacgccatc

SEQ ID NO: 573119 - DNA, 87 bp, Homo sapiens
tcagtgagcaaggcatcaacgagtttctcagacagaaccaagttgtattgttagacacactggaacaagagatttcaaaatttaaag

SEQ ID NO: 573120 - DNA, 75 bp, Homo sapiens
gttcaccttgaccagaatgaccctcgtttcattggaaactgtacaaccttggaaaagcttgaagttgcagagtca

SEQ ID NO: 573121 - DNA, 90 bp, Homo sapiens
ctgatgacggcactgttagaatctgggactttcttcgttgccatgaggaaagaattctccgagtcgaggggagctgcagcgggagtcaga

SEQ ID NO: 573122 - DNA, 89 bp, Homo sapiens
caggactccaaaatggcgtcagttgggttgacgccatggtggacctgctggacctggacccactgaagaggtcgggctccatggagcag

SEQ ID NO: 573123 - DNA, 75 bp, Homo sapiens
gaagctgagggcacgtgtttgcggttcagccctttgatgaccgcagcagtacgtagagaaatcgacactcttaat

SEQ ID NO: 573124 - DNA, 80 bp, Homo sapiens
gggaacaaatactactacatcccgcagtacaagaactggagagccgtctttaaatcctgagtatgagagagaaccaaatc

SEQ ID NO: 573125 - DNA, 50 bp, Homo sapiens
ctaggggaacccgtgcggctggagagagttccaccaggtgagaagagtga

SEQ ID NO: 573126 - DNA, 75 bp, Homo sapiens
cagcactggactcatggaggctgagcatttattcaggaattgtggtgcttggaataaacagagcttatggcaaaa

SEQ ID NO: 573127 - DNA, 100 bp, Homo sapiens
ggcatgttctttgtcatgtgctcggcctttgctgcagaggaagaacttgtcgcttttcctaagcattagtttgttaattttctggggttcctcccttttg

SEQ ID NO: 573128 - DNA, 100 bp, Homo sapiens
tgaataaaaaatatccaaagctttctcgaaggtgtatggtccacgctccctgtaaatgagaagaaattaaatcttgcatttagatctgcaaggagtgtta

SEQ ID NO: 573129 - DNA, 100 bp, Homo sapiens
gggtccccaacgtgggcaagtcctccctcatcaactccctccggaggcagcacctcaggaaagagagagtctacagggagattgaacaggtgattggccc

SEQ ID NO: 573130 - DNA, 98 bp, Homo sapiens
ctcagactacctcctccactttgctggttcctgtgcctaacctcgacagttttccacctatttccctggatattttgatggtcagtactggctctggt

SEQ ID NO: 573131 - DNA, 100 bp, Homo sapiens
agttgctctcctggcttcttactcagtccatcttctgcttagtatgtgtattcagacagccccatggcctttctgtggtgctcacgtccccagcggtgtt

SEQ ID NO: 573132 - DNA, 100 bp, Homo sapiens
aaaggctccttcagtgagcaaggcatcaacgagtttctcagttgtgacttctcaccaggagatttggtttgggccaagatggagggttacccctggtggc

SEQ ID NO: 573133 - DNA, 100 bp, Homo sapiens
ggtttctgagtccagccaacagcagaagagaaagccagttatccacggactggaagatcaaaagaggagctccaaacgagaatggaagccgctggaggac

SEQ ID NO: 573134 - DNA, 98 bp, Homo sapiens
aagaccgaattcagaaggatatcgacgtcgtgatccagaagtccagagctgaggactgcctgtttgcaggctgtggatctttccattgatgagtccag

SEQ ID NO: 573135 - DNA, 115 bp, Homo sapiens
caaggaaaagatccctggaatatgaagagacacagtatggtagccacacccccagaaacctctgtagaggagcaggatgcaaccgacaggctgtggccggacagctgctgcccag

SEQ ID NO: 573136 - DNA, 100 bp, Homo sapiens
gccaggaagaaggttctcaaacaaggagtccaacctataccttctcagggaggcaaactagaaatagctggcactgtggttggccattgggctgggagca

SEQ ID NO: 573137 - DNA, 100 bp, Homo sapiens
tttccgccctaatggaggtctccagtttcgttggaggtccccctccccactaagtgcctctttgcatagcaccagtccccacccgcacgctctctggacc

SEQ ID NO: 573138 - DNA, 98 bp, Homo sapiens
tcatctcagagcatcagggtcacatggaaggtaatgaggagtacctgatcaatctgatagactctccaggacacgtggacttttcctcagaagtatca

SEQ ID NO: 573139 - DNA, 100 bp, Homo sapiens
atacagaaggctggaggaaacgtcagtttttccagggctaccagctgaagagctcctgtgggactccagccccaccaccatgggcagccccgagggccgc

SEQ ID NO: 573140 - DNA, 88 bp, Homo sapiens
aaaaagaacgacatgatgcaatcttcaggaaagtaagagggtgcgtctaatgctagtgttggcacctgttatgtgcattctctctggc

SEQ ID NO: 573141 - DNA, 75 bp, Homo sapiens
cctgaaagcattaccgggttcgctaggctcacagtgggaccctgaagatgtgaacctcgaaggcagcaaagaaaa

SEQ ID NO: 573142 - DNA, 100 bp, Homo sapiens
caacagcaccttgctgccgccgccctccaccccccaggaagtgccaggaccttccagaccaggtctcctctgagcctccggcctccataagacccaaaac

SEQ ID NO: 573143 - DNA, 100 bp, Homo sapiens
ctagaaggggaggggagtggaaaggctctcagtgaaaaagcctctctacatatgacatcgtgatcactacctatagcctcgtggccaaggagattcccac

SEQ ID NO: 573144 - DNA, 83 bp, Homo sapiens
gcgtgggggaccggctgttggcgggtctatcagccacagtctctgcaagtttccaagagcagcagaaaatgaacacattgcag

SEQ ID NO: 573145 - DNA, 75 bp, Homo sapiens
aggaagtggatgagttccacctcattttagagtatcaagcagggaactctaatgatccaggacaaagaagttacc

SEQ ID NO: 573146 - DNA, 49 bp, Homo sapiens
ggcgtctgggcagcctacgctttccgaaggagctggcaaacagccctga

SEQ ID NO: 573147 - DNA, 83 bp, Homo sapiens
ccagcatatcacgggcccggtgcggccccgtcatcagaaaacgcccactcctggatcttcacattgaactcaatggctacatg

SEQ ID NO: 573148 - DNA, 75 bp, Homo sapiens
gggcttgccctggtcttgctcggccgatgaagtgcagaggtttttttctgaatagcctaacatggcagaccagag

SEQ ID NO: 573149 - DNA, 75 bp, Homo sapiens
ccgggatggcgacgtctacactgagtcggaggcgaagcttgttctaaagacgaaggggaactccctagtgctaca

SEQ ID NO: 573150 - DNA, 83 bp, Homo sapiens
gccgccgccgccgcggccccgccagaggagaaggcagagcccccccaggctatgaatgccctgatgcggttgaaccagctgaa

SEQ ID NO: 573151 - DNA, 96 bp, Homo sapiens
cagagtctgtccaaggtggagaaaccaggatctatttggatttgccacagaatttcaagatatttgtgagcgttttcggctttgtgagaaacctta

SEQ ID NO: 573152 - DNA, 98 bp, Homo sapiens
taaaaattttcagaagcacatgtattataacagaccctgtgccatggtggcccctgacattgagctaatctgtgaaatcttgttagttgctgaaggtt

SEQ ID NO: 573153 - DNA, 83 bp, Homo sapiens
ctcagttggaagcagccgatccagcctgcggagcctgtggggcagggggagaagcgagcggacatccagctgaacagcttcgg

SEQ ID NO: 573154 - DNA, 75 bp, Homo sapiens
cgaggaggcagccaagctcgtggcctgcctctgcgtgcacatggcccatgaacatggacatgagcatggacatca

SEQ ID NO: 573155 - DNA, 83 bp, Homo sapiens
ataagatgggtctgaaatttcagagaaatatggctacacacacctttctgcaggagagctgcttcgtgatgaaaggaagaacc

SEQ ID NO: 573156 - DNA, 104 bp, Homo sapiens
aaacaccacgatgaaaagaaatacctgtgatttgctttctcggagcaaaagtatttgaaaaatgtgtgagtgctaaggaagctttggagactgatctttataag

SEQ ID NO: 573157 - DNA, 83 bp, Homo sapiens
gcagaggatccagtgttcaccatcctggccccggaaggtcctctccacccggatcctggccatgaaggcctcgctctgcaagc

SEQ ID NO: 573158 - DNA, 123 bp, Homo sapiens
aaattcctgaggcgctgggagccgcaccacctaacgctggccgacaacagcctggcgtccgccacgacaatgcagatcttcgtgaagactctgactggtaagaccatcaccctcgaggttgag

SEQ ID NO: 573159 - DNA, 100 bp, Homo sapiens
tcttagaagagtcaaatgttcagccagtatcaacaccagtaacagtgtgtggagatatccatggacagtgatcagcctttgagcctttcccacattgaag

SEQ ID NO: 573160 - DNA, 88 bp, Homo sapiens
gaatacagtaatggacaggcgggtgcgatagaacatcgcaaatctgtccaaggctgcctggggagcattggagaagaatggcacccag

SEQ ID NO: 573161 - DNA, 50 bp, Homo sapiens
ggagccggacccgccgcctcccggtctcctgacatcgacaaccaccatgc

SEQ ID NO: 573162 - DNA, 83 bp, Homo sapiens
aaccaattccagacacattattaagacctgcctagagctggaacgttacctccagagcgagccctgctatgtttcagcctcag

SEQ ID NO: 573163 - DNA, 98 bp, Homo sapiens
gtttttgcagcagctgacagcgtttttccagcagtgccctgaaagtacaagccagctgccatgttgtgagcacataccacatagctccatggagatgc

SEQ ID NO: 573164 - DNA, 75 bp, Homo sapiens
cagaatgagctggagagactgaaagagcaactccgatccaatatccgagaaattgagaaactttgtttgaaagtc

SEQ ID NO: 573165 - DNA, 100 bp, Homo sapiens
ctcgtctcaaactctatttgccaaaggaaacttgccttatcaccttcttgcttgcaggttttggaaggaaggatgttgtagaacacttactacagatggg

SEQ ID NO: 573166 - DNA, 99 bp, Homo sapiens
agagatgcctgtaccgtgatgtgacgctggagaacctggcacttatgtcctccctggatgcacgaaggagagagagtgagaagtctctagaaaatgaaa

SEQ ID NO: 573167 - DNA, 90 bp, Homo sapiens
tccaacagcttacctgagccagccaagaagagctgagctttcagcacaagatcgggatcctttattgcaaagcaggccagagcacagagg

SEQ ID NO: 573168 - DNA, 50 bp, Homo sapiens
aagaagtatatgcaggaaattttgtggaacttcgggctttgtattccatg

SEQ ID NO: 573169 - DNA, 75 bp, Homo sapiens
aaacctgccactgggttcactctaggaggaacaaatacaggaaagtgatgaagcattgggcccaacaatgatgag

SEQ ID NO: 573170 - DNA, 78 bp, Homo sapiens
taaaggcgaaaaaggtggatttgctagtactaaggctcgtacgtctgcatcgattatcttacgtggggcaaatgattt

SEQ ID NO: 573171 - DNA, 97 bp, Homo sapiens
ccaggacttcggaactagacgaggacactcatgaggaccatgatacttccactgagaatacagacgagtccaaccatgaccctcagtttgagccaat

SEQ ID NO: 573172 - DNA, 75 bp, Homo sapiens
ttcctgtacagcctgcagaactgggcccagatcattgatctgatgatgctggtcatcgatgtgaccaaggggatg

SEQ ID NO: 573173 - DNA, 99 bp, Homo sapiens
aggtggccgtggaggcagaggtggcatgggtgctgtgatcttggctaccatgcaagtctgaacagagccctaagaacatatctgtctgcggagtacaac

SEQ ID NO: 573174 - DNA, 100 bp, Homo sapiens
ggatggcggaggcgcctcctgtctcaggcctgatcttttggccagaaggagattaaaaagatgcccctcaagatggctgtgcctgtcagctgcatggagc

SEQ ID NO: 573175 - DNA, 98 bp, Homo sapiens
tgaaatgtttgacgacactgatggtttgttttcggctttgtgagaaaccttaccatcaaacacgatggccagcaacgttaccaacaagacagatcctc

SEQ ID NO: 573176 - DNA, 75 bp, Homo sapiens
ggcaagtagcggcggcgcttcaaggttttaaaatcaaagatgggaaaatcggagaaaattgcccttccccatggc

SEQ ID NO: 573177 - DNA, 100 bp, Homo sapiens
tagtcatcacgggggatgcagacattgaccatgaccaggtgaaagaaaagatgttgtcccggttaagagtagtttccaccacttgtactttggcatgtcg

SEQ ID NO: 573178 - DNA, 75 bp, Homo sapiens
gtacctgttaccactttcaaaaagctgcacagcaagttacagtcctccgaggcggaggtgcgcagcaaatgcgag

SEQ ID NO: 573179 - DNA, 74 bp, Homo sapiens
ctcttcgagcgccgcggacgcgtcatcgagtgtgacgtggtgaaagagctgaggaactgcgtgtggagtcagcc

SEQ ID NO: 573180 - DNA, 82 bp, Homo sapiens
cccaaggaccaagcccaggactccagtcagccttcccaagtgacagacatcacacctccagtgcaatccctgttcctaagag

SEQ ID NO: 573181 - DNA, 100 bp, Homo sapiens
ggcggcaggagaagatcacccggaccaaggaggaggccctggagctgatcaacgtcccacagaacaacgagaagcttcaggagagcccgtgcatcttcgc

SEQ ID NO: 573182 - DNA, 80 bp, Homo sapiens
agataaacgaggggctggaacacctcgccaaagcagagaaatatttcaccagtgatcattaaagaatgggcagcttacaa

SEQ ID NO: 573183 - DNA, 122 bp, Homo sapiens
gctcattggaagcttgtcggattcttgacactttgggattgcttcggcaggaagcagaaattccgggtagatatgcctggctcaggcagtgcattcatccccaccatcaacgccatcacgac

SEQ ID NO: 573184 - DNA, 100 bp, Homo sapiens
ctgtaattcttgctgtagaaagcttaaacttccaggatttttcaagccacattcaattgataggatgaaaaaatttaagagaaggctatccctcacactc

SEQ ID NO: 573185 - DNA, 75 bp, Homo sapiens
gttgaagcttagctctttaacccaggtctgctggcgtccaggccacgtgctgctgggtctcagtcctccacttcc

SEQ ID NO: 573186 - DNA, 100 bp, Homo sapiens
gttcagcacaccagtggggcagtgcctcggacgccaagagtgccgaggatgaggctccttccagacacttgggaaagcaccagccccgctcagcacaggt

SEQ ID NO: 573187 - DNA, 98 bp, Homo sapiens
aaggataacaatgcccacacagtgaagagcaggctagaagagctcgatgagagttacatgctatgggaaaacttcctggaaccagaatggcagcgtta

SEQ ID NO: 573188 - DNA, 97 bp, Homo sapiens
ggggaatctatagttaatcttggcgacattgacaatgatggctttgaagagagacaagagagacacctccaacttcgacaaagagttcaccagacag

SEQ ID NO: 573189 - DNA, 75 bp, Homo sapiens
ctgcggaagtggtgacccgtgggacgcggctgagacagatatgttgatgatgtgatcagccgcattgacaggatg

SEQ ID NO: 573190 - DNA, 75 bp, Homo sapiens
tggacttcatgcttagatacatgtataacaaggtggtcataatgtcacaatctccttgcagtccaggactgggca

SEQ ID NO: 573191 - DNA, 83 bp, Homo sapiens
gatcatcctggggacctggtacatggttatggaaacaaaggacatgctttacatcgtcactgaatttgctaaaaatggagaaa

SEQ ID NO: 573192 - DNA, 100 bp, Homo sapiens
gcagactggcaatggaggaaacattcctgaagccatttcaggccatcgttctttccacatacctggagatgggagctgtggagctcaggggccgctctgc

SEQ ID NO: 573193 - DNA, 100 bp, Homo sapiens
gaaacagtgctgaagcctttaaatgcagcatctgcgatgtgaggaaaggcacctccaccagcggagctccctgggtcctcagcagtgaggctggcctccc

SEQ ID NO: 573194 - DNA, 100 bp, Homo sapiens
gaagctcacctttgtctaaataacactgctcagcacgcaggcatgtgaggaagctgggcttaaaggagactccagcaaatggagagacagaccacagtcc

SEQ ID NO: 573195 - DNA, 100 bp, Homo sapiens
ttccggggagctcggctccaagttctggcctacccgttccatcccgggctatcccagttccccactgccagggaaccccacgccacccatgaccccaagc

SEQ ID NO: 573196 - DNA, 100 bp, Homo sapiens
cctgcaggatggcgcggccgagtccccgtacggccacccggcggtcaccttcaggccattcagaggaggaaagagaggggaatatgaagtcagccaagcc

SEQ ID NO: 573197 - DNA, 98 bp, Homo sapiens
atccctgttaccagggacaaatgcaatttcaaattttagcattggtcttccaagcaataatgaatcgtatttccagggagaaaactggttgtcctgga

SEQ ID NO: 573198 - DNA, 90 bp, Homo sapiens
gtgagatatacctttcaccttctgccgtgattgtgaggcctcctcagccacgtggaactgaaaaatatattcagggggaagagatgtaat

SEQ ID NO: 573199 - DNA, 100 bp, Homo sapiens
gtgtccctgtacgcggagggctcggtcaacggcttcatcagcaccttgggtcagagcaccataacatggtgtgggaagtgaagacaaatcagatgcctaa

SEQ ID NO: 573200 - DNA, 90 bp, Homo sapiens
ggctctttgaactttggatgctttattgtacaaaggtgaccattgtgaggtagatattttgttctaattttccagatgaggaagctgaga

SEQ ID NO: 573201 - DNA, 74 bp, Homo sapiens
ggaggagcttttggggtgcgtcaagcccctggcctgaggcagcggtaagaatgattgatgttggctgatattgg

SEQ ID NO: 573202 - DNA, 50 bp, Homo sapiens
gtggggggagagcccctggcagccgaatttgccacatacctgaatttctg

SEQ ID NO: 573203 - DNA, 83 bp, Homo sapiens
cacagtccgcagggatgaacctcgagttgctggttgagaagctgatgtctcctcgacttccaactggaaccttgaacccccac

SEQ ID NO: 573204 - DNA, 100 bp, Homo sapiens
ccctattcacgctctgtgcttgtgccaagaaaactatgtgcaagctgtggaggagttccagtcctgccttaacctgcaggaacagtacctggaagcccac

SEQ ID NO: 573205 - DNA, 101 bp, Homo sapiens
cgggtgaggtacaggctcagtctgcggccaagactccgtcctgcaaggctgcagaagatgtcaatgttactttcgaagatcaacaaaagataaacaaattt

SEQ ID NO: 573206 - DNA, 75 bp, Homo sapiens
ccatcatcatgaaggacgtgcccgactggaagatttggatttacagtgtgagataatcagctacatagaagtacc

SEQ ID NO: 573207 - DNA, 82 bp, Homo sapiens
gcgccgtgagttcgccgctggtggctccggatacagtttatgtaacttgatggaagaaaatggaattactccaaaaagacaa

SEQ ID NO: 573208 - DNA, 75 bp, Homo sapiens
cctggctagccggcgacttgagtgacgagttactgagtggccggaagatccacagccaggaggaagccttgcggg

SEQ ID NO: 573209 - DNA, 50 bp, Homo sapiens
gaaagctttaggagttcacagtaaatgatgaccgggaaattttattggag

SEQ ID NO: 573210 - DNA, 100 bp, Homo sapiens
actcaatcgacagaagattcggagccttgatgtgggaggaagttttattttgtcttcatcaggaagccaactaattcggttgatacctgagagctcagga

SEQ ID NO: 573211 - DNA, 75 bp, Homo sapiens
catggagcctccggccgcgcgcctctaaggccccggcgttcatgtggagacctttggcgacttggcctttggcga

SEQ ID NO: 573212 - DNA, 74 bp, Homo sapiens
tcaatcaattctttgtgactcctcgatcttcagttgaggtggcatccttagctgggcctggagggcaagtggaa

SEQ ID NO: 573213 - DNA, 74 bp, Homo sapiens
cgctgctgctgaggagaggagcgtcaacagcagcaccatgggagtacttcttgcaagcagagctgacaagcaac

SEQ ID NO: 573214 - DNA, 82 bp, Homo sapiens
ctccattctaataacatctccattctccaggaactgtacgaaaggaactgtggctgcaccatctgtcttcatcttcccgcca

SEQ ID NO: 573215 - DNA, 99 bp, Homo sapiens
tcgcagcacaggctggactttcagctgatgttgaaaattcgagacacactttatattgctggcaggaagttaaatgaagttcgaaagagattgaatgag

SEQ ID NO: 573216 - DNA, 90 bp, Homo sapiens
agatcaaacaattgtagatcccttcagttcaaaacataatgtgattgtgtcaggcacctacgatgcaacgatcctggatgccaaccttcc

SEQ ID NO: 573217 - DNA, 88 bp, Homo sapiens
tgggctcagcgacaccgcgagctatatctgcgcgtggagctgagtgacgtacaggagatctattgggaaactgattataaccactcgg

SEQ ID NO: 573218 - DNA, 75 bp, Homo sapiens
gaggatctggaggcacagctgcagtctgacgagagggagtgatagattcgtgtggcctttcaaatgattgtgaag

SEQ ID NO: 573219 - DNA, 90 bp, Homo sapiens
aaactatgggattttcagggctttgaatgcatcagaaccatgcacggctgctggaaagtacagacaacaaggcagaaattatattgttga

SEQ ID NO: 573220 - DNA, 51 bp, Homo sapiens
cctgggtcgcttggaagaagccaagacaacaatatgcacaggttttggccc

SEQ ID NO: 573221 - DNA, 95 bp, Homo sapiens
cttggatgatgatggacgtcccaccgggcaggatgaaggcagagcgtgtggcatctccacctcaaggcacaagtgaagctgatgtggaggctgtc

SEQ ID NO: 573222 - DNA, 101 bp, Homo sapiens
gcctttctggacagaccaacctgtcagtgctgcaagacgctgtttgtgactgtagtacccagtctctcacctcctgcttcgcccgatcgtcccgctctgcc

SEQ ID NO: 573223 - DNA, 103 bp, Homo sapiens
taattgctgaacttaaaaagcagtctaaacctgtgaccacccctgaagaaattgcacaggttggcacagttaattatatgccaccagaagcaatcaaagatat

SEQ ID NO: 573224 - DNA, 100 bp, Homo sapiens
aggaaccgcccaacatggcctcggaggggaggaagttgccttgtactgtgccaaatatcttcctgatatcatcaaagatcagaaggcctacaaggaaggc

SEQ ID NO: 573225 - DNA, 75 bp, Homo sapiens
ccctgatgattcagacgagtctttagatacctgtggagccgccaccaaaatgcagattttcgtgaaaacccttac

SEQ ID NO: 573226 - DNA, 51 bp, Homo sapiens
cagaatcaccagcactggctgaagatcaggagaacctcagtctgacgacat

SEQ ID NO: 573227 - DNA, 101 bp, Homo sapiens
aatggaacagaaagccaagcagaatcaggtggccagccctcagcccccacatcctggcgagaggcagacatgcccgatgagatcaacattgatgaattgtt

SEQ ID NO: 573228 - DNA, 100 bp, Homo sapiens
gcgctggactggagcagaaccccaggactgcgcccccgggagcgggcgcccagagaaagctctgggtgtgcggcagtaccatgtggcctcagtcctgtgc

SEQ ID NO: 573229 - DNA, 83 bp, Homo sapiens
tggagtgcgtgggggaccggctgttggcgggccctgggaggagcggggacactgaggacctctctccaaattggcctctcaac

SEQ ID NO: 573230 - DNA, 74 bp, Homo sapiens
cttacccacagggaacttggcagaaggtgatacaggtggttcagtcagcacttgcacctcctgcgccgccgccc

SEQ ID NO: 573231 - DNA, 98 bp, Homo sapiens
tcgggaacaggtaccggctgggccggaagatcggcagcggctccttcggagacatctatctcgggcaaaataacatggcagccagacgaattacacag

SEQ ID NO: 573232 - DNA, 76 bp, Homo sapiens
atcagatccaccatctgcttcaacgagtagcacagaagagggaggatgctgtttccaaagaagtgactcgaaaact

SEQ ID NO: 573233 - DNA, 90 bp, Homo sapiens
gtgccttttgcctcccaccgtgattctgaggcctccccaaccatgtgcaattgtgaatacatcaagacctggaggccacggtacttcctg

SEQ ID NO: 573234 - DNA, 119 bp, Homo sapiens
gcggtggccatgtggagctgggacgtggagtgcgatacgtgcgccatctgcagggtccaggtgatgggctggaaccaatggttacatggctcctgagatcctaatggaaaaggtaagtt

SEQ ID NO: 573235 - DNA, 100 bp, Homo sapiens
gatttcctgaagagcgatgaaggtggcaaagtgctgcttccaaagctcattgacttttctgctcaggctggagcattggatttgctaaaggagcttaaga

SEQ ID NO: 573236 - DNA, 80 bp, Homo sapiens
gacaaaacttcaagccaaacatcaagcagaatgtgatttgcttgaagatatgagcaaacggggattcagcgtccgatcct

SEQ ID NO: 573237 - DNA, 82 bp, Homo sapiens
tcagaaggagctagctgaaataacccttgatcctcctcctaattgcagacaatgcagatcttcgtgaagactctgactggta

SEQ ID NO: 573238 - DNA, 90 bp, Homo sapiens
atggcggcgcggtggagctctagaaatgggcaagttcatgaaacctgggaaggtggtgcttgtcctggctggacgctactccggacgcaa

SEQ ID NO: 573239 - DNA, 100 bp, Homo sapiens
cgttcaacaagctagtgagcacaatgaaggcaagtgggactttgccttctcagcccaaagtcagctgtgtagcccacaatgccctggagtgtgcacgagc

SEQ ID NO: 573240 - DNA, 90 bp, Homo sapiens
atttggaattgcacttgtttcagagaactgataaatttcaaacggaagagagtggcagcatttagaaagaatctaattgaaatgtctgaa

SEQ ID NO: 573241 - DNA, 78 bp, Homo sapiens
acgacttgtctttcaagaaaggagagaagatgaaagtcctggaggagtgttcagaatgccaggattccctcaccaact

SEQ ID NO: 573242 - DNA, 74 bp, Homo sapiens
gggcctgggagcttgctgcagcttcagggtggatgtgaacactgaccggaagatcagtgccaaggagatgcagc

SEQ ID NO: 573243 - DNA, 90 bp, Homo sapiens
cggagatccgagagctctgcttctctgaaaagcgtgtggctttctggacttgcctccaggatcactaagttcaaggcccctttggaacct

SEQ ID NO: 573244 - DNA, 98 bp, Homo sapiens
gatgaggaaactgaggcctggagaggttaaagagacccgttcagagtcctacagtggcaggagccattgagcttcaaggacgtggctgtggtcttcac

SEQ ID NO: 573245 - DNA, 75 bp, Homo sapiens
cgaggtggaggtcgtggacctggtcctgaaacttcgtgagaagctggagctgcagaggctggagacagagttggg

SEQ ID NO: 573246 - DNA, 73 bp, Homo sapiens
accgtcgcaaccctcatgaagtacaaccagcatatgctacaagagatgcttcctgggaattagaggaaaacgc

SEQ ID NO: 573247 - DNA, 101 bp, Homo sapiens
gctgtggtcacgtatactgcagaaagtaaaggagtcgtgaagtttggctggatcaagggtgtattagtctcctctgagcctccggcctccataagacccaa

SEQ ID NO: 573248 - DNA, 100 bp, Homo sapiens
ctaagcatggctatgcagactctaaaactttatattcagagcaccaatcaaattaagcaagcctggggaacttcgtgaggaatatgaaagcttgagaaag

SEQ ID NO: 573249 - DNA, 112 bp, Homo sapiens
tcttttcttacctgagactgggcctgaagggagagtttcagttcttcattgacgatcttaccaatatatttgagtccttcctgcctcagttattggcctatcctaaccccat

SEQ ID NO: 573250 - DNA, 51 bp, Homo sapiens
catgagcaccaagcagatcacttgcagaaaacctcggatcaattctcagct

SEQ ID NO: 573251 - DNA, 97 bp, Homo sapiens
taaacgattatttctgttttcctatgcgactgctgcacaaaacaatacaggtggaaggaacagcatatttaagttcttttctgtggaaaactcagaa

SEQ ID NO: 573252 - DNA, 75 bp, Homo sapiens
atggagaacctgatcgaacttcgataattgatggagagatgtatcctcccacagtcaaagatactcaggcagaga

SEQ ID NO: 573253 - DNA, 97 bp, Homo sapiens
cccttgcatgatggaaacaccatggctgcggcggcccagctctctctgacacaggacccttgaacatctgtgaagaaatgactattctgcatggagg

SEQ ID NO: 573254 - DNA, 99 bp, Homo sapiens
cagagagagggtttggaggcagcccctaagggcccttcgcgggagagcgtcgtgcacgcgggccagaggcggtaagaagtttgatagctgtaggactgg

SEQ ID NO: 573255 - DNA, 100 bp, Homo sapiens
gggaggaggaggaggattcagggaataggagctggggagcccttctgcgccacaggccagaaaattagtccagaaggaaaagctaaaattcagcttcagc

SEQ ID NO: 573256 - DNA, 100 bp, Homo sapiens
cacttcttttttgagaaaggaaggaatatatcctgactgattgtggatctaggatccggcttccaacatgtggcagctctgggcctccctctgctgcctg

SEQ ID NO: 573257 - DNA, 75 bp, Homo sapiens
cccagagaggatggcatctagaagagacagggcagggcattgttcatgcactgaccgacctcagcagccccggca

SEQ ID NO: 573258 - DNA, 121 bp, Homo sapiens
atacaaagacaaaaggagattctgatgaagaagttattcaagatggtgtcatggagaaactccagctgggcccagagattctgcagcgggaaaatccaaggcttatttatgccaggctgag

SEQ ID NO: 573259 - DNA, 98 bp, Homo sapiens
tgacagtctgcatgtgcagttttcaggcatgaacgctgctgtccgggctgtgacgcgcatgggcatttatgtgggtgccaaagtcttcctcatctacg

SEQ ID NO: 573260 - DNA, 83 bp, Homo sapiens
caatatctgtcttcggtggactccttcggcagtccacccaccgccgccgcctcccaggtcctgaacgaggctgtgggggccct

SEQ ID NO: 573261 - DNA, 50 bp, Homo sapiens
gctcgtcgccaaaagattgaagagccctgggaggagcggggacactgagg

SEQ ID NO: 573262 - DNA, 83 bp, Homo sapiens
aagagcatcttggatgtaggacaatggaagagttagggtgtatgccatgtacaattccgtaaagggatcctgctccgagcctg

SEQ ID NO: 573263 - DNA, 75 bp, Homo sapiens
ttatggtctctagaatagacaaggaaagaacatgaggttcccttggaaatcattcaagaggaagatggaaggggc

SEQ ID NO: 573264 - DNA, 90 bp, Homo sapiens
gcccctcaggagccctggaggagtgctatgtcacagaaattgaccaaggatactgccacaacatgtcaactgtcctggaggaattaatgc

SEQ ID NO: 573265 - DNA, 90 bp, Homo sapiens
ggcggctcagttgtccatgaccctgaaggtccaggagtacccgaccctcaagcgcccctttcctgtgtctgacagcgagtcaccaacagc

SEQ ID NO: 573266 - DNA, 98 bp, Homo sapiens
aggtacttggatctccagtgggagctgccctctcgaaggcaggacagcggtggcggcaggtattatgactctgtccccctttgatcaaatgaagactg

SEQ ID NO: 573267 - DNA, 100 bp, Homo sapiens
tcctgctattccttgggctgcctttcctgcagtgttatagttttgccgctggactcttccctcccttcccccaccccatcaggatgatatgagacttgaa

SEQ ID NO: 573268 - DNA, 100 bp, Homo sapiens
cagatcatgagtgtgaaaaactggaaatcccaaagcctcgaatggctgccactcagaaacttgttaaagacattattgtactcgcagaaggaagacagat

SEQ ID NO: 573269 - DNA, 83 bp, Homo sapiens
aactccagcgtgtctccagccgtgatatgctgtgatagcatttggatgtgccagctgtccaaaattaacttgtgggcgagagg

SEQ ID NO: 573270 - DNA, 100 bp, Homo sapiens
ggaacctatacaaagaagtgatgctggaaaatctcaggaatctggtctcattgggtggacacgctttgcctggaggatttgcatgcgtttattgcgcagg

SEQ ID NO: 573271 - DNA, 101 bp, Homo sapiens
actcaagccaggtggaatttggataaatctagacatcttcatttgattgtacaccatctcccagcaagacaccagttgaaaaccccttgaatattatgttg

SEQ ID NO: 573272 - DNA, 100 bp, Homo sapiens
aaaaccctaagtctttgccatgttattcatttctgtgcaaaacaggactggctgatactacatattccagatgaccatgctcgacagctgaccaaggcca

SEQ ID NO: 573273 - DNA, 75 bp, Homo sapiens
agagaaagcgcctgttcaactttgtcctctctcaggaaattgacaatggcccttcagctatgctaggtctataat

SEQ ID NO: 573274 - DNA, 74 bp, Homo sapiens
gaggagccttctcaagaacagagaaatgcactcggtgatggaaagagagccactattctgaagaacacttggcc

SEQ ID NO: 573275 - DNA, 97 bp, Homo sapiens
cggggcgcgcgcgaagcgagcgagaaggcacggagtcgccgcggagcgcaggtgaagtattacagacacttagcacctgatcacttgctgcaaatat

SEQ ID NO: 573276 - DNA, 96 bp, Homo sapiens
taagaaatcagagattaagaaagaagactatgttttaactgagctctgccagtgccggccgggagaaggcaattgctcctgctgtaaggagtgcat

SEQ ID NO: 573277 - DNA, 74 bp, Homo sapiens
acaccaccggcacagtgacggcttcagagggtgaacggaagagtccttatgttgcagtatgctgtatagtaatg

SEQ ID NO: 573278 - DNA, 100 bp, Homo sapiens
gatggttctttacaaaatgaagaaatccgtgaaagcaatcaacagctctgggctggacaagttggatggcttgaggactggtactaaaaggaaacgtgac

SEQ ID NO: 573279 - DNA, 96 bp, Homo sapiens
ttccggatcaatccagatggcagccagtcagtggtggaggtgaaggatgattccagggccctgactttaggagcactgacgctgcctctggcccgc

SEQ ID NO: 573280 - DNA, 80 bp, Homo sapiens
gccagtactctatatgaacaatccgtctggatcacggatgtaggaagtgacatccctttaaaagtagttggaatgttccc

SEQ ID NO: 573281 - DNA, 100 bp, Homo sapiens
ggtgcttgatggtcgaggccatctcctgggccgcctggcggccatcgtggctaaacaggatctgcctaatgctatgaacgctgctgagatcacagacaag

SEQ ID NO: 573282 - DNA, 75 bp, Homo sapiens
cttttccgttgccggtgccggcctagcgtcctggaattacttcaatcaagcgcagttgtgtagcagttgagtaat

SEQ ID NO: 573283 - DNA, 110 bp, Homo sapiens
cacaggtgcatttcacagcactctgggcgaaaattggatgtgaaaatgaagccagaccgaggtgacttaagagattaaaattaatttggttgctgttggttctgaacaaa

SEQ ID NO: 573284 - DNA, 124 bp, Homo sapiens
cgcttcttcaactccttcaatgaggccaccatggttctggtctcctggatcatgtggtgtgaagatgccttaagaaaaaataagagcttaattgggccggatcaaaaggagtatcaaagggaac

SEQ ID NO: 573285 - DNA, 83 bp, Homo sapiens
cctgatttcctgcttctccttttcatgagtgttcctgtggtctctgcacctcctttctgtcatgcaagacaagataatctgcc

SEQ ID NO: 573286 - DNA, 100 bp, Homo sapiens
tatcatacactatccaaatgaagtcattgtcaaagttcacgctgccagtgtaaatcctatagacgttaatatgagaagtgtcttatctgacttggggtgt

SEQ ID NO: 573287 - DNA, 97 bp, Homo sapiens
agttcacgactctgagtgctgtttttccagaggcctcaaatacagcctcctagagctaccatcccgaacagcagtccttccattcgtcctggtgcac

SEQ ID NO: 573288 - DNA, 83 bp, Homo sapiens
cggacgtgcgaagcgttcgcggtgcgaaacattgctgaggctcttgtcagcaaaggtctagccacagtgatcagataccggca

SEQ ID NO: 573289 - DNA, 95 bp, Homo sapiens
cgccgtcgccctcccagaatggcattgaatgccccagaggagcccgaaacctcccaggcttggtgcaggaaggagagcccttcagcgaggaagct

SEQ ID NO: 573290 - DNA, 83 bp, Homo sapiens
cggcagccgaggccgcgaactgcatcatggagggggatatgagactttctactcggaatatcctgagtgttgcgtggatgtaa

SEQ ID NO: 573291 - DNA, 75 bp, Homo sapiens
cagccgagatgccgggggagcggggccttccacaccccctccgtgggtgtgtgatttctgcgccaggagatgagg

SEQ ID NO: 573292 - DNA, 100 bp, Homo sapiens
gaacataatgtatttcaaaacaaaatacatgtcagttatcaagagactcaacagatgcagatgaagcctgtcagagttgttcagtataatatcaatacag

SEQ ID NO: 573293 - DNA, 82 bp, Homo sapiens
ctcgatgaagataaagaaagcacatttggttatgtgcatggggtctcaggacctggaagaggatcacctagcccgggtagaa

SEQ ID NO: 573294 - DNA, 50 bp, Homo sapiens
ggcggccgcagctgccacaaaccaggaagacaaacttttgcttgagagcc

SEQ ID NO: 573295 - DNA, 82 bp, Homo sapiens
aacctacttagatgacaatgtcaagaaagaaaactcctccttgtacctagaccaagatcactccatggatgaaatgacagct

SEQ ID NO: 573296 - DNA, 78 bp, Homo sapiens
gaagcggctcaatgaccatggcaagaactggcgtcacgtttacaagatgaggacggggacttggttgccttttccagt

SEQ ID NO: 573297 - DNA, 88 bp, Homo sapiens
tctacatcgatctgcggggcatcgtgtctcgaccgcgtcttctgagtcagctgagatctgtatctgtggacctgaatgttgatccctc

SEQ ID NO: 573298 - DNA, 100 bp, Homo sapiens
ggagacgcagctgtgcaccacaagcaatcatttggggaagaatctacagttgctgatggacagagtggatgaaatgagccaagatatagttaaatacaac

SEQ ID NO: 573299 - DNA, 110 bp, Homo sapiens
ctggggagacccttcgaggaacagctgaacgaaccctggccacactctcagaggactactgagcccagccaggctgtatgccattgctgccaaagaaaaagatattcaag

SEQ ID NO: 573300 - DNA, 100 bp, Homo sapiens
ccaacattgggccaacccgaattcttcccaatctttatcttggctgccagcgagatgtcctcaacaagatgcgcctggagaaggacaggttctctgtcaa

SEQ ID NO: 573301 - DNA, 90 bp, Homo sapiens
accaatatttggtatactgggcacaatccatctggtggcaggaatttcagggaagagccaggtcctgtttgctgtggtgttcactgcccg

SEQ ID NO: 573302 - DNA, 97 bp, Homo sapiens
ttgcgtacctcctcaccatacacctgaaggaaggccggaacctggttgtccgagatcgctgtgaacctgtgagaagtttctacaatggtgggctcag

SEQ ID NO: 573303 - DNA, 100 bp, Homo sapiens
tcaagaggaacggcacatgacccaggcctatgccaatcagcatttcacattcctcatggttggttcaaagataacagcaaagccgatggccagctggtct

SEQ ID NO: 573304 - DNA, 80 bp, Homo sapiens
ctactaccgcctcacacgcttcctctccagagtgatcaagtgtgacccgagtggcagaatttagtgacatttggaagctt

SEQ ID NO: 573305 - DNA, 75 bp, Homo sapiens
caagggcccgctgcagtctgtgcaggtcttcggacgcaagtatatttgccttccctccatgatctccaacactat

SEQ ID NO: 573306 - DNA, 75 bp, Homo sapiens
cagttatcaagctttagagcctggctactcacagttgaagcctgattgcagaaaatgatgcatcctgttgccagc

SEQ ID NO: 573307 - DNA, 75 bp, Homo sapiens
agaatgatgtggatgatgaggaagttcatggaagttcagacccggatgcagagtctacagcctgacccagctgcc

SEQ ID NO: 573308 - DNA, 100 bp, Homo sapiens
ctgccagtgagcctcaggctttaggaactgaagaggatgtacagttacccagcacgtgtacctcctcctcctcctattgctcgggctgtagtgccctcga

SEQ ID NO: 573309 - DNA, 82 bp, Homo sapiens
ctctgactctcggactgagaaacgcaagttgattatggaagattcccacaagagtaccacgtcagagacagcacctcaacct

SEQ ID NO: 573310 - DNA, 98 bp, Homo sapiens
cctttcttatccgagagagtgagagcgctcctggggacttctccctctctgtcaacaggcgcggggcgaaggagctgctagaacaatgctgaggcggg

SEQ ID NO: 573311 - DNA, 98 bp, Homo sapiens
gaagattcatttttcttttttccattcttcaggaccttcggcaaggactccctggaggaaaagcggaagcggcagcggtctgaacgcctggaacggat

SEQ ID NO: 573312 - DNA, 50 bp, Homo sapiens
catctacaaccttcgatctcctgacgagcatgtgatgtgaatcagctgac

SEQ ID NO: 573313 - DNA, 101 bp, Homo sapiens
ggaaactctcttctggagaagataacactttagtacagtcgccaactgatgtctacaggaagtttatctcgacaatgctagttgcagtctgtgtgaccctg

SEQ ID NO: 573314 - DNA, 75 bp, Homo sapiens
catgcccctcaggctggaacttgccctgtctcctcgcagatgagaacacccatctcggctttctcgcaagataac

SEQ ID NO: 573315 - DNA, 100 bp, Homo sapiens
agcagtgatggcttttggttgtatcttggaaggaccagagcccagtcagctcaaaccactagttatacagatacaaactggactctcaggacaaaacgac

SEQ ID NO: 573316 - DNA, 100 bp, Homo sapiens
taatgaatttgcccaatgttttgatgattggcagagacccactgtctggacagtcattttgtttactcattcagccctgttgcaggtcccaataaactct

SEQ ID NO: 573317 - DNA, 100 bp, Homo sapiens
gtggcccttccaaataagcggcataaagcaattgagaattcaggtactgggcctaatcgctacgtgcctctttggctatgatgcctatgtcaccttcccc

SEQ ID NO: 573318 - DNA, 51 bp, Homo sapiens
ggcctgcagggcctcagctcttcttaccagaccccccaccccctggatttt

SEQ ID NO: 573319 - DNA, 95 bp, Homo sapiens
ggccgacttcgatgatcgtgtgtcggatgaggagaagattgagaggatccagaatccagatctctggaatagctaccaggcaaagaaaaaaacta

SEQ ID NO: 573320 - DNA, 74 bp, Homo sapiens
cgggcaacgatcggaactcggacacggtcatcatcagatttgaaatatttaaagtggatacaaaactatttcag

SEQ ID NO: 573321 - DNA, 101 bp, Homo sapiens
gagtttggcgagtcagtgactgaagcgcccgtccattccaaggccctgggaggagcggggacactgaggacctctctccaaattggcctctcaactcacag

SEQ ID NO: 573322 - DNA, 87 bp, Homo sapiens
gccagcgagccgccgacccgccgagcaaaatgttgagtggtgattttatgcaatggcttcaagccacagttcttcaccagtgcctca

SEQ ID NO: 573323 - DNA, 75 bp, Homo sapiens
ataagaaggaacccaaagaaccatctcccaaacaggatgtcctccgggcctcatatgaacaggagaaagaagcgc

SEQ ID NO: 573324 - DNA, 95 bp, Homo sapiens
aatgaaggcattgctatttttgcacttcagttcacatactatttatggggaaaagaagatctcccggagcagtgccctgaaagtgctggaccatg

SEQ ID NO: 573325 - DNA, 100 bp, Homo sapiens
caagagatccgggagagaaatcacttggaaggactttgtcaataactatctttcaaaaggagtaatccgcaaggatgctctccgggcgctcaactttgcg

SEQ ID NO: 573326 - DNA, 100 bp, Homo sapiens
ggaggcaacacactgggatatggcagccgtagtgtcttaggaactggttggccgaaagacttggtgaaggaaccactcgttttgactattattttatcac

SEQ ID NO: 573327 - DNA, 83 bp, Homo sapiens
tggagttgagcgtcctgcggctgggcctccgggaggcagaagagaagtccctgctggtggggaacgccaagcacaacgtgcat

SEQ ID NO: 573328 - DNA, 100 bp, Homo sapiens
gcgcggattcgccgaggcaccgaggcactcagaggaggtccggcctctttggcctacccccgttggctccgctgccccaggtcgatgagtcccctgtcaa

SEQ ID NO: 573329 - DNA, 51 bp, Homo sapiens
gaagaaaacttcgaaggcttaacctctttggagccaggagctctggatgcc

SEQ ID NO: 573330 - DNA, 76 bp, Homo sapiens
tacgcggagggctcggtcaacggcttcatcagcaccttgggacttcattatcctggcagtatggggcatgctggct

SEQ ID NO: 573331 - DNA, 75 bp, Homo sapiens
gactcattgatgaaatttatggcattcagaacagtgtgttcatcctcgaggtggtgtgattcagagtgtttcttc

SEQ ID NO: 573332 - DNA, 100 bp, Homo sapiens
ctggaatgtccttggaggcctccctgtgttccctggaggagtgtgctgcggcttcatatacagatagctctgatgatgagacatcgcccagggacaagca

SEQ ID NO: 573333 - DNA, 100 bp, Homo sapiens
ccccatcgcagaggccatgctgacctacaagcagaagaggccaccagcccctcgggttccaagatgcagctactggagacagagttctcacacaccgtgg

SEQ ID NO: 573334 - DNA, 83 bp, Homo sapiens
tgtaggcggtagcagtttgcacgatgaacttggaactgcaagcacatgttgaccagataactgaaatggcagcagtaatgagg

SEQ ID NO: 573335 - DNA, 99 bp, Homo sapiens
taaccaactgcaattcctacctccagacactacccgaagcagtccttcaccacggtggcagatacacctgaaaatcttcgcctgaagcagcaaagtgaa

SEQ ID NO: 573336 - DNA, 101 bp, Homo sapiens
tactatggaaaattcatgcctgtaggtttaattgcaggtgccaggctttccttaaagtttcccatgtctcaatggactcctgaatataacgagctctacac

SEQ ID NO: 573337 - DNA, 75 bp, Homo sapiens
ctgtcttcggcatgacaggccatctgcctgacttctgcatgctcatggtgatgcagctaattgccccagtttgga

SEQ ID NO: 573338 - DNA, 97 bp, Homo sapiens
gggagaggcgagctcgcgatgagtggtctcggcaggctcttcgggaagggacagagcgggatgccaccagcttgtccaaagggaagttccaggagct

SEQ ID NO: 573339 - DNA, 100 bp, Homo sapiens
cggggcccgccgccgctcaccgcagccccctcctggcgacccgcaagcatccctccctgctcttctgtcggagcccgcggcgggggaggggcgccgccgc

SEQ ID NO: 573340 - DNA, 80 bp, Homo sapiens
ccccagcctcatctccaggcttggctaagccccagatgcccccagatacctggaggggtggggagaagtaagaattgtaa

SEQ ID NO: 573341 - DNA, 75 bp, Homo sapiens
ctggttgccggggcaggggcggaggcggaggcagaggtggaggcgctttgaaagatggagttttaacattgaatg

SEQ ID NO: 573342 - DNA, 95 bp, Homo sapiens
aagattactacacattactgggatgtgatgaactatcttcgttggcagatatccctgttacaatctgtacatatccatttgtatttgatgcccaa

SEQ ID NO: 573343 - DNA, 115 bp, Homo sapiens
gggccgggagctgtacttctatatctacaagggggtccgcaagtactatactggcaattgctggagaagattttgcaattgttgcttctgatactcgattgagtgaagggttttc

SEQ ID NO: 573344 - DNA, 98 bp, Homo sapiens
ggagcccatgtcctatgactcagacctgggcacagcaaatgctgaggactcagaccagtctctgcaagagagcggagagtttaataggcaagaaggaa

SEQ ID NO: 573345 - DNA, 90 bp, Homo sapiens
tactctaaacttcacaaatggttctgaagagtatggagcctacgtagattcataaggacaggcgacactaacaggtgaagatctcgggag

SEQ ID NO: 573346 - DNA, 104 bp, Homo sapiens
ggcggcggcagctgcagtgacatgtccagcatgaatcccgaatattgtcactcagcccagtccatcagtttctcagcccagtacttctcagagtgaagaaaaag

SEQ ID NO: 573347 - DNA, 74 bp, Homo sapiens
gacgcagtggcctccaaggtgcagacagctgtgactatgaagggggagaccagtatgatgtctgtgccatttgc

SEQ ID NO: 573348 - DNA, 75 bp, Homo sapiens
ctccctagtagctgggactacaggagtgcgtgatcagaatggtgtctggacggttctacttgtcctgcctgctgc

SEQ ID NO: 573349 - DNA, 76 bp, Homo sapiens
gcggaatgacagcggcgaggagaacgtcccgctggatctgacccgagattgggaaaatgaggtacgttagtgttcg

SEQ ID NO: 573350 - DNA, 74 bp, Homo sapiens
taacctactatgagggtcgagcagagggccggtgggaaagtcagcaggatgtatcccaaaccacagtttccaga

SEQ ID NO: 573351 - DNA, 100 bp, Homo sapiens
taccaggacctacggcaccagtggcctggacaacagacctctgtttggggagacgtccgccaaggtcaaatgggctctctcattcttggagtgaaaggat

SEQ ID NO: 573352 - DNA, 100 bp, Homo sapiens
gccacaccagaagaaacaaacgcgagcttcagtggtgattccagtgactggggatagtgaaggtgctacggtgcagcctgtggacatctctacagcaatg

SEQ ID NO: 573353 - DNA, 100 bp, Homo sapiens
ggctggacaagcagggcaacttcaacgcctgggttgcggggagctacggtaacgatcagtggctgcaggcggaccgagacagtgcagaagctgtgcccag

SEQ ID NO: 573354 - DNA, 82 bp, Homo sapiens
actttactgccatccgaggcaactacagcctagaggaacagcttgagaactatgacttcaccaaattccactcgctgaagcc

SEQ ID NO: 573355 - DNA, 75 bp, Homo sapiens
gaagaatgaaaaaaccaaaattatcgccaagattcagcaaggggaggcccccgctgagatgggggcgctgctgct

SEQ ID NO: 573356 - DNA, 51 bp, Homo sapiens
ttcctgtcaagcagtatccaaagacacgaagatcgattgagaagttattag

SEQ ID NO: 573357 - DNA, 90 bp, Homo sapiens
tggcctttatgctgctcgaattcctgagcgcttctttcctggaaaatttgacatatggcacccagtcagcttgaagagtttcaaatggac

SEQ ID NO: 573358 - DNA, 78 bp, Homo sapiens
cttggaagtcaacactgtcaactctggctcctcctcctcctcagaagatgaacgacccaagagatcccatgtgaagaa

SEQ ID NO: 573359 - DNA, 96 bp, Homo sapiens
agacatcctctgcagccagaagaacaagaagtaggcattgaccccttgtccagttactctaacaagtctggaggacctgatcgctgcaaaatgaac

SEQ ID NO: 573360 - DNA, 98 bp, Homo sapiens
cggcctcgtgcgccgcgctttgaggtgtcccgacccaggctaagcttgagcatggctgagcaggagcccacagccgagcagctggcccagattgcagc

SEQ ID NO: 573361 - DNA, 75 bp, Homo sapiens
tctagtacagtagtatctctattggctgaccggttccctgatgtgttacctgcttctgctactgatccaaactgc

SEQ ID NO: 573362 - DNA, 82 bp, Homo sapiens
gatgtccctctgaaaactgaggaatttgaagtgaccaaaacagcaggaaccatcactgttgctggaggcacctgacaaatcc

SEQ ID NO: 573363 - DNA, 100 bp, Homo sapiens
cgagatgacaactccgcagcaaacaactccgcaaacgaaaaagaacgacatgatgcaatcttcaggaaagtaagagggtcatacagcagatggaacaaaa

SEQ ID NO: 573364 - DNA, 80 bp, Homo sapiens
gtactgcgccgactgcgaggccaaagcactattggaaataattatgaaaaatggaagcacggctggaaatagccctcatt

SEQ ID NO: 573365 - DNA, 49 bp, Homo sapiens
gccgaggcgggcagatcacgaggtctaccagttgctgggcaaacctcag

SEQ ID NO: 573366 - DNA, 50 bp, Homo sapiens
ctcagtcccatcactccaaggagagaagtcctgtgcctcctgattgctga

SEQ ID NO: 573367 - DNA, 75 bp, Homo sapiens
aagtatcgtaacccccaaagagaaaaagaaatgatgcaattgtatatcagactcttcacagatggaatcacaaat

SEQ ID NO: 573368 - DNA, 83 bp, Homo sapiens
agtttgtcgaacgatgttggactcatagtcactgccagaaaggtgccagatgtgacatccagatgacccagtctccatcctcc

SEQ ID NO: 573369 - DNA, 73 bp, Homo sapiens
ttcatttaccacctgcgggaccgtgccagaccccggctccgcgacccaggttccagcaacagatagaaatgct

SEQ ID NO: 573370 - DNA, 100 bp, Homo sapiens
gcggcgccatgcccgggccggagtgagtgcgcgcgggcgaaaatggcgtacatccaggcaaacctgtatgtgggactggtggtcatgtgtggcttcgtcc

SEQ ID NO: 573371 - DNA, 75 bp, Homo sapiens
tcagctcatcttaggctgtgctgtgaactgtgaacagaagcaagactcagacgatgccctgctgaagatgaccat

SEQ ID NO: 573372 - DNA, 100 bp, Homo sapiens
caaagtactggccagatccctcatgattcaggacctgaaggagaagaaggagaaggtggaggagaaggcaagccggaaagagcgaaagaaagaagtggtg

SEQ ID NO: 573373 - DNA, 100 bp, Homo sapiens
caaggtctctcgcgggcgggagaacggaaaactcccaacttcctggactgcttcaccagtttttctactggctccttctttgaactggatggacgtccat

SEQ ID NO: 573374 - DNA, 100 bp, Homo sapiens
cacgatttggtgcagccggggtttggtaccgagcggagaggagatgcacacggcactcgagtgtgagggctcaaaatttgggcggggaactggactcact

SEQ ID NO: 573375 - DNA, 75 bp, Homo sapiens
ctgcaggagtccattttagcacaggtacagcgcatcgttaagggtgaggtggaacgtgtgatcaccattatgcag

SEQ ID NO: 573376 - DNA, 96 bp, Homo sapiens
cagagttctagggttctaagtgatgtccaggaaggaggaggaataatatttatggagcatatattatggaacacatcatcaagagttcatataact

SEQ ID NO: 573377 - DNA, 49 bp, Homo sapiens
ttagcaggaccacttcgtcaaatgcaggcccaggtggagattgtcactg

SEQ ID NO: 573378 - DNA, 100 bp, Homo sapiens
tgatattattatagcctcaatactgaggctgattgttggcaaacatgaattgactgggcataaagtagctgtgaagatactcaatcgacagaagattcgg

SEQ ID NO: 573379 - DNA, 51 bp, Homo sapiens
gacaagggtccagcctccgatgaaaatgtttcaacgtgcgcaagagttgcg

SEQ ID NO: 573380 - DNA, 76 bp, Homo sapiens
agtttcgctttgattgctaccctggtatatgcacttttcaggcatttccggagagttcttttgaagtcacttcaga

SEQ ID NO: 573381 - DNA, 100 bp, Homo sapiens
cccgtcagtccctgctctgtgcgcgcctccatctgggccatggatggatctgtatttcagaacctgggaagtttacccaaaaggtgaaggtatggattag

SEQ ID NO: 573382 - DNA, 75 bp, Homo sapiens
gcagatctggatcatcaaagacagatgtggaagatgtgaaatttgtcatcaattatgactaccctaactcctcag

SEQ ID NO: 573383 - DNA, 82 bp, Homo sapiens
ctctcctgatacagcaggcgctcaccatgttccctggaggctgtctgcggacctggtttcagcgctggtgggactgcagccg

SEQ ID NO: 573384 - DNA, 98 bp, Homo sapiens
ctcagcctgggtttagtagattatatcttcgtagccatgttactttacatccgagatgcttgtaacgatgggggtccatcctcttcaagtaagactac

SEQ ID NO: 573385 - DNA, 83 bp, Homo sapiens
gtcccgaccctggccgccccgagcggagcctggagaattctctggtggttgagatcccgccatttcggaatcagaggataacc

SEQ ID NO: 573386 - DNA, 100 bp, Homo sapiens
ggtacacaatgctagtgatttgctgattaaacccttggaaaatttccggaaggaacaaataggcttcaccaaggtacaagaaaattccccaggacacaga

SEQ ID NO: 573387 - DNA, 80 bp, Homo sapiens
ccaagggctccacacaccaagaccaaggttccaagttccccatcaagtggacagccccagaagctgccctctttggcaga

SEQ ID NO: 573388 - DNA, 83 bp, Homo sapiens
tattaaagttactgctgttaaaaagaatgaagaagcagtacgacgtctcatctgggaaaagaatctaaagtttgtgatgcttc

SEQ ID NO: 573389 - DNA, 50 bp, Homo sapiens
agccagcagctcgctcagtacaagagttctgttttgaacccaaagtggat

SEQ ID NO: 573390 - DNA, 50 bp, Homo sapiens
gaaactggcctcccaagccctgataaagcccaaatcttgtgacaaaactc

SEQ ID NO: 573391 - DNA, 82 bp, Homo sapiens
ctctgcgtcctcatcgggcttatgttcgaggtgacagagttagtccttgataattgcctgtgtgtcaatggggaaattgaag

SEQ ID NO: 573392 - DNA, 75 bp, Homo sapiens
tgacgtcctgcaggaacccgaacagttccccctggtgcagggagtggccatagtctgggacgaggccaatctgag

SEQ ID NO: 573393 - DNA, 75 bp, Homo sapiens
tgtgccaggcccgcagtcctaccccattgtgacagggcactccacagaaggatgttattatcaagtcagatgcac

SEQ ID NO: 573394 - DNA, 80 bp, Homo sapiens
aaacttgcagctgttcagaccgcgctccgccgagaagtcccgggcccagagcccggccagcaggagcagttggtcttcgg

SEQ ID NO: 573395 - DNA, 100 bp, Homo sapiens
ttggcagaagcagggaggatatgacagaggagtctactcttcatcttgtgttgagacttcgtggtggtgctaagaaaaggaagaagaagtcttacaccac

SEQ ID NO: 573396 - DNA, 74 bp, Homo sapiens
gtgtgttgtatttgagagaaattataagagccatcacctccagctacagctttggacatcagacagtgcaggag

SEQ ID NO: 573397 - DNA, 90 bp, Homo sapiens
ccagagagcgtcatggacctgggaagcttgctgtcttcgatacgtggagctccttggcggtccacattgcaatggacaacactgttgtga

SEQ ID NO: 573398 - DNA, 98 bp, Homo sapiens
gagcagagccgctgggcgccggagccgaggcgagcgccgcgcgcaccactgatccaagaaaacattcttggccaaaatctaggggaagttactgccac

SEQ ID NO: 573399 - DNA, 75 bp, Homo sapiens
ctggcctccaccatgctgactgctgccaaagccaagctctactccaggaagtgaaaatgtgctgcctcgagagcc

SEQ ID NO: 573400 - DNA, 82 bp, Homo sapiens
gcaaggtcggcagagcaaggggcttacgcagaaggacctggccacgaggctgaggggatctggcggtggagcgctaggatca

SEQ ID NO: 573401 - DNA, 73 bp, Homo sapiens
caaagactgtggaacttttaagtggagtggtggatcagaccaaagatggaatgatttaaggctacagatggaa

SEQ ID NO: 573402 - DNA, 98 bp, Homo sapiens
cgcaggaacggctccagcatcaagatccgtctgacaggaccaggcctcctcttcccacctgtccagcagcatgaaagcagcatgattggccgaccgca

SEQ ID NO: 573403 - DNA, 50 bp, Homo sapiens
ccgcctcctgccaaggaaacagtaattggctcacagtggttgattgatca

SEQ ID NO: 573404 - DNA, 100 bp, Homo sapiens
aataatctaaatatgggtgttggatgtgtgcattgcaatgttgtgtactctgatgtggctgctctgaagtctcacattcaaggttctcactgtgaagtct

SEQ ID NO: 573405 - DNA, 82 bp, Homo sapiens
ggaagggccgctttttttgcagagtcagcgctttgggaccaaggtgtggacactgccagcggctgcagccgacttggaatga

SEQ ID NO: 573406 - DNA, 51 bp, Homo sapiens
cggaccagcttttcaaacaatacagacggcgcctcatctcccagagatctt

SEQ ID NO: 573407 - DNA, 100 bp, Homo sapiens
agctgtcgtttggtttgatcttgttgactatgaggaagttctaggtgactttaggcagatcttttgccaagcatgccttagagaagaacctgactcggag

SEQ ID NO: 573408 - DNA, 99 bp, Homo sapiens
cccacttgtgtcaaaagcgaaatgggcccctggatggatagctactccggaccttacggggacatgcgatctggcatttccttgtgctcataatgagaa

SEQ ID NO: 573409 - DNA, 95 bp, Homo sapiens
agcgcagaaagtgaagctgtttcgggccagcgacccgctgctcagcgtcctcatgtggggggtaaaccactcgcactcctgtaggaggcctgctg

SEQ ID NO: 573410 - DNA, 100 bp, Homo sapiens
agctgtttcagttctagttcagatttgtctcaaaccatgaattatgtgggacagctggctgggcaggtgattgtcactgtgaaggaactctacaagggca

SEQ ID NO: 573411 - DNA, 100 bp, Homo sapiens
ccgcggagacccttcgagaaatctcgtctcgaccaagagctgaagctgatcggcctccatccctggaccagcttcgagctgaacgtctgcggagggaagc

SEQ ID NO: 573412 - DNA, 82 bp, Homo sapiens
tgagctgagtgaggccgaggccgggaggccgtgcccggagggcgtctctggccgagcctctttttgtggaaaacgacagcag

SEQ ID NO: 573413 - DNA, 90 bp, Homo sapiens
ggccaagatggcggaagcggaggagtctccaggagacccggggacagcatcgcccaggcccctgttggccatgttagaggaagatttgtt

SEQ ID NO: 573414 - DNA, 83 bp, Homo sapiens
atccagaacctccactctttcgacggtatccaactgttgaaaaacgagccagagtcttcaatggagcaagttatgtgcctgtt

SEQ ID NO: 573415 - DNA, 97 bp, Homo sapiens
tccgagaagagcagagcggagggagccccagacacggtaactaggatttctacctcaaccgcgagacctatgcaaggacggtgtggaccaactcgcg

SEQ ID NO: 573416 - DNA, 119 bp, Homo sapiens
tgtggccaagagttcagaccgtggcgaagtggagagtgacatgcagttggatggcggtgactgcgtgctgatcactggagattccatcgttagtgctgaggcagtatgggatcacgtca

SEQ ID NO: 573417 - DNA, 83 bp, Homo sapiens
gtcacctgaaagccaggaaatggtgggaggaggagctcgccaagcgcatgaaccttcagaccatggtggacacgctgcaggag

SEQ ID NO: 573418 - DNA, 100 bp, Homo sapiens
aacactggccaaccattgtgtcatctctaccctcttcccaaggatagtggccaaagcctccaagaacctcatgtccacgcaaagcttggggattgtattt

SEQ ID NO: 573419 - DNA, 75 bp, Homo sapiens
tgaggtccactactccctcctgaaaggtgaccaagaatatggcccaggtgaccaaagccctggacaaggccctga

SEQ ID NO: 573420 - DNA, 98 bp, Homo sapiens
tggattataaggatgtcatccccatggctgatgcagcaggcatcatccgctatgcaattgggttctgggaggtgatcagtgatgaacatggcatcgac

SEQ ID NO: 573421 - DNA, 130 bp, Homo sapiens
tatgaattgctgaagttgaagtacaaccagcatatcaatagattaccagaagcccagttggatcttctaagggtgtgaggatacaggcgtcaaagaccccgtgctgagacagctccataacaacatgcag

SEQ ID NO: 573422 - DNA, 100 bp, Homo sapiens
caagacaagctcagaactgagaagctgtcaccacagggaacccgagcgtcatgttagggtgaagcagaggacctcagtgctgaacatgctaaggaggttg

SEQ ID NO: 573423 - DNA, 83 bp, Homo sapiens
ggaacaatcattagttcagtgcagtgtctgacttgtgacaggctcaaatcccagccttctatatggacacaagtcatttattc

SEQ ID NO: 573424 - DNA, 90 bp, Homo sapiens
gcataagcaaatgtaactcagcgaattgtaatggaaagcatatggacaggtctacgccacatcacttagaaaacggtccggatgtacccc

SEQ ID NO: 573425 - DNA, 82 bp, Homo sapiens
aaaatgtttcagttcagcgcttttgcctgcagttgaggctttatgagacgagttgtactgctgtcacaggaaatggacgctg

SEQ ID NO: 573426 - DNA, 90 bp, Homo sapiens
ggcgggagaagagcggagcagtggtcggagatgtggcgaccggcccagctgagagccagcctggaggttacccagcagcaggccacccag

SEQ ID NO: 573427 - DNA, 100 bp, Homo sapiens
cagacggtgccccatagatggccagctttcccccgagggtcaacgagaaagagatcggctacagagtgcggtggcgccagcacagaactctgctcaatgt

SEQ ID NO: 573428 - DNA, 82 bp, Homo sapiens
ggccgagccgggatctcaggtcctcgggggcggcggccacgccaaggacggtgtttgaaagatgtatggtgatcttgaaacc

SEQ ID NO: 573429 - DNA, 101 bp, Homo sapiens
agcagggcagcacccccagccgcagcccccgctggtttggtgcacctcgatttggaggaagtagggcagggcccttatctggaaagaagtttggaaaccct

SEQ ID NO: 573430 - DNA, 90 bp, Homo sapiens
ttacatattccagtaatggtggatgaagttgttcattgtttgtcaccacaaaaaggacagctgtcccagaaaatacttgacaaattggag

SEQ ID NO: 573431 - DNA, 83 bp, Homo sapiens
agcgtcgctggcagccgctgtacttggctgaccccgcactacatctacccaccagccatcgtgcagcccagcgtggtgatccc

SEQ ID NO: 573432 - DNA, 98 bp, Homo sapiens
ttcaaactcaacaatattatccccatgtggggtggaagacaacccgtgagtattacaccttcatgtgggttactttgcccattgacctaaacaacaaa

SEQ ID NO: 573433 - DNA, 75 bp, Homo sapiens
gtgaaagtcctctttttctttgtaccacttactgagatttgatggtagagtggtggcaaagcttccttttacccc

SEQ ID NO: 573434 - DNA, 97 bp, Homo sapiens
cgatgagtacgaccagccttgggagtggaaccgggtcaccatcccagccctggcaggctgacggagccagtgcagccggaaggaaaagcactgcgag

SEQ ID NO: 573435 - DNA, 100 bp, Homo sapiens
ggagtatttcctgaactgtgtgggaatgtaagaagcacttggcaggcttgggggctttggggctgggcagcctgatcactgaactcacggcaaatgaaga

SEQ ID NO: 573436 - DNA, 75 bp, Homo sapiens
agcagccgatccagcctgcggagcctgtggggcagtatgaagtgctcctttgtgtacaagatcatgatgatccag

SEQ ID NO: 573437 - DNA, 50 bp, Homo sapiens
gaagaattcatgctcatccggatggcttgttcaatcagtatatcagtcaa

SEQ ID NO: 573438 - DNA, 83 bp, Homo sapiens
agatggtgaagcagatcgagagcaaggagggtgaggacaaaatcttcttaatcaacaagcttcactccatctacgagaggaag

SEQ ID NO: 573439 - DNA, 110 bp, Homo sapiens
cgcaaccattgacgccatgtcgggttattcgagtgaccgagaccgcggccgggaccgagggcacattcaggaccccgcgagccagcggctgacgtggaacaagtccccaa

SEQ ID NO: 573440 - DNA, 99 bp, Homo sapiens
gttgccggaggccatcgaggaagtgaagaaaatctctacagagcctccagcggtagaggcctggcctccagaaggaacttcgagaacccagtgcagccc

SEQ ID NO: 573441 - DNA, 80 bp, Homo sapiens
tatcctttggaaatgtgctcacactggattaaagcctgtggtttccacagaagcaccacctatcatatttgccacaccaa

SEQ ID NO: 573442 - DNA, 100 bp, Homo sapiens
cgcagcaggactacgaactcgtccagagggtcggcagcggcacctacggggacgtctataagctttctttagcttgcccatggtgatgtgaagatgagaa

SEQ ID NO: 573443 - DNA, 100 bp, Homo sapiens
gacaaacatgagggctttatgctgaagaaaagaaaatggcctttaaaaggctggcacaagacggcaccgaaagcgaaggaagctcctgctcctcctaaag

SEQ ID NO: 573444 - DNA, 100 bp, Homo sapiens
ggcatattgacgcaatcagaaaatcaagtaaaggaacccaacagagatctcttctgttctccactgctagagtttgccagatccggcccggtgcctgggt

SEQ ID NO: 573445 - DNA, 104 bp, Homo sapiens
actgaggatagtttagaaggatgcttggattgtctgcttcaagccctggctcaaaatagaatgttttaaaggaagttgggctactcacaagttactacataaga

SEQ ID NO: 573446 - DNA, 75 bp, Homo sapiens
ctcctgcctcagccttccgagtagctgggattacagacacatgcctggacatacaagtcgagaagtactaatcat

SEQ ID NO: 573447 - DNA, 83 bp, Homo sapiens
tcaccatttctttcacaaaccttgtgtctcaatttggctacaaaaggttgaaaggattgttgacaaaaggaaaaataaaaaag

SEQ ID NO: 573448 - DNA, 83 bp, Homo sapiens
gccgtccatgcggaagatcgtcgccacctggatgctggagtgtcaacagcatctccaccctggagcctgtgagccggtgccag

SEQ ID NO: 573449 - DNA, 82 bp, Homo sapiens
tcttggtgagaaacattaagacctactaccaggattctttctactaatccagatacttgttgaagtgctgactagtttcttg

SEQ ID NO: 573450 - DNA, 107 bp, Homo sapiens
ctgcaggctacctcaggggccgtccccaggacactgtccggatcttccctccctggtggatgcccggagcataccagtgttagcaaaatggcaaaattcatatagca

SEQ ID NO: 573451 - DNA, 74 bp, Homo sapiens
ccgggaatacagtcgctttgagaaggagcagcaacaactcaactggaagcagagggaaaatggtccccgaggat

SEQ ID NO: 573452 - DNA, 50 bp, Homo sapiens
accaacaggatgaggagaagatgccaggttttacagacatttcaccagag

SEQ ID NO: 573453 - DNA, 117 bp, Homo sapiens
tacaggctcagggtatccaagtatttgatcctggggagtctgattcagatgacaactgtacagatgtcactgcaaaccagtccagctacgggggcccagccagccagcagctgagtg

SEQ ID NO: 573454 - DNA, 100 bp, Homo sapiens
tgtggaaaatgatgcttaatatcgatggcttaccttacaaatttgaagtacagcagatgttagaagaacctcagtggggattagtatttgaaaagacaag

SEQ ID NO: 573455 - DNA, 122 bp, Homo sapiens
cgcgccatggcggcccccggcagcgcccggcgacccctgctgctgctactgctgttgctgctgctcgacctgaaccggaccttccccgacaacgtgaagttccggaagaccacggacccctg

SEQ ID NO: 573456 - DNA, 100 bp, Homo sapiens
aggaaatccaccccgctgcacttcgccgcaggaccggagtaggccctatgatacttttaacttgcactcgttggagaactccttaatggatatgataagg

SEQ ID NO: 573457 - DNA, 100 bp, Homo sapiens
ttgccatgtccgcaccgggacgatcatcctggggacctggtacatggatctgtacccagctctgaaaggtgtaaacacagttttccactgtgcgtcaccc

SEQ ID NO: 573458 - DNA, 87 bp, Homo sapiens
agcagctccgtccacaacgccgcttcggggctcctagacaatgcagatcttcgtgaagactctgactggtaagaccatcaccctcga

SEQ ID NO: 573459 - DNA, 100 bp, Homo sapiens
ctccgaagcccagcggctccccgactccttcaaggatgagtgccaaaccaaatatggaaatgctaatgcctggagatactgtaccaaagtttttgacatg

SEQ ID NO: 573460 - DNA, 75 bp, Homo sapiens
caaaactgaagatggtttgaaacagcttcacaagggtttggaaatcccttgtctccaggttgctgggattgactt

SEQ ID NO: 573461 - DNA, 98 bp, Homo sapiens
agaagcggctgcgcacggactgctggagatggtggagtccgtcaattgctctggaagcagccaaagcactggatgacaagaactgctgggaaaagctg

SEQ ID NO: 573462 - DNA, 75 bp, Homo sapiens
agccgatccagcctgcggagcctgtggggcagcgaagcagcagttttgggaatttcgatcgttttcggaataatt

SEQ ID NO: 573463 - DNA, 90 bp, Homo sapiens
gaagaaaaatattccacgcatcacgagcccccctccatgcgcctgaaggcccgacccagcagccctggcttttccgtgcttacctgcagc

SEQ ID NO: 573464 - DNA, 74 bp, Homo sapiens
aagaacaggcaccctggctggagcagagggtctgtggcttatcatgcagctcagtccaaatgcctggaccaagc

SEQ ID NO: 573465 - DNA, 50 bp, Homo sapiens
gcaggactgcgccgcgtcttcctcaaggaagaaggtagataatgactata

SEQ ID NO: 573466 - DNA, 101 bp, Homo sapiens
gaaatgcctgaaccctgcacagagggctttatacagggccgtgatgttggagaactacaggaacctggagtctgtgggtgcagcggaactgctgcctgacg

SEQ ID NO: 573467 - DNA, 74 bp, Homo sapiens
aaaagttcatctccttctgcatccttaactgagaatgagcctcccaaagtgaaatgcctgaccaagatctggca

SEQ ID NO: 573468 - DNA, 85 bp, Homo sapiens
cctgttggtccatccagagtggaaagaccacagcaagattctttcattcgtctcctcctagcctgggggaccaggctcgaactga

SEQ ID NO: 573469 - DNA, 51 bp, Homo sapiens
cgtgcccgaaacgccgaatataatcccaagaaaccccgagactcttcagtt

SEQ ID NO: 573470 - DNA, 97 bp, Homo sapiens
cgagaaagtcctctcgggagaagcagcgcctgttcccggggcagatccaggttcagggtaaccaggagccgacaacaactcctgacgcaatggttca

SEQ ID NO: 573471 - DNA, 100 bp, Homo sapiens
aagatctacatttgcttgaggaaattgctctcacactcagagcttttgaggtatcatttatcactgtgatcttaccaaagaggagctggagccaagagtt

SEQ ID NO: 573472 - DNA, 50 bp, Homo sapiens
ccgagaccgcggccgggaccgagggtcaaacgatcaaggagcaaaggcgg

SEQ ID NO: 573473 - DNA, 100 bp, Homo sapiens
tctgctgtaggcggtagcagtttgcacgatgaacttgctgaactaccagcagaaagtaggcatcatgtactgcaaagctggacagagcactgaagaagag

SEQ ID NO: 573474 - DNA, 97 bp, Homo sapiens
agaagatatgtatgacgagattattgagttaaagaagagcgccgccctgtgctgggctgccgggagctcgtcttcaggaacctctccaagatcctcc

SEQ ID NO: 573475 - DNA, 83 bp, Homo sapiens
ctgggccgctgggagccgttattggctgccgttaaggaccgttacgtttcccggggggaaactcggccgatatcctccttggc

SEQ ID NO: 573476 - DNA, 85 bp, Homo sapiens
tgagaagagcaatgacattgggggcctgtggaaattttcagcatttatgtttgaatcatctttaagtctggcggtcacaaagtgg

SEQ ID NO: 573477 - DNA, 100 bp, Homo sapiens
ctaaagatgcatcgcctaaagcatgaagtgctcccaagaagatattgctgataaactaggtgtggatatctctgcaacaaaggcagtccacataagtaat

SEQ ID NO: 573478 - DNA, 114 bp, Homo sapiens
ctctacccttctccaaaagaagagccaagagaaggtccttttctacaaatatcagagccatggctcaggttcttgggtgtctctggggagtccctgggccagaccttcctccag

SEQ ID NO: 573479 - DNA, 100 bp, Homo sapiens
gaaaagcctctgggagcagaagggaggctccaagacctcatcaacaattaagagaatgtgatcaatgggcaggactacgaagtgatgatgcagattgact

SEQ ID NO: 573480 - DNA, 82 bp, Homo sapiens
tctgccccctataaccaccatggcaggagactggtctctgtgctgacttccacccgagtggggcagttgtggccgtaggact

SEQ ID NO: 573481 - DNA, 100 bp, Homo sapiens
aaatacttgctggatggtggactcagagaccaataaaaataaactgcttgaacatcctttgactggttagccagtgggctgagggccatgtcagttttct

SEQ ID NO: 573482 - DNA, 51 bp, Homo sapiens
ggaacacgtagaaagtgcaagcaaagccgacatcggcctggctgcctgggg

SEQ ID NO: 573483 - DNA, 100 bp, Homo sapiens
gagtactggccgagatggctaagaagtccatgccaggaggtcgtctgcagtcagtgccaggtggagctcaacaggaaagtcctagcggatctggccatct

SEQ ID NO: 573484 - DNA, 75 bp, Homo sapiens
ggcaggaccagcgggcgggggcccacgaggggggccctcagcctcttggccttgaacgggctgttcatcttgatt

SEQ ID NO: 573485 - DNA, 98 bp, Homo sapiens
ttaagagatttcctagttcaaataaaggttcatcacaagacctatgaagatatagataaacgtggaaaatatgaccttttacgttcaacaagatactt

SEQ ID NO: 573486 - DNA, 82 bp, Homo sapiens
actctcggatgagatccaagtccagggtaaaaggacaaacttgcgtaaaactggctcagagcgtatcgctcatggaatgagg

SEQ ID NO: 573487 - DNA, 100 bp, Homo sapiens
cggcggtgcgtgttgctgcgagtgggacgcgcactggtcggtgccggctcaggagccggggcagcagctatgggctgcaggtgccctggatggattccac

SEQ ID NO: 573488 - DNA, 75 bp, Homo sapiens
gggttccctcaagaggaagtgagcggtgctgtcctcaggtggccattaagcagatgaatcttcagcagcagccca

SEQ ID NO: 573489 - DNA, 75 bp, Homo sapiens
gaaacacaggctagactggaagctttactagaagctgcagaaataaactatcaatcttgcccagactggagaaag

SEQ ID NO: 573490 - DNA, 100 bp, Homo sapiens
gagtacaagctgatcctgtccacagtatccggagtgtgatgcagaagtaccttgcagagagaaatgaaataacctttgacaagattttcaatcagaaaat

SEQ ID NO: 573491 - DNA, 96 bp, Homo sapiens
tgaatgccaatccccacactgccctgggactagtgcagatgatcacggacgtgcagctcgccatcttcgccaacatgctgggcgtgtcgctcttct

SEQ ID NO: 573492 - DNA, 98 bp, Homo sapiens
ggggaaaccgctgcttcagagacacagtgttctaagaacggaagcatctgggctggatggaatttagcatcaagcagagtcccctttctgttcagagt

SEQ ID NO: 573493 - DNA, 73 bp, Homo sapiens
atatctggagccatccaacatttagctgggatgaaagacagcaagatggttgacattactactgaagaactga

SEQ ID NO: 573494 - DNA, 83 bp, Homo sapiens
caccaatcccttcgatcaggatgttgatctccagtctatgtgctgaagaagcagcagcccaagagcagacaggtcaggtggag

SEQ ID NO: 573495 - DNA, 80 bp, Homo sapiens
ggagaaggccgccgggcccgggcatggtggtctggggcaacgcggaagcagcagccgctcttctaaaacattcaaaccaa

SEQ ID NO: 573496 - DNA, 50 bp, Homo sapiens
ccattctcgatcaagatcaaaatccagaattaaacaaccaccatgtcgag

SEQ ID NO: 573497 - DNA, 50 bp, Homo sapiens
ctcagcctcctgagcagctgggactacagagacggggtttcgctcttgtg

SEQ ID NO: 573498 - DNA, 50 bp, Homo sapiens
acccttctctcccctccactttctcccggactgattcttgctattccaaa

SEQ ID NO: 573499 - DNA, 80 bp, Homo sapiens
ggtggcctttccctccagctctgtctatcctaccaagtttgctgatggtcgccaaagttggagttagtatgttcaacaga

SEQ ID NO: 573500 - DNA, 75 bp, Homo sapiens
ggatcatgtcttcattgaacaggatgatgataataatagtgcagaatgcagtaatagtggccttgtcttcaaaat

SEQ ID NO: 573501 - DNA, 82 bp, Homo sapiens
ttggaactgctggaggagggccagaggctgccggcgcctcctgcctgccctgctgaggatcccatgacagattctgttgtca

SEQ ID NO: 573502 - DNA, 90 bp, Homo sapiens
aagatggtgaacaccaagttaaaatgaaggccttcagaggatatgccacaggacttcaaggcttccctgtgcctgcccacaacctcggcc

SEQ ID NO: 573503 - DNA, 90 bp, Homo sapiens
gatgtggcgcggctgcgcgaggagcaggaaaagaaatgttcccactgccaggaggcaggcgccaccttgggctgctacaacaaaggctgc

SEQ ID NO: 573504 - DNA, 52 bp, Homo sapiens
aggcgttcgctgcgcgtgcacattccggtgaaaggtgtagcagtcactcggc

SEQ ID NO: 573505 - DNA, 83 bp, Homo sapiens
gggagctggacggcgagcgcgagcggcgcgagaaagtccccgttctccgtgtcctgctgtccgctgacctgaaggggttccag

SEQ ID NO: 573506 - DNA, 114 bp, Homo sapiens
gggccctcttcgacagctacacaaatctggaacgggtggccgattactgcgagaacaactacatacaggtgagcgagtgctgtgctttcatgggcctcttctttatgaagcaaa

SEQ ID NO: 573507 - DNA, 100 bp, Homo sapiens
acagaattttgcagcaacagttctcagaaacaccaagggcaacgtcagatgccacctcagtatggacagcaaggtgtgagtggttactgccagcagggcc

SEQ ID NO: 573508 - DNA, 101 bp, Homo sapiens
acttggactgggccattggcagcagaattcctgccaaagcattaattccagactctgatcacacgccagaagccctgtcaatgaagacaatcaagatggtg

SEQ ID NO: 573509 - DNA, 80 bp, Homo sapiens
ttgaggtcggcagctcccgagaagcaggagaagcagagtttttgcaatcccagattacaggaatgcagtaatcgtggcca

SEQ ID NO: 573510 - DNA, 75 bp, Homo sapiens
caagagggatgccagagccttctggtgaaaaggctgatagcttttacatcatagagtctggcgaagtgagcatct

SEQ ID NO: 573511 - DNA, 73 bp, Homo sapiens
atcaaaggataaacttgaccaggtttccagtgaaataagaagaatgttggtgaaaagcacagaaaccagtgac

SEQ ID NO: 573512 - DNA, 98 bp, Homo sapiens
tggggtgagaccctcacttcatccggtctcggcgcggaagatggccggcggcgtggacggccccatcgggatcccgttccccgaccacagcagcgaca

SEQ ID NO: 573513 - DNA, 100 bp, Homo sapiens
gctggaacagtttgaggacctcctggtgcgcatcctgctgctggctgcccttgtctcctttagcgcttgcatcaaacacccctaactcagaagtgtgcag

SEQ ID NO: 573514 - DNA, 100 bp, Homo sapiens
agcgttgagatgtgggagagaatgcactaatctgaaggcagccctgcgtcaggaattcagcaacctggaagagcaggataacctagggtctcagtttagc

SEQ ID NO: 573515 - DNA, 100 bp, Homo sapiens
tcttttcagtgccagtccatccatcacgaccacatttgtcatgatgacagtgacaagagaggaaaatatgatgttcccaagtggctctctcccagtagca

SEQ ID NO: 573516 - DNA, 51 bp, Homo sapiens
taaggattccaagtaactcttatttgatggcttaagcaaaatcagactaaa

SEQ ID NO: 573517 - DNA, 80 bp, Homo sapiens
gcgacttcagcactggcaagatcggctggttcctgggaggccagttaaatgtctctggtgctggagaatctggtaaaagc

SEQ ID NO: 573518 - DNA, 101 bp, Homo sapiens
tctgtccatctggattcacaggaagccactgcgagaaaggatgacacagcaagaaggccctcaccagatgctgagcagatgccggcaccatgcctgtggac

SEQ ID NO: 573519 - DNA, 95 bp, Homo sapiens
ctgcaggcgccgccgccggacgtcggcaacggagaagaacactctgctccagccaaggtggtgagggcagctgttcctaaacagcgcaaaggcag

SEQ ID NO: 573520 - DNA, 83 bp, Homo sapiens
cttctgcctcttgatctccgccaccgtcttcaggccagggggatatgagactttctactcggaatatcctgagtgttgcgtgg

SEQ ID NO: 573521 - DNA, 100 bp, Homo sapiens
aagaagatgaatctacagaaaagctatcttctgtatgcatgggtgaagacccccttgtggacgatcaaaatgaacgagatatcaattcagtcgctggtgt

SEQ ID NO: 573522 - DNA, 98 bp, Homo sapiens
cttagctgtgctcgcgctactctctctttctggcctggaggctatccagcgcctttttgcaaatgtgtaacttgcctatcaaagtagtttgtagggca

SEQ ID NO: 573523 - DNA, 83 bp, Homo sapiens
ttgtactatcctcggtgctgtggtgcagagctagttcctctccagctcagccgcgtaggtgcttttgaagatgatgatatcac

SEQ ID NO: 573524 - DNA, 82 bp, Homo sapiens
cctggcctcgcgggccgtgtctccggcatcatgtgtgtttgcctgagaatacagatcaacccacagaacaaagcggatttcc

SEQ ID NO: 573525 - DNA, 100 bp, Homo sapiens
tcacctgacgctcttcctgaccttggtgtccgggctagagttcattcgtttcgagctggatctgtttctctgcaggtggatattgttcccagccaggggg

SEQ ID NO: 573526 - DNA, 74 bp, Homo sapiens
ctcaaagagcagctggctcccctggaaaaggtaccgaaagcacagtaatcactggtgtcgatattgtcatgaac

SEQ ID NO: 573527 - DNA, 101 bp, Homo sapiens
ggaattgaaacagtacaactgcctccaccagaggaaaatagtatgggaattcctattatgtaacaaatgtggcaattattttggatctatcacctgtcatc

SEQ ID NO: 573528 - DNA, 100 bp, Homo sapiens
ctcggatatgggggtgggcgtcttcacccccaccattgaggcccgcacagcccagtccagtgtgggacgtgcgtgcggcgagatggacactcccccgctc

SEQ ID NO: 573529 - DNA, 100 bp, Homo sapiens
gcttgctcctcggcttgcatttgtttctgctgaccgcgggccctgccctgggctggaacgaccctgtgcacgttcgaaggctgtgggaaacgcttttcac

SEQ ID NO: 573530 - DNA, 121 bp, Homo sapiens
ttcggtggactccttcggcagtccacccaccgccgccgcctcccagccatggaattccatgaacacttgcacagcataggcaccaaggaaggtttgaaggaaagaaaactacaaaaagcag

SEQ ID NO: 573531 - DNA, 112 bp, Homo sapiens
catgtatttggaacaaaaaaaggagatgcctggcagccccgctctctgcacaattctgtggtgttcttggtcacacatttatggagtttctgaagggcagtggagattactg

SEQ ID NO: 573532 - DNA, 75 bp, Homo sapiens
ctcggcagctgcctcctggccagagcccagtgctgggcctaaaggagataacatttatgaatggagatcaactat

SEQ ID NO: 573533 - DNA, 90 bp, Homo sapiens
ggagagccgggtaccggccgtggaagcggccaccgactactgtcagcagctgtgccagtggtggtgaccgcggtggcttcaaaaattttg

SEQ ID NO: 573534 - DNA, 98 bp, Homo sapiens
caacctcaacagacagtttttgtttcaaaagaaacatgttggaagatcaaaggcacagaaactggcgatggaatatgagaggagccctctggaaagaa

SEQ ID NO: 573535 - DNA, 80 bp, Homo sapiens
acacggcctacaacaccaagagcaaccatgtccaagggacctgcagttggtattgatcttggcaccacctactcttgtgt

SEQ ID NO: 573536 - DNA, 80 bp, Homo sapiens
ccgttccctggaggtcctgtggaatgctttccccagacatggccaacaagggtccttcctatggcatgagccgcgaagtg

SEQ ID NO: 573537 - DNA, 101 bp, Homo sapiens
tgataggggggttccatctcccaacttgtccatgaaggtgtcttgctgcaggtaactaatgaagaagtggtcaaccacagagtcttcaagaaataagaaat

SEQ ID NO: 573538 - DNA, 100 bp, Homo sapiens
cccgcgatgccagccgcccccatagtgttctgccagttctggataatccactgtccaagaaggttcgaggcctcattgatagcttacgggcacagagatc

SEQ ID NO: 573539 - DNA, 90 bp, Homo sapiens
gtgaagcctgcctacagttttcacaaatctccaaaagttttggaaggtctccatcaagaaaacaaaattattcatcaaaaaatgaaaact

SEQ ID NO: 573540 - DNA, 98 bp, Homo sapiens
gcgcggccgccgccgctgcagacgacgagtccgccctcgtcccgcgcccccggggctcgcggagccagctcaaactggaggattataaggatcgcctg

SEQ ID NO: 573541 - DNA, 100 bp, Homo sapiens
caaagagtcacctaaagttaggcggcactccagccccagctcgatctatccatactaatggaaatgtaactggaactgactctgatgataaaatcaagga

SEQ ID NO: 573542 - DNA, 83 bp, Homo sapiens
ctgagggcgcagaggcaggcagaagcatcagatggtgaaggagaaggagacacagaagtgatgcagcaggagacagttccagt

SEQ ID NO: 573543 - DNA, 97 bp, Homo sapiens
cctgaagccaatatgtctcggagtttcacctgaggcccatgctcctgtatcacgtggaagagatagttatggaggtccacctcgaagggaaccgctg

SEQ ID NO: 573544 - DNA, 76 bp, Homo sapiens
ccctggagagaccgcggggctgggcgctgctttaccacgcgttggtctgccgggccgcaagtacagccctgggtac

SEQ ID NO: 573545 - DNA, 110 bp, Homo sapiens
gaaaacggaagcgcagggagaaggaagaggtgtttgaaaagggacttgccatgaggtgttgaagccttgtttcactgagttggagagactggacctaaatggcgcagcat

SEQ ID NO: 573546 - DNA, 89 bp, Homo sapiens
tgacggagctgcagtcggcactgctactgcgaagacagctggcaggtccgcgggagagctgtggggcttggtgagtgtttcgtggcctc

SEQ ID NO: 573547 - DNA, 82 bp, Homo sapiens
tatgagagcggacgggccatacccaataaccaggtgcttggcaaaatcgagcgggccattgcgccactggcttcaccacgcg

SEQ ID NO: 573548 - DNA, 89 bp, Homo sapiens
gggtagaaggcataacctctgagggttaccattactattatgatcttatctcaggagctgactggaaataccggcatgcaggattgatg

SEQ ID NO: 573549 - DNA, 82 bp, Homo sapiens
catcacagacaccgcctacaggagtatgatgcaagcatgcttttcacttccactgcatctctcgctggctcaaaacacgaca

SEQ ID NO: 573550 - DNA, 75 bp, Homo sapiens
caagctctccagcttactctgcaagttctccccggacggcaagtacctggaaggaatgcagctcatttcagaaaa

SEQ ID NO: 573551 - DNA, 100 bp, Homo sapiens
ggcgagcagccctgcctccggacggaatcccgttctgcttccagaagtggaagtgctcacggatcggggaaatctgcaaggcatacccctgcaaggtctc

SEQ ID NO: 573552 - DNA, 74 bp, Homo sapiens
cacaaatccacacgccctgtgaagaaggtctccagttgatgataattagaagcatgctttccactgaacttccc

SEQ ID NO: 573553 - DNA, 76 bp, Homo sapiens
ctccgccaagaggcgccgcaggaggtagcagaaggtcaagaaatttgtgtgattgaagccatgaaaatgcagaata

SEQ ID NO: 573554 - DNA, 102 bp, Homo sapiens
agagttggagcacaggcttgtccggggagcagtatgccggaagctggttttcaggccacaaatgctttcacagctttaccgatttgttacaactcaagcaag

SEQ ID NO: 573555 - DNA, 83 bp, Homo sapiens
ttctcacgacgggccgagcctgccactgtttttgtcatccattggagggacactgtatgaggttggaaagcctgaaatgcaac

SEQ ID NO: 573556 - DNA, 50 bp, Homo sapiens
cagaacgcttgcccagcaaatgcgaagctcttcctgctgcccacattcct

SEQ ID NO: 573557 - DNA, 100 bp, Homo sapiens
cccgcccatccccgctccccgaggccggccgcctggtcatggcgcagccgggcccggcttcccagcctgacggactggctttaattttgggataatcaca

SEQ ID NO: 573558 - DNA, 83 bp, Homo sapiens
cagacttcaggcagaccctcagcgctttcctcatgggattcgccagctagctaattatgctcttacagcactactttcagatg

SEQ ID NO: 573559 - DNA, 90 bp, Homo sapiens
ggaaagaccaggaaaaaccacatccccagagtgggtgatttcaacgaggaacttgaaactggtattgttgaccttcttataccctctccc

SEQ ID NO: 573560 - DNA, 75 bp, Homo sapiens
cagccctttgatgaccgcagcaggtagatgatgagctggagatcaaggcctactatgcaggccacgtgctggggg

SEQ ID NO: 573561 - DNA, 75 bp, Homo sapiens
gccagcgcatccagagtcagctgcatgaagctggagggcaggtctgccacctcttccttccatgcctccccgaaa

SEQ ID NO: 573562 - DNA, 101 bp, Homo sapiens
ggttagtgtgctctgagggagggtccgagccagccgctgttttgccggaggagcccctcaggccacctgaaagatgtctgaaaattccagtgacagtgatt

SEQ ID NO: 573563 - DNA, 90 bp, Homo sapiens
aatcaagcgggagttcaaggaggtgctgaagagcgaggaggtgattttacaacgagatgctgctctccatagggatgctcatgctgtcag

SEQ ID NO: 573564 - DNA, 100 bp, Homo sapiens
caccaacttgggcaaaatatatgccatgaaagtcctaaggaaggttatgatgtgattgctcaagcccaatctgggactgggaaaacggccacatttgcca

SEQ ID NO: 573565 - DNA, 90 bp, Homo sapiens
ctggattcttcaggacttcaggaagtgcatttagctgggatgtgaccatccacggcaagatagcatggatttcagtaatgaatgggggga

SEQ ID NO: 573566 - DNA, 51 bp, Homo sapiens
tggacgcggcgctgctgaccgacatcgaagagtccatgttgtacttagatg

SEQ ID NO: 573567 - DNA, 101 bp, Homo sapiens
atttgggcctgatgagcccagctgggtgcctgcctcatacttggagaaaggggaagtgctgcaatgaacctcagaggctggatcttgctgactcatctggg

SEQ ID NO: 573568 - DNA, 100 bp, Homo sapiens
tctactgcgtctaccagagcatggtgctcttcttcttcgagaattacaccggggtccagatctcttccgttccctgctggcagttcatcagctggatcag

SEQ ID NO: 573569 - DNA, 101 bp, Homo sapiens
agcgtgtgggaaaacatgcatccaagttccagtttgtggcctcctaccaggagctcatggttgagtgtacgaagaaatgatatttggagttcttacaacat

SEQ ID NO: 573570 - DNA, 90 bp, Homo sapiens
ggaacttctgatgaggatgttacagatgctggtcttaccacttatcatctccagtcttgtcacaggtgctggagaatctggtaaaagcac

SEQ ID NO: 573571 - DNA, 75 bp, Homo sapiens
gctgtcggccccggcccgactctatcacaagaaggtttcaggcacagaactgtatatccaataatagtgaaatgg

SEQ ID NO: 573572 - DNA, 96 bp, Homo sapiens
ttcttttgacacaatgcagcaagaacttcagattggagctgatgatgttgaagcatttgttattgacgggagctccatttaaataacaacctgtta

SEQ ID NO: 573573 - DNA, 50 bp, Homo sapiens
cttttgcttccaaatacaagctgtatagcatgggcctcctacatgaccaa

SEQ ID NO: 573574 - DNA, 89 bp, Homo sapiens
tacaaatatgccatttgtaggacttcggttggagggcaattgaaggaacagactaaaaatcgtgtcctggaaggaaactacaggtacta

SEQ ID NO: 573575 - DNA, 75 bp, Homo sapiens
ggcaaccatgcagctattaaccagtgtcagggaaatcctcattgacgattcaatttgttgaaggccaatttgtgg

SEQ ID NO: 573576 - DNA, 100 bp, Homo sapiens
caacgccaagcagcccaccgacatggcccggaggcagcagaagattatcgggaccattccactgatgcctaatccagggccatcgagccaagcagcaagc

SEQ ID NO: 573577 - DNA, 90 bp, Homo sapiens
cttcttcctcaactatctcgctgacacgcagttggaatcgaagcctcttaaaatggcagatgacttggacttcgagacaggagatgcagg

SEQ ID NO: 573578 - DNA, 75 bp, Homo sapiens
agaagtgggattactggattatatggttctccagcatttggctcaaggccccaagggcacatgtgacaagaaggc

SEQ ID NO: 573579 - DNA, 73 bp, Homo sapiens
tccgacgctggctccgctctatccggctttgctaggggagaatgtcaaaactggaccaatggggccaggctga

SEQ ID NO: 573580 - DNA, 100 bp, Homo sapiens
cttctcagcgcctatggcgaggtcggacgcgtcttctttcaggctgaggcggttcagcgaggaagaatgcctccaacccagcccaatccaggccagtacg

SEQ ID NO: 573581 - DNA, 75 bp, Homo sapiens
catgcgtggcgtcggggctgtggcacggtcgggtccgggaggaggtggccaagttggagaagcacttgatgcttc

SEQ ID NO: 573582 - DNA, 73 bp, Homo sapiens
gaagacaggcctttcctgctgagcccagcctatcttcgcagcctgctcagagtgtgaacatggctacgcctct

SEQ ID NO: 573583 - DNA, 100 bp, Homo sapiens
gaggggggagcggcgttggaggccaccgtttccaggtggaacaatccaaagttttaatcaaagaaggtggtattcagttgctgcttacaatagttgatac

SEQ ID NO: 573584 - DNA, 96 bp, Homo sapiens
cagaggctcttcatgattctttggctcaaaggagttgtatttagtgtgacgactgttgacctgaaaagtcatccgtccttggctcaggatttggag

SEQ ID NO: 573585 - DNA, 97 bp, Homo sapiens
tcggtgcggctctcggactctgctcctcactcaccgcgtggacacgatcgtctatccagaagttaaaggagagattgctcgtaaagatgaaaagctg

SEQ ID NO: 573586 - DNA, 90 bp, Homo sapiens
aaaaggcctgaaataaccaactggacgctctgctgttgcccgtattcaggagttcttcagacggagaaaagaaaggaaagaaatggaaga

SEQ ID NO: 573587 - DNA, 75 bp, Homo sapiens
cacaacggactcatcaagattggctctgagctagagccggtgcaggccacgcagaacaagacagggaagtatgtg

SEQ ID NO: 573588 - DNA, 81 bp, Homo sapiens
gcgtcgccgccgccgccgccatgaacaactcgggcgccgacgagatcggctctctgtcctagggcctggcggcagttacac

SEQ ID NO: 573589 - DNA, 73 bp, Homo sapiens
acacggaggtggaactccatgaccctggaccagcgggactcagtgtggcaaaggagcagagaactttgacaag

SEQ ID NO: 573590 - DNA, 78 bp, Homo sapiens
atctggctgcgccacagaaagcctgagcttgagcggcccatcaaggctaagtcctatcagccatggaaacaccattgc

SEQ ID NO: 573591 - DNA, 100 bp, Homo sapiens
gagctccccagctggtggctggagcgaccccttgttctttggtggcgctgccatgcctgatggagctctggacacagctgtctgcgctgacgaagtgggg

SEQ ID NO: 573592 - DNA, 75 bp, Homo sapiens
accctgcctcattcttctgccttcacgcctcttaaggtaagaatgattgatgttggctgatattggagtgctcat

SEQ ID NO: 573593 - DNA, 100 bp, Homo sapiens
aagagatcatagccgagtatgaaagtcaagtcaaagcactcactgaaaatgaccgagacagccagtcgccgttgaggaatcctctgttgtcaacatcgag

SEQ ID NO: 573594 - DNA, 98 bp, Homo sapiens
ttcacttcacctctttctggaaaccagttgatcatggccttgccaggttggtgacagtatattgtgagcatggtcataaagctgccaaaatcaacccc

SEQ ID NO: 573595 - DNA, 75 bp, Homo sapiens
aaagaatactattgttgccacaggggatttcagtcataatcggttgtctaactggaacatcagcttggaatcaca

SEQ ID NO: 573596 - DNA, 74 bp, Homo sapiens
ccgccacaccacgctgagcctcctgaagcgggccaaggtgcacatcaagctatggaagtgataaacaagtccag

SEQ ID NO: 573597 - DNA, 91 bp, Homo sapiens
agagacaatggccccgatgggatggagcccgaaggcgtcatcgagtatgacgccgtgcccatccagtccagcgtggtgttatgttcctgcc

SEQ ID NO: 573598 - DNA, 74 bp, Homo sapiens
aaagatatcctggaaatgtttactattagtgtaagttctctctttccagacgtagtgaactgtatgcagactga

SEQ ID NO: 573599 - DNA, 100 bp, Homo sapiens
ttatgatcagcacaaccttgttgcatgccagataaatgatcaggttcgatacaagaggctgttttcctagcgtggcttgctgcctttggtaagaacatgt

SEQ ID NO: 573600 - DNA, 100 bp, Homo sapiens
ctcctgggctcaagtgatcctcctgcctcagcctcccgagtacctgagattagcccaggaaaggccgagggggacggcaagatgcacatcaccctctgtg

SEQ ID NO: 573601 - DNA, 75 bp, Homo sapiens
cgtgccctacttcaaggataagggcgacagcaacagctctgccggctggaagtgtcggagatgtatgcagtgtga

SEQ ID NO: 573602 - DNA, 95 bp, Homo sapiens
gcgtgtctaggtgagtcgcggtgggtcctcgcttgcagttcagcgaccacggtaaaaaagagtgtcaagtggacatgcaaagcttgtggagagaa

SEQ ID NO: 573603 - DNA, 100 bp, Homo sapiens
atccaatcaagtgcccttggacaaagcctgaaaccaggcttcagagaactttaccagctggtcggtctttcgttgccatggataccaaggatatccctca

SEQ ID NO: 573604 - DNA, 83 bp, Homo sapiens
tagaaaagcagaaagccgcctcttggtttgcgtcctgcactgaaaggaaatgacggattttctgctgtgacttactcgaagcc

SEQ ID NO: 573605 - DNA, 60 bp, Homo sapiens
gaaaagtcacaaactccttcacactgcagatgttgatggtggtggttgggggccaagcac

SEQ ID NO: 573606 - DNA, 95 bp, Homo sapiens
gggcctggcccccgggactccctgtgccttgcttggagctgacgccgacgggagtgtctgtgggccagcggtggcaggatgtcctgcctgtggcc

SEQ ID NO: 573607 - DNA, 90 bp, Homo sapiens
cggagaccccgaaaacggaagcgcagggagaaggaagaggtgtttgaaaagctatggcattgctggttctaccaacgtgacaggtgatca

SEQ ID NO: 573608 - DNA, 95 bp, Homo sapiens
gccgccgccgccgcgggatccgagtgcgggcgcgggcgcgggcgctcccggcgagccacggctaaaataaatgaagctgtagaatgcttactgtc

SEQ ID NO: 573609 - DNA, 100 bp, Homo sapiens
gcgggtgttccgggagcaccggggctccgtcatctgtctggagggtgctttcttctgcgacctggtactcatctacctcatcaaaaagagagagttttac

SEQ ID NO: 573610 - DNA, 75 bp, Homo sapiens
taaacagcatgacgtgaggccgtggatgcaggcattaagagataaaagcaacagtgtttgatgactgcaagaaag

SEQ ID NO: 573611 - DNA, 83 bp, Homo sapiens
gatgcaagtgatagaaccccagtttcaacgagacttcatttcattgctccctaaagagcattaggtggtctcttcagtcagcc

SEQ ID NO: 573612 - DNA, 96 bp, Homo sapiens
atcggggtatactggatacactcaagcttcttggacacttaatgattgttggcaagaaatgtgctgctgatctgggcctgaataagggttatcgaa

SEQ ID NO: 573613 - DNA, 101 bp, Homo sapiens
aggactactgcaccagaatgaaggagaaccagaaacatatctattatatcacagaacaccttccaccatgaccacctcagcaagttcccacttaaataaag

SEQ ID NO: 573614 - DNA, 99 bp, Homo sapiens
ttttaaactacagaaaagatggaaactttggacttcaagaacttggattaaagaacttgacagcggcaacctttggcactgcatccatgagcatgccca

SEQ ID NO: 573615 - DNA, 100 bp, Homo sapiens
cggcggaacccgtgggcctgtggactgcagcctcggcggtcagcagcggaagatccatccaaaagctatgtgaaattacgagactttgtgcttgtgaagc

SEQ ID NO: 573616 - DNA, 98 bp, Homo sapiens
tccgatgctgctactgctgtttctggtgtcttgacaaatacctgctccatctcaaccaggttgctgcagcaactggtcacacagtagtgttggtagac

SEQ ID NO: 573617 - DNA, 98 bp, Homo sapiens
tagcatccggaaacatgtggccctacatcaggaatttcatggcaagggtggttatcactaggctaaaactggacaaagaccgcaaaaagatcctcgaa

SEQ ID NO: 573618 - DNA, 75 bp, Homo sapiens
atgtgggaattggggagataaaggatatccggttggtgagggtatattacctctctctggaattttacatgggcc

SEQ ID NO: 573619 - DNA, 90 bp, Homo sapiens
cgctccttcggcatgaccccagtgctgcctgcattcgcggggcatgttcccgaggctgtcaccaggctgtgctcctggcggacatcctcc

SEQ ID NO: 573620 - DNA, 75 bp, Homo sapiens
gcctctgctgacacataaacacttcaatgcacacctcaaaatcgctgttggctggggaacagaccagggaattgg

SEQ ID NO: 573621 - DNA, 96 bp, Homo sapiens
cgtccccggggctgggctgcagcaagccgcacctggagaagctgaccctgggcatcacgcgcatcctagccagccaagccagggacttgttgtcaa

SEQ ID NO: 573622 - DNA, 100 bp, Homo sapiens
aagtgagaggtcagactcctaaggacaaattgatggccaggagatcactgccaccgccgtgctggccccctggcctaggccaccccccaggagattcagc

SEQ ID NO: 573623 - DNA, 82 bp, Homo sapiens
ggaggtggccatcttcggaccccccaacaccctctacgaaggcggctacttcaaggttgtatcagagtaagatggacggtag

SEQ ID NO: 573624 - DNA, 75 bp, Homo sapiens
cttctgttctacagacctctctcctcttcctgctcatggggttcaactccaccagtaactgttttcaaaggttca

SEQ ID NO: 573625 - DNA, 75 bp, Homo sapiens
gccacctggtttataacaaaaggtggcctgccatgggtatccatggtgacaagagtcaacaagagcgtgactggg

SEQ ID NO: 573626 - DNA, 100 bp, Homo sapiens
ttgagctccaggagttcgtctcttacgtctgcggaagtgcagctgcctcagttcttagcgcagctggtcacctgacttttgaatgccgcaattttctccg

SEQ ID NO: 573627 - DNA, 82 bp, Homo sapiens
ctcttcagggatgagtcatgtggcagtggaaaatgcgctcgggctggaccagcagctgacctgatctccagcttcctgctca

SEQ ID NO: 573628 - DNA, 96 bp, Homo sapiens
tatctgcagtgaagggccaggagcgcttcagcctctaccaaaccagaagtctgatccatgagctgaaggtgtcgcggtcatccccgtgctgcagag

SEQ ID NO: 573629 - DNA, 95 bp, Homo sapiens
cggcccccgagagccgccgacatgaagaaagacgtgcggatcctgctggtgggagaactttttccagaggcctcaaatacagcctcctagagcta

SEQ ID NO: 573630 - DNA, 87 bp, Homo sapiens
gagcccagttctgtttcacagacaaggattgctggtgcccagctaagacctgaatgccatcaccctccccagggctctgcagttttc

SEQ ID NO: 573631 - DNA, 83 bp, Homo sapiens
gtctcttcccacggacgcgcgagacaatgaggagcattttgaaagcgaagcagaagccgtagaatcagcggcgagcctgttga

SEQ ID NO: 573632 - DNA, 75 bp, Homo sapiens
acgccttaccaagtggctgctgaaattaggctgaacgagcgcgaccgcctgatcaagaggctgggccggaagacg

SEQ ID NO: 573633 - DNA, 75 bp, Homo sapiens
cacggaccttgggctgaccggtctgtctggcttcagattttaacctttgagaccaagaacccgtcggaattagca

SEQ ID NO: 573634 - DNA, 98 bp, Homo sapiens
atcctgtaaatacgaatctttccaaaggagatgcccggagggacagcagtgtgataaaagaggaaatcaaagcctttcttgccaatcggaggatttcc

SEQ ID NO: 573635 - DNA, 100 bp, Homo sapiens
gtttgatgaagatggagataaacccccagattttcttggaaaagttgccattcccttgctgtccgtactccaaagattcaggtttactcacgtcatccag

SEQ ID NO: 573636 - DNA, 50 bp, Homo sapiens
cttacaacatggcagacattgacaaaatctacctgttactcgtattttgg

SEQ ID NO: 573637 - DNA, 100 bp, Homo sapiens
gctgaaaagacttcgctgttattaaaccttcaagaatgttctcgtaccaaaaactgtggaagagttatgtgaaacttcgccacctcctagcaaatagtcc

SEQ ID NO: 573638 - DNA, 75 bp, Homo sapiens
ggctgggcgacttgcgaggatgagagcgacgaagccaactgtccaggcatagcgcgctggctaggactccagtac

SEQ ID NO: 573639 - DNA, 100 bp, Homo sapiens
ccaagatgagctgcagagcaagcagtccaaaggcctggaggagagcagcctagggcctaggcccgggccaccatggcgctgcctccaggcccagccgccc

SEQ ID NO: 573640 - DNA, 100 bp, Homo sapiens
ctggagaacagcctcacttctttgattgaatacttacataatgcattggaacatgacatgagattaaggcatgttatttgaaagcaattgagacgcaacc

SEQ ID NO: 573641 - DNA, 82 bp, Homo sapiens
ctcgggttctgacaagatggccgggctgccccgcaggatcatcaagtatttgtttaccagcaacttcagttggtcaagatgc

SEQ ID NO: 573642 - DNA, 82 bp, Homo sapiens
gcgctggtgcagccaccctcgctccctctgctcttcctcccttcgctcgcaccatgatctggtggctggacccagagctgac

SEQ ID NO: 573643 - DNA, 98 bp, Homo sapiens
agagacgtcatacttggaaatggctgcaggttcagattttcggctttgtgagaaaccttaccatcaaacacgatggccagcaacgttaccaacaagac

SEQ ID NO: 573644 - DNA, 100 bp, Homo sapiens
cctcatccctgtacgggtgcctggcctcgcttctgtcccagggcaagattcttgccaagagaattaatgtgcgtattgagcacattaagcactctaagag

SEQ ID NO: 573645 - DNA, 101 bp, Homo sapiens
tgcgcgaggtctaccccgtgggcatcttccagaaacgcaagaagtacaacgtgccggtccaggtctcccacacattctccaactacccgcccggcgtccgc

SEQ ID NO: 573646 - DNA, 100 bp, Homo sapiens
tctagttccaacatggttatcatgctcattgggaataagagttaagtgggcagaccaacatccacctcagcaaaaacttcttcctgacgaatcgcgccag

SEQ ID NO: 573647 - DNA, 82 bp, Homo sapiens
attttgtggccttagctacaggagaggaaaatcctgccttgcttcgttgggcctatgcaagaacaataaatgtctatcctaa

SEQ ID NO: 573648 - DNA, 82 bp, Homo sapiens
aggaaaagctggccaagaacggcatctgccagagaatcttcggggagaagatttggtgttgtactgcgaggcattcctgacc

SEQ ID NO: 573649 - DNA, 117 bp, Homo sapiens
gggagcctcgtggctgcgtcaccgccgcccccccagacaagatggacaccgcggaggaaggttccttgcattgactccatggagagtatatcacctgatttccgtcatgatacttgg

SEQ ID NO: 573650 - DNA, 98 bp, Homo sapiens
gccggccaccgccgagacccagcacatcgccgaccagatcccagatgcagtgactggttactacctgaaccgtgctggctttgaggcctcagacccac

SEQ ID NO: 573651 - DNA, 100 bp, Homo sapiens
gcgggcgcggagatgtggcccctggtagcggcgctgttgctgggctcggcgtgctgcggtccttcagttgagaccaaagaccggtgtcaggggattgcac

SEQ ID NO: 573652 - DNA, 75 bp, Homo sapiens
tgtggagtttgatgttgttgaaggagaaaagagcccaatgacgaaagtggagctaacgtggatgcgtccaaaatg

SEQ ID NO: 573653 - DNA, 96 bp, Homo sapiens
tgcttggccaccgccaccgccgtccgaagggctcgagcccgtgaccattgtgaggtagatattttgttctaattttccagatgaggaagctgagac

SEQ ID NO: 573654 - DNA, 100 bp, Homo sapiens
aggaaacctttccaacacagatgtccaagctgccaagttatgggaagctggctggaagcagcggtactacaagaacaaatttgatgtggatgcagctgat

SEQ ID NO: 573655 - DNA, 75 bp, Homo sapiens
gtcccagctcggcccgcgggggagccccgggagccgcacggtctataacttgacccaggagttcttccggcacga

SEQ ID NO: 573656 - DNA, 88 bp, Homo sapiens
caggttttggtgggccagttattagttctctatatcatgaagaaaccatcagggacagagcagaatgggctgatatagatccggtgcc

SEQ ID NO: 573657 - DNA, 99 bp, Homo sapiens
acaaagaactcaagaaaatcttcgaagacttttcatttgtggggacattcatggacaattctttgatttgatgaagctctttgaagtcgggggatctcc

SEQ ID NO: 573658 - DNA, 74 bp, Homo sapiens
ggggctgcgtctgctgttgctgctgctgctgccgctgctaggcaaagaccatggtgaatccgggcagcagctcg

SEQ ID NO: 573659 - DNA, 90 bp, Homo sapiens
gcaactccgccgcccaccatggcttccgaggagctgtacgagaactccatccggcacaacctgtcactgcatagtcgattcatgcgggtc

SEQ ID NO: 573660 - DNA, 98 bp, Homo sapiens
cttgcagactgtggcgcaactggtcttggtagcggaggcacccgaatgctgcccgggtgaggatggctgcagctcctccaagttactgttttgttgcc

SEQ ID NO: 573661 - DNA, 101 bp, Homo sapiens
ggtcgcagggctgcgggactacaatcttcgcatgaaatggaagagagggtggtgcggatagcttgaggaaggccagctgcgggccgtccagcggctgtgcc

SEQ ID NO: 573662 - DNA, 75 bp, Homo sapiens
agtcaactccttcaagcatataagtggtcaaacaagaataacaagcctttgtattcatttgaagataatgcagac

SEQ ID NO: 573663 - DNA, 95 bp, Homo sapiens
agattgtgaagaagaatttcgatctccgccctggggtcattgtcaggtctgctcaccaggtggccagataccgcccacgtgcccccatcattgct

SEQ ID NO: 573664 - DNA, 100 bp, Homo sapiens
tattagaaatgagctgaagaccattcacagctatatcgagaagtttactgactttcttcggctctttgtgagtgttcacctaagaagaatcgagtcttac

SEQ ID NO: 573665 - DNA, 100 bp, Homo sapiens
cttcctctcggtggtgcagctcaatcctttcccttcaggcaggtaaaaatcaaggtgaccccaagaaaatggctcctcctccaaaggaggtagaagaaga

SEQ ID NO: 573666 - DNA, 90 bp, Homo sapiens
ggacatcctggaagctgggaaagggttcctcagtggtgtgctgaatattgtctttccatccactaccagcacgggggcgtgatatgcaca

SEQ ID NO: 573667 - DNA, 85 bp, Homo sapiens
catcttgtggggccatccagtacatcccaactgagctggatcaaatgcttgtggttggtggcatcgaccgggtttatgaaattgg

SEQ ID NO: 573668 - DNA, 98 bp, Homo sapiens
ctcaccctggacattcagaacaagaaaattactgaggtcgccctcatgggccacctaagaattctgcttggtcagaatcgtgatggcattgtgttcag

SEQ ID NO: 573669 - DNA, 100 bp, Homo sapiens
cgtgggaggagctggagctctacaaggacggaggcgttgcgattattgaccagtggatctgcgcacacgccagagctctgcgtgcctcttgctgtgccct

SEQ ID NO: 573670 - DNA, 102 bp, Homo sapiens
tgtcctagcagttgtggtcatcggagctgtggtcgctgctgtgatgtgtaggaggaagagttcaggtggacaagatcgaggaacttgatcaagaaaacgaag

SEQ ID NO: 573671 - DNA, 50 bp, Homo sapiens
cgactggttaagatttttgcacaggtaagaattctctacgcctgtggttt

SEQ ID NO: 573672 - DNA, 101 bp, Homo sapiens
cctggccccaagggctcgccggcactactgcagtcttcagttaagcaacaagtagaagctattgaaaaacagtacatttctgcaattgagaaacaggcaca

SEQ ID NO: 573673 - DNA, 100 bp, Homo sapiens
gaagagaagaaagatgaaacttcgagctcctctgggtgccttcaccagggatggaagaggcaggctgcagcagagagatgcagagttctttcacacgtcg

SEQ ID NO: 573674 - DNA, 50 bp, Homo sapiens
cagttttgccaggtgtttgttaccttggtgctttacaaggccaagtacgg

SEQ ID NO: 573675 - DNA, 102 bp, Homo sapiens
agcggccagctaggagcgctctgtggtgcctggggctgaacgcggctttctgttaaatccagatgtgaatgttttccaacggaaatttgtgaatgaagttag

SEQ ID NO: 573676 - DNA, 80 bp, Homo sapiens
tggaggccgtgcccgccgtggcgccgcagacctccatcctgacctatatccagactttgcctgacactgcagggtccaag

SEQ ID NO: 573677 - DNA, 75 bp, Homo sapiens
ccatattgatcgcctggactgtgcagtatttccagtctgtctcagaggatgaagtttttgctgctgcagcagaag

SEQ ID NO: 573678 - DNA, 100 bp, Homo sapiens
gcctccgccgctgcctcaggagcggaacaacgtcggcgagcgggagtgaagacatttccacctggacacctgaccatgtgcctgccctgagcagcgaggc

SEQ ID NO: 573679 - DNA, 75 bp, Homo sapiens
ccagagcctcagtttgtgcaggacaccgacatggaacagggactcactgggggacagtctccgtaagaaggatga

SEQ ID NO: 573680 - DNA, 100 bp, Homo sapiens
gattgtttatcctaatcccaatgctgaagtaagattgtcttggaaatactaagttgggctttccttaaagtttcccatgtctcaatggactcctgaatat

SEQ ID NO: 573681 - DNA, 100 bp, Homo sapiens
atgaattaaagattgaaagtgtagaacgttccttcattctctcagccaggattttcagtcaatgcatcatcggagcgactcaacatgggtgaaatcgaga

SEQ ID NO: 573682 - DNA, 50 bp, Homo sapiens
atggatgtgatgcctgctagccaaaaggagctggactggccattatggag

SEQ ID NO: 573683 - DNA, 83 bp, Homo sapiens
ctacttttcaagacaccaagtgagaggccaaccagggctgtcacatggtgactgaagaacttcattccataacgtttgaaaca

SEQ ID NO: 573684 - DNA, 89 bp, Homo sapiens
ctgggaagccaacgaccacacgcagtgtttccccccgggccggcctgccgtgacgatcacagccctgccgtctcaggtcacggttttgg

SEQ ID NO: 573685 - DNA, 90 bp, Homo sapiens
agcgggtcttgggtcctccgagagcagcagcggtgattgtagagaaggctccaaaagccagggtgcctgatctggacaagaggaagtacc

SEQ ID NO: 573686 - DNA, 50 bp, Homo sapiens
gctcaagaggaatgctccaggaaagatgtgaagttcatttccaatccgcc

SEQ ID NO: 573687 - DNA, 100 bp, Homo sapiens
gattccaaaggctatggcatcgcaacacctaaaggatcctcattaagatttggagtccagatacaggaccaatactttatctccagaaaaggacatttat

SEQ ID NO: 573688 - DNA, 98 bp, Homo sapiens
aggccgcgaagtccccgtctccagttcagggcaagaagagtccgcgactcctcataggttaatatcagagaagcacatgacctgggcaatctgcatgt

SEQ ID NO: 573689 - DNA, 51 bp, Homo sapiens
gagaatagtggttcttaactctgagatgtgaagatttttatcctgtgttgc

SEQ ID NO: 573690 - DNA, 100 bp, Homo sapiens
cgaggggctgcacgtgctgaccggggagaaggcttctccagggaaagtgaccgaggcagtgaaagaggccattgacgcagggtaccggcacttcgactgt

SEQ ID NO: 573691 - DNA, 82 bp, Homo sapiens
tttagcacagctgctaaaataggccaggcctgcaggacatacggacaatgcagatcttcgtgaagactctgactggtaagac

SEQ ID NO: 573692 - DNA, 82 bp, Homo sapiens
gcttgcttgcctgtgcgcgcgtgcgcggacatggcctcaaacgatgtgaagttcatttccaatccgccctccatggtggcag

SEQ ID NO: 573693 - DNA, 76 bp, Homo sapiens
tccggatcaatccagatggcagccagtcagtggtggagccctcccgcctcctgcccacaatggcctctgctgacaa

SEQ ID NO: 573694 - DNA, 96 bp, Homo sapiens
cctcccaagtagctgagattacagctctcacgtgtgaatatgtgtctagtgcatccttaacctgaggacttcaccagttcgaaattacagttttca

SEQ ID NO: 573695 - DNA, 82 bp, Homo sapiens
gtcccagcggcagcagcagcggcgggaggagcctccgggatgtgcactcccagcaacacccctgccacgccgcccaacttcc

SEQ ID NO: 573696 - DNA, 50 bp, Homo sapiens
gagcctcggcgcggcttccgcttccggttaagagcaggcttatgtgatcg

SEQ ID NO: 573697 - DNA, 97 bp, Homo sapiens
cctggagagcctgcaggacggcgcggcagagtccccgtacgcctacagtaacgacatgtcatgctgcccaaggacatagccaagctggtccctaaaa

SEQ ID NO: 573698 - DNA, 82 bp, Homo sapiens
gcaggagattatagctctgtatgagaaggacaacacctacttagatgatcatgacgcagtcctgaggtttaatggggcaccc

SEQ ID NO: 573699 - DNA, 99 bp, Homo sapiens
cctagcccctttccttactggatcctcaaaccagaagaaaacctgaatctctgaggtactacgacgtccccatcgccaccctggacttctcctcgctgt

SEQ ID NO: 573700 - DNA, 98 bp, Homo sapiens
ctccgtggatgaggctctgcggctggtccaggccttccagtacacagacgagcatggggaagactcggcccagccttctgccatccctgaggcctcca

SEQ ID NO: 573701 - DNA, 101 bp, Homo sapiens
ttgcggttggctgaaacgagagagaatgaagtgtcaacaagtgcaacagatgaacttctatcacagtttaaggatgtgtttcacatggtagttgaagtacc

SEQ ID NO: 573702 - DNA, 90 bp, Homo sapiens
aagatggaacaaagactgttgagtatgctccatgtagatcacgtcccgtcaggaagcccaagtatgtggaaagccccagagtgcctggag

SEQ ID NO: 573703 - DNA, 90 bp, Homo sapiens
gctgccgacaggaacgtggagatctggaagatcaagaagctcattaagagcttggaggcggcccgcggccctggcaggtgcccggcccgc

SEQ ID NO: 573704 - DNA, 50 bp, Homo sapiens
tcgagttcaaagagaccctcggaacaactgtcagaccttcagcagcctca

SEQ ID NO: 573705 - DNA, 98 bp, Homo sapiens
cagcggcgcgcatcagggacactcggtgtgcgacgtggagatccgaaggaatgaaatccggacaatgcagatcttcgtgaagactctgactggtaaga

SEQ ID NO: 573706 - DNA, 90 bp, Homo sapiens
ttcccacccagggcttcacggagattgtcttctgtgctgtcacctcgaatgagcaggtcaagggaaagccaccagggtgggtggcgagcc

SEQ ID NO: 573707 - DNA, 100 bp, Homo sapiens
aaaatacaaatcacacgcataatggatgaaaggaaccgacaggaaagatctaggagagagggagaaattgatgctgccagaaagaggggacagttacaga

SEQ ID NO: 573708 - DNA, 100 bp, Homo sapiens
tcgggcggtggtgatctctggtgcaggaaaaatgttcactgcagtgatcggagggtatggttggcatggaattgaatttcatctgtctgtgggaattgta

SEQ ID NO: 573709 - DNA, 87 bp, Homo sapiens
gcgggaagagccggggccgtggctgacatggagcaggtttttgccaatccagaagactgtgtagcatttggcaaaggagaaaatgcc

SEQ ID NO: 573710 - DNA, 83 bp, Homo sapiens
atctcatcaaaaaggacaccagcaagctgttcaatgaggagtcctcatcaccgggggcatcgtggccacagctgggcgcttca

SEQ ID NO: 573711 - DNA, 89 bp, Homo sapiens
ggactccctggagaagcagatggaaaagtcacaccgaggagaagactcagtgggaacatccaaaaactggaaaaagaaaacgagtggca

SEQ ID NO: 573712 - DNA, 100 bp, Homo sapiens
aaggaggagcctgttccagaactgctggaagctgagattataagcacaccacagagactaaccagttcaggaagtgttctgattgggagtccatataccc

SEQ ID NO: 573713 - DNA, 100 bp, Homo sapiens
agccgccccgtcgccgccgccgccgccgccgcccggaccccggcgcgctgaatgcagatcgtaaagctgaaaattgaaatcatgaaagtagacaggacta

SEQ ID NO: 573714 - DNA, 100 bp, Homo sapiens
gatttagaagaggctggaaaagagggtggaaaaagcagggaggttatgaggcttaataaagaaggtcgaatgagtgatttgagtgtaattggtcatccaa

SEQ ID NO: 573715 - DNA, 100 bp, Homo sapiens
acatcctttgactggttagccaggagagtagttatcttgatggaattagaagttttgaagtcagctgaagcagttggagtgaagattggcaatccagtgc

SEQ ID NO: 573716 - DNA, 100 bp, Homo sapiens
gcgacggagggggcggccgggtccgcatcgagaagatgagctcagaggtggtggattcgaatccctacagtgctgaagctgctgaaagatggcagaagaa

SEQ ID NO: 573717 - DNA, 82 bp, Homo sapiens
gggaagactcatcggagcgtgtggatttgagccgccgcattttttaaccctagatctcggtgtggacactgccagcggctgc

SEQ ID NO: 573718 - DNA, 75 bp, Homo sapiens
ggaaaaattggcaaggttgaaggtcaccagcacattcagagattcctgggaagccagaaattgtagattctgcct

SEQ ID NO: 573719 - DNA, 75 bp, Homo sapiens
gcaactgagaggaactgagacccaagcagctcagtaaagagagctcaaaggatggctactgacatgcagaggaag

SEQ ID NO: 573720 - DNA, 100 bp, Homo sapiens
cggcgcctgaggagcgggatctaacccaggagcagacagagaagctgctgcagtttcagtatgaacggtgccttagcgtttgtggacacttcggactgca

SEQ ID NO: 573721 - DNA, 100 bp, Homo sapiens
tcagcacctttgagcggataaacaggaaggacctgtgggagagaggacagagagaggacctggtgaggggtgccttcaaatctcttgacaaagatggcac

SEQ ID NO: 573722 - DNA, 101 bp, Homo sapiens
tgccgcccgccgcagggcgctgacggtcccgcacgtctgccgctgccaccggcgcgcccgacctcgaagcggaggatccctgtgtcccagccgggcatggc

SEQ ID NO: 573723 - DNA, 100 bp, Homo sapiens
gctgctgcagaccaggaacaagagagaaagagtggatttcagcctgcacggatggtcttgaaacacaaatggtttttggacctgattggggatatgaggg

SEQ ID NO: 573724 - DNA, 73 bp, Homo sapiens
gttcccactggctctgctgaccttgtgccttgctgaactttgacctggaccggggcgtgtttccagtagtcat

SEQ ID NO: 573725 - DNA, 75 bp, Homo sapiens
actggaagaaaaaagaaaagaaactgacaaaaacatttctgagaaagtggatctcttcagcctgggaattatctt

SEQ ID NO: 573726 - DNA, 82 bp, Homo sapiens
cttcgccttcgtgcgcttcgaggacccccgcaaattgtggctactaatttgccccctgaagatcaagatggctctggggatg

SEQ ID NO: 573727 - DNA, 98 bp, Homo sapiens
aggaaaatactggagttcctgagatctcaaggtgcaatggatgagcttcatagtctggatccaagaaggcaagagttattggaagctagatttactgg

SEQ ID NO: 573728 - DNA, 100 bp, Homo sapiens
tgggcctcgcgccggctatggccgtgccctggggctgagccctcagattcttcgctgctgctgccttaccgccgagaaccaccacccgccaggcgtcttg

SEQ ID NO: 573729 - DNA, 98 bp, Homo sapiens
ggttcgttgtggcggcagcgagttgaactttaggagagctgtgttctctgcagattctaagtctggaacgatttcatgaaccgctccggggaggagca

SEQ ID NO: 573730 - DNA, 100 bp, Homo sapiens
gccctcacgcctgaacaagaaaacatattgcataccacccagacagactgctataacaatctagctggtccggcgccagctgccagtcgaggaaccgaac

SEQ ID NO: 573731 - DNA, 100 bp, Homo sapiens
caaccaagtaagcaagtgtcagggctcaccaaccatgcaaggacagggcaggagaagaggaacctgcaaaggaaaaggccaaagttgttgagcccctgga

SEQ ID NO: 573732 - DNA, 98 bp, Homo sapiens
gggatcgtgaccgagaccgtgaccgagagcgtgaccgagagcgcgaatatcgtcatcgttagaagtgtctgctgttgcaaaaagaagaaaacattctc

SEQ ID NO: 573733 - DNA, 75 bp, Homo sapiens
attttcagttctgggaaaatggtgtgcacaggagccaagagacccctgtaaaagagcccaacagtgaaaatgtag

SEQ ID NO: 573734 - DNA, 100 bp, Homo sapiens
cggcgagccggagcgcggagcccggctcccgcaccatggaggaggacgacagctacgcccttcagatatttcaacactcctctcagcatcctccacttcc

SEQ ID NO: 573735 - DNA, 82 bp, Homo sapiens
ggactgaggagtcgccgccgccccgagtcccggcagctcctttgggacccagatcatcgggggccgggaggtgatcccccac

SEQ ID NO: 573736 - DNA, 74 bp, Homo sapiens
tggcactacccgtcttgaggaatgtaccaaccaagaagctgaagaaatatgagaaagaatatcagacaatgcga

SEQ ID NO: 573737 - DNA, 74 bp, Homo sapiens
ctgagctgatggacataactaaggttgatactgcctctccaagcccaatggaaacatctggatgtgcccctgca

SEQ ID NO: 573738 - DNA, 74 bp, Homo sapiens
ggaaatcgtgcacttgcaggccgggcagtgcggcaaccaaatcggcgccaagatgcatggtcatggaggctatg

SEQ ID NO: 573739 - DNA, 89 bp, Homo sapiens
agagcccagaggtcctttgaatcatctctacagagaactgaaatttcttcttgtgttggggatgtcctttgcactgaccctgaactgcc

SEQ ID NO: 573740 - DNA, 112 bp, Homo sapiens
acaagacagagctggcctggagtccgcggctggccgcgtgagtaggtgtaatcctgagagattcacatggtgttgcacaagtacgttttgtgacaggcaataaaattttaag

SEQ ID NO: 573741 - DNA, 100 bp, Homo sapiens
atcaactggggatgattacagttcttcctaaaaaagaactggttagtactgcagaaaaaccacgacttaaagaaggccttatacatgaacaagacacagt

SEQ ID NO: 573742 - DNA, 83 bp, Homo sapiens
agaaacaaaatgtcaacaaattgatggcattttgaaagcgaagcagaagccgtagaatcagcggcgagcctgttgaaagaacc

SEQ ID NO: 573743 - DNA, 90 bp, Homo sapiens
aggaaatcgcctcccgagaagaagttgaggcgctatgatgacgtagctttgccaaagacttagaagctaagcagaaaatgagcttaacat

SEQ ID NO: 573744 - DNA, 75 bp, Homo sapiens
gttcatgaagattcaataacagttgcatttgaaaacaaattgatcattcttagaagagctgctgtaacacatagg

SEQ ID NO: 573745 - DNA, 100 bp, Homo sapiens
gccctgggtaacacacgtctgcggtgttacccacgactgcctgggacctggccaagggctccacacaccaagaccaagccaggtgctgcccacctacgac

SEQ ID NO: 573746 - DNA, 78 bp, Homo sapiens
atacaggactcagactcttactgtattcaagtcaaacaacgttgaaatggattgggtgttgaagcatactggtccaaa

SEQ ID NO: 573747 - DNA, 100 bp, Homo sapiens
aatattctcacaaataaacatggtgcttggggagcagtttctcatagacaagttggatggcttgaggactggtactaaaaggaaacgtgactgggaggcc

SEQ ID NO: 573748 - DNA, 50 bp, Homo sapiens
gacaacagcctggtggcagcggtggttgtggcaacgaacattgctgagac

SEQ ID NO: 573749 - DNA, 100 bp, Homo sapiens
gtctgatcccttgctcccatccctgcagcatgaacaagaattaactcctgaggagagagcccaaaagattgccaaagccatgcgcaaacagtcttctgaa

SEQ ID NO: 573750 - DNA, 100 bp, Homo sapiens
tgggcatggatgataaccacccaaggcccaaaagcgtcaaactcaccaaaaacaacatctttccagaaagagatcgggcccagcacaggcagcgtcagtg

SEQ ID NO: 573751 - DNA, 88 bp, Homo sapiens
ccgcttctcccgcttcaacgaagaccgagactttcagcctcccggcatggtgctcaaggccttcttccccacgtgctgcgtctcgacg

SEQ ID NO: 573752 - DNA, 82 bp, Homo sapiens
agaactgtgaccatgtgcccttcactgggcctgcgggatttgcttcctaaggagaagaacttggaaactctgttgaccttgg

SEQ ID NO: 573753 - DNA, 100 bp, Homo sapiens
ccgggttgctgtgcgactattctccgggagccgtccgtgtcaccgccggaacctggcgcaggtcatcatcagatttgaaatatttaaagtggatacaaaa

SEQ ID NO: 573754 - DNA, 90 bp, Homo sapiens
ctcaagatggcggacaaaacgccaggcggatctcagaaggccagttcaaagaatgctgagatgtataaactgtcttcagagcaattccat

SEQ ID NO: 573755 - DNA, 101 bp, Homo sapiens
ctctgccatcctcgcctcagtcaaagaacaggctcagttagctctagaggccattcttttgctgatcctgccagtaatcttgggctggaagacattatcag

SEQ ID NO: 573756 - DNA, 100 bp, Homo sapiens
tggtgaattttcagctcgtttccttttgaagctgcccgtagatttcagcaatatccccacataccttctcaagctgggacgatgccggagtgtgaaggag

SEQ ID NO: 573757 - DNA, 50 bp, Homo sapiens
ccgagaaataacatttgaaaatggagagatcagacctattgtgaccgcct

SEQ ID NO: 573758 - DNA, 89 bp, Homo sapiens
gcggaggaactgagacgtttcgaattccagagcatcctggccagaacaagccaaggagccaagacgagagggacacacggacaaacaac

SEQ ID NO: 573759 - DNA, 90 bp, Homo sapiens
gctagagctccagggccggcttcaggaggcccaagacaccacagaagccctccgagcccaggcccagaccttctctttccctttccagca

SEQ ID NO: 573760 - DNA, 100 bp, Homo sapiens
tcgcattttggcattgacatttaattttagggtcctttatatagaagggagagtagattcatgatgttgctatcaaaagttgagaaattgtcagaagaaa

SEQ ID NO: 573761 - DNA, 96 bp, Homo sapiens
gcagctctcccagcagccctggacagtgatgtggtatggtgtattcctgtgggcactggtgtcttctctcttctttcatgtccctgctggattact

SEQ ID NO: 573762 - DNA, 80 bp, Homo sapiens
caaccacaagacgactcaataggaggaaggtgctggagaatctggtaaaagcaccattgtgaagcagatgaggatcctgc

SEQ ID NO: 573763 - DNA, 75 bp, Homo sapiens
gctgctgccagcacctgccactcagagcgcctctgtcgctgggacccttcaggtgaaaggtgtagcagtcactcg

SEQ ID NO: 573764 - DNA, 82 bp, Homo sapiens
agagacctctttgccccctgggccaggcagagcaggtcctagaccagaaggagcacaggctggatggccgtgtcattgaccc

SEQ ID NO: 573765 - DNA, 100 bp, Homo sapiens
cttaccctcccaaagtggtgagattacagaatgtggagagtaaaggaatgagggaccagcgattagatcttcagagaagagcagcagaaaccagtgatga

SEQ ID NO: 573766 - DNA, 90 bp, Homo sapiens
aagcgaagtggagagcgccagagtaatggttctctcctgcgctatggtggaaacctgtccctccaaagtgccatgagtgtacgattcaac

SEQ ID NO: 573767 - DNA, 100 bp, Homo sapiens
cccatgcatcggctaatagcccggagacaagctttcttgcagaacataaattattaggaaacattaaaaatgtggccaagacagctaacaaggaccactt

SEQ ID NO: 573768 - DNA, 80 bp, Homo sapiens
caacaccacaataatccacagccaagattacatgcagcaaactggaggtcaagcacatctattcttttggatgacagtgg

SEQ ID NO: 573769 - DNA, 75 bp, Homo sapiens
aaggccataatatagctgattatattgatccagccatcatgaaggattattgcatcgagcttttagtgtcttctt

SEQ ID NO: 573770 - DNA, 83 bp, Homo sapiens
ctggcaggagcacatgagagaggtgctggagaatctggtaaaagcaccattgtgaagcagatgaggatcctgcatgttaatgg

SEQ ID NO: 573771 - DNA, 101 bp, Homo sapiens
gcccttttgaagaggaaatgaagggtattgccgctgttactgatatacctttagtgactgcagcagcagcggcagcgcctcggttcctgagcccaccgcag

SEQ ID NO: 573772 - DNA, 83 bp, Homo sapiens
ccccgagccgcccgcagagcaagcgcggggaaccaaggagacgctcctggcactgcaggtacttctttgatagtgcctccatg

SEQ ID NO: 573773 - DNA, 98 bp, Homo sapiens
gcgggagacgagccggccgtcccgggccgggggacccgcccgccatggccaccaaggctggcgcccatgcggctctacacgctctccaagcgccactt

SEQ ID NO: 573774 - DNA, 100 bp, Homo sapiens
gatgccgaaggcgcccaagcagcagctgccggagcccgagtggatcggggacggagagaacacgagcccatcagcgtggtgatggtggatgaggcacacg

SEQ ID NO: 573775 - DNA, 75 bp, Homo sapiens
actggcagacccgtagctaagacgccaggatttcctggaagcagagaaatggatttttacctcctataactccac

SEQ ID NO: 573776 - DNA, 50 bp, Homo sapiens
catggccggggacacccagtggtccaggtcaggcagcagttgagtgaaat

SEQ ID NO: 573777 - DNA, 101 bp, Homo sapiens
atcaaggctgtcacacatcaagttaaatttggtcaacaaaatccacgtcaggacatccaggcagaaattgatgcccacaatgacatatttaaaagcattga

SEQ ID NO: 573778 - DNA, 75 bp, Homo sapiens
tgagaacaaagcctacagtaaaggaaaaggggattttgctcgcaagaatggaatgactcctctaatgcatgcagc

SEQ ID NO: 573779 - DNA, 75 bp, Homo sapiens
gcgggaaggccgaccgactgccgcgtcaccaggtgtcaagatgctgcaagtacataggactggactgggcaggct

SEQ ID NO: 573780 - DNA, 100 bp, Homo sapiens
aaggtggaaaccagctgcgctgtcctaaatgtggcgacttgtgcacacatgtagagacctttgtatattgtttgttgacacaagtgtttactaacactgg

SEQ ID NO: 573781 - DNA, 90 bp, Homo sapiens
tttaattttagggtcctttatatagaagggagagtagaaggtgatttactacctctgcatcttattgaaagatccagtggaaccacatgg

SEQ ID NO: 573782 - DNA, 90 bp, Homo sapiens
gtccatgttcacactgggtgaaggaagctgaaaccacagacatgactgagtcctccatgaagaccccccctcctctgcacctctcctctc

SEQ ID NO: 573783 - DNA, 99 bp, Homo sapiens
cgcggccgtagcagccgggctggtcctgctgcgagccggcggcccggagtggggcggcggaatgcgtcaacctttgaggatgtcacccaggtgtcctct

SEQ ID NO: 573784 - DNA, 112 bp, Homo sapiens
agatcttcatgtgtctcttctaagctgaataaagctgttttggaactgtcaggtacctcaaagcgcctatatgaacccaatagcaatggcgagatcaaggggtccaatccag

SEQ ID NO: 573785 - DNA, 75 bp, Homo sapiens
aggacagcatggatgggctggagacaacagaaacagaaacgattgtggaaacagagctttcagcagaggccaagg

SEQ ID NO: 573786 - DNA, 100 bp, Homo sapiens
taagattaagaggcatacaccacttagtaaactaatgaaagcctattgtgaacgacaggtgtgatccctcacatccacaaatctctgattggaaagaagg

SEQ ID NO: 573787 - DNA, 88 bp, Homo sapiens
gagatcctttcctgcttttggtttccctggcaggggttgaactgtggagtgtgtgggacctcagcagccatgtcgaagccccatagtg

SEQ ID NO: 573788 - DNA, 75 bp, Homo sapiens
ccgaggcaggcggatcacctgaggcttggtggatagtaactggtgtgtaggtgctgtgctggagaagaagatgcc

SEQ ID NO: 573789 - DNA, 98 bp, Homo sapiens
gcgcagatagcagagccatccttggggtcgccactgggacactgtgaaccaggagtgagtcggagctgccgcgctgcccaggccatggactgtgaggt

SEQ ID NO: 573790 - DNA, 83 bp, Homo sapiens
gagaggccgagggtttgatgaaggtggaggcagcgcggctctcaggctactgcagcactggggtgtcagttgttggtccgacc

SEQ ID NO: 573791 - DNA, 98 bp, Homo sapiens
gagatctctctcatctcgctcggctgcgggaaatcgggctgaagcgactgagtccgcgatggaggcattccctcctcgtcccgggctggcccttgccc

SEQ ID NO: 573792 - DNA, 75 bp, Homo sapiens
gtcggcgccgcggccgctgcggacggacgctcgcctgccggctgagaaagagaatgcgaacttcctaaaatagat

SEQ ID NO: 573793 - DNA, 98 bp, Homo sapiens
cagagaaaagaacagaaaagatcttccgccagatggacaccaatagagacgaatcggttggtgcgtcttgtgtgtgtgtttctccaatccttgatccg

SEQ ID NO: 573794 - DNA, 97 bp, Homo sapiens
tctggctgcggcagcgggagctggacaaggaaggaagcagccaccctcgccatggcctccccgcccgcctgcccctcggaggaggacgagagcctga

SEQ ID NO: 573795 - DNA, 100 bp, Homo sapiens
tggaagcgcagcaacagcaagctcccgggcaggtgacagagctgaatgaacctctctccaatgaagatcgaaatctcctctctgtggcctacaagaatgt

SEQ ID NO: 573796 - DNA, 75 bp, Homo sapiens
agctcctgggcatcccgctggaccagatcgtctggggaatatttttcatcttagttgcattgctgtttgtaattt

SEQ ID NO: 573797 - DNA, 101 bp, Homo sapiens
aagcagactctgaagatgatcagacaaggcaaagcgaaattggtcattctcgctaacaactgcccagctttgaggccctggctgtggagaatgctgaagga

SEQ ID NO: 573798 - DNA, 100 bp, Homo sapiens
ggccaagtatccgccagtcaataggaagtacgagtattgaaggactatccccagtattgtcagcatttggcttctatcagtcactttatgcaatttccac

SEQ ID NO: 573799 - DNA, 100 bp, Homo sapiens
cccagacctagaactacccagagcaagaccacagctggtgaacagtccagatatccctcctaaatgtacaatcaaggatttgctaccaaaagagaagagc

SEQ ID NO: 573800 - DNA, 100 bp, Homo sapiens
agtcccccaggatacagggtcaaaggagagcacaaccatcgcagttggaagcccatggggcagtctccatctgctgctgcctcttcatcctcttcctctt

SEQ ID NO: 573801 - DNA, 90 bp, Homo sapiens
gacgaccgttgctgagctggtgtggaacgtctgtgatcaggggatatcattttcaatgcccaatacccagaactgcctcccgattttatc

SEQ ID NO: 573802 - DNA, 83 bp, Homo sapiens
ctcacctgggttttcttagccctctacttttcaagacaccaagtgagaggccaaccaggactggttgccataaaggaagccca

SEQ ID NO: 573803 - DNA, 100 bp, Homo sapiens
ggctcgttcccaagtctctttccagaggccaggctttatgggagcatgggttaccagcgacgcaccctcttgatcagttactggcagtcgcagactttgg

SEQ ID NO: 573804 - DNA, 90 bp, Homo sapiens
acctgcagaaggtctctggagacatcttcagcagggcccccgagtctgcgccccttaagagcaaaatgatttatgccagctccaaggacg

SEQ ID NO: 573805 - DNA, 75 bp, Homo sapiens
aacagctggctaagctcatcattgttactgaaactgaaggctcagaagaggatgataaagaaaatgataagaccg

SEQ ID NO: 573806 - DNA, 98 bp, Homo sapiens
ttggagctgggctgcagatggaatgaatcaagtttaacttaggtcctcaatgcagttggatattttatgcatattattaagtttcaccgtgcatcaaa

SEQ ID NO: 573807 - DNA, 75 bp, Homo sapiens
tcccgagtgagggatttcgccgcccgctttcaggcccgtgcattgatctggagaacattgtgtactacaaggacg

SEQ ID NO: 573808 - DNA, 97 bp, Homo sapiens
cacctttaactctccttatgctgggtgaaaacaaagcttttcgctgtggcctgcagtttttaggcaacattgcctcacggaatgaagattcccagtc

SEQ ID NO: 573809 - DNA, 76 bp, Homo sapiens
aaattctgcagatgaacatttgattccacagctgggctatgtggcaacaaatctcagtggttcaatagcatcccca

SEQ ID NO: 573810 - DNA, 100 bp, Homo sapiens
gaaactagaaagaccacgaacttcaaaggggaaagcaaggccaaagacagggagaagtgtggataaatcttggaaggagctcagtaatgtcctctcaggg

SEQ ID NO: 573811 - DNA, 100 bp, Homo sapiens
gccaggacaacaatgcgacggccactgttctctgggacaatgcttttgcagagcctctaagaagcttcccaagaacgagccccagaatgcaactggtgct

SEQ ID NO: 573812 - DNA, 100 bp, Homo sapiens
gaatgcaaatttgctcatccccccaaaagttgtcaggttgaaaatggaagagtaattgcctgctttgattccctaaaggcagacatctggtccctgggca

SEQ ID NO: 573813 - DNA, 83 bp, Homo sapiens
cgggcactgctttccactcggctcctgtcgtccgttctctcaggctcccgttcagatacgtgcttttcaacatgccttcagca

SEQ ID NO: 573814 - DNA, 90 bp, Homo sapiens
agagagcccaacgcctggtgctcaagactttctccgagaattcaattcgccacaatctctctctgaatcgttatttcatcaaagtgccgc

SEQ ID NO: 573815 - DNA, 121 bp, Homo sapiens
gaactggatcgaggctctgagaaagaccgtacgtccaacttcagccccagatgtcaccaactggaccaagctgactgaaagattcttcaagaatacaccttggcccgaggctgaagccatt

SEQ ID NO: 573816 - DNA, 100 bp, Homo sapiens
cgaaagcgttggagaggtgttaccggaacggcggcgacaagggtgttcccgaactagagtgggaaattcgaaatgagtcccatgactatcctcatagagt

SEQ ID NO: 573817 - DNA, 98 bp, Homo sapiens
ctgggcgcagagggctcctccggcgccgccgagctgcgcccgctgccttcacaccccggacatccgcgccacacagtttgagcggtgctgaactgtca

SEQ ID NO: 573818 - DNA, 98 bp, Homo sapiens
tgcagcgcccaccctgcgccagagaccagataaataagactttgaccccgacgcaggcttcagtgattgccgcggatcagaagcctgagcactttggc

SEQ ID NO: 573819 - DNA, 100 bp, Homo sapiens
taccgcaaacttccttcactggtgtagggacattggggttgatgaaacttacctctttgaatctgaaggtttagccaccagctgaacaggccaaagccag

SEQ ID NO: 573820 - DNA, 75 bp, Homo sapiens
cctggaggctgctaacctcttccagccccaggaccaaattaccatcacagggtacgaaaagaacacagaagctgc

SEQ ID NO: 573821 - DNA, 90 bp, Homo sapiens
gggagcgaccgggagcggcggcagcggcggcgcggaggcggctgaggtgcgagccgatccctaaagaagtggctgacatctttaacgccc

SEQ ID NO: 573822 - DNA, 82 bp, Homo sapiens
aggaggctttggagcggctaaaaacctatgaagatctccttcaacgacaaaagcctgcagaccacatttgagtacccttccg

SEQ ID NO: 573823 - DNA, 75 bp, Homo sapiens
gctctgcagttaacgggaccagctctgcggaatgctggcatcaccatctacatcaggtcagctgtctcagtttgg

SEQ ID NO: 573824 - DNA, 75 bp, Homo sapiens
gtttattgaaactagtgcaaaagctggatacaatgtaaagcaggatttgtacacacagatatgacgaaagacttg

SEQ ID NO: 573825 - DNA, 74 bp, Homo sapiens
ctgcgatcgagcctcggtcaaggagctactacccacagatggcatgatccgaaaacactctcatgtcaagatag

SEQ ID NO: 573826 - DNA, 100 bp, Homo sapiens
ttgatacaaaagcagcggttgccgcacatattcaagaggagtctactcttcatcttgtgttgagacttcgtggtggtgctaagaaaaggaagaagaagtc

SEQ ID NO: 573827 - DNA, 96 bp, Homo sapiens
ggaaaaacagaatcagctgttccctgcgaaagattgaagccttcagctgactgtggcccttttcgaggtctgcctctcttcattcactccatctac

SEQ ID NO: 573828 - DNA, 100 bp, Homo sapiens
caaggtgtccacgtcgggtcagatccgacagaagggtgctttcttctgcgacctggtactcatctacctcatcaaaaagagagagttttaccgtgacaag

SEQ ID NO: 573829 - DNA, 82 bp, Homo sapiens
cgccagttactgcacggaaagcagcgtcaggagccatagtacctacagcagcactccagaaaattgtacaagctggagataa

SEQ ID NO: 573830 - DNA, 98 bp, Homo sapiens
cggattggcagtggttttgacaacatcgacatcaagtcggccggggatttagtttcctcactgcttggaggaagatgagaattctcagaggtccttat

SEQ ID NO: 573831 - DNA, 50 bp, Homo sapiens
cgggagttcaagaagaacactccagagctcaagactgcagtgcagatgac

SEQ ID NO: 573832 - DNA, 71 bp, Homo sapiens
taatgtaatggctttatacaagaagattatgttgcagtaccatgcaggactagcatctggccttttaaatc

SEQ ID NO: 573833 - DNA, 118 bp, Homo sapiens
cgcggcgcggggctgcggagtcgtccggagccgctgcgcggtgcttttgaagatgatgatatcacgcacgttgaaggaagtgtagatcctattcgagatatagaaataatacatgaag

SEQ ID NO: 573834 - DNA, 75 bp, Homo sapiens
atggcggagaaggatgacaccggagtttgacgaagaggtggtttttgaggtgctagtgtatgagttgttgttggg

SEQ ID NO: 573835 - DNA, 100 bp, Homo sapiens
gactcagaggtacaggccaaggaggagcatttgagacaatacttccatcagctggagaagatggtcgctgaaaattttgttccccctctgttggatgcag

SEQ ID NO: 573836 - DNA, 50 bp, Homo sapiens
gatgcctagcacagaccttctgatgttgggaaatcctcattgacgattca

SEQ ID NO: 573837 - DNA, 75 bp, Homo sapiens
cgggatcaagctgtgtgcattagtacaaatggtgtcttggctgggcatgacaaccgcgtcagctgcctgggcgtg

SEQ ID NO: 573838 - DNA, 100 bp, Homo sapiens
caacagcacactgaaggaggctcagttcaaagacctgttcttaaaaaaagagaatagtgacagtggtacaggaaagaaagaaaaagaaaagaaaaacaga

SEQ ID NO: 573839 - DNA, 50 bp, Homo sapiens
gggatgtggtacatgttcccaatatgaagtagagacggggtttcactgtg

SEQ ID NO: 573840 - DNA, 100 bp, Homo sapiens
catctaaacttaagtggaaataaactgaaagatatcagcaccttggaacctttggccatcgaagacggcaatttggaggaaatggaagaggaagtacggc

SEQ ID NO: 573841 - DNA, 97 bp, Homo sapiens
atgcatttcatggctatcatctacaccttataccattgctaagtatggtatgtctatgtatgtgcttggaatggcagaagaatttaaaggtgaaatt

SEQ ID NO: 573842 - DNA, 75 bp, Homo sapiens
ggctctttagagagttatctgagtgtatgaaaatgaaagtcttcagaatggaaggaagtcaactgaatttccaag

SEQ ID NO: 573843 - DNA, 82 bp, Homo sapiens
cttcaagtgcatgatgtgcgatgtgcggaagggcacctccacccgttggttgaatctggcgatgtggaacccatggatatgg

SEQ ID NO: 573844 - DNA, 100 bp, Homo sapiens
aaggttctggacaagatgaagtctttctgccagactgctgagaaggaagaatttgaacatcaacagaaagagctggagaaagtttgcaaccccatcatca

SEQ ID NO: 573845 - DNA, 100 bp, Homo sapiens
ttgtaataaaataaaagataatgacaaagaagatggctgcttctatttcagctgtagcaccagttgtacccgatttaagtagtgacattgatactagtaa

SEQ ID NO: 573846 - DNA, 74 bp, Homo sapiens
cgggctgaagcgactgagtccgcgatggagttggatcatcatcgctgccacagtggtttccattatcattgtct

SEQ ID NO: 573847 - DNA, 100 bp, Homo sapiens
gccaaagcctgcccagacggctcacctgtgcgggatggaacaaaaggactcgctcagcagcagcctgaaaacttgctacaagtatctcaatcagaccagt

SEQ ID NO: 573848 - DNA, 96 bp, Homo sapiens
cggcctggtcctggccccggagctgttgctggacccctggcaggagaaaatacggtacatgtccccatggaggatatggcttgggcttggaacgat

SEQ ID NO: 573849 - DNA, 100 bp, Homo sapiens
ccgatctatgcacgcagatgctggagaagtccccttatgaccagaccactaaggcttttcttcctacgatgctggagattaatcatggtcatattgtgac

SEQ ID NO: 573850 - DNA, 100 bp, Homo sapiens
gaaaatagcacacttttactctacgcaactgttgctttttcatgcacccgacagctacaaagtgcaagataagaaaaatgcctccagccgccctgcctct

SEQ ID NO: 573851 - DNA, 82 bp, Homo sapiens
acattaccagctggccgatactctttgaatgtcacatacactatggtgtgtcagaaacttcctagtccccttgatattacag

SEQ ID NO: 573852 - DNA, 84 bp, Homo sapiens
gcttggtttcgggatctcggtgctgcagacggcgagacctcctgcacagacctgcctagagctggaacgttacctccagagcga

SEQ ID NO: 573853 - DNA, 90 bp, Homo sapiens
gcgcgcgcctgcctccaggccgtcaagtacctcatgttcgccttcaacctgctcttctggggggcttcgccaccttctcctcctgcttcc

SEQ ID NO: 573854 - DNA, 100 bp, Homo sapiens
tcgggctgaagcgactgagtccgcgatggaggtcaccaaccaggtgggtgagcggccgccccgccctgtcctccgccagcctgcctcccacggccgcgag

SEQ ID NO: 573855 - DNA, 75 bp, Homo sapiens
cgacaagaggagctggccctctcccaagaaccgaaggtaagaataattgcagatcttcccttgtaaatgtgactg

SEQ ID NO: 573856 - DNA, 87 bp, Homo sapiens
gtatcgccatggcgacagattatgactgctggaaggagcacgaggaagcatttaaggaagaaatctctaaacgttttaaatcacata

SEQ ID NO: 573857 - DNA, 100 bp, Homo sapiens
tccctgcgaccgtcgcggaccatgggcgacaaagggacccggaatctctggagacaggtaaaaatagaagcaagaaaaactgatagccctcagatttcat

SEQ ID NO: 573858 - DNA, 83 bp, Homo sapiens
ggcctccagctagtgagcatgatccgggttgcaaagacagttgcacagaggctcaacacagatccaatgttgctgcagttttt

SEQ ID NO: 573859 - DNA, 96 bp, Homo sapiens
acctgcagaaggtctctggagacatcttcagcagctctattaccaggttttaaacttcgccatgatcgtgtcttctgcactcatgatatggaaagg

SEQ ID NO: 573860 - DNA, 102 bp, Homo sapiens
tgatgaagattcacctgtgcatgcatgcccagcaagatcgggcccttacccagacagacaggaagatcgaaactgaggttgctggcctcaaaaccatgcttg

SEQ ID NO: 573861 - DNA, 100 bp, Homo sapiens
actatggtagcccacccagcattgtggtgccaccgaacatcgcagaactgaagaatttggaggtgctcaacttttttaataaccaaatcgaggagctgcc

SEQ ID NO: 573862 - DNA, 88 bp, Homo sapiens
caacctgaccgggcacgaggagaagcttgtagagaactgtgtttgccttcttcggaacttatcatatcaagttcaccgggagatccca

SEQ ID NO: 573863 - DNA, 75 bp, Homo sapiens
gtccagtctggctgcagcaaaaagcagagcctttgcactggcgatgccatctgctgcctggatgtcttcctgctg

SEQ ID NO: 573864 - DNA, 75 bp, Homo sapiens
tctccatcgaaggcaacattggatttatgagcagcttccagaagtacagaaaaagagagaagaagagaagagaaa

SEQ ID NO: 573865 - DNA, 100 bp, Homo sapiens
ccggacatggccgccaacatgtacagggtcggagccgagaaggtgagctccctggggaaggactggcacaagttctgcctcaagtgcgagcgctgcagca

SEQ ID NO: 573866 - DNA, 100 bp, Homo sapiens
tacaaggacagcagcgactttggggcccgtcaccctcaggtgttggagcgggccggagagaagtagagtgggctgcgaggagaaggaaacaggcctttcg

SEQ ID NO: 573867 - DNA, 100 bp, Homo sapiens
gccaactccaatgggcctttccagcccgtggtccttctccatattcgaggttggcatgtatatggactcttgcagcgttctgataaaaaatatgatgaag

SEQ ID NO: 573868 - DNA, 75 bp, Homo sapiens
gccaagaggagctcatgaggcagatcacaaaatttgtccaggatagacatagagctagaagaaacagacttcgta

SEQ ID NO: 573869 - DNA, 100 bp, Homo sapiens
agcaggagtcccctggagctggagcccgaggccaagaagctctgtgcgaagggctccggtgactcctgcacctgcgccggctcctgcaaatgcaaagagt

SEQ ID NO: 573870 - DNA, 100 bp, Homo sapiens
aatcacagaagccgacaaggcgttcaagcgaaaacatgaccgctgagcccatgaggactttccttatcccagttgattgtgcagaatacactgcctgtcg

SEQ ID NO: 573871 - DNA, 98 bp, Homo sapiens
tacagcgaacccttcaaggaacccccaaaggcagcctggcatcctcgctacaacctcattgttgtgggccgatacccagatcctaatttcaaaagttg

SEQ ID NO: 573872 - DNA, 75 bp, Homo sapiens
gccacccggagccagcggagggacaggtgcaccctttgctcccgggctcatccaccatcatgatccatgacttgt

SEQ ID NO: 573873 - DNA, 50 bp, Homo sapiens
agcaccccttcaccgtggaggaatttgttcttcccaagtttgaagtacaa

SEQ ID NO: 573874 - DNA, 100 bp, Homo sapiens
ctggtggagctactggcgtggtagttaaaggcccagatgataggaatcccatctcatttagaaaccgaaacttcattgccccttcaatgtgggaatccag

SEQ ID NO: 573875 - DNA, 75 bp, Homo sapiens
tcctcagcagcaccttcaagcaggtcctctggatgtcagcatggcagccacaaacctggagaaccagctgcacag

SEQ ID NO: 573876 - DNA, 83 bp, Homo sapiens
catgagggccctgtgggtgctgggcctctgctgcgtcctgctgaccttcggatcaaagttctgatcgtaccagtctttcttca

SEQ ID NO: 573877 - DNA, 75 bp, Homo sapiens
agtggaccctgagattgagctttttgtaaaggagtgtgaggaagaggctgtctgtgtcattatgtgtgcgtcggt

SEQ ID NO: 573878 - DNA, 75 bp, Homo sapiens
ttgtagcctattggaggaaaacacaccaagcttaaagaagtcttctgctgaactgaaaaaaatactagccaatgg

SEQ ID NO: 573879 - DNA, 75 bp, Homo sapiens
gaagaaccggaagctctttgaccttctggatgtccttgagttcaaccagattgagaggatccagaatccagatct

SEQ ID NO: 573880 - DNA, 101 bp, Homo sapiens
tgcgtggaggagctgtgcagccgcgaggaggcgcgggaggtgttcgagaacgaccccgagacggacccttgaacatctgtgaagaaatgactattctgcat

SEQ ID NO: 573881 - DNA, 83 bp, Homo sapiens
accccagagcggccatgagctggtgtgcagccgcccaggagggagctctgcgtgcctcttgctgtgccctacctggacaaacc

SEQ ID NO: 573882 - DNA, 121 bp, Homo sapiens
aaattatcagcactttttattaatttgatcagtgatccttcacgttgggtgtaatggataggtaacagagaagacctcgtcccttcctagtcagggcatcagcatgactgagtgcttcctg

SEQ ID NO: 573883 - DNA, 75 bp, Homo sapiens
gctggggactgggaaatcagggcatcggagagtgccacattaatgggcagttcaattaacctccagaagatggct

SEQ ID NO: 573884 - DNA, 100 bp, Homo sapiens
tccagcagatggcggatgccctgcagtacctgcagaaggtctctggagacatcttcagcagcaatcatcctcttccagtggtagcgtgtttgggtctgga

SEQ ID NO: 573885 - DNA, 98 bp, Homo sapiens
ggagctctccaggaaagccaagctggcggccaccgcaggggccctccacattctggccgatgatgccatggagagcagcaagcctggtccagtgcagg

SEQ ID NO: 573886 - DNA, 100 bp, Homo sapiens
cagaaagaaaaagtgaaaggagttaccaatcagactggacttaaggaatccggagatgatgagtatcaaggggaccagtcagacacagaggacgaagtgg

SEQ ID NO: 573887 - DNA, 75 bp, Homo sapiens
cgagacaaggctgtcagcccctagttagtgcgcaagaagcacatgttgtcctgcttccaagatgcccttgtgagg

SEQ ID NO: 573888 - DNA, 80 bp, Homo sapiens
ctgggcgttcatgatcctggccagcctgctcatcgcctactgcagtgtccttaagtttgctcgcttggtcaagtcctacg

SEQ ID NO: 573889 - DNA, 90 bp, Homo sapiens
tggcgggcggacccgggggcgccctccggacgcggcaggtgttggtaaatcatgcttattgctacagtttacagacaagaggtttcagcc

SEQ ID NO: 573890 - DNA, 100 bp, Homo sapiens
cggaataattccatccaaaaccggcagctgttagccgagcaaggacttgccatgaggtgttgaagccttgtttcactgagttggagagactggacctaaa

SEQ ID NO: 573891 - DNA, 100 bp, Homo sapiens
aagctcaaagccttgcagaggccaaaccctctttcccagctgcccgctcctcagcacccgaagattcgcctgtacaacgcagagcaggtcctgagttggg

SEQ ID NO: 573892 - DNA, 50 bp, Homo sapiens
agtcttcctcaaaataacaatccagtagagacggggtttcaccatgttag

SEQ ID NO: 573893 - DNA, 90 bp, Homo sapiens
gcggctgaggaggggccccagcagcccccgaaggccctatcaggacatggagtatgaaagacgaggcctaacatcgtgtcccagctcagc

SEQ ID NO: 573894 - DNA, 118 bp, Homo sapiens
tttaggtcctacgtttaccctcgatgctcttgttgaatgtcttgtgattggagttggtaccatgtcaggaatcctttgtgcattgaagactttagattcctctctgcggtagacgtgc

SEQ ID NO: 573895 - DNA, 100 bp, Homo sapiens
ggaggcgttggagcgcggaaatctggaaccgggatggcgacgtctacactgagtcggaggcgaaggcagctgaaaaagttggatgaagatagtttaacca

SEQ ID NO: 573896 - DNA, 83 bp, Homo sapiens
ggagtacaacgaggtcaacgtcaccctggacctgggccaggtcgcaatggaagaagagatcgccgcgctggtcattgacaatg

SEQ ID NO: 573897 - DNA, 101 bp, Homo sapiens
gctgatggctctgccaatcaccgggcccgggtcaccaccagggctcgtgcaatccgcttcagacaggatggtaacgaagccgtcggaggattcttctctca

SEQ ID NO: 573898 - DNA, 74 bp, Homo sapiens
ggagcctcttgcagcttacccgctaaaatgttccgggcccagagcaaagtgtctgtgtttcactgatggcaaga

SEQ ID NO: 573899 - DNA, 95 bp, Homo sapiens
tttgtgttttgtgatggaatatgttaatgggggcgagactgctctctctgtataagaaaatttctgtcctataaaactcagtgtccaacttgctg

SEQ ID NO: 573900 - DNA, 75 bp, Homo sapiens
cgccgctgcctcagtcatgccggagtcgatagcagcagttggtgacgagatggcactcagaaacggcgttgacgt

SEQ ID NO: 573901 - DNA, 75 bp, Homo sapiens
caccggagaattcctggggcgcaccgccaagagctggggaattgaatgatctggcacgggaccctccagcacagt

SEQ ID NO: 573902 - DNA, 100 bp, Homo sapiens
gagcaatacagtgacattgggggtttggacaagcagatccaggagctggtgtcatagatgaagattatagaggaaatgttggtgttgtactgtttaattt

SEQ ID NO: 573903 - DNA, 99 bp, Homo sapiens
gagaccaatcacccacccagtgtgcgccttgccaacattccactaacccccgagactcagcgggaccaggagcggcggattcggcgggagatcgccaac

SEQ ID NO: 573904 - DNA, 100 bp, Homo sapiens
agccaaacccgttccctgggtggaaaaatagtcctatggcagcgtatacaaagctattcataaagagaccggccagattgttgctattaagcaagttcct

SEQ ID NO: 573905 - DNA, 100 bp, Homo sapiens
cgggcgcaccgaccatggcctccaaatgccccaagtgcgacaagaccgtgtacttcgtcaggatggctaaaggtgaccccaagaaaccaaagggcaagat

SEQ ID NO: 573906 - DNA, 99 bp, Homo sapiens
ggaacagctactacgcagacacgcaggaggtacccaattccgacagccctgatcttctgacgttgcagaaatccattcattctgctagcactccaagca

SEQ ID NO: 573907 - DNA, 112 bp, Homo sapiens
gtgattcccaggaggatgtcgacagctggaaggcatctctactaagagctggggtctatcctgacaaatctgtatagtattattgattccacagaatacagccaacctccag

SEQ ID NO: 573908 - DNA, 50 bp, Homo sapiens
ccgggctgccccgcaggatcatcaaggctggagtgcaatggcgccatctc

SEQ ID NO: 573909 - DNA, 51 bp, Homo sapiens
gacgagggggccgaaaccgagaggggctgaggaagctgccctcgaaaccct

SEQ ID NO: 573910 - DNA, 74 bp, Homo sapiens
ggatcgctgtgatcgtcacttggcaggatggggaagcagaatagcaaactggcccctgaagtgatggaggacct

SEQ ID NO: 573911 - DNA, 75 bp, Homo sapiens
ctcatccttcttgataatgccaaaaggatattggtgctggaaaaggcaaatactatgctgtcaattttccaatga

SEQ ID NO: 573912 - DNA, 100 bp, Homo sapiens
tctgagcccagaggaagccgagtcagccctggaggcggcccattatttcacagaggacagctcctcagaagagaccagctcttcggccaccagctacagc

SEQ ID NO: 573913 - DNA, 82 bp, Homo sapiens
agtgcagctgcctcagttcttagcgcagttgcagcatgagaaagccgaactagaacagcatcttgaacaagagcaggaattt

SEQ ID NO: 573914 - DNA, 73 bp, Homo sapiens
gtgaagcctgcctacagttttcacaaatctacctccataaggcattagcatccctagccacagccactctgga

SEQ ID NO: 573915 - DNA, 100 bp, Homo sapiens
gagtgtcttcctacggctggggcgtgtgggagtccaggcttcacgcactctttgctgttcaatgtaggtcttgagagctgatgacaataacatgggcaat

SEQ ID NO: 573916 - DNA, 75 bp, Homo sapiens
cggaaaatagcctttgccatcactgccattaagaggtcccccctattggaagtaaaggggaacatagaactgaag

SEQ ID NO: 573917 - DNA, 113 bp, Homo sapiens
tgtttttctgttttgcctgaatacatgatttaaacaagagatttccacagaagatgtctttggtggacttgggaaagaggttgctagaagcagcaagaaaaggccaagatgat

SEQ ID NO: 573918 - DNA, 101 bp, Homo sapiens
tggaagcaataccaaacagtggcatggaccacacccagcggaagtttgtactacagaaagtgccagttaatttccaaggaagatgttactcatgatacgag

SEQ ID NO: 573919 - DNA, 100 bp, Homo sapiens
tggaggaagagattgcagtgggggctgccagtgctaccctgagaaaggtggacgtggccctcaaggtacaccagggctgataggccagccaggagccaag

SEQ ID NO: 573920 - DNA, 111 bp, Homo sapiens
aagtaatcttatatggtgtgattctgctgttcagcaggagaaaatttcagagctgcaaaattatcaggataaaatggaccagttgctacagatgctgcaaagtacagaccc

SEQ ID NO: 573921 - DNA, 76 bp, Homo sapiens
tcagggcggatttgtgaatctcacatttaccaagagcccagcattacatcaacatgcccgtgcagttcaaaccgaa

SEQ ID NO: 573922 - DNA, 96 bp, Homo sapiens
cgctggactgcggtgggcgcgggctggctgcgttgcccggggacctgccctcctggacgcggagcctcactattcctgatcagagaactccagttg

SEQ ID NO: 573923 - DNA, 80 bp, Homo sapiens
ctcctcctggcatccgcagtggctgcgatggaagagttttccgtctgatgaaggttggccatttgcaaagtatcttggag

SEQ ID NO: 573924 - DNA, 101 bp, Homo sapiens
gcgagcaggacctggaacgcgcgggcctgcggcagcgggaggttgcactgatgacatcgtcaccagcgaccattcccccgtgtttgggacatttgaggttg

SEQ ID NO: 573925 - DNA, 100 bp, Homo sapiens
atgctggcaaatactccacaactttcttcatggtgacgtttgcagccctttacagcactcacaaaggacatgaaagatcagatgtcaacttcatctgtgc

SEQ ID NO: 573926 - DNA, 100 bp, Homo sapiens
atgttcatggtgatataaaagcagcaaatctacttttgggttacaaaaatccagaccaggaaaattgggccgatttccacctatgatgcatcatcaccag

SEQ ID NO: 573927 - DNA, 75 bp, Homo sapiens
ctcgaactaaacaaattcatcccagaaatctaagagatacctttgtctggatatggaggaacaagcaatcttatt

SEQ ID NO: 573928 - DNA, 100 bp, Homo sapiens
gagggcaccaccaaaagtgaggtcttctacccaggtgaccaagaatatggcccaggtgaccaaagccctggacaaggccctgagcaccatggacctgcag

SEQ ID NO: 573929 - DNA, 75 bp, Homo sapiens
cttgtgggagcaaaaccaacgcctggctcggagcagcagcctctgagtgggtaattccagaattgattggccata

SEQ ID NO: 573930 - DNA, 50 bp, Homo sapiens
aggaaattgaactaagaaatggagagggacaaactctgcctgggcgagtc

SEQ ID NO: 573931 - DNA, 82 bp, Homo sapiens
ggagaactctaccctggaggagattctggggcagtatcaacggagtctccgggacaacagtgattgactacgtgaagccctc

SEQ ID NO: 573932 - DNA, 75 bp, Homo sapiens
aatcattcctgcagatgaaaaagtgtgacttggcagctgattactacagcccggccatgctgggcctgaagaccg

SEQ ID NO: 573933 - DNA, 101 bp, Homo sapiens
ctgctgtgtgggaagaagatttgtaaagaaaactcttaggtcacttcctcctaacccatctgctgctagagaaactaaaggaatcagccccatcaaggata

SEQ ID NO: 573934 - DNA, 75 bp, Homo sapiens
aaatcccctgctcagggtcttcatccagaaacgaggatgatcacggacgtgcagctcgccatcttcgccaacatg

SEQ ID NO: 573935 - DNA, 100 bp, Homo sapiens
caagctcatgctgctcctggaggtcatatcagttcaacgtggacaaggaagcaggggagaggcagatctaccaccgatactgcatggaaagggcggcagc

SEQ ID NO: 573936 - DNA, 75 bp, Homo sapiens
gtggaaaacatctttcatgtttccttcattatacggtgaagcagaggagagcagtaagatccgtgctcccactac

SEQ ID NO: 573937 - DNA, 100 bp, Homo sapiens
atggacctcagatctcggacaacccccattgcaatgagctttgcacagtttgaaaatctactgtcctgccattgactctaccagaggagattcttcaagc

SEQ ID NO: 573938 - DNA, 50 bp, Homo sapiens
cgctgctcccgggggcgacggatgacgtccggttgtttgccttcgtgcgc

SEQ ID NO: 573939 - DNA, 101 bp, Homo sapiens
gccgggagtcgctgggtgcgtggggctgcctcgccgcgtctcgccacgggtcaaagaattgactgtagatccaactgctgctggtgatgttcgtccaataa

SEQ ID NO: 573940 - DNA, 100 bp, Homo sapiens
cgacatggagaacgaattctactatcgctacccaaacccctgtaaaagagcccaacagtgaaaatgtagatatcagcagtggaggaggcgtgacaggctg

SEQ ID NO: 573941 - DNA, 50 bp, Homo sapiens
cctgaatcttggtgtttggacataggaggaatcatgggtaaagaaggaag

SEQ ID NO: 573942 - DNA, 76 bp, Homo sapiens
tcatctcacctatgcagtcaacatttggagtgaaaacgacccggcagatatactagagtaaaaggatggtttcttc

SEQ ID NO: 573943 - DNA, 80 bp, Homo sapiens
ggactccttcggcagtccacccaccgccgccgcctcccaggtctgcgaggaacagaagtgcgaggaggaggtcttcccgc

SEQ ID NO: 573944 - DNA, 100 bp, Homo sapiens
acatttcaggaaaacagagaaagaagtgataggagggctctgtagttccagggtctccctccactgctgtagtaacccgggtccggggcctcggtggtgc

SEQ ID NO: 573945 - DNA, 100 bp, Homo sapiens
gcctcgctgtccctgcggcttctggggcatgcttttcacttccactgcatctctcgctggctcaaaacacgacaggtgtgtccattggacaacagagagt

SEQ ID NO: 573946 - DNA, 75 bp, Homo sapiens
cctgagaccagtggtcatcgatgggagcaacgtggccatgagattgggaaaatgaggtacgttagtgttcgcgat

SEQ ID NO: 573947 - DNA, 100 bp, Homo sapiens
aaaagactctgaggacatgggtgtcgtcgtcagcttgggaacaggatccaagcagtacagtgcagccattgccttcaccctggccctcttttcccacctc

SEQ ID NO: 573948 - DNA, 75 bp, Homo sapiens
cgtaaggcaaaggcggcggcagcagcagcggcagagaaagaagctggacctgcctagagctggaacgttacctcc

SEQ ID NO: 573949 - DNA, 100 bp, Homo sapiens
agggctactcctccacaaactccagtgacagcaggtactccaaagattcaggtttactcacgtcatccagcagagaatggaaagtcaaatttcctgaatt

SEQ ID NO: 573950 - DNA, 95 bp, Homo sapiens
caggaagtaactttagaggaggatctgatattgatactagacgcagggctgcttgtgatctggtacgaggattatgcaagttttttgagggacct

SEQ ID NO: 573951 - DNA, 100 bp, Homo sapiens
tgctgatacagaagagatggatattgaaatggacagtggagatgaagcctaagaatatgatcagattatttgcatgggtgcaaaagaaaatggtttgccg

SEQ ID NO: 573952 - DNA, 74 bp, Homo sapiens
agcccccgcccgcagcctggacgacatcgacctgtccgccctgcgggaacaaatgtggtatctggggctggcgg

SEQ ID NO: 573953 - DNA, 100 bp, Homo sapiens
gtcctgggtgccagtgctcgttattgtcctcgtcgtgctctggtcctactatgcctacgtctttgaactctgcctggctctgggtgaaccaggaggatga

SEQ ID NO: 573954 - DNA, 100 bp, Homo sapiens
ccgcaacttttcggctccgaactgctgagaaaatgctgagaagcttctgcagttcaagcgttggttctggtcaatagtagagaagatgagcatgacagaa

SEQ ID NO: 573955 - DNA, 87 bp, Homo sapiens
gcctggggctggggccgcggtgctgaggacgcaaatgtggtggagccgccaccaaaatgcagattttcgtgaaaacccttacgggga

SEQ ID NO: 573956 - DNA, 98 bp, Homo sapiens
gcaggcgcctacatcctaactcgatttgctagacctacagagttgaaacagtgaaacctggaaagattgtctggcaggaagaccctcgtttacaagac

SEQ ID NO: 573957 - DNA, 71 bp, Homo sapiens
cctgcaagaactggctcaagaaatttgcctcgaaaaccaaaaggacagaataacgggctcccagattcaca

SEQ ID NO: 573958 - DNA, 98 bp, Homo sapiens
gcggagcagaacggattgcagggaatactcccccagttgcaagaggcgcaggaccgtggaagacttcaacaaattctgcacctttgtcttggcctatg

SEQ ID NO: 573959 - DNA, 100 bp, Homo sapiens
ctttgccctctgttccagaagagaaaaagcccaggcataaaatcatctccatattctcaggcacagagaaaggtggttccttaaaaacagttattgctca

SEQ ID NO: 573960 - DNA, 101 bp, Homo sapiens
ttcaccgccaaccccttcgagcaagacgtggaataacaagcctttgtattcatttgaagataatgcagactatgtttatgatgttatgtggtcacctaccc

SEQ ID NO: 573961 - DNA, 117 bp, Homo sapiens
cggatccccaagcccgccacgccgcccagcccggccccgcccgcgccggaagagccacgccgacaatgcagatcttcgtgaagactctgactggtaagaccatcaccctcgaggttg

SEQ ID NO: 573962 - DNA, 74 bp, Homo sapiens
ggtagcaagaaagaaaattagagtgaatgtagttgcaccaggtaaggagagctgctttgagagaattgtgtcaa

SEQ ID NO: 573963 - DNA, 75 bp, Homo sapiens
cggtgaagagaggttttgaattcacgcttatggtagtggttggtgatggagttttgtggtgctggctctgtcacc

SEQ ID NO: 573964 - DNA, 82 bp, Homo sapiens
agtacctcattttcaccatgagcttgtatatgaagttgaaaggattgttgacaaaaggaaaaataaaaaagggaagacagag

SEQ ID NO: 573965 - DNA, 135 bp, Homo sapiens
ttatttgctactcttgagtgctagaatgatgaggatcttaaccaccattatcttaactgaggcacccaaaatgggagattacaaagcctctgagaccgttgggcaaagctgcttccctgttgctggagatcctgg

SEQ ID NO: 573966 - DNA, 100 bp, Homo sapiens
tcttattctacatcattttttacctgtaggtgagaaagatcagtctaaagaaaaggagaagaaagtgaaaaaaacaattccttcctgggctaccctttct

SEQ ID NO: 573967 - DNA, 74 bp, Homo sapiens
gatgatgctgctatcagcctggcagcctggcatcctcgctacaacctcattgttgtgggccgatacccagatcc

SEQ ID NO: 573968 - DNA, 100 bp, Homo sapiens
aaccctagcctccggaacttcatcgccatggggaagaattacgagaaggcactggcaggttggtgttcgaggaagagacattgttgttcttggtgtggag

SEQ ID NO: 573969 - DNA, 83 bp, Homo sapiens
cacagtcgaaaagaatactgtgaattatgcaagcacagatttgcttttacaccaagcagtcatggatcaggtaatgcagtttg

SEQ ID NO: 573970 - DNA, 100 bp, Homo sapiens
agaaacagcagcaacatttttgaaaaagttttcggctttgtgagaaaccttaccatcaaacacgatggccagcaacgttaccaacaagacagatcctcgc

SEQ ID NO: 573971 - DNA, 82 bp, Homo sapiens
tctctctttctggcctggaggctatccagcgctccagggagttccacgctgtccagttctctctgccgtgataaacctctgc

SEQ ID NO: 573972 - DNA, 80 bp, Homo sapiens
ctggccggggcgcagttcggaggttcaggattttttatcaagcagaaatgcatcgaacaacgagaatcaagatcactgag

SEQ ID NO: 573973 - DNA, 51 bp, Homo sapiens
gagaagaatgaggcctttctggtcccattgatcggaagcctccccgaagcc

SEQ ID NO: 573974 - DNA, 97 bp, Homo sapiens
gagtaaagctgctggacaacaccatggaaatatttgacattgaggactggaaggatcaccagcacatatgcggccagtcagcagctgtcaccgtcca

SEQ ID NO: 573975 - DNA, 98 bp, Homo sapiens
caccacgggctccaccctgctgcagcccctcagcaacgccgtgcagctgcccatcgaccagtgttttagagcactttgctgcaagggaccaccacctg

SEQ ID NO: 573976 - DNA, 100 bp, Homo sapiens
ccaagcgacagctgtcagaggggcaggagcttctgggagccaccgtctgaagatgccatggacaatattaccaggcagaaccaattctacgatacccaag

SEQ ID NO: 573977 - DNA, 101 bp, Homo sapiens
cccgcgcctctcttcgcctcgcctcgggacccgcggtccccgctcttgctggtggacccccaaaagtacaagggcatatttaacggattctcagttacact

SEQ ID NO: 573978 - DNA, 102 bp, Homo sapiens
ctgtgcttggctggaaaaccccaaaagtgtacataagattaaatctcttgatgaacagtgtgtggttggcaaaatttccaagcactggactggaattttgag

SEQ ID NO: 573979 - DNA, 100 bp, Homo sapiens
cagcccccatggcttcagaagaggcacagtaaccttggtgcacgaccgaaagggctgtctactctggtgaagagtggtgtccctgaagcattgagggcag

SEQ ID NO: 573980 - DNA, 75 bp, Homo sapiens
atggcaacatgacagaggaccatgtgatgcacctgctccagtctctgctggatgaaccgaatcctaacagtccag

SEQ ID NO: 573981 - DNA, 75 bp, Homo sapiens
ttcacgaaggcaccgacgtcatcatgctgaccaccaatcagatccgtaagcaaacggggattcagcgtccgatcc

SEQ ID NO: 573982 - DNA, 100 bp, Homo sapiens
tgggctttgactgcccagcatgcagtctccattcttagggggctgttgtggttccgactataaacagtacgtgtttggcggctgggcctgggcctggtgg

SEQ ID NO: 573983 - DNA, 100 bp, Homo sapiens
ccgcgggcggccggtcgggcggggcggcggcgctgacaggacttcatagacctcacgttgtcgaagactcaacgaaagactccaaccgttattcataaac

SEQ ID NO: 573984 - DNA, 75 bp, Homo sapiens
tcgaacttagacttccggaaggactttggcgagggtgccaagtcctgccctgccaacttcttggcagctgccgac

SEQ ID NO: 573985 - DNA, 95 bp, Homo sapiens
gggatctcggtgctgcagacggcgagacctcctgcacagggtttccaggcctgaggtgcccgccctggccccaggagaatgaaccagccgcagag

SEQ ID NO: 573986 - DNA, 100 bp, Homo sapiens
cccggacagtggcagtgaaacaggcagagctggagacgctggtgctgtcccgcagcctgacccaggagctgcagggcacggtagaggctctggagtccag

SEQ ID NO: 573987 - DNA, 83 bp, Homo sapiens
gttccctcggattaaacgccggagagagcgtgaatttgcctcggggacgcctctccaggtggaaaggagactatggaaccagg

SEQ ID NO: 573988 - DNA, 80 bp, Homo sapiens
cagccttttggctccagccagtgactgggaagttccgcgggggtgtgaaccctttcacccgaggctgctgtgggaatgtg

SEQ ID NO: 573989 - DNA, 133 bp, Homo sapiens
ctcagaggccgccatcaaccgccagatcaacctggagctctacgcctcctacgtttacctgtccatgggtgcctctgccaactggtggaatcatcgccacttccagcaccacgccaagcctaacatcttccac

SEQ ID NO: 573990 - DNA, 133 bp, Homo sapiens
tctactctgtcgctcttgtgccctagcaccccgagaaccgtcagtttgagccagatgtgtgtgccatatttaattgctatgggcacagacccagaacctgctatgcggaacaaggctgatcagcaacttgtgg

SEQ ID NO: 573991 - DNA, 52 bp, Homo sapiens
ggagggcctcgccatgtcctgctgcccgtttactattaaaccactggataag

SEQ ID NO: 573992 - DNA, 90 bp, Homo sapiens
ctggataaaaaagaaaaaaaaatgataaagaagaagtcaccgtttctacctggagaggcagatgcgaaccagaacaatgggacctcctct

SEQ ID NO: 573993 - DNA, 90 bp, Homo sapiens
tcatgggatctttgtcctttgggatttctgaacttcagaaagccagtgttgatggctgcctttctgagaaaagtctacagcattctttct

SEQ ID NO: 573994 - DNA, 100 bp, Homo sapiens
atttgaagacgttccttgaggaggtttgaaaaaacttccttgtgaaacctcctagtagaaaaagttcttgggacaaacttcatttggtaagtttgtttct

SEQ ID NO: 573995 - DNA, 90 bp, Homo sapiens
gaagtgtctttggtccaacgttgttccagaacaccttccaccatgaccacctcagcaagttcccacttaaataaaggcatcaagcaggtg

SEQ ID NO: 573996 - DNA, 100 bp, Homo sapiens
ctgacaatgatgagcagtttgtaccagactatcaggctgaaagtttcgttcccagatttcctaaactttccagagaaaatggtcttctccctggctcagc

SEQ ID NO: 573997 - DNA, 100 bp, Homo sapiens
gcatcaatatctctgtctgggacgatgttggcaatctgatccagcctggggacattatccggctcaccaaaggaattagagcccattgggaacgatgcca

SEQ ID NO: 573998 - DNA, 75 bp, Homo sapiens
gattgggacaacattcagacccatttccagtcatgaggcccatgcagaatctccaccatgtgtagacaacctaaa

SEQ ID NO: 573999 - DNA, 98 bp, Homo sapiens
cctctgcggctccaggagggcgcaggagcgggactgagagcgcctggaggctcgagcggagggaatcccagtcagaagttccagcctgccactgttct

SEQ ID NO: 574000 - DNA, 75 bp, Homo sapiens
tatcggtccccagatacaaacatgtggagcagaatggtgagaagtttgtgcagcatctggaatcaagagacccat

SEQ ID NO: 574001 - DNA, 100 bp, Homo sapiens
tgggaagttacctcgaagtccctcttttccactgccctaccacttatgtcttggatgaagatgaacctcgattccttgaagaagttgattacagtgcaga

SEQ ID NO: 574002 - DNA, 100 bp, Homo sapiens
catcaggaccccagatgtctgacagccctgtgtgacaccaagataagtaacgtagtgggcagcagtcagtgacaggtgtaacctctgtggatgacagcaa

SEQ ID NO: 574003 - DNA, 82 bp, Homo sapiens
ggactgagtcctgcaggacacaggaagaggatcacctagcccgggtagaagaggcaatcacccgtatgcttgtgtgtgccct

SEQ ID NO: 574004 - DNA, 82 bp, Homo sapiens
aggcttctccaagagcagcaccagctctctagcagaagtgaatgaggcctctggggatggggatggagaggatgccgttgtg

SEQ ID NO: 574005 - DNA, 106 bp, Homo sapiens
ggtgtaccaggcgaagctggccgagcaggctgagcgatacgacgtatcaagtggggcagctgtattctgtggctgaggccagtaaaaatgaaacgggtggtggcga

SEQ ID NO: 574006 - DNA, 98 bp, Homo sapiens
agccggccccccacctccccccggagccaggctggtttcggaaatgcccttacagcagcaggcgggcgctaatattgacacctgctcagaagaccaga

SEQ ID NO: 574007 - DNA, 76 bp, Homo sapiens
cacggccatcgggcagtggctccgctgggataaggtatcgaaggatgatcgcagtgatgtggagagcagctcagag

SEQ ID NO: 574008 - DNA, 100 bp, Homo sapiens
gcagaggtcaaacctgaaagaccccagttatggatgggaggctagagtaccgtggcacaatctcagctcattgcaacctctgcttcctgggctcaagcac

SEQ ID NO: 574009 - DNA, 89 bp, Homo sapiens
gctcgctgggagagaggtacctctccttttccctctccctttccctaaggttcttctgtgtggcagttcagaatgatggatcaagctag

SEQ ID NO: 574010 - DNA, 100 bp, Homo sapiens
tggagcctcagttggaagcagccgatccagcctgcggagcctgtggggcagattgtcctgggtcacataatgccagctgagcgtaaaaagccagcaagta

SEQ ID NO: 574011 - DNA, 83 bp, Homo sapiens
ccagagcggcgggcactgacgggcacttgcaccgtgtggacagactctccggttctgcctctctgctgatggtggtgccaagc

SEQ ID NO: 574012 - DNA, 75 bp, Homo sapiens
aaaactggagagcttcatcaaaaatagtgatagctttgataagaagtgtttggattgtgagctatttcagaactg

SEQ ID NO: 574013 - DNA, 50 bp, Homo sapiens
ccaaaatcacagctttgagtgagaaacagtaacactttcagctgctcctc

SEQ ID NO: 574014 - DNA, 97 bp, Homo sapiens
cccatttctatggtcctcctcacctatggccgctggcagatggatcctgagcttgaaaaaaaactgaaagagaataaaatatctttagagtcggaat

SEQ ID NO: 574015 - DNA, 95 bp, Homo sapiens
ctctccgccccccaggaggggcgagagggagccgcagctgatgtcagatgatgattattctccaccgtctaagagaccaaaggccaatgagctac

SEQ ID NO: 574016 - DNA, 97 bp, Homo sapiens
cctgttataaagcaggaaggtgaccatgtttctcagacacattcatttttacaccccagaaatggttcaccaaaccaccagccagagccaccccctc

SEQ ID NO: 574017 - DNA, 97 bp, Homo sapiens
tttgatactgacctgtaaatcatcctttaggaggtctcagcatgaaacagcagcagtggtgtgggatgactgccaaaatgggcaccgtgttgtcagg

SEQ ID NO: 574018 - DNA, 75 bp, Homo sapiens
ggctgatctcgaactcctgacctcaggtctggcatcctgcacttgctgccctctgacacctgggaagatggccgg

SEQ ID NO: 574019 - DNA, 83 bp, Homo sapiens
gttcgcccgtccccctgccccgttcacaataaatggaggcaaacgaccattttaactttactggccttccccctgcacctgct

SEQ ID NO: 574020 - DNA, 98 bp, Homo sapiens
ggaattaaatgcacatattgttgtatcagatccagaagatattacaggccaagctataacatcagaaatggtgaatgaatacaagaaaattcttttgc

SEQ ID NO: 574021 - DNA, 77 bp, Homo sapiens
ttcaggcatcctcatataattaaactgcaattcgaagttttcaagtagcccttcacatctatccaatgaaccctgaa

SEQ ID NO: 574022 - DNA, 100 bp, Homo sapiens
tgctgctcggggtccgcgcggcctccgcggagccagagctgtccgtggcacagtgcacgcagcggcccgtggacatcgtcttcctgctggacggctccga

SEQ ID NO: 574023 - DNA, 100 bp, Homo sapiens
cacaccaccgcactgtcgctgcccgcctgccctgaggagtccccgctgcttggaaggaaaatcacctcggcagtgtttgaaggaaggatactgcaactct

SEQ ID NO: 574024 - DNA, 90 bp, Homo sapiens
agaaaattcactagcagagtatcatagcagtcttagagtttgaaagagtctatcttgataatctccccagtgcatccatgtatgagcgca

SEQ ID NO: 574025 - DNA, 100 bp, Homo sapiens
ccgggggccgccgccacccgcctcccaccatggctctgaagagaatccacaaggttatatcttaagtgtggtgctgctaacattgcccaggcagcatctg

SEQ ID NO: 574026 - DNA, 100 bp, Homo sapiens
agtccccagtgagggtgtacaaatacccctttgaattaattatggctatcttagcaaagcaatgtctcaagatggtgcttctcagttccaagaagtcatt

SEQ ID NO: 574027 - DNA, 100 bp, Homo sapiens
tcgggggcaagcggaaggtgatgcccaagatggaccagcctagaacattccatattctgcttcacacacggtgactcactcactactgctttgtaccagt

SEQ ID NO: 574028 - DNA, 82 bp, Homo sapiens
ggcctgcagcgggagctggacggcgagcgcgagcggcgcgagaaatgagaagcgccaccttcaagtgaacgtcaccaaccca

SEQ ID NO: 574029 - DNA, 82 bp, Homo sapiens
gaccggatcctggagaacatctcgctgtcggtgaagaagggagtgcatccgccccaacccttttccccctcgtctcctgtga

SEQ ID NO: 574030 - DNA, 156 bp, Homo sapiens
tttgttggggagaagaggattggaggtgtcagtgttaaaggaacctctacaacgaaggtgaagccacggaagataagactcagcccacctgcacccaggtgaaataaacagctttattgctcacacgaagcctgtttggtggtctcttcacacgga

SEQ ID NO: 574031 - DNA, 48 bp, Homo sapiens
cttgaagcagaggagcagcaggaccagacataccagggtctagagagt

SEQ ID NO: 574032 - DNA, 73 bp, Homo sapiens
gtgacctgtggagacacggccagatctgccctccagctctgactacacccggataacagaagacagtttctca

SEQ ID NO: 574033 - DNA, 100 bp, Homo sapiens
caactgcttcctgaatctacccctgcaggaaaccaagaaatggcctgccagctgcccctgttttcttacatcgtggagcgcctgtgtgcatgttgttatg

SEQ ID NO: 574034 - DNA, 74 bp, Homo sapiens
gggaaccctggtcaccgtctcctcaggtggcgggacaggcttcattgggacagccctaacccagctgctgaatg

SEQ ID NO: 574035 - DNA, 75 bp, Homo sapiens
cgcggtcgcagtctccacggcgcaggcccacggtagcgcagccgctctgaggtatcacagcctgtacctgaaggt

SEQ ID NO: 574036 - DNA, 50 bp, Homo sapiens
aatcccttgaaccacaacgtgctgcagctgataaattctaatgaacccgg

SEQ ID NO: 574037 - DNA, 75 bp, Homo sapiens
agttggcaggaagccaggttgcagggtgtccgcttcctcaggcggcctgagcacgctcactgacaccgtttggcg

SEQ ID NO: 574038 - DNA, 75 bp, Homo sapiens
agctcatattttgaagtgtttacggattacaaggcttcctcggagatggcactttaccagaaaaaacatggtatt

SEQ ID NO: 574039 - DNA, 82 bp, Homo sapiens
ccgagatggagccctggtgggcacggcgtgcaaggatattagaaatggctactccccagtcaattttcatctttgcaatctg

SEQ ID NO: 574040 - DNA, 73 bp, Homo sapiens
gaaaatcgcagactttctcaactcgttcgattggggaccacaaattcagtgcccaccggattgtcttagcagc

SEQ ID NO: 574041 - DNA, 75 bp, Homo sapiens
aggcatcctactatgcttcctgagtgcttctttcttggagctgaccatgtccagcctagggtgaatgtttccccc

SEQ ID NO: 574042 - DNA, 51 bp, Homo sapiens
ttcgtttaccacttcgccgtagctgagctcaatgtgcagcaatggatgacg

SEQ ID NO: 574043 - DNA, 74 bp, Homo sapiens
gctgtgggccgcccacgcccatgaaggtgattgcatactcggaacatcgttaccgtatctttggggaaaccatc

SEQ ID NO: 574044 - DNA, 87 bp, Homo sapiens
gtcggcgctgggctggaggcggcggagcgcgagagcttcgagcggactcagaatgattacggacctgaagccaaagaacaagatgcg

SEQ ID NO: 574045 - DNA, 80 bp, Homo sapiens
gggctgtgggacgagctgcggcgcggatgaagtacattgagacagagctaaagaagaggaaagggatcgtggaacatgag

SEQ ID NO: 574046 - DNA, 96 bp, Homo sapiens
cggcggcggcggcagcgggtcttgggtcctccgagagcagcagcgggaaatttgtgcacagagataacacaggggatatgccatatgaagatgaag

SEQ ID NO: 574047 - DNA, 90 bp, Homo sapiens
gtggcctcggcagtcctgtttccctgtaagtgatgaatcaccaacaccagcagcagatggcccccagtaccctgagccagcagaaccacc

SEQ ID NO: 574048 - DNA, 75 bp, Homo sapiens
ggcgaaggcgggcggcagaggcgatcaggcccccagcagtcagcatgtggctgccgcgcgtctccagcacagcag

SEQ ID NO: 574049 - DNA, 50 bp, Homo sapiens
aaaaacccatctccgaatattgtgatactggggagagataccaatatcat

SEQ ID NO: 574050 - DNA, 75 bp, Homo sapiens
aaggctgtggtggatgcaggaatcactaccaagcttctgaccgtaataatagacgtggatggaatacaactagcc

SEQ ID NO: 574051 - DNA, 100 bp, Homo sapiens
gtgatgttggagaactacagaaacctggtctccctagataacgtgaaggactggagcaaggtcgtcctggcctatgagcctgtgtgggccattggtactg

SEQ ID NO: 574052 - DNA, 96 bp, Homo sapiens
cccagtggaggtggtggcggtggaggacagcagcgagctggtgactggaagtgtcctaatccgtactcagacaggaagtagcagctcctttgagca

SEQ ID NO: 574053 - DNA, 98 bp, Homo sapiens
gaacctttgctgtctatggatctgctctaaaccttatagcctgcttatgggggaagacatgttttgagcgcctgctgtgtctcaagccctgtcctagg

SEQ ID NO: 574054 - DNA, 98 bp, Homo sapiens
cgagaacgtccactgcgggccggcgaaagctgggcaccgcgtccgtgctgcagcgccggtcccccaatgaggagtacgtggaggtggggcgcctggga

SEQ ID NO: 574055 - DNA, 100 bp, Homo sapiens
cgaagcttgaaagacttggtaatggcgacgggtttgtccaaggtttacactcgcacaccaaccttatatttggacttcaaattggacccaggagccaaac

SEQ ID NO: 574056 - DNA, 75 bp, Homo sapiens
catgggagccttccttcctaatcaagaaattatggatccggatgagcaattggaaacccttcatgaagcactgaa

SEQ ID NO: 574057 - DNA, 95 bp, Homo sapiens
aaaagccacattgagaagttgatcttccggatggctgctcccaagagtactattaatcccgtagatgcaatatatcaacctagtcctttggaacc

SEQ ID NO: 574058 - DNA, 75 bp, Homo sapiens
tgcggagcatgtcgaccccggcccggaggaggctcatgcgggatttcaagcggttgtccttctattcaggccact

SEQ ID NO: 574059 - DNA, 74 bp, Homo sapiens
ttcaatgtccgcatcgcaaccaccgccctggccatctaccatgtgcgcctgcttcgcggtttcctgcttgctga

SEQ ID NO: 574060 - DNA, 74 bp, Homo sapiens
gtgctgaagaaaaaagtagggcttctcaaggagacagcccacctgaggatattgaccataaggactcatatctc

SEQ ID NO: 574061 - DNA, 75 bp, Homo sapiens
ccagctagcaccttcgccctctccagccagaagggagttaagccccaagccaaggcagccaaagctcctcctaag

SEQ ID NO: 574062 - DNA, 100 bp, Homo sapiens
agatctcaagatctggactactgttgaaaaaatttccagtgagttcttctcaccactaaatccaatacgagttcatattgatattggagctgatggcaga

SEQ ID NO: 574063 - DNA, 96 bp, Homo sapiens
ggtatttgagatcacggacttcaccactgcctcggaatgggaaagcgtcacactgctcagctccgcgaagagttgctgaaacttccctgccctgaa

SEQ ID NO: 574064 - DNA, 100 bp, Homo sapiens
cctcgagatgattatcgtaggaggagtcctccacctcgtcgcagttgctctatatgcaatcagtgctgtctactttgctggagtgatggtgcgactgatg

SEQ ID NO: 574065 - DNA, 86 bp, Homo sapiens
gcccgcgcctgggctgccggcacttcgcggcagcagcccctgtcaaagggaacaggaagcagtccacggagggtgacgccctagac

SEQ ID NO: 574066 - DNA, 100 bp, Homo sapiens
acgcctcgataaacagggccgtgccgcagatgcccaccggaatggagaaggaagaggagtcggtatcactggacaggccatggctccacggtcccggcga

SEQ ID NO: 574067 - DNA, 100 bp, Homo sapiens
gcagaaaggaagatggcttactgcctgacaaattgttatcaggtcctggcattgatgtgcctgctccagacatgagcacaggtgagcgggagatgtcctg

SEQ ID NO: 574068 - DNA, 75 bp, Homo sapiens
tccaaaaccagtcatgaccactagacccacagctgttaaagcaacagataacaacgaacttgatgcaagtgatag

SEQ ID NO: 574069 - DNA, 88 bp, Homo sapiens
agcagaagctctgaatcgtgttcctgaatgaaagaagtcagatatggtaaacaagcatctgccaaccattttgaagaaagcacagggc

SEQ ID NO: 574070 - DNA, 100 bp, Homo sapiens
ggcgcggtttcctgtacctgccttgggatccggagggaggaagctgggacacccgggagtcaggaaatggactcagtggcctttgaggatgtggctgtga

SEQ ID NO: 574071 - DNA, 100 bp, Homo sapiens
ggggacaccaaaactcatttggcagcagaggtgaggtacaaatcaagacctaccagctcctacattccatctttcagtatccaaatccagctgtttccta

SEQ ID NO: 574072 - DNA, 82 bp, Homo sapiens
gcttggtttcgggatctcggtgctgcagacggcgagacctcctgcacaggaccagttgctcttctgtgatgactgcgatcgt

SEQ ID NO: 574073 - DNA, 101 bp, Homo sapiens
gtctggtcatcatctattgttggaaaaaatcttctgtggattaactcagtggctcaacaggctgaagggagggcactccacagaaggatgttattatcaag

SEQ ID NO: 574074 - DNA, 100 bp, Homo sapiens
atcacttgggttcattctattcaggctgttcacggaagaccaggatgtagatgagggacttgtctatgacactgtattcaagcacttcaaaagacataag

SEQ ID NO: 574075 - DNA, 51 bp, Homo sapiens
ctgaggcctcctcagccatgtggaacttgatggaatggggagaagatatta

SEQ ID NO: 574076 - DNA, 80 bp, Homo sapiens
tcttacatgatgaacaaagtactgatgacaggtatctcgggggagctttgtgccttgatggatcaagttcatcatatgca

SEQ ID NO: 574077 - DNA, 74 bp, Homo sapiens
gaagcacaacaaaaagggcctaaagaagatgcaggccacgtgcgagcgagggtttgcagcaatggaagaaacgc

SEQ ID NO: 574078 - DNA, 75 bp, Homo sapiens
tcgtgacctgcttttcggttccgggtcttggccccgtccttacctcacaggtgcagattcactttataggaacag

SEQ ID NO: 574079 - DNA, 101 bp, Homo sapiens
gcgggaagaaggcctccagctagtgagcatgatccgggtggatcccctttcagaagaaggctggaaacagaaacccaacctcaatgccatccgctctctgg

SEQ ID NO: 574080 - DNA, 98 bp, Homo sapiens
agctggagagcgtcaacaagctgtaccaggacgaaaaggttatatcaatcagtgaaaattctatattcctttggcatttttgtgacatattcaattca

SEQ ID NO: 574081 - DNA, 101 bp, Homo sapiens
cagtgacactggtacagtagctccagaaaaatgcttatttggggcaatgctaaatattgcggcagttttataggatgaagtttttgctgctgcagcagaag

SEQ ID NO: 574082 - DNA, 75 bp, Homo sapiens
tggctcttcctggagaccgggcagctccccaaagacaggagcacaggctgtgtgccgagcttggaagaaagtgtg

SEQ ID NO: 574083 - DNA, 100 bp, Homo sapiens
aggaggtgctgaagagcgaggagtcattgaaattatgagactatcattcaaatggaagcattatagttcttcggaaccattatgatctcaaaacgaaagg

SEQ ID NO: 574084 - DNA, 100 bp, Homo sapiens
ttaagcacatggtggagaggcaagcacggattccagaacatgttcttcaagtatacatggaataactttttgcatacacaagtggaaatttgtattgcac

SEQ ID NO: 574085 - DNA, 100 bp, Homo sapiens
aggaacctgaagactacatctctgtaatccagagtatcatattcaaagctaaaagatggcggcaaggcagcccaggcaaatgtaagaataggcgatgtgg

SEQ ID NO: 574086 - DNA, 126 bp, Homo sapiens
cgcggagccgcgcagagggaggaggccccagacccaggcgccccgccagcccagctgcacgtaagcggacctgcgaccgcatcaagcagtccgccagcggaaccaagcggcgcgtgttcatcatcg

SEQ ID NO: 574087 - DNA, 96 bp, Homo sapiens
atagaggagtacgggtagtggcatttggacagtgggctggtgtggcagtatcaaatcatgggtggataagatgcaagaagaccttgtcacactggc

SEQ ID NO: 574088 - DNA, 100 bp, Homo sapiens
ctcagatgcgctgaagctagctaaagaagttgatcctcaagcctgtgaagttgaagcagggaaagtataccaggtctcctcaaaagagcatatgcagcct

SEQ ID NO: 574089 - DNA, 100 bp, Homo sapiens
agctggcttatcaatattgctgtttgatgcgatcctgaccagtgcaaccacgggatggaagctcctcagggtgctcccactgccgagtgagaactgggga

SEQ ID NO: 574090 - DNA, 100 bp, Homo sapiens
tatcaatgcagcaattggagtcactacgtcaccggtgctgccttctctgatccagggttattttggagctgttggagcactccttgagctgttgaagatc

SEQ ID NO: 574091 - DNA, 48 bp, Homo sapiens
agacccatttccagtcatgagaatttgaagcctacattaatgcttctg

SEQ ID NO: 574092 - DNA, 100 bp, Homo sapiens
ataaaagatgaacaaaaatctgggacaggtatgaaataatgtactcttgctggagaaccgatcccttagaccgccccaccttttcagtattgaggctgca

SEQ ID NO: 574093 - DNA, 100 bp, Homo sapiens
tcggaatgctgctgttcgctggtgggaaggaggtcaccatcaaccagagcttgctcacccccctccacgtggagattgaccctgagatccagaaagtccg

SEQ ID NO: 574094 - DNA, 80 bp, Homo sapiens
cccaggccacaagacatttcctgctcggaaccttgtttactaattgtggccagacaagcacaaacctctcaggagcccta

SEQ ID NO: 574095 - DNA, 100 bp, Homo sapiens
acaacggggtccgacgagcagttgggcacgggctgagtccgcctgccggcagatcaatgtccgagttaccaccatggatgcagagctggagtttgcaatc

SEQ ID NO: 574096 - DNA, 73 bp, Homo sapiens
tgatcgaggttgtttgcaacgaccgtctggggaagaaggtccgcgttaaatcctgccagttttctccattcaa

SEQ ID NO: 574097 - DNA, 97 bp, Homo sapiens
ctgagctcagacctgccaatttaccagagataattgataacaccctgtaacagctgaatatgaggccccaggattcctggcgaggtcctcctcccct

SEQ ID NO: 574098 - DNA, 100 bp, Homo sapiens
gtacattatgaagacattcgggaaaatgcttcttggacacttaatgattgttggcaagaaatgtgctgctgatctgggcctgaataagggttatcgaatg

SEQ ID NO: 574099 - DNA, 75 bp, Homo sapiens
gagggccctgtgggtgctgggcctctgctgcgtcctgctgaccttcggagcatgtatcccgtttggaaatctttt

SEQ ID NO: 574100 - DNA, 75 bp, Homo sapiens
gtccgccaggaagactccctgcctcctgagtcccagctttatgaaggcaaagaacagatggagtttgaagaatcc

SEQ ID NO: 574101 - DNA, 82 bp, Homo sapiens
cgggggcagccgctgagacggtttttcacaagcttcggaaccaaaaagaagcttcccagagccggggccaggagccccaagc

SEQ ID NO: 574102 - DNA, 82 bp, Homo sapiens
gtgtggatttgagccgccgcattttttaaccctagatctcggaaaaggagaaggcccagttggcagcagaagctctaaagca

SEQ ID NO: 574103 - DNA, 100 bp, Homo sapiens
gtacaaatacccctttgaattaattatggctccctcttggaacagagatcatgatgacacggcatctactcgttcaggaggaaccccaggcccttccagc

SEQ ID NO: 574104 - DNA, 82 bp, Homo sapiens
gagtactcggtgctgagtggggctacgagttccagggagctctgtcctggtgaccgtgcccgggttatgacgactaatccca

SEQ ID NO: 574105 - DNA, 82 bp, Homo sapiens
gagtaggagactcagaatcgaatctcttctccctccccttcttgggtcatcacactgaaacggtgttcaaccgggttttgcc

SEQ ID NO: 574106 - DNA, 75 bp, Homo sapiens
agacttcagatcccggacgccacgactctcaaagatgaagacttttgtaaacgtgtatctttggctactgtggat

SEQ ID NO: 574107 - DNA, 75 bp, Homo sapiens
ctccggatattacctgtggagaccctcctgagacgttctgtgcaatgcacactgtccgtgaagaaacgatgatgg

SEQ ID NO: 574108 - DNA, 50 bp, Homo sapiens
ggcctccccagccacgtggaactatctggaaagcatgaagactgggcttt

SEQ ID NO: 574109 - DNA, 51 bp, Homo sapiens
ccggcgctagcccagcccgacccaggttgcaaagacagttgcacagaggct

SEQ ID NO: 574110 - DNA, 101 bp, Homo sapiens
gtgtactgctccaagtacaacgaagccaccggcgtgtgccccgacggcgacgagttttgtcctggtcatcgggctcgtgactttctacagaattggcccat

SEQ ID NO: 574111 - DNA, 100 bp, Homo sapiens
gagaactacggcaatctggtttcaatgggtgcacattcaggttcccgagcacaaacatcaagataacgttcactgccctgtccagcgagaagagagagaa

SEQ ID NO: 574112 - DNA, 83 bp, Homo sapiens
gccaccaccaccgccgctgccccggctgcctcctccctgaggttaatgttgaagaaggaaaatgcggaagtcgtcatttgaca

SEQ ID NO: 574113 - DNA, 137 bp, Homo sapiens
gattgctactgcacggtgaacctggaccaggaggaggttttcaggaccaaaattgtggaaaagtcactctgtaatctatgccagcaattatgacaatgttagcagaccatgcagctcgtcagctgcttgatttcagc

SEQ ID NO: 574114 - DNA, 75 bp, Homo sapiens
aagacgtaatcaaagacggcaacgcgcttatcagcgctatgagaaattctcattcagattgtggatgcctcgtca

SEQ ID NO: 574115 - DNA, 75 bp, Homo sapiens
atgtgatgttggagaactacagaaacctggtctccctaggttaatttggagtggcccctggagtcagtttcctac

SEQ ID NO: 574116 - DNA, 50 bp, Homo sapiens
gagctcaaacgcacgctggacgccaaggccataggaaaaggatacagagt

SEQ ID NO: 574117 - DNA, 82 bp, Homo sapiens
ttcaccggggagtccctcgccacctgcaagagcctgcagcagtcgcttctccgcagggaaagcaggcaggatgggagagtcg

SEQ ID NO: 574118 - DNA, 89 bp, Homo sapiens
ggttaacaggaaggcctccttctgggatacgacccctatcaggaaatattcgagtggcaactgcagtggaatatgtgatcaagtgtgac

SEQ ID NO: 574119 - DNA, 101 bp, Homo sapiens
agtcatgctcgcttcacggaggcaatagctagccggtactaggttttgacaagcttgcatcatgcgtgagtataagctagtcgttcttggctcaggaggcg

SEQ ID NO: 574120 - DNA, 99 bp, Homo sapiens
cgaagcacgagcagatcctggtcctcgatccgcccacagacctcaaattcaaagatgatcacagtcgtgttaaactgcaaaatgctgagaatgattata

SEQ ID NO: 574121 - DNA, 100 bp, Homo sapiens
tgtctccttcgacttggagtctttgtccaggacggttaacacagaaatctgcctcctgggccatgccgcttctaaggcctgtttcttctcatgagcccca

SEQ ID NO: 574122 - DNA, 83 bp, Homo sapiens
cttcgaccccaccggcctggagcgcgccgccaaggcggcgcgcgagctggagcactcgcttggcgttccgggccgcgtggcgg

SEQ ID NO: 574123 - DNA, 100 bp, Homo sapiens
tcaaaatggccctatgcttaggtctttcccagggaactccgatgaagtgttccaacaaaatgagcgagtgaaccaagaagaggatgacattagatccagg

SEQ ID NO: 574124 - DNA, 90 bp, Homo sapiens
cgaatccagtagaaaactggtcaaggaagctgctgccttcgaccagcgcatgaagacatggcagcgctggcaggatgcccaagccacact

SEQ ID NO: 574125 - DNA, 100 bp, Homo sapiens
ctacaacagtttggcgtgcaacatggggcttgagaaaggaatgcagagagcagtttgcagcagaagaatgaagccatcacatcctttgaaggaaaaacca

SEQ ID NO: 574126 - DNA, 82 bp, Homo sapiens
ggaattgttttggcctaggatcatccaggcccccccggcctgccacttcagtcaactccactgaggagactgccactacagt

SEQ ID NO: 574127 - DNA, 75 bp, Homo sapiens
attagtgcctgtgatggcatctttcatctaacacccttcagtttggaaacctgcagaattatgattgccatgttg

SEQ ID NO: 574128 - DNA, 100 bp, Homo sapiens
ctaggaagatgctctgtgagccccaccttgttagcgggaaaccacagttcagggtttgtgtttagtgaatcagagggatctgcattagaacagtttgaag

SEQ ID NO: 574129 - DNA, 82 bp, Homo sapiens
tggaaccctcaagaggaccgagcatcaaggcatgccatgggttgcctctcataaatggccaaagctgtgacccttatgcaac

SEQ ID NO: 574130 - DNA, 100 bp, Homo sapiens
tatatctacaagggggtccgcaaggtggcgacatgtctaagaatgtgagccagtcacagatggcaaaattgaaccaacaaatggccaaaatgatggatcc

SEQ ID NO: 574131 - DNA, 100 bp, Homo sapiens
ctcctgctctgtttactgtggattggatattctcaaggaaccacacatgtattaagatttgctgtcggcagtactcagtggaagggtgatattatgacac

SEQ ID NO: 574132 - DNA, 97 bp, Homo sapiens
gagaaccaagtgcggacgctgtgcgagaaggatcagcagcaggctcgtcagtctcagcttgctcaggatgagcgtgtgtcccgctcttacctcgccc

SEQ ID NO: 574133 - DNA, 74 bp, Homo sapiens
catgtccctgtgggacacaatgcccccaaggatgttttgctctgagcaaatgcaggaccgtggcgggccccgtg

SEQ ID NO: 574134 - DNA, 83 bp, Homo sapiens
aggcagctattctcaggatatgacaggggtaacacccttccagatgatttttgagatgagaaaactgattctgagagattctg

SEQ ID NO: 574135 - DNA, 75 bp, Homo sapiens
tgctcccactggccccctgggaccccctggtcatggccaaaccctggctcgggttcatgacgctctcgatattcc

SEQ ID NO: 574136 - DNA, 98 bp, Homo sapiens
gcggccaggccgtgcgccggcctttggtcgcctccgtgggcctcaatgataaggagggttcctgcccccaggtgaacattaactttccccagctcggc

SEQ ID NO: 574137 - DNA, 100 bp, Homo sapiens
caaaattaacaccatcttcatatccaagttaatggagaatcatcctcatttgcaccaactgataatgcgtctgtcacgggtactccagtagtgtctgaag

SEQ ID NO: 574138 - DNA, 75 bp, Homo sapiens
caaatgcagaggaagaatttttctatgagatggctattgatcaggcccacaggcagaatgtctcctctctttttc

SEQ ID NO: 574139 - DNA, 100 bp, Homo sapiens
gcaagacaatggagagctctcactgtggtggacgttcggccaagggaccaaggtggaaatcaaaccactgctgatggttcttcagaactcaggaatcgtg

SEQ ID NO: 574140 - DNA, 85 bp, Homo sapiens
tggctacagcttcagaagaccgaagcgttcgtatctggaaggaacttgctactaccagcaccatgccctaccaatatccagcact

SEQ ID NO: 574141 - DNA, 100 bp, Homo sapiens
aggccttcggcaccaccggcttccaagcaaccaacttcgggcgcgctgtacagcaagtcaatgccatggctgaaggtgatgtggccgccctcaaccgacg

SEQ ID NO: 574142 - DNA, 100 bp, Homo sapiens
agctatgatgagaacaccgtgtacagcatcggcgaggacgggaaggctgattccaacaaaaccagaattgatgaggccaaccaacgtgcaacaaagatgc

SEQ ID NO: 574143 - DNA, 100 bp, Homo sapiens
cattcttagcagaatggggtgatcgctctcaactaactacaattgtattggcagctagagagcttcagaggatgattccgaagaagacggagaccataac

SEQ ID NO: 574144 - DNA, 98 bp, Homo sapiens
gtgaaacgtgtttcaagaccaaaaaacacaataccaggcatacatttggcagaataaatgaaccaggcttctccagggaaagtgaccgaggcagtgaa

SEQ ID NO: 574145 - DNA, 85 bp, Homo sapiens
cctcccgagtggctgggactacagaaattcattgtacaacacacgaaccccttcaatacctggataggtctcacggacagtgatg

SEQ ID NO: 574146 - DNA, 90 bp, Homo sapiens
caatgctgaccaaggaggagcctgttccagaactgctggaagctgaggacagagcgggatgccaccagcttgtccaaagggaagttccag

SEQ ID NO: 574147 - DNA, 49 bp, Homo sapiens
gcgaagacgcggtgggccgcccctccgatgctgcttgctggggcagtaa

SEQ ID NO: 574148 - DNA, 75 bp, Homo sapiens
gggattctcaatggatgctggattctaaaatttgaatggcatttgcacgccaaaggcaaagaagaaaaaatgtcc

SEQ ID NO: 574149 - DNA, 74 bp, Homo sapiens
tcttggacttcacagcctctagaactgtcttcaaagcttcacctttctccaaaggcagatgtgaagaacttgat

SEQ ID NO: 574150 - DNA, 100 bp, Homo sapiens
tcgtttgcgacgttccctcagcctctgcccaaagaaagaaggagggtgggctgaaaaacagcaaacatgaatgcaccctgtcttcacaagaatatgttca

SEQ ID NO: 574151 - DNA, 90 bp, Homo sapiens
tgagacccggaggaggttcgaagctgagtatgtgacaggttcttcacacacccccattcggcgtagtacccagagagctcaagatgtgtg

SEQ ID NO: 574152 - DNA, 100 bp, Homo sapiens
caagatttaacattccaacacataaaaattatttatccaacagctcctcccaggctgagtcatcactagagagtgggaagggcagcagcagcagagaatc

SEQ ID NO: 574153 - DNA, 74 bp, Homo sapiens
cccgtcacccccggcggccacagaaacgggtacccagtaccgcgctgagcacgttcttccaagaaaccaacatt

SEQ ID NO: 574154 - DNA, 87 bp, Homo sapiens
ccatttactaactgtgtgaccttaggtggataatattaatgcagctgtgatggatttgaaaaaaaagaagatccgcagtctaagtga

SEQ ID NO: 574155 - DNA, 100 bp, Homo sapiens
ggtcaccatcaaaatggaatgtaaccctagccaggtgaatggctcaagatcatcatggcaaaaccagctggtgggcccaagcctccaagtgggaagaaag

SEQ ID NO: 574156 - DNA, 73 bp, Homo sapiens
cgtcacatgcaaaccttctacaggttgggtatctacagccattggttgctgttcaggtcagctttgctcctaa

SEQ ID NO: 574157 - DNA, 83 bp, Homo sapiens
ctggcaggagcacatgagagagtaagtacaaggtggactgtgcatgcctcaaagaaaacccagagtgccctgttctaaaacgt

SEQ ID NO: 574158 - DNA, 75 bp, Homo sapiens
ctggctgcagccctcactcttcatggtcactgaaaaccatgagctgttttccaagagcttcatctccatggaagt

SEQ ID NO: 574159 - DNA, 87 bp, Homo sapiens
agagaatgctgagttcatgaggaactttcagaagggccaggtgacccgagacggcttcaaggtcaagaaagtagtgaagactgtgac

SEQ ID NO: 574160 - DNA, 102 bp, Homo sapiens
ggaggctccgggcgcggggaagtcatgctcgcttcacggaggcaatagctagccgcttctaagtgccagatgatggaggagcgtgccaacctgatgcacatg

SEQ ID NO: 574161 - DNA, 82 bp, Homo sapiens
ggcggacagattgaccttcagagcgaggcgccatgtcagaaccggctggggatgtccgtcagaacccatgcggcagcaaggc

SEQ ID NO: 574162 - DNA, 100 bp, Homo sapiens
gtgaatgtgtttgctctcatgaacatgcaatgagaagactgatcaatctggtatacccgaaatcttgtggatcaaggaaatggaaaatttaatctgatga

SEQ ID NO: 574163 - DNA, 75 bp, Homo sapiens
aaaagcttctacctggaattgaagtgctttggacagacagaggaccccagtaagtgcagtcctcggttttgggag

SEQ ID NO: 574164 - DNA, 75 bp, Homo sapiens
gcctgaaccacaagctggacagccatgcgataccccagaatcttccatgctccgtcacactgcagccaggcccag

SEQ ID NO: 574165 - DNA, 99 bp, Homo sapiens
ccaaggaaaaactggagagcttcatcaaaaatagtgatagctttgataaggtcctgacttgtcctgggcaagccaagtccattgcttctgctcctggga

SEQ ID NO: 574166 - DNA, 101 bp, Homo sapiens
caaattttataaccaccccttgcactttgttttcaatgacaccaagttggacgctatgctggaagaatttaagaaaggataaggaagcctgtgtgggtacc

SEQ ID NO: 574167 - DNA, 98 bp, Homo sapiens
tactcgtttggaaccgttgtggattttcaaataggaaaatcaaaaggcccaaagagacagctcactgcacccgacagctacaaagtgcaagataagaa

SEQ ID NO: 574168 - DNA, 111 bp, Homo sapiens
cggagcttatactcctcccagtgacgggtctggagtgcgtgggggaccggctgttggcggtccctgaagaggaaggagaaggaatatgagcatgaaatggagcggctggca

SEQ ID NO: 574169 - DNA, 90 bp, Homo sapiens
ctgctgggaggtgagggactccgccctcgagttcctgacccagctgagcaggcactggggaggacctcagcagccatgtcgaagccccat

SEQ ID NO: 574170 - DNA, 73 bp, Homo sapiens
gaaggcatcttaatgatgaaaacgactttggttggcatcatcaagaacacatgtgtactgtggtttattttga

SEQ ID NO: 574171 - DNA, 75 bp, Homo sapiens
gcgcgctcgttcgggatcgccgagggggctgaggcttctccagggaaagtgaccgaggcagtgaaagaggccatt

SEQ ID NO: 574172 - DNA, 90 bp, Homo sapiens
agcaagtgcgcggttggggccactgcgaggccgttttagaaagttcgtcgctgcttcctgtgctccaggagaggacatctcctgtattcc

SEQ ID NO: 574173 - DNA, 74 bp, Homo sapiens
ggtgtcttttctacaaactctgtgcctcaacaaccatttctaagtgacttggattcacttgctggtcatcattg

SEQ ID NO: 574174 - DNA, 75 bp, Homo sapiens
tgctgcccctgctgtcgctcctggtcggcgcgtggctcaagctagatttctcgaatgctggcagccaaaaccgtt

SEQ ID NO: 574175 - DNA, 90 bp, Homo sapiens
gtgtattcctccatcatatgctgaccttggcaaagctgccagagatattttcaacaaaggatttggcctgggccgaggccactggtgcat

SEQ ID NO: 574176 - DNA, 83 bp, Homo sapiens
agcaactggattttttaactgaagatagtgcctttcagccctaccagacaatgcagatcttcgtgaagactctgactggtaag

SEQ ID NO: 574177 - DNA, 80 bp, Homo sapiens
ttacgatggcaaaacagcagtgaccgagatcgtcaacagtgtcactactccatccagaagggagctgcgtttctgggact

SEQ ID NO: 574178 - DNA, 75 bp, Homo sapiens
ctggggcttcctgctccagctgtttctaataagtgaccgtgacccacagtgcaacctccactgctccaggactca

SEQ ID NO: 574179 - DNA, 74 bp, Homo sapiens
tcaatccggaggccagtagcaccaggatatgtcttcgtggtgatggtggatgaggcacacgaaaggaccctaca

SEQ ID NO: 574180 - DNA, 75 bp, Homo sapiens
ctcctccaagccggccaattccccccgcaccaaattgcatcgtttcccaggaatactcccccagttgcaagaggc

SEQ ID NO: 574181 - DNA, 100 bp, Homo sapiens
acgctctcagtcagcctggggaatgagacccaaactgctcatacagaattacgcatttccacttctaatgctgtttcagatagagagccttgcccgggag

SEQ ID NO: 574182 - DNA, 74 bp, Homo sapiens
ggagtcagggatggctcttcctcagatgccggtggccgtgggtccctacggacagtcccagccaagctgcttcg

SEQ ID NO: 574183 - DNA, 75 bp, Homo sapiens
ctctgcttatcttttttgccaaatactgatggatggatgcaaccttgaaagaactgacaagcttagtaaaagaag

SEQ ID NO: 574184 - DNA, 50 bp, Homo sapiens
tcgctacacagcaatgcatcgaggaaatctgaaatagagtactatgctat

SEQ ID NO: 574185 - DNA, 83 bp, Homo sapiens
gctgctgctgcccggcctcgggttgccagaggttccaccctctgaggaggaagaacaggaagcctgggtgaatgccttgcttg

SEQ ID NO: 574186 - DNA, 90 bp, Homo sapiens
gggagtgtcctggacccagctgagcgggcggtcattcgcatcgcagacgttcatcttcactgacggggaagatgaggccctggccaggca

SEQ ID NO: 574187 - DNA, 75 bp, Homo sapiens
cgttacaagctttgtctccttcgacttggagtctttgtccaggacgctttgggacatccggaagaaagcagccat

SEQ ID NO: 574188 - DNA, 83 bp, Homo sapiens
tcatccacggggtgctgcagatcctgttccaggtggtctttgggaagaagcttcctgcctttgccaccatccccatccaccag

SEQ ID NO: 574189 - DNA, 75 bp, Homo sapiens
tgggtccgctgagcggggcgacccgaggttatcaatactctggctgaccatcatcatcgtgggactgactttggt

SEQ ID NO: 574190 - DNA, 80 bp, Homo sapiens
ccaatgttccataagcgtggcaagaaaaatgggaagttctcgcaaccatgtccaagggacctgcagttggtattgatctt

SEQ ID NO: 574191 - DNA, 99 bp, Homo sapiens
aattgcgtaactccaaggacttttcggagacttttatgatgaataaggtatttggaggtactgtgcacaaaaaaagtgtcagagaagatggagttttca

SEQ ID NO: 574192 - DNA, 100 bp, Homo sapiens
ggtggagctgcggggccctggcatgaaaggtaaattcgaaccaccattatttcacccgaatgtgtacccttcggggacagtgtgcctgtccatcttagag

SEQ ID NO: 574193 - DNA, 75 bp, Homo sapiens
agtacctttgtcatttggaagaagcgaagagtactatactggcaattgctggagaagattttgcaattgttgctt

SEQ ID NO: 574194 - DNA, 100 bp, Homo sapiens
agaaattacacggcaccgtggtagagggccgtaaaatcgagcatgccaatgaagatgtggaaagaatgttactaggaaacaagtgtgatatggacgacaa

SEQ ID NO: 574195 - DNA, 50 bp, Homo sapiens
tgctgaaaaggtggccactagagatacttgatgatcggaagcaatggtgg

SEQ ID NO: 574196 - DNA, 100 bp, Homo sapiens
ttctgccagatgttcctggggttactgtaaatgggaaggacaggcagagctaaacaaggttcgggatgagtatcggcaggactacgatgctgggagagga

SEQ ID NO: 574197 - DNA, 98 bp, Homo sapiens
acctggcggtgctcgagtgcctgcaggatgtgagggagtcgtccctggggatgagcccagggagaagatggacttggtcacctactttggaaagagac

SEQ ID NO: 574198 - DNA, 83 bp, Homo sapiens
cccggcgccgggcactgagcaccgccaccatggggaaggggtgatcagggccaaagcggtcagtgagaaggaagtggactctg

SEQ ID NO: 574199 - DNA, 100 bp, Homo sapiens
cgccacctccccgctgggtggggagaggcccttcagatcgaagaggttcctggtgagctcatgcaggaagacctggcaacggatgacgtcatgcttctgg

SEQ ID NO: 574200 - DNA, 89 bp, Homo sapiens
gatttttagaactccacatttgagtaccaaaagaattggtggagctccatttgaagctgatgaggaaaattggcaaatctgttactgca

SEQ ID NO: 574201 - DNA, 104 bp, Homo sapiens
ctggtggggagatgaacccaacctagtgggtgtaatacatcatgaactgcaggggcagctgcaatgactctccgcacggtattattgtcattgcaagcactatt

SEQ ID NO: 574202 - DNA, 100 bp, Homo sapiens
ctattgccaagtggtgagaccatcaccaagcggtgagactatcacctatcgccaagtgaaccttctgaggaaaggaggccatacagaaattgaacctcag

SEQ ID NO: 574203 - DNA, 100 bp, Homo sapiens
gcgggacagcgcggcggggagcgacgattccagggtctccctccactgctgtagtaacccgggtccggggcctcggtggtgctcctgatgcccctcaccc

SEQ ID NO: 574204 - DNA, 75 bp, Homo sapiens
atcacctcctccaagaccgtgctggtctttctcaacctcatcttctgggtactactgagcgagtgtgcttgatcc

SEQ ID NO: 574205 - DNA, 80 bp, Homo sapiens
tttaaagcgcataagaatgtcctggcagcattcagccagtattttaggtgacacttggacagaaacactggcctatgtgc

SEQ ID NO: 574206 - DNA, 98 bp, Homo sapiens
ggaagcgcagggagaaggaagaggtgtttgaaaagcaataattcggcatagacctgctcttgttaaagtaattttaatttcgagcgtagccttcagca

SEQ ID NO: 574207 - DNA, 75 bp, Homo sapiens
gattgtctaatgatggagaaacaatggtaaatgtgccacatattcatgcaagaatttggcctcagtatgtcaagg

SEQ ID NO: 574208 - DNA, 101 bp, Homo sapiens
caactaacatctgtgaaaccatcgtatggaaggcattcagccccactactgtcaacactggccgaggaaggagtcaagactgagaacaacgatcatattaa

SEQ ID NO: 574209 - DNA, 80 bp, Homo sapiens
catgatctccttaacggacacgcagagttttaaaatcaaagatgggaaaatcggagaaaattgcccttccccatggccag

SEQ ID NO: 574210 - DNA, 75 bp, Homo sapiens
tccgcccggccccagccctagcgctggccgcgaccccggcggtatgatctcgtgaaaccttgagagaaactgaat

SEQ ID NO: 574211 - DNA, 100 bp, Homo sapiens
ccaggtgctgccctccagctcacaggaggaaaggtcccggagagagcgagtgcgtcagtctcgaatggacacagatctggaaaccatggatctcgaccag

SEQ ID NO: 574212 - DNA, 100 bp, Homo sapiens
gtcgctgaggggcttgcctgaagcgagggggaacaagctaccctctgagtcagcactggacttgaagataaatcctacaattcatgaaactgactgattc

SEQ ID NO: 574213 - DNA, 120 bp, Homo sapiens
gctcggccgcctgctcgaccgtttgcccagcttccagcagagctgcaggaacctaattcatctctccagcaaaggacacatctctccagcaaaggacacctctctccagcaaaggacacc

SEQ ID NO: 574214 - DNA, 75 bp, Homo sapiens
aaagtgtataactacaatcacctaatgcccacaagcagtgttgtactgctacttctataaacggacagccgtaag

SEQ ID NO: 574215 - DNA, 80 bp, Homo sapiens
gatccagcaaggtcggcagagcaaggggcttacgcagaaggacctggccacgagagtcacaccccaaagcctctttattc

SEQ ID NO: 574216 - DNA, 100 bp, Homo sapiens
gacgtgaaggagaaattcgactatggcaacaagtacaagcggcgggtgccccggtttgagttcatgatcgagtccatcctgtatgcccgggatgcctggc

SEQ ID NO: 574217 - DNA, 90 bp, Homo sapiens
aaagagaaaattcccatcattggaagtttggttggcttagtggattatccagatgatgaagaggaagatgaagaagaagaatcgtccccc

SEQ ID NO: 574218 - DNA, 73 bp, Homo sapiens
ctgctcaactgcctgcacgtcgtcaccctgtacaatcgatcagtgaagtggagcccaaatactatgcagatgg

SEQ ID NO: 574219 - DNA, 76 bp, Homo sapiens
gcacagaggaacgagctgagctggcagagtcagacgagttgtactgctgtcacaggaaatggacgctggattacaa

SEQ ID NO: 574220 - DNA, 50 bp, Homo sapiens
gggttggaaaagccattgataaggtgataatgaaatcacagcatctccat

SEQ ID NO: 574221 - DNA, 75 bp, Homo sapiens
ggtggtaccctaaaattagggcatgattaaggagtccaatgtgctgattgctgctaacagtcagggtacaattaa

SEQ ID NO: 574222 - DNA, 100 bp, Homo sapiens
gctggggggagagaggcagtccagccgcaggggccacccgaacagtctctcctcctcacagaagcctgggcagttgggtgagaagcagcttccatcttca

SEQ ID NO: 574223 - DNA, 83 bp, Homo sapiens
ccggggcctgggtccacgccgagggcaggacgaacttcaccagtggctgcttcaacccccaactccactgctggtgcagccat

SEQ ID NO: 574224 - DNA, 82 bp, Homo sapiens
ctcggcgcgtccagcgcagcccgacgttccgctgctggggtgtctcgtgcctctgctggaccctgactctgggctcctggtc

SEQ ID NO: 574225 - DNA, 82 bp, Homo sapiens
ctcctggtggccggagcctccacagcagtgcagtggcagccacctacaaaaaaggagaagcgggctctagggaactggaagt

SEQ ID NO: 574226 - DNA, 98 bp, Homo sapiens
ccgcgaaccgagcgggcggcgggcgcgcgcaccatgggggagaaacccgggaccaggatgcagaaggaagaacccccatccacgtggccatcagcagc

SEQ ID NO: 574227 - DNA, 98 bp, Homo sapiens
cactgctgccgtgtacagtgctgcgattctggagtacctcactgcagagggtggtgacttcacacgccataatggcactggtggcaagtccatctatg

SEQ ID NO: 574228 - DNA, 74 bp, Homo sapiens
ggagcgcaacactcgcttggttggggagatcggcgcttggccggactttgcctcccgggccaaactggcagttc

SEQ ID NO: 574229 - DNA, 82 bp, Homo sapiens
aatcttttcgcccctcacgcttttgtaataatggtcatgcaagacaagataatctgccttccgaaaagagtgcagcctgctc

SEQ ID NO: 574230 - DNA, 50 bp, Homo sapiens
ccgccactgccgcaggaggcgtgaggaagcaggagctggccaacagctcg

SEQ ID NO: 574231 - DNA, 157 bp, Homo sapiens
gtgctgccaccgaccagactcatggaggccagattttctccaattaaccagatcttgccctggtgcagacaagacttaacagcctgaccctggattctggccttctcatgacctctgctgatcctcctctcctctcctgctgagccttccacctctg

SEQ ID NO: 574232 - DNA, 75 bp, Homo sapiens
gccgctggtgatctccggtagcactcgggccggcggacagtgagggcgcgtcccatgaagctgaggtcttgaagc

SEQ ID NO: 574233 - DNA, 90 bp, Homo sapiens
ctaaaccagaagaggaggttgcccagaagaaaaaggttacccatgcagttgttactgtaccagcctattttaatgatgcccaacgccaag

SEQ ID NO: 574234 - DNA, 100 bp, Homo sapiens
gaaggagctcatgcagtggtacaaggaccagaagaaactgcaccggaaatgtgcctaccagagagagcaggagattcggatgggtcagatggctatggga

SEQ ID NO: 574235 - DNA, 98 bp, Homo sapiens
gggtgggcaacttacccgagaacgtgcgggaagagaagatcatcgagcatttcaaacgatttcaacactacacttgcacaatgtctttgaaaccaaga

SEQ ID NO: 574236 - DNA, 100 bp, Homo sapiens
ttttgtcaccgttatgtgggaagcgaatccagatggaatccgacgtggtaggcccagagcagatactgtccgcgatttaataaatgaaggagagcattca

SEQ ID NO: 574237 - DNA, 82 bp, Homo sapiens
ccaggagtttattggagcgcagactgatggcgcaaaggacaatgcagatcttcgtgaagactctgactggtaagaccatcac

SEQ ID NO: 574238 - DNA, 100 bp, Homo sapiens
tcaggtgactgtcccagaagtgaatcgcagacatatctgaagagatggattaagaatgctttggattaaggattgtggagcacatttcaatcattttagg

SEQ ID NO: 574239 - DNA, 100 bp, Homo sapiens
tcaggcgtgcgcggacggtgtgcggggagatgcagttaaagacttgatgcttcgctttctgggtgaaaaagctgcagcaaagagacaagtcctaaatgcc

SEQ ID NO: 574240 - DNA, 100 bp, Homo sapiens
aagtaatggtgcaaagcctgaagtcaaaggccctttcagaagcaactccatttcattggataacttaaaaccctccagagtgtactgtttacaagtccag

SEQ ID NO: 574241 - DNA, 100 bp, Homo sapiens
agagaggcccgcccaccagttcgcccgtccccctgccccgttcacaatcctacaacacagcagtcccctcaggatgagcaggaaaagctcttggatgaag

SEQ ID NO: 574242 - DNA, 83 bp, Homo sapiens
ttacaggcccagcccactgggaggtcagcccaaggccaaccccactgtcactctgttcccgccctcctctgaggagctccaag

SEQ ID NO: 574243 - DNA, 82 bp, Homo sapiens
tctgatgaaaagtcaatacaaaactaccatccttttgcagcccatgactgaagagttgctgaaacaacaaaagctgaattca

SEQ ID NO: 574244 - DNA, 83 bp, Homo sapiens
ccctctacttttcaagacaccaagtgagaggccaaccagggaaccctactctggaaactgtcagtcccagggcactggggagg

SEQ ID NO: 574245 - DNA, 75 bp, Homo sapiens
ctcttgtgccctagcaccccgagaaccgtcagtttgagccagatgtttcccgtcaccaattttccttggaattgg

SEQ ID NO: 574246 - DNA, 50 bp, Homo sapiens
gccgagcaggaggcgccatcatgctgagatctgtatctgtggacctgaat

SEQ ID NO: 574247 - DNA, 98 bp, Homo sapiens
ctcgcaactcggcagcctccacccaccggcccaccctacatttagcgcatcatgtgatccgggttggagtcagttagctgctatgcactgtgttatgc

SEQ ID NO: 574248 - DNA, 75 bp, Homo sapiens
gcagccctccacccaggagtacgtgctgcatgtctacgaccaagatcactccatggatgaaatgacagctgtggt

SEQ ID NO: 574249 - DNA, 100 bp, Homo sapiens
tcaacaccaacaagaatgaggagcaggacatcttcatttacagagcaacttgatgaaggtacacccaatagagagatcaagaagctactctagaagtcgg

SEQ ID NO: 574250 - DNA, 75 bp, Homo sapiens
ctgactttcagctatggaatcggatcttttgccagaaatgagggcatactggcctgacgtaattcactcgtttcc

SEQ ID NO: 574251 - DNA, 83 bp, Homo sapiens
agcatcaactacctgcactttggggagcctaagtcctggtgtcgtgaaaactacccctaaaagccaaaatgggaaaggaaaag

SEQ ID NO: 574252 - DNA, 100 bp, Homo sapiens
gcggcacagagagggcctgggagcttgctgcagcttcagggaatcttggaatcagaccagaccagacgagtgagcctaaaaaaacactggccgatcacct

SEQ ID NO: 574253 - DNA, 55 bp, Homo sapiens
gatcccaccgcacgttcagaagtcgggtggccccagccattaaggagaggatgat

SEQ ID NO: 574254 - DNA, 99 bp, Homo sapiens
ggaagagggcggcgacggtggtggtgactgagcggagcccggtgacaggatgaataattgtgtgcccaagaagatgctgcagctggttggtgtcactgc

SEQ ID NO: 574255 - DNA, 100 bp, Homo sapiens
gaataaagaagtggagcgtgtcctgaaggagttccaccaggccgggaagcccatcggtgagtgtgtccgcttgaaaccaactgacatacagcccgacatc

SEQ ID NO: 574256 - DNA, 75 bp, Homo sapiens
cagccagaggaccaacgcgagcggcttctgcagggtgtgcaggagggctccagcgtgacatggctgaagcgcacc

SEQ ID NO: 574257 - DNA, 98 bp, Homo sapiens
cctgttccgaggtcaggaggatgcaagtcctgacagattcagcaacactgactacgcccaagcaaggtttgatgcctatttccaccagaagaggaagc

SEQ ID NO: 574258 - DNA, 75 bp, Homo sapiens
catggaccatcctgctggtcagcactgcggctggacccccgcagcaaacacaagtttaagatccacacgtactcc

SEQ ID NO: 574259 - DNA, 75 bp, Homo sapiens
aaactgaccatagccagagaacagccctccatcttgcagcccagaagcttgagaattgtaactacgcggtagaat

SEQ ID NO: 574260 - DNA, 98 bp, Homo sapiens
agcgccacatctcggagcaactgaggcgccgggaccggctgcagagacaggcgttcgaggagatcatcctgcagtgaaatggctagtgatgagctgaa

SEQ ID NO: 574261 - DNA, 90 bp, Homo sapiens
tctttcttcagccgaggccgccgccgcctctccttgctgcagccatggagaggccactgtctgcagctcccgtgaagatgtccactccag

SEQ ID NO: 574262 - DNA, 82 bp, Homo sapiens
gtgcgcggagagcaatcgccgggacagctgcaagattcagagcattcttcactccagaataatgagcaaccctctttggcca

SEQ ID NO: 574263 - DNA, 50 bp, Homo sapiens
gaggaatgacaaacaaccagctcttcagaatcccctactttgaaactagt

SEQ ID NO: 574264 - DNA, 51 bp, Homo sapiens
cccgctcccggcgcctgccggagaggccagacaggtgatttggcttctgca

SEQ ID NO: 574265 - DNA, 50 bp, Homo sapiens
atcagtgtgggaagccaagcagatacaagatttccagatgtgacttgcac

SEQ ID NO: 574266 - DNA, 80 bp, Homo sapiens
ctactgaagacatcatttgggaccaagctgatgagcccttgaagcacagcagttacatgggaattggtctttctgctcaa

SEQ ID NO: 574267 - DNA, 101 bp, Homo sapiens
aggcagctgcaaggagggcggcgggactgcactcgagtgtccagacctgctcgatggtggtccattatggctgacatgcaaaatctggtagaaagattgga

SEQ ID NO: 574268 - DNA, 100 bp, Homo sapiens
tcccttctatgatcggttccactggttcaaacttgtggggagctacgacggcgtcaacaagaacatcgcgtctgtgggcttccacgaagacggccgctgg

SEQ ID NO: 574269 - DNA, 82 bp, Homo sapiens
ggcgctgcctggcccaggcgcacacggaagtggtgtccctggccagtgtccttccacctgtccacaagcatggggaacatct

SEQ ID NO: 574270 - DNA, 100 bp, Homo sapiens
gtgtgctacgccaagaacgggcaggtaatgtgtcagtggatggaaaagtttagaaaagatctgtgtaggttctggagcaacgttttcccagtattctttc

SEQ ID NO: 574271 - DNA, 95 bp, Homo sapiens
ctgctgctgcggaggatccgggccgagtcgggcaccaagggactctttgcagtggtggtcgtggtgacaggactggccgctatggagccactgac

SEQ ID NO: 574272 - DNA, 74 bp, Homo sapiens
ggactttgggcgtcccattgccatgtcctcccctgcccaagggaaccggcaagagagtactgtgtcattcaatc

SEQ ID NO: 574273 - DNA, 76 bp, Homo sapiens
tgaggacactgaaattcagagaggggaagtgatttgcctcagcttgtactgtggtgcccaggcaacatgggtgact

SEQ ID NO: 574274 - DNA, 71 bp, Homo sapiens
cgtatcctgggttcaagcaactctcctgctgcagccactctcgctctgtcgtccaggctggagtccaatgc

SEQ ID NO: 574275 - DNA, 75 bp, Homo sapiens
cgtcaaggagacacacgaagtgttggacatgctgttcccaaagttcttgaaagcatacggaatggacagccgacc

SEQ ID NO: 574276 - DNA, 82 bp, Homo sapiens
ctgggcctgcccttcaccctctacatgctcttttgaaacagatggtcaccatgtttagatattagcagtcccgtatgtgcat

SEQ ID NO: 574277 - DNA, 75 bp, Homo sapiens
aaagaatcttgtcactttagccactgctactacagaaatacagtccatactgcccggaatctctgcaaagctgac

SEQ ID NO: 574278 - DNA, 74 bp, Homo sapiens
cagccaccagttcaggagcacttgggagtgatctaggcattgaatgccccagaggagcccgaaacctcccaggc

SEQ ID NO: 574279 - DNA, 90 bp, Homo sapiens
cccagctgagcaagctcctggagctgacagggccaatcaacagggagctggtgcggaaggtggacgggaaggctgggctggtggtgcaca

SEQ ID NO: 574280 - DNA, 83 bp, Homo sapiens
ggaagtgactgggcggtgccggcgccggagacgatgccgttataacgaaggaggcccaacttcattcaataaggagcctgacg

SEQ ID NO: 574281 - DNA, 51 bp, Homo sapiens
cgtgacttcccggacgctgggaaatgatcatggaagggaagtggttgctgt

SEQ ID NO: 574282 - DNA, 90 bp, Homo sapiens
caccagcagctgtactggagccacccgcgaaaattcggccagggttctcgctcttgtgcaccaattccagctggacatcactgtgaaaat

SEQ ID NO: 574283 - DNA, 98 bp, Homo sapiens
cagccgatgcaccgagtccagcccaggaaaatggagagatgaggagactgtccttcctgtttcgcagatgaggaaactgaggcttagagaagtttggc

SEQ ID NO: 574284 - DNA, 100 bp, Homo sapiens
cgcctccttgcccgtgaccgtcgctagaactcagttgtgcgttgcggccagtcgccactgctccaagaaggatcaagaaggtggagaagaaaagaaatct

SEQ ID NO: 574285 - DNA, 90 bp, Homo sapiens
cacctggctatcggggtgaacgcatcaatcagctcatccgtcagctgaactagacccaggtgctggaaacgtgcgtagcaacagtaggcc

SEQ ID NO: 574286 - DNA, 101 bp, Homo sapiens
tcggaagggtctttgttccctgcagccctcccacgaaactggcgatggaatatgagaggagccctctggaaagaaaaggacagaccctgtgctttcatgaa

SEQ ID NO: 574287 - DNA, 87 bp, Homo sapiens
cacgccctctatgacaatgtggagaaactctttccaggtctttctaccctggactccatctgtgactccctgagtgttgctttccgg

SEQ ID NO: 574288 - DNA, 100 bp, Homo sapiens
gaaagatggatttttgcatgagacgcttctggacagaaaatatttacaccagcagctccagttcataccaataaagaagatcctgctacccaaactaatt

SEQ ID NO: 574289 - DNA, 100 bp, Homo sapiens
ggaagaggcactgctgagggggcgcgaggggaacggaggccagagctgcgacagatgtgctggtgctgagctgtgatctgataacagacgttgccttaca

SEQ ID NO: 574290 - DNA, 100 bp, Homo sapiens
tacatcctcagcagatttgcagttcttttagagcaagatatatttcatcgttccttgatggcttgttgtttggaaattgtgctctttgcctatagctcac

SEQ ID NO: 574291 - DNA, 98 bp, Homo sapiens
atcgaggagacgctggaggacagcccgcagcactcctgtaggaggcctgctgatggcatttcagaagtactctggtgagactgttcaggaaagaaaac

SEQ ID NO: 574292 - DNA, 100 bp, Homo sapiens
gggtctggagtgcgtgggggaccggctgttggcggctggtaggtgagtgctgtcctcggctcactttcctcaagctctccggctgccacggtgtgactgc

SEQ ID NO: 574293 - DNA, 74 bp, Homo sapiens
gaatcttcatcgccctgtggaacatcttcatgatgttctgcatgattgtactctgtttgctggctacacggaca

SEQ ID NO: 574294 - DNA, 101 bp, Homo sapiens
caggaccgggcctcaaaatggccacacgcgtacccccgtagcggaaaaacttccagggtctccctccactgctgtagtaacccgggtccggggcctcggtg

SEQ ID NO: 574295 - DNA, 100 bp, Homo sapiens
caacttgctgcggtttttgttcctggggctgagtgccctcgggcgtgatggtgggcatgggtcagaaggattcctatgtgggcgacgaggcccagagcaa

SEQ ID NO: 574296 - DNA, 98 bp, Homo sapiens
ctgaagcaagccttcgtccggggtctccccacgcccaccgcccgctttgagcaaaggaccttcagcgtcatcaaagatgaccaagcgagacgtgcctg

SEQ ID NO: 574297 - DNA, 100 bp, Homo sapiens
gccaaaaaggacatctttggagccaggctctgaagggctccaagaagctggtgctgtctgtgtactcagcagggcgcatccctgggggctacgtcaccaa

SEQ ID NO: 574298 - DNA, 46 bp, Homo sapiens
ggttcttaatgagctttatacggagtacttgattcttcagaaaacc

SEQ ID NO: 574299 - DNA, 83 bp, Homo sapiens
gtcggatgttgtgttgcccgccaccatgagctacacagccagttgtttggggaagaagatgctgatcaagaagtatctcctga

SEQ ID NO: 574300 - DNA, 100 bp, Homo sapiens
tgaagatgaactttccttcaagggtgtgggccgaagatatgctcatgtggtgttgaggaaagcagacattgacctcaccaagagggcgggagaactcact

SEQ ID NO: 574301 - DNA, 100 bp, Homo sapiens
gtcttagcaaggctgtcatcacaccatacttcccattgcctccagctgttgcacggaggtttcacatcatatttccagaaggctcctggaaagagtgaat

SEQ ID NO: 574302 - DNA, 83 bp, Homo sapiens
ccgacaaccttcccagaaagtccaagctcgtggtttttgtctgatgaaaatagtctggagtataaatattacaagctgaagtt

SEQ ID NO: 574303 - DNA, 82 bp, Homo sapiens
gaatcctgagggccaatggacaattatggacaacaaggacctgaaggagaagaaggagaaggtggaggagaaggcaagccgg

SEQ ID NO: 574304 - DNA, 75 bp, Homo sapiens
acctttacctgtggaggcaacactggccaagaagaggaaagatttattgctaaacatgggtgcatttttggataa

SEQ ID NO: 574305 - DNA, 101 bp, Homo sapiens
ggatgtttacttgctggtggtcttatctaagatcaacattggcagctgtgcccggagaggcctccagggtccagggttccgagtctgaggaagacataacc

SEQ ID NO: 574306 - DNA, 80 bp, Homo sapiens
tggtcacggtccagcggtcacctacccccagcaccacctccagcccctgcgcctcgctgctctcccatgggtgatggtga

SEQ ID NO: 574307 - DNA, 98 bp, Homo sapiens
aacgctctccttgttgaagaagaaggacccccgcatttatcagaaagatgccaccttctataacagaacagactgatgggaagaagagttactataag

SEQ ID NO: 574308 - DNA, 98 bp, Homo sapiens
tccgcgggacaagaaaattcatgcggaaatggtcaacaagaggctcagagtcccatgagcttaatgaaggaggagatgaaaagaaaaagcgagattct

SEQ ID NO: 574309 - DNA, 100 bp, Homo sapiens
acgaggggacagtgaggacggaagcccaagtggcacaaatgcagaaactccctctggtgatgatttcagttattgccttgtctgtcaagatccgcagtta

SEQ ID NO: 574310 - DNA, 100 bp, Homo sapiens
gctgcagaggagtacaccctcatgagcatagacaccatcatcaatgggaagagaatggatcttggagaatgtctgaaagtccatgacctggctttaagag

SEQ ID NO: 574311 - DNA, 100 bp, Homo sapiens
cacccacgcagacatcttcagccgctgccaggtttggtgcacctcgatttggaggaagtagggcagggcccttatctggaaagaagtttggaaaccctgg

SEQ ID NO: 574312 - DNA, 89 bp, Homo sapiens
ggtccaccgtgcctatttaaaggacacttgagcaccaaaagtaatgggaatgaaaaagactcgagtagatgcaaaaaaaattggtcctc

SEQ ID NO: 574313 - DNA, 75 bp, Homo sapiens
gatggcgtggagatatggcgcaactgcggcgcgttcgagaacttgtcttggacaattgcaaatcaaatgatggaa

SEQ ID NO: 574314 - DNA, 76 bp, Homo sapiens
cagattctgccaattcgttttcaggagcatctccaggtcgcctggtcggcgctctggatgcagtgttggattccaa

SEQ ID NO: 574315 - DNA, 99 bp, Homo sapiens
aggcgtgaggaggacgccaggtggacacgcccatccttggacttcctgaaaatgacccaggtgaaatgacaatggatgctctgttggctcgattgaaac

SEQ ID NO: 574316 - DNA, 75 bp, Homo sapiens
agctgcctcagttcttagcgcagaaattccttgagctcataggcattgctcagggtcagatgacagttctgagac

SEQ ID NO: 574317 - DNA, 100 bp, Homo sapiens
gacctggccgatgaggaagtactgagcctgttggaggaactggcccggaaacaggaggacatggcccactgcgtgaccttggttcagctgtccatttcct

SEQ ID NO: 574318 - DNA, 75 bp, Homo sapiens
agatgtaaagcaatatttcgagcagtttggcaaggtatttgaaatggacatcgctaaacagttacaagcttatga

SEQ ID NO: 574319 - DNA, 100 bp, Homo sapiens
ctgcggggcttccctgcggctggaggaatgtatcctgtcaggtataatgtcagtgaatggcaagaaagttcttcatatggatcgaaacccttactacgga

SEQ ID NO: 574320 - DNA, 96 bp, Homo sapiens
accacctctgccatcctcgcctcagtcaaagaacagagctgaagaagcaggtggagagtgccgagctgaagaaccagcggctcaaggaggttttcc

SEQ ID NO: 574321 - DNA, 100 bp, Homo sapiens
gcaggagatggacccgccaaatccagaggaggtgaaaacgcctgaagaagggactttgaacatgtcggggatcgccctcagcagactcgcccaggagagg

SEQ ID NO: 574322 - DNA, 100 bp, Homo sapiens
acctggtagctttgggcttcaccatctttctgacagcgctgtcccggccaggaaccaaaatcatgagtggaggatctcaagtccacattttttggggtgc

SEQ ID NO: 574323 - DNA, 87 bp, Homo sapiens
gtcacgctgctggtggcccgggtcttccagaaggctgtagaccagagtatcgagaaggctgcttttgtcagagacgttttattaccg

SEQ ID NO: 574324 - DNA, 82 bp, Homo sapiens
tgcgcacgctctaccacgagcacatcatcaagtacaagggctgctgcgaggaccaaggcaccgtctgcgtcctgctgtcctt

SEQ ID NO: 574325 - DNA, 100 bp, Homo sapiens
ggccttgctgttccttgaacctgccaggagcagcgggaccccacggtgcatgatgatgtgctggagctggagatggacgagctcaatcggcatgagtgca

SEQ ID NO: 574326 - DNA, 74 bp, Homo sapiens
caaaaacccaccaattctggacacattgggattaaagacaaatttacatgtattggagaccagaccagaagccc

SEQ ID NO: 574327 - DNA, 50 bp, Homo sapiens
gtctcttctcgccctggcggggaaggcccagctgagagccagcctggagg

SEQ ID NO: 574328 - DNA, 73 bp, Homo sapiens
gcctgaggcaggagaacctgcagctggtgcacagatttgggtctcgctgtgctagaatattccgtctagtttt

SEQ ID NO: 574329 - DNA, 74 bp, Homo sapiens
agagggtgttcgactgctagagccgagcgaagctatggtttgaagtggtgaacatggatttttctcggcttcac

SEQ ID NO: 574330 - DNA, 100 bp, Homo sapiens
actggtcttggtagcggaggcacccgaatgctgcccgggtgagagccagcccctgggcaacaaagtggaaatggagattgtgagcatgttggaaaaaaac

SEQ ID NO: 574331 - DNA, 75 bp, Homo sapiens
gctgcagaaagacatgaagaagagcaccgacgcagacctgggtctttcatggtgctgattcagacatagaatggc

SEQ ID NO: 574332 - DNA, 100 bp, Homo sapiens
caaggaacatcttgccaatttcaaatcgggaaaacagttcctcctgaggatttcagagaagagctggacttcctggctgactctcacattctcttcttct

SEQ ID NO: 574333 - DNA, 90 bp, Homo sapiens
gtgcatcacgggcttccggcccttcctccccaactggcagcccgtgcagtgaaaccgaaacttcattgccccttcaatgtgggaatccag

SEQ ID NO: 574334 - DNA, 98 bp, Homo sapiens
cgcagtcagctgcgtgattcccgtgattgcgttacaagctttgtctccttcgacttggagtctttgtccaggacgaggactactgagcccagccaggc

SEQ ID NO: 574335 - DNA, 90 bp, Homo sapiens
ctcgccatgccggcccggcggctgctgctgctgctgacgctgctgctgcccggcctcgggatgatgtgatgccagccacttactgtgaaa

SEQ ID NO: 574336 - DNA, 100 bp, Homo sapiens
caagatgaaaggttatccccattggccagctcgaggtcccgggattcttgagctgtgcccagctgacgagcttttgaagatggcacaataaccgtccagt

SEQ ID NO: 574337 - DNA, 50 bp, Homo sapiens
aacatttttccccaaccataagccaatgaagctccaccatgaggcgaggt

SEQ ID NO: 574338 - DNA, 82 bp, Homo sapiens
cggcgtgcggaagtggacttggagcgcgtgcgtgtggaaacttcctcctggccaaccctgtgtctggcagccccatcgtgac

SEQ ID NO: 574339 - DNA, 75 bp, Homo sapiens
cataagttatctcttcttttggacccttattttatgccataatgaagtgcctgctgttctccaagcagttcatgc

SEQ ID NO: 574340 - DNA, 138 bp, Homo sapiens
ttgctataatgggattcattggcttctttgtgaaattgatccatattcctattaataacatcattgtatgccgctcctacgaggactgctgtggctccaggtgctgtgtgcgggccctctccatacagaggctgtggt

SEQ ID NO: 574341 - DNA, 50 bp, Homo sapiens
cccaaccttccttctgacaagtcccaggtcactgaactgatgcaggagca

SEQ ID NO: 574342 - DNA, 98 bp, Homo sapiens
aaactgttattcgggcattctacggagggagatattcttgaggtgtttcccatgatgaattgcttgacttagcaaagtttcatttcggtgactcttta

SEQ ID NO: 574343 - DNA, 122 bp, Homo sapiens
tgagggtggcggcggtcgacatgttccaggtcccggatagcgagggcggccgcgccggctccagattctttccaccatggccagacgcccccggaacagcagggcctggcacttcgtcctga

SEQ ID NO: 574344 - DNA, 100 bp, Homo sapiens
tcgtggaggtggtttcggtgggaatgacaacttcggtcgtggaggaaacttcagtggtcgtggtggctatggaccgccccctgcaggaagaggagccccc

SEQ ID NO: 574345 - DNA, 101 bp, Homo sapiens
aaggtggagccaccagcctctccttggctgacaaacgggctcatcataatgcactggaacgaaaacgtagggaccacatcaaagacagctttcacagtttg

SEQ ID NO: 574346 - DNA, 74 bp, Homo sapiens
gttatttcgagcaggagaatgactggtcgccccacggctgaattctcggtgataaaggcgcccactggaccctc

SEQ ID NO: 574347 - DNA, 96 bp, Homo sapiens
cgtcaggactattttcacgttttaatgccgagagttgccaaagctctgcaggaatttgacttggccttaagaggaaagaagaaaaggaagaagttt

SEQ ID NO: 574348 - DNA, 75 bp, Homo sapiens
cgcggcctctccgccgggtgtaccacctgtcgcggcgcgagacctctgggtggcattgtgtgtcccagagtgccg

SEQ ID NO: 574349 - DNA, 75 bp, Homo sapiens
acagccacctggaggaatttgagcagatccagtcacagaccttctcccagccgcagcaatggcgctgagttcctc

SEQ ID NO: 574350 - DNA, 74 bp, Homo sapiens
ccgcagtgccacttcgacatcgagatcaaccgggagccggtgcccaccagaagtatgtccgacaagcctggcag

SEQ ID NO: 574351 - DNA, 100 bp, Homo sapiens
actctgatcttgacctagagtcatggccatgatgcctgaaaacttcatgcctcctgttcccatcacatcaccaatcatgaacccgttgggtgacccccag

SEQ ID NO: 574352 - DNA, 133 bp, Homo sapiens
tccctgcctgctgctgggcggagggaaggcggcaagagctgcggagcccctggaagattattgccaagcgcctccccccagaccagctcatcagcctcttgctaaccatgtttgaggccctgggagaccccga

SEQ ID NO: 574353 - DNA, 50 bp, Homo sapiens
ccggcgctcagctgggcttgagattcatgttacatgtaaagctgtcctca

SEQ ID NO: 574354 - DNA, 75 bp, Homo sapiens
ccagccacctgcagccatcacccaggtcatgttgctggccaatccactgaagggtggtgaaggaggagatctttg

SEQ ID NO: 574355 - DNA, 82 bp, Homo sapiens
tcgcttatcctgtgggggccgccgggctgcggcaaggtgtggtcactcacctgtctaccactcccgtgaaatggcagctcgt

SEQ ID NO: 574356 - DNA, 51 bp, Homo sapiens
cggcgagcgcgtggggccaagaaaggtcagtcatatgaaattcggatgctg

SEQ ID NO: 574357 - DNA, 75 bp, Homo sapiens
cacacattgaatgggccaaggaaaaatcgagcagaaagaatgtctttcagatacttgccagaactaatacagctg

SEQ ID NO: 574358 - DNA, 49 bp, Homo sapiens
tgagaagctcttacgttatgcccaggtttgaagatgccgcatttggatt

SEQ ID NO: 574359 - DNA, 82 bp, Homo sapiens
gccttcgcctcctaatccctagccactatgacacgatgaggcgagtggtacgacagagcaagtttcggcatgtatttgggca

SEQ ID NO: 574360 - DNA, 90 bp, Homo sapiens
ggggaccacaagatcctcatcgacagggcgccctgcgtccggcagaggaggcgagcatcccgctcaggtgatgaggaacccctcgcgcac

SEQ ID NO: 574361 - DNA, 75 bp, Homo sapiens
ccagggcactcaccaggctgcaagaacagtgctggggttcatgacatcttctatcccttcccccaatcagaggga

SEQ ID NO: 574362 - DNA, 82 bp, Homo sapiens
ttggaagcagccgatccagcctgcggagcctgtggggcaggcttgaagtagaaaatgccatgatgagaaaaactattaaaaa

SEQ ID NO: 574363 - DNA, 75 bp, Homo sapiens
gtcagccgatgcaccgagtccagcccaggaaaatggagaggaagaaggagagacgaccatcttgcaactagaaaa

SEQ ID NO: 574364 - DNA, 87 bp, Homo sapiens
gcgcacgggctcggccgccgcccctgccggataaaagaatcagagtgtctcaacccttgacaagaggaccaagtgcctttattccag

SEQ ID NO: 574365 - DNA, 50 bp, Homo sapiens
ccgggagcgtcgctgcctggtgaacggtgcagtcagcctcagtttccaaa

SEQ ID NO: 574366 - DNA, 97 bp, Homo sapiens
ccgtccagcagatggcggatgccctgcagtacctgcagaaggtctctggagacatcttcagcaggtggctcaatcccttgtttaaaattggccataa

SEQ ID NO: 574367 - DNA, 112 bp, Homo sapiens
ggaggctccgtgtctgcagctagtgtgtcaactcagcgtttctcctctcgtccctgacaatgcagatcttcgtgaagactctgactggtaagaccatcaccctcgaggttga

SEQ ID NO: 574368 - DNA, 100 bp, Homo sapiens
aacacctgaagcatcactgtaacaatcagattgttcgatatggtgagattccagctgaattaagggcggcggccactgaccaccggcaggagctaattga

SEQ ID NO: 574369 - DNA, 100 bp, Homo sapiens
atttgtcgatatcacagccaccaaccacactaacgagattcaagattatttgcaacagctcacgggagcaagaacgttgtatcacggactgattcaccga

SEQ ID NO: 574370 - DNA, 98 bp, Homo sapiens
aagtcaaatctgaatcgacagtttcttttccggccctgggatgtcacggtgttcggcttcctgaacctggtgctctgggtcggcaacctgtggttcgt

SEQ ID NO: 574371 - DNA, 100 bp, Homo sapiens
ctgcgcaccccagcggagccaagccccacgctggccggacagggccgcctgtcgccgggcccgggtggaacgcatggagcagttccagaaggagaaggag

SEQ ID NO: 574372 - DNA, 82 bp, Homo sapiens
tgcgtgtagaaaggggcagatcgccggcaccacgagagcccggcccgcctgtgtggacgtgagtgacctgcaggaagaaggc

SEQ ID NO: 574373 - DNA, 90 bp, Homo sapiens
aatggtgaaaaagttcaaagactccaaaagtgtattggtcccggctgaccagtacaggagcttggctgagagtgccctcttggagcccca

SEQ ID NO: 574374 - DNA, 75 bp, Homo sapiens
acccgccaccgtcgccggccgcccgcacgtccgtccggacgtagacaagtttggcaacgagatcacccagctggc

SEQ ID NO: 574375 - DNA, 75 bp, Homo sapiens
ctcggacgtggccatgaaagtactcaacagcatcgcctacaagaaaactttagaaactgttcctttggagaggaa

SEQ ID NO: 574376 - DNA, 100 bp, Homo sapiens
gagagaggtacctctccttttccctctccctttccctaaggcgagcgacggaggcgccggtgccaggtggcattcagctacctgccccagaatgacgatg

SEQ ID NO: 574377 - DNA, 71 bp, Homo sapiens
tgggatgacgtgagttgaggaggctcagcggaaagcgacaggaaagattaagcctgatcaagatgacaacc

SEQ ID NO: 574378 - DNA, 51 bp, Homo sapiens
aaaaggacggctccttatttcactccacgatttaagtgccctgtatgctca

SEQ ID NO: 574379 - DNA, 75 bp, Homo sapiens
gcccgggttgcgtggatctccagtggaaagcagcctcgtcttacagcgtgactgcaaagaaaaagacttttgttt

SEQ ID NO: 574380 - DNA, 100 bp, Homo sapiens
acacctgcacccacttcaggaattgtgggtgcattaatggaagtgatgcagaaaaggagcaaagccattcattcttcagatgatgatgaagatgatgatg

SEQ ID NO: 574381 - DNA, 100 bp, Homo sapiens
acaaacggaataccacgtggcaggccaagcaatggggctggacacaaggtcggtggcccaaaaagagtgctgaatttttgctgcacatgcttaaaaacgc

SEQ ID NO: 574382 - DNA, 100 bp, Homo sapiens
aaccaacgacaaagcccgcgtcgaggtggagcgcgacaacctggccgaggacatcatgcgcctccgggagaagtctctaattaacagaagatggcaaagc

SEQ ID NO: 574383 - DNA, 98 bp, Homo sapiens
atcaaggagctcatcaaggacgggaagtcactcataagcgcgctcaagacttggtgtaaaaattgccaaagcagttgcctgccacaactttgtaaaag

SEQ ID NO: 574384 - DNA, 90 bp, Homo sapiens
gatttttggcctaccctccaaagaaaaggcgccaagcccatctttgtgtgcttgcatccaactgtgatgagcctatgtatgtcaagttgg

SEQ ID NO: 574385 - DNA, 100 bp, Homo sapiens
tcgatgtgcggcgtccgctgtataagttctttatcaacaagactgagattgaggactttccccgctttcctcaccggggcttgctgttggatacatctcg

SEQ ID NO: 574386 - DNA, 100 bp, Homo sapiens
aaaagcaagaagtggaaagaaatcctgaagttccctcacattagccagtgtgaagacctccgaaggaccataggatgaccagtgtcccagtgaaggaacg

SEQ ID NO: 574387 - DNA, 75 bp, Homo sapiens
ggacacaaagctttactgtatctgtaaaacgccttatgatgaatctaactgtcccctttcctccaacccaacggc

SEQ ID NO: 574388 - DNA, 100 bp, Homo sapiens
ggaagctgaaaccacagacatgactgagtcctccatgaagagtgtggtggctggaggtggccgaattgacaaacccatcttgaaggctggccgggcgtac

SEQ ID NO: 574389 - DNA, 76 bp, Homo sapiens
actacctggcattgccttttgttgagagggctttaaggaagcagcggagaagtttcgaatggaatctggaatcgaa

SEQ ID NO: 574390 - DNA, 117 bp, Homo sapiens
cgacatgttcacgcacgggatccagagcgccgcgcacttcgtcatgttcttcgcgccctgctcaccatggatgatgatatcgccgcgctcgtcgtcgacaacggctccggcatgtgc

SEQ ID NO: 574391 - DNA, 100 bp, Homo sapiens
gggcagcctgggtgttttcacttgttcttggactgggccaaggtggtcacatgtgccaatttaacgaacggtggaaagtcagaacttctgaaatcaggaa

SEQ ID NO: 574392 - DNA, 96 bp, Homo sapiens
gcccgaccgctttccgggagactggagtcgaaggccgtgagcatgccaatgaagatgtggaaagaatgttactaggaaacaagtgtgatatggacg

SEQ ID NO: 574393 - DNA, 100 bp, Homo sapiens
gccatgagtctgacttccagttccagcgtacgaggaaacaaaccatcaggcctcccagaaagtatccgggatctgaaaatcaccaaatcaccacatccgg

SEQ ID NO: 574394 - DNA, 100 bp, Homo sapiens
agatcattggaaattgtgtgtccatcttggttttgagctctgctctgcctgtgatgtcgagaacactggtttctgatgaagaattgaaaagaagagtagc

SEQ ID NO: 574395 - DNA, 98 bp, Homo sapiens
ccgggagatgcggagcctccgctgcagcgcgatctgcgcgaccagaccggcccccccgaggatttttttcccaggaagccatcccgtcagaggggttc

SEQ ID NO: 574396 - DNA, 100 bp, Homo sapiens
cagtggcaagatctcatgtccatcatggaaatgcagcaagcaacacagtattctgagcagaagatcgggacttgaggccatgttgcggagggccagtgac

SEQ ID NO: 574397 - DNA, 71 bp, Homo sapiens
gctatcctgcgcctttccactgctctgacgtgcagttcctggcctcggtgctgcccccagacacggatcct

SEQ ID NO: 574398 - DNA, 97 bp, Homo sapiens
agaagaggagaatgctaagcagaagcatcactttgggtcctcaggaatgacattacatgaacgctttactaaatacctaaagagaggaactgagcag

SEQ ID NO: 574399 - DNA, 75 bp, Homo sapiens
aagcaccccatggacctcagcactgtcaaggtcaacaccttcatgtccttcatattccccatggtggtcatctcg

SEQ ID NO: 574400 - DNA, 75 bp, Homo sapiens
attagatgatccaagtcaccaagaaattactgtctcaagtgatacgggaataaccagcaagtacctgtcaagaat

SEQ ID NO: 574401 - DNA, 75 bp, Homo sapiens
ttgaagtctgggatgtagtagacaaaggggttctccaggacaaggacctcttctctgtcttcgctgatcccaata

SEQ ID NO: 574402 - DNA, 100 bp, Homo sapiens
gggaacagcaagcagagaaaactgaagatcaaccctaaaaggtatgcagtggaactgatgaagaccctgatgataaaaacgcaccctttcggcaacggcc

SEQ ID NO: 574403 - DNA, 75 bp, Homo sapiens
gccagctcagctatggacacatctgagccagccaagacagcacccaagaaaacctcatttggctcgctgaaggat

SEQ ID NO: 574404 - DNA, 98 bp, Homo sapiens
gtggcacttcagctgccagctcccctaccatcatgcggaaaagcagcggcagccccgactctcagcactggaagcaattttggaggtggtggaagcta

SEQ ID NO: 574405 - DNA, 100 bp, Homo sapiens
cgagctacctgaagatgcgcgccgtcttccccgaagcggggatctgatgagcttctttcttctggcatcattaacggaccttttaccatgaatagttcta

SEQ ID NO: 574406 - DNA, 100 bp, Homo sapiens
tggatgatgcaatcaaagctcgacttctcaatcccaagtggccaaaggtacggttcctggagcagcagaacaagatgctggagaccaagtggagcctcct

SEQ ID NO: 574407 - DNA, 100 bp, Homo sapiens
ctctgatcagagaaaacaagcaaatgctgccttccttgttggatgctacatgacctctcaagctggatccaaggataaaaagatggaccaaccaccccaa

SEQ ID NO: 574408 - DNA, 76 bp, Homo sapiens
gccaactagacatcttgagcctcctgaaacaggtgaaaaggagaacagcttgaagacagatgattatggccgagac

SEQ ID NO: 574409 - DNA, 100 bp, Homo sapiens
gctggatgtgttgtgttcctggcttccctctggatgctgacagaaacaagggatttttcaagccacattcaattgataggatgaaaaaatttaagagaag

SEQ ID NO: 574410 - DNA, 83 bp, Homo sapiens
agatggtttacatctcgaacgcccagatggcagttacacagaggagcagagtcaggagagtgagatgaaggtgctggccacgg

SEQ ID NO: 574411 - DNA, 82 bp, Homo sapiens
agaaagaaatgaacccaccttctccttctaatccccggacatttgtgtactcactgctcaatcgagggaggccttatccagc

SEQ ID NO: 574412 - DNA, 87 bp, Homo sapiens
gtggactgattgatgatattgctttgatcagcccttcgccacaagaagatgggcagatcatgtttgatgtggaaatgcacaccagca

SEQ ID NO: 574413 - DNA, 50 bp, Homo sapiens
gtttctaggaaaggccggacaccaggctactgcagcactggggtgtcagt

SEQ ID NO: 574414 - DNA, 110 bp, Homo sapiens
acagacacagccggggtcgggagccgcccggggcagggctcgggagagcgggctgaccccgcactacatctacccaccagccatcgtgcagcccagcgtggtgatcccag

SEQ ID NO: 574415 - DNA, 100 bp, Homo sapiens
agcagacctcggagatcatcacgtttgccgagtcagattttatcatgtgggcaacctgctgcaactggttctgcctggatggacagcctgaggaggtccc

SEQ ID NO: 574416 - DNA, 74 bp, Homo sapiens
cccggcctgcgctcccatccacacgctcggcataatcaccagcaacacccgggacaataatacgggggccacct

SEQ ID NO: 574417 - DNA, 75 bp, Homo sapiens
ggtaaatgacgaaggggcttcttccagagccaaggaggaagggttgtccgggtacagagccagatggactccttc

SEQ ID NO: 574418 - DNA, 49 bp, Homo sapiens
tgaggccaaaggcagttgtattgctgcaggactcatgcacacgttcaat

SEQ ID NO: 574419 - DNA, 100 bp, Homo sapiens
ccgaagccaccgcggccacggagaagggcgagaagaagaaggagatgcccattcaccagaatctcaaggagctgctggccgtcagggcggagctgcagaa

SEQ ID NO: 574420 - DNA, 99 bp, Homo sapiens
cccaagaagaccattcagatgggatctttccggatcaatccagatggcagccagtcagtggtggagtaccttggccatgtagaagttgatgaatcaaga

SEQ ID NO: 574421 - DNA, 99 bp, Homo sapiens
gtgtggttctgtgatcttgggacagtcacttcctctctgtggttgtcagtcttctcatccctaagccaaatgatttctcagtatcactaaaagcacaag

SEQ ID NO: 574422 - DNA, 100 bp, Homo sapiens
agggcggcaccggctcatcactcaggtttatctctcccacaccgcttggacagagttatgcccagccaagtcttcagtatatccaggggcaacagatttt

SEQ ID NO: 574423 - DNA, 82 bp, Homo sapiens
gccctgaagaggacactggattccatgaacagcaagggctgcaagatctattccagaggggagcttcaccacttcattgacg

SEQ ID NO: 574424 - DNA, 82 bp, Homo sapiens
cggaggcgcgcgcgaccggcggctctttggcgcggattagggggtctcggcgagctttcatccatcccaggggaatcactta

SEQ ID NO: 574425 - DNA, 76 bp, Homo sapiens
ggaaaatgcaagaagactgatggagcaggcttgcaatattaaaagctctgattatacaaaaccaggagacattgac

SEQ ID NO: 574426 - DNA, 77 bp, Homo sapiens
gcggcgcagtacaccaacgcggtgcgcgaccgggagctggacctccggggtactccaaagattcaggtttactcacg

SEQ ID NO: 574427 - DNA, 98 bp, Homo sapiens
tttcgccacagttcctaccttatgagctcggttttcttatgcttataagagtggaacaggttgtggcagcactgcctgaaggtatgagaccagattct

SEQ ID NO: 574428 - DNA, 100 bp, Homo sapiens
aaggaaatcatgtcaagcgaagccttgaaaaagctgccctgagacggtgtcccgccgaaaggtataccaagcttggctacgcaggcaacactgagcccca

SEQ ID NO: 574429 - DNA, 75 bp, Homo sapiens
gctgatcttcgatgagctctcggattccttatgcagagtggccgacttggagtggagtcggttcttatacaacta

SEQ ID NO: 574430 - DNA, 82 bp, Homo sapiens
actgagggtcttgtaaagagtctgccttctggatctcaccaggcttcaacggaccacaccaaaatgccatctcaaatggaac

SEQ ID NO: 574431 - DNA, 123 bp, Homo sapiens
ctttaactgcttggccgtgcttgccctgtcatcccacctgagaaccatgctcaccgacccttggtctaccatcacggcaacagtgcgacgggcggccattacactacagacgtcttccagatc

SEQ ID NO: 574432 - DNA, 75 bp, Homo sapiens
tttcaaccataaagacatcttaattgggcacgaaagaggttgcaacaaggacagtgtcagagcaggctgtaaaaa

SEQ ID NO: 574433 - DNA, 100 bp, Homo sapiens
gaatgagggcccggctacagagtcagaggccccgctggtgctgcgagagatgtgcaagcagggataccgggatggcctgcgctttctgcagcggaacggt

SEQ ID NO: 574434 - DNA, 85 bp, Homo sapiens
gctccctgtgtgcaccgcgcgctgcccgaggcgctaacatccaggagatgagggctcggcacaaagaggcttttttgaagaaaca

SEQ ID NO: 574435 - DNA, 98 bp, Homo sapiens
gtcagcgtgaacgcgcccctcggggctccagtggagagttcttacgggaagccccacccaccagaagccaagatgtccagcaagcgggccaaagccaa

SEQ ID NO: 574436 - DNA, 48 bp, Homo sapiens
agaacttgcccgaaggaaacaggatttctataattggcctgatgaatc

SEQ ID NO: 574437 - DNA, 97 bp, Homo sapiens
gtggtgggggacacttcagggtactaccagcggatgttggtggttctccttcagctcttgctgggcagtggtgtgggaacagtgcgtctctatgaca

SEQ ID NO: 574438 - DNA, 98 bp, Homo sapiens
gcctgggagttcagcttttagagcaggtgtatgatcttttggaggaggaggatgaatttgatagagaggtggccctgttgaatcccattgaaaaccca

SEQ ID NO: 574439 - DNA, 75 bp, Homo sapiens
ctaaactccaaatattagagcttagagaaaaccagttaaaaatgttgcctaagttcaaaccttgtactactcagc

SEQ ID NO: 574440 - DNA, 73 bp, Homo sapiens
aatgcactttgccactttcatattgcagccagcatcaacccagccacaggtgtcgcgcatcctgaggaaggcg

SEQ ID NO: 574441 - DNA, 96 bp, Homo sapiens
cggggaccagcagctgtcgccgccgctctcagatccagacatttaatgtggatgcaccatgccagaccgtggaagatttaacgaatggggttgtga

SEQ ID NO: 574442 - DNA, 50 bp, Homo sapiens
acgggcagttgcagtgttggagctaaagatttgaatttgttgaaatgagc

SEQ ID NO: 574443 - DNA, 100 bp, Homo sapiens
gagctgggccccatatgctgcttgcccagcttgggaaagaggaggctgctgcaaaggaccgatcggcggtgacctgaccaacggtgcagatgggatgctg

SEQ ID NO: 574444 - DNA, 98 bp, Homo sapiens
gccagtcaagttcctccactgagctcgctgcgtataaggaggaagcaaacaccattgctaaggtcaggccggctccggcgtcaaacccaagccacaag

SEQ ID NO: 574445 - DNA, 100 bp, Homo sapiens
gagacggtccagacaggaacaagacccggacattccaggccacagtcctgggaagtcagatgggattgaaaggtttttctattgggaaagctactgatcg

SEQ ID NO: 574446 - DNA, 87 bp, Homo sapiens
tacacactgctgtttaccttggcgaggcctttcaccaagtccatgaaagaactctgcaacatgatacttgattgctgtgcccaacag

SEQ ID NO: 574447 - DNA, 83 bp, Homo sapiens
ggagcctcagttggaagcagccgatccagcctgcggagcctgtggggcagatcaatgtccgagttaccaccatggatgcagag

SEQ ID NO: 574448 - DNA, 100 bp, Homo sapiens
gcgctgcgctcgcgcccggatccctcagtgagcctccgacgctgttgcacaagctgactcttcgtcacgtgatgcgaccgggctccgccccggcggcaac

SEQ ID NO: 574449 - DNA, 100 bp, Homo sapiens
cggcaactactcacgctcctacgggacgaggagagggaggtgaatccgtggcagaggtgacttaagagattaaaattaatttggttgctgttggttctga

SEQ ID NO: 574450 - DNA, 95 bp, Homo sapiens
agggtctgcagggcctgggccgccgctgctacctgcagcgccgtgtggcacgacacaaaaatcaggctgaccccgcactacatctacccaccagc

SEQ ID NO: 574451 - DNA, 75 bp, Homo sapiens
gaatggagatgcagctcagcagtcggacgaggaaggcagccaggagaaaggaggggacgacagccagcagaagtt

SEQ ID NO: 574452 - DNA, 100 bp, Homo sapiens
gaaccaacaagttcatcaaggagctcattaaggacggctctctgctcattggggcgttgaggagggatggtttagacaacagtgtagcttcacctggtac

SEQ ID NO: 574453 - DNA, 74 bp, Homo sapiens
gccgcgtgtcctcggagcgcggtccctgtattggtctcctgctcctagagctgcggttggatttctcacgatgt

SEQ ID NO: 574454 - DNA, 100 bp, Homo sapiens
ggcccgggctgcggcgtgtgcgcgcccgccagctgctccggagatacgagtctgtagaagaggcgacaccagggcttccaaatgaacaaccgaaaggaag

SEQ ID NO: 574455 - DNA, 75 bp, Homo sapiens
ccggatcaatccagatggcagccagtcagtggtggagctgcaccaaagccagctggagcttcaggaggtgcgtct

SEQ ID NO: 574456 - DNA, 84 bp, Homo sapiens
tcttgcatattccgctccagaaattctgcttggtgatgagtatgatgcacctgcagtagcacttttccagccattaactccagg

SEQ ID NO: 574457 - DNA, 101 bp, Homo sapiens
aggagcctttcgatatctggggaacttggcattcaacattaaaaagcggatccaaagacccaggaatgacagttctttatagctccaagctctacagattc

SEQ ID NO: 574458 - DNA, 88 bp, Homo sapiens
cgaaggcagccatctttagttcgtctttcctagagagcaaacttagtgctacatcagactgtggagcgtattcatgtgggcaaaaaat

SEQ ID NO: 574459 - DNA, 98 bp, Homo sapiens
gatgagcccctgggtcctgaggatgaagactccttctccaacggttaaaagcagccttcgccttatcccagatgatctatccctcctgaaactctacc

SEQ ID NO: 574460 - DNA, 100 bp, Homo sapiens
cctcccaaagtgatggaattacaggtgtgaatcactgcatctgactatggcaaggatctctgtcactgaggtcaaatttgtcaagatgtccacaatcccg

SEQ ID NO: 574461 - DNA, 100 bp, Homo sapiens
cgcatggtgcccgaacaccgcgccttcggaagcccgttcggcctggaggagccgcagtgggtcccggacaaggagagagaactcgatgccaccgcaacgg

SEQ ID NO: 574462 - DNA, 98 bp, Homo sapiens
atactgaatgatctctacatctcagactactgtgtgtggattcagaaagtcaagccggaccagaatatggccaagggatgaaccctattagccgcctg

SEQ ID NO: 574463 - DNA, 98 bp, Homo sapiens
agcaacttccaaaggagcagttgctagtggccatttacaggaatcagccacttcagttcaggtaaaataccatgaagattttgaaaaaacaaagggga

SEQ ID NO: 574464 - DNA, 75 bp, Homo sapiens
aatgggagcagcaatggatgcgcttgaaaaataaggagctcaaaaagtgggatgagtttgaagatattttagaag

SEQ ID NO: 574465 - DNA, 51 bp, Homo sapiens
atgccatggatgagattggattgcctaagtggacatttgggagcaataaaa

SEQ ID NO: 574466 - DNA, 50 bp, Homo sapiens
ccagccctgcctctccctgggctctggtgtgggtacgccacgctgcatca

SEQ ID NO: 574467 - DNA, 74 bp, Homo sapiens
ggtttactggagtaggtgttagtaaggcgagtctgcggacaccagaactgacctgggagcgagtgagatctcaa

SEQ ID NO: 574468 - DNA, 100 bp, Homo sapiens
gctgctggaggaagagctgagcagcctaaaggaggagttggccctgtgtcagcacacgacggttctgccctttatattaatcgagatgaggacatcgcac

SEQ ID NO: 574469 - DNA, 75 bp, Homo sapiens
cagcataccaatgaacctctattcaagaggagatgttaaagtaacccatcttgcaggacgacattgaagattggt

SEQ ID NO: 574470 - DNA, 100 bp, Homo sapiens
tggccgggcagcacctcccggtaccccggctggagggcgtttctcgggagcagttcatgcagcacctctacccacagtgcacttgttgagctcgtgaaac

SEQ ID NO: 574471 - DNA, 88 bp, Homo sapiens
gcctttgatcgtcttcctcttcagccatccaggccaaacgtaccaagaaagtcgggatcgtcggtaaatacgggacccgctatggggc

SEQ ID NO: 574472 - DNA, 82 bp, Homo sapiens
ggactctgctggtctgctgtctgctgaccccagccttgctgttcaccctgatggtgttcgggtagcctcgggacagacagct

SEQ ID NO: 574473 - DNA, 80 bp, Homo sapiens
tggaagttacttgtggacatggtgatatccaagaactgtatgacaccaccttggccctgggccacgcggcggctttctca

SEQ ID NO: 574474 - DNA, 75 bp, Homo sapiens
cctgcgaccgccctgcgcttcgtgcaccggggcggtccgttgccaaagccagggcacaagagactatagtccccg

SEQ ID NO: 574475 - DNA, 82 bp, Homo sapiens
ccgtgccgcgtctccgcgttcccagcccgggtccccgcgttcacagccccagcgcaggcagtgtgtgaagaaaccctgaagg

SEQ ID NO: 574476 - DNA, 100 bp, Homo sapiens
ctgcggtcatggagggagcaggagctggatccggcttccggaaggccggaaggtggtggtcgtacgctgtgaaggcatcaacatttctggcaatttctac

SEQ ID NO: 574477 - DNA, 97 bp, Homo sapiens
tgggaagaggataaagaggaaggtggttgagacttcccaaagcagaaagccaggagagatgctgttcagttaaatgtgattgcaacgcgacagctta

SEQ ID NO: 574478 - DNA, 100 bp, Homo sapiens
accagtgccgctgggcacactggcttcacgccggctccgcctcaccagcaagcgcattcccagtacaagccagctgccatgttgtgagcacataccacat

SEQ ID NO: 574479 - DNA, 50 bp, Homo sapiens
gtagcatccaaggcagacaaagaggcctcgatctgtttatcgtcctttaa

SEQ ID NO: 574480 - DNA, 100 bp, Homo sapiens
tgggtcttgcatttatgtctacaatgtgttctccttattctgttggcgttgttcagacatatctgaagagatggattaagaatgctttggattaaggatt

SEQ ID NO: 574481 - DNA, 100 bp, Homo sapiens
aatctcaaagaaagaaacaagttcttggcaagagaggcatcctccttgaagtatttggctgaggagttttcaatcccagcctgtatgtggaatcagaggg

SEQ ID NO: 574482 - DNA, 82 bp, Homo sapiens
aaaagtatcgtcgagaagcctatcatcggtattccctcagagctcctcgtggagtggccagaacatttttgaaaatatcaaa

SEQ ID NO: 574483 - DNA, 74 bp, Homo sapiens
gctgaggagcgccgctgcctcgcctcgggatgtttcagcagcccctgagaaggaagaggaggaagctgagggcc

SEQ ID NO: 574484 - DNA, 74 bp, Homo sapiens
gagaaggagaccttccgggagaagatttttagactctgaggagcagttggagctaatccacattatggaaatgg

SEQ ID NO: 574485 - DNA, 100 bp, Homo sapiens
ggcgcctcatgaacctgcataacaatgaggccggcaggaagctggccgcccggatcctggaggcgcaccagaacgtggcccagatgcccctggtcgaagc

SEQ ID NO: 574486 - DNA, 110 bp, Homo sapiens
tcacgtagaagtggctgaactgttggtacatcagcgtgctcttcaggatccaaatgtggctgcgttcatggtagaaccaattcagggtgaagcaggcgttgttgttccgg

SEQ ID NO: 574487 - DNA, 100 bp, Homo sapiens
tcagtgaagaagaaagtaaagttggaagttaagggagacaaagttgaaaacaaagtgctggccatcgaagacggcaatttggaggaaatggaagaggaag

SEQ ID NO: 574488 - DNA, 96 bp, Homo sapiens
cacaactccagtgctaactcaacaggtcccctcttgctgttggctgcacatcaggaaggctgtgatgggaatgaaggtgaaaacttggagatttca

SEQ ID NO: 574489 - DNA, 98 bp, Homo sapiens
gggaaacgggaagccgctgcaagtccaccgcctcagctacccagattgggatctgcccaggcccgcctctggctcctgggcctgggctttagtctggg

SEQ ID NO: 574490 - DNA, 100 bp, Homo sapiens
catctccagcaccctcatcgccctggccgacaagcacgcaattccactgctccaaacccacccaccaaggactctgaacctgtccaccccgggcgcatca

SEQ ID NO: 574491 - DNA, 100 bp, Homo sapiens
catctctcctgctggaaaatcagtgctgcctgtgggaagcccgccctggttggagctgcagtttcctaccagtttgagaaagcagcagctgccaacatag

SEQ ID NO: 574492 - DNA, 75 bp, Homo sapiens
cccctacacagtggaggcctcgctgccaccagatcccagcaagattcaattagcagagcctcacagacaatggcc

SEQ ID NO: 574493 - DNA, 74 bp, Homo sapiens
agactgttgtgtgctccccgcagaaggggctaccatgatcctttcctcctgctttggaatcaggatgatgctgg

SEQ ID NO: 574494 - DNA, 143 bp, Homo sapiens
aagatcttttcttgctttggattgggatcctgatttgaaaaaaagatattttgatgaaaatgctgctgaggatatgggccctcacattttccaaacctgtccatctgctaactattttgactgcagagccatgtccattggag

SEQ ID NO: 574495 - DNA, 82 bp, Homo sapiens
cggcgcggcgctggcgctgccggagctgtcgacccggcctggcgccggactaggtactccaaagattcaggtttactcacgt

SEQ ID NO: 574496 - DNA, 76 bp, Homo sapiens
ctttatgaaccagtgtatcccaagtggaatatgtgatcaagtgtgacatgtcagctctgcagaagattctgtatcg

SEQ ID NO: 574497 - DNA, 75 bp, Homo sapiens
ggcgaatccggcgggtatcagagccatcagaaccgccaccatggtcagttgactggcggctataaacctaacccc

SEQ ID NO: 574498 - DNA, 99 bp, Homo sapiens
tcgacgccgcctggcaggccctgcgcaccaggtactgaacgacacctgggtctccttcccttcctggtctgaggactccacgttcgtcagctccaagaa

SEQ ID NO: 574499 - DNA, 50 bp, Homo sapiens
ctcaggagagagcagccagagtgtgcagtcattggagaaatcgatgaaga

SEQ ID NO: 574500 - DNA, 80 bp, Homo sapiens
aaacgcccccaatttcccagctgctaaaggaagaggaaggcaatactgaacactgcgcagcttgcagaggtctcctggca

SEQ ID NO: 574501 - DNA, 75 bp, Homo sapiens
tacatcgtcatcttccgacaacgacgagggcagcggaggggcgacaaatgctgaagacgtggtggcccgtgtgcc

SEQ ID NO: 574502 - DNA, 100 bp, Homo sapiens
ctctttgaagttgggttcaggagtgtagaattggcaaagttattgccagcttcctggttcaaaccttgtactactcagctgatcacaagctgcttgatgg

SEQ ID NO: 574503 - DNA, 82 bp, Homo sapiens
ctctgcccccccttccccacgcaaccccagatccatttacactttacagtgttgacttcaaaatcaaaactgtagagctaag

SEQ ID NO: 574504 - DNA, 50 bp, Homo sapiens
cgaagatgcttccctgtgcaagaggtgcttcattggagatgggaagaccc

SEQ ID NO: 574505 - DNA, 48 bp, Homo sapiens
tataaaagcacagttttaagagaggttgaaatcacaaagattagacac

SEQ ID NO: 574506 - DNA, 100 bp, Homo sapiens
cgcagccccgagctgggcagtgtccccagccgccatggatagcgacgacgagatggtggaggaggcggtggaaggatttcagatgcatgccaggtttcca

SEQ ID NO: 574507 - DNA, 75 bp, Homo sapiens
agcaacccctgtgcttctccccaggtccagccaatgcattcagaagccaaaatgatggagtcttgctttgttgcc

SEQ ID NO: 574508 - DNA, 80 bp, Homo sapiens
atcacttcatccgaaccctcagcctcaagccgctgctcttcgcccaatcaattgagcagagactgatgaaaatggatcac

SEQ ID NO: 574509 - DNA, 82 bp, Homo sapiens
cgacaatccagtttcctgctaatttgcagcttcctccaggtctcagccaatttcttctccagtcatcctccagtttggtcat

SEQ ID NO: 574510 - DNA, 75 bp, Homo sapiens
cggtggaggttcgcggctctaacggggctttctacaaggcttcctgtgtccagtaccggttagtggtccgggatg

SEQ ID NO: 574511 - DNA, 100 bp, Homo sapiens
cttggacttgtccaagtacatcgacaagacgatccgggtaaagttccagggaggccgcgaaggtccctttctagagataggagaagagagagatcgctgt

SEQ ID NO: 574512 - DNA, 90 bp, Homo sapiens
attcaaagttgtttccaattccttcaaaacctcaaaccaggtaagaaacggttgaactggatgcaatttttatcacagcttgtgtaagac

SEQ ID NO: 574513 - DNA, 98 bp, Homo sapiens
agtggttgtgtggtcgcgtctcggaaaccggtagcgcttgcagcatgacaagcagatgcccagtgtcgggaaggcagcccaggatcacagcagcaccc

SEQ ID NO: 574514 - DNA, 75 bp, Homo sapiens
gcttctgactaagctcccaacaattagtcagacgccaaattccagcgaaacagctgatgccagccagcttgaaga

SEQ ID NO: 574515 - DNA, 100 bp, Homo sapiens
tactcaggaggaaattacagagacaattatgacaactgaaatgagacatgcacataatataggtctctaattaacagaagatggcaaagcccagccacag

SEQ ID NO: 574516 - DNA, 74 bp, Homo sapiens
ttcagacattacgagaaatgttagagaagaaagacagctttgtggaagaggtgtgatccctcacatccacaaat

SEQ ID NO: 574517 - DNA, 51 bp, Homo sapiens
ctggctggaagtggcgtggctgcggcaacctttggcactgcatccatgagc

SEQ ID NO: 574518 - DNA, 75 bp, Homo sapiens
gtttaccaaaagagaggcaccgctggaacactaatgaggtttcccaggcagctgcagacttgaaacagttctgtc

SEQ ID NO: 574519 - DNA, 101 bp, Homo sapiens
tcctgggctgggaccccgacagccttgctgactatttcaagaaggtgtctgacttccagcaactgctggcctgtgccagggtgcaagctgagcactggagt

SEQ ID NO: 574520 - DNA, 97 bp, Homo sapiens
gccaagttagatgccgattacccacttcgagtcctttattgtggaggtgtcatggagaaactccagctgggcccagagattctgcagcgggaaaatc

SEQ ID NO: 574521 - DNA, 100 bp, Homo sapiens
acaacctgctaccccatgccatcaacctgcgtgaggtcaacctgcgcccccagatgtcccaggtactccaaagattcaggtttactcacgtcatccagca

SEQ ID NO: 574522 - DNA, 111 bp, Homo sapiens
acaagaccatgctggcaagtctgaaggtcaatgcaccaattccagctggacatcactgtgaaaatgggacgggataaagtccgagaaatgtttatgaagaatgcccatgtc

SEQ ID NO: 574523 - DNA, 82 bp, Homo sapiens
catactgagtcagatatatacagatggtccaggagaagctttgaaggctgtgaaggtcctcaaaatgagcacatgaagaggt

SEQ ID NO: 574524 - DNA, 83 bp, Homo sapiens
gggctccgcgcccggccggacccgggcccgagggcaacaggtttgtctatgctggctctaactcgggcgtggtccaggccccg

SEQ ID NO: 574525 - DNA, 118 bp, Homo sapiens
attggagactgagcaaaaggaaatgtgaaacgaataacatgatggaatatgtcaaagagtttttgagtactttgtgatcttgctgaagactacaggcagccaaatggttccagatact

SEQ ID NO: 574526 - DNA, 100 bp, Homo sapiens
ttgggctgagcagaggacgacatgttgcttttcgtggagaatgagctgaaagccagtggtggcgaaatcaaaattcataaaatggagcaaaaggagaatg

SEQ ID NO: 574527 - DNA, 71 bp, Homo sapiens
aactgctggaaggagactggatgatagaattgtatatgagtagaccagtgatgagtggcccaggactctat

SEQ ID NO: 574528 - DNA, 98 bp, Homo sapiens
actggacaaacatttcctccaagggatcatagacggtatttctatgtaaacgaacagtcgggcgagtctcagtgggagtttccagatggtgaagagga

SEQ ID NO: 574529 - DNA, 73 bp, Homo sapiens
ccagccctgcctcggcggaccaaaggtatgagaatgagtcggccctgaacctttatgagacttgcaaggtgcg

SEQ ID NO: 574530 - DNA, 100 bp, Homo sapiens
tctctggcgaccatctgcaaacaaccagagaataactgtgtagaatacattgaggatgatgaggagcacgtggacattgagactgtagaagagctctcag

SEQ ID NO: 574531 - DNA, 96 bp, Homo sapiens
tagcggtgggcagcaatgtgaccgggctgaagccaggagactgggtgattccagcaaatgctggtttaggctggagtgcagtggcgcgatctcggc

SEQ ID NO: 574532 - DNA, 74 bp, Homo sapiens
ttcaagaagcaggagaggagaggtgaccacctgagaaaggccaagctggtccaagcatctcattttgaaggcct

SEQ ID NO: 574533 - DNA, 101 bp, Homo sapiens
agacgccgccgccgccgcctccagggtgggcgcctttcgccgtggacgccgaccgtccgggacgaggtttaagaattgtttaagctgcatcaatggagcac

SEQ ID NO: 574534 - DNA, 99 bp, Homo sapiens
caggtcagcatgaacgatggcctctcttttatctccagttctgtcatcatcaccaccacacactgtgatctgaagaagatgatgaagttgtggcaatga

SEQ ID NO: 574535 - DNA, 101 bp, Homo sapiens
attactggcacagatatattggatatgaaactggaagacatcctgatattaataaggcagcggaaagaagaaatatgaatacggctccatcaagacccagc

SEQ ID NO: 574536 - DNA, 80 bp, Homo sapiens
actcgctcccttgatgatcttgaggttttgttaaaggccttcatagcgaacctgaagtcaagctcccccaccattcggcg

SEQ ID NO: 574537 - DNA, 100 bp, Homo sapiens
ccggcccacagtgggggtgtgcaaacccgagagaactggctctggaagagaaatggccccagttcatcacccttctctagcccagcctcctcccgctccc

SEQ ID NO: 574538 - DNA, 101 bp, Homo sapiens
aagcccttccactacgaccggccctggcagcgcgccacagcccgcgaagccaacgagtgcgtggcatcctggtggggaagaagttttaagggaacaagctg

SEQ ID NO: 574539 - DNA, 97 bp, Homo sapiens
catggtcacactcatcactgagaagctgcagagccagagcctggacgacctcacctgcaaggcggaggctggcccgctttaccactcctgaaggccc

SEQ ID NO: 574540 - DNA, 75 bp, Homo sapiens
tgcgttgctcttgcttttcctcgctggggtgtacgactgggaggcacgcattgacagccacggcaggatcttcta

SEQ ID NO: 574541 - DNA, 90 bp, Homo sapiens
caccactgcacaatttaacttacgttgttataccacatttgcataagttagccttggtgaacaacttacagattgtggattctaaaagac

SEQ ID NO: 574542 - DNA, 83 bp, Homo sapiens
gccaacggctcccctcgcgatgacaatgcagatcttcgtgaagactctgactggtaagaccatcaccctcgaggttgagccca

SEQ ID NO: 574543 - DNA, 100 bp, Homo sapiens
ctaacagatatgcacctgccgtgtattgtacgagcattgaaagatccaaatgcatttctttttgaccaccttcttactttaaaaccagtcaagtttttgg

SEQ ID NO: 574544 - DNA, 90 bp, Homo sapiens
ctcttctccggggtcctcatggatctgtccaaaaggcaccccctgtaatggcctatcctgctactacaccaacaggcatgataggatatg

SEQ ID NO: 574545 - DNA, 83 bp, Homo sapiens
agccctgcctctccctgggctctgatatgcctcttcatgttcgacgcagtagtgacccagctctaattggcctctccacttct

SEQ ID NO: 574546 - DNA, 101 bp, Homo sapiens
gatccatcactcggattggcaggacctggggccaaaagccaagggaataccaacagcatctttgccctggactacatcagcggagtgctgaccttgaatgg

SEQ ID NO: 574547 - DNA, 95 bp, Homo sapiens
aagcgtaaagatagtgtgtggggctctggaggtgggcagcaatctgtcaatcaccttgttaaagaggcaaatcctgatcctaactgttgtcttgg

SEQ ID NO: 574548 - DNA, 99 bp, Homo sapiens
caggatgaagtgacacccccagctacatccgaggaggttctaggacctgctacgaggcgtccgacctccgatcatgaacgggcccctgcacccgcggcc

SEQ ID NO: 574549 - DNA, 90 bp, Homo sapiens
ctgaaagcattaccgggttcgctaggctcacaggtagctacagcaagctgggtagcaggcagatccaaaggatatcatgaagtttccagg

SEQ ID NO: 574550 - DNA, 100 bp, Homo sapiens
atgtagtcaatgtgacatgcgtttcatacagaagtacctgcttcagagacatgagaagattcatactgaatatgatgctgtggctgagaaagctggtaaa

SEQ ID NO: 574551 - DNA, 90 bp, Homo sapiens
ctttcctggcacaggagacttgagggtaaaaagaacgtattctcatggtacttacagagctggcccaatgagacaaataagcttggtggg

SEQ ID NO: 574552 - DNA, 75 bp, Homo sapiens
actttcaaaattcaacaagatctatgaatttgattatcatctgtatggccagagctggaatcttgctccattgcc

SEQ ID NO: 574553 - DNA, 83 bp, Homo sapiens
cactcggctcctgtcgtccgttctctcaggctcccgttcaggaacaagatcactcaaggtgaaggataatctactaataccag

SEQ ID NO: 574554 - DNA, 133 bp, Homo sapiens
tccttcccctcccttgcatgatggaaacaccatggctgcggcggcccagctctctctgacacagcccgtgatgctgatgagcgagagaagtggatccatgccttagaagaaacaattcttcgacatactctcc

SEQ ID NO: 574555 - DNA, 100 bp, Homo sapiens
cttttgtataccaaataccaagaagaatttttatccagttaatgaaaaggagctgctgctcttcctccagaacctgcccacagcccactgggatgatgag

SEQ ID NO: 574556 - DNA, 133 bp, Homo sapiens
gctgactctcaagaaattcaaaggagacctggcctacagacgacaagagtatcagggcagctgcaatgactctccgcacggtattattgtcattgcaagcactattggcagctgcagagccagatgatccaca

SEQ ID NO: 574557 - DNA, 97 bp, Homo sapiens
gattcgcagtggtcgcttcttctccttggggttgagcattcatgatggtacctggaagtcagcaatttatggttttggagatcagagtaatttgaga

SEQ ID NO: 574558 - DNA, 75 bp, Homo sapiens
gtgggtacgaccggaagccgcagggttctccaaaaaatgtggaatcctttgcatctatgctgagacattctcctc

SEQ ID NO: 574559 - DNA, 83 bp, Homo sapiens
ttttagttcaacaagtgtcacggcatacaagcaggtggaacctgaaaatgctgcagtgccggagctgcctgcagtggttccat

SEQ ID NO: 574560 - DNA, 101 bp, Homo sapiens
ggaggctgttcctctaacactacagattatttacagcaagctcggtcaaggagtgtgatgactggcgagcagatggctgccttccatccatcgtccacccc

SEQ ID NO: 574561 - DNA, 100 bp, Homo sapiens
ttacgctaggaatatggcaaacagcatactccttccatgttagcgcagatggtcagatgcagcctgtcccttttccacccgacgccctcatcggacctgg

SEQ ID NO: 574562 - DNA, 75 bp, Homo sapiens
tgggcaccggggagctggcagcggaggtgctcatccagcaaggtggtggcctttatgaagtctccagtgggtcag

SEQ ID NO: 574563 - DNA, 51 bp, Homo sapiens
agaggctgcggagccccaggaggagagaagaagaaggaggttcctgctgtg

SEQ ID NO: 574564 - DNA, 130 bp, Homo sapiens
ccctctcgctgttgctggtctctggctccctcctcccagggccaggcgccgctcagaacggtccatggaattgtacggcggtccagttcatttaatacgggtcgaattgagcatctgtataagaatcccc

SEQ ID NO: 574565 - DNA, 73 bp, Homo sapiens
cccgggacctgcatggccaggcagagtcagcagctgcagtgtggaagggcatttgtttacctgagcaatctgc

SEQ ID NO: 574566 - DNA, 95 bp, Homo sapiens
ctccgaggggtctggaagccagagaccaacgagatcctgcacatgtctttgatctgcttcccagtgcaggtgaaccggctgcctcgggagacact

SEQ ID NO: 574567 - DNA, 100 bp, Homo sapiens
aggactgcctcactgagcaaccaagatagtttatgccaacgtgacttcattcatacagatgaaccaaggatcgggatagcagtataaaattagaatcaag

SEQ ID NO: 574568 - DNA, 75 bp, Homo sapiens
aggtcgtgcgtctgaagcctacaagaaaggtgaagaatttcatgacgtggaggatgcagagacctacaaaaagat

SEQ ID NO: 574569 - DNA, 78 bp, Homo sapiens
ggaaggcgacggcaacagtgaccagctcatgggcttcgagagagactcggaagtgtggcaaaggagcagagaactttg

SEQ ID NO: 574570 - DNA, 113 bp, Homo sapiens
cccccagcctggaggacggttcggatgccttcatgtcaccccaggatgttcggggcacctcagaaaaccttcctgagagggacggtattcagaattcgagcgcaggagctccg

SEQ ID NO: 574571 - DNA, 50 bp, Homo sapiens
tggaggagaaggtccgcttcaaatggcttcccagttacgactcttcgatc

SEQ ID NO: 574572 - DNA, 75 bp, Homo sapiens
cttcagctcgcatcgaggagagaaaagtctctaagtttgtgtggaatgcagtagccctctgggcctgggatattg

SEQ ID NO: 574573 - DNA, 97 bp, Homo sapiens
ccgagtggcggacgggctcccgctggccgcctcgatgcaggaggacgaacagatatgaagatcaatgatgcagactgatggttttgatgaagctggg

SEQ ID NO: 574574 - DNA, 74 bp, Homo sapiens
tattacccctctaaagttcttggataaagcaagcaattctgtggtgttcttggtcacacatttatggagtttct

SEQ ID NO: 574575 - DNA, 75 bp, Homo sapiens
cggtggactccttcggcagtccacccaccgccgccgcctcccaggttgaagaagcctcagcggaggcgatacggc

SEQ ID NO: 574576 - DNA, 100 bp, Homo sapiens
cgatggaatcccagaggaaactgacggagacgcagatgtggacttgaaagaagctgcagcggaggaaggcgaggaagtaatggctgaacacaatccccag

SEQ ID NO: 574577 - DNA, 100 bp, Homo sapiens
gttcagcacaccagtggggcagtgcctcgctctattaccaggttttaaacttcgccatgatcgtgtcttctgcactcatgatatggaaaggcttgatcgt

SEQ ID NO: 574578 - DNA, 100 bp, Homo sapiens
cctgctcaccttacacccaatagaaattgctcgacaactcactttacttgaatcagatctataccgatccccgtcgaggtcaagatcaagatccaggtct

SEQ ID NO: 574579 - DNA, 50 bp, Homo sapiens
gaggagctcttcatcgtcagcaagggccagcaccttctctctaaagccca

SEQ ID NO: 574580 - DNA, 122 bp, Homo sapiens
tcctgacctcaccgcgcccgtggccgccgtgcaggcggccgtcagcaacctcgtccgggaggcaagtgaggcctatctggttggcctttttgaagacaccaacctgtgtgctatccatgcca

SEQ ID NO: 574581 - DNA, 89 bp, Homo sapiens
agaagctggagctggacgtgaggagtgtcacttccgtcaggagagggctccgtaggcaccaactgcaaggacccctccccctgcgggcg

SEQ ID NO: 574582 - DNA, 75 bp, Homo sapiens
gtcgtggccggagcggcccgcgcctgggctgccggcacttcgcggcagttggtgtaatacggtgcccagtatgcc

SEQ ID NO: 574583 - DNA, 100 bp, Homo sapiens
caaagataagaagagaaaaagagaagaagatgaagaaaccagcttgatatgttgtaactaccctggacatttcatcattcacagacaaatgtcttctttt

SEQ ID NO: 574584 - DNA, 74 bp, Homo sapiens
agaagccgagttcaacatcctcctggccaccgactcctacaagaggtgcagcagtctccccactgcacgactgt

SEQ ID NO: 574585 - DNA, 75 bp, Homo sapiens
gctgaaggctgcgagggactaagagcagacatgactatatgaaggaagaggaaggttttcctgaagatgaggcga

SEQ ID NO: 574586 - DNA, 96 bp, Homo sapiens
tgctactcaagccccacagctatggccgcttcattaggtggctcaacaaggagaagggcatcttatgttaacctacctaccattgcgctgtgtaac

SEQ ID NO: 574587 - DNA, 74 bp, Homo sapiens
cacgacctgcacaaccacaggagcacccttttgcttcaagcaggaattggcagactacacggtttatggaagtt

SEQ ID NO: 574588 - DNA, 100 bp, Homo sapiens
aattgttaggcgtggagagggagtgatgtcttccagactcgctgcagaagatcataagtaaacaagatgacttgatgacagtgaaaactaatgaaactgg

SEQ ID NO: 574589 - DNA, 96 bp, Homo sapiens
aggtggagccaccagcctctccttgtctgccacaggtgtgtatttagcagctttaccaactcctggtggtattcagattgctgggaagactcctaa

SEQ ID NO: 574590 - DNA, 82 bp, Homo sapiens
aggcttctgtgctttatgattgtaaaagagttacagaaactaatctggattcactccctctggttgatacccactcaaaaag

SEQ ID NO: 574591 - DNA, 100 bp, Homo sapiens
ctatggagcttcagtagcaaataaggacatcatctgctataacctacaagcagttggacaggccattctcaagcacaacctgggtgaggctctgtcattg

SEQ ID NO: 574592 - DNA, 80 bp, Homo sapiens
gaatgagagcgctgcaggtgcgcaccgggaagttcagcaccagaattatggaacatttatcaacagcctaaaataaagac

SEQ ID NO: 574593 - DNA, 80 bp, Homo sapiens
ctgcagggctacttcctcctggacgggaagtgcaccaactggcccgagataacttcttccgctgtggtgtgctgtatgag

SEQ ID NO: 574594 - DNA, 82 bp, Homo sapiens
cctcgccgccgcccgtctcctgtcgcgcagcttcctccgtgctcagcagggagaccccctttcccgctatatcttcaggaag

SEQ ID NO: 574595 - DNA, 75 bp, Homo sapiens
gggagttttccggggccctctcagcaagaacgggaacaaaactctggctgttcgctgctacgaatctttaatctt

SEQ ID NO: 574596 - DNA, 82 bp, Homo sapiens
ctcctccataaaaacaagtgtgtgcatctggctgttagaagaattcatgctcatccgggtgttgacttcaaaatcaaaactg

SEQ ID NO: 574597 - DNA, 95 bp, Homo sapiens
gacggagctggatgaactcattcaggtcaaagttgctcagcggagcccagtagattcaggcaccatcctccgagaacccaccacgaaatccgtcc

SEQ ID NO: 574598 - DNA, 88 bp, Homo sapiens
taatccagtggaaatcaggagaggttttacgagaggcgaaggagaaagaagagatacggacctccaatgaggttaccgtggaaacaga

SEQ ID NO: 574599 - DNA, 98 bp, Homo sapiens
atgagaggctgtttggccaaccaaggggatctcgattttgaatggaacaatttcatagccaccttgggtgttgaggttcatcccctagtgttccacac

SEQ ID NO: 574600 - DNA, 95 bp, Homo sapiens
cggcctcctccgaggaggagcgcaagctctgcagtccttcatccaagcctacgccacctaccccagggagctgaagcacatcttccacgtccgat

SEQ ID NO: 574601 - DNA, 100 bp, Homo sapiens
cagcccaacggcggcgagcccttccttataggcgtcagcgggggaacagctagcggcaaggcttcaacggaccacaccaaaatgccatctcaaatggaac

SEQ ID NO: 574602 - DNA, 73 bp, Homo sapiens
catctcatggtgacgtgacttagaaggtggtgcagaggtgtgcatcaccttcgaccaggccaacctgaccgtc

SEQ ID NO: 574603 - DNA, 139 bp, Homo sapiens
tcactgatcccccttcgaggtagtgaaaatgaaatgcgccggagtgtggctgccttcaccgcggaccctctgtctgcggggccagcaggtcttcctcaagccggacgagccgccgccgccgccgcagccatgcgccgac

SEQ ID NO: 574604 - DNA, 83 bp, Homo sapiens
cgggaaatcgggctgaagcgactgagtccgcgatggaggtttttagaacttcagccataaaaatgggcagaattttccttgat

SEQ ID NO: 574605 - DNA, 100 bp, Homo sapiens
tttctgcctaccgtacagcaatcaaaatccgaagactacaaaaagcactatgttctttttccaccgtcatggcatttattacatctccacttggatatac

SEQ ID NO: 574606 - DNA, 100 bp, Homo sapiens
cacagtacaagaagggcaaggattctctgtacgcccagggtgaccctggcagcaaccccaacaaacgccagaggcagccccctctcctgggagatcaccc

SEQ ID NO: 574607 - DNA, 87 bp, Homo sapiens
agttaacacctctgccgctgctaaaagggtaacaagatgctcaactatagtgctcccagtgcagggggttgcctgctggacagaaag

SEQ ID NO: 574608 - DNA, 90 bp, Homo sapiens
ctaccgcctttttgttgtgcacctgctccccaagctccagcagctgggcatatatggtgctggttgtctcattacggaaggatgtcgtgg

SEQ ID NO: 574609 - DNA, 82 bp, Homo sapiens
ctgaaggcctccagcaggacctccgccctcctctccggctttgccatgcccatcgccgaagcaccattcaagttcgacatgg

SEQ ID NO: 574610 - DNA, 75 bp, Homo sapiens
ggactgttggaggcttcttcctggcaggccgaagtatggtgtggtggccgggggaacttgaggttaagaacatgg

SEQ ID NO: 574611 - DNA, 90 bp, Homo sapiens
gagaaaatctccctgctccgcagcgacatcaccaagctggaggtggacgccatcgtcaacgccgccctccagaatacccatcatatagcc

SEQ ID NO: 574612 - DNA, 51 bp, Homo sapiens
ccccactcctgggccgtccctgaagtgtgagacagctgccttgtgtgggac

SEQ ID NO: 574613 - DNA, 96 bp, Homo sapiens
gccgggcacctgcaagtactggatcctcgacctaggaatgcttctagtcacaacagacacccttggccatgactttcatgtcttccaaattctgac

SEQ ID NO: 574614 - DNA, 76 bp, Homo sapiens
gtttttctacattcacaaggcttttcacaaacttctcaggaagacaactgttagttttgtggcttactgctgctcc

SEQ ID NO: 574615 - DNA, 117 bp, Homo sapiens
gcccctgtccctgggagccgagatgtgggggcctgaggcctggctgctgctgctgctactgctggcatcatttacaggggatgaacgtagggcacttagcttcttccaccagaaggg

SEQ ID NO: 574616 - DNA, 83 bp, Homo sapiens
ctggcgcggcatcgagtcaccaaaacgcagggctgtcacatggtgactgaagaacttcattccataacgtttgaaacacagat

SEQ ID NO: 574617 - DNA, 101 bp, Homo sapiens
gaatatcactgtttgctgcaattactgtgtcctgatttcccgctggagctcactcagaaagcagccaggagatgacaagtatgggcggaagatcattgtgt

SEQ ID NO: 574618 - DNA, 50 bp, Homo sapiens
gcctagcgtcctggaattacttcaatcaacccgtgatgctgatgagcgag

SEQ ID NO: 574619 - DNA, 75 bp, Homo sapiens
ggaagtaatccctagtgtcagcagattcagcggtactggtgtataatagagtggcagaatttagtgacatttgga

SEQ ID NO: 574620 - DNA, 83 bp, Homo sapiens
ccaaattctctgcatatatcaagaattcaaggccagaggctaatgaagctgatcttgcatctttaatggataaaacatttgag

SEQ ID NO: 574621 - DNA, 75 bp, Homo sapiens
ggattcaacacacaaatacgctctgttcaggttattggtggcattctatacgagatactccagccaaaaatgcac

SEQ ID NO: 574622 - DNA, 100 bp, Homo sapiens
aacctacctgcctcaaatacaagaccctgcttgtgaaggaattacatgaacgacagccttcgcaccgacgtcttcgtgcggttccagccagagagcatcg

SEQ ID NO: 574623 - DNA, 100 bp, Homo sapiens
tcttttgttagtgacaaagatgcaagcctggcattttttgatgattgtgtagataaaattcttcagtttgaagatatcttggccaatacgttctaccgag

SEQ ID NO: 574624 - DNA, 101 bp, Homo sapiens
tggagtcaagatggaggagtacgcgcgagagccttgtttaatctccacctcacaggtgacatccatgccatcactgcagctaataacctcgttgctgcggc

SEQ ID NO: 574625 - DNA, 100 bp, Homo sapiens
tttgaacaccaaggggcaactgggccatgagagggaaggaaacaagccaggtatcctggtcagatataggaggactggaaagtatcaaactgaagttgga

SEQ ID NO: 574626 - DNA, 75 bp, Homo sapiens
tcatgatggacttggagctgccgccgccgggactcccgtcccagcagcactattcctgatcagagaactccagtt

SEQ ID NO: 574627 - DNA, 140 bp, Homo sapiens
gaggcgaagcccgtggacaaagtgaagctgatcaaggaaatcaagaactacatccaaggcatcaacctcgtccaggtcgcaatggaagaagagatcgccgcgctggtcattgacaatggctccggcatgtgcaaagctgg

SEQ ID NO: 574628 - DNA, 96 bp, Homo sapiens
tagaaggccagagtcacacacggtcctaagagctgggcaccaggaagcgaaggctgcaaacggggattcagcgtccgatcctttggaacagggact

SEQ ID NO: 574629 - DNA, 75 bp, Homo sapiens
gcgcaaaagaaaagaatctcaaagtgaaaggaccagttcgaatgcctaccaagaatttcctgttgagatataaag

SEQ ID NO: 574630 - DNA, 75 bp, Homo sapiens
gcggctctgggggaggcctgtcacgcaggcgctctgcacaggaagctgcaggacactgtctcagtgcatcgccca

SEQ ID NO: 574631 - DNA, 100 bp, Homo sapiens
gcccggggccgtggggcttccgcctcgtgggcggcaaggacttcgagcagcctctcgccatttcccgggcacattgcaagcaacccgtgccttgatggtg

SEQ ID NO: 574632 - DNA, 74 bp, Homo sapiens
ccctgagctgcgtgagaacccgcccatgaagccagatttctcccaggttggctggatatttacagacctcgtct

SEQ ID NO: 574633 - DNA, 80 bp, Homo sapiens
tacgataacgcgcttttgctcctcctgaagtgtctttggtccaacgttgttccagattcaggcttcttcaggagaaagca

SEQ ID NO: 574634 - DNA, 75 bp, Homo sapiens
gagacctccaaacccctttggccctgtatcaggagcacagtatttaggtcagttaacgtccataccaggatacct

SEQ ID NO: 574635 - DNA, 80 bp, Homo sapiens
caggctgtggccatcttcaccgtgtacctgggctcgagcctgcacatgaaggcggtgcgtctttctacgtgaataggatt

SEQ ID NO: 574636 - DNA, 126 bp, Homo sapiens
gcaagcttccaggttgatgcctttggaacgtcattcattctcgatgtcgtgctaaatcagtggtggaggtggatacagcagtcggagaacatctggcagagacaaatacggaccacctgttcgtac

SEQ ID NO: 574637 - DNA, 98 bp, Homo sapiens
gaaacctccatctggaaggatatccaatatgccacaagtgtcactcagctctatgtgccagcatccagacatgtgtggaggttccggcggatggggag

SEQ ID NO: 574638 - DNA, 100 bp, Homo sapiens
ccgagaccctcgctcccccatcaacgtggagagcttgctgattcagaatggacagtttagaagaacctcagaaaaaagtctttaaggctcgaaaaacgat

SEQ ID NO: 574639 - DNA, 140 bp, Homo sapiens
gagtgtatcctctcaaggaagcaagtggatgccctggggctgacaggaatcttctggtgtactctttttatgaaaagttgataaaaatggtgatgtgtgcatttctattcttcatgagcctggggaagataagtatggtt

SEQ ID NO: 574640 - DNA, 82 bp, Homo sapiens
cgggaagcggcggcggcggctccagcgtcctaagagccacagctccggagcaagccccagccccggcccggccataccaggg

SEQ ID NO: 574641 - DNA, 100 bp, Homo sapiens
tgatttccactctggaaaacttcaagcatttggtgaccatgctttgggattttcatagtttgagtaattcctatgggctctaccacccagcgagttaaag

SEQ ID NO: 574642 - DNA, 98 bp, Homo sapiens
gagagccgcggggagaaggccatcacccaggtcagcaagggcacctgcgagcaagagaccctcctggatgacttccttctcacgtacactgtcttcat

SEQ ID NO: 574643 - DNA, 75 bp, Homo sapiens
tggatgtaccgcatgtgatcactctgggactcgtggggctgcagcaccgagagctgtagtacacatggatgaacg

SEQ ID NO: 574644 - DNA, 100 bp, Homo sapiens
gttgaaaaaaatctgggaggttgaacttattaatgtaaaataccatgaagattttgaaaaaacaaaggggagaggctttactcccgtcgtggacgatcct

SEQ ID NO: 574645 - DNA, 99 bp, Homo sapiens
ttgctcgaagaactcgagcgacagagacaagctgagcttgccgcacaaaaagctagagagagagagcaggagattcggatgggtcagatggctatggga

SEQ ID NO: 574646 - DNA, 83 bp, Homo sapiens
ttcaaccataaagacatcttaattgggcacgaaagagaacacaccacagccatcagcactggaatgcaaagaccagaacaaac

SEQ ID NO: 574647 - DNA, 82 bp, Homo sapiens
gcacgcacagagtgcaagacgctgagcaatgcaggtgaaaagtagtgatgaggcagtgatcctgtgtaaaacagcaattgga

SEQ ID NO: 574648 - DNA, 50 bp, Homo sapiens
gccgggagttacaccgccaccgccaggggctttgaccacgacctttgaag

SEQ ID NO: 574649 - DNA, 101 bp, Homo sapiens
gcatcttcctggcattggatttccttggacagtcattttgtttactcattcagccctgttgcaggtcccaataaactcttcataaggttgacagaagcacc

SEQ ID NO: 574650 - DNA, 88 bp, Homo sapiens
cgggcggcctggcgcggcgctccggtgattttacaacgagatgctgctctccatagggatgctcatgctgtcagccacacaagtctac

SEQ ID NO: 574651 - DNA, 75 bp, Homo sapiens
cgcccccagagagtaccgacgagggggccgaaaccgagaggcaactggtttccggagctgagacactgaatcttg

SEQ ID NO: 574652 - DNA, 75 bp, Homo sapiens
gggagctcggctccaagttctggatcacattccagttcatagcaacattttctactctggtgcctttagtagatt

SEQ ID NO: 574653 - DNA, 100 bp, Homo sapiens
agtaactttagaggaggatctggtttatcatttaaaagtgcctgtgtgaagtcacttttgctggaaaactgcagcttgggagctttctttgtattcacat

SEQ ID NO: 574654 - DNA, 58 bp, Homo sapiens
tactggtcgacgacttcagtgatcgaggaaatctaccactgtcgaagacaaataaaat

SEQ ID NO: 574655 - DNA, 75 bp, Homo sapiens
ttcggccatcttggctcctccctcggcccagttctggtgatgatttcacttttgacagaagctgtccctcaaaag

SEQ ID NO: 574656 - DNA, 95 bp, Homo sapiens
ccggccacctctgagaagggagacgacgctgctgggtccgctgagcggggcgacccgagctgagatctgtatctgtggacctgaatgttgatccc

SEQ ID NO: 574657 - DNA, 144 bp, Homo sapiens
aaaaaacctacacctgtgctattaccacagtcaaagcaacagaaacaaaagcaggcaaatggagtcgttgggaattgtgttggcatgcatcagcccagaagcagtgatctctggattaaactgcatgtcatttgctaatgttgg

SEQ ID NO: 574658 - DNA, 76 bp, Homo sapiens
ggaatgtcgacgaggagctgagtttcaccagtgatcattaaagaatgggcagcttacaaaggaaagtctcctcaaa

SEQ ID NO: 574659 - DNA, 74 bp, Homo sapiens
tcgcgtctcggaaaccggtagcgcttgcagcatggattatgtgctggccgtggaggcgtatcattcggttatca

SEQ ID NO: 574660 - DNA, 83 bp, Homo sapiens
tccaacagcgcactcggattgaagatgaatatagaacccatcacacagtacaactaccatcactggtgcaagctatatttaac

SEQ ID NO: 574661 - DNA, 90 bp, Homo sapiens
acttcagatttctatgacagaactaaagcgggcaaagttagaccttccagaacctgttaccttatcccatatcacacaactggtcctcag

SEQ ID NO: 574662 - DNA, 82 bp, Homo sapiens
aaagactcagtgcagagagccagagactggcttcaggatgtagagggcctgcaggggccctcctgctgctccctccatgagg

SEQ ID NO: 574663 - DNA, 99 bp, Homo sapiens
gcgctcctggccggctgggtcgccgtagcatcctgaggttagcattacacttctcccagtggagcccatgacttctgatcaggacgctaaggttgtggc

SEQ ID NO: 574664 - DNA, 83 bp, Homo sapiens
atgggcccaagaagaggggacccaaacccaaaactttcctcctgaagacaatgcagatcttcgtgaagactctgactggtaag

SEQ ID NO: 574665 - DNA, 80 bp, Homo sapiens
aaaggaggaattcgccgtgcccgagaatagctccgtccagcagtaaaatgtttattggaggcttgagctgggatacaagc

SEQ ID NO: 574666 - DNA, 75 bp, Homo sapiens
ctgaatgaccaggtgtaaagtgcaagagtaatatgctatgactgagaaatcctctgcggacaaaatgcaacagtt

SEQ ID NO: 574667 - DNA, 75 bp, Homo sapiens
ttgcttgcagttaggtcaagtggaggtaagtccatggcctacatgcgcggcatgtactttcgcatgaaggatgag

SEQ ID NO: 574668 - DNA, 100 bp, Homo sapiens
ggacgctctgctccagccttgcctgctccctttcctgggatacgccttggagccatggcttaaaacctgtctctcttgctgatcgagaggtgatatcccg

SEQ ID NO: 574669 - DNA, 100 bp, Homo sapiens
gactattaccaaaccatgtctggagtgaaggaggccgacttcaaggatcttgagactcaaccccatatggcgagaaggttttgggattcgaattcagtgg

SEQ ID NO: 574670 - DNA, 100 bp, Homo sapiens
gggagaggagtctccaccaggactgaccgctgccgcccagcacgtccaggtgatctgcaactctttcaccatctgtaatgcggagatgcaggaagttggt

SEQ ID NO: 574671 - DNA, 75 bp, Homo sapiens
gttgaggcaagaagcagaacaactgcggaatcagattcaggaagatgttggatccagggttgatgacgtgttcca

SEQ ID NO: 574672 - DNA, 122 bp, Homo sapiens
taaaaagacggacagcccatcgtgtgaactatagagtttgtggacagatttatattggtgctggagaatctggtaaaagcaccattgtgaagcagatgaggatcctgcatgttaatgggttt

SEQ ID NO: 574673 - DNA, 101 bp, Homo sapiens
ttaacccctagaccggtttttagtccattgactatgcagcctaatgtgctgaagctgctgaaagatggcagaagaagtggtggtagtagccaaatttgatt

SEQ ID NO: 574674 - DNA, 100 bp, Homo sapiens
acatcaaggatgtggggcagatgctgatgggcaaactaggggagatcgtggtgaaatggtttgaggctgtccagactggcctgcccatgtgcatcctggg

SEQ ID NO: 574675 - DNA, 90 bp, Homo sapiens
ccaacaacaccacaataatccacagccaagggagctctacccagtgctgatgcgggccttgcaggtggtgccgcgggagctcagcaccca

SEQ ID NO: 574676 - DNA, 75 bp, Homo sapiens
tctgaactacaagaatcctgaccagcttgaattcggagtgatttaccactgcacagaggagcggctgtacacggg

SEQ ID NO: 574677 - DNA, 90 bp, Homo sapiens
ggggctttcgcccgggtcctcctagaaattccccccgaagaagactcccccacatctggagtggagactgctgcacggactctggaacca

SEQ ID NO: 574678 - DNA, 102 bp, Homo sapiens
cctaccgctgtgtcctaggccctcatcagatacttcgttgaaagttgccaccctgatgtaatccagcatcttctccaggaccccgtgatccgagaatgccgc

SEQ ID NO: 574679 - DNA, 75 bp, Homo sapiens
tctgaactgtttcctgctgttgtgaagaatgtggccagtaaaaatattgagctaagaaacctttccagcttggac

SEQ ID NO: 574680 - DNA, 102 bp, Homo sapiens
atttccaagagttgcctgcttcttcaaaaacaagtaactcccagcatggaaacaggagcccaagaagaggccgaaaccgagaccatgccagggaagctgaag

SEQ ID NO: 574681 - DNA, 90 bp, Homo sapiens
atcaacaacgaggaaatatttccaacatgcgtgggcaagacatctgtatagattctgcttcatccgtgagagagaataagcaacctgaag

SEQ ID NO: 574682 - DNA, 100 bp, Homo sapiens
gccaccagcaccccagccacccccagctcttcagcattgtccgccaggcctgtgtccggagcctgagctgtgagatgttgtgactgtgacagactcactg

SEQ ID NO: 574683 - DNA, 124 bp, Homo sapiens
attgactttctgtgtggctggagcctgtccgaacgctttgggctgttagggagtgaccctccacgaaaaggagaatcttatgaatgcagagaaccttggaatcgtctttggacccacccttatg

SEQ ID NO: 574684 - DNA, 94 bp, Homo sapiens
ccgttttgaagattgttgagaaattggatcttacacttgaaatacagactgttggggaacaagaggaatcagagatcattgatttcttcctggg

SEQ ID NO: 574685 - DNA, 100 bp, Homo sapiens
gtgaaattttttggaacagaagatcaacttaattcagtgcacaaatgagatgaatgtgaacatcccacagttggcagacagtttatttgaaagaactact

SEQ ID NO: 574686 - DNA, 82 bp, Homo sapiens
ttttgtattaatggatcacattttgaatttgaaggtcattcctgtcccaatcagctgctctactactgatgacattaaagat

SEQ ID NO: 574687 - DNA, 74 bp, Homo sapiens
gaagattttgaagacaatcgtcacttatacagtgatgtcttggcattgcccattttcaagcaggaagattccag

SEQ ID NO: 574688 - DNA, 100 bp, Homo sapiens
gttggagtcctccagaaaggaagtgttggtctggtcatatgtgacgaggtgaaaggtgtagcagtcactcggcctacacccacagcatcgaccttgtgaa

SEQ ID NO: 574689 - DNA, 75 bp, Homo sapiens
actatggcgctgaaacggattaataaggttttaaaatcaaagatgggaaaatcggagaaaattgcccttccccat

SEQ ID NO: 574690 - DNA, 100 bp, Homo sapiens
gcagtagctctgctaattgggccaaatgctcctttaatttttgaacgagcccttagagatttgtttgattccatggataaaacttcttccagtattccac

SEQ ID NO: 574691 - DNA, 83 bp, Homo sapiens
tgagcatctcaggccatcatcctgaaacttggcagccttcgtggagtagtgtgagatcaaccatgagttccgttgcagttttg

SEQ ID NO: 574692 - DNA, 51 bp, Homo sapiens
aaaccgtcctgctgcttgctgaccaaatgtattattttggcgacttcaatt

SEQ ID NO: 574693 - DNA, 96 bp, Homo sapiens
tgcaggcgatcataaagaaaatcgacttggactcagatggctttctcactgaaagttcatctcagaagaagttgttggcacctgatatgtttacag

SEQ ID NO: 574694 - DNA, 75 bp, Homo sapiens
gaaaattgggaaggttccctcaagtccaagggcctcatgcatctgcaggggaagccagtttgttcttttgatcca

SEQ ID NO: 574695 - DNA, 98 bp, Homo sapiens
ccccgagttcacgcagctgtcccatgccgtgctgctggagctggtcatcgacagacggtatccaactgttgaaaaacgagccagagtcttcaatggag

SEQ ID NO: 574696 - DNA, 99 bp, Homo sapiens
accactggatctccaaacagggccagaagctggagatgatgctggagcagaagttagcgcttctctctcgggcctctgactggaaattagaccagcctg

SEQ ID NO: 574697 - DNA, 82 bp, Homo sapiens
cggattcgccgaggcaccgaggcactcagaggagggattcactcatgtttcgtgtgtaaagagagcaagacagatgttaagc

SEQ ID NO: 574698 - DNA, 100 bp, Homo sapiens
ctgaaaaagtatcgtcgagaagcctatcatcgaaaggaagctgttgaagttattgaagtacctgttgctatattctaagaaattaaaatgtccagaaatc

SEQ ID NO: 574699 - DNA, 98 bp, Homo sapiens
gcatcatcgtggagggtggcggggctgtggcagcactgcaggccatgaaggcacacccgcagaaggccggcgtgcagagacggggttttgccatgttg

SEQ ID NO: 574700 - DNA, 83 bp, Homo sapiens
attggatgtgaaaatgaagccagaccgagatgcctgaaaacttcatgcctcctgttcccatcacatcaccaatcatgaacccg

SEQ ID NO: 574701 - DNA, 82 bp, Homo sapiens
gcccagaggactttcttccagcttctgctgtccttctttgtggagagcaaggatcaaaatacttgctggatggtggactcag

SEQ ID NO: 574702 - DNA, 100 bp, Homo sapiens
ggggatgaacatcgacatcgccagcatcgacatggtttccgaagtcaacatggtctccgaattcaatcctttgacgttcaccagcgtgatcgaatgcgag

SEQ ID NO: 574703 - DNA, 90 bp, Homo sapiens
ggccaccgcctcagcgggagaggagtctccaccaggactgaccgctgccgcccagcacgtccagacaatgcctgtggaagacaagtcaga

SEQ ID NO: 574704 - DNA, 82 bp, Homo sapiens
gtggtgggcgccgtgaagagccttcaggcgctgggcgagcttgagatcttcttagcccagagagcagtggagttgagtgagg

SEQ ID NO: 574705 - DNA, 74 bp, Homo sapiens
gtatttcaacattgcaatgataatacctcagtgttcacataactgctccctgaaacaacagtaacctacccctg

SEQ ID NO: 574706 - DNA, 50 bp, Homo sapiens
attactgtctcaagtgatacggactatcctattaagtgtaatctcactgc

SEQ ID NO: 574707 - DNA, 95 bp, Homo sapiens
gacggggcggaagaccaagatcatcgagatggaaaaccagtagattcccagacatcgcgaagtgaatctgaaattgtgccaaaagttgctaaaat

SEQ ID NO: 574708 - DNA, 120 bp, Homo sapiens
gttcaaaccaagctgtacttggcaatgaacagtgagggatacttgtacacctcgtctctgttggatgaacccaatcccaatagtccagcaaacagccaggctgctcagctgtaccaggag

SEQ ID NO: 574709 - DNA, 50 bp, Homo sapiens
gatgaacccctcttcacggcagaccagatttggttgaaacagaaataaag

SEQ ID NO: 574710 - DNA, 75 bp, Homo sapiens
gctccttcaacccgtggctgatagctgaaaggagaagggaccgcgccgtgcacatccagcatcctccaggagaag

SEQ ID NO: 574711 - DNA, 98 bp, Homo sapiens
tgagaagaccaccatcaacaatgagtacaactaccgctgctggaccacaaaccgctgccagaaaagaggtgctaatgatgctggataactatgtaaga

SEQ ID NO: 574712 - DNA, 100 bp, Homo sapiens
cgatttgaccaaatttctggaagaggccccttcacagatgtagtcactacaaatcttaaattgcgaaatccatcggatagaaaagtgtgtttcaaagtga

SEQ ID NO: 574713 - DNA, 82 bp, Homo sapiens
caaccctttctgtgccaaagagatgtgatgcagatgctcctgaaggtctctaattaacagaagatggcaaagcccagccaca

SEQ ID NO: 574714 - DNA, 100 bp, Homo sapiens
gtgtgagtctcgggaccatgtggaactggctaaaaatgtcatttacaggaagtaatactcaaaagggctgcggatctggtagaagcactgtatgggatgc

SEQ ID NO: 574715 - DNA, 100 bp, Homo sapiens
gggaagtacatggatgtgcagtttgacttcaaggcatgcttcggaaactggacatcaaaaacgaagacgatgtgaaatcgttgtctcgagtgatgatcca

SEQ ID NO: 574716 - DNA, 100 bp, Homo sapiens
cgccgtcttctttatgatccccacctgggttctggtggacctctcggctttcctggtcagcagcgacttgagatgctgcccccacccccttaggcccgag

SEQ ID NO: 574717 - DNA, 100 bp, Homo sapiens
gtagccgcctccgagcccgccgccacatcctctgagtctccatctgctgctgcctcttcatcctcttcctcttcctctcggagctcaccggatttataac

SEQ ID NO: 574718 - DNA, 98 bp, Homo sapiens
tgtaacagactttattaaaagtgaatgtttaaataatattggtgactcctctcctctgattagagccactgttgaaaaagcttgtggtgaaggggggc

SEQ ID NO: 574719 - DNA, 95 bp, Homo sapiens
aggagagctcaacaaacactttcggtcccatacagtctccctttcctggtgatgatgaagaggaagtttttgacagtattgtaaatgatgaagta

SEQ ID NO: 574720 - DNA, 50 bp, Homo sapiens
cttggtgcccttcacaggcgagaagaaggtgctcaagtaaagctctttgt

SEQ ID NO: 574721 - DNA, 87 bp, Homo sapiens
ccttccgagaggaacctctatgccgacatcgacgccgcctggcaggccctgcgcaccagcttgctatggcatcgttcaggtgccaac

SEQ ID NO: 574722 - DNA, 103 bp, Homo sapiens
cccaggaggacgactgggaccgggacctgctgctggacccggcctgggagaagcagcagcgcaagaatttcgctaaggagtttgtgatcagtgatcggaagga

SEQ ID NO: 574723 - DNA, 98 bp, Homo sapiens
tccttcagcagcaccactgtaacagaggtttcatcaccttaaatggttttgaaccaatgaaggtgtattcccttaaaaagacggacagcccatcgtgt

SEQ ID NO: 574724 - DNA, 80 bp, Homo sapiens
agcatgtcgaccccggcccggaggaggctcatgcgggatttcaagcgaatctaggtcaacctattaagatacgtttccag

SEQ ID NO: 574725 - DNA, 100 bp, Homo sapiens
gtgctgctgtctgtatggagaggcctggggcatgcagtgtgccctctgccccctgaaggattcagagtttgccttctgccaggtggatgcctccatcgct

SEQ ID NO: 574726 - DNA, 96 bp, Homo sapiens
aaagagaggatttgcttttgtaacttttgatgatcatgatacagttgataaaattgttgatgaggaggaggaggaggagaacctagatgatcagga

SEQ ID NO: 574727 - DNA, 100 bp, Homo sapiens
cagaaaccagagcaagttatcaaagagttccgaacctttgacccatgtaaacagctgtggtgtagccatcctgataatccctacttttgtaagactaaaa

SEQ ID NO: 574728 - DNA, 74 bp, Homo sapiens
ggcagggagttattgataaagactccttaggaccgcttttacttcaggggcactatgaacgaagaggagcagtt

SEQ ID NO: 574729 - DNA, 100 bp, Homo sapiens
tctggcgatgacctacaaacagaggatgctgcagccgtccagcagcccgctctgggggaagcttcgtgtggacatcaaggcttacctgggctcggccata

SEQ ID NO: 574730 - DNA, 74 bp, Homo sapiens
aaaagctccgcaacaagatagcagggagatctataaggacaggcagaaattctcagaacaggttttcaaagtgg

SEQ ID NO: 574731 - DNA, 85 bp, Homo sapiens
cacgctcatgatcgacttcctcacccgcgcctgcgacctcggctccagcccccttttggacatcgttggcggccggaaggcgagg

SEQ ID NO: 574732 - DNA, 50 bp, Homo sapiens
atcgacatcagtgaagaagatcagtggctgtgacgtgaacagtcccagac

SEQ ID NO: 574733 - DNA, 100 bp, Homo sapiens
ggcgcgctccctgcggccccgggatgacttctcagcgttcccctctggcgcctttgctgctcctctctctgcacgccatttcgtagagtgacgttttctg

SEQ ID NO: 574734 - DNA, 83 bp, Homo sapiens
acgaagcttgaaagacttggtaatggcgacgggtttggaccaggaatcaccttcaagcctatgtcgtgaggctttggcagaaa

SEQ ID NO: 574735 - DNA, 100 bp, Homo sapiens
aggagctgggcctaggtctgcgccctgagataattgacgaccttgccaacctagtggagaacacagatgaaaaacttcgcaatgaaaccaggcgggtaaa

SEQ ID NO: 574736 - DNA, 83 bp, Homo sapiens
ctggcatttacatcctgtaccacggaaaccccgttgtgagacctgcctagagctggaacgttacctccagagcgagccctgct

SEQ ID NO: 574737 - DNA, 98 bp, Homo sapiens
tgttattccacaaaatgattctccatttggagtatttggatttgaagaaaagactgttgtaggtcataaagaaggtctggatgttatggagagagctg

SEQ ID NO: 574738 - DNA, 75 bp, Homo sapiens
tttataaactgcctggccgaatcagccttttcacgctcaaggtattttgattccgttcaagctaaagaacagcga

SEQ ID NO: 574739 - DNA, 83 bp, Homo sapiens
gcaagggcggcggggagcacacggagcactgcaggcgccggtgctccctaccctcacctcaagacgaccatggccaccatccc

SEQ ID NO: 574740 - DNA, 75 bp, Homo sapiens
cctgcatctactcggccctcattctgcacgacgatgaggtgacagtcacggcaagaaagtgaaggggggctccag

SEQ ID NO: 574741 - DNA, 74 bp, Homo sapiens
taaggtttttgatctttgcgtagtatgtggagacaaagcatcaggcgaacagctgcttggagaactacaagtga

SEQ ID NO: 574742 - DNA, 88 bp, Homo sapiens
ttgtccctttgcctcatcccaggttgccttggaaaatgccaacgccgtgtctgaagattgcaggatacctatatggggtgagcccacc

SEQ ID NO: 574743 - DNA, 80 bp, Homo sapiens
ctcagctctgtggaggagcagcagtagtcggagggtgcaggggacggtattcagaattcgagcgcaggagctccgcttct

SEQ ID NO: 574744 - DNA, 100 bp, Homo sapiens
ttccagagaatgacacaggtgaaagaggggccgtatggggtctttgctggaagagatgcatccaggggccttgccacattttgcctggataaggaagcac

SEQ ID NO: 574745 - DNA, 98 bp, Homo sapiens
tagacttgatcagtgtcaggctggttgtcaattttgatatgccttcaagtatggatgagtatgtccatcagcaagttggtattgataaaggtgacatt

SEQ ID NO: 574746 - DNA, 83 bp, Homo sapiens
cctccaggcatgccccgctacgagctggctttaatcctgaaagccatgcagcggtgtgaagcctcagtttaggtcatctggtg

SEQ ID NO: 574747 - DNA, 100 bp, Homo sapiens
gtcgtctccgagatcttcgtcagccagacaaccttcgtgggcatcgtccctcttgccatgagtgcttgtgatttcacgtatttttgctgaactcgtaaaa

SEQ ID NO: 574748 - DNA, 83 bp, Homo sapiens
aaacacagttgtttacagctctaacaaaatagacggtttactcctggcttgggggcattaggaagcactggaggctcttcggg

SEQ ID NO: 574749 - DNA, 98 bp, Homo sapiens
gccgccggtgagctggcgggtcgtgcggggaagcagcacccccgcgccgtgccagggccggccagcgtccgcaggtgtcatggagaaactccagctgg

SEQ ID NO: 574750 - DNA, 100 bp, Homo sapiens
acttctggaattggagtggtggagtaggggttcctgggaatgggacccttacccggaaacagggtgtctttgggacagcacccaagaaaacctcatttgg

SEQ ID NO: 574751 - DNA, 74 bp, Homo sapiens
aggctgaaggggatcgtctaaaagagggttgtctgcattcaaaagagcattctattaaagctaccttaatttgg

SEQ ID NO: 574752 - DNA, 50 bp, Homo sapiens
attaaagagtaaagttgtgctcaacgctgcagtattgaagtatgagaaca

SEQ ID NO: 574753 - DNA, 100 bp, Homo sapiens
gtagtatgcttttatagacgacgtgatatttccaacacacttataatgctcgcagataagcatgctattcaaccttcacttgactggagacatccacgcc

SEQ ID NO: 574754 - DNA, 98 bp, Homo sapiens
cagctgagaagtattatgatctggcagccaggctgaggcctaatgcatctccttggaaacaatgccatctttgaatgtgagagataaacctagtttca

SEQ ID NO: 574755 - DNA, 51 bp, Homo sapiens
gtcccgtccgacagccaggcccgggagaatacctggagtagaacagaaaaa

SEQ ID NO: 574756 - DNA, 98 bp, Homo sapiens
tagacctgcagagtgaagaaagctggtaatagatgtctgacaaactaaagaaagacttgtgttacgctctccagcagaactatctcctactactcttt

SEQ ID NO: 574757 - DNA, 98 bp, Homo sapiens
cgaggagcgggaggaggacgggaccccggcgcccccaccccatccccgggaggaagtcctggctgagcaaggttggaagccctagttctcgcattgac

SEQ ID NO: 574758 - DNA, 98 bp, Homo sapiens
cagcgtctgcattgctccggactcagccaagttccccaacggctccccgtcgtcctggtgctgcagcggttgttcctcaaagtcattcaagctgtact

SEQ ID NO: 574759 - DNA, 75 bp, Homo sapiens
cgcgatgagtggtctcggcaggctcttcgggaaggatggtcagagctgtggcccggcagctgcaggacaggacgc

SEQ ID NO: 574760 - DNA, 74 bp, Homo sapiens
acttacccgagaacgtgcgggaagagaagatcatcgagcatttcaaacgccatgggaacaaggaggtcttctcc

SEQ ID NO: 574761 - DNA, 100 bp, Homo sapiens
agacaagtcaggcatggctctcacccaggtaagatctgtctcgtaactgtgtaatcaaggaactagcaccacaacaggaaggtaacccaggagaagtatt

SEQ ID NO: 574762 - DNA, 101 bp, Homo sapiens
acagggagctggttggggaggaccagaaatcaggtgtcatcaatcttacagaagaagtgctgtgggtcaaagtgaatataaacatgaatggttattatatt

SEQ ID NO: 574763 - DNA, 90 bp, Homo sapiens
ctgcacccccaatgggcaccccactctgcaggtatgacgaaggttctggaggcagcggggatgaaggcagagatgaggcccacaagcggg

SEQ ID NO: 574764 - DNA, 100 bp, Homo sapiens
aatctacaagatgatgcagggaggaggggatatcattttcaatgcccaatacccagaactgcctcccgattttatctttggagaagatgctgaattcctg

SEQ ID NO: 574765 - DNA, 83 bp, Homo sapiens
tctgggatcccggccaccagcaattgtccgatttccatggtgtcagtgattcatattcctgataggacttataaactatcctg

SEQ ID NO: 574766 - DNA, 82 bp, Homo sapiens
ctgaggaggcccgagcggcggcggtggcggcgaaggccgaggcggtctccctgagtctttgaggacacagcctcgctggagg

SEQ ID NO: 574767 - DNA, 84 bp, Homo sapiens
cccagacttgggaactcagtacctgtctcctaaagagcccgaacagctgaggaagctcttcattggagggttgagctttgaaac

SEQ ID NO: 574768 - DNA, 75 bp, Homo sapiens
ctctccaggaggcgggcacattcaggggcaagattcttgccaagagaattaatgtgcgtattgagcacattaagc

SEQ ID NO: 574769 - DNA, 98 bp, Homo sapiens
ctggagtctattcctggattcaatgtcatccagagcccagagcaggaaacagagcaaatgcagcgttacaatcaaagacttattgaggaattgaaaaa

SEQ ID NO: 574770 - DNA, 100 bp, Homo sapiens
ataaacatgcaatgaacccaaaagggcctagttccccgagagcgttcagacagtgggggctcaagctcagagccatttgaccgtcatgcacctgctatgt

SEQ ID NO: 574771 - DNA, 100 bp, Homo sapiens
ggaaagtaaactgacaattcaggagacccagctgggcactgaaggtcctgagaactgcagagtttgctccttttgttgttttcattgctgcaccaactat

SEQ ID NO: 574772 - DNA, 100 bp, Homo sapiens
gccattgaaaaccctgctgatgtcagtgttatatcctccaggaatactggccaggaatatgacagaactgatggtttttcacacagtccctttggcttga

SEQ ID NO: 574773 - DNA, 75 bp, Homo sapiens
tcgctgctgtcaccaatccaagccagagggctgaggtggagagcctgcttagacgcctggtgactctcatttcgc

SEQ ID NO: 574774 - DNA, 117 bp, Homo sapiens
tccgggcgcggggaagtcatgctcgcttcacggaggcaatagctagccggccccttcacagatgtagtcactacaaatcttaaattgcgaaatccatcggatagaaaagtgtgtttc

SEQ ID NO: 574775 - DNA, 74 bp, Homo sapiens
cgcacccctccgagcagcccggggatccagcacgcagggagtgcatccgccccaacccttttccccctcgtctc

SEQ ID NO: 574776 - DNA, 71 bp, Homo sapiens
taacattaatggatgttccagtatttaaagctattcaaccagatttgcaggacgaggagcggaggcggcag

SEQ ID NO: 574777 - DNA, 100 bp, Homo sapiens
tggcaagagcagtgcctagaaaggagctgaaaatcctggtggactacgacgagaaaggctacctcctgcagatcttcaccaaaccggtgcaggaccggcc

SEQ ID NO: 574778 - DNA, 100 bp, Homo sapiens
ctgcgaaacccaagccgccgcgtaggagcgtgcgttcgggccctcttctcccacctgttcggacatgatccacatcgcggacaccaaggtcgccaggcgt

SEQ ID NO: 574779 - DNA, 75 bp, Homo sapiens
gccccctgaggccccagaactatcttttcggacgcaaatcaatttcacagtggctattgattttacagcatcaaa

SEQ ID NO: 574780 - DNA, 50 bp, Homo sapiens
gcatctccaacagcgacctgagcgaacatccagtcatggataaaaatgag

SEQ ID NO: 574781 - DNA, 88 bp, Homo sapiens
tatgttatcaaaagtagagaaaatgaaaggagagcaagaatctcataggtaccctcttaccaattatacttttggtacaaaagagccc

SEQ ID NO: 574782 - DNA, 75 bp, Homo sapiens
cgggcttctcgccccggccgcggccgggtcctcagaacattgagctcaaggtggaagtagaaagtctgaagcggg

SEQ ID NO: 574783 - DNA, 75 bp, Homo sapiens
gatttgttaaggattccaagtaactcttatttggaggactcagagagagtaatgataattaccggaccaaacatg

SEQ ID NO: 574784 - DNA, 50 bp, Homo sapiens
ggaagaaaaagggccagtgtctcccagaagcaaaacggacaagtcggttt

SEQ ID NO: 574785 - DNA, 82 bp, Homo sapiens
ttcgcctccttcaccgccgcagaccccttcaagttctagtcatggcaaagcgaaggctggagctaggagaaagcggtcatca

SEQ ID NO: 574786 - DNA, 98 bp, Homo sapiens
gaatgtagatggtctcatcggagtcgcatttgtagacatgcttagaaactgtgggtcctttactcgtgtggcaaaggagcagagaactttgacaagtt

SEQ ID NO: 574787 - DNA, 82 bp, Homo sapiens
aaactaggtcgatggtcggcggcgcccggatgggcagctgaggtcaaaatgcagatcttcgtgaaaacccttaccggcaaga

SEQ ID NO: 574788 - DNA, 100 bp, Homo sapiens
gaaagtttcctgcatgttcattcctgatgggcgggtgtctgtctctgctcgaattgacagaaaaggattctgtgaagttacagatgtagagctaaaacga

SEQ ID NO: 574789 - DNA, 118 bp, Homo sapiens
aggatgcccggcagcactctagttccaacatggttatcatgctcattgggaataagagtgggaagccgtgtccgccttttaagattgtgattctggatgaagcagattctatgacctc

SEQ ID NO: 574790 - DNA, 82 bp, Homo sapiens
gagcggggaggaggcggtggccctgctggaggagctctggaaacctgtttccctccaatcttgtggttgcagctttccgtac

SEQ ID NO: 574791 - DNA, 82 bp, Homo sapiens
accaagcctctacaggggcctcccgcgccccccgggacccccacgccgccgccagatggtcagtaggacagaaggtaacatt

SEQ ID NO: 574792 - DNA, 88 bp, Homo sapiens
tgggggcccattttggcggctacctggtcaaggaccctgctgccgaagctgattccctccggtgcaggccgggagtggctggagcggc

SEQ ID NO: 574793 - DNA, 74 bp, Homo sapiens
aagggaaaaactgttccaatcgatgattcctctgaaactttaggtcttgttgcagtaggagaaagagcacaaaa

SEQ ID NO: 574794 - DNA, 74 bp, Homo sapiens
ggccccgagatcagaatgccgattaactgctgaagtactgatcgagttctgcatttcttcaatgaggaactaca

SEQ ID NO: 574795 - DNA, 101 bp, Homo sapiens
ggggcgtctaccgctttgccactgataggaatgacttccggagccgattatgtttcgaggggaagtacgtttaaatgtggaagagaaaaaaacaagagctg

SEQ ID NO: 574796 - DNA, 94 bp, Homo sapiens
gcgtccagcacctacgtcccgctgccgtcgccgccgccaccatgcccaagagaaaggtctcctccgggctggggctgagcaagccctcggagtg

SEQ ID NO: 574797 - DNA, 75 bp, Homo sapiens
ttttgctgcgccctctcagcttcccaagaaagggccgttgctccagggagaactgcaaatatcttcatccacccc

SEQ ID NO: 574798 - DNA, 100 bp, Homo sapiens
atgtgaagcccaagccgattgagataccactcagtggggagcaagagtgagccatggagctacgtgtggggaacaagtaccgcctgggacggaagatcgg

SEQ ID NO: 574799 - DNA, 98 bp, Homo sapiens
tgacactgccggtctcaccatgcccacagcaacactggattgagctaagagaacgagagatagaacgactgtcagttgctttggatggtggtcggtcc

SEQ ID NO: 574800 - DNA, 75 bp, Homo sapiens
tttaaaagagagagcttgtgaaactgagggaatagtctgcaaaatgaatgttcaccgtcgatgtgagaccaacgt

SEQ ID NO: 574801 - DNA, 90 bp, Homo sapiens
tgcgtgatcacctatatacttggagttggagacaggcacctggataaccttttgctaacaaaaacagcttgtagaccctggagttaaggc

SEQ ID NO: 574802 - DNA, 97 bp, Homo sapiens
ttagcctctcagtggcctatcggtgtggcagagaagacacagcttctgaaattgagtgtacctgctacttttatgcttgtgtctttagatgaaggtc

SEQ ID NO: 574803 - DNA, 99 bp, Homo sapiens
catctacccttattccaggcggctgctcagaatagcctaacatggcagaccagagacagcgctcactgtctacctctggggagtcattgtaccacgtcc

SEQ ID NO: 574804 - DNA, 75 bp, Homo sapiens
cagacaaatgccacacaggaagtcgtgcgagaccttgtgcgccagggttggtggttctgtcagatgaaagcaaag

SEQ ID NO: 574805 - DNA, 82 bp, Homo sapiens
ttctggtctcctggatcatgtggtgaagctgtgtgactttggctttgctcgcatcatcggcgagaagtcgttccgccgctca

SEQ ID NO: 574806 - DNA, 100 bp, Homo sapiens
catctccagatgctagggttatggggactgctgagatgtcctctattcttgaagagcgtattcttggagctgatacctctgttgatcttgaagaaactgg

SEQ ID NO: 574807 - DNA, 100 bp, Homo sapiens
ggccaatctggccagccccacccctgctgacatcgggagcagtgtgccaggcccgcagtcctaccccattgtgacagccatatcagcgggaacaagattg

SEQ ID NO: 574808 - DNA, 90 bp, Homo sapiens
ttaggaccagaagcctttcgcggagaaaaggctgacatgcccgtcctatatgacaggaccaacttggaggccttgcagaagaagctggag

SEQ ID NO: 574809 - DNA, 100 bp, Homo sapiens
ggagtttgggaaaaaccgcgaagtcatggggctctgtcgggaaggtcaaaatgcagatcttcgtgaaaacccttaccggcaagaccatcacccttgaggt

SEQ ID NO: 574810 - DNA, 100 bp, Homo sapiens
tccaaatggttgaaaacagatatacaggcaactcatgcagcaattccagaaccccgacttcccacccgaagtagaggaacaggatgccagcaccctgcct

SEQ ID NO: 574811 - DNA, 74 bp, Homo sapiens
ttctctaaagacttgccaagaggtgacagtatgttgactgctgtctctgtggccagagattgtggaatgattct

SEQ ID NO: 574812 - DNA, 131 bp, Homo sapiens
gacagcaggagcgatggccgggatcctggagcactcggtcatgtacccggtggactcggtgaaggttaatttggagtggcccctggagtcagtttcctacaccatccgaggccccacccagcacgagctac

SEQ ID NO: 574813 - DNA, 90 bp, Homo sapiens
ggccgaccctggcgccaggcgtgatgcaatggaagagttaatagttgaacttcgtctctttcttgaactcctggaccatgaatatctaac

SEQ ID NO: 574814 - DNA, 88 bp, Homo sapiens
ggcctagcgtcctggaattacttcaatcaagtggatccataaagaacccagccaacccgcagagggaggggaggggctgagctgtgag

SEQ ID NO: 574815 - DNA, 96 bp, Homo sapiens
gggatgtccgcaactacaacagccagacagccttccagtctcaggggccagccaagcccccacccccaaggaagccactgcctgccgacccccagg

SEQ ID NO: 574816 - DNA, 100 bp, Homo sapiens
cccgtcaaaatccgaaagattcgggccagagacgacaacccgggcctccgagggtcctgaggacaccgtgagccagccaggcctggccgctgggcctgac

SEQ ID NO: 574817 - DNA, 90 bp, Homo sapiens
taaggattccaagtaactcttatttgaaaatgcatccgatgcagatttatggctcctgaacagttgcactgtaaaaaacccagctgaaga

SEQ ID NO: 574818 - DNA, 78 bp, Homo sapiens
caccaaaaagctttctgctaggggtaatgcaggtggtgaaggagcaggttatgagagcacttacaaccaagcctagct

SEQ ID NO: 574819 - DNA, 75 bp, Homo sapiens
attgacatttaattttagggtcctttatatagaagggagagtagctggaaacaacgtggaggtagatgagtcttt

SEQ ID NO: 574820 - DNA, 87 bp, Homo sapiens
cttcctgagacagcagcctgccactcggacacagcagtctaacatctgggtgaatatgggttgcttcatgtgcgaaatggaaactgc

SEQ ID NO: 574821 - DNA, 98 bp, Homo sapiens
cggaaatacagtgcaatatatggcagatttgactcaaagaggaaggatgggaaacatctcacacttcatgagaagctgcagttcatcatctgctgtga

SEQ ID NO: 574822 - DNA, 100 bp, Homo sapiens
caggttttccagtcgcactgcggacacatgctaaccaagagtgagaagaaccagttattggcaatagcatcatcattgtttgtggcattccagttaagag

SEQ ID NO: 574823 - DNA, 82 bp, Homo sapiens
tggagactgtaatttgggagatgaagcctcgagcctaaggcgctctcaggtccatagtcaatgcatgtgttgatgtggtgct

SEQ ID NO: 574824 - DNA, 83 bp, Homo sapiens
ggcaggttgcggcggcgccggagcgggtctccaggctggcgagcgcccagacaatgcagatcttcgtgaagactctgactggt

SEQ ID NO: 574825 - DNA, 98 bp, Homo sapiens
tgtccctgtctcccagagcctgagccaccaaagcacaaggcagaaaggagtgatgccatggacaatattaccaggcagaaccaattctacgataccca

SEQ ID NO: 574826 - DNA, 82 bp, Homo sapiens
aaaactctggctcatattcaatttctcagtttcaatccagaatgatcagtgagaaagatcagtctaaagaaaaggagaagaa

SEQ ID NO: 574827 - DNA, 95 bp, Homo sapiens
aaggccctggacacagcaatatctctgggctttcacaggccagattgattgggctgcattggcccaagcttggattgcccaaagagaagcttcag

SEQ ID NO: 574828 - DNA, 100 bp, Homo sapiens
tcaaaaacaaaattctgaactcaggacttggcaaattagaaatgatatttgccaaatttgatgaagtgcaaagttcaggcggtatgattttgagtgtctg

SEQ ID NO: 574829 - DNA, 100 bp, Homo sapiens
gaacctactggtgtcatgtatataatgatcgagacagtcaagatagcaagaaggtagaaatcatcatagtgaataaccctataccttccaatttgaaatc

SEQ ID NO: 574830 - DNA, 88 bp, Homo sapiens
ttcttcgtggagcctcatctcatcttacaggagcagactaggcccaggctgcaagcacaaaggaagtttgctcagtctcagccgaata

SEQ ID NO: 574831 - DNA, 100 bp, Homo sapiens
cccagttacaagcgtcttgccaccggcttccctttgtaaattgagctctgcacgctggggagtttgttggggtattctctactgccgctgatggtcaaac

SEQ ID NO: 574832 - DNA, 90 bp, Homo sapiens
gccaaagccagactacagctggttcttgaagctgctggtacagcagggaagaactggaaactcagagaaagaaactgcccttccatctac

SEQ ID NO: 574833 - DNA, 100 bp, Homo sapiens
gtcaaatactttgcacaggaagctataagtgaccttgaagctgatgatgttaagggcagtgtaccactgtcttcaagccctcctgctacacatttcccag

SEQ ID NO: 574834 - DNA, 82 bp, Homo sapiens
gcagcgggagctggacggcgagcgcgagcggcgcgagaaaggggcagagtccccaaggccaagaagaaggcgccgctggcca

SEQ ID NO: 574835 - DNA, 100 bp, Homo sapiens
tcacgctatatcaggatgagataactgaaagggaagcagaaccatactatgcccagattattcatcagcatggctacctgctaatgaatcattgtggcag

SEQ ID NO: 574836 - DNA, 75 bp, Homo sapiens
cagatgggatctttccggatcaatccagatggcagccagtcagtggtggagtgttctggacttggtgcctctttc

SEQ ID NO: 574837 - DNA, 75 bp, Homo sapiens
aagagagcagttgaagaagtgaagaaattattggtacctgcagttaatgactccagagagtaagatcagattcgt

SEQ ID NO: 574838 - DNA, 100 bp, Homo sapiens
ggagccacgatggaccttgaaatcttcaaccttcctaatgtggagatcagcaaagaagtgggccaccatatctggaaactacagtctatgctttgaagcg

SEQ ID NO: 574839 - DNA, 76 bp, Homo sapiens
agtgctgctgagtccaccgggaactgtacttctgcatttgcccagtataacatggatcagttcacgcctgtgaaga

SEQ ID NO: 574840 - DNA, 100 bp, Homo sapiens
gagtgatgtcttccagactcggtgctgtacccgccgtctctgtcccacctggtgctctggactgctgggtgtttctgagctgtctggaggtgttgcagag

SEQ ID NO: 574841 - DNA, 82 bp, Homo sapiens
cgcccgggagctgtcggccccggcccgactctatcacaagaagacctgcctagagctggaacgttacctccagagcgagccc

SEQ ID NO: 574842 - DNA, 75 bp, Homo sapiens
acacaaagacactgtgtactgtgtggcatatgcgaaggatgatctgactgcagccatgagcagcaatgagtgctt

SEQ ID NO: 574843 - DNA, 51 bp, Homo sapiens
tctggagcttttcccctccccggttttgctacttgagaagatagaacatga

SEQ ID NO: 574844 - DNA, 87 bp, Homo sapiens
ggaggcggctccgctcggccggcgcggcgcagaagaaacccgcggcgaccacagccaaagcgggctttctacagcagtataatcact

SEQ ID NO: 574845 - DNA, 100 bp, Homo sapiens
acaagactacggagcataggaggaaaattcatcatctggaaactccgggacgttttacagcagaggctgatcaaattcttcattgaccagagtaaaaaag

SEQ ID NO: 574846 - DNA, 100 bp, Homo sapiens
agtagaggtaatatttcacgtgtcaacaagaatgccttctgattctgatgattctttgaccaaaaaatgtggagatgtactttcctcagaatgactcttg

SEQ ID NO: 574847 - DNA, 100 bp, Homo sapiens
aagcgctggaagtcagaggggcatggcgaggagtccagctctgaggactctgacatgctcccggcactgcccctcgctgtgggctggcaccaatgggggc

SEQ ID NO: 574848 - DNA, 48 bp, Homo sapiens
ggctctggtgtttgccatcaagggttggcaatgtttgattgcactggg

SEQ ID NO: 574849 - DNA, 82 bp, Homo sapiens
gcagcgcgagctgggaccagcgtctcggaggcgccgcagcacagcccgttcttcgccgagcagctgaccgcattccaggtgt

SEQ ID NO: 574850 - DNA, 75 bp, Homo sapiens
ctgccctggcgctgacaagggtccagcctccgatttgtcactcagcccagtccatcagtttctcagcccagtact

SEQ ID NO: 574851 - DNA, 74 bp, Homo sapiens
gaccctcacggagctgggcgacgagctgaccctgggagacatcgacggtgtgtgcagtggcctcagggatccgg

SEQ ID NO: 574852 - DNA, 103 bp, Homo sapiens
tccctgcgactcctggaccaccgggcgctggtctgctcccagccggtgtggacactgccagcggctgcagccgacttggaatgacctgggagacaaatacaac

SEQ ID NO: 574853 - DNA, 74 bp, Homo sapiens
ttaatgaccctaaaaatggcgattctgcaaccaagcacctgaaacagcaggtgtactttcggctccatgcttcc

SEQ ID NO: 574854 - DNA, 83 bp, Homo sapiens
ggtgatcccttccttcatgtgccagcccctcggagggccacagttatcagaacagcggtctggaccacttccaaaacagcaac

SEQ ID NO: 574855 - DNA, 100 bp, Homo sapiens
caacactgataagattgaatgccaagcagaaaattacctaaatgcactctttcgaaagaaaggacccagatgatgtggtaccagttggccaaagaagagc

SEQ ID NO: 574856 - DNA, 100 bp, Homo sapiens
gcttactggaaactggatgcagcaaggaaataggatttaaccgctctctgcctcccagtctaacaaagtgccagtggtgcagcaccctcaccatgtccac

SEQ ID NO: 574857 - DNA, 75 bp, Homo sapiens
ccgccgccgcggacaatgagagtgtgcaggatgacagaattcgagtcgaaaggatggataacatttattttgaat

SEQ ID NO: 574858 - DNA, 74 bp, Homo sapiens
gcccagtccccagctcgccagcacgccctgctggcggacttggagtctaccacctcccacatctccaaacggcc

SEQ ID NO: 574859 - DNA, 75 bp, Homo sapiens
gacttagtttcctgcttgccttcccccagattgaatacctgcttaagaagcttacagaagctatgggaggaggtt

SEQ ID NO: 574860 - DNA, 87 bp, Homo sapiens
gcccgcgccccggggcagcagcgcgtcccaggaggagcaggacgaggagaaggccttacgaccggatatgggctataatacattagc

SEQ ID NO: 574861 - DNA, 100 bp, Homo sapiens
ccacttccaaggaagaccccaagttcaaggaactggtcaagtgatccgggccaaggtggtggggaagaagctggtaaaggaggggcccttcggcacgctg

SEQ ID NO: 574862 - DNA, 100 bp, Homo sapiens
gaaacagcaagcggcgtggacgaccgttgctgagctggtgtggaacgtctgtgatcaggttggtcaaagaaaaagtgatgtatgaaaaagaggcaaaaca

SEQ ID NO: 574863 - DNA, 121 bp, Homo sapiens
gcccagtccctcggacccatcgccgcttctagaccctactgcggtctcggatattgccgggcaacggggtggtcatccacttgccaggcttgtttgaggaagcagagaagaatgaaaagaa

SEQ ID NO: 574864 - DNA, 88 bp, Homo sapiens
agtcaccacaaggccaagggcaagtgatttgacagcgttcctagaatcccatgggcctttgccatgacggaagtatgtggcatgattc

SEQ ID NO: 574865 - DNA, 90 bp, Homo sapiens
tggaagcaggggatgtggtccaaggaagaaattgatattttgatgaacaatattgaacgctatcttaagaaagtgactgagaccgaagat

SEQ ID NO: 574866 - DNA, 101 bp, Homo sapiens
ggttacgagtagccatgtgccatatgatttatcggaaggcctccccatggccacccatggaccagtcggcattcacttcctcccttctgcggcccataaaa

SEQ ID NO: 574867 - DNA, 100 bp, Homo sapiens
gacagatgaagatgaacacagtattgaaatgcatttgccttatacagctaaagccatggaaaggaacttagtgatttggcccgtgaccctccagcacaat

SEQ ID NO: 574868 - DNA, 90 bp, Homo sapiens
ggagctggacggcgagcgcgagcggcgcgagaaaagagcgcctgctcgctgtgcccccgggttatgacgacccccaataaaggaaacaag

SEQ ID NO: 574869 - DNA, 75 bp, Homo sapiens
tgacattgcagagctgtgggctgtgttccacaagttcaaaggtgttgacttcaaaatcaaaactgtagagctaag

SEQ ID NO: 574870 - DNA, 100 bp, Homo sapiens
gcgcggtcgacgcgggcctgagctccctccaggatttttagactctgaggagcagttggagctaatccacattatggaaatggaaaccaccgaacctgag

SEQ ID NO: 574871 - DNA, 93 bp, Homo sapiens
gcctgtttctggggcaaaaacattcaagaatgagagcgagaacacctgtcaaggggttgtgtccactgtggtccccgactctgcccacaagct

SEQ ID NO: 574872 - DNA, 99 bp, Homo sapiens
atgcgctacttgaacggactcgatcggaaaagcttcactctgaccatcactgtcttcacaaacccaccgcaagtcgccacctaccacagagccatcaaa

SEQ ID NO: 574873 - DNA, 75 bp, Homo sapiens
ggcgcctgtctcttccgggctgtaggtgcagattcactttataggaacagcttcagcttcagtgatgaaaaactg

SEQ ID NO: 574874 - DNA, 71 bp, Homo sapiens
aggaggatcttttccaccaacaggctgctgggtcaggtggtccagacggctgtggacctgcagctgtggac

SEQ ID NO: 574875 - DNA, 75 bp, Homo sapiens
gagagcggccgccgccgctgccgcttccaccacaggtaagaatgattgatgttggctgatattggagtgctcatt

SEQ ID NO: 574876 - DNA, 87 bp, Homo sapiens
tgcaagtcatcagactgcataaaatcaggagaacgtatttaccgggcagtcaaagatctattcctacatgagcccgaacaaatgctc

SEQ ID NO: 574877 - DNA, 98 bp, Homo sapiens
aaagcttaaagaagacatttcacagggggtacacatatctgtatatagaaaacatcggttgtgaagagaaagccaaaaagaatgccaacaagcctttg

SEQ ID NO: 574878 - DNA, 51 bp, Homo sapiens
gatggaattatgcagtttattaaggtctatgttaacaatgaatgggcaacc

SEQ ID NO: 574879 - DNA, 100 bp, Homo sapiens
gttggggccgtcttcctcatccttccttttctcggggctcccgtgggctgctccagcagggagtttagctccatggacacctttgaagactgtgaaggcg

SEQ ID NO: 574880 - DNA, 100 bp, Homo sapiens
ctgaggagtgttgatccaacacagactgagtaccaaggaatgattgagattgtggaggagggtttatgctaaaactatcgatgggcaacagactattatt

SEQ ID NO: 574881 - DNA, 110 bp, Homo sapiens
ggcaggcacccgggcgccgggcctcccagccgacatgtctctagtggcggaagccttcgtctcccagattgcaggtacaagaaaattccccaggacacagagctggtttg

SEQ ID NO: 574882 - DNA, 97 bp, Homo sapiens
cccctcggacactgcccccgccgccgccggagctctgcagcacggatgtctcagtggtacgaacttcagcagcttgactcaaaattcctggagcagg

SEQ ID NO: 574883 - DNA, 74 bp, Homo sapiens
gtactcagcaagctcgagttaaagttggatgtgctggaacagatggggcgcctacccttcttcagcaagatggg

SEQ ID NO: 574884 - DNA, 82 bp, Homo sapiens
atcgagaggatctggtgtaccaggcgaagctggccgagcaggctgagcgatacgacggacaaggtgctgcggatgctgtacg

SEQ ID NO: 574885 - DNA, 82 bp, Homo sapiens
gcagggcctgcagcgggagctggacggcgagcgcgagcggcgcgagaaagaagcttgctgtcttcgatacgtggagctcctt

SEQ ID NO: 574886 - DNA, 75 bp, Homo sapiens
ctgatattaactccatctgtcaggaggtgaatggtctccgagtggatctcccagctgagaagttagcatctgtgt

SEQ ID NO: 574887 - DNA, 100 bp, Homo sapiens
agcggctgtgcgggctgcgtagcggtgctgggtcgggccgacgtgccacccacccggagccggtgatggccattgccactttggctgcctgttataataa

SEQ ID NO: 574888 - DNA, 104 bp, Homo sapiens
tggaggtgcggggacagctgcagagcgcgcttctgatcctggggagttacttaaagatccactctacattggactacggcagagaagagtaagaggttctgaat

SEQ ID NO: 574889 - DNA, 76 bp, Homo sapiens
ggcgaacgcttcgctggccatttaggagctctgctcaaagccagacggatgaagatttgaagtgggtagaagaaaa

SEQ ID NO: 574890 - DNA, 90 bp, Homo sapiens
atttaaatatggagacctcctgggacacttgggtcctcgtcctgctttatttgtgcctgaggtttcatttgagttactggtgaagcggca

SEQ ID NO: 574891 - DNA, 75 bp, Homo sapiens
gctgcaggacctctgtcagagaatgaaacactcatcgcatgggcagctgcaatgactctccgcacggtattattg

SEQ ID NO: 574892 - DNA, 98 bp, Homo sapiens
ctctggggaagccgtcacagaggagtcaccagcacccccgaatgaagagcaggttgttgccctggatgcccaaaatattgtagctgtttcatgtggag

SEQ ID NO: 574893 - DNA, 96 bp, Homo sapiens
cacaaaagctggacaagcgaagggtagggctctacttcactgggcctgtgatcgaggacataaggaactagtcacagtgttgctgcaacatagagc

SEQ ID NO: 574894 - DNA, 82 bp, Homo sapiens
cgctttccctctcgcgtctctggctgcaggaaggatgcctgtggccctcggagagcacagtgtcaggcaacggaatcccaga

SEQ ID NO: 574895 - DNA, 80 bp, Homo sapiens
gggctgcagacggctgcgaggcgctgggcacaggtgctttacaaggccaagtacggtccaatgtggatgtcctacttagg

SEQ ID NO: 574896 - DNA, 75 bp, Homo sapiens
ccaccaacattcttggcattacgcaggccagcaactcccagctcaatgcaatggaatatattaaaggaatctgtg

SEQ ID NO: 574897 - DNA, 126 bp, Homo sapiens
ggaggttctggccaggtgccgggaggggcgctgtgtcgagggcgatccccccaaagcagcgtcccgtgctaaaggttcagaaaatggtcttgcacagaagcatcgaacacctcgccgacgatgtca

SEQ ID NO: 574898 - DNA, 75 bp, Homo sapiens
tcatctccggccctctcggcgtccgccagcgatggcacagtgatgttcctccatcttacgttcaaactaaatttt

SEQ ID NO: 574899 - DNA, 98 bp, Homo sapiens
ggaggtgccgctgccgtggccgcccggctgccgggagccgacagcttcgcgccggtgttttagagcactttgctgcaagggaccaccacctgcacgac

SEQ ID NO: 574900 - DNA, 98 bp, Homo sapiens
ggccgtggacacctgtgtcagcatgtgggacctggttctctccatcgccttgtctgtggggtgcactggctgcatagagcctggacctgggcactggg

SEQ ID NO: 574901 - DNA, 98 bp, Homo sapiens
cgacagcctcaaacaggagctggagcagctcaaagagctgggagtgtccactcgccttccaccagcatggcaacgtcttcacagtaccgccagctgct

SEQ ID NO: 574902 - DNA, 82 bp, Homo sapiens
actaggagtttttgctttagctggactaacagatttgatccataaatggactaggacaaatcttagaaacacaaagatcaag

SEQ ID NO: 574903 - DNA, 82 bp, Homo sapiens
agacctcgtaattacattctctcggccagcgcctccgcgaccgttccccagcacaccccaccccactcagccgctcagcctc

SEQ ID NO: 574904 - DNA, 83 bp, Homo sapiens
gctcctgtcgtccgttctctcaggctcccgttcagcacacaggggctggggctggccttcggagttacgaggaaacgaggacc

SEQ ID NO: 574905 - DNA, 88 bp, Homo sapiens
ctgggcacccacggagcctccggggctgatgtggaagcgtttgccaaagccatgcagaacaacgccaagcccgagcagaaagagggcg

SEQ ID NO: 574906 - DNA, 100 bp, Homo sapiens
cttgcctgtgcgcgcgtgcgcggacatggcctcaaacggagtgcgccggtctcggggaaatgcccggttccttcgtgcccacggtcaccgcgatcacaac

SEQ ID NO: 574907 - DNA, 75 bp, Homo sapiens
ttgaagatagccatcagccgctacgtgactcttttctccagtccttcagtgaatctacagacctattttctcagg

SEQ ID NO: 574908 - DNA, 75 bp, Homo sapiens
ctgtcgctgcccgcctgccctgaggagtccccgctgcttgacttcccaagtaagaagcggaagaggagccgctgg

SEQ ID NO: 574909 - DNA, 101 bp, Homo sapiens
cacaaagcagcccaaccaaaggggtctcctatggacagaagtgcgggcaaggagctttgttcctccccgatgtcaccctcccacagcccacttgctagcag

SEQ ID NO: 574910 - DNA, 101 bp, Homo sapiens
aagggtccccgggacccgcctgctgagtggacccgggtaattctgcttggtcagaatcgtgatggcattgtgttcagcactgatgactattttcaccatca

SEQ ID NO: 574911 - DNA, 98 bp, Homo sapiens
ttgggtgcagtatgatgggagaattccttatccacggcctggtacacctaaattatacagatctgtgattgaagatgtcattaatgatgtgagagaca

SEQ ID NO: 574912 - DNA, 100 bp, Homo sapiens
ggcgccgggcctcccagccgacatgtctctagtggcggaagccttcgtctcccagattgcagggatgggcgtgttttgggcgtgctagaggtgtcacgct

SEQ ID NO: 574913 - DNA, 75 bp, Homo sapiens
ggtgacaactcaagagcaatcagtaccatctggtattgaagcccctgggtgataatttgatggaggaaaacataa

SEQ ID NO: 574914 - DNA, 100 bp, Homo sapiens
ccagatcacaggcggagaccactctaggacgctcttccagctgaagcaggtgaccaagaatatggcccaggtgaccaaagccctggacaaggccctgagc

SEQ ID NO: 574915 - DNA, 100 bp, Homo sapiens
cctcctccttggtcgccgcgtccttggctggcgtagacacctatggctgccgatgaaggctcagcagagaaacaggcaggagaggcccacatggctgcgg

SEQ ID NO: 574916 - DNA, 75 bp, Homo sapiens
agaatcagttgttggagaaaattaaaggttgatggacggatggctacatggatgtgatggagatggtttactatc

SEQ ID NO: 574917 - DNA, 51 bp, Homo sapiens
cagaaaaggggacacggcggtgcttaggcagctatcaatggtgtaatacca

SEQ ID NO: 574918 - DNA, 75 bp, Homo sapiens
aactgggatttcaacctgaaagtggaggctgcgaaaataggattgactcagtcagcattgacacccttatcttca

SEQ ID NO: 574919 - DNA, 83 bp, Homo sapiens
tctgtcactagtccagacatggatgaaataactcacggttacccatgcagttgttactgtaccagcctattttaatgatgccc

SEQ ID NO: 574920 - DNA, 99 bp, Homo sapiens
tatgctgcagcatattgtactggcctgctgctggcccgcagggtgacctctgagaaggatgtgcaaacagctctggctctagcaaaaggaaagtttggc

SEQ ID NO: 574921 - DNA, 74 bp, Homo sapiens
atagaagacacccctttggttccgtatgaaaacccatggacaatcccgaatatgttgtcaatgacgagaattgg

SEQ ID NO: 574922 - DNA, 98 bp, Homo sapiens
ctgtcctccggcccgagatgaatcctgcggcagaagccgagttcaacatcctcctggccaccgactcctacaaggaaatacaactggagcacgcaaag

SEQ ID NO: 574923 - DNA, 81 bp, Homo sapiens
ccgacgccatgaagatcaaagatgccaagaaaccctaatatcctccgaatcctaaatctagagctccaaggatgctggtca

SEQ ID NO: 574924 - DNA, 75 bp, Homo sapiens
agtggacgtggatttggggatggctataatgggtatggaggaggacctggagaccatgctcgacagctgaccaag

SEQ ID NO: 574925 - DNA, 87 bp, Homo sapiens
tctggcaggaacctcggcctcagagaattcaaagaagctttttcactatttgacaaagatggtgatggaactataacaacaaaggaa

SEQ ID NO: 574926 - DNA, 101 bp, Homo sapiens
acagtgaaatacaggcctggctttcagacttggaatgaatctgaagtctgctgcagtaaaacacagaaggctttaaaatgttttcttgcataaaattcaaa

SEQ ID NO: 574927 - DNA, 89 bp, Homo sapiens
gttgatggcagtttcaataacaggtcattgccgagaaaaggaaaagaagatttttcagatcccctggatgcatgcggctagacatgggt

SEQ ID NO: 574928 - DNA, 74 bp, Homo sapiens
aaatatcccaaggactaatctgatcgggtcttccttcatacttagaaggttttgactccgtggtatcatctact

SEQ ID NO: 574929 - DNA, 88 bp, Homo sapiens
agctgcgtgagaacccgcccatgaagccagatttctcccagctttgaaatatcagtgatgtataatgaatctgacctgcatacactcg

SEQ ID NO: 574930 - DNA, 96 bp, Homo sapiens
ctgccgccgccggccgcctgggaccttgcggtgaggctgcgcggggccgaggccgcctccgagcgccaggctaatagctcgtcagcttgctaaaat

SEQ ID NO: 574931 - DNA, 75 bp, Homo sapiens
ccccttcggcgacgtctcctcccgcctcaccacaggtgaccaagaatatggcccaggtgaccaaagccctggaca

SEQ ID NO: 574932 - DNA, 100 bp, Homo sapiens
gaacatgcatatttgggtccaactgtgaagccagatgataaggtgatccagaagaattaatgttccagtattttaaaaagtttggcgataaaccttgttg

SEQ ID NO: 574933 - DNA, 86 bp, Homo sapiens
acgagagctccgtgcgggtggctgtcaggaattgaatgatctggcacgggaccctccagcacagtgttcagcaggtcctgttggag

SEQ ID NO: 574934 - DNA, 101 bp, Homo sapiens
gcaggagcgcgagaaggatatcctgacggccatcgccgccgacctgtgcaaggtaattggtatgtgaaaaagtgtctaaacgacgttggaatttgcaagaa

SEQ ID NO: 574935 - DNA, 75 bp, Homo sapiens
atttccagtcaaagtacatgatttccctagtggaaatgggacaggaggcaggtgtctactatgaaccatcctgta

SEQ ID NO: 574936 - DNA, 75 bp, Homo sapiens
gcagtggtcgcttcttctccttggtataggactttcactaaccttggaccatatatttgccaggaagaatgtaag

SEQ ID NO: 574937 - DNA, 75 bp, Homo sapiens
agaggtacctctccttttccctctccctttccctaagtgcccactgttgatgtctttcagatttccacaaaagag

SEQ ID NO: 574938 - DNA, 90 bp, Homo sapiens
ctaaaggatgtgaccattttggcagctactaaccgtccagataggatagacaagaactgtagtgaaatgtagtattgccaagtcccaagc

SEQ ID NO: 574939 - DNA, 98 bp, Homo sapiens
agaaagagaaatccaaggacttcaagaaccacgtgatcaagtaccttgagacactcctttactcacagcagcaggaatatatatgtcccagatgtgaa

SEQ ID NO: 574940 - DNA, 51 bp, Homo sapiens
aaaaataagcaacttggccacgaagaaggtgggttggctatgagttccccg

SEQ ID NO: 574941 - DNA, 83 bp, Homo sapiens
cgagaagggcgactactacgaggcgcaccagatgtaccggaccctgttcttcagttttccaagagataacttcaccaagatgt

SEQ ID NO: 574942 - DNA, 102 bp, Homo sapiens
ctcgcggtcaatgggaaagtcttcgacgtgaccaaaggcagcaagttctacggcccgggtggagccgccaccaaaatgcagattttcgtgaaaacccttacg

SEQ ID NO: 574943 - DNA, 82 bp, Homo sapiens
aagccgcctctgtattacttaccagatgttttcaaactgcagtaaacaatcaatctataagaccattgaaagtaaggcccag

SEQ ID NO: 574944 - DNA, 100 bp, Homo sapiens
atttggtcctcttggtcctcggatgtcacagcttttccatagaacaattggaagtggagctatgactgcaacagcaataggaattccatcgcctccttca

SEQ ID NO: 574945 - DNA, 101 bp, Homo sapiens
ctcgcacttgctcaacaagggcctgccgcttgaacgacaaatcctccacccctgggctcaagtccaacacaccaaccccaaggaacgacgccccaactcca

SEQ ID NO: 574946 - DNA, 73 bp, Homo sapiens
tcttccccacacaatatatggtgagcaagatttcattgacaggtactccacgccccggatgccctggcatgac

SEQ ID NO: 574947 - DNA, 75 bp, Homo sapiens
cctttgtatggagaagaccccataacgtttgcaccatttaaaatttcttgtatggaattgtcagccacttgaaga

SEQ ID NO: 574948 - DNA, 75 bp, Homo sapiens
aagatcgtggcccctacggtgtcccaaatcaatgcggagttcgtgacccagatggaagtttactgttctgatttt

SEQ ID NO: 574949 - DNA, 98 bp, Homo sapiens
aaggacttcatctcccgatttgagacttaattcagtgcacaaatgagatgaatgtgaacatcccacagttggcagacagtttatttgaaagaactact

SEQ ID NO: 574950 - DNA, 100 bp, Homo sapiens
cgcaggttccctacacggtctcctgggtcaagaaaaagcttgtggtgaaggggggcaaaaaaaagaagcaagttctgaagttcactcttgattgcaccca

SEQ ID NO: 574951 - DNA, 82 bp, Homo sapiens
tggtcatgagctttgtgaacctggggcacctggacgatgacggattaccgcacgggttctgcacagtcacctactcctccac

SEQ ID NO: 574952 - DNA, 100 bp, Homo sapiens
ctttgatcgtcttcctcttcagccatccagattgttagccctgaaaacaccaaatctagctcagatgatgaggagcagctgacggagcttgatgaagaaa

SEQ ID NO: 574953 - DNA, 100 bp, Homo sapiens
cattcagcttcgagcttccacagacccagtcggatgatgattctgggtcagcttcaggctctggatctggttcgagttctggaagcagtagtgatggaag

SEQ ID NO: 574954 - DNA, 100 bp, Homo sapiens
ggcagctgggctgcagtgaccccgctttcctcacgcccaggtgctggacgtcattgctcctccttatacctctgacttcgtgcaacttttcctccccatc

SEQ ID NO: 574955 - DNA, 75 bp, Homo sapiens
ctgctctactcattccctgttgtaatcaagatgctcccataatactctcagatagtgaagaagaagaaatgatca

SEQ ID NO: 574956 - DNA, 82 bp, Homo sapiens
atcctgccgtccttctccactttcgccagcccgtgccgcgagcgcggcctgcaggagggatccaggtccggcacgatcaaga

SEQ ID NO: 574957 - DNA, 90 bp, Homo sapiens
attggcctcaaagctgttgtcggagagagacacaactcagatgggaagttcatcgcccgggcacagcggatagagtacgactgtgaacta

SEQ ID NO: 574958 - DNA, 75 bp, Homo sapiens
tctcggcctggaggagggggtcgcgcgaagtgccagatgcaggcggggaagggagcatcgagtacagctgtccgg

SEQ ID NO: 574959 - DNA, 112 bp, Homo sapiens
cacatcggtatcctcgaattcaaagtatcaaagtacaatttaccggctgaaaatgatgagaatggacaagcagaaaacttttccatggacccacaattggagaggcaagtgg

SEQ ID NO: 574960 - DNA, 75 bp, Homo sapiens
ccggccctactatgaggctcggcggctggctaaggagattttcatgttccagctgctccggggcctcgcctactg

SEQ ID NO: 574961 - DNA, 100 bp, Homo sapiens
gcctcaggcgtgcgcggacggtgtgcggagctccaaacgagaatggaagccgctggaggaccgtagctgcacagacataccatggctgctgctcttcatc

SEQ ID NO: 574962 - DNA, 110 bp, Homo sapiens
ttgcagcatctccagtgacaatggcctggtttgctttcgaccctggctcggcgcactcggacatcatcctctccaatgacaacctgacagtgacctgtagtagctatgat

SEQ ID NO: 574963 - DNA, 80 bp, Homo sapiens
tcattccaggcagattagaaacatgacccacagtctccttgatggtttgcccgaggagccttcaacacctggtacagtgg

SEQ ID NO: 574964 - DNA, 100 bp, Homo sapiens
ggcggccgcgccatgtggctgctggggccgctgtgcctgctgctgagcagcgccgcgggcatagaatgtcaagctaaccaggcgtccgctacttcagaag

SEQ ID NO: 574965 - DNA, 116 bp, Homo sapiens
gatcgtgactattcagatcatccaagtggaggttcctacagagattcatatgagagttatgggatcaagcatgaattgcaagcaaactgctacgaggaggtcaaggaccgctgcac

SEQ ID NO: 574966 - DNA, 101 bp, Homo sapiens
ccagaaatcaagcagaagattgagctgctgatgtcagttaactctgagaagtcgtcctcttcagaaaggtctattctggataagcaggttttgtgaagaca

SEQ ID NO: 574967 - DNA, 100 bp, Homo sapiens
tagggcctgggccgcggttcggccgcgccggccgggcagccattctacaaaagtggaagctgtggtcagaactctgatgaaaatacagcttagagatcca

SEQ ID NO: 574968 - DNA, 98 bp, Homo sapiens
ctaaacatggaaatattcaagtgggatgtgtagactgttcaatgcaacaaggcaaggtggagcagttctggaggttttatagccacatggtacgtcct

SEQ ID NO: 574969 - DNA, 80 bp, Homo sapiens
tggagctgggtcagtccgccgctcaccccgcggccgcaccttcccgccttctcagccgccaccggcacggccaggccagc

SEQ ID NO: 574970 - DNA, 98 bp, Homo sapiens
cgagaaaaggatcctgtctctggcccgcaatcaccccttcctcactcagttgttctgctgctttcagacccccgtgtcatggagaaactccagctggg

SEQ ID NO: 574971 - DNA, 83 bp, Homo sapiens
gcccgcgccgcgcgccggcggcaccatgaagtcagcggaggaagtttcatgatcaacatgggagactcccacgtggacaccag

SEQ ID NO: 574972 - DNA, 74 bp, Homo sapiens
cccaggcatttggagggtttctcatttggcctgaatttacatagtacatgacgaagttaaggataaagcttttg

SEQ ID NO: 574973 - DNA, 100 bp, Homo sapiens
gcagacgacgacagaaccctgtacaatttgatagtcattcgtaatcagcaggccaaagactcagagggtctttacggaataaaggatgatgtcttcctta

SEQ ID NO: 574974 - DNA, 75 bp, Homo sapiens
ctcccgcagccagagggctggagcctgctcagaggtgctttgaagttttaaagcccatctgggagcagttacctg

SEQ ID NO: 574975 - DNA, 101 bp, Homo sapiens
acgggctgggcgcccccagaagcccgggaacaaacgatgtgatcttcgtggtggaaagctaaattttaaaaccaccccaatggatgcagacagtgatgttg

SEQ ID NO: 574976 - DNA, 100 bp, Homo sapiens
ccccacaggaggccaggttggaaagtgagatggaagattttcgaggtatagcagaagaatcatttccaagctttctcaccaattcattatttggtaacag

SEQ ID NO: 574977 - DNA, 99 bp, Homo sapiens
ctgcgttatagcggccgtgagcctggttggtttacacaacattggacagacctgctgccttaactccttgattcaggtgttcgtaatgaatgtggactt

SEQ ID NO: 574978 - DNA, 75 bp, Homo sapiens
gactgtaatcaggttgtcaaaccgcaggcatttcaatcacattatggtctcctcctacctggatctcattacttg

SEQ ID NO: 574979 - DNA, 100 bp, Homo sapiens
aaagaatcttttatggggggctaattcagcttagagaactatcaacacaggacaatgcaagcccatgagctgttccggtattttcgaatgccagagctgg

SEQ ID NO: 574980 - DNA, 88 bp, Homo sapiens
agtttcagcgtcgaaagtggccagaaatgaagagaccttcttccaaatcacttttacaggctggtaacctacatctttgtctacgaga

SEQ ID NO: 574981 - DNA, 75 bp, Homo sapiens
gcccgactgccatcgcccggcccggccgcgcccgcggaaccagaccaggtgtcgtgaaaactacccctaaaagcc

SEQ ID NO: 574982 - DNA, 50 bp, Homo sapiens
ggaaaacgttcgtcaacatcacggtcccgcagcccccggaagccaataga

SEQ ID NO: 574983 - DNA, 119 bp, Homo sapiens
cgagctggataaatattccgaggacctgaaggacgcgcaggagaagctggagctcacggagaagaaggcctccgacgttgctccttgagggcaggacagttcttatggctttatccgtt

SEQ ID NO: 574984 - DNA, 74 bp, Homo sapiens
ccaactctgaggagtccactgcagcagttctgtcaggccaagcagaaggcagccttgctggagctgctgcatga

SEQ ID NO: 574985 - DNA, 100 bp, Homo sapiens
ccttccccgacggcttctggcggccaagtggatgtggcgggtgatcgagccaccctgcccaggggcgcccagcactgctgccttcctatttcaaggaaag

SEQ ID NO: 574986 - DNA, 100 bp, Homo sapiens
ggctgccctgagctggcagtacctgaccactctctcccaggtgacctcaaagcagaagctctgaattcacctctcatctgacgactgacagctgctgcca

SEQ ID NO: 574987 - DNA, 75 bp, Homo sapiens
caatgatcttttcaatgctgcgaaagctgccaaaagtgacatgcaggggcattgacgttgtgaggaataaaatta

SEQ ID NO: 574988 - DNA, 100 bp, Homo sapiens
cagaaataccagtccccagtgagggtgtacaaatacccctttgaattaattatggctatggcccactgcgtgaccttggttcagctgtccatttcctgtg

SEQ ID NO: 574989 - DNA, 100 bp, Homo sapiens
tctggctggcagagcaacgggtgcccctgagtgtgcaactgaagcctgaggtctccccaacgcaggacatcaggtcagcagatccggaagctcatcaaag

SEQ ID NO: 574990 - DNA, 88 bp, Homo sapiens
ccttaagtgaaagaagtggaaacacccctaactctcccagatttaggcctattaaaggaaggcaggaagaactaaaggaagtaattga

SEQ ID NO: 574991 - DNA, 75 bp, Homo sapiens
agcctgtggcattccagcgattcctcattgctcaaggacgcatcttctctccagactgccgatcccagaaagcca

SEQ ID NO: 574992 - DNA, 75 bp, Homo sapiens
gttcagccctttgatgaccgcagcaggttactaaaaaaagggttgcaaacaaaaagaactttgagaataaggaag

SEQ ID NO: 574993 - DNA, 82 bp, Homo sapiens
caagcactgtgatcttcaaatatcagttggccttatttcctcagtggaaatctactcactatgatgtggtagttggcgtgtt

SEQ ID NO: 574994 - DNA, 75 bp, Homo sapiens
agtgacatggagaccctgaaggctgacaaagccaggcagcttcacacgtttctagtgatggaacttctgaatgga

SEQ ID NO: 574995 - DNA, 50 bp, Homo sapiens
cataagggcttgcagcccagttgacccggaagaaaacaggcagattttgg

SEQ ID NO: 574996 - DNA, 100 bp, Homo sapiens
taccagcgttgagtcccctgtaaagcgggccaatccgagcctacatccttgcccacaaggatgccatccagctctggaggacgctcatgggacccaccag

SEQ ID NO: 574997 - DNA, 100 bp, Homo sapiens
ctgcatgagacccagggtcctggtccaagaatgcctcaggatggatcagatgacgaggacgaggagtggcccaccctggagaaggctgccacaatgacag

SEQ ID NO: 574998 - DNA, 75 bp, Homo sapiens
gatggggaagatgagatgtcagaagctaaggacaatggcagtagagatgaggcatagaatgtcaagctaaccagg

SEQ ID NO: 574999 - DNA, 100 bp, Homo sapiens
ccttttgtccctttgcctcatcccaggttgccttggaaaatgccaacgccgtgtctgaagagataattgacgaccttgccaacctagtggagaacacaga

SEQ ID NO: 575000 - DNA, 90 bp, Homo sapiens
ggactgttggtctcggccctgcggaaggtttgagaaatttctgtggttcattagctcagagaactatctaattataggtggacgagatca

SEQ ID NO: 575001 - DNA, 100 bp, Homo sapiens
ttcgctaacgcctcccggctctcgtcagcctcccgccggccgtctccttaacaccgaacaccaggcaaatttctggagatgtgcaatgatctcttagcta

SEQ ID NO: 575002 - DNA, 100 bp, Homo sapiens
aggccccacccctgccattctagaatctctcatcaggtcgtgttttcgcctggggcatgggcaccaactaccagctgggcacagggcaggatgaggacgc

SEQ ID NO: 575003 - DNA, 83 bp, Homo sapiens
tcacctacactaccacggccacactcaccactccatggccacacagatgcctgtgaggagccaccaacatttgaagctatgga

SEQ ID NO: 575004 - DNA, 100 bp, Homo sapiens
gtccaaagggtgatgccggtgcacctggagctccaggaggcaagggtgaacctggtgtggttggtgctgtgggcactgctggtccatctggtcctagtgg

SEQ ID NO: 575005 - DNA, 50 bp, Homo sapiens
ctaccactccctggcattatcaaaaggtggtgagctttttgcctggggac

SEQ ID NO: 575006 - DNA, 100 bp, Homo sapiens
ctctctaccagggcctgctctccaacttccctgacatcatccatctacaaaaagctgcagcatatcgtgagtgatgagatctgtgtgcaggtgactgacc

SEQ ID NO: 575007 - DNA, 78 bp, Homo sapiens
aaaagtaaacagctgaaggatgaaggagccagtttggctgaaaataaaagggcaagtgtccagagaatggctgggatg

SEQ ID NO: 575008 - DNA, 100 bp, Homo sapiens
ctgagcaggagtcgtccgcttatagtggaggctgctaggagccggtcagaggtgccggtggtggtgtgcacattgagccccggtatagacagttccccca

SEQ ID NO: 575009 - DNA, 51 bp, Homo sapiens
cgctcccagagcagctgcggccaggagaggagttcattacttcggaagtgg

SEQ ID NO: 575010 - DNA, 100 bp, Homo sapiens
aaacaaggcatctcctagtattgcatcctacagatgtgctgtaaacatcaaaagaagacggtgggatcaggagatgatgtcctaaacgatgctatatttg

SEQ ID NO: 575011 - DNA, 100 bp, Homo sapiens
tggatggacttgaaccaccaactcagcttagaaggaagccaagacttaaagtttcctagatcccagcttgtcatggcaaaaccccaaaagatgccgcgtc

SEQ ID NO: 575012 - DNA, 75 bp, Homo sapiens
tcaaggtggcctaccaggaggccaggggtgtcgccatggcctgaagaagtcagtgatttatagttcactaaaact

SEQ ID NO: 575013 - DNA, 100 bp, Homo sapiens
gcccccttaccagggtgggcctcctcgacctccgatgggaatgagacctcctgtaatgtcgcaagattgaagaagagatgttggctttgcagaatgagcg

SEQ ID NO: 575014 - DNA, 100 bp, Homo sapiens
cacgggcaaggcggagagtgacggagtcggcgagcccccgcggcgacaggatctatcttgggatcccatggctttctttactgggctctggggccccttc

SEQ ID NO: 575015 - DNA, 87 bp, Homo sapiens
aaaatgctactgtgcacccaggcctggagttgccatgtgacctacggctccttcgactacacctcgctgctgtacctctccaactac

SEQ ID NO: 575016 - DNA, 100 bp, Homo sapiens
gctgctcctgctgctcatcccggtggccgccgcgcaggagcctcccggagctgctgcatcttcctcccgtgaggctggccgagctccacgctgatctgaa

SEQ ID NO: 575017 - DNA, 100 bp, Homo sapiens
cagctatcccctgaggcccgacccagaatcaccacgacagcagcatgcatgatggacctcaggagataccccctggacgagcagaactgcactctggaaa

SEQ ID NO: 575018 - DNA, 83 bp, Homo sapiens
cccaagtctccgccggaccctcctttggatattcctcgtgtctccgattctgaggtgatggcatcagctgagaagggaaggaa

SEQ ID NO: 575019 - DNA, 89 bp, Homo sapiens
aacatggctagcaggaatgcttactgttgcgtggttcgttattaacagatcagtcgcatcgaatacattcattcaaagaacttcatcca

SEQ ID NO: 575020 - DNA, 98 bp, Homo sapiens
aaactggagaaactcggagtgtactccgcctgcaaggtatcagaagagcaaggtcaagaaaacccagcagaccacgatcctattcatgatcaaagctg

SEQ ID NO: 575021 - DNA, 100 bp, Homo sapiens
aaaaggggcagcagcggcagctccgcggcggcgtctgcccagggcagggctcctaaggaaggacccgcctttaggatctaagcattgaagaacagtcaga

SEQ ID NO: 575022 - DNA, 90 bp, Homo sapiens
gaagctggccgagcaggctgagcgatacgacgcgccatcatgaccgggtcctataacaacttcttcaggatgtttgatagagacacgcgg

SEQ ID NO: 575023 - DNA, 82 bp, Homo sapiens
aaaaattaatcaacagagtgggacctaatggtgagagggtcaaaaattgcatgttcaaacaaaaggaggcaaagtgatctgt

SEQ ID NO: 575024 - DNA, 100 bp, Homo sapiens
agcttagtggaaatttacagacatgtaggagaacgtgtgagggcagatctcagtaaaaaaggattgccacagtcccgatagccgcaatggctgaaaatgg

SEQ ID NO: 575025 - DNA, 100 bp, Homo sapiens
gataagcaaccagcatttagagctgtttatgaagcactgagaaatgtgtttaaaattatccaactgccatagagctaaattcttttttggaaaattgaac

SEQ ID NO: 575026 - DNA, 75 bp, Homo sapiens
aggggttcagactgctattgaaggaaattctttggggcttctcaataggtttggcatggacaagatctatgaagg

SEQ ID NO: 575027 - DNA, 90 bp, Homo sapiens
atctacgtgtgctttttcaagggagctgataaagaacttcttcccaaaatggaggctgacccgcggctgattgagtccctctcccagatg

SEQ ID NO: 575028 - DNA, 96 bp, Homo sapiens
gtgagaaaagcgagcctcttctgataactcaggatttacttgaaacaaaaggagaccctaatcttcagattacatgcagcaaactggaggtcaagc

SEQ ID NO: 575029 - DNA, 98 bp, Homo sapiens
tccagactcggtgctgtacccgccaaattccgggtagatatgcctggctcaggcagtgcattcatccccaccatcaacgccatcacgaccagccagga

SEQ ID NO: 575030 - DNA, 100 bp, Homo sapiens
gaagaatgttcttttgttagtgacaaagatgcaagcctggcattttttgatgattgtgtagataaaggaatgacagaggaagaggaagacaaacttctgg

SEQ ID NO: 575031 - DNA, 101 bp, Homo sapiens
caggtgcttgccactatgcccaactaacatttggaattttcgtatacgtggattctagaggggtgacagcgaaactaacaatttggacaagacagcaaatg

SEQ ID NO: 575032 - DNA, 100 bp, Homo sapiens
gttccagaagaaaagccaaaagaattacctgaatggagtgaaaaagtggctcacaacattttgtcagaaactatgttccaacttcctgtcaacaatcttg

SEQ ID NO: 575033 - DNA, 100 bp, Homo sapiens
cgagccgcaggagagacacgctgggccgaccccagagcggcgctggacagacaatgcagatcttcgtgaagactctgactggtaagaccatcaccctcga

SEQ ID NO: 575034 - DNA, 95 bp, Homo sapiens
ctgtctggagcaaggaaaagatccctggaatatgaagagacacagtatggtagccacacccccagagtggcagaatttagtgacatttggaagct

SEQ ID NO: 575035 - DNA, 90 bp, Homo sapiens
caggatttacttgaaacaaaaggagaccctaatcttcaggaaagaccacagcaagattctttcattcgtctcctcctagcctgggggacc

SEQ ID NO: 575036 - DNA, 74 bp, Homo sapiens
aactggttaatagtggcatggaagatccatttggtatcatgaactgatcactaaatatgggaagttggagcctt

SEQ ID NO: 575037 - DNA, 101 bp, Homo sapiens
cgggacaaagtgacagccacgggacaccatgtggcggatctttactggatcgctgctggtagaggagaagtcaagtgcccttctgcatgaccttcgagaga

SEQ ID NO: 575038 - DNA, 74 bp, Homo sapiens
cgacataggaaaaaaactcgggcagaacggtctggataatggatccagacatttaatgtggatgcaccatgcca

SEQ ID NO: 575039 - DNA, 90 bp, Homo sapiens
cagtcttctatgtttccacatcggtcagaaaaagattgggtaattccagaattgattggccataccattgtcactgtattactgctcatg

SEQ ID NO: 575040 - DNA, 50 bp, Homo sapiens
ggaagttgtgttgtcagagaataaggttgctacgatttctgcaaacggag

SEQ ID NO: 575041 - DNA, 80 bp, Homo sapiens
cgcagtgaggccaacgccgtgttcgacatcctggccgtgctgcaggttaatttggagtggcccctggagtcagtttccta

SEQ ID NO: 575042 - DNA, 100 bp, Homo sapiens
gggcctcctccaccgaggaggtgaatacacctctgattttaatcagttctgcgtttgaaaggaaacccgtgaaactggaacgccaagctgaagaagaacg

SEQ ID NO: 575043 - DNA, 75 bp, Homo sapiens
tccattgcagccatccctggccgctgcaccacctcgtgagcgatgacgtctgcctgaaggtggtggagctctacc

SEQ ID NO: 575044 - DNA, 75 bp, Homo sapiens
tgtcaggcggagagacccgccgccaggtacttcgtactggatttcgaggctggcatcctgcagtattttgtgaat

SEQ ID NO: 575045 - DNA, 82 bp, Homo sapiens
agctaatgagcgagtaaaggatgccagcaagaagtcgagaacttcaaaaaggtcaatatgatcagccgggagcagtttgaca

SEQ ID NO: 575046 - DNA, 121 bp, Homo sapiens
gttggaaacttgggctgagtaccgcggcgggcgcgagcgaggcgccctagacatcttctccctcccttgcctcaggtattcaagataaactggactacatcacagctttaaatataaaaac

SEQ ID NO: 575047 - DNA, 75 bp, Homo sapiens
acgtgcggtgctcgtcgggagtgatcacctaccctacagggcacttgatgacattagtgaaagcatcaaagagct

SEQ ID NO: 575048 - DNA, 100 bp, Homo sapiens
tgctgaattttactggcacaattcctgtgatgtatcagggtgatccagatcatggttggattgatgcacattggttttggaattgttttgtgtttaatat

SEQ ID NO: 575049 - DNA, 75 bp, Homo sapiens
gtttccaaagctgtgtgctcaacctacttacagtcacgttactacagtatgaagtgtaacagaacagactttacc

SEQ ID NO: 575050 - DNA, 100 bp, Homo sapiens
aggactacagtaaggctgaaatcattgaagtgcttggagtgcagaactgaaagaggacagcaatatgccacactttcaaactttgcaagctattgtttct

SEQ ID NO: 575051 - DNA, 82 bp, Homo sapiens
aaggaagcaagcagttcagaagagccaaggaataaacatgcaatgaacccaaaagggtctatcagtcttggaaatctgtctt

SEQ ID NO: 575052 - DNA, 75 bp, Homo sapiens
gtaagcgcagaaagcaggcgaacccgcggcgcaataacgcctcttctgaaacagtctccctggagcaaccatcag

SEQ ID NO: 575053 - DNA, 75 bp, Homo sapiens
agcagaaaatagcagccaggaaccaagaaaacttgcacttgtgttctgattagtggccaaataaatgacagtcag

SEQ ID NO: 575054 - DNA, 73 bp, Homo sapiens
cgaaaacatgaccgctgagcccatgagtgtactaatggtcacttgatgtgcgctggctgttttatccacctac

SEQ ID NO: 575055 - DNA, 51 bp, Homo sapiens
tactgggacatgagcaaccaggatgtgatcaatgccattgaacaggactac

SEQ ID NO: 575056 - DNA, 88 bp, Homo sapiens
actcacttttatggtggcaagaagccagcacctacaggacttgggctgcttcaggctgaacgctgggagaccacttcctgtgctgaca

SEQ ID NO: 575057 - DNA, 83 bp, Homo sapiens
gtctgctgctattctccgagcttcgcaatgctcaccatggatgatgatatcgccgcgctcgtcgtcgacaacggctccggcat

SEQ ID NO: 575058 - DNA, 87 bp, Homo sapiens
gggtggcatggcggagaaggatgacaccggagtttgacgaagaggtggtttttgagggaagtgcctcctgtattgcaatggtgtcct

SEQ ID NO: 575059 - DNA, 75 bp, Homo sapiens
gcaaagcaagcgagaagtcgcgggcccagcccacagcaggatcttcttggaaacagaattgttctacaaaggtat

SEQ ID NO: 575060 - DNA, 75 bp, Homo sapiens
aaaaacaaaattctgaactcaggacttggcaagggatcatcgtcttgctcttcttttatctcagtttgtgggtag

SEQ ID NO: 575061 - DNA, 76 bp, Homo sapiens
agaggataccttggtcccagagtcatcatgaaggtgctggagaatctggtaaaagcaccattgtgaagcagatgag

SEQ ID NO: 575062 - DNA, 100 bp, Homo sapiens
aaggaaagccacgcaagttggggagaaaacccccaaggatgaatctgccaatcaggaggagcaatctcagaactgttatgaagaccttcgaagttcttca

SEQ ID NO: 575063 - DNA, 100 bp, Homo sapiens
agttaatcctcaatttaagcctgatctaacccctagaaacagggtgataaaagaaaatgtggctgaagttacccgaagttcagcttgcagtgtaattcag

SEQ ID NO: 575064 - DNA, 98 bp, Homo sapiens
tcgagacctgcggcgggtgctcatcctggacaattcacctgcctcctatgtcttccatccagacaatgctaaactggcagacctttcacttcgtatcc

SEQ ID NO: 575065 - DNA, 50 bp, Homo sapiens
cggccctctcccagcactgctacgcagccaatgccgagttctgcccagct

SEQ ID NO: 575066 - DNA, 83 bp, Homo sapiens
cggcagaccagaacctgaagttcatcgaccccttctgcagaattgctgcccggaccaaggagaagcggggagaggtggtgaga

SEQ ID NO: 575067 - DNA, 82 bp, Homo sapiens
agtcgcgaaagtgggccagaggttctgcgacaccacctcggtggacatcctcatcatggatgatgacgacgtccccagctgg

SEQ ID NO: 575068 - DNA, 100 bp, Homo sapiens
ctcttacaacaagagtcctcaatccaacagcccagtgcttctgtctcgactgcactttgagaagggactggtgattgcagctggaagtgcccatgaccga

SEQ ID NO: 575069 - DNA, 98 bp, Homo sapiens
tttgaaacctcgtcattaattggacacagtgccagagtgtatgcactttactacaaagatggacttctctgtacagctgtgatgcagatccatccgcc

SEQ ID NO: 575070 - DNA, 78 bp, Homo sapiens
cttgaggttcacagatgatacgtttgatccagaacttgcagcaacaataggaagcagtcaattatagatttcttcaaa

SEQ ID NO: 575071 - DNA, 74 bp, Homo sapiens
aaggaaaaactggagagcttcatcaaaaatagtgatagctttgataagtccaagtgtgcctgccatcaactaac

SEQ ID NO: 575072 - DNA, 98 bp, Homo sapiens
ccggtctgggagttgggggcaaggagaagatcctgattactatgacatggaatccatggtccatgcagacacaagatcatttattctgaagaagccaa

SEQ ID NO: 575073 - DNA, 99 bp, Homo sapiens
ctcgaatgggttcatctagcatgccagggggcagtacgcccgtcagcagcgccaatatgatgtcagacaagaggcggtcaggaaggaggaaaacacacg

SEQ ID NO: 575074 - DNA, 99 bp, Homo sapiens
agtcgcgggagcagttggggactcaatgtgtgggcaacaaggttgaaatcacaaagattagacacctttttagataggtgttcttcagcaccactgaca

SEQ ID NO: 575075 - DNA, 74 bp, Homo sapiens
agaaattgctgaagaactcgcaagctcctacgaaagaaagctcatcgaggcatcctctggtatcacgattccaa

SEQ ID NO: 575076 - DNA, 100 bp, Homo sapiens
ctggttcttcagagagtcctgctagtctaaagcgagtagcctctccagcagccaagccggtcgtttcgggagaagaatcattgaaaaatggctctgctac

SEQ ID NO: 575077 - DNA, 88 bp, Homo sapiens
cggaagaaaagttcaatctggaaacatcaatgctgccaagatatgtgcagcgggggctacagcgagtggggctagatccccagctgcc

SEQ ID NO: 575078 - DNA, 98 bp, Homo sapiens
caacaatagccccattacaacttcgatgtttttgaagcaggcatttgaaggagaataccctaaattattacgtctttataatgacttatggaagcgtc

SEQ ID NO: 575079 - DNA, 100 bp, Homo sapiens
gctgaatgtaccaaaatatggacagaaaaaataatgaaacaaactgaagtgttattgcagccaaatccaaaaattggagatattgctggtgttgctgatg

SEQ ID NO: 575080 - DNA, 82 bp, Homo sapiens
aatccccaaaacagtgcacagacggctgacggctcacactgcgcagttgtgtagcagttgagtaatgctggttagctgttaa

SEQ ID NO: 575081 - DNA, 88 bp, Homo sapiens
gctactggggctgctgaggctgcgaggaggaggaggaggaggagaaattccgggtagatatgcctggctcaggcagtgcattcatccc

SEQ ID NO: 575082 - DNA, 51 bp, Homo sapiens
ggactccgcgggccttcggcagtgattcgcctttgccagtctcatctcgtg

SEQ ID NO: 575083 - DNA, 93 bp, Homo sapiens
ccagaggcgcctcctccacaccccccgccgcagcagcaccggcgacaggcttgggcactgtttaaaggaaagttccgagaaggcatcgacaag

SEQ ID NO: 575084 - DNA, 100 bp, Homo sapiens
ggcgtccctggagcggccgccttccagcggtatgagtattatagaacaattagaccctgtatcttttagcaattacttgaagaaataccataatactata

SEQ ID NO: 575085 - DNA, 100 bp, Homo sapiens
aaaactaggaatctatgatgctgatggtgatggagattttgatgtggatgatgccaaagttttattagtggcccaccctcaggaccctcaccacccatca

SEQ ID NO: 575086 - DNA, 96 bp, Homo sapiens
gaacagcctatgtgggcttccacggagctttgtgtccctggtgatgttggaacattaatgatggaacatggccaaacttcagtcatgatcctgaag

SEQ ID NO: 575087 - DNA, 51 bp, Homo sapiens
cctcccaaagtgctgggataacagagctaaaaaagtccctgtacgccatct

SEQ ID NO: 575088 - DNA, 86 bp, Homo sapiens
cagaaatatgaccatgcagcgcaccatgaagctctaccgactgccagagggtgtccgcaatgttgccagtgtctgtctgcagattg

SEQ ID NO: 575089 - DNA, 75 bp, Homo sapiens
agcgccggttccttgcggtcaagatgctgcaaaacgtgactccccacaataaactggtcaaacaaatggatttta

SEQ ID NO: 575090 - DNA, 100 bp, Homo sapiens
ttcgctttgtttcactttccttttgtatgctactggccttttctacacttgtcaggagctctgtctaaacatcattccaacctttgcaaatcttatagac

SEQ ID NO: 575091 - DNA, 98 bp, Homo sapiens
ggcgctggacgtgctcctctccatggggttccccagagcccgcgcctctagaggacaaaatcccagtccttggcacaaactcaggaaatggaagccgg

SEQ ID NO: 575092 - DNA, 50 bp, Homo sapiens
tcggttcttctgacattcttaattacagttggctagagatttactacatc

SEQ ID NO: 575093 - DNA, 82 bp, Homo sapiens
aatatgtagcccttcccagtgaagagctctggtagctgaagaacatctcacagtggacgccagggtctattcctacgctcta

SEQ ID NO: 575094 - DNA, 75 bp, Homo sapiens
cagatgaagagggaggcctgagaggctgctgttctaactcgctcccaggtgccagcaaggtcaacctcgtgaaga

SEQ ID NO: 575095 - DNA, 100 bp, Homo sapiens
aagaggcgcaaacaagccaatcccaggaggaaaaacgatgtacattgaagatgtcagtttctacatgtgggaagtagacattgaaggctttatggtttac

SEQ ID NO: 575096 - DNA, 100 bp, Homo sapiens
gaaatggcagacgatctcggagacgagtggtgggagaaccagccgactggagcaggcagcagcccagatggagatcttataacaatttttgatagttctg

SEQ ID NO: 575097 - DNA, 75 bp, Homo sapiens
ggcctgccggcccccagaacaaggtctaattggtagctgcaccaattcaagctatgaagatatggggcgctcagc

SEQ ID NO: 575098 - DNA, 83 bp, Homo sapiens
tccagatgtgcgcattgacaccaggctcaacaaagctgtctgggccaaaggaataagttatctccagaagaagaagagaaaag

SEQ ID NO: 575099 - DNA, 127 bp, Homo sapiens
ccactacatcatcaacagcagcggcccgcgcccgccggtgccaccgtcgcccgcccagcctccgcccggaatggtcctcgtccgaagtgagaatgggcagttgttaatgattcctcagcaggccttg

SEQ ID NO: 575100 - DNA, 100 bp, Homo sapiens
acgctgtctgtggcggtcaccccagtacaggcggtgatcttgctgtattttcaggaccaagagacgtctcccacaacctgctccgggcgctggacgttgg

SEQ ID NO: 575101 - DNA, 75 bp, Homo sapiens
cccaccagagtgtggaacccgtggtcatgatgcacatgaacattcaagcaggactctggactgtcttcacactag

SEQ ID NO: 575102 - DNA, 75 bp, Homo sapiens
caggctacggatggatatgtcaggaatgtgattcttcatcttccaaggtaattgctctagcagatgcagtggagg

SEQ ID NO: 575103 - DNA, 100 bp, Homo sapiens
gatggagattttgatgtggatgatgccaaagttttattagatgccagcacgagccgccgcttcacgccgccttccaccgcgctgagcccaggcaagatga

SEQ ID NO: 575104 - DNA, 74 bp, Homo sapiens
tcttcgagtttaaccagcgcgacgagggcgccgccgcggccgccccagctccttcgagaactcatagaacggaa

SEQ ID NO: 575105 - DNA, 100 bp, Homo sapiens
ggagactagaggctggataccaaatagcagtggaaaccgtgggttgtcttctggcctcagagtatcccttatcagaaccttgggcccctgggccccttca

SEQ ID NO: 575106 - DNA, 100 bp, Homo sapiens
tgagcaagaaaagcctctgggagcagaagggaggctccaagacctcatcaacaattaaggtgtggatgaggtcaccattgtcaacattttgaccaaccgc

SEQ ID NO: 575107 - DNA, 100 bp, Homo sapiens
gagaaaggcccacctgtgtcctggttgagggtctccagggttctttggggcccgagagactctccaacatgtgccttctgaccatacaaatgaaacttcc

SEQ ID NO: 575108 - DNA, 100 bp, Homo sapiens
aagcgtatgcttttgtgcacactggtgacaactcaagagcaatcagtaccatctggattccggagtttgaatccacctttgacaattgtccgaaagacgt

SEQ ID NO: 575109 - DNA, 100 bp, Homo sapiens
cacaccaggctgtggttttcattgctttggcagagggaggtacagagtcgtggagtcgggacaggtgtacagagagaggcagaagtactgtaaggagtgg

SEQ ID NO: 575110 - DNA, 100 bp, Homo sapiens
agttcttacaacatggcagacattgacaacgatctagggcagccctgcagaggtacctgttctactgtaatcgctatatgaaccacatgcagagcctgcg

SEQ ID NO: 575111 - DNA, 100 bp, Homo sapiens
ccgggatcgtgaccgagaccgtgaccgagagcgtgaccgagagcgcgaatatcgtcatcgttagaagatgggacccaggtgagcccgggtgcccactact

SEQ ID NO: 575112 - DNA, 73 bp, Homo sapiens
cctcttccagcaggggggccgggagctcgacatctacaacaacctacggcagctgcaggtgggtgtggagttt

SEQ ID NO: 575113 - DNA, 80 bp, Homo sapiens
gaccagtctgggggcgctggcggcctgcgcagccacctcaagacaatgcagatcttcgtgaagactctgactggtaagac

SEQ ID NO: 575114 - DNA, 83 bp, Homo sapiens
gtggcaatcatcctgaatgaatttagagccaaactgtccaaggctttggcagctggagtgcagtggcgggatctcggctcact

SEQ ID NO: 575115 - DNA, 73 bp, Homo sapiens
ctggccaaagcctgcccagacggctcacctgtgcgggatggaacaaaagatgtcggactgaatatgaagttaa

SEQ ID NO: 575116 - DNA, 98 bp, Homo sapiens
gccctgtgactgcagccatggccacaggcttagctgttaacgggaaaggggaggagtggggccagttaaaagctccccatgccaaccgattcatcttc

SEQ ID NO: 575117 - DNA, 97 bp, Homo sapiens
ccctgctgcggagcagacgtgaaggtgtcgcccttgatctcaggatgctaccagggctttgttctcgggatcctcgcacctggagagtgaagacggg

SEQ ID NO: 575118 - DNA, 90 bp, Homo sapiens
gtagtcctgaagcatgtttattaactttggatccttggcgtggagtcttcctcccttctcccaagtctttctccgtgaacttttcctcct

SEQ ID NO: 575119 - DNA, 74 bp, Homo sapiens
cgctgctgggcacccacggagcctccggggctgaccagcatctcagacatgtcgaaaaagatgttttgatccct

SEQ ID NO: 575120 - DNA, 100 bp, Homo sapiens
ccacggtggagcagatcctggaggatgtgcggggtgcgccggcagaggatccagtgttcaccatcctggccccggaagggtgagaactctgtctcagtcg

SEQ ID NO: 575121 - DNA, 74 bp, Homo sapiens
cagttgcacatccccacatcaatgcactgccaatggttattctcgttcaagttaatccaggtgagactttcaca

SEQ ID NO: 575122 - DNA, 100 bp, Homo sapiens
gctgaggcgggcgttttcttggatgaattgcttgctttggagggcagcatctcatcacggcagttgctgaccatctatttaagctgaagacaacatcatg

SEQ ID NO: 575123 - DNA, 98 bp, Homo sapiens
tcagctcttcacagggggtagaacaagtggtactaggattatacattgtaagaggtgacaacgtgactcaagagtagccttcctcgaggacctgcctt

SEQ ID NO: 575124 - DNA, 82 bp, Homo sapiens
cttattcagagaaggaaggatcttctcatgcacagaggcaacaaatggcaactttctgagcttgaacatgacaagcagattt

SEQ ID NO: 575125 - DNA, 96 bp, Homo sapiens
gtctgcaaagtgtccccggcaagaagactgtgccctgtccacggtgcctcctgcatgtcctgctgccctgagctgtcccgagctaggtgacagcgt

SEQ ID NO: 575126 - DNA, 122 bp, Homo sapiens
ctctcgcgcgggtgtcgctgggctgtcggcctggaccttgcagccgcaatggagtacttcttgcaagcagagctgacaagcaacgtcttaaaaacaggcgtggtgcgctgctgcgtgggaca

SEQ ID NO: 575127 - DNA, 75 bp, Homo sapiens
cgcagaggcacgagagcatcccacggtggtacccagtcacctgtggccttgccgaagaactggaaaaagagaagt

SEQ ID NO: 575128 - DNA, 75 bp, Homo sapiens
ccgcaccccggggtcccaggaagggcggcccaggttctgggccggagaaggggcgacgttcgggcaccccccgaa

SEQ ID NO: 575129 - DNA, 90 bp, Homo sapiens
gaaatggccgaggagccggagccgcagtctctagtgatccctgaaaagttccagcatattttgcgagtactcaacaccaacatcgatggg

SEQ ID NO: 575130 - DNA, 100 bp, Homo sapiens
tcgtctgggcgaaccggcatcgcgaactggaggccgcactgcacagccaccaggagctggagttcctacgcgtggccaagaaggagaagctgcgggaggc

SEQ ID NO: 575131 - DNA, 90 bp, Homo sapiens
tggacaagttttggtggcacgcagcctggggactctgcctcgtgccgctgagcctggcgcagatcgatgacattaaagtatcagtaaatg

SEQ ID NO: 575132 - DNA, 75 bp, Homo sapiens
atgtgggtgtagagtctaaactcatccttaaaggggtcatactgctgctctctagagcgctctggtgtatggctg

SEQ ID NO: 575133 - DNA, 100 bp, Homo sapiens
tgtgtgcctggaaaggaattgttttggcctaggatcatccagctctagaggacaaaatcccagtccttggcacaaactcaggaaatggaagccggagtct

SEQ ID NO: 575134 - DNA, 100 bp, Homo sapiens
tgctagcaatgagctcccaaagccatccaggcagaggcagaggtgaatgtggtttctaccaaagaagttttgatgaagtagagggtgtttttggtcgagg

SEQ ID NO: 575135 - DNA, 90 bp, Homo sapiens
aagtgctcgggaagagggagagcaaacttggctcagcccatattggatacaaatgaccgatttctacgaaaaataaccatcgggcaggga

SEQ ID NO: 575136 - DNA, 83 bp, Homo sapiens
caccatggggaagcgggacaatcgggtggctcacagaacatttcctgcctgttgctcacactctgttgtccacagcatacccg

SEQ ID NO: 575137 - DNA, 101 bp, Homo sapiens
cacgaatatctggacagcatgttttttgaccgctttctccagtggaagtggttggaaaggaactctaatgaatcattgattgaccagcactattttaccag

SEQ ID NO: 575138 - DNA, 97 bp, Homo sapiens
agcagctccaagatgatttgatgaaggtcctgaacgagctctactcgctcaccatctgctacctggatatgctgatgaccagtgaggagcgccggaa

SEQ ID NO: 575139 - DNA, 83 bp, Homo sapiens
cacgcctggaacaaggaccgcaccccatacatcaagagagtgatcgcacacccatccttccataatatcaatttcaagcaagc

SEQ ID NO: 575140 - DNA, 100 bp, Homo sapiens
ttgccccggtgggccatcattggttggctcctgacaacgtgcacggatgtgggctctcttgatgagaagatgaagagcttggatgtgaatcaggactcgg

SEQ ID NO: 575141 - DNA, 88 bp, Homo sapiens
ctcagtgagacacaatttatcattgaataagtgttttaagaaagtggacaaagagaggagtcagatccgatcacataggacagtatgc

SEQ ID NO: 575142 - DNA, 100 bp, Homo sapiens
aaaaatgtgctgaaagatggtcccgcagctcaggatgggaaaattgcaccagtaccttctccaggcaaattccgttcccctgcagcaccatctcctttgg

SEQ ID NO: 575143 - DNA, 83 bp, Homo sapiens
cgagagacagaccccccccggaattctgagcaccaaaaggcgggcgctaatattgacacctgctcagaagaccagaggacccc

SEQ ID NO: 575144 - DNA, 87 bp, Homo sapiens
gtgtttttcctgttctttggaatgattctcttttttgacaaagcactactggctattggaaatgtgctgaagttagaattgaagcaa

SEQ ID NO: 575145 - DNA, 96 bp, Homo sapiens
actgggaggctgtggaggttggggcctccagccatgacagtgatgagaaagcaatggcaccagcatgatatcattgatcattcctcccaaagacca

SEQ ID NO: 575146 - DNA, 75 bp, Homo sapiens
agctggctatgcctatcggcgcatcttccaaaaattcctacagaggaagtaaaatctcttctggaagaactgagt

SEQ ID NO: 575147 - DNA, 75 bp, Homo sapiens
cctctgcattgctgatcttgtacttggattcagcaaggaaccttccggcggccatcgtgagaatcatgaagatga

SEQ ID NO: 575148 - DNA, 100 bp, Homo sapiens
ttttatgcaacgaggagatcctgggcaaggaccacacactcaagttcgtggttgtcactaggtggagattcaagccaaatatcatgcagcttcgtgacag

SEQ ID NO: 575149 - DNA, 83 bp, Homo sapiens
tattgctgcggctggtgcgtcgtcgctctagcctggagtactcgggtactttgagttcagtggctcaccccagcctcctggtt

SEQ ID NO: 575150 - DNA, 98 bp, Homo sapiens
gccagcatggccgtcccactgctggagttcctgtccagtgtggatgtggaagcagccaagcgggcagaagaggaattgctccttcatgacacgaggtg

SEQ ID NO: 575151 - DNA, 100 bp, Homo sapiens
ttcaagtagtggaaggagtacagggaagtctataagctttgcaacagaattacagagtatgatattggtgaaagacaacaagtgttagtaacagaagaat

SEQ ID NO: 575152 - DNA, 74 bp, Homo sapiens
tttcgttgggcacaacaggaacgggccattcacatgttaaactgcagcttgcagccatgttttgtatatcaaac

SEQ ID NO: 575153 - DNA, 97 bp, Homo sapiens
gcttcttcactgatgagagaatcttcatgctcttgagggccagccaagtctcgggatggtgaacgtactgtctattgcaacgtacacaagcatgaac

SEQ ID NO: 575154 - DNA, 101 bp, Homo sapiens
gaggttttccgagacaacaacggcaccgcggtgaaagaacttgtcctggacaacagtcggtcgaatgaaggcaaactcgaaggcctcacagatgaatttga

SEQ ID NO: 575155 - DNA, 48 bp, Homo sapiens
tttgcaggggagcctgagagccacagggtcccgggattcttgagctgt

SEQ ID NO: 575156 - DNA, 88 bp, Homo sapiens
cctcacctttgtcttcctggcaagcctccttgttctcattgaggcttttgaacacttgcagcaattagaattaataaagcccatggaa

SEQ ID NO: 575157 - DNA, 75 bp, Homo sapiens
ggggtcatcaccatggatgggacgctgcaggccctgcccgtggaccgggagcccgtggaccgggagccggtggtg

SEQ ID NO: 575158 - DNA, 98 bp, Homo sapiens
catcagtggttgtcccaatatccaagaagcagtagagggtgccatgcacattcagggtcttgctacgtacgttgcccaggttggaatgcagtggcgtg

SEQ ID NO: 575159 - DNA, 75 bp, Homo sapiens
gacaccttgttagatggaacctacaagcagaaactgccaagttttggaccttatctggaacagcgcaagaaaatc

SEQ ID NO: 575160 - DNA, 80 bp, Homo sapiens
cagcgctggacacccagcctccagaggactgattacggtgagcagcaacctcagctacgtcatcgagcccctccctgaca

SEQ ID NO: 575161 - DNA, 75 bp, Homo sapiens
cacgactgcctgggacctggccaagggctccacacaccaagaccaaggtccataattcagcagccaaatctttcc

SEQ ID NO: 575162 - DNA, 97 bp, Homo sapiens
tgctgctctgctgggacccgaggctgagccaagcaggtacaccaggggttggaaaaaccacactaggcaaagaacttgcgtcaaaatcaggactgaa

SEQ ID NO: 575163 - DNA, 99 bp, Homo sapiens
gatttcattactgtcttcagaaaactcatgatgatcctggccatgaatgaaaaggagaagaaggaagttgtggaagaggcagaaaatggaagagacgcc

SEQ ID NO: 575164 - DNA, 74 bp, Homo sapiens
gtcgacccccaggaaaggaaaaacccacaaacatgttcacaacgggcatggatgccctgcacagcgtaaagaag

SEQ ID NO: 575165 - DNA, 137 bp, Homo sapiens
ccgggttccaaacccctagccacgacatggaagaatttttgcaacgcgccaaatctaaactggtgatttcctaaaaactttggaagacccagatttgaatgtgagaagagtagccttggtcacatttaattcagcag

SEQ ID NO: 575166 - DNA, 101 bp, Homo sapiens
agcgagcccgaggcggagcccggctccccacagaagctcatccgcaaggtgtccacgtcgggtcagatccgacagaagaaggccttacgaccggatatggg

SEQ ID NO: 575167 - DNA, 101 bp, Homo sapiens
gaccctttgggttggcttcgtggctccacgacttactctctacccttggcagagcttacaagaccctatgaaaaaattagttgagaaagaagagaagaaga

SEQ ID NO: 575168 - DNA, 51 bp, Homo sapiens
ctccaattcaaaattgttttcagctaatgggtgatgattttgaaattgccc

SEQ ID NO: 575169 - DNA, 83 bp, Homo sapiens
gcctctcgcaatattgcaatataggggaaaagcagacaatgcagatcttcgtgaagactctgactggtaagaccatcaccctc

SEQ ID NO: 575170 - DNA, 83 bp, Homo sapiens
ctcgccagcttcctagacttcattacgaggagtctggcatggctcatgaatcagcagaggacttgtttcatttcaacgtaggg

SEQ ID NO: 575171 - DNA, 89 bp, Homo sapiens
tggaactgccggattccctggatcccctggtgctaagggtgaccgatctgaggactttggtgtgaatgaagacttggctgattcagatg

SEQ ID NO: 575172 - DNA, 99 bp, Homo sapiens
aaagaactccctcaagtttcatttgtgaagccttgcatccaagggtccttaagccgttgtcttcattgattcatcttcaggcaaattctaatccttggg

SEQ ID NO: 575173 - DNA, 82 bp, Homo sapiens
cttccctggtcgaacagttttttctaatggctattcaaggtctcagcaagaagcagctgccaaaaaattcttttgactacca

SEQ ID NO: 575174 - DNA, 82 bp, Homo sapiens
atctataaatactgaagtggtagcatgctctgttgattcacagtttacccatttggcctgcaacagccaactcagtttataa

SEQ ID NO: 575175 - DNA, 96 bp, Homo sapiens
gcgggaggaagcactgaaacaacacaaaaccctatctcaagaacttgttaacctccggggagagctagggttttggaaatttgcccatctgcatgg

SEQ ID NO: 575176 - DNA, 100 bp, Homo sapiens
atgcccaggccaagccttacgagaacatctctctctgccagggagtcgtcgcatggtggatgtcatggacgtgaacacacagaaaggcattgaaatgacc

SEQ ID NO: 575177 - DNA, 50 bp, Homo sapiens
cagccagcctagtgcccgaagtgaacatctatattggaaagcgactgagc

SEQ ID NO: 575178 - DNA, 74 bp, Homo sapiens
gatgaattaatgaaccttgacccacaccaaggtctggtccatcgaactcatatgtcatcctgtcgggtggataa

SEQ ID NO: 575179 - DNA, 75 bp, Homo sapiens
gaaggagagaaaatggcgtccacggtatgaccagtataagactccaatggagaacattgggctacaggactcact

SEQ ID NO: 575180 - DNA, 100 bp, Homo sapiens
cctccttgaagtatttggctgaggagttttcaatcccagtaatggacagctcaatgccgctgattggagagcatgtggaagaggacagacagctgatggc

SEQ ID NO: 575181 - DNA, 90 bp, Homo sapiens
gacccgggccgctcctggaggaggaggtgggagtgaaagagtttctagccaaagccaaagaagactttttgaaaaaatgggagaatccaa

SEQ ID NO: 575182 - DNA, 128 bp, Homo sapiens
aggaagaggaagtgagagcagcggcagccggcggtgcagcagccggccgacccagagtgtactccaaagattcaggtttactcacgtcatccagcagagaatggaaagtcaaatttcctgaattgcta

SEQ ID NO: 575183 - DNA, 98 bp, Homo sapiens
agcagtcaactcaaatgcaagtccaagaggaggaggaggcggaggtccaagcggaaagcattaaagggcagtatttaaagtcagttggcaagcagtgg

SEQ ID NO: 575184 - DNA, 97 bp, Homo sapiens
ttcaggagaccgtcgttgccttgtatttccagagaacaggagtacaaaccaccaggaacccgtaaacttcataacattcttggagtggaaacaggag

SEQ ID NO: 575185 - DNA, 75 bp, Homo sapiens
ggcttccaggcgcactaccgcgatgttcgcacacaagccatgtaccagatgatggatcaaggctttgtaggactt

SEQ ID NO: 575186 - DNA, 75 bp, Homo sapiens
ccaagctcatctctgagacccggaggaggttcgaagctgagtatgtgacaggcctgggcagtttttaaagggaag

SEQ ID NO: 575187 - DNA, 75 bp, Homo sapiens
aaatgagactccctcagatccagtgataattgacagtgagcaagaagaacccatcaggtgattgtcaggcctctg

SEQ ID NO: 575188 - DNA, 100 bp, Homo sapiens
ggtttagaaatggaaaaatgtgtgctgatccgcagtggccgggtgcccattgtgtccttggagtgtgtgtcctgcaaggcacaggccgtgtacgaagtga

SEQ ID NO: 575189 - DNA, 46 bp, Homo sapiens
aagaacttcaaccccacagtaggcttgctgtttgggctctctgaaa

SEQ ID NO: 575190 - DNA, 100 bp, Homo sapiens
agcgggcggagctgtgcgagagcctcctcacttggaatctgcaaaatggctgataatttggatgaatttattgaagagcaaaaagccagattggccgaag

SEQ ID NO: 575191 - DNA, 75 bp, Homo sapiens
ccaagctggagccccaccccgtgatacctcggtggtagatctactagtatccatgtgtaggtctgcgttggaatc

SEQ ID NO: 575192 - DNA, 100 bp, Homo sapiens
agctctgcagctcagccaatcagtgacatcattggctctcaaaattagagagatgtgtaattgtccaccactgtctaatccagaccctcgattactattc

SEQ ID NO: 575193 - DNA, 83 bp, Homo sapiens
tctcaaccttgtgggatgtgaaaactctgttactgaaggtatatcctgatcagcaaacccacaatatggacagaaagattaag

SEQ ID NO: 575194 - DNA, 90 bp, Homo sapiens
cttgcttgtcgatgtccctgccttcgcctgcctctctgcccttgtcctcatcaccggcaagcacgaggagcggcaggacgagcatggcta

SEQ ID NO: 575195 - DNA, 100 bp, Homo sapiens
gagctcctgggccacccctcctttcaggtcaagccctgggcgctgcctatggcacagccaagagcggtaccggcattgcggccatgtctgtcatgcggcc

SEQ ID NO: 575196 - DNA, 83 bp, Homo sapiens
cagtaaatacccactatttctccatcgatgaggagctggtctatgaaaaggtcttactgaagtaacacaaagcttaaaaatgg

SEQ ID NO: 575197 - DNA, 82 bp, Homo sapiens
ggtcggggatcggtcgcctgagaggttgcctgttcactctgatcgtagtattggaagttctggccaaggcaatcagacaaga

SEQ ID NO: 575198 - DNA, 83 bp, Homo sapiens
gccagtgtggaaaaccagtggtaaatgtcagctacaggccagcttatgaccaggaataatgtatttgtggccttggacatgag

SEQ ID NO: 575199 - DNA, 99 bp, Homo sapiens
ctcctcctccagacgctctcagcagacttgagtcctggtccttctgcagaggcctgagcagcggaatagaagatgaactcaactgaattcaccgaagat

SEQ ID NO: 575200 - DNA, 82 bp, Homo sapiens
taccagtatttaggaagctgtcctggctcagatggctcggtcatcacggaatgtggccccgtcccagagcaccacccgagac

SEQ ID NO: 575201 - DNA, 82 bp, Homo sapiens
atgataccatgaagagaagtttacaggccctctattgccaactgttaatttggtgccctggttgtcagatgttggaaagcag

SEQ ID NO: 575202 - DNA, 74 bp, Homo sapiens
gaggccgagaccgaaagcaagccccagacagaagggcaagaagtacaagcccctggacctgcggcctaagaaga

SEQ ID NO: 575203 - DNA, 98 bp, Homo sapiens
cccgatccgccagcaccacctgaggatccagaaaccgccccagcgatggaagaggatcaggagctggagaggttcaacctttgggaatgaagaacagc

SEQ ID NO: 575204 - DNA, 75 bp, Homo sapiens
gaaagaagtcattccttttttgaagctctaagcgaaagacatgaggcctcagcctgaaatgaggttgttttgagg

SEQ ID NO: 575205 - DNA, 90 bp, Homo sapiens
gaacttcttcagaattagaaaggagctgcttcccaataaggaaacaatattaataaggcagcggaaagaagaaatatgaatacggctcca

SEQ ID NO: 575206 - DNA, 90 bp, Homo sapiens
cggcctctgcaggcttgccgaagaagggaggtggcttctggcacagcagcttaattgaccggaacctcattgattattttgttcccttcc

SEQ ID NO: 575207 - DNA, 88 bp, Homo sapiens
tgagcccggaagcgcagaagctggaagatgagaatgtgcctactgctcctgatcctccaagtcaacatttacgtgggcatgggacagg

SEQ ID NO: 575208 - DNA, 75 bp, Homo sapiens
tcgctcggagcttcgctcggaagggtctttgttccctgcagccctcccacggcggtgcgtctttctacgtgaata

SEQ ID NO: 575209 - DNA, 100 bp, Homo sapiens
ctgagccggtgggtgagcggcggccacggcatcctgtgctgtgggggctacgaggaaagtgtgacagtgacagtgaccaggaagagaaggtaagaccccc

SEQ ID NO: 575210 - DNA, 100 bp, Homo sapiens
acgaggccagaaggctagaagaatcagacgtgctccaggaggccagaaggaaatacctggtcagtgagaaggtcggaggggccgaggggaccaagctgga

SEQ ID NO: 575211 - DNA, 75 bp, Homo sapiens
aagaatctgcaggacttggtccgcggcatccgtaaccacaaggaggacgagactctgatgccagtatggactgga

SEQ ID NO: 575212 - DNA, 100 bp, Homo sapiens
tacatctgaaagccgggaaatgggagtcctgacctgggggctgtggagctgcgcatcgaagagctgcggcaccacttccgagtggagcacgcggtggccg

SEQ ID NO: 575213 - DNA, 100 bp, Homo sapiens
taaatgttttcagaaagtggaaagaagccatggcaagagtcaacctatttgatttcttgacaagaccacaatctgatcccaaagatgtgctccacaaatc

SEQ ID NO: 575214 - DNA, 87 bp, Homo sapiens
cctgcccgagcaagagcctggagctgcgcaagtgctccagacccagttcctggacctgccctggaaaagaagtatcccgtagagatg

SEQ ID NO: 575215 - DNA, 104 bp, Homo sapiens
ggaagtggtttggacatgcacaccaaaccctgggttagagcaagaggctgacccgcggctgattgagtccctctcccagatgctgtccatgggcttctctgatg

SEQ ID NO: 575216 - DNA, 100 bp, Homo sapiens
tataggtgactatgcagcctgcaattcaacatgtgcagtctttgccaacaaaaaaaattaccaagaaacctattccagatgagcacctcattctaaagac

SEQ ID NO: 575217 - DNA, 119 bp, Homo sapiens
ctttccacttcctaagggaagaaaagatttggatgatgaagacagcaatccaaagggaagggaattcagctggccactgcggttccccagacccgattgtgaacggtcacattagtgga

SEQ ID NO: 575218 - DNA, 100 bp, Homo sapiens
tcagtacgccacaagcgacacaaatgaacacgccttctcagccccgccagacacctagctcccctgtttgacaaccctaagttggataaggagctgcggg

SEQ ID NO: 575219 - DNA, 98 bp, Homo sapiens
gttacgcagcaaaccatccagaagtcaagttcagcagctgtgtggggaccaaggggacacaatatgagaccaacagcatggacttcaaagttggggca

SEQ ID NO: 575220 - DNA, 80 bp, Homo sapiens
tctccagtggactgccaagtcaccggcatgcccaagagaatcgtaaatgcaaaaattgcttgccttgacttcagcctgca

SEQ ID NO: 575221 - DNA, 80 bp, Homo sapiens
acaaaagagtctttggaggatgcggctttgatgggacatggatttgattgacatactttggaggcaagatatagatcttg

SEQ ID NO: 575222 - DNA, 100 bp, Homo sapiens
cacagaaggactgggatgatacaccttttccacagggaattgagttgctgtcaccactgactaaagaagagaaaactgcggcagagcaattcaaatttca

SEQ ID NO: 575223 - DNA, 97 bp, Homo sapiens
gcaataatgaatcattagtatcggacacagaaaccaagcaaggatttggcacagacatcctatttcatggctaccaacaggttgttatcctgaccct

SEQ ID NO: 575224 - DNA, 82 bp, Homo sapiens
cccgcatctgcctccctgccccagcccatcctctctaaccaaggtgattgtctgacaagcagaggcatgagctgggtccagg

SEQ ID NO: 575225 - DNA, 75 bp, Homo sapiens
cagtttctggaagaagaagaagagcatgatcggcatgtccaccaaggcagggccgttgccgtctgcacccagacc

SEQ ID NO: 575226 - DNA, 88 bp, Homo sapiens
ggcctataattacaaaatggaacagatttcaaaaggacgtaatactccactgtgcgacagctggctgcataatgacttaaaagtggcc

SEQ ID NO: 575227 - DNA, 83 bp, Homo sapiens
gagctaaagcagcgtgcgttcagccctgggggtctcgctctgttactcaggctggagtgcagtggcacactgcagcctcaacc

SEQ ID NO: 575228 - DNA, 96 bp, Homo sapiens
gagagaaattcttctggtgatgctgattcagctcatactgatgaagtatttctggaagcccagattcagaatatgacaacctcacctatgtttatg

SEQ ID NO: 575229 - DNA, 84 bp, Homo sapiens
tgctcttcttggaaaaccagatccagaaactggaggagtcccgctcgaagctagacaatgcagatcttcgtgaagactctgact

SEQ ID NO: 575230 - DNA, 100 bp, Homo sapiens
agctgggctggatctcttatccatcacatggggttttaaatgcacagagagcaggatacaaggcagccatagttcacaatgttgattctgatgacctcat

SEQ ID NO: 575231 - DNA, 90 bp, Homo sapiens
gtgcgacgtggagatccgaaggaatgaaatccggatgctgaagaaggaagaagcaattccatggcctggaactttagcaattgttcattc

SEQ ID NO: 575232 - DNA, 101 bp, Homo sapiens
cacggagaaccattaatcatctctaagatggagtttcactcttgttgcccaggctggagtgcaatggcgtgacctcggctggctgcaaccttcacctcccg

SEQ ID NO: 575233 - DNA, 80 bp, Homo sapiens
gagagcaccatcagctggggtccgtcaccgacctttggggaactggggtgcgcggatgacctgaaaaaagccagaaagag

SEQ ID NO: 575234 - DNA, 98 bp, Homo sapiens
gaattctaatttgaaccatgtttggattgaagccgcctctgtattacttaccagtgcggcatcgtcctgggggcgctgctcttggtcttctgctcatg

SEQ ID NO: 575235 - DNA, 73 bp, Homo sapiens
tcggaggcgttcagctgcttcaagatgaaggaattatgtttcgcagaaaagtgtccccaaggaagtgccacca

SEQ ID NO: 575236 - DNA, 75 bp, Homo sapiens
cccctctgcgctgagcggcggccagccggcaggccatggtaggggaggagtgtgtaggtgccatcgtttgcaagt

SEQ ID NO: 575237 - DNA, 100 bp, Homo sapiens
tttaccgattacctctcagtagccatgctcatgatcggcgtgtttggatgtactttacaggaagccaccattcttcagagggcaatgaaggcacagaaat

SEQ ID NO: 575238 - DNA, 50 bp, Homo sapiens
gataacgcggccttgggctctggatccccctctgtgtgcctgagcgaagc

SEQ ID NO: 575239 - DNA, 100 bp, Homo sapiens
gattccatacactactaccctggtaatgatctccaccctgacctggaggagccatcctctctaggggtgtaaggtacaggtttgcagattccgccagcag

SEQ ID NO: 575240 - DNA, 83 bp, Homo sapiens
agaaagatggatttttgcatgagacgcttctggacaggtgtccctgctccaattcccgttttgtcagtgacacagactttgac

SEQ ID NO: 575241 - DNA, 75 bp, Homo sapiens
gcgactttcagaaacaatcacatgaagactaaagcatctgtcagaaaatccttcctatgactggatgagaagagt

SEQ ID NO: 575242 - DNA, 97 bp, Homo sapiens
gcctggtgaatcatgttcctcttgaacaggattccagacagcattggaaaagacatagaaaaggcttgccaatctatttatcctctccatgatgtct

SEQ ID NO: 575243 - DNA, 50 bp, Homo sapiens
gaaggaggagtggattaagtgcattaagcgcccagacaccatgtcacaac

SEQ ID NO: 575244 - DNA, 75 bp, Homo sapiens
cttcttccagagccaaggaggaagggttgtccgggcttacggagttcctatgctagtcagcatagtcagcttggg

SEQ ID NO: 575245 - DNA, 51 bp, Homo sapiens
ctcttctccactagtgcaatctgccgatataaagatgaagcgcagctgtat

SEQ ID NO: 575246 - DNA, 100 bp, Homo sapiens
ggaggccgtcggggagacgctgtggtgtgactggggcaggaccatcaggtacaaacccgtagtgctgatgaaccaatgacaacatttgttgtctgtaatg

SEQ ID NO: 575247 - DNA, 100 bp, Homo sapiens
acagagccacgtcatccgcggctacgtgggcaaccgggcggccacgttcccgctgcaggcttgtccagccggaagccctgagggcagctgttcccactgg

SEQ ID NO: 575248 - DNA, 73 bp, Homo sapiens
cccccggattagacagcaggatgacaagaagctccaccatgaggcgaggtggatggaggaagcgagctgaaaa

SEQ ID NO: 575249 - DNA, 75 bp, Homo sapiens
ttccacctctgcgtttttccctccagagcaaatcatggaggaagataaaaaacatggtgcactggtctcccttcg

SEQ ID NO: 575250 - DNA, 75 bp, Homo sapiens
cggcttccaggcgcactaccgcggatttttagactctgaggagcagttggagctaatccacattatggaaatgga

SEQ ID NO: 575251 - DNA, 87 bp, Homo sapiens
gggatcctacgtgcatgaagatggacgaggtcctgtacagcatcgccgagaaggaacaacttttcagcctaatagcaactcttatgt

SEQ ID NO: 575252 - DNA, 100 bp, Homo sapiens
ttcggactcctgatggcatgcctgtaaagaacttgcagttgaaggagtataacacagctcctctggtgcaagtgtggtagctattgacaacaaaatcgag

SEQ ID NO: 575253 - DNA, 100 bp, Homo sapiens
taaattctgtggatgatgttttctcacccagtcatggtggtgctttgcatatcagttgatgtatctcaagactataaccaagtagagaatgtcataaaac

SEQ ID NO: 575254 - DNA, 100 bp, Homo sapiens
ccggcacagctccgaccgcgaggacgacttctccgcagacaatgcagatcttcgtgaagactctgactggtaagaccatcaccctcgaggttgagcccag

SEQ ID NO: 575255 - DNA, 100 bp, Homo sapiens
aggcagtggtcagcgacccgcagtccatctgactcctgcttcccgggtgttgctcgtgcagatcgggagcggtgccgagaaaaatttccttactagatga

SEQ ID NO: 575256 - DNA, 100 bp, Homo sapiens
tggtctttagaattgggtcactggatttctgaggagccgttcgaactgtctcaccacttccctgcagctcccagccaaacttggaatgccacagtttttg

SEQ ID NO: 575257 - DNA, 101 bp, Homo sapiens
ctgcggccaggagctggttctggtggcggcggggccgcgggagctggcgcggggtccgccgggggaggcggaacctaaaggcagacccagaagagcttttt

SEQ ID NO: 575258 - DNA, 74 bp, Homo sapiens
ggagcacaaactctgcgcggacgacgaatgcagcaccctcttggaacagagatcatgatgacacggcatctact

SEQ ID NO: 575259 - DNA, 100 bp, Homo sapiens
ccgagatggctaagaagtccatgccaggaggtcgtctgcagtcaggcctccccatggccacccatggaccagtcggcattcacttcctcccttctgcggc

SEQ ID NO: 575260 - DNA, 100 bp, Homo sapiens
cgagagtggcttcatgctgatgaagaactgcatggagcgtgccaggaagatgtcgagcccgggcatcgacggcgaccccaagcctccatgcttgcctcga

SEQ ID NO: 575261 - DNA, 118 bp, Homo sapiens
ggctgtggggtttctcagataactgggcccctgcgctcaggaggccttcaccctctgctctgggaattcctcctgatcagcagagactgatctttgctggcaagcagctggaagatgg

SEQ ID NO: 575262 - DNA, 89 bp, Homo sapiens
cgagcgcgctcgctccggcgccggcctcgcctcctcgcagcagcgccatgccccagtggacaggaaagctaaggcctcagcgatgccgg

SEQ ID NO: 575263 - DNA, 100 bp, Homo sapiens
tgtgtttggagctgacgtgagcgaggttggtcatgtgctcgggaaagaccacagcaagattctttcattcgtctcctcctagcctgggggaccaggctcg

SEQ ID NO: 575264 - DNA, 75 bp, Homo sapiens
cagagaacttctttatccttcgaaggaagcctgtggagaacttgtctgtgtgtccagaggaggagtccatcatca

SEQ ID NO: 575265 - DNA, 99 bp, Homo sapiens
cagctgtaaagccttgggctcccttgcaggattcagaagtgtatttagcatctctaggttctaagctggtctatgtccatcaccttcttggagaaggag

SEQ ID NO: 575266 - DNA, 99 bp, Homo sapiens
gggaaagggagacggcgagacgcgcagcgccggcgcccgggagacccaggaggagcccgcagacttcagctacgggacggacgagtacgacggagaggg

SEQ ID NO: 575267 - DNA, 98 bp, Homo sapiens
cgcaagtacccgtccatcatagtcaactgcgtggaagagaaggcaattaagttggaatatgcaaggttggttaagttggcccaagaagacaccccacc

SEQ ID NO: 575268 - DNA, 90 bp, Homo sapiens
gaacaggagtaaagaatggctgttgaacatccacaaggcacctgcaagaaggtgacatttcaaaaggcccgggaatactctgtcaagacc

SEQ ID NO: 575269 - DNA, 90 bp, Homo sapiens
cagcagcactgtggaggccgtcctcgggctgaaatctctttaatgatggagggaagcaggcagacgcgagtgtctcggccatacaagatc

SEQ ID NO: 575270 - DNA, 87 bp, Homo sapiens
aactgaagtatctgcccctgtcaaatcattccagatcagacctattgtgaccgcctggtgcaggacacgcctttcctgacaggccat

SEQ ID NO: 575271 - DNA, 90 bp, Homo sapiens
tacaggaaaactccagtgattttcaatcaaacattgcatagacaaatttacatgtattggagaccagaccagaagcccttctgaattaag

SEQ ID NO: 575272 - DNA, 90 bp, Homo sapiens
cgctgacattaaggaccagccagaaaatgatatttgtcaggatacgaatcaggttctcttcaagtgctgccagggatctgaagaggtacc

SEQ ID NO: 575273 - DNA, 88 bp, Homo sapiens
gcgtttgctgccaccttctgcatcgtaggttctgcgttagacctgcatcttagcaatgtgaatattgcatccctagagaaggacctgg

SEQ ID NO: 575274 - DNA, 100 bp, Homo sapiens
aatataaactgcacttactggcatgctcaaggaatgggctattaagatcaagcgacgtgcctcagaggctttgcccgaattgcttcgtcctgtcaccccc

SEQ ID NO: 575275 - DNA, 80 bp, Homo sapiens
ggaaggtggcaagatggtgttggaaagcactatggtgtggcgtccaggtgatcccccaaacagcatgtgctcagccccag

SEQ ID NO: 575276 - DNA, 75 bp, Homo sapiens
cacacttctgatgacacctttattttaaaagctgatgttccaaggtcatggaaaatggaagatttgcaaaataca

SEQ ID NO: 575277 - DNA, 98 bp, Homo sapiens
ccgagacttggttccaggtgatacagtttgcctttctgttggggatagagttcctgctgacttacgcttgtttgagggtgagaatccttttgaaattc

SEQ ID NO: 575278 - DNA, 100 bp, Homo sapiens
agcatccgaccaccgaggctggagggggagaacacccagctacaggccaaatttgagcaccttaagagacttcaccaagaagagagaatgaagcttgaag

SEQ ID NO: 575279 - DNA, 100 bp, Homo sapiens
gtgaggattgcagccgtcaccagagggggagttgggcccttcagtgatccagtgaaaatatttatccctgcacacggtcctccccacacggccgctcaca

SEQ ID NO: 575280 - DNA, 74 bp, Homo sapiens
accaggggactccgaagaaaaggttcaggcccctcctgttgttgctgcaactccctcacccacagcagtacctg

SEQ ID NO: 575281 - DNA, 108 bp, Homo sapiens
catctacttgtgagtaatgtgggaggagatggagaagagattgaaagattctttaaattacatcagctttcaactgacaaaactgtgaaagtcttaaatatcttggag

SEQ ID NO: 575282 - DNA, 83 bp, Homo sapiens
cttcagagttctttgtggatggacttgattctgatgagagcaaagaagatgttgctatggaattggaaagagtgggagaagat

SEQ ID NO: 575283 - DNA, 98 bp, Homo sapiens
ctggaaccagctgctaagccagaagcgcgtgggcacccacgggtacatggctccggaggtcctgcagaagggcgtggcctacgacagcagtgccgact

SEQ ID NO: 575284 - DNA, 100 bp, Homo sapiens
gaaaacgaggacccaagaagcagaaggagaacaagccaggaaaaccccgaaaacgcaagaagcgtggtgtgggccgaagatatgctcatgtggtgttgag

SEQ ID NO: 575285 - DNA, 83 bp, Homo sapiens
caaccgattctgcctgtccaagcctggtggttatcactaggctaaaactggacaaagaccgcaaaaagatcctcgaacggaaa

SEQ ID NO: 575286 - DNA, 90 bp, Homo sapiens
gtgtgaccgatgtcatatgctaggccactatacagataaaatgaaatggtctccagtttggcactgcagatgtcactttattttaatacc

SEQ ID NO: 575287 - DNA, 124 bp, Homo sapiens
tcctgatatagatgccagtcataatagatttcgagacaacagtggccttctgatgaatactttaaagtcctatcattgatcggcctgagtctaatagctttggggacaggaggcatcaaaccct

SEQ ID NO: 575288 - DNA, 74 bp, Homo sapiens
caagttccaacaaaagaatgctgccgcagatccacagaccagcatggctgccactgctgctgtgagtcccagtg

SEQ ID NO: 575289 - DNA, 98 bp, Homo sapiens
aaaatcatggtaaaaagcagtgggatttggatgtgggatccggttccttggtgtcatccagccttagcaaaccagagttcacttcttcaactgagatg

SEQ ID NO: 575290 - DNA, 83 bp, Homo sapiens
agaaacttcagcaggcgatagcaatgcacagccaatttcatgctccactataggatcatgttctaattgagctcacccaggct

SEQ ID NO: 575291 - DNA, 100 bp, Homo sapiens
ccacctgctttgagaagagcaatgacattgggggcctgtggaaattttcagctgaactccagtgcacccagttagacttggagcggaaactcaagttgaa

SEQ ID NO: 575292 - DNA, 50 bp, Homo sapiens
tgaaactggccctgcacgtggagaagggatggaggccatcatgtcggagt

SEQ ID NO: 575293 - DNA, 100 bp, Homo sapiens
ataggttatgaagctaatcctggcgttccaccagcaaccatgagtggttccatgatgggaagtgacatgatgctgatggaaagttaagcgtgaaatttgg

SEQ ID NO: 575294 - DNA, 96 bp, Homo sapiens
gaaaaattggtttgcaagatgaaaggagaaggggttgaaattgttgatagaggtggaaattccctgaataaccttattgaactaaagacaatcaat

SEQ ID NO: 575295 - DNA, 100 bp, Homo sapiens
ctgcaggcagcaccggaggcccaggtctccgtgcagcccaacttccagcaggacaaggaacagatggagtcggataactgttcaggaggagatgatgact

SEQ ID NO: 575296 - DNA, 90 bp, Homo sapiens
gaggaaatcgcctcccgagaagaagttgaggcgctatgtttattacccagaactctttgtctgggtcagtcaagaaccatttccaaacaa

SEQ ID NO: 575297 - DNA, 74 bp, Homo sapiens
tgctgacagctttgtgagacagcaggaggcacatgccaaggaatttgctgacacaatatcttccgcctggtgct

SEQ ID NO: 575298 - DNA, 100 bp, Homo sapiens
agcagatcctggtcctcgatccgcccacagacctcaaattcaaaggtctcctctgagcctccggcctccataagacccaaaacagatgacacctcttccc

SEQ ID NO: 575299 - DNA, 98 bp, Homo sapiens
tttctcttgaccgtgcacaaactctcctactatgagtatgactttgaacgtggggaagaaggtagataatgactataatgcccttcgagaaagactca

SEQ ID NO: 575300 - DNA, 83 bp, Homo sapiens
ctccatgcgcagtcatgagtcgcttcaagtttatcgtaggtggcaagtgggagaaaccatcagaaattttggaaatcaaagga

SEQ ID NO: 575301 - DNA, 90 bp, Homo sapiens
cttcttcagaattagaaaggagctgcttcccaataaggaaacaagatcatgatgcagccgtccttttggatttctttttaataatgtgtg

SEQ ID NO: 575302 - DNA, 73 bp, Homo sapiens
tgtgcccagcactgcccggaagccatgatctgcgtcattgccaatccgttcagatcccaccaagcaccaccta

SEQ ID NO: 575303 - DNA, 50 bp, Homo sapiens
ccaggacgaaggccctactgggcaaggtgagtgtggctgtgaagtgcctg

SEQ ID NO: 575304 - DNA, 75 bp, Homo sapiens
tcccggcgacatactacctctggccccgagatcagaatgccggtgtcgtgaaaactacccctaaaagccaaaatg

SEQ ID NO: 575305 - DNA, 83 bp, Homo sapiens
gctacaacctatgactacaaagcagatgaaaagtggggcttttgtgaaagtcctaggcctacttacaagcctccagtctcaaa

SEQ ID NO: 575306 - DNA, 88 bp, Homo sapiens
ccttcgctaacgcctcccggctctcgtcagcctcccgccggccgtctccttaacaccgaacaccgtacatgtcccagagcaagcacac

SEQ ID NO: 575307 - DNA, 83 bp, Homo sapiens
gctctacaaggacggaggcgttgcgattattgaccagtggatctgcgcacacgccaggccctgggaggagcggggacactgag

SEQ ID NO: 575308 - DNA, 129 bp, Homo sapiens
ctagactgttgtgagaggctcagagaaagcagagggtgagatggatgagtccagcattctaagacgaagagggctccagcaaagctagagaagatttgctgaaaattcagaaagaacgtgattttcatc

SEQ ID NO: 575309 - DNA, 109 bp, Homo sapiens
cctgtttctacaccaagttcagaagatccagtagctggagatataaaagggtctccaactgaattccttgaagagaaaatggcctaccaggaatacccaaatagccaga

SEQ ID NO: 575310 - DNA, 98 bp, Homo sapiens
tggatacggagtacaaaaacggcccttggatgatggaggtcacgcaatatttaaactcacgtatctaagcaatcacgactataaacacctctactttg

SEQ ID NO: 575311 - DNA, 90 bp, Homo sapiens
ggacatggctgtgcggggccggctgctcactgccctggtgctccccgacctgctgacagaagccctgggggatgcggaggaagatgagga

SEQ ID NO: 575312 - DNA, 100 bp, Homo sapiens
ccagtacgtcattcacaacaacaagtgcatccctgagtgtccctccgggtacacgatgaattccagcaagttcgtgctggccgtgggcagcgccgtcttt

SEQ ID NO: 575313 - DNA, 90 bp, Homo sapiens
ggcagaggtggaggcgctttgaaagaacaaatttcaaggaatggtctttgacttcgtaaccagacaagtttttgacataagcatcatgat

SEQ ID NO: 575314 - DNA, 82 bp, Homo sapiens
aactcctatttgtttatggcaagactcgctctttactgagcgtgtttgaagaagatgctggcaccctcacagactataccaa

SEQ ID NO: 575315 - DNA, 90 bp, Homo sapiens
cggaagtgcagctgcctcagttcttagcgcagggtctcttgcaacgtgtgagctgcctcttgccaagagtgagtggcaaaagaaactaac

SEQ ID NO: 575316 - DNA, 99 bp, Homo sapiens
aaaactaaatgtggcaattgtaaggccatcgattgttggtgccagttggaaagaaccttttccaggagaggaatcaaatgagtctgcagaatctagcag

SEQ ID NO: 575317 - DNA, 100 bp, Homo sapiens
cggaaaagaaacccactcagggcaaccccctgccacctcagatatttaatggcgaccgatactgtggagtgaagtattacagacacttagcacctgatca

SEQ ID NO: 575318 - DNA, 100 bp, Homo sapiens
caaatgggtcgcatggattgattaacgtccatggccctacgctaccctatggccgtgggcctcaacaagggccacaaagtgaccaagaacgtgagcaagc

SEQ ID NO: 575319 - DNA, 75 bp, Homo sapiens
cccagaacaccccgcagaaagtgcctgtgcatcaggttggacgtgataagtatgagcctgcagctgtttcagaac

SEQ ID NO: 575320 - DNA, 75 bp, Homo sapiens
ggttgtgtggtcgcgtctcggaaaccggtagcgcttgcagcatgggttgacatgatgaacaatcggtttcggaag

SEQ ID NO: 575321 - DNA, 74 bp, Homo sapiens
aaagattgccctgtaaccgccatgcagaagaaatctggctatcatagttgcaccattactcagacttctaaaga

SEQ ID NO: 575322 - DNA, 50 bp, Homo sapiens
gctactaaaaagcagagcatttctgtgagatggaagattttcgaggtata

SEQ ID NO: 575323 - DNA, 82 bp, Homo sapiens
gaaaacagaaatcgaaacagatacagagatgtaagcccatataacgaaggaggcccaacttcattcaataaggagcctgacg

SEQ ID NO: 575324 - DNA, 74 bp, Homo sapiens
gaaaagccgttgagaggaccatcacaacctgagcagcacagacctgcctagagctggaacgttacctccagagc

SEQ ID NO: 575325 - DNA, 97 bp, Homo sapiens
aaatcaaaaatctggtgaaattgccggcaagagggagttaaggacattccaggcagaggcaagagctagggccatgagtaccttgtttttgactgga

SEQ ID NO: 575326 - DNA, 98 bp, Homo sapiens
gcagaactgggttctggactttgggcgtcccattgccatgttactccacaggatccgctgaacataggatgttgccacaaaatctacctcgtgtattt

SEQ ID NO: 575327 - DNA, 100 bp, Homo sapiens
cggcgacctcatccacgccatgccaggagtctactatgcaactgcatactggatgcctgctgaaaagacagtacaagtcaaaaatgtaatggacaagaat

SEQ ID NO: 575328 - DNA, 101 bp, Homo sapiens
ccgcgccccaccccgccagctccagagccacgtacggttcatgaaccatcgagctccagccaatggccgctacaagccaacttgctatgaacatgctgcta

SEQ ID NO: 575329 - DNA, 75 bp, Homo sapiens
gcttggcgtgtcccatgtttttgagtatatccgttctgagacatacaaataaaatgcactcggtgatggaaagag

SEQ ID NO: 575330 - DNA, 75 bp, Homo sapiens
accaagaacgtgagcaagcccaggcacagccgacgccgcggggcctccggtgtggctgtctctgatggtgtcatc

SEQ ID NO: 575331 - DNA, 144 bp, Homo sapiens
tacaagaggctggagatctacctggaacccttgaaggatgcaggtgatggtgttcgatacttgctcagattgtggtggtgccatgcagcaagaatcagagagatgcagagttagagccagaaggcctgacatggcactttatgt

SEQ ID NO: 575332 - DNA, 100 bp, Homo sapiens
ttcctgagtgtcaactatctgggggggacattcccagggtatgttagagcccaccaaggaaccactgaaaccactttctgctgcagaaaaaatagcttcc

SEQ ID NO: 575333 - DNA, 83 bp, Homo sapiens
agaagaaggctgctattgaaagagagtatgcacaggcactcttaaaagacccattttacatgggcttgtaccagaaacgagat

SEQ ID NO: 575334 - DNA, 100 bp, Homo sapiens
gtgactacaacatattgctgcaatcaggaccattgcaataaaatagaacttccaactactgctctttcgacgtgtagcagcagctttgccgggaatggaa

SEQ ID NO: 575335 - DNA, 100 bp, Homo sapiens
gtggtgctcaaaggccggccatgtaagatcgtcgagatgtctacttcgaagactggcaagcacggccacgccaagaaacctctgcgccatgagagccaag

SEQ ID NO: 575336 - DNA, 100 bp, Homo sapiens
acatactatccgtttgttcaggaaccaccagtgacagacctgtgggccaaagctgaccaactcccccaccgtcatcgtcatggtgggcctccccgcccgg

SEQ ID NO: 575337 - DNA, 51 bp, Homo sapiens
gttaaggattccaagtaactcttatttggttggcacagttaattatatgcc

SEQ ID NO: 575338 - DNA, 87 bp, Homo sapiens
gcaagtgcgcggttggggccactgcgaggccgttttaggtgatgaccccacaaggaagaggtactgttgcagccgctgcagctgctg

SEQ ID NO: 575339 - DNA, 100 bp, Homo sapiens
gaggcagatcctgccccgtggccgcggccgtctcgtagatgccagcttggagagtcacgtgagagcaagagagtagctttctggttgtcctggtgccctg

SEQ ID NO: 575340 - DNA, 83 bp, Homo sapiens
attcgcagagtcaatgatgaagagggcattaagactttcaagatattccatattctgattggtgtgagcagactatccataat

SEQ ID NO: 575341 - DNA, 75 bp, Homo sapiens
ttaccaccatccaccaaaaagtcagttgaagactgggatagtttccaagctattttggatcatacctacaaaatg

SEQ ID NO: 575342 - DNA, 75 bp, Homo sapiens
gcagcctcgaggtggagaagaaggacaagcttgcgacaccaaatcctactgcaagcgagtttattcctaaaggag

SEQ ID NO: 575343 - DNA, 95 bp, Homo sapiens
tgaaaagtcactatattatgccagttttttggaagtcttagttcgagatgtgtgtatttcatgctgctttgctggctctgcaagaaaatggacta

SEQ ID NO: 575344 - DNA, 82 bp, Homo sapiens
ctagttgagaagcagaacccagctgaaggactggaactgcaagcacatgttgaccagataactgaaatggcagcagtaatga

SEQ ID NO: 575345 - DNA, 73 bp, Homo sapiens
gccaccgtggacagcctgccactcatcacagagcgccatgctgcactgcccctactggaacaccttctcgctg

SEQ ID NO: 575346 - DNA, 50 bp, Homo sapiens
cagatatcgaggtggatggaaagcaggtatcttattgacagccggtggtt

SEQ ID NO: 575347 - DNA, 76 bp, Homo sapiens
tcattattacatgaagtatcatgtttctgtaaaagtacacctgtaagccagcttggttccgcagactttcccgagg

SEQ ID NO: 575348 - DNA, 88 bp, Homo sapiens
aggtgacagtctgcatgtgcagttttcaggtgtggccgacgacgatgccctcgctgaggagcgcatgcggagaggccagaacgccctg

SEQ ID NO: 575349 - DNA, 98 bp, Homo sapiens
caaaagtgggaagccaagcctttcctcccgagtaacctgatccactacctgggactgagccatcacctgctggcactgaattttatcattgtttcttt

SEQ ID NO: 575350 - DNA, 100 bp, Homo sapiens
gacaccatgaaggtgctgggagtgcagcggcctctcctacaggagagatgaatggagagtatagaggcagaggatttggacgaggaagatttcaaagctg

SEQ ID NO: 575351 - DNA, 51 bp, Homo sapiens
cgagataaagccaccacgtctgcttgcttggctcaggaacaacagaagaga

SEQ ID NO: 575352 - DNA, 75 bp, Homo sapiens
actccgcaaacgaaaaagaacgacatgatgcaatcttcaggaaagtaagaggctcatgggcctcctgagtgaccc

SEQ ID NO: 575353 - DNA, 82 bp, Homo sapiens
caacgacgttccatctgtggaaggacctaccaaccagcactgccagtgaaagatgtagaagataaacctgaacaacaaacca

SEQ ID NO: 575354 - DNA, 100 bp, Homo sapiens
ggatcctctgctgcatagtttcggtcatctaaaggaggttttaaacagtataacagaatccgtctcttgctcaagtgaaaattgaagaagcaaagcgaga

SEQ ID NO: 575355 - DNA, 75 bp, Homo sapiens
caggtttcccacagggagaaaatggagcagacattcaggagacttgcagccaatacaggaagcaaacagcgtagt

SEQ ID NO: 575356 - DNA, 100 bp, Homo sapiens
taaactgcttaaacgattatttctgttttcctatgcgactgctgcacaaaacaatacaggtgaatgaaaactttgccattgatttgatagcagagcagcc

SEQ ID NO: 575357 - DNA, 98 bp, Homo sapiens
gctgactacctgctgtacaccctcaacaaacaccagcgctttggagccatgggaccacaccaccaccaccacaaccaataggccaggaaccaccagag

SEQ ID NO: 575358 - DNA, 99 bp, Homo sapiens
tttcaaaaattttagaaaatggacctgctgacagagcagatggcctggagattcatgacaaaatcatggaggaaacatgccctgaactgtcacagaatg

SEQ ID NO: 575359 - DNA, 143 bp, Homo sapiens
gatgaggtggatgaaaaaagagctttcaagacaaatggcaaacctgaagaaaaaaaccatgaagctggaacatcagaatggagatttacagacagtcatctgggtggaggacacccttttgggatcagcactgaaagtgacgc

SEQ ID NO: 575360 - DNA, 100 bp, Homo sapiens
cggcttcaatatcttcacccagcatggttctcagagccagaccccagccacaccctggaggagcgggtagtgcactggtatttcagccagctggacagca

SEQ ID NO: 575361 - DNA, 90 bp, Homo sapiens
ggcccagtcatgaagatggaacctctgaataacctccagattttggctgaagagctgtgtactcctccagatcctggtgctgcttttgtg

SEQ ID NO: 575362 - DNA, 75 bp, Homo sapiens
gtgtatcaagtaatggtgcaaagcctgaatttcagtcattcagtcagtaccgctgtaagactgccaagaagtcag

SEQ ID NO: 575363 - DNA, 74 bp, Homo sapiens
tggtgagcttcactgcttcctggtctctgatatcaggtttttctatatgagtggagaagacagctgttaccagg

SEQ ID NO: 575364 - DNA, 100 bp, Homo sapiens
gaagtttttttggatgtggtcgagagattgtctgtactgatagcatctaatgagtgtgggctgctgctctcctctgagggcgagtgtcagggctgctacc

SEQ ID NO: 575365 - DNA, 50 bp, Homo sapiens
caccgccgtcaccaatctctacaaaggtctacaaggaagtcttcacgagg

SEQ ID NO: 575366 - DNA, 106 bp, Homo sapiens
ggtgaccgaaaggatcatgaactagtgacctggaaaggaaatctactttcttcaatgtgttaaccaatagtcaggcttcagcagaaaacttcccgttctgcactat

SEQ ID NO: 575367 - DNA, 75 bp, Homo sapiens
atcgggggcaagcggaaggtgatgcccaagatggaccaggctcttcgtcagattgggcagaggacgataagcact

SEQ ID NO: 575368 - DNA, 82 bp, Homo sapiens
ctcccgaggagtgcaggcgcttcaccacagacggagctcagtctgaatattcttggagaaagatgctgagtggcattgcagc

SEQ ID NO: 575369 - DNA, 102 bp, Homo sapiens
ttcgagtaaaaatgtatcctgtagaagattttgaagcatcatttcaatttatgcagttccctgtattgaacactgatatacaaggaatgaatagaagtcaag

SEQ ID NO: 575370 - DNA, 57 bp, Homo sapiens
cacccccagcgctctgataaaaataatggatctgaagaagatgatgaagttgtggca

SEQ ID NO: 575371 - DNA, 82 bp, Homo sapiens
cgctccgtggccttagctgtgctcgcgctactctctctttctggcctggaggctatccagcaatatgcttttaaggctatta

SEQ ID NO: 575372 - DNA, 75 bp, Homo sapiens
cagccggcacctgacggcgtgaccgacccgagccgaggctgggaggcggcagaatgcagccagaggagggcacag

SEQ ID NO: 575373 - DNA, 90 bp, Homo sapiens
tcactgcagaggtgctggagctggcaggatgtaatttcacatagtaaaaagctgaacaagaaaaaaggaggagaaatggaaatactgaat

SEQ ID NO: 575374 - DNA, 101 bp, Homo sapiens
cctcttcaatttctgacaaaagatggagacgagagatctggacttctgaacatctaccggaaaagataaaatgtgcaagcccttcagaacgctggggaggt

SEQ ID NO: 575375 - DNA, 90 bp, Homo sapiens
gtaaaggttgccataaaggacaaacaagtgaaatacttcatacattacagtggttggaataaaaagatctaccgctaccagtctcatgac

SEQ ID NO: 575376 - DNA, 82 bp, Homo sapiens
gtatcttatatgttagcttgacctatgcagatcttattccagggacctaatacctatcattgctgctctggaatataatcag

SEQ ID NO: 575377 - DNA, 132 bp, Homo sapiens
agggagtcgctgacgggcacgctgactggaggctggcggacaggcgacagcgacctgcggcagcccgagcgggaagaagttccgcagcaagccgcagctggcgcgctacctgggcggctccatggacctgag

SEQ ID NO: 575378 - DNA, 88 bp, Homo sapiens
cctggaacctcaagtgtgtgttattgagggagaggacattaagtgaaacagttgacagacatcaccagttgacttctgcattaacctg

SEQ ID NO: 575379 - DNA, 96 bp, Homo sapiens
gcctcgccgggctccagctctgtacccggcgcgtgctggcttgggacaggatgagtgcctggtgaagaatgtgatgggatcactagcatgtctgcg

SEQ ID NO: 575380 - DNA, 75 bp, Homo sapiens
atgctttccagctgcaaggaaaagcttctcaataggtttggcatggacaagatctatgaaggccaagtggaggtg

SEQ ID NO: 575381 - DNA, 74 bp, Homo sapiens
ccgggaggaagccgcccgggcacttcgcggccgagagggggggccctcagcctcttggccttgaacgggctgtt

SEQ ID NO: 575382 - DNA, 100 bp, Homo sapiens
ccccaaagtcttggaacagcgacgacaaggcttggaaacatacttacaggtacatccaagcagaagtccagttccctccaggtagcagatcaggacctac

SEQ ID NO: 575383 - DNA, 100 bp, Homo sapiens
tggaatcaggagagcccagaggtcctttgaatcatctctacagagaactgaaatttcttcttatgcaccagcaaggaatactgaagaccgatgatctcat

SEQ ID NO: 575384 - DNA, 101 bp, Homo sapiens
atgaccacctccagagctaatcaggtggataatattaatgcagctgtgatggatttgaaaaaaaagaagatccgcagtctaagtgaagaggtcaaaatagg

SEQ ID NO: 575385 - DNA, 100 bp, Homo sapiens
cgggatcccagcctcaggcctgcacggacggtgttggttgggatacttggtgcttgaaaaactgaagaaggaagacgctgaccgaattcatatattcagt

SEQ ID NO: 575386 - DNA, 100 bp, Homo sapiens
ggaaatctggccgccgccgccgcgagcgctcccggtgtcatggagaaactccagctgggcccagagattctgcagcgggaaaatccaaggcttatttatg

SEQ ID NO: 575387 - DNA, 120 bp, Homo sapiens
ccggggggagttgctcggactcaaacgtccagtcctcgtgcgaccgcgctgggtcggaagtgagcaggggagaacattaatatctgctggagtcctgatgggcagaccattgctgtaggc

SEQ ID NO: 575388 - DNA, 50 bp, Homo sapiens
tctcgcagaacgccatcaaccagctctcctcaagagttactgatctatga

SEQ ID NO: 575389 - DNA, 51 bp, Homo sapiens
ctcgggaccaaggatcacgtcatgactccgatgtgaactatgaagacttta

SEQ ID NO: 575390 - DNA, 148 bp, Homo sapiens
ccatgaacttcgaaacgtgataagaagcacctggatgagacatttgctacagcatcccacattaagtcaacgatacgatgaatggattaaagcagataaaatagtaagacctgctgataaaaatgtgccaaagataaaacatcggaag

SEQ ID NO: 575391 - DNA, 75 bp, Homo sapiens
cacacagaattctctacatttgtgaaagtcagtttctgaggaatttcatcagctcaatctgaaattgaagtgtct

SEQ ID NO: 575392 - DNA, 82 bp, Homo sapiens
gggcttacgcagaaggacctggccacgctctccctgtccagccgcctgcagctgaccctgtaccagtacaagacgtgtccct

SEQ ID NO: 575393 - DNA, 83 bp, Homo sapiens
ccgggaggaaggaacgaggcaaggagctaaagcagcgtgcgttcagccctgggatgcctgctctgtgcctgtatctgagatca

SEQ ID NO: 575394 - DNA, 99 bp, Homo sapiens
gatcagccagtctctttcatcatcaagcagacatactcaaggagaataaaggcagccccgttgatgactgaaaatgacaaagcatccacctaacagacg

SEQ ID NO: 575395 - DNA, 100 bp, Homo sapiens
tcttgccaccggcttccctttgtaaattgagctctgcacgctggggagtttgttggggttcatgtgaaaatggcggatgaggctgtctgtgttggcccag

SEQ ID NO: 575396 - DNA, 98 bp, Homo sapiens
ctcaatgtggagcgtgtcttccaggacgcggagcccatcgtggtgaggcttaaggaggtccgactgcagagggacgacttcgagattctgaaggtgat

SEQ ID NO: 575397 - DNA, 78 bp, Homo sapiens
actcattgactttggacttagcttcaaagaaggcaatcagaaatacaggtatcaggatgaagatacacctcctcaaga

SEQ ID NO: 575398 - DNA, 100 bp, Homo sapiens
agtccatggaccaggacttcgggaaagcaagcaagtggagaccaagacagatgccaagaatggagaggaaaggggcagagatgccagcaaaaaagccctg

SEQ ID NO: 575399 - DNA, 83 bp, Homo sapiens
ttgtcccagaatctacgtctaaactgcagaagtttacaaggagtgtggccatctggggccgtgtggtatttgccactcaggag

SEQ ID NO: 575400 - DNA, 75 bp, Homo sapiens
cctctgagccccggggcatctatgccagtgagaggcccaagtccctagacctaatctgggagcctgcaagtgaca

SEQ ID NO: 575401 - DNA, 82 bp, Homo sapiens
gaacgcttcgctggccatttaggagctctgctcaaagccagacggagggagccatggatttgctgcgggagctgaaggccat

SEQ ID NO: 575402 - DNA, 98 bp, Homo sapiens
cgcggctgcggggcttccctgcggctggaggtgccttggcatctcccaatggggtggctttgctctgggctcctgttccctgtgagctgcctggtcct

SEQ ID NO: 575403 - DNA, 100 bp, Homo sapiens
cgggagtgatgtctgtggggccgccggcggcccggcttcaggaagccattaatttgctagaaccaatgacaaacgaccccgtgaactacgtgaggcaagg

SEQ ID NO: 575404 - DNA, 82 bp, Homo sapiens
aagatagaattcttagagaagagcttcagaaacagagactgattgagaggatccagaatccagatctctggaatagctacca

SEQ ID NO: 575405 - DNA, 90 bp, Homo sapiens
gggcgctgcgggccggggcgcggaccgcggagcggccaaccactcacgaattcttgtttggtgcccttgctgaactggttgataatgcaa

SEQ ID NO: 575406 - DNA, 51 bp, Homo sapiens
cagcgggggggcaggcgatcgaagaattctgaaggtggactctatgtatgc

SEQ ID NO: 575407 - DNA, 101 bp, Homo sapiens
gcctcctcctgctgctactgtgtccagcgcagggtggccattcagggcaactggggccttcgtcagttgccccttcattccgcccagaggatgagcttgag

SEQ ID NO: 575408 - DNA, 49 bp, Homo sapiens
cactgtggagcagggagaaattttgtcttgctggtggatgccctcctta

SEQ ID NO: 575409 - DNA, 100 bp, Homo sapiens
tgtgggctggtgtgtggaactggatgcagactcttcttattttaaaatctttaagacaaaacatgactgaaaagagcacctgtacttttcaagccactgg

SEQ ID NO: 575410 - DNA, 75 bp, Homo sapiens
ctcaaggacacggtctacaccgacttcgacggccgccatggcatcagatgaaggcaaactttttgttggagggct

SEQ ID NO: 575411 - DNA, 100 bp, Homo sapiens
gaagatggacagctgggaattgctgaattagaactgcagaggttcctctacagcaaggagtctactcttcatcttgtgttgagacttcgtggtggtgcta

SEQ ID NO: 575412 - DNA, 89 bp, Homo sapiens
cctgatgaagttcgagcactaatatttaagaaagaagatgttaactttcaggtcagcccaaggccaaccccactgtcactctgttcccg

SEQ ID NO: 575413 - DNA, 74 bp, Homo sapiens
ctctacttccccaccaaaaagtggcacacactggagagatatcagttgcctatccctcgtccaggtgaagtttt

SEQ ID NO: 575414 - DNA, 87 bp, Homo sapiens
tgggcaatggtgaatttgaaaaggttaatttggagtggcccctggagtcagtttcctacaccatccgaggccccacccagcacgagc

SEQ ID NO: 575415 - DNA, 86 bp, Homo sapiens
ctgcgtggcttgtcaggaactcgactcagacgtggataaagataatcccgacttcccaagtaagaagcggaagaggagccgctgga

SEQ ID NO: 575416 - DNA, 100 bp, Homo sapiens
ggaagacaatttagcatagacccagatctcctggttgataactctcttgatagagcccaagcagccaagaataaaggcaataaatattttaaagcaggaa

SEQ ID NO: 575417 - DNA, 75 bp, Homo sapiens
cgcacttcctgcagtgggcattagccacgtccaggacgtggtgggtcctctggtgcgaaattccggatttccttg

SEQ ID NO: 575418 - DNA, 75 bp, Homo sapiens
gacctcaacatccgagtggaaaggttctccagcatttggctcaaggccccaagggcacatgtgacaagaaggcgc

SEQ ID NO: 575419 - DNA, 101 bp, Homo sapiens
gagcagcctggcagtgtccaagcaacaagcctccgctcctccttcctgcaccctggggctcctgaaactcacatgatagttttgaggcagctgtgccatca

SEQ ID NO: 575420 - DNA, 90 bp, Homo sapiens
gtttcctatagaagacacccctttggttccggtagtgtgccagtatttgaaaaatcccaatgtatctgattcactgctgctgcagaatat

SEQ ID NO: 575421 - DNA, 100 bp, Homo sapiens
gcccattgcccccctcctcccctggctggagtgccctgcctggagggagccctcctggctgggggcaaggctaggtcctttcacaaaactgttcctgtga

SEQ ID NO: 575422 - DNA, 76 bp, Homo sapiens
ccttctcacttggcctatggaaaacggggatttccaccatctgtcccagtgcaaagaaaggaggtacaggcccgag

SEQ ID NO: 575423 - DNA, 74 bp, Homo sapiens
aacgtgggaactgagtctgtatgagctgcaccggaccccgcaggtggtgaagcagtattttccaatttgaagat

SEQ ID NO: 575424 - DNA, 90 bp, Homo sapiens
agattagttgaagacaagccaggttccagacgacgccggtcctactccagaagccggagtcattcaaggaattcttttagttggaccccc

SEQ ID NO: 575425 - DNA, 82 bp, Homo sapiens
tcaaccctaccatcgccgagggcccatcccctaccagcgagggcgcctccgagcgtcctggaacatgagcatgctgcagacc

SEQ ID NO: 575426 - DNA, 80 bp, Homo sapiens
ctcatgttcgccttcaacctgctcttctgggtgagaagccctaccactgcaactgggacggctgcggctggaagtttgcg

SEQ ID NO: 575427 - DNA, 100 bp, Homo sapiens
ttcatctgtgatgtgggcaaccgggaggaggtgtaccagacggccaaggccgtccgggagaaggacagtcattttgtttactcattcagccctgttgcag

SEQ ID NO: 575428 - DNA, 83 bp, Homo sapiens
cttcgatgtgcgagactttggaaagttcatgcgggagatggcaggggctggcacatgacagtggagcagaaatttggcctgtt

SEQ ID NO: 575429 - DNA, 98 bp, Homo sapiens
aaaaggttaccaaaagaatgtatgatagcttctggaggcagttcaagcactctgagaaggtagtcgactatgcccaacttgttcagccacgttttgat

SEQ ID NO: 575430 - DNA, 100 bp, Homo sapiens
ggaagtgcagctgcctcagttcttagcgcaggattacggggcgctgaaagacatcgtgatcaacgcaaacccggcctcccctcccctctccctgcttgtg

SEQ ID NO: 575431 - DNA, 83 bp, Homo sapiens
cgcacctccgcaaagcgccgcggccgctacgatggttgtgaccgagattcccgacgagagagactgaggggaagagaggaagg

SEQ ID NO: 575432 - DNA, 50 bp, Homo sapiens
ccaacttcaaccaggacaacactaaggttcgtgatcctcgggccaatttt

SEQ ID NO: 575433 - DNA, 75 bp, Homo sapiens
ggccctgtgtcttgcaggagtaccagcagttcagcaggagagcctgtcctgcctccagtccacctgtggccttgt

SEQ ID NO: 575434 - DNA, 99 bp, Homo sapiens
ccgcccgccgccgccgccgctgtccggcccccgagcacgccggccccgcgcgcgcctcgaggccgagtcaagttgagcattatgaaagatgagccagaa

SEQ ID NO: 575435 - DNA, 78 bp, Homo sapiens
ggaacgctcactgtcagcgcctggaaacttgctcacgcctgggttctgaggaaaacgcaatggtggccatggacttgg

SEQ ID NO: 575436 - DNA, 98 bp, Homo sapiens
gccgaggcaccgaggcactcagaggaggaggataagatcaatgccctcattaaagcagccggtgtaaatgttgagcctttttggcctggcttgtttgc

SEQ ID NO: 575437 - DNA, 95 bp, Homo sapiens
gcaagggctattcctgaccaagaagatctaaagagaacgtctctgaaatcaagtccggatgaaggtatcagcagatgttgcacacaaacttggta

SEQ ID NO: 575438 - DNA, 99 bp, Homo sapiens
cttcaaggataagggtgacagcaacagctcggcgggctggaagaggctgaggggatctggcggtggagcgctaggatcagacgcccccgcgatgaccag

SEQ ID NO: 575439 - DNA, 75 bp, Homo sapiens
tatccacagggatctcaagtcacccaatgctacaaggtgagctgcctggaaatccctgggccctctggccccaag

SEQ ID NO: 575440 - DNA, 101 bp, Homo sapiens
caaagtcgccaaggtgcggtctttcgaccactccggaaagacctatgaggaccagcacagcagtgaggaggaggaggaagaggaagaggaagaggaaagcg

SEQ ID NO: 575441 - DNA, 97 bp, Homo sapiens
agcctcatataactgctgcagagggtaaacttcacaacatgatagttgatctggataatgtggtcaaaaagtctctgctggatgaaccgaatcctaa

SEQ ID NO: 575442 - DNA, 100 bp, Homo sapiens
agtatgaagtggtgaaggagtgtgtgcagcgtatggaagctccaaaaggaaagataccagattgatcttgatcacctctgcctccccagcacctagtctt

SEQ ID NO: 575443 - DNA, 50 bp, Homo sapiens
ggtcggaggccgattcgacacagacaagagttcctatcagactgagattg

SEQ ID NO: 575444 - DNA, 82 bp, Homo sapiens
ctgaaggaggaggacaaagagcccctcatcgagctcttcgtcaaggttgacatcatggacatatgtgagtccatcctggaga

SEQ ID NO: 575445 - DNA, 83 bp, Homo sapiens
aactctacttcaacccgcaccttgtgttccggaagttccaggaacaagatcactcaaggtgaaggataatctactaataccag

SEQ ID NO: 575446 - DNA, 100 bp, Homo sapiens
acccgcttcactggcaccatggtgtttgatgcgatcatgaatttcaagaaagaggagacagcaaaactgatagagaaactggacatcaaactggacagcg

SEQ ID NO: 575447 - DNA, 73 bp, Homo sapiens
tcaactcataatatggatgtccccaacatcaaaaggaatgacttccagctggcagatggattgcagtatatat

SEQ ID NO: 575448 - DNA, 83 bp, Homo sapiens
cgcaggcccagatgcgcgcgatgctggaccagttgatgggcacctcccgggacgtcctggaatcaagatgtgagaccaagaaa

SEQ ID NO: 575449 - DNA, 99 bp, Homo sapiens
ccgagtgccaggcgccggccggctgcgaagacgcggtgggccgcccctccggtcaggttagtgtggtgcaagtgaccatcccagacggtttcgtgaacg

SEQ ID NO: 575450 - DNA, 100 bp, Homo sapiens
aactgctgccatcttctccgcgctatggctgcgttcggccgtcaggaaagtggagaatgaggacatgaataaagaccagatcttgctggaaaaagaagct

SEQ ID NO: 575451 - DNA, 98 bp, Homo sapiens
attgaggactgccagctggcgctgcaggacatctccaagtttgcagagaaagacaatatagttcttggagaaggtggaatcacactgagtggaggtca

SEQ ID NO: 575452 - DNA, 100 bp, Homo sapiens
tggggcagaggctgcggagccccaggaggattctgtgaggagaccaggaggaattttgaagccaccttaggttggctacaagaacatgcttgctcaagaa

SEQ ID NO: 575453 - DNA, 90 bp, Homo sapiens
aagagttctgcgttttgccagtcacctctcaactgtgtgccaaaggctccatggtccccttctcgatgcgcatcttgcacgcggagcttc

SEQ ID NO: 575454 - DNA, 75 bp, Homo sapiens
attcggaataggaaaggggatcacgctaatgtcaatgccatgattttagtccatggagaacagaatgaaatggcc

SEQ ID NO: 575455 - DNA, 75 bp, Homo sapiens
ggggaccccggccactggagcaggtcacctgttacaaggaactgtggctgcaccatctgtcttcatcttcccgcc

SEQ ID NO: 575456 - DNA, 98 bp, Homo sapiens
aggaaggaggagcagcagactcggacgtggacgcctttttccggacaggcatcttttctgtcagatcagcctgagccctacctgcccttcctctcaag

SEQ ID NO: 575457 - DNA, 75 bp, Homo sapiens
gtagccaagactggagaaacaattgaaagctggtggaatgcgaattgtgcagaaacacccacatacaggagacac

SEQ ID NO: 575458 - DNA, 75 bp, Homo sapiens
ctagatggaacacatgctctgatgtcctggatcagtgacattcgagcaggaaccgccccttcatgcaggaaccac

SEQ ID NO: 575459 - DNA, 50 bp, Homo sapiens
ttctgtgtttgtgaacctctagaaaaggccaagtggcatcagagctgagt

SEQ ID NO: 575460 - DNA, 90 bp, Homo sapiens
ctccaattaaccagatcttgccctggtgcagacaagacttaagtgtgaacatggctacgcctcttcattcccgtccatgccgagcccccg

SEQ ID NO: 575461 - DNA, 82 bp, Homo sapiens
cccgaagctgctggataattttatcccagggtggctgaatcacggaatgaaagcgtggatacccatcaacgaagttttgata

SEQ ID NO: 575462 - DNA, 75 bp, Homo sapiens
ccgggatctcaggtcctcgggggcggcggccacgccaaggacgggaattgtcttagaagaaagaaggcaagccac

SEQ ID NO: 575463 - DNA, 75 bp, Homo sapiens
cggccagctcgatcgcaggcttccacctggcggccaagtcccctttacttggtaaatcacggcgagagtggacca

SEQ ID NO: 575464 - DNA, 88 bp, Homo sapiens
cgtggctgtgctgagggtggcggccggatagatttgggaatggatgatgaaggagatgatgacccagttcctctaccaaatgtgaatg

SEQ ID NO: 575465 - DNA, 82 bp, Homo sapiens
aagaagtgataggagggctctgtaggttgtgaccgagattcccgacgagagagactgaggggaagagaggaaggaggggcgg

SEQ ID NO: 575466 - DNA, 117 bp, Homo sapiens
gagcgggtccgtcgcggagccggagggcgggaggaacatgacatcgcggagatcccatgcgaggcccaagaaaactagaagtagtggaggtcaaatctcggcaaatcactatccgct

SEQ ID NO: 575467 - DNA, 88 bp, Homo sapiens
tttgatagtcgtaccatatgcagaaggtggccaaacaggagaagaagaagaagaagacaggtcgggctaagcggcggatgcagtacaa

SEQ ID NO: 575468 - DNA, 75 bp, Homo sapiens
aaggacatctgcaaatctttcaccaattcaatcctttcccatggtaccgtggcagactgtgctgttgttggcaag

SEQ ID NO: 575469 - DNA, 50 bp, Homo sapiens
gttcctcccagctacgagctgccccagtaaagatgacggcgccttgaggt

SEQ ID NO: 575470 - DNA, 98 bp, Homo sapiens
aaaaagaagcgtatggactactatgactctgaacagtccagcccagaatcaaatgcaggttccatctggatatggattgcatcatcaaaactatattg

SEQ ID NO: 575471 - DNA, 75 bp, Homo sapiens
ctgccgggagatgtccggggacctggaggagggcatgctggccgtgggtctgcctcagccacctccctgacgctg

SEQ ID NO: 575472 - DNA, 90 bp, Homo sapiens
atcatcctggggacctggtacatggtatgacgctgggcgggatggcttcatcgacctgatggagctgaagctgatgatggagaagctggg

SEQ ID NO: 575473 - DNA, 89 bp, Homo sapiens
ctcccatccctgcagcatgaacaaggtgctggagaatctggtaaaagcaccattgtgaagcagatgaggatcctgcatgttaatgggtt

SEQ ID NO: 575474 - DNA, 101 bp, Homo sapiens
gctgcccgggtagcttcccgacttatcgacatgagcaggcaccaagtggcctcatcctgcatgactcgcctgtcccggtctcgtacagcctctctgaccag

SEQ ID NO: 575475 - DNA, 82 bp, Homo sapiens
ttgaagctgactactaaggagaataagatgagtgaccgaggaggtggcgttcctttgaggaaaattgacagacttttcaact

SEQ ID NO: 575476 - DNA, 75 bp, Homo sapiens
gtggagagcccgtccgacagcgctgaggtattgttgcagcatctggcagtgagactgaggatgaggacagcatgg

SEQ ID NO: 575477 - DNA, 100 bp, Homo sapiens
gaacatcgatcgcaacatcacccacctgcaggaagctcttcgtgtggtgaagatcttacagaaccttgatccgccatttagcattgatgggaagatggta

SEQ ID NO: 575478 - DNA, 82 bp, Homo sapiens
tgttaccagcaatgacactacgggatttgtcttggctgttactatgacacgggaagcaattgatgaatttcggcgttttcag

SEQ ID NO: 575479 - DNA, 102 bp, Homo sapiens
gctcgccaaaagatgttattggagctattttgtaagaacatgcttaaggcggtcaatgcgacccagaagcagacagacttggtaaagctccatgaacaagcc

SEQ ID NO: 575480 - DNA, 75 bp, Homo sapiens
ccatgctgggcatctggaccctcctacctctgcagcctcccgcgacgatgcccctcaacgttagcttcaccaaca

SEQ ID NO: 575481 - DNA, 99 bp, Homo sapiens
tacctctgcgatcccgggtcatctccagatgctagggttatggatccctctctgggcgcattgttggaggtgtgtggtggttctttaccctgatcataa

SEQ ID NO: 575482 - DNA, 75 bp, Homo sapiens
attccagatttggaacttcgaaaagagtaaaggcgacacaggaggagaaccgggagctgaggagcaggtgtgagg

SEQ ID NO: 575483 - DNA, 50 bp, Homo sapiens
gtggaattttggagatattcaaagatcaagacacagccatccgggtcttc

SEQ ID NO: 575484 - DNA, 100 bp, Homo sapiens
cctggccgtgccagccccacttcctgctcaagttccgtttgcagtaccgtccggcgcagcatccagcctggtccacgagatggacagagacgtatgtgcg

SEQ ID NO: 575485 - DNA, 51 bp, Homo sapiens
cctgacacagaaccgctcctcaaggaggaagtatcaaaactccgctgtcag

SEQ ID NO: 575486 - DNA, 100 bp, Homo sapiens
ggagggtccgagccagccgctgttttgccggaggagcccctcaggccatttttatacgactgtaaacaactattggattctaaatgctcgacacataaat

SEQ ID NO: 575487 - DNA, 100 bp, Homo sapiens
gggctgaacgccatccagacaaagagacatcgggaagattctgatgtggaaatggtggaagatgattcccgaaaggaaatgactgcagcttgtacccccc

SEQ ID NO: 575488 - DNA, 100 bp, Homo sapiens
cgggagcggcgccgagaggccgtgcgggacgcgggcgccaggaccggccgaacgcagagctcacgtggaaaatgaagagcagtacacccaggctctggag

SEQ ID NO: 575489 - DNA, 50 bp, Homo sapiens
accctctctgacaccacagcatcaggagctctggaagatcatcgcagaac

SEQ ID NO: 575490 - DNA, 98 bp, Homo sapiens
ggtcatcgggcactacgctggagaagatgcaacggacctgaaggagaagaaggagaaggtggaggagaaggcaagccggaaagagcgaaagaaagaag

SEQ ID NO: 575491 - DNA, 80 bp, Homo sapiens
acgagcaggacttcatccaggcctacgaggaggtgcgcgagaagtacaaagtttgtttcgacgccggaccgcgtaagaga

SEQ ID NO: 575492 - DNA, 100 bp, Homo sapiens
atctctcttcctttctcatgttttggctttggggctaggagaggagtctgcaatgccgagtggaggaaggaggaaccggagtgtgagcagtagctgggtg

SEQ ID NO: 575493 - DNA, 74 bp, Homo sapiens
cattttggaatacttgacttacattgtggatatcaagcctgccaatatggaagagctaacagaggtgattacag

SEQ ID NO: 575494 - DNA, 90 bp, Homo sapiens
ccgcgctgtggctgctgctgctgctgctgccccggacccgggcggacgagcacgaacacacggggccacctacagatgctcctgcagtgg

SEQ ID NO: 575495 - DNA, 86 bp, Homo sapiens
gaagcatccatggcggagggcggcagcccagacgggcgggcagggccgggctccgcaggaaagtggagaatgaggacatgaataaa

SEQ ID NO: 575496 - DNA, 80 bp, Homo sapiens
aggaggagggcggcttctgcgagggcagcctgaggtccatctgggaagcgggatttgggttgatgaggagaaatggcacc

SEQ ID NO: 575497 - DNA, 50 bp, Homo sapiens
tgctgatcgggacccccccgcagaaggaacaacagagagatggtatttcc

SEQ ID NO: 575498 - DNA, 100 bp, Homo sapiens
agacgacaagcacacactatggcgctgaaacggattaataagctaaaagatggcggcaaggcagcccaggcaaatgtaagaataggcgatgtggttctca

SEQ ID NO: 575499 - DNA, 98 bp, Homo sapiens
ccccttcttgccatcgccccagacatggggaacgcggcgaccgccaagaaaggcagcgaggtggagagcggtaagaatgattgatgttggctgatatt

SEQ ID NO: 575500 - DNA, 98 bp, Homo sapiens
atcctacaagaccctcaggctggtagtgcgcaggcattgctaccatttatgttcgttataagcaagttcatgctctgagtcctgaagagaacgttatc

SEQ ID NO: 575501 - DNA, 90 bp, Homo sapiens
gggggcagcgcgatgaggcgggtgaccctgttcctgaacggcagccccaagaacggaaagatgccacctcagtatggacagcaaggtgtg

SEQ ID NO: 575502 - DNA, 100 bp, Homo sapiens
gatttccaccaacattcaaggaaacaaatcaactaaaaacaaaattgccagaaaatctttcctctaaagtcaaactgaactgttttaatcatggacaaac

SEQ ID NO: 575503 - DNA, 100 bp, Homo sapiens
cttaacttcttatccatcccatctcttggacagatgatgccagttaattactttgaattatcagatgtagaaggtggtgatggactgcagctcagaaagg

SEQ ID NO: 575504 - DNA, 96 bp, Homo sapiens
caggcggagcagggccttggaccccgcggcgcccctcggcctcggagcaacgagcgcagcgccggtgatgtgtccaatctagatcccaacttctca

SEQ ID NO: 575505 - DNA, 109 bp, Homo sapiens
agtgctgccagagctgagccagtccctagggctcagggagcaggagcttcaggttgtccgagcatctgggaagacagtcattttgtttactcattcagccctgttgcag

SEQ ID NO: 575506 - DNA, 75 bp, Homo sapiens
gccaaggtggatattgatgaccacacagacctcgccattgagtatgagggagattttgcagctgctgccggcaac

SEQ ID NO: 575507 - DNA, 100 bp, Homo sapiens
gaccatgttagataaacttgtggatggacttgctacctcttgggtgaactctagcaattacaagagttgaaactggttgacaaccattaacctgggttgc

SEQ ID NO: 575508 - DNA, 100 bp, Homo sapiens
ggagcatttgttgatctgttcaccactcatttgcaacttatatcgccagtccagcagctaaggatattttgtgcagagagctgcttttgcacattttcct

SEQ ID NO: 575509 - DNA, 89 bp, Homo sapiens
aaggaacgccctggaaaacatcaggtgtacctgaaggaaatcttaaaagaaattggtgttcagaatgtaaaagggatccacaaaaacac

SEQ ID NO: 575510 - DNA, 94 bp, Homo sapiens
ctgcaatcttaccagggaggccaagcgaccacccaaagaaggaagggaaaaggccgaggcatcagcgtgtgaagaccgcaaagacgatcccgag

SEQ ID NO: 575511 - DNA, 75 bp, Homo sapiens
tccagatcctcgatcaccaaagatagtcgtgcaagcactgcagtgttcccattattcgattctttggcagttggt

SEQ ID NO: 575512 - DNA, 51 bp, Homo sapiens
cggacgctcgtgcacagatacagttttgccgaattgacaagcccctgtgtc

SEQ ID NO: 575513 - DNA, 117 bp, Homo sapiens
actacaagcccaccaagctaaagaggctgcccagaaagcagttaacagtgccaccggtgttccaactgtttaaactgtactccgtgcacctggacgggttcctcttctgcagggtgc

SEQ ID NO: 575514 - DNA, 83 bp, Homo sapiens
gggaaccctggtcaccgtctcctcagcacatacccccggcctcatgagtacctgtccccagcggatctgcccaagagctggga

SEQ ID NO: 575515 - DNA, 98 bp, Homo sapiens
gacatcctggaagctgggaaatgactccgtgggaaggaggcttgtttaaactacggatgcttttcaaagatgattatccatcttcgccaccaaaatgt

SEQ ID NO: 575516 - DNA, 58 bp, Homo sapiens
cttggatgaggtgaaagactatgtggccaaggatttcctgctgcagatatttactgtg

SEQ ID NO: 575517 - DNA, 82 bp, Homo sapiens
caccgctgccctcagctccgagtccagggcgaggaaatctggcattttttaaagtttgcgccccacaaagaggaaatattcc

SEQ ID NO: 575518 - DNA, 98 bp, Homo sapiens
gcccaaaccgccaagaaccaaacctgatccaagaaaacattcttggccaaaatctaggggaagttactgccacttcgtactatataaggaaaacaaag

SEQ ID NO: 575519 - DNA, 96 bp, Homo sapiens
actctctcagatgacttcgtctcccaccgactgcctgtttaaggccagcgatctgtacatgagacccaggaattatttccaaagcaagattcatat

SEQ ID NO: 575520 - DNA, 90 bp, Homo sapiens
ggcagcgccgctccccagggagggagtccgcagcctgaggccatagtgtatgaaggccaagacaagaacccagaaatgtgccgagtcttg

SEQ ID NO: 575521 - DNA, 75 bp, Homo sapiens
taaggattccaagtaactcttatttgggaatgcagagagcaaccaatgtcacctaccaagcccatcatgtcagca

SEQ ID NO: 575522 - DNA, 75 bp, Homo sapiens
ttcctgttctgatagcgtggaaggaattcgaatttagagtttaatttctcagagcattctctccaggaagaattt

SEQ ID NO: 575523 - DNA, 100 bp, Homo sapiens
cgtccctttcccttgcacctgttaacatctttaaggcaggagctgatgaagagagagcagagacagctcgtctggaatcagagatcattgatttcttcct

SEQ ID NO: 575524 - DNA, 76 bp, Homo sapiens
ttttattacccaagtggaagaagagatttcccgacactacaggaagccctcaatctagaagagtagaggtccaaag

SEQ ID NO: 575525 - DNA, 100 bp, Homo sapiens
gtggagagccgccagggctctatcaaggggctggtgtactccagcaacttccagaccacttccacatgcagtcggagtctctgatcgggcccctgatgca

SEQ ID NO: 575526 - DNA, 98 bp, Homo sapiens
gtcaagggttcaagatgatgaagttggtgatggcactacctctgttaccgttttagcagcagaattattaaggactgtctcgaggatgcctacggagc

SEQ ID NO: 575527 - DNA, 100 bp, Homo sapiens
agcagtagtccctggcagtgcccagtttgcagggcagaagctcctcctggggtagagacagatcttattgatgttggattcacagatgatgtgaagaaag

SEQ ID NO: 575528 - DNA, 76 bp, Homo sapiens
agtgtggcatcccaaggctttgggttttcctctccaaacaaaacagggaagacaaaggcgctttggctaagctggt

SEQ ID NO: 575529 - DNA, 96 bp, Homo sapiens
atccatgtttctggacgcggatttttggcctcatactctgttatagataaacaaggtcatacttacctggttgcttgcgcatctagtaatgttgga

SEQ ID NO: 575530 - DNA, 90 bp, Homo sapiens
tgagtgtgcccacctgcgtaagggggcagagacagcgcctgggccatgttcctggaccggccccagcagtggctccagctcgtcctcctc

SEQ ID NO: 575531 - DNA, 100 bp, Homo sapiens
ttcccagccttcagaaattgccggtctgggagttgggggcaaggagaagatcctggggacggtgctcattggttcagaacatggcctgatagaagtagac

SEQ ID NO: 575532 - DNA, 100 bp, Homo sapiens
aatggcatccggggatttctgctcacctggagaagggatggaaatacttcaacaagatctgacaggatggcatctgatgactttgacatagtgattgagg

SEQ ID NO: 575533 - DNA, 71 bp, Homo sapiens
catgctgaaaatccatgtcataaagcttcacctggctctgcggacacgtgcaccggaacatcctctccaag

SEQ ID NO: 575534 - DNA, 75 bp, Homo sapiens
ctgaaatgcgggaggctccttaactcttgtataaacagatgacacccccaaccatggttgtgaagatgctagcga

SEQ ID NO: 575535 - DNA, 100 bp, Homo sapiens
gcgttggaggccgccttttcagaagcggctgcgcacggactgctggagatggtggagtccgtcattctgggaggtgatcagtgatgaacatggcatcgac

SEQ ID NO: 575536 - DNA, 100 bp, Homo sapiens
aagatgcaagcggtttgggaccttgaacaaggcaaatatggttttgctccatgatgcgttatctgggtctggaaacccaaaccctcaaggatggcctggc

SEQ ID NO: 575537 - DNA, 100 bp, Homo sapiens
cgggcctgtggaagaagcgccgcgcacggacttcggcagaggtcaaaaggctgagtttcaaattctggataatgtagactcaacgggagagttgatagtg

SEQ ID NO: 575538 - DNA, 96 bp, Homo sapiens
ggggcgcgcggtagcgtcccgggtcccctagcagggctctagagaccacgtgaagtctcctcgctgcaatatctagagaactttctgagatcacca

SEQ ID NO: 575539 - DNA, 90 bp, Homo sapiens
gggaataaagcggagcgaggacagcaaggttcgttccaccagtcataaaccagatgaaatctatggcatgattgaaagactatctcctgg

SEQ ID NO: 575540 - DNA, 82 bp, Homo sapiens
ctggactcatggaggctgagcatttattcagcaaatcatgaaggacaggtggatcaatgcagggcatgaagaagatgaactc

SEQ ID NO: 575541 - DNA, 83 bp, Homo sapiens
aaaggaagaggagaaggaaattgtcccgaatccctgcaggttttaaaatcaaagatgggaaaatcggagaaaattgcccttcc

SEQ ID NO: 575542 - DNA, 75 bp, Homo sapiens
ccgcgcgacgagcaggtggcggcggctgcaggtcaaaatgcagatcttcgtgaaaacccttaccggcaagaccat

SEQ ID NO: 575543 - DNA, 90 bp, Homo sapiens
aaccttcgatctcctgacgatttgtgctgaagcacacggccttcgcccacctgcgggaggtgggctccttcccctgcaccctgaaccccc

SEQ ID NO: 575544 - DNA, 74 bp, Homo sapiens
ctccaaagccctggtggcctattaccagaaatatgtggacgagtgcagctccgggcagcatcagtgtgacagct

SEQ ID NO: 575545 - DNA, 90 bp, Homo sapiens
attcgcagtggtcgcttcttctccttgattgtcactgctgttccaagggcacacgcagagggatttggaattcctggagagttgcctttg

SEQ ID NO: 575546 - DNA, 91 bp, Homo sapiens
ccattggatttaaaagacagtcctcgtcagcactgactttcagctatggaatcgaggagaggagacgccgtgagcgggacgaccagatgta

SEQ ID NO: 575547 - DNA, 95 bp, Homo sapiens
ctctcccatggtggccaagtcaacattggatattgttctggccaataaagatgtattgtcttctaagaactctgaagcaatgtcagacattgagg

SEQ ID NO: 575548 - DNA, 75 bp, Homo sapiens
tctttcagagaaagcgcctgttcaactttgtcctctctcagcattcttcaggtcatctgaaccttctgagaaaac

SEQ ID NO: 575549 - DNA, 100 bp, Homo sapiens
gtggaaacctaactgaagacctgaagacaataaagcagacccattcccagatgctgcacttaaaaggatgcttgttttgatgtcctgctcattgttttcc

SEQ ID NO: 575550 - DNA, 100 bp, Homo sapiens
gagcggctgcggcaccccaacgtgctgcaggtgatgatgaacagtctacacagatggctgcaagttgggaagatgataaagttacagaagcatcttcaaa

SEQ ID NO: 575551 - DNA, 99 bp, Homo sapiens
tgtggccctcagaatttaaacttaaggaaagagtgggaaagtgagggatgaaaactttcggaagagaaagttgcctgtggtaagttcagttgttaaagt

SEQ ID NO: 575552 - DNA, 100 bp, Homo sapiens
actccgcaaacgaaaaagaacgacatgatgcaatcttcaggaaagtaagagggggatctgaaacttgtggaaaagccgtctcctttgactcttgctcctc

SEQ ID NO: 575553 - DNA, 80 bp, Homo sapiens
cctgagtatgtcgaaaatctctgcccctggaggagaaatagaaggttttgagcaaaattttggactgtgaagcaaggcat

SEQ ID NO: 575554 - DNA, 51 bp, Homo sapiens
agagctgcacccgctgccccagctcaaagggaggaaataatgctggccata

SEQ ID NO: 575555 - DNA, 124 bp, Homo sapiens
caacgacctgtttgagagtgggaacatgacgcaggtgcaggtgtctcttctcgccctggcggggaaggtttacccaaggtccagcctagcccctaggcaccatgtcggacagtgatctaggtga

SEQ ID NO: 575556 - DNA, 100 bp, Homo sapiens
tacatgggtctcccaactccagaagacaaccttgaccattacagagaagatgagaatgtgcctactgctcctgatcctccaagtcaacatttacgtgggc

SEQ ID NO: 575557 - DNA, 100 bp, Homo sapiens
ggctaaccgggagtacattgagataatcaccagcagcatcaagaaaatcgcagactttctcaactcgttcggttttctggacccaaaccaaagaatctag

SEQ ID NO: 575558 - DNA, 83 bp, Homo sapiens
ctcggctgaagaaagaaggtgggagcggagagcgcaggcgtgggggatatgagactttctactcggaatatcctgagtgttgc

SEQ ID NO: 575559 - DNA, 98 bp, Homo sapiens
aggaccagcagatgaatggacaccttgaagcagaggagcagcaggaccagtatgacatgatgggaagaaatcagactgctgtgagagaagagatgatt

SEQ ID NO: 575560 - DNA, 80 bp, Homo sapiens
caacacacagagaaattcagcaggttttgattcccaccatggccatcacccagtttcggttatttaaattttgtacctgc

SEQ ID NO: 575561 - DNA, 100 bp, Homo sapiens
agtgtttacagctaacttgaaaaaaatgtcatggaataaattcagccttactagaaaaattgtggagtgtcgagttgtggaaagtaaaaatgtagcccta

SEQ ID NO: 575562 - DNA, 100 bp, Homo sapiens
acctgcctgggcatagacttccttaagcaaatggttatgagccttagagtttctgaactccaagtactgttgggctacgccgggagaaacaagcacggac

SEQ ID NO: 575563 - DNA, 90 bp, Homo sapiens
gaagccacgtgcagacatctacaaccttcgatctcctgacgagacacctgcgtggctctgcaggccttggctgaatatgccatcttgtcc

SEQ ID NO: 575564 - DNA, 100 bp, Homo sapiens
tagggattgggatgatttggctgggcattaatttgaaggcaggatggggaagcagaatagcaaactggcccctgaagtgatggaggacctggtgaagagc

SEQ ID NO: 575565 - DNA, 90 bp, Homo sapiens
agcagttgtctgatgaagagaaggcgcagcccagcctcgaaatgcagaacgacgccggcgagttcgtggacctgtacgtgccgcggaaat

SEQ ID NO: 575566 - DNA, 83 bp, Homo sapiens
gcgacggggccggcggcggggcagctgccaggaacgagggtagcagaactctcttgatagagcccaagcagccaagaataaag

SEQ ID NO: 575567 - DNA, 74 bp, Homo sapiens
cttcgctgtggtgaagctggggcggcaccggatcaccaagacggagtgatgtccttgcattgcccatttttaag

SEQ ID NO: 575568 - DNA, 74 bp, Homo sapiens
gataaactcaacatcgacagcattatccaacggctgctggaagagtcggtatttcttcaatagatatatctcaa

SEQ ID NO: 575569 - DNA, 82 bp, Homo sapiens
tgttgcgggccccgggacctgggctgggaacccgcggtggagcgggacacgaacgtggacgctgtgcagagctgcaagtccg

SEQ ID NO: 575570 - DNA, 100 bp, Homo sapiens
gacgatcacttttctgtaggccatttgtccaggtacaactccaaaaggagacattggagaagaaccaagctgggtctataaggaattgcacatgagatgg

SEQ ID NO: 575571 - DNA, 100 bp, Homo sapiens
gttaccttcttgaaaaggatttggaagaaatactttatactcttggactacatctttctcgggctcagatgggacgtctagttgcaagaaaacaagcttg

SEQ ID NO: 575572 - DNA, 100 bp, Homo sapiens
agaaaagcttgcagaatatatttgttccaaggtctcattgccagcagtttcacggaaacccactatctgcaagacggtactgatgtctccctcgctcgaa

SEQ ID NO: 575573 - DNA, 75 bp, Homo sapiens
caccttggctctcccacccaatggagatggctctaatggtacaaagtagatttcatagaagagaaggcatctcag

SEQ ID NO: 575574 - DNA, 95 bp, Homo sapiens
gaccgagagcgtgaccgagagcgcgaatatcgtcatcgttagaagccctaccacttatgtcttggatgaagatgaacctcgattccttgaagaag

SEQ ID NO: 575575 - DNA, 100 bp, Homo sapiens
gatactcagcagctggaccggcaaattaaagcaattatgaaagaagtcattccttttttgaaggcactactgcagtcttcagttaagcaacaagtagaag

SEQ ID NO: 575576 - DNA, 88 bp, Homo sapiens
gaaagaggccgggagtcgccccctacccgcttctcgtagtcctgggagcacagcagaagtgggcacggtggcgcacaagatcatgcag

SEQ ID NO: 575577 - DNA, 74 bp, Homo sapiens
gaagagggaagacacgcggaaacaggttctgggaacactttttatttatgtcttatttatggttgaggaattca

SEQ ID NO: 575578 - DNA, 82 bp, Homo sapiens
ctttaaaatgcaggtgggtaacagtgacctgaagacatactaacaggaacaggaaatatagtggtcattatgattagctatc

SEQ ID NO: 575579 - DNA, 100 bp, Homo sapiens
gcagtgggaaaaatggaccaacttctttggcaagtggacattttactggctcaacctgagattcctgaacgcctctgcgaacaaactggaaagccttcct

SEQ ID NO: 575580 - DNA, 96 bp, Homo sapiens
cagggataaatcccaaacttcttaacccctagaccggtttttagtccattgactatgcagcctaatggtgtacaaagataatcaatgctgattcgg

SEQ ID NO: 575581 - DNA, 82 bp, Homo sapiens
aattgcagacttcaggtcgtggcagagaaaaccagctgagacagggcgccacttactagatggcggctcagcggcagcgggc

SEQ ID NO: 575582 - DNA, 75 bp, Homo sapiens
tccagcttagaaatggacgacgaaagctccggaccaaaatttaacagtgccatccgaggaaagattgggttgcct

SEQ ID NO: 575583 - DNA, 82 bp, Homo sapiens
ggtacctgcaggacccatttgtgtccattgatctcttggagcagctggggatcatgaacatacatatgatagttgagaaaga

SEQ ID NO: 575584 - DNA, 100 bp, Homo sapiens
gtagggcatccttcacccatctgaagggaggaaatagtggcaggtgacagtctgcatgtgcagttttcagaaatggtggagtcaatgaagaaagtagcag

SEQ ID NO: 575585 - DNA, 75 bp, Homo sapiens
tggaagaagccacccgcttaacatcctacctccagtcccagttaaaaagctttaccactcctgaaggccctaaac

SEQ ID NO: 575586 - DNA, 101 bp, Homo sapiens
ggcagggccagctgaccggccggggcctggtccgggcggtgcagaatcctcactatggatgggctcattgaggacattaagcatcggcggtattatgagaa

SEQ ID NO: 575587 - DNA, 87 bp, Homo sapiens
cgttattggctgccgttaaggaccgttacgtttcccgggtgagaagccctaccactgcaactgggacggctgcggctggaagtttgc

SEQ ID NO: 575588 - DNA, 100 bp, Homo sapiens
ttcacattccttcttagaagacttgactggtcttacattgctgcatcaagaaacccaagctgctgagggaacctcagaacctgttctggatccacagcaa

SEQ ID NO: 575589 - DNA, 75 bp, Homo sapiens
tgtgtatccatggagacaagagtcaaccagaaagagattgggtacttaatgctctatcgtccgagctttgtgcac

SEQ ID NO: 575590 - DNA, 75 bp, Homo sapiens
ccgtagtgtggaagcagcttcagttcgtgccctcgtgaggctggcatgcaggatggcaggacagcccggccacat

SEQ ID NO: 575591 - DNA, 75 bp, Homo sapiens
ctaaatgtcattactgaaactcagtgcactctagagttgccatataatgattactttgagtattttggaccagac

SEQ ID NO: 575592 - DNA, 83 bp, Homo sapiens
cagctacgcatagaagccgggattgagcgcatcaaggtgtcgtgaaaactacccctaaaagccaaaatgggaaaggaaaagac

SEQ ID NO: 575593 - DNA, 90 bp, Homo sapiens
aacctccagggccgcatcgggggcgactcaggcctgtccagccggggcaagaagtctagggacaggaagatggttggcgacgtgaccggg

SEQ ID NO: 575594 - DNA, 100 bp, Homo sapiens
accattttccgtttctgcgaccggtcggtgccccctgcccgggccctcctgaagaggcggcgctcagacagtacggcaagaagaagctgaaatacctgcc

SEQ ID NO: 575595 - DNA, 85 bp, Homo sapiens
aaaaggtggagaatggaagtggaaaatatatgcagatgatgaacattcttaagccaattgcctttgatgttattcatttcatgtc

SEQ ID NO: 575596 - DNA, 100 bp, Homo sapiens
ctttgaacttgaagatgaagtagaacaacatcgtgctgtgaaacttcatgacaacctcattatttctgatctagagaacctcttcagctcggatgcccgg

SEQ ID NO: 575597 - DNA, 80 bp, Homo sapiens
cggcgttctggatctcaaagcgccctcacctaccactacgagacccagtgcctgcccacgcccgccgcctggttcgcaca

SEQ ID NO: 575598 - DNA, 75 bp, Homo sapiens
ctccctcacggggaggacacatggcatctgacgacaccaaaaagaagatgtacagctccatcctagtggtgggag

SEQ ID NO: 575599 - DNA, 75 bp, Homo sapiens
ctttgaaccttcttgtcatcctcctacctgatgcaaacagggacacactgaaggagcttcagaaatacgagcagt

SEQ ID NO: 575600 - DNA, 82 bp, Homo sapiens
tcgtatgtccgctatccagaacctccactctttcgcacaacaccccgatcccccaaggaggcagaggagccatccagtttgt

SEQ ID NO: 575601 - DNA, 80 bp, Homo sapiens
cgatgagaactggttctacacgcgagctggcacacagaggagtactttctgcctcggatgatacaggacctgacaaagca

SEQ ID NO: 575602 - DNA, 113 bp, Homo sapiens
tggaacgcgggcgcctgaaggagttgttgtctcggcagcgcccgcggagacgtgaagaggttgtgaccgagattcccgacgagagagactgaggggaagagaggaaggagggg

SEQ ID NO: 575603 - DNA, 100 bp, Homo sapiens
aatggagacgccgccgctgcctcccgcttacctagaaaagtacgagaaagttcatcattttggggaggatgatgatgaggtaccaccaggcaatccaaag

SEQ ID NO: 575604 - DNA, 100 bp, Homo sapiens
cttactccccaatatatacgtcttggatagactgttggtgcatgctacaaaaagagaatttctacaagtgtgaaagaattagaaaacttcaggaacttgt

SEQ ID NO: 575605 - DNA, 98 bp, Homo sapiens
atcctgctcctgaattcctgctttctcatcagcagttttagcaggatgacgcaaaacacggtgattgtgaatggagttgctatggcctctaggccatc

SEQ ID NO: 575606 - DNA, 73 bp, Homo sapiens
cagaggagaggactactgtaattcccagccttgttcctttatagctatttgacagaccatatgctctattgaa

SEQ ID NO: 575607 - DNA, 74 bp, Homo sapiens
ccaggacaagcttttgtccccaaaccagagttggtagctggcagtgttgtgatggcttttgaagaagtatgccc

SEQ ID NO: 575608 - DNA, 100 bp, Homo sapiens
gcgaagcgctggtggcgggcccgggctgcggcgtgtgcgcgcccgccagctgctccggagatacggtgtttctgcccagttttccttcatagtcagatgc

SEQ ID NO: 575609 - DNA, 100 bp, Homo sapiens
gccgctgggaccttgggggaaagtggcagccgggccgcgggccctgtgtcttgcaggagtaccagcagttcagattttgcaagaacgaggctcaaggatg

SEQ ID NO: 575610 - DNA, 85 bp, Homo sapiens
tgcaccacagatatatgggtttttgtcccatgaggagcacccccatagccatcctctctatggacatggtgtatgcaagtggcca

SEQ ID NO: 575611 - DNA, 75 bp, Homo sapiens
agtacttgggatcccccagttccaaagtgtcttaaagatcagggagcagagaaacatgaaggcacaggtcagtcc

SEQ ID NO: 575612 - DNA, 100 bp, Homo sapiens
cgatttggtgaacagacactcccttctgtagacctccaatggaagtccgggcacatggcggagagcctcaccaacatgccacggcactccctctacatca

SEQ ID NO: 575613 - DNA, 100 bp, Homo sapiens
tgcagctgaacctggtgttttagaggataccttggtcccagagtcatcatgaagctatcttccagagggccacactgggcatggacacccttttccctgc

SEQ ID NO: 575614 - DNA, 100 bp, Homo sapiens
agccctcctgctgctcaagctcttcatcattctctgcaggtaaaatgtcggttccaggaccttaccaggcggccactgggccttcctcagcaccatccgc

SEQ ID NO: 575615 - DNA, 83 bp, Homo sapiens
ctcatcccagccatgtcatcttatctacgaaatgattcagagtgactcctctttcttcccagagtgtggtgattcaccatggc

SEQ ID NO: 575616 - DNA, 83 bp, Homo sapiens
aagcgactgagtccgcgatggagatcctgttcatcttcatcgacagcgaccacaccgacaaccagcgcatcctcgagttcttt

SEQ ID NO: 575617 - DNA, 74 bp, Homo sapiens
cccacttccagcagcagcagccactcaatctcagccagagaaatacatggagtttgaccttaatggaaatggcg

SEQ ID NO: 575618 - DNA, 90 bp, Homo sapiens
gacagaaatgttgatgtggtacttgaagacacctgtactgttgggtttggattcaggatttgttcctagtgtccaagattttgataagaa

SEQ ID NO: 575619 - DNA, 50 bp, Homo sapiens
gcgatacctgcctgcaggagttcctcagcgagaaccctctgcccacagtg

SEQ ID NO: 575620 - DNA, 74 bp, Homo sapiens
gcaaccgagaagatatttacagctctgcaaagaaggtgaaggcgtttgggccggggctgcagggaggcagtgcg

SEQ ID NO: 575621 - DNA, 89 bp, Homo sapiens
cttctatgacgggtacagacatgagatgcttccagccagcctcatccagaggctaaaggcagcagttcactatactgtgggttgtcttt

SEQ ID NO: 575622 - DNA, 73 bp, Homo sapiens
tgcagaatatgctaaacttttggccaagagaatgaaggagaggtccaggccttctatgaggacctgagtggcc

SEQ ID NO: 575623 - DNA, 95 bp, Homo sapiens
tgacttcattttagagctgtaccagacaggttccacagaggaagaaggagagacgaccatcttgcaactagaaaaagatttgcgcacccaagtgg

SEQ ID NO: 575624 - DNA, 100 bp, Homo sapiens
tgagctgggaggccactagcagccagttccggcccgaggacaccgactaccagcagcttgcgcgatctctggcctcttcaactgcatcaccatccaccct

SEQ ID NO: 575625 - DNA, 49 bp, Homo sapiens
gttagctggtgctttgtgtgctcagaagagatggggtttcgccatgttg

SEQ ID NO: 575626 - DNA, 75 bp, Homo sapiens
ggaaagacgatggagggcagcgaagagagtcaccgaccatgacgggtcagggaagtcaaagatgcatccctgagt

SEQ ID NO: 575627 - DNA, 74 bp, Homo sapiens
gcccccagctcagctcttactgcgggccgctccgacggcggtccatcctgttcattcggctcctaaagaagtag

SEQ ID NO: 575628 - DNA, 83 bp, Homo sapiens
tgcagccgcgaggaggcgcgggaggtgttcgagaacgaccccgagacggtgctggggagtcagggaagagcaccatcgtcaag

SEQ ID NO: 575629 - DNA, 100 bp, Homo sapiens
aagaactttgtggtcgtcatggtgaccaagcattaaagggcagtatttaaagtcagttggcaagcagtggaataagatttttgtaaagaaaccttgtgca

SEQ ID NO: 575630 - DNA, 75 bp, Homo sapiens
gcgaccatggcctcctccgaggtggcgcggcacctgtgaaaaatgtgaggttttacaatattctgcaagggaagc

SEQ ID NO: 575631 - DNA, 100 bp, Homo sapiens
tccccatgcgcttctcggtgctgattttgcaagaacgaggctcaaggatgtgagggacacagtattgacagctgaagaaatgatttacgttttcccgaga

SEQ ID NO: 575632 - DNA, 104 bp, Homo sapiens
gtatggccaacgagaagcacagcaagaacatcacccagcgcggcaacgtcgccaagacctcgggccgttgctccagggagaactgcaaatatcttcatccaccc

SEQ ID NO: 575633 - DNA, 100 bp, Homo sapiens
ccgctttgtgaaatggccccgctatatcagtttgcaggtcgaagtaagaaggaaaccaaatattctcttaaggctgtcgaagacatgttggaaacattgc

SEQ ID NO: 575634 - DNA, 89 bp, Homo sapiens
ctgagtggttgtgtggtcgcgtctcggaaaccggtagcgcttgcagcatgcactccgtacaaagtgagacctgtggccatcaagcaact

SEQ ID NO: 575635 - DNA, 82 bp, Homo sapiens
ggggaggccaacgtgaagaagcgacgttgtggacgtttaccagcgggagttcctggcgctgcgcgatcggttgcacgcagct

SEQ ID NO: 575636 - DNA, 83 bp, Homo sapiens
gttggagagctcatctggaattttgccgatttcatgactaaccagtgctttccttaaagtttcccatgtctcaatggactcct

SEQ ID NO: 575637 - DNA, 98 bp, Homo sapiens
aagaagtggcccgaacggctgtctgccctcgataatctcctcaaccattccagcatgttcctcaaacaggggcaagtgtccgagtggtgaatcagcta

SEQ ID NO: 575638 - DNA, 74 bp, Homo sapiens
gggagtattatgaaaagatcgctgattcaccccaagagtggccgttcctaccacgaggagttcaaccctccaaa

SEQ ID NO: 575639 - DNA, 131 bp, Homo sapiens
cggacctgagccgcgaggacacgggctgcaacctgcagcacatcagcgaccgggagaacatagacgggaagtcgagataacatgagtattgtactagtttgcttttcaaatgctcccaaggtctcagatga

SEQ ID NO: 575640 - DNA, 83 bp, Homo sapiens
tcgcgcgcgaccgccgaatcgctcctgcagcagagatcttcgtgaagactctgactggtaagaccatcaccctcgaggttgag

SEQ ID NO: 575641 - DNA, 100 bp, Homo sapiens
agaaaacctcaggaaattctacaaggtggactacgtggagcccagccagaacaccatctccctgaagatgatcccacgcatcgactacgatcgcatcaag

SEQ ID NO: 575642 - DNA, 75 bp, Homo sapiens
gaaacttcttgatattcttcataaagactcatcacttgggcttctctacagtttagcctttaatgccaggtttct

SEQ ID NO: 575643 - DNA, 82 bp, Homo sapiens
gcctccagtcaccctcgtcttgcattttcccgcgtgcgtgtgtgagtcgctctgcctgtctgatgacgacacagctgatctg

SEQ ID NO: 575644 - DNA, 75 bp, Homo sapiens
gcacgcggggctgctgcccaaggcaatgagaagcacgaccttcatgttacctcccagcagggcagcagtgaacca

SEQ ID NO: 575645 - DNA, 121 bp, Homo sapiens
ccgggactgcccgtcgaggtgcgcggctccaacggggccttctacaaggtggacatcttcaataaggagctactgctaatccccatccacctggaggtgcattggtccctcatctctgttg

SEQ ID NO: 575646 - DNA, 73 bp, Homo sapiens
tgccatggccctggagaaaaagctgaaccaggaggcaaaaccttcaactgaggacttgggggataagaaggaa

SEQ ID NO: 575647 - DNA, 100 bp, Homo sapiens
cagggaccgagggcgagacacgcctgggcccaggtgtggcgtctctgtccccatctggttttaggtggcctgacggagcaagagctgatggaacagctgg

SEQ ID NO: 575648 - DNA, 49 bp, Homo sapiens
cgccgaggatgataaacacccaggacagacctgaaagatgtctgaaaat

SEQ ID NO: 575649 - DNA, 103 bp, Homo sapiens
cagccagcacactcctcgcgagcaagcaatggctgccatccggaagaaactggtgattgttggtgatggagcctgtggaaagacatgcttgctcatagtcttc

SEQ ID NO: 575650 - DNA, 90 bp, Homo sapiens
gtcacggcgtacgccctcatggggaaaatctccccggtgactttcagaacgacaccgtaactatccgcactagaaagttcatgaccaacc

SEQ ID NO: 575651 - DNA, 98 bp, Homo sapiens
atgcttcaagatgtgtatcatgtggtcacattgaaaattcagttacacagattgagaaagaagtcagtgaggccatgatgaagtccctaaaatactgc

SEQ ID NO: 575652 - DNA, 73 bp, Homo sapiens
taacaaacgagggttcccgggattggaccgacgcagccatgacttatcagatgtagacttcctagatgattct

SEQ ID NO: 575653 - DNA, 107 bp, Homo sapiens
ggacgaaggtactcgcagcacttggagcgcagaaccggccgcgcccgaatgattacggacctgaagccaaagaacaagatgcgctagtggacagattgctgaccagg

SEQ ID NO: 575654 - DNA, 100 bp, Homo sapiens
ggtgtggggcggtcccggccccgcagcaattaatggatgcctcgaagttgacgtacatatatattcagaaatgttttgccacctgagacctatgaggagg

SEQ ID NO: 575655 - DNA, 100 bp, Homo sapiens
cagcgagcgattggccgggctgcaggcgaggtacatgtcccagagcaagcacacggaggcccgggagctcatgtactcgggagccctgctcttcttcagc

SEQ ID NO: 575656 - DNA, 100 bp, Homo sapiens
gcactcggatgccgccgctgtcaaatgtcaaaactggaccaatggggccaggctgaagtattgaactttctgctacgctaccaaccccgcagtgaggaag

SEQ ID NO: 575657 - DNA, 83 bp, Homo sapiens
aaggaagacttgtaacctggagaagaggatttttagactctgaggagcagttggagctaatccacattatggaaatggaaacc

SEQ ID NO: 575658 - DNA, 75 bp, Homo sapiens
gaaaaagtgaggatggatctttataagagaggaattccccctgctagggtatttgaagtataccatacaactgtt

SEQ ID NO: 575659 - DNA, 75 bp, Homo sapiens
aaaagagatggcaaggagaaaaaagacagaggagtgacgaggcctaattcagtggtttgagacagcaccaagtcg

SEQ ID NO: 575660 - DNA, 90 bp, Homo sapiens
cgacgcccggcgccagcacatcgcagggaaggctacaacaatccccccatctcaggtgagaatctgattggcctgagcagagcccggcgc

SEQ ID NO: 575661 - DNA, 100 bp, Homo sapiens
atgttccagaaaaatctgagtacttggaagttaaatactcgtgctcatctctcagagatctagaacttgcctaccaagtacatggccttttaaaaaccgg

SEQ ID NO: 575662 - DNA, 75 bp, Homo sapiens
ctggaagcgcagcaacagcaagctcccgggcaggtttggtgcacctcgatttggaggaagtagggcagggccctt

SEQ ID NO: 575663 - DNA, 101 bp, Homo sapiens
tcccagagtggaaatgccctcacagcatatgccttgtttaagttacagatttatggtaatggaaagactaggaatagatttacagaagatctcaggccaga

SEQ ID NO: 575664 - DNA, 100 bp, Homo sapiens
agagtctgctggacgcccaggcggacgaggccgtgttaggtgctgggtaggccaggtttcagcatcgcagacaagaagcgcaggacaggctgcattgggg

SEQ ID NO: 575665 - DNA, 75 bp, Homo sapiens
caacaccaaaaagctttctgctagggctcaaattgaaattattccatgcaagatctgtggagacaaatcatcagg

SEQ ID NO: 575666 - DNA, 74 bp, Homo sapiens
aattatgggagcgcatttccccagggagttattcctgatgaagctaaagctttgtctctgttggcaccagctaa

SEQ ID NO: 575667 - DNA, 90 bp, Homo sapiens
gacccacaggagccccggacttcacctgagctacctcagatgacaacggcaacacgacaagaagtccttggcctctaccgcagcattttc

SEQ ID NO: 575668 - DNA, 51 bp, Homo sapiens
gcccactggaagcctccaccttggaatgaggcatttcatccttcatgaagc

SEQ ID NO: 575669 - DNA, 100 bp, Homo sapiens
gtacgatttgaccaaatttctggaagagggaatgcagagagcaaccaatgtcacctaccaagcccatcatgtcagcaggaacaagagaggtcaggtggtg

SEQ ID NO: 575670 - DNA, 90 bp, Homo sapiens
caccggtcccccagcggcagccgagcccgcccgcgcgccggtaagtaaggaggtctctgtaccatggctcgtacaaagcagactgcccgc

SEQ ID NO: 575671 - DNA, 74 bp, Homo sapiens
gcctccgccgccaagagtgagcgagcggacccgcgatggctgtttggggctcagctaagtgaccacacaggaga

SEQ ID NO: 575672 - DNA, 100 bp, Homo sapiens
aacaatatttctcagaggatagcctttcacttattcatctgtccagcatgactcatccccgggagtgttgaccaaggccacctttgatgccatttctaag

SEQ ID NO: 575673 - DNA, 83 bp, Homo sapiens
cacgcagtgacgagcggccgaagcagctttgcggtgagaagccctaccactgcaactgggacggctgcggctggaagtttgcg

SEQ ID NO: 575674 - DNA, 83 bp, Homo sapiens
ccaagagcaagtcagaggccaagtggaagtacaagcagaaaaatatggctcaggagactaaccagaccccggggcccatgctg

SEQ ID NO: 575675 - DNA, 75 bp, Homo sapiens
ccaagtcctccacagagggcgagccagggtggagaagagccagcccaggatcaaagttctgatcgtaccagtctt

SEQ ID NO: 575676 - DNA, 101 bp, Homo sapiens
cttaaaacctgaaaacattggaccacacaaagtcttactgatgccttcaattaagttgcagagttctgatggagagatatttgaagttgatgtggaaattg

SEQ ID NO: 575677 - DNA, 100 bp, Homo sapiens
gtgacccactcactccaggctatccagcaaaagaagtctggaacgttttttcttagagttccagaattgagactgaagtgtacccagagacacaaagaaa

SEQ ID NO: 575678 - DNA, 98 bp, Homo sapiens
ggagctggttctgaagggcagctggggattggagaattcaaggaaataagtttcacacctaaggtgtgggctcccgcctggatggtcttcgaaaccgg

SEQ ID NO: 575679 - DNA, 95 bp, Homo sapiens
tggatatggcagtggacgtggatttggggatggctataatgggtatggaggaggacctggaggacatcggtgggatcaagtgaaaaaggaggacc

SEQ ID NO: 575680 - DNA, 100 bp, Homo sapiens
atgtctccctgcctctcaataccttgggcccagtcatgaagatggaacctctgaataacctccagtctcttgcatggcaccaagaatgttaccaattcaa

SEQ ID NO: 575681 - DNA, 74 bp, Homo sapiens
gagatgaaagctttgtatgaacaaaaccagtctgatgtgagaatgtactactcatcacctcccacctgtgaaag

SEQ ID NO: 575682 - DNA, 100 bp, Homo sapiens
cgccgctggacgctggtggggactcgctctcggcttgaccgcattcttcctcccaggaaatggccagcctcaaacgacaattcacggaactgttatcgga

SEQ ID NO: 575683 - DNA, 50 bp, Homo sapiens
ccccccaagcagcggcagctgctgagcaccctgacaccactccacatcgc

SEQ ID NO: 575684 - DNA, 100 bp, Homo sapiens
acgtcacatgtcattataccttcacccagcatttcatccctcgtcgaaaggattggattggcatctttagagaccctgatgctcccataagacagaaaat

SEQ ID NO: 575685 - DNA, 50 bp, Homo sapiens
gatgtggacgaaggggccgacctcctagggctctggaaggggaggctcac

SEQ ID NO: 575686 - DNA, 100 bp, Homo sapiens
cttctctgaagggtttttcgccaagtggtggcgctgctttcctgagcggtggttcccatttccttatccatgggggaacgtgaaggggaaacggccctac

SEQ ID NO: 575687 - DNA, 129 bp, Homo sapiens
tcagaaaactatgggaagattttggtagagaagaatgaacattgtattgagaacaatatagatttgcaggtgatgatgaacagtctacacagatggctgcaagttgggaagatgataaagttacagaag

SEQ ID NO: 575688 - DNA, 95 bp, Homo sapiens
ctggaaatcgacttcggtttcagttggagttggaatttgtgcaatgtttagccaacccaaattaccttaattccaacaaatggaattttcttgag

SEQ ID NO: 575689 - DNA, 99 bp, Homo sapiens
ctcatgcggatcaccctgcggaacctggaggaggtggagttctgtgtggaagaaggtagaagatagcaccatgccgattcgtcgaactgtgaattctac

SEQ ID NO: 575690 - DNA, 97 bp, Homo sapiens
tgtatcatctgtgtatttgtactacgatcctgattattcgtttttgtctttgggcgtctactctgcactacggtaccaaagcagtcagactcacagc

SEQ ID NO: 575691 - DNA, 100 bp, Homo sapiens
ctgagacatctttggtttctaatatcttccatgtcaacacggatgatcacagggaagctggaagacttccgattagagaaaggtgaagaggaaagaaatc

SEQ ID NO: 575692 - DNA, 85 bp, Homo sapiens
acacgctgttctcagcagctactggtcccagcatctggggaagaaagaaatgcatggttggactccatgaaagaattgcacaaaa

SEQ ID NO: 575693 - DNA, 82 bp, Homo sapiens
gtaaggtgctgcggagcgacgcggcctgggaggataagacaatgcagatcttcgtgaagactctgactggtaagaccatcac

SEQ ID NO: 575694 - DNA, 97 bp, Homo sapiens
ctgcagccccggcctccacctgctgcccttagccagccagtgttgcccttggccccctcgtcgtctgccccaggttatggaggttttgatgactatg

SEQ ID NO: 575695 - DNA, 110 bp, Homo sapiens
ggctgcctctaccgcctgcgggcgctgggcgagcggcacaccatggacctcactgtgggctgcctgctgtttcccggggagatcatgaaacgaggtcgccttcccagcag

SEQ ID NO: 575696 - DNA, 100 bp, Homo sapiens
gtggctcatctacgaagagtccaggtgagcgaggcggagatcaatgggcaattcgagtccgtgtgcgagtccgtcttcagtgaagttgaatctcaggcca

SEQ ID NO: 575697 - DNA, 50 bp, Homo sapiens
ttgcaagcattctatccaaatgggaacaagctgccaataatgtctgcaaa

SEQ ID NO: 575698 - DNA, 76 bp, Homo sapiens
cagacatggcctctggcaccaccaccaccgccgtgaagaacatccagtcatcaagttccaatgtgttgggcatgaa

SEQ ID NO: 575699 - DNA, 82 bp, Homo sapiens
tttacagaaacaaactacatctcaggacaaaacttgccaatggcacttccagtatgattgtgcccaagcaacggaaactctc

SEQ ID NO: 575700 - DNA, 50 bp, Homo sapiens
tcaagaaatttgcctcgaaaaccaagtgctggctgccagctgctgcgccc

SEQ ID NO: 575701 - DNA, 90 bp, Homo sapiens
ttaagattaagaggcatacaccacttagtaaactaatgaaagcctattgtgaacgacaggatctcaaagatttcatgagacaagctgggg

SEQ ID NO: 575702 - DNA, 87 bp, Homo sapiens
aggcagctgtgactgaggcagtgcgggccctgctgatcctgaaggacacgcaggtgactcgacaggccttaaatgagatctcggccc

SEQ ID NO: 575703 - DNA, 99 bp, Homo sapiens
ttaaactgatggtccagagaactactgctcatttcccccatcccccacagtgcaccctgctggtgaaggacaagatgcaaccttaaaatcagtgacaag

SEQ ID NO: 575704 - DNA, 75 bp, Homo sapiens
gggaactttggaggtggtggaggtaattttggccgtggtggaaacttcagaacattttcgtatagatggtccagt

SEQ ID NO: 575705 - DNA, 82 bp, Homo sapiens
gacgtcatcatgctgaccaccaatcagatccgtaagtttgatgaaggccggaacaactttgaaggggaggtcaccaaggaga

SEQ ID NO: 575706 - DNA, 71 bp, Homo sapiens
tgaaactaattcatgcagatccaaagctcttgctttgtgaagagagaagggcacagttacctaagtatcaa

SEQ ID NO: 575707 - DNA, 75 bp, Homo sapiens
ctgacaattctgtcgtgtcccgacatatctgaagagatggattaagaatgctttggattaaggattgtggagcac

SEQ ID NO: 575708 - DNA, 97 bp, Homo sapiens
gtaaagggaagtcatttctactggacttcatgcttagatacatgtataacaaggtttttagaacttcagccataaaaatgggcagaattttccttga

SEQ ID NO: 575709 - DNA, 120 bp, Homo sapiens
cccgcttcctggaatggcaagcgcagcaacaacagagagcacgtggtgcccgtggttgacacgagctgtgtccccagctgttcccgtctacaatggcatcatcttcctctttgtcctggc

SEQ ID NO: 575710 - DNA, 51 bp, Homo sapiens
tccgtttgttcaggaaccaccagtgacagacactgccccccaggtgttgag

SEQ ID NO: 575711 - DNA, 96 bp, Homo sapiens
tggagacctgcaggaaccttgcctccttgggtcccaggtgtgtgatggcggctgcaatctgtcttgtgggtattaatgcaatcttcagtggtggct

SEQ ID NO: 575712 - DNA, 82 bp, Homo sapiens
ccatgaggcgccagcctgcgaaggtggcggcgctgctgctcgggctgctcttggaggccatccagaaggaactagaacagac

SEQ ID NO: 575713 - DNA, 80 bp, Homo sapiens
gcgagacttcgggaccgtgtcctgagcgctctccatgcgcccggcgcgagattgcaggcctaagtctacctcttcctccc

SEQ ID NO: 575714 - DNA, 100 bp, Homo sapiens
ggaagattgtggatcaaataagagcactggagatattattgctgtcatgataacagaattgaggggtaaggatattttgagttatctggagaaaaacatc

SEQ ID NO: 575715 - DNA, 96 bp, Homo sapiens
agcacaagtggcgaatcatcagtcccaccctgctagcagaatatgcctacgtgctaagagttggggtatgcccaagaggacagagaacgaatgcac

SEQ ID NO: 575716 - DNA, 97 bp, Homo sapiens
cagaataactgtcaagacaacagtgatgaggaaagctgtgaaagttctcaagatgaccagctgaactcagaagaaaaaaagaagagaaagcagcgaa

SEQ ID NO: 575717 - DNA, 75 bp, Homo sapiens
cacctggaccttggacattcagacttcagaatgggcccagcgtgtgaggcggccgataccagggtcagatcagac

SEQ ID NO: 575718 - DNA, 50 bp, Homo sapiens
gcctgcggagcctgtggggcaggttttgagcaaaattttggactgtgaag

SEQ ID NO: 575719 - DNA, 75 bp, Homo sapiens
cttagctgtgctcgcgctactctctctttctggcctggaggctatccagcatttattgctaaacatgggtgcatt

SEQ ID NO: 575720 - DNA, 98 bp, Homo sapiens
tgaagaaccagacctggactttcttaggtaaaataccatgaagattttgaaaaaacaaaggggagaggctttactcccgtcgtggacgatcctgtgac

SEQ ID NO: 575721 - DNA, 50 bp, Homo sapiens
ggggactactggtgcctgcgctgaaaaagctcggtcaaggagtgtgatga

SEQ ID NO: 575722 - DNA, 75 bp, Homo sapiens
agcagaggaaaatggaagagctcatcaaaaacgagccggaagacttaattcagtgcacaaatgagatgaatgtga

SEQ ID NO: 575723 - DNA, 100 bp, Homo sapiens
ggtggcatcacgatgctcttcacaggatacttcgtcctgtgttgtagctggagtttcagacgtctgagtgctggagaatctggtaaaagcaccattgtga

SEQ ID NO: 575724 - DNA, 97 bp, Homo sapiens
gcactgactcgcctcaagcacctgcgcatcgtcatcggtgaacgcttggccaagccagagcgaggcaagatgagagtgcacaagatctccaacgtca

SEQ ID NO: 575725 - DNA, 75 bp, Homo sapiens
gtaaaggtgctggtaagatttcttctggtgctaactgccaaagaaaggaaaactcaaattgatgatagaaacaaa

SEQ ID NO: 575726 - DNA, 106 bp, Homo sapiens
gaaaacggctcaacccaccgctgccgaaatgaagtataaggaagatgatccctatgatcttgaagatgtttctgcacagaaatgagggaaatacaaagaaccaaat

SEQ ID NO: 575727 - DNA, 51 bp, Homo sapiens
aagagcgctcccaggagaaacaaacggcagttctgctactgcgaattgatg

SEQ ID NO: 575728 - DNA, 100 bp, Homo sapiens
agctcgggcgggtcctacagagacagttatgacagttacggtgaccaagaatatggcccaggtgaccaaagccctggacaaggccctgagcaccatggac

SEQ ID NO: 575729 - DNA, 75 bp, Homo sapiens
ccgagggcggcgacaagaaccgaatttcgctaaggagtttgtgatcagtgatcggaaggagctggaggaagattt

SEQ ID NO: 575730 - DNA, 100 bp, Homo sapiens
cagagtctgagatagagacagataaaaatggatttttgcagtacgatgatgggcttccccaaggatttattgacattgctacttgagtgtgaacagttac

SEQ ID NO: 575731 - DNA, 82 bp, Homo sapiens
taccacgacaaaaccaccctagtctacttccccagcaggacagcatcattctcctatatcttctagacatcactcatcttcc

SEQ ID NO: 575732 - DNA, 100 bp, Homo sapiens
ctcaacaatggtcatgctttcaacgtggagtttgatgactctcaggacaaagcaggcccagccccagcccaggggaccccagacgtctccagtgccttgg

SEQ ID NO: 575733 - DNA, 83 bp, Homo sapiens
ggtcccaatcccccactctttccgccctaatggaggtctccagtttcgcttccttcaaaatgtctactgttcacgaaatcctg

SEQ ID NO: 575734 - DNA, 100 bp, Homo sapiens
ttctgaatctcctcccagctgaagctttaatgaagcaccagttgagattcccagtccttctgaaaccccagctaaaccttctgaacctgaaagtaccttg

SEQ ID NO: 575735 - DNA, 80 bp, Homo sapiens
gaactctcagtggtcctacctggggatattatcaaatctactactgttcatggcaggctggagtgcagcggcgtgatctc

SEQ ID NO: 575736 - DNA, 100 bp, Homo sapiens
gcggcggaggcgacggtggcggctctcggagccggcgcgaatccggcccccgcagcgggacccgggttcaagctgaagttcctggatctcccatatttgt

SEQ ID NO: 575737 - DNA, 74 bp, Homo sapiens
gcaccgagtccagcccaggaaaatggagaggttgttgcttgtgaacttgacccaaggctagtagctgaacttca

SEQ ID NO: 575738 - DNA, 90 bp, Homo sapiens
tggctgacaaagacacagtgctgctggagttttatgctccatggtgtggacactgccagcggctgcagccgacttggaatgacctgggag

SEQ ID NO: 575739 - DNA, 100 bp, Homo sapiens
ggacgctgcgcggctactacaatcagagcgaggccgggccccgtgatcaaggtgaacagcaagcaacgctatgcttcaaacgcggtgtcagaggccctga

SEQ ID NO: 575740 - DNA, 90 bp, Homo sapiens
caaggacagtgaggagctgggtggtcccagcctggagctgtgccagcctgacatgggaagagagaagggcacagttacctaagtatcaac

SEQ ID NO: 575741 - DNA, 82 bp, Homo sapiens
cagggccgggcagtgctccctatccgctggatgtcttgggagagtatcttgctgtggcattggcctggccctctgcaagcgg

SEQ ID NO: 575742 - DNA, 74 bp, Homo sapiens
caaattatggatgaacctatgggagaggaggagattaacccacaaactgattgtactgtatatgaaacagagaa

SEQ ID NO: 575743 - DNA, 100 bp, Homo sapiens
ttggcgcctcggggaggggaccgcgcccgcctcatttgcgccttgcagcactgctggaccaggaagtgcttcgggagatccaggatgcagtggccagggc

SEQ ID NO: 575744 - DNA, 82 bp, Homo sapiens
gcacatacataactttggagagcaaagacatcagattatgagcctcaaacaatttgtgagcatctccagtacttgtttgcct

SEQ ID NO: 575745 - DNA, 95 bp, Homo sapiens
ctggaagtgtagattctatagctgttgatggctcaggaactaaatgggctcgggatgagtttgaaggcctcttcaagcagccagcagaaaatgtc

SEQ ID NO: 575746 - DNA, 82 bp, Homo sapiens
cacagacaacgtcatgttgcgggtccagcctgatgggaaagtgctctatagtctcaggagattatttggtagcaattgaaga

SEQ ID NO: 575747 - DNA, 100 bp, Homo sapiens
ttgttagaaaggagacccgactgcaactgctggattgctgcaaggctgagggacgagaacgagccctgatgatattgggacctgctggtatatccttctt

SEQ ID NO: 575748 - DNA, 98 bp, Homo sapiens
tttctgctccgtcatccatgccactgcgttcccacagctgtgcagaacttagcgccacgcgctgctgttgctgctgctgctccccgggctgttgcccc

SEQ ID NO: 575749 - DNA, 100 bp, Homo sapiens
tcagaatccaagcggagagagtcagcctctggttcagactgcagtaaccaagctggtggagttgagatctataatggagatcgtaaaataaaggtttcca

SEQ ID NO: 575750 - DNA, 50 bp, Homo sapiens
ccggagaggagtggcctcgcccgcttggtacgaagatgccctggtgctcc

SEQ ID NO: 575751 - DNA, 100 bp, Homo sapiens
gaagaagtccacccagaaggtgctggacccgaagaaggacgtgctgacccgcctgaagcacctgcgggcgctgctggaactgataaatttcaaacggaag

SEQ ID NO: 575752 - DNA, 100 bp, Homo sapiens
atttgggcagtcaattaacataaataggctgcttggagaaaatgatggggaaacaagagctttgccaaggccacctttgatgccatttctaagacctaca

SEQ ID NO: 575753 - DNA, 82 bp, Homo sapiens
gcgactgcaggcgctcatgatggagtgctgggacactaagccagagaaggcgtggtgaccaagatgaagatgcagaggacca

SEQ ID NO: 575754 - DNA, 100 bp, Homo sapiens
cttggggggatggttccatcatggcgtcaatgcagatgaaggatttgggggcagagcacttggcaggtcatgaaggggtccaacttctcgggttgttgaa

SEQ ID NO: 575755 - DNA, 100 bp, Homo sapiens
tgaaaatggagaactctgtgatgtcacactcaagcttagcagtgtctgcaaaaacgaatcttttcctacaacctgttaactgactggactgttggtaaca

SEQ ID NO: 575756 - DNA, 88 bp, Homo sapiens
atactgcaagtcttttgatagatgtcataacagtatttggagaactcactgatgaaacaacatctggggaagatgtacgagacttcac

SEQ ID NO: 575757 - DNA, 82 bp, Homo sapiens
cggaagcggatcgggtggagtgtaggtcatatcgccgcggcgcatattaaatttcctattgactacccctattcaccaccta

SEQ ID NO: 575758 - DNA, 50 bp, Homo sapiens
cctgaagatctgtgccaaccactacacccccaaatacatcaagatgtttg

SEQ ID NO: 575759 - DNA, 103 bp, Homo sapiens
atcgacacacaaagaatagagttgagcctgtgggacacttcggcgccgtgccgtccctgcagtgacaccgaggtgctcctagccgtctgcaccagcgacttcg

SEQ ID NO: 575760 - DNA, 100 bp, Homo sapiens
cattgctgcagctcgtgggtgctcaggtcctgtccaaaatgcattgctgtcttcacaagagtcagtgagccaaggatacaatttccagcttccaggatcc

SEQ ID NO: 575761 - DNA, 100 bp, Homo sapiens
tgaaaacatcatcgttttgaagagttctgcgttttgccagtcacctctcaactgtgtgccaaaggacacagccagtgtgaagtcctctagtagtcttgaa

SEQ ID NO: 575762 - DNA, 83 bp, Homo sapiens
ccaacggggaggccaacgtgaagaagtgaccctggcaaagatgagagtgcacatttcgtcctgcctgaaggtccaggagcaga

SEQ ID NO: 575763 - DNA, 51 bp, Homo sapiens
cttgactcagcttgacatctgcagatggagtctcactttgtcacccaggct

SEQ ID NO: 575764 - DNA, 82 bp, Homo sapiens
ctcctgctctgggaccggaggagacatcggcctctgcaggcttgccgaagaagggagtgtactaatggtcacttgatgtgcg

SEQ ID NO: 575765 - DNA, 112 bp, Homo sapiens
ctggcccgccacagcgacgccggcgccgagggacaccgcagtatgaggcagagagattccatcgtgcctggctcacataagcgcttcctggaagtgaagtcgtgctgtcctg

SEQ ID NO: 575766 - DNA, 82 bp, Homo sapiens
gggcgcccgaggcttcccggtgcgctccgccaggtcttgttcagcgttgcgtaatcatccagaaagatgacaatggatttgg

SEQ ID NO: 575767 - DNA, 97 bp, Homo sapiens
tttttgatgaaattgtagagaactatttgaaagaagccaacactaaaccacaaatatacaacaaggccattttctcaaacgagagtcagcctttaac

SEQ ID NO: 575768 - DNA, 100 bp, Homo sapiens
agcggcggcggcgctcgcgagaggaggcccaggccaaggcgcagttgtgtagcagttgagtaatgctggttagctgttaaggtggcgtgttgcagtgcag

SEQ ID NO: 575769 - DNA, 74 bp, Homo sapiens
acggattcatttagagctgcggaacaggacgccctctgatccgctgtacaaccagccctccgacacccggcagt

SEQ ID NO: 575770 - DNA, 75 bp, Homo sapiens
ctcaggtcctcgggggcggcggccacgccaaggacggtgagacggtttaagcggaagcatcttactgccattgac

SEQ ID NO: 575771 - DNA, 98 bp, Homo sapiens
agaggagaagagcccagcacaacgaagatgccatggacaatattaccaggcagaaccaattctacgatacccaagtcatcaaacaagaaaacgagtca

SEQ ID NO: 575772 - DNA, 100 bp, Homo sapiens
taaaccactagcccatttcacagagatgtcggcttatttataggaattgcttgaagccagagtcatggtggatgtcggaaagtggcccatcttcactcta

SEQ ID NO: 575773 - DNA, 75 bp, Homo sapiens
tcgccgtgcccgagaatagctccgtccagcagactcaccccacacagaccgcgtttctctccagtgtcgacctac

SEQ ID NO: 575774 - DNA, 89 bp, Homo sapiens
tccttgcagaacatgagaaaattcatttttgagataactgttcccaatgcagctggaagattatatctggatcaccaccagagcaagcc

SEQ ID NO: 575775 - DNA, 100 bp, Homo sapiens
ttggaattgctaagagcccaaatacaacaagaattagaaactccaatgagagaacgttttaggaatctagatgaatgtgtggaccagttgacaaagatcc

SEQ ID NO: 575776 - DNA, 90 bp, Homo sapiens
tccagagagagtgaattacaagtttgaaagtggaacttggaacatggacgttttgttctcatttcgtgatggagactgcagtaaaggatt

SEQ ID NO: 575777 - DNA, 100 bp, Homo sapiens
tgttggaccttccggagcttctcagaagacagagggttttcttttgagaagagtcaagtaccattggccaggatcaaacgcttatggaacgtgatacaga

SEQ ID NO: 575778 - DNA, 98 bp, Homo sapiens
agaacaagaagttgagaccgagaatgtggaaacagaaggccaatgatgaggccaatcagagtgatacaagtgtctccttgtcagaacccaagagcaaa

SEQ ID NO: 575779 - DNA, 100 bp, Homo sapiens
acttctactgacgaagcttggaagttgcagaagaccttcacggcatggtgcaactcccacctgcggaaggcaggcacacagatcgagaacattgatgagg

SEQ ID NO: 575780 - DNA, 98 bp, Homo sapiens
ctgtggggcaatccgggcttgcagacgaggctgaagccgacgtagcttctctgaacagacgcatccagctggttgaggaagagttggatcgtgcccag

SEQ ID NO: 575781 - DNA, 74 bp, Homo sapiens
ccaccgactggaaggaggcgaaatgccaggctaccaacgtctttgtgaacatggaggaggacttcatgaagcca

SEQ ID NO: 575782 - DNA, 51 bp, Homo sapiens
tacctttgtcatttggaagaagcgaagagttacagaatgtctgaaggggac

SEQ ID NO: 575783 - DNA, 75 bp, Homo sapiens
aacgacatgatgcaatcttcaggaaagtaagagggccatgcgtagtcacgaaggaaatgaagcccaggtttgtta

SEQ ID NO: 575784 - DNA, 75 bp, Homo sapiens
tggccaagaagggccttactccttcacagatcgattgcatttgcacacgattcaactcgtgtgatccagtgttac

SEQ ID NO: 575785 - DNA, 75 bp, Homo sapiens
tccctctcagcacctgggcggacgggacatgagagatggctttagaagaaaaagtttctactcttcccattatgc

SEQ ID NO: 575786 - DNA, 50 bp, Homo sapiens
tgaaatccgagcaattcctaaaaaggtgaatcaattcagatatttgctga

SEQ ID NO: 575787 - DNA, 100 bp, Homo sapiens
cttcttcccggggcgccataaacgcccccaatttcccagctgctaaaggaagaggaagctgcagaaccttggcctgaaaatgctacattatatcagcaat

SEQ ID NO: 575788 - DNA, 83 bp, Homo sapiens
gttgaagatgtcggccttctgagccgactgcggtggtcaagaggaaaactttattctcaagagatttctcattccgcagaaat

SEQ ID NO: 575789 - DNA, 110 bp, Homo sapiens
gctgtatgcaagttttcacttatctcgaaagcctatcagcatagttaagtgtgaagaccagaaggtggaatgcctgtacgaggcgctgaagagagctggagacaggctcc

SEQ ID NO: 575790 - DNA, 74 bp, Homo sapiens
taatagtaactctacatctggttctgctactagcaacccttttggtttaggtggaagtagagcttttgtcccgg

SEQ ID NO: 575791 - DNA, 83 bp, Homo sapiens
gggacagcacctcatcccctggatgggggaccacaagatcctcatcgacagcaaaatgatgcttcaacacccaggccaggtct

SEQ ID NO: 575792 - DNA, 75 bp, Homo sapiens
atcagcagacaacattggatacacctcaactagaacgcaaaagatcctggtgtatagcctggaagcaggacgccg

SEQ ID NO: 575793 - DNA, 100 bp, Homo sapiens
ggcagtgcgtcaatcagagcgtcctgtgcgatcaccaaggtgatgctgctcaagggctggcgttgtgtggagtgtattgtgtgtgaggtgtgtggccagg

SEQ ID NO: 575794 - DNA, 83 bp, Homo sapiens
cccgatcccgccagccactcgcccctggcctcgcgggccgtgtctccggcatcatgtgtgaaaaggggccttgctgttcaaca

SEQ ID NO: 575795 - DNA, 95 bp, Homo sapiens
cagtgtttcatttacagcagcttttagaacgtaagccagatcactactggttacaacctggaagatgaccgctgtgagtgtgtggctctgcagga

SEQ ID NO: 575796 - DNA, 100 bp, Homo sapiens
gtgccgtcagaggcttcagagccggtgcccagggtgctttctggagacccccagaacctgtgcctcaggcccaggcccaaggccaagtgagagagcccag

SEQ ID NO: 575797 - DNA, 101 bp, Homo sapiens
ggaagctgctgagagacttggaatataagacagtttgctgatggccgccaaagttggagttcgtatgttgatgacatctgattagcagaagtcatgttcca

SEQ ID NO: 575798 - DNA, 98 bp, Homo sapiens
ctatggcttcccttccgttttcgcgtggttcttttgcaagatatcattctctgctggaactgggtgagaagcgtaaaggcatgttggagaagagttgc

SEQ ID NO: 575799 - DNA, 96 bp, Homo sapiens
gaagatttcctggttggagggacagccccaggatgccgtgggccgcagccactcaggactgtcaaaggtgctggaggcatgcatgaagaactgtgg

SEQ ID NO: 575800 - DNA, 95 bp, Homo sapiens
aaaaaggataaggagatcatagcagagtacgatactcaggtcaaagagctgtaggtaaaacttgcctactgatcagttacacaaccaatgcattt

SEQ ID NO: 575801 - DNA, 100 bp, Homo sapiens
tattttgtgaagaattcatacaacaatgtccagcagctgttgaagttcttaacctagtagcccaggaatgtagtgctggatttccagatgtgacttgcac

SEQ ID NO: 575802 - DNA, 75 bp, Homo sapiens
acctcaagatgtggatttaccttatcccctcaacaacttttcagtggcaaaatcaacctaccgacaccaagcaac

SEQ ID NO: 575803 - DNA, 98 bp, Homo sapiens
gaagctgcaagacatggaggcccaggcaggctgggctgcccctggcgaggcgcgggctgtgggctggatgacactttgcacacaattattgattatgc

SEQ ID NO: 575804 - DNA, 100 bp, Homo sapiens
tggaaacgagatccagagattgccgcagatgctggctcacgttcgaaccctggaggagcttactccacgggaacagcctctagataatctgagttgttga

SEQ ID NO: 575805 - DNA, 100 bp, Homo sapiens
gtcttgctgaaagccagggaaggtctgctccagctcagccacctgctgaagggacagaagggactgccccaggtgggggtccccctggccctcctcctaa

SEQ ID NO: 575806 - DNA, 100 bp, Homo sapiens
gattttcagcctgggtggaacccgcttccgagatacagcagtctggttgccaaggtctacaggtccaactgctgccactggcagtaatcgaagacttcag

SEQ ID NO: 575807 - DNA, 97 bp, Homo sapiens
tgcaccgccaagccaagctcaacctcaaatcagtactgagggctgtgttccagatcatctccctggtaatttaccccgtgaagtacacccagacctt

SEQ ID NO: 575808 - DNA, 82 bp, Homo sapiens
caaccttcgatctcctgacgagaactgtggctgcaccatctgtcttcatcttcccgccatctgatgagcagttgaaatctgg

SEQ ID NO: 575809 - DNA, 88 bp, Homo sapiens
caagtgtggcttaatccgtctccaccaccagatctttctccgtggattcctctgctaagaccgctggccagcgagaccgaggagaatg

SEQ ID NO: 575810 - DNA, 90 bp, Homo sapiens
ggcgcccgccgccgagccgtctcctgcagcggcccccgccgggctccccacaggtgcaggaagccgccgcccagccatggacggggagga

SEQ ID NO: 575811 - DNA, 75 bp, Homo sapiens
cactgctatctacccaacaacgagaaaggccggaagggtctgggggtggtggcatctcccctaaaggaagtggtc

SEQ ID NO: 575812 - DNA, 50 bp, Homo sapiens
cggggtgcgagcagcgcacttccgatggcatccgccacagactcgcgcta

SEQ ID NO: 575813 - DNA, 82 bp, Homo sapiens
aaggagggcatgatcaacctcgtcatgtcctacgcgtgttcttggggaagatcccgactaagccattttccagtggcacctc

SEQ ID NO: 575814 - DNA, 74 bp, Homo sapiens
gcatctgctgacttgaagggcgaagaacatgtgatcatccaggccgagttctatctgaatcctgaccaatcagg

SEQ ID NO: 575815 - DNA, 75 bp, Homo sapiens
gcaacacctgcggcctcactgggacccccaggaggtgaccctgcagaactgactttacagtgtacatttatcaga

SEQ ID NO: 575816 - DNA, 100 bp, Homo sapiens
tgctgaacggagaggtagccatgatgccccacttggtgaatggagatgcagctcagcagcggagctggagttcgcccaaatcatcatcatcgtcgtggtg

SEQ ID NO: 575817 - DNA, 96 bp, Homo sapiens
gaaaggctgcggcgcgcagagcgaggctgcgggaccccaggatgggggacaggaggctgcggggcctcagagaacggagaccaacctgggctgaag

SEQ ID NO: 575818 - DNA, 50 bp, Homo sapiens
cgcctcttctaccggggcaagcagattttcagctgaactctcatctctca

SEQ ID NO: 575819 - DNA, 83 bp, Homo sapiens
gctaaagcagcgtgcgttcagccctgggggtgactatgaccagagcaggaccaaagtgctgcacatgagcctgaaccccacca

SEQ ID NO: 575820 - DNA, 49 bp, Homo sapiens
ggcctccccagccatgtggaactatggagtcttgctctgtcgcccaggc

SEQ ID NO: 575821 - DNA, 92 bp, Homo sapiens
agcagccaaccatgctcaacttcggtgcctctctccagcagactgcggttgacatcatggacatatgtgagtccatcctggagaggaagcgg

SEQ ID NO: 575822 - DNA, 128 bp, Homo sapiens
actttctcctcattgaagctatgcagtatttctttggcatcactgcagctagtaatttgccttctggattgatctagtgaaaagccatttgatgtatgcggtcagagaagaagtggaggtcctcaaag

SEQ ID NO: 575823 - DNA, 100 bp, Homo sapiens
cgcgctgtaagaagcaacaacctctcctcttcgtctccgccatcagctcggcagtcgcgaagcagcaaccatggctgacttctgcctgggcaccgccctg

SEQ ID NO: 575824 - DNA, 83 bp, Homo sapiens
ccgagccagccgctgttttgccggaggagcccctcaggccatatgtgtcacaaagatgtctacacggaactgccagggaatgg

SEQ ID NO: 575825 - DNA, 100 bp, Homo sapiens
cacctctacaaggatctgcagccatttatattgcttaggctactggtgttccaaaattgcagctgtattcaaacatcaggaaattcatctgcagttcttg

SEQ ID NO: 575826 - DNA, 89 bp, Homo sapiens
caaaggtgaatcttttggttggtgattttgatgatagccacaaagcaagcaggcaacgtgaaatcctgcatgagattcagagaaggaaa

SEQ ID NO: 575827 - DNA, 74 bp, Homo sapiens
ggcctcgtgcggcggcgaccggagaatccgcatctggggcacggagggacagtcattttgtttactcattcagc

SEQ ID NO: 575828 - DNA, 76 bp, Homo sapiens
tcaaacaggagctggagcagctcaaagaggctgtcctggaggaccacagtcagatgaggcagatggagctcgaaat

SEQ ID NO: 575829 - DNA, 83 bp, Homo sapiens
tgttaggcgtggagagggagtgatgtcttccagactcggtgctgtacccgccggctctggaacttcatccattctctatgaaa

SEQ ID NO: 575830 - DNA, 101 bp, Homo sapiens
gtttgtaaattctccttttaccaaggacccagatgatgtggtaccagttggccaaagaagagcctggtgttggtgcatgtgctttggactagcatttatgc

SEQ ID NO: 575831 - DNA, 98 bp, Homo sapiens
caccacctcctgctgccttcccgtcgccgctcccgaagcttttccagtaactgagggcaaacccatcagacaaccagagccataatttgtggtcaccg

SEQ ID NO: 575832 - DNA, 80 bp, Homo sapiens
ccggacacccttccatacctatgtgaagttcgacgccgtgagcggtgactactatcccatcatctacttcaatgactact

SEQ ID NO: 575833 - DNA, 75 bp, Homo sapiens
tggcgaaacgaggaggagataacgcggccttgggctctgtcccctgcagagcaaaaaaacttgtcggattcggga

SEQ ID NO: 575834 - DNA, 75 bp, Homo sapiens
gagcggagaggagatgcacacggcactcgagtgtgagttacctagaaaagtacgagaaagttcatcattttgggg

SEQ ID NO: 575835 - DNA, 100 bp, Homo sapiens
tccccgtctttgacgagatcatcctctccactgcccgcatgaaccgggtcctcagcttccacagcgtgtctggtatcgagaaccttccctgcgaacttca

SEQ ID NO: 575836 - DNA, 83 bp, Homo sapiens
gcagtggagccaccagcagcgggtgggcgacctcttccagaagctgggggatatgagactttctactcggaatatcctgagtg

SEQ ID NO: 575837 - DNA, 101 bp, Homo sapiens
gtggcggctgccaaggagacgctgaattcttgccgccaggatggggaaacagaacagcaagctgcgcccggaggtcatgcaggacttgctggaaagcacag

SEQ ID NO: 575838 - DNA, 76 bp, Homo sapiens
accatccctggaggagacctggcagcaggtgcgtgctctggaggaggccaacgccgacctggaagtgaagatccgt

SEQ ID NO: 575839 - DNA, 50 bp, Homo sapiens
acaagatcccgtccatgaatcagaataagctttccgatttgttggcaccc

SEQ ID NO: 575840 - DNA, 48 bp, Homo sapiens
gggtgtgcaaacccgagagaactggatggagtcccctgtttccacacc

SEQ ID NO: 575841 - DNA, 75 bp, Homo sapiens
ggggagttggaaggtcacaggagttcagcctcaggtagaacacctgaaggagaagctcattagccaggcccagga

SEQ ID NO: 575842 - DNA, 100 bp, Homo sapiens
gatgatcggtcgtggagctccagagatgattactctcgggatgattataggcgtgatgatagagcctatgtgcttcccaagctgtatgtgaagctacatt

SEQ ID NO: 575843 - DNA, 90 bp, Homo sapiens
gccgcagttctagcttcaccttcacgatgtttcccttggtcaaaagcgcactaaatcgtctccaagagtatttggagctggttatccaag

SEQ ID NO: 575844 - DNA, 80 bp, Homo sapiens
aagaacagtaaagttggaacacagcagagggtgtgtaataaaatacagatggatatcagtattgacaaatagcaaagaag

SEQ ID NO: 575845 - DNA, 143 bp, Homo sapiens
gtcattcttctctacagaagagcttctcctcatcaactggggatgattacagttcttcctaaaaaagatgtcctcctcgcactttcttaccagccctttgcaaaatttttcttgatgaaagtgctccagacaatgtattagag

SEQ ID NO: 575846 - DNA, 76 bp, Homo sapiens
gaaggcagaggaagcacatcagcccgatattatcaactcactggtaacaacagtattcatgctcatcgtatctgtg

SEQ ID NO: 575847 - DNA, 100 bp, Homo sapiens
aaagaatacattcctgattacctgccacccattgtgtcttctcaagaaggagtgtacctcacagccttctaggatctccagagtggacaggaatctcact

SEQ ID NO: 575848 - DNA, 75 bp, Homo sapiens
ccattgacagcagctatgacattgccaagatatcccagattgtggctgcacggctcaacggttcccttgatttct

SEQ ID NO: 575849 - DNA, 100 bp, Homo sapiens
tgacaaggagccgtcgtcgttaggttgaaaggattgttgacaaaaggaaaaataaaaaagggaagacagagtatttggttcggtggaaaggctatgacag

SEQ ID NO: 575850 - DNA, 82 bp, Homo sapiens
agttatttgcctcagtaaaagactcaaatctaatccaagtgaaaatgaagaaaaggaagcacagtctcaacttataaaatct

SEQ ID NO: 575851 - DNA, 76 bp, Homo sapiens
cgaagaagagaccatccatatttccagaatattcagaaaaggttctgcttcctaacctgtgatgcagccagttacc

SEQ ID NO: 575852 - DNA, 100 bp, Homo sapiens
tggctgtgggcttggggctaggagtactggccgagatggctaagaagtccatgccaggaggtcgtctgcagtcagagcccaacctgggggaggacgatga

SEQ ID NO: 575853 - DNA, 71 bp, Homo sapiens
ccattgtgggcctgggcacttggaagcttaacattggtatcccttccctgacaaagtgttgcaaccaacac

SEQ ID NO: 575854 - DNA, 50 bp, Homo sapiens
agctgaacatctttcagagttgtatccgaagattgttgatcgaatcgaca

SEQ ID NO: 575855 - DNA, 90 bp, Homo sapiens
gtctgttagtacccagtgagacaaatttcctgcacttcacctggcatgcgaagtccaaggtatcaaagcttgaaagagagaagactcaag

SEQ ID NO: 575856 - DNA, 100 bp, Homo sapiens
gcctctccagccatgtggaactattttgcctgcctgagctcctctagtagtggccacaattgccagagaagatagagcaggtctctcccaggacttgcag

SEQ ID NO: 575857 - DNA, 90 bp, Homo sapiens
agttcctccgcaccctgcccggcttcctcatcgtggccgagatcatctgcgatttccttctggttggctgtcctgcgtgggtgccaagtt

SEQ ID NO: 575858 - DNA, 75 bp, Homo sapiens
gtggttggacagtcagcatttgcagactttgtcatcaagcctcctttgcgtcattttaaacgccctgcttacgca

SEQ ID NO: 575859 - DNA, 49 bp, Homo sapiens
ctggagtaacatcagacaactcttgtatcagcatagtgttgagtgggca

SEQ ID NO: 575860 - DNA, 82 bp, Homo sapiens
ccctcttccgctcctgttttatactgcttccatatttacacttaaagcttttcaagccaggccaagaagctgtgaagtacca

SEQ ID NO: 575861 - DNA, 100 bp, Homo sapiens
gtctttgtgtcctgagatcaaatggcacttcattggccacctacagaaacaaaatgtcaacaaattgatgggagaagctgatacggaaagtgacgacgac

SEQ ID NO: 575862 - DNA, 101 bp, Homo sapiens
cggcgcagccaccccgcgggatacgcctcagcgcggaatgcagtttattctactccaagagattctgcctcccttgtgtccgggagaacatcaatgctttt

SEQ ID NO: 575863 - DNA, 99 bp, Homo sapiens
tttggggccttcgcggtgggattaaaagcagcgaacctcgagaccaacgtggaggagctgtgggtggaagcttcaccatgggttgataatagtagaact

SEQ ID NO: 575864 - DNA, 100 bp, Homo sapiens
ggattaaacgccggagagagcgtgaatttgcctcggggacgcctctccaggagatcagaattcaattgatattttcatctgggagatgggacagtcttcc

SEQ ID NO: 575865 - DNA, 75 bp, Homo sapiens
cgccgctgctacctgcagcgccgtgtggcacgacacaaaaatcaggacagtcattttgtttactcattcagccct

SEQ ID NO: 575866 - DNA, 95 bp, Homo sapiens
actcacaggccgtggaggagctggcggagcagctggagcagacgaagcgggtgaaaacagctactattgccactgaaaggaatgggaaaccagag

SEQ ID NO: 575867 - DNA, 80 bp, Homo sapiens
cgcgctactctctctttctggcctggaggctatccagctggtcaccagcagtccctgtcccttggcaccaggagtccctg

SEQ ID NO: 575868 - DNA, 75 bp, Homo sapiens
ccttcaatccgctctactggaatgtgaacccagcgggtgccgcttctccacccgaggcttccacctccaacgagc

SEQ ID NO: 575869 - DNA, 90 bp, Homo sapiens
cctctctcctgatacagcaggcgctcaccatgttccctggagacttaattcagtgcacaaatgagatgaatgtgaacatcccacagttgg

SEQ ID NO: 575870 - DNA, 100 bp, Homo sapiens
agtctgttgtccaaactctgcagtgaaagccccgataacgtcgtgtcgaccacagatcggcttcagctccccaggaatatgattgaaaacagcatgtttg

SEQ ID NO: 575871 - DNA, 74 bp, Homo sapiens
gaggctccaagacctcatcaacaattaagttacttgctggacagaagaaaagctcccccttctggacatttgaa

SEQ ID NO: 575872 - DNA, 100 bp, Homo sapiens
tatgaagagctggctcggatgctgatggggctggacctgctggtgttcgcccacgaccatgaggccgtttctctatagtaaagaaatgcattcacaaagc

SEQ ID NO: 575873 - DNA, 90 bp, Homo sapiens
cttgggttcaaattcaagttttaccaggtagtgtgccagtatttgaaaaatcccaatgtatctgattcactgctgctgcagaatattttc

SEQ ID NO: 575874 - DNA, 96 bp, Homo sapiens
gatatcagcaaagtatgtaaccaggagcaggactgcagggactggagtgatgagcccctgaaagagtgtcctctccaatcctgaagtcaaaatgga

SEQ ID NO: 575875 - DNA, 100 bp, Homo sapiens
ggaaacaggcttcacatgtttcttgtacagttgagatgtgcagtgttacaactccttctgcttaacacagttgaagaaactacaaaagatgtatctggtc

SEQ ID NO: 575876 - DNA, 75 bp, Homo sapiens
caaaaactataataattgacaactcaccacaagcctttgcatatcagccttatgccagcctggaccatcttggag

SEQ ID NO: 575877 - DNA, 115 bp, Homo sapiens
ccgaagtcagttccttgtggagccggagctgggcgcggattcgccgaggcaccgaggcactcagaggagagatcctgaaggagctagacgagtgctacgagcgcttcagtcgcga

SEQ ID NO: 575878 - DNA, 100 bp, Homo sapiens
cacgcacacgctcggcgctgcgatccgcgcatataacgatactttggttagtgaccacatcgcagcatgttgagtcaagtttaccgctgtgggttccagc

SEQ ID NO: 575879 - DNA, 82 bp, Homo sapiens
ctgaaggctgtgataatgaggaagatcttcaaatgggcattcacaagccaagaagccctccatgagcagagcagctacatcc

SEQ ID NO: 575880 - DNA, 75 bp, Homo sapiens
aaacaacaaccaagccagtttaatggaactgtggctgcaccatctgtcttcatcttcccgccatctgatgagcag

SEQ ID NO: 575881 - DNA, 100 bp, Homo sapiens
ggaggcggcgggcgagggcgactacgaccagtgaggcggccgccgcagcccaggcgcgggggcgacgacagatgccttcaattaagttgcagagttctga

SEQ ID NO: 575882 - DNA, 83 bp, Homo sapiens
ctgctagagccgagcgaagcgatggcagaggagcaggagttcacccagctctgcaagttgcctgcacagccctcacacccaca

SEQ ID NO: 575883 - DNA, 90 bp, Homo sapiens
accatgcatcctgccgtcttcctatccttacccgacctcagatgctcccttctgctcctggtttgctgaaaagcccagtgaacaagacag

SEQ ID NO: 575884 - DNA, 74 bp, Homo sapiens
cagctaagatgtcaggacatcctggaagctgggaaagggtgaaaacgctagaatacatcaagaagcaaagcaaa

SEQ ID NO: 575885 - DNA, 129 bp, Homo sapiens
ccacctgtgctacccggtccagacctcccagcccaagctagagcttgtggagcaatgttgatcccagggatgatgtatttggatatcctcaacaatttgaagataaaccagcattaagtaaaactgaag

SEQ ID NO: 575886 - DNA, 100 bp, Homo sapiens
attgagtcggttacttcacaaacacagatttgctgaagctgagagttttgccattcagtttggactagatgttgagacactacccgaagcagtccttcac

SEQ ID NO: 575887 - DNA, 76 bp, Homo sapiens
gaaccagccagctaggcatccaaacaggcccgacaacaagctcaaatacgtcaccaaatggcagaggacagcaaag

SEQ ID NO: 575888 - DNA, 75 bp, Homo sapiens
cagaagcgtgtcgttctgcaccagcgccttgatcgagtacttgaggtaatctgtaagtcagatgctccaacaggg

SEQ ID NO: 575889 - DNA, 116 bp, Homo sapiens
tatggcctgttgaacttctatctctacaccttggcctttgtatattctccatcgaagaatgccctctatggctccccgaatgagaaagaatactcggaatcagcggtgaattgcag

SEQ ID NO: 575890 - DNA, 100 bp, Homo sapiens
agaagacagaaagaggagatctgaagaatcaagacaagaaatagaagaatttcagaagctgcagatgacttccggatcttctgtggggatctgggcaatg

SEQ ID NO: 575891 - DNA, 60 bp, Homo sapiens
gccaggaaaaccccgaaaacgcaagaagcgtaggttgacggatatattcagacgttacga

SEQ ID NO: 575892 - DNA, 97 bp, Homo sapiens
gagaggagagcgaggaggaagaggacgaggacgacgaggaggaggaggaggaggaaaaaggaagttcacaaatgggtgctaccatagtagatgcttt

SEQ ID NO: 575893 - DNA, 100 bp, Homo sapiens
cccgggaccgccaggccaccaccggccgcctcagccatggacgcgtccctggagaagacattgtatgcaaacctgttccattctttcttcgtggacaacc

SEQ ID NO: 575894 - DNA, 100 bp, Homo sapiens
gaccagaagtacagtgatgaagagaaccttccagaaaagctcacagccttcaaaggtgaaatgacaatggatgctctgttggctcgattgaaacttctga

SEQ ID NO: 575895 - DNA, 100 bp, Homo sapiens
ggccccggctctctggaccttgtctcgctcgggagcggaaacagcggcagccagaggtaaaaatgtctccatcgtatcatcagtccaaaggggatcccac

SEQ ID NO: 575896 - DNA, 100 bp, Homo sapiens
caactccttgaaggaactgtggcttgtgatccatgggcgagtctacgatgtcacccgcttcctcaacgaggtctcacagatttcaagcctggctactgga

SEQ ID NO: 575897 - DNA, 80 bp, Homo sapiens
ccttctccactttcgccagcccgtgccgcgagcgcggcctgcaggagggttttggccaaattgggcgagggcacaaaata

SEQ ID NO: 575898 - DNA, 100 bp, Homo sapiens
gagtgtgggtgatggcgttcacacaaactggtcagcgtttccctggagaggaagaggcaagatcgggcccagcacaggcagcgtcagtgcaaacttcccc

SEQ ID NO: 575899 - DNA, 82 bp, Homo sapiens
cactgcggctactgcgattccaaggagggcaaagcgtcctgcgggcgaactttctgaccaagtatacaactacccagagggc

SEQ ID NO: 575900 - DNA, 75 bp, Homo sapiens
cagattaaaacattgtcatttttagcttacattatcaggatttaccaggatttgtacacacagatatgacgaaag

SEQ ID NO: 575901 - DNA, 100 bp, Homo sapiens
gaagaactgaagataggcaacaagatgatgagggcgcggcagtatccttggggcactgtgcagggcccccacagaacacctgaactcaaatgagatgccg

SEQ ID NO: 575902 - DNA, 96 bp, Homo sapiens
cccgacgctttgtgaaccaattaaataccaagtaccgggattccttgccccagttgctgcagaagaaagatcagcaactggagcctaaaaaaagta

SEQ ID NO: 575903 - DNA, 95 bp, Homo sapiens
gctcaagcctggagactcgcaacaagatcccctatgagagtcccatcttcagcagaggtttttagaacttcagccataaaaatgggcagaatttt

SEQ ID NO: 575904 - DNA, 82 bp, Homo sapiens
ctgagccggccgagcggcgacggaccgcgagcaatggctgccatccggaagaaactggtgattgttggtgatggagcctgtg

SEQ ID NO: 575905 - DNA, 90 bp, Homo sapiens
ctggttttaagtgtagttgccgacgcaatggcagcctttgcagtggaacctcaggggcccgcgttaggaggtggaatcaaattctcctgc

SEQ ID NO: 575906 - DNA, 75 bp, Homo sapiens
agccaagacataaactcaaccccttctcttccaaaagtgtacaagtccccagagtatgagtcccttggttttgag

SEQ ID NO: 575907 - DNA, 95 bp, Homo sapiens
ctgacaaattatgctgcagcatattgtactggcctgctgctggcccgcagggcccctggccccaacatggcccgtcgctctcagagctcctcgca

SEQ ID NO: 575908 - DNA, 74 bp, Homo sapiens
cgcggggcgggccctgggggtcctcagcgtggtctgcctgctgcactgctttgtgccatggtgtgcagccaaag

SEQ ID NO: 575909 - DNA, 75 bp, Homo sapiens
agatgaggacttcattcaagctctggataaaatgatgctagaaaatctacagtctgatgatttgaagaagagaag

SEQ ID NO: 575910 - DNA, 100 bp, Homo sapiens
agaaacacctaggaagggagaactggtcatcatcagatttgaaatatttaaagtggatacaaaactatttcagcaatgcagacaattaagtgtgttgttg

SEQ ID NO: 575911 - DNA, 83 bp, Homo sapiens
ggacccgggctgggctttcctcacccgggctttatcctgtggataaacgcagagtgaacgagtttggggagtcctacgaggag

SEQ ID NO: 575912 - DNA, 100 bp, Homo sapiens
ctggtacatccagggcgaccgtggtgacatgattaccatcaggatgaccgagtgggagacagcagcaccagcggtggcagagaccccagacatcaagctc

SEQ ID NO: 575913 - DNA, 112 bp, Homo sapiens
tgccacgcaccttctgccagctgatcctggaccccatcttcaaggcgatccggcggcggaacgtgcgtggtgaggacagcggccgcaagcccgagcggcggcgcctgaagac

SEQ ID NO: 575914 - DNA, 100 bp, Homo sapiens
ctcaaactagctgctcggaacacttcagcacaagaacgctaccttttcttacataagcagtactataatggatgtagacagcacaatttccagtgggcgt

SEQ ID NO: 575915 - DNA, 75 bp, Homo sapiens
ctcagtcaggaccctggagatgagacacgggccttccaggagcaagtgggaagtggtggttcaagtggaggatga

SEQ ID NO: 575916 - DNA, 74 bp, Homo sapiens
cggcagccgacggcaaaggtgtcgtggtggtcattaagcggagatccgggtggttctcttcccaaagtggaagc

SEQ ID NO: 575917 - DNA, 82 bp, Homo sapiens
ccgcccggacggcctgcagagcgctgccatcatgagcaattctgtggtgttcttggtcacacatttatggagtttctgaagg

SEQ ID NO: 575918 - DNA, 82 bp, Homo sapiens
gctcgcgctactctctctttctggcctggaggctatccagcgcgcctgtgtctggcagagctggtgtgagacgagacaatcc

SEQ ID NO: 575919 - DNA, 100 bp, Homo sapiens
tcccaacatcctggagaataaagaagccctggaggctgcccgaatttgtgccaataagtacatggtaaaaagttgtggcaaagatggcttccatatccgg

SEQ ID NO: 575920 - DNA, 100 bp, Homo sapiens
gtggatgacctgcacatcattgtccaagagctgaggggctccattctcgattcagagatcaaaggtgaagtcctctatctcggctactaccaatcagcct

SEQ ID NO: 575921 - DNA, 90 bp, Homo sapiens
cgaaggtgaagagttgtcccagctcggcccgcgggggagccccgggagccgcacgatgagctctctccggaacagcacaacctttcttta

SEQ ID NO: 575922 - DNA, 83 bp, Homo sapiens
cctggtgatcggctccttaccagctcacctctcaccgcgcatgtttggaggctcagaacgcccagcagctccatgaacgaatc

SEQ ID NO: 575923 - DNA, 51 bp, Homo sapiens
gctacctgtgaacagtacgcagtgaatgttaactggaatgatgaatgggac

SEQ ID NO: 575924 - DNA, 75 bp, Homo sapiens
aacatgcgctggatcatccaggtgccccggatttaatgaaaataaacccatctggatgcatgctgaagaaagaga

SEQ ID NO: 575925 - DNA, 92 bp, Homo sapiens
gcggcggctcctgccctctcgctttccctctcgcgtctctggctgcaggtcaaaatgcagatcttcgtgaaaacccttaccggcaagaccat

SEQ ID NO: 575926 - DNA, 82 bp, Homo sapiens
aaaccacaggcgaatccataactctgataagccgtacagtcatgctgcaaagcttggagcccagctggccgatttacacctt

SEQ ID NO: 575927 - DNA, 75 bp, Homo sapiens
aatcgctatagtctcgatcatatttcttcactgttcacttctcagaaagcacagctgagtacaagctaactggag

SEQ ID NO: 575928 - DNA, 50 bp, Homo sapiens
cggcataaagcaattgagaattcagatttgggaatggatgatgaaggaga

SEQ ID NO: 575929 - DNA, 50 bp, Homo sapiens
gtagtttctgcatttagtgagataagcaattaccagctctggctgggtcg

SEQ ID NO: 575930 - DNA, 100 bp, Homo sapiens
ggagaaagtcgtcttccacttgcacgaaagctttcctaggccaaaaagagggttctccaaaaaatgtggaatcctttgcatctatgctgagacattctcc

SEQ ID NO: 575931 - DNA, 80 bp, Homo sapiens
agatcgggagcgcaaggtcgccctcaaggccatgatcaaaacttattgtgatcactctaagccctgctcctgccccgtcc

SEQ ID NO: 575932 - DNA, 98 bp, Homo sapiens
ggtggctgaggctgctaggatgtggaacctcattgtgggaagcaaatcccttgctccagccctggctgctgcctcagttttcccagcgtccgtgacct

SEQ ID NO: 575933 - DNA, 100 bp, Homo sapiens
ctcgagggtgacgctcgctccgctcgtcccgctcgtcatggcctacccgggatacggaggaggggataacaaagccattgacctttgccgattgtgttgg

SEQ ID NO: 575934 - DNA, 74 bp, Homo sapiens
gcacacagaggatgatgctgactttgatgaagctgccaaatggtgtcacttaccacactggaacatatcaagac

SEQ ID NO: 575935 - DNA, 99 bp, Homo sapiens
catccccgaggaggaagacgaatcgttaaacatctgaaagggtcagatgatatcatcaagttgaatcgaaaggaagggaagaagcagaattttccaaga

SEQ ID NO: 575936 - DNA, 75 bp, Homo sapiens
cagctacagactttcctgagtcagttgcagatctgatctcttctgaacacctcatcgtgtctccatccctgggaa

SEQ ID NO: 575937 - DNA, 100 bp, Homo sapiens
tgcagcctcaacttcttgtcctcaagtgatcctcccaccttagcctcctaagtagctgggaccacaggaatttcttcacatggctcctggagaagtgacc

SEQ ID NO: 575938 - DNA, 97 bp, Homo sapiens
caagaaacctcaggacttgagtaacagcaacatgttcttttccctggttcagcctgaactatataccaggccctgctgaaaataccacccaacagtt

SEQ ID NO: 575939 - DNA, 76 bp, Homo sapiens
cagggagccgctcccggccactttaagaattactggttacaaaaggttcgacgaggtgctttataaatcatctcag

SEQ ID NO: 575940 - DNA, 75 bp, Homo sapiens
ctcctggtgaatataagagaaagagaagacaaagtgtaggaggtacttaagagattatggcatcagaaacccaca

SEQ ID NO: 575941 - DNA, 90 bp, Homo sapiens
ccaacacagacacgaaggttggaaataataccatccatgtgcaccgagaaattcacaagacacctcagcttggtctcaaaactaatccac

SEQ ID NO: 575942 - DNA, 100 bp, Homo sapiens
agggtccttagcacagacattttgacgatgcagagagaacttgtttatgcaagaggagatggccctggggcccctcgccccggatctactgctcatccac

SEQ ID NO: 575943 - DNA, 84 bp, Homo sapiens
ggaagagttgtggcgaggcagatcctgccccgtggccgcggccgtctcgaagctcttcgtgggcggtcttgactggagcacgac

SEQ ID NO: 575944 - DNA, 50 bp, Homo sapiens
caggacttgagtaacagcaacatgctacagcctggacggatgtctcccag

SEQ ID NO: 575945 - DNA, 76 bp, Homo sapiens
gccgtcagtatttgaggagaaagcatttgtcaagtctctatttatgaggtggacaagcaagattgtcgcaaatttt

SEQ ID NO: 575946 - DNA, 74 bp, Homo sapiens
aaccttggagcccagagccacgtcaaaagcagatttactatgctgggcctgtcaataatcctgaatttactatt

SEQ ID NO: 575947 - DNA, 101 bp, Homo sapiens
ggcttgtctgggaaatatcaaacatcatcaaaattgttccagaactgcagtgaactctttaaaacacagatgacgagttccagttattacagagaaatttc

SEQ ID NO: 575948 - DNA, 100 bp, Homo sapiens
ctcgggggtaggcaagacctgcctcctgttccgcttctcagaggacgccttcaacaccaccttcatctccaccatcgttcttttagaactcatcaaattg

SEQ ID NO: 575949 - DNA, 82 bp, Homo sapiens
atggccaatgagaaagccctgaagcagaagggcatcaccgtgaagcagaagaggtccctgtgcgttttattgcgacctgccg

SEQ ID NO: 575950 - DNA, 83 bp, Homo sapiens
cgcgccgcggccgggcagggaggagaccggcacccagacaggtggcgacggcagaggaccgttggacataccagatggtcgaa

SEQ ID NO: 575951 - DNA, 90 bp, Homo sapiens
cttgtgaagatgggaactatacaagaggcaggaaaaaagacagatgttggtcttccaggatctcaaccagttctctcactgcagagtctg

SEQ ID NO: 575952 - DNA, 76 bp, Homo sapiens
cccaggcatttggagggtttctcatttggcctggactacaggaatatgtggaagctgtctcttttcaacacttcat

SEQ ID NO: 575953 - DNA, 83 bp, Homo sapiens
ctctttttgccaccaatcccttcgatcaggatgttggtcatcactccccaaaatggacgttaccaaatagattccgatgttct

SEQ ID NO: 575954 - DNA, 50 bp, Homo sapiens
ctgaattaaggaagacttcagatggccagaagcggactcctagaagaggg

SEQ ID NO: 575955 - DNA, 97 bp, Homo sapiens
aagccttcagtgggactcccccagcagatacattctcatgtttgctttcacaaccaaagttctgggccattcagacatcagccttgatcctccggac

SEQ ID NO: 575956 - DNA, 137 bp, Homo sapiens
aggtaggctgcgttgaggatctttgctcttccatccgcctttgatcgtcttcctcttcagccatccagggactttgaacatgtcggggatcgccctcagcagactcgcccaggagaggaaagcatggaggaaagacc

SEQ ID NO: 575957 - DNA, 122 bp, Homo sapiens
atagctgcaaggaaggtggagatctcctgtgctgcgaccactgcccggctgccttccacctccagtgctggctgaccggttccctgatgtgttacctgcttctgctactgatccaaactgca

SEQ ID NO: 575958 - DNA, 75 bp, Homo sapiens
agatcgagctgatagagaccctagtaacatgtattcccacgagcattctgctgagatgaacaatcagatgacctc

SEQ ID NO: 575959 - DNA, 75 bp, Homo sapiens
tcttggcagacctgttggcactgagtgctccttccgcttccagccgttcgagtcctatgactccaggccctgcct

SEQ ID NO: 575960 - DNA, 82 bp, Homo sapiens
aaatacgtggttggagagctcatctggaattttgccgatttcatgactaaccagtgtcagcccaaggccaccccctcggtca

SEQ ID NO: 575961 - DNA, 101 bp, Homo sapiens
ggccacgcccggggccaccctccccaagtccccatctcagaacaatcccgaagagatgacttggagtctctgggctacgtgctaatgtacttcaacctggg

SEQ ID NO: 575962 - DNA, 74 bp, Homo sapiens
ccgggaaggagcatcccaggacctaccagaatctgttgaaaacaatcctcgaacaggaaatcttggtgcactaa

SEQ ID NO: 575963 - DNA, 123 bp, Homo sapiens
cacagccacagacttctcagcacagagtggggactgccttccattgtgaagtctattggctctaccagtgcacctggacagggaggaatcctggctcagcgggagtttgacaggcgattctcc

SEQ ID NO: 575964 - DNA, 75 bp, Homo sapiens
gttagagtcttcctgcccaacaaacagaggacagtgatacccttcatgagacccaactctgccacagctcatcct

SEQ ID NO: 575965 - DNA, 100 bp, Homo sapiens
aaagttcaatctggaaacatcaatgctgccaagggtgtgggccgaagatatgctcatgtggtgttgaggaaagcagacattgacctcaccaagagggcgg

SEQ ID NO: 575966 - DNA, 100 bp, Homo sapiens
tggagatgatgatgaaattcagtttgatgacattggagatgatgatgaagatattgatgacgctcgtggtcccaagaagcatctgaagcgggtggcagct

SEQ ID NO: 575967 - DNA, 138 bp, Homo sapiens
ctccagcgtgaacatggtgcaaagataccagtctcctgtccgagtctacaagtacccgtttgagctggtcatggcgcttagcagtgtctgcaaaaacgaatcttttcctacaacctgttaactgactggactgttggt

SEQ ID NO: 575968 - DNA, 110 bp, Homo sapiens
caggggtctttcgaggcccggtactacccaaacgtcagtcgaatcacaggcaggaggaaatagctcgtctgctggccctggaggaggctaccctgagtaccgatctgcag

SEQ ID NO: 575969 - DNA, 83 bp, Homo sapiens
atcaacaagtatgggtctccgtacaccaaaaactcaggcttcgccacctgcgtgcaaaagatcctgaaggagctagacgagtg

SEQ ID NO: 575970 - DNA, 88 bp, Homo sapiens
caacctatgttgccctgagttacataaataggagaacggcccttccagtgcaatcagtgcggggcctcattcacccagaagggcaacc

SEQ ID NO: 575971 - DNA, 75 bp, Homo sapiens
tcagaaccctgaagaactttgtacttcccccaccttaatgacatctcaggaaccactcgttttgactattatttt

SEQ ID NO: 575972 - DNA, 83 bp, Homo sapiens
actttgtcctggtggcagaaacaaccatggccaggatacgaaggtgcaaactgaacaatgaggacgcatggacacaggaaggg

SEQ ID NO: 575973 - DNA, 82 bp, Homo sapiens
gaactcaacctgactggctccttctggaatgactcctttgccaggctctcactatgttgcccaggctcgtctcaaattcctg

SEQ ID NO: 575974 - DNA, 93 bp, Homo sapiens
cttcggcagtccacccaccgccgccgcctcccaggtcagcccaaggccaaccccactgtcactctgttcccgccctcctctgaggagctccaa

SEQ ID NO: 575975 - DNA, 75 bp, Homo sapiens
ctaaattctgccgaaaggactgaggaacggtgcctggaaaaggattttctattgcagcagaccatgctacgagtg

SEQ ID NO: 575976 - DNA, 100 bp, Homo sapiens
ttccagagagccagaaagaaggaataccttggcaagcagctccagtccgagcagccccagaccgctgccgcccgaagctaagcctgcctctggccttccc

SEQ ID NO: 575977 - DNA, 74 bp, Homo sapiens
gaaaatggagcagacattcagggatctgtctggctccattgatgacctccccacgggaacggaagcaactttga

SEQ ID NO: 575978 - DNA, 96 bp, Homo sapiens
cccaaaagaggggcgacagaacatgatgttgacacgggctgggcgcccccagaagcccgggaacaaaccccacatacttcttattggccaagatat

SEQ ID NO: 575979 - DNA, 50 bp, Homo sapiens
gacacggcctacaacaccaagagaaaactttagaaactgttcctttggag

SEQ ID NO: 575980 - DNA, 106 bp, Homo sapiens
acccggtgtgtggcgcgcccagagccccgcgtttcagccctagggaagatacagatcacttggattcagtcgagtttgctttgctccgtgggaactgcaccagagc

SEQ ID NO: 575981 - DNA, 101 bp, Homo sapiens
ccagattggaggaggctggctctggtcttcgatgcacaggagtggccgttatggaacgcagcacccgacagctacaaagtgcaagataagaaaaatgcctc

SEQ ID NO: 575982 - DNA, 100 bp, Homo sapiens
cacatttgacttggaagcaatgtttgaacaaactcgaagaacagctgtggaaagaagttgcaaaacactgggaacggaaaacagttcttccttcaaagca

SEQ ID NO: 575983 - DNA, 101 bp, Homo sapiens
gaaacaccatggctgcggcggcccagctctctctgacacagatgatgctgtgtatctggacaatgagaaagaaagagaagagtatgtcctgaatgacatcg

SEQ ID NO: 575984 - DNA, 83 bp, Homo sapiens
agagaatgaaggctgagtacgatgcagtgaaggccaaggcccaggtttttagaacttcagccataaaaatgggcagaattttc

SEQ ID NO: 575985 - DNA, 100 bp, Homo sapiens
cctcggtctctccctgaagcccaccggtccccaacgcatcatgccagggagccaagcgtcctgcccggccgtatctctcctctttgtcacaacctctttg

SEQ ID NO: 575986 - DNA, 100 bp, Homo sapiens
atgcagccgattgatacctgtgtctcctacccaaggacagggggacagggctctgtctcgcacttcccaggagagaagatgactgaggaggaggtggaga

SEQ ID NO: 575987 - DNA, 75 bp, Homo sapiens
aggagggttggctgcacaaacgagtgagaagcgccaccttcaagtgaacgtcaccaacccagtacagtgcagcct

SEQ ID NO: 575988 - DNA, 82 bp, Homo sapiens
ggacattattgcgcgtggaacggctgcttttggaagatgaggacggggacttggttgccttttccagtgacgaggaattgac

SEQ ID NO: 575989 - DNA, 101 bp, Homo sapiens
tgcgactgcagagcccgaggccggggaccaggacagtcgcgaggttcgagtgttgcagagcctgcggggcaagatcttgatcagggccaaagcggtcagtg

SEQ ID NO: 575990 - DNA, 128 bp, Homo sapiens
ctgtttgagagtgggaacatgacgcaggtgcaggtgtctcttctcgccctggcggggaagcggggatctgacgagcttttctctacttgtgtcactaacggaccgtttatcatgagcagcaactcggc

SEQ ID NO: 575991 - DNA, 100 bp, Homo sapiens
gtggactggctcttattgctgaaagactacccatgctatatccagaagtaattcaacaggtgtttttggggaaaaaaatcacaatctggacgtgagaaag

SEQ ID NO: 575992 - DNA, 85 bp, Homo sapiens
gagctggtgtcttcatccagaagggacagtttgtgccagctctccagagagaaaagcagagcatcctggccagaacaagccaagg

SEQ ID NO: 575993 - DNA, 89 bp, Homo sapiens
caatctgcattttagaaataagcatcctcacagcacagtacacgaccaggtaaatgaaattgcctttataaatacccttgaagcccaga

SEQ ID NO: 575994 - DNA, 95 bp, Homo sapiens
ggcgggtgcagaactacctgtacaacgtgctggagagaccccgcggctgggcgttcatctaccacgctttcgtagtttcactcttgttgcctagg

SEQ ID NO: 575995 - DNA, 101 bp, Homo sapiens
ttcacttccctcggtctgggcttctctgaggcggcgagagatggtcaggtctggagctcgaccgggccaggatcaaagttctgatcgtaccagtctttctt

SEQ ID NO: 575996 - DNA, 83 bp, Homo sapiens
gttcctggaggaatccgagaagagcagagcggagggagccccagacacgcatgcttttcacttccactgcatctctcgctggc

SEQ ID NO: 575997 - DNA, 100 bp, Homo sapiens
aagaagctgaagaagaagggcaaggagaaggcggaagcacagcaggactcatcaggtctcgctccatttaaaaccaaagaaccatccactcggatcggga

SEQ ID NO: 575998 - DNA, 75 bp, Homo sapiens
cgaggaggctctaattgagaaatacttcccaagtaagaagcggaagaggagccgctggaaccaagacacaatgga

SEQ ID NO: 575999 - DNA, 87 bp, Homo sapiens
ccgccaggaagactccctgcctcctgagtcccagtgcatgtgagggaaccctggcttgttcaacctgtcacctcatctttgaagatc

SEQ ID NO: 576000 - DNA, 75 bp, Homo sapiens
tcaacgactccattgccgaggagctgaacaagaagttggccaacaaggtactgctataaccagaatttggtagaa

SEQ ID NO: 576001 - DNA, 50 bp, Homo sapiens
tgaaaggcgggaaggcttattccaaggttatgaagacagtatggagtttc

SEQ ID NO: 576002 - DNA, 82 bp, Homo sapiens
gggcgggccagggccgcactccggagactcgcggttgctacgcgcaccatggctggaggtagctacagcaagctgggtagca

SEQ ID NO: 576003 - DNA, 74 bp, Homo sapiens
catgctgcgcggccttcccatcaccatcacagagagcgatatgagacaaaaggacccagtgaaaggaatgacag

SEQ ID NO: 576004 - DNA, 75 bp, Homo sapiens
gtatccctgtctcagcgaagtggtgaaagagcatcaggaagacctccgtgtggatggccgtggctgtgaggacta

SEQ ID NO: 576005 - DNA, 99 bp, Homo sapiens
taagactttcaggcagcaacatggcaagacggtggtgggccaaatcactgtggacatggaattgaatgatctggcacgggaccctccagcacagtgttc

SEQ ID NO: 576006 - DNA, 80 bp, Homo sapiens
ggcgctggagagggggcgctgagctgttgggcaaacggggattcagcgtccgatcctttggaacagggactcacgtgaag

SEQ ID NO: 576007 - DNA, 90 bp, Homo sapiens
tggacatcctgaagccaatcctgattgagaggatccagaatccagatctctggaatagctaccaggcaaagaaaaaaactatggatgcca

SEQ ID NO: 576008 - DNA, 75 bp, Homo sapiens
ggcagtctcgaatcctctcctggtttagggaggggaaggtactggtcttcttggacattaatctttgaatacttg

SEQ ID NO: 576009 - DNA, 82 bp, Homo sapiens
tgtagatggattactagcttgcatgaaaaagaccccttgttgaaatgggacagttggcagcggctctgatgagcccgagaag

SEQ ID NO: 576010 - DNA, 100 bp, Homo sapiens
tctcttcctgaatttgaaccaccgtttccatcgtctcgtagtccgacgcctggggcgatggatccgtttacggagtgttctaagaacggaagcatctggg

SEQ ID NO: 576011 - DNA, 90 bp, Homo sapiens
gccattccagcactggactcatggaggctgagcatttattcaggaattgaatgatctggcacgggaccctccagcacagtgttcagcagg

SEQ ID NO: 576012 - DNA, 82 bp, Homo sapiens
agcagatgtaccctcagtacgccacctactattacccccagtatctgcaagccaaggtcatcatcagatttgaaatatttaa

SEQ ID NO: 576013 - DNA, 82 bp, Homo sapiens
ctggcaagtctgaaggtcaagtcgagtcccagacaccagaagtctgaatttggagaaggctggggtagatactagccccgac

SEQ ID NO: 576014 - DNA, 76 bp, Homo sapiens
cctgcctcccagagaggggagccggcgaggatcaaaatcttcgaaggaggaagcatcaagtgtacctgatttgtga

SEQ ID NO: 576015 - DNA, 75 bp, Homo sapiens
agttaactatggtagcccacccagcattgatcaatgaactgagccatgttcaaatccctgttatgttgatgccag

SEQ ID NO: 576016 - DNA, 82 bp, Homo sapiens
cagcagccccggggcccggagagaccttctctcaccatgccccataggaatctgacaggaagctgcaacgttaattgtggtt

SEQ ID NO: 576017 - DNA, 107 bp, Homo sapiens
aagcgaccgagggactgggagtcgttagtgagagcccccctccatgcgcctgaaggcccgacccagcagccctggcttttccgtgcttacctgcagcgccttctcct

SEQ ID NO: 576018 - DNA, 74 bp, Homo sapiens
gtggacgagttggagtcatctttcgagatgcacaccggctgcaccatgtcagcagcctggcctggctggacgag

SEQ ID NO: 576019 - DNA, 75 bp, Homo sapiens
cactgcctcctttattgcagcaggaatttggtacaccaggggttggaaaaaccacactaggcaaagaacttgcgt

SEQ ID NO: 576020 - DNA, 90 bp, Homo sapiens
ctgaaccgttatgaaatgtatcgccgctcagctttccctaaggcagccatcaaaagggaggctactcacagtcgaactacaactccccgg

SEQ ID NO: 576021 - DNA, 83 bp, Homo sapiens
gacgacaaggagggcatgatcaacctcgtcatgtcctacgcggtacatccagacactgaaggaccacaggccccggatggtgt

SEQ ID NO: 576022 - DNA, 75 bp, Homo sapiens
cagcctctagagtagccgagaccacaggaggatgatatggatggaatccacattgtggccttcgcagaggaagct

SEQ ID NO: 576023 - DNA, 100 bp, Homo sapiens
tgtaaattatgtgaaacctccaaatgtggacgccatttggaatgaacaggaaaaggctgaactttttacagataagttttgtcaagtatgtggagtgatg

SEQ ID NO: 576024 - DNA, 100 bp, Homo sapiens
gccattttaccaagaaagttgggtttcttttactggcaaatagtacttcaagagcacagtcttatgtaaggtgcactttacaggtccccgatgaaccaag

SEQ ID NO: 576025 - DNA, 75 bp, Homo sapiens
tgagggaggtgcccctgcgttgtaccatccgcctgtgggacacctaccaggagcattgggctcaggatctgaaca

SEQ ID NO: 576026 - DNA, 82 bp, Homo sapiens
cgggcgcctgaaggagttgttgtctcggcagcgcccgcggagacgtgaagagcaatgttgagaatgacagaagaccatgtgc

SEQ ID NO: 576027 - DNA, 75 bp, Homo sapiens
ggtgctgcagaaccagatccgggagcacgtcatcgccatcgaagatacttgccagaactaatacagctgatgaaa

SEQ ID NO: 576028 - DNA, 82 bp, Homo sapiens
atctgttttgtttgcatgcatgcccaaaacaaccctgttccagtgctggaaaacgatattcacctcagtttgtaaaggctgc

SEQ ID NO: 576029 - DNA, 100 bp, Homo sapiens
gcctgaacttcctggatcaggagctggagcgatcctacaggaccagctatcaggaagaggacgagcctgtggagtgggagacacctgacctttctcaagc

SEQ ID NO: 576030 - DNA, 100 bp, Homo sapiens
cgggcagtggcagtcatggcggctcagtgcgtgaggttggcgcggcgcagtcttcctgctttggcgttgtctctcaggatccatgcttgaagctggatga

SEQ ID NO: 576031 - DNA, 76 bp, Homo sapiens
ttactccctttccagtgccatcaagttctccatcttctattgaggtccgaacaaggtcagttggtgaatgtgtagc

SEQ ID NO: 576032 - DNA, 90 bp, Homo sapiens
cagaaaatggacaaccagaaccacaaaacaaggttccggctgaggaccttacattgacattcagaaagaaatgaccgcccggatgtgcca

SEQ ID NO: 576033 - DNA, 100 bp, Homo sapiens
gcagaagacaggtgatttctgcatttccgactgaggtccgagtggacagtggcatccaaccaggaagtgatattagcatttattatgatcctatgatttc

SEQ ID NO: 576034 - DNA, 75 bp, Homo sapiens
ttcacgcctgtgaagatagaaggatatgaagatcaggagtacttgattcttcagaaaacctccaaagtagatgtg

SEQ ID NO: 576035 - DNA, 100 bp, Homo sapiens
acccagtatttcaagagtcacttctttacttggtgcaggaaggcagtctttgctacgtacagcaaaaggtgacccttgcacggtgtcctcccagatggag

SEQ ID NO: 576036 - DNA, 82 bp, Homo sapiens
ctgctgcaccgacctcgacgtcttgcctgtgtcccacttgttcgcggcctataggatgcatcatctgcagacatcagaaaag

SEQ ID NO: 576037 - DNA, 74 bp, Homo sapiens
tgcctactgaagagcttatcagagctctacttgggaaaacagggtctcactttgtcacccatgctggagtgtag

SEQ ID NO: 576038 - DNA, 82 bp, Homo sapiens
cacctttcggcttctgagacggcggcagcagcggcattcagtcccgtggagtctccatctgagccctttcctagtccaggca

SEQ ID NO: 576039 - DNA, 73 bp, Homo sapiens
aggtccgtgtggccaacgagctcaacgccaggcgccgctcctttacaggtgatgtgtccaatctagatcccaa

SEQ ID NO: 576040 - DNA, 83 bp, Homo sapiens
caaattaataaaccttccagaggattacagcagcctcattaatcaagcatccaatttctcataacgaaggaggcccaacttca

SEQ ID NO: 576041 - DNA, 75 bp, Homo sapiens
gcgcggggcgacgctggctgcagggacccggtgacagcgtgagaggttcgtgctggccgtgggcagcgccgtctt

SEQ ID NO: 576042 - DNA, 75 bp, Homo sapiens
cctggctctataagctgaattatggcagcccagtcaaggtgtccctggccagtgtccttccacctgtccacaagc

SEQ ID NO: 576043 - DNA, 83 bp, Homo sapiens
agtcctctccaaactttgacctgaggtgtgactattgggaaggaacgtcccagggatggaagtgcttggatgcggtgctgctg

SEQ ID NO: 576044 - DNA, 101 bp, Homo sapiens
gaccacaggcttccagtacgagctggttaggaggcacagggcgtcggacctgcacgagctgtctgcattactctactgactggcagagacaggagaggtag

SEQ ID NO: 576045 - DNA, 50 bp, Homo sapiens
ctggccccttggattgagagtcaagattgtgattacagtggcgagatctt

SEQ ID NO: 576046 - DNA, 153 bp, Homo sapiens
cagctgccgaagtcagttccttgtggagccggagctgggcgcggattcgccgaggcaccgaggcactcagaggagacctgcctagagctggaacgttacctccagagcgagccctgctatgtttcagcctcagaaatcaaatttgacagccag

SEQ ID NO: 576047 - DNA, 100 bp, Homo sapiens
gagacagcaaaggcagcgaagaggtggattctcattgcaaaaaggccctgagtcataaagagctatatgattccagatgagatgatccagtgcgtagtct

SEQ ID NO: 576048 - DNA, 82 bp, Homo sapiens
tcggggctgtcggccggccacagggatgtcttttactatagatgatatcatcaagttgaatcgaaaggaagggaagaagcag

SEQ ID NO: 576049 - DNA, 75 bp, Homo sapiens
tcatcaaagagctcattaaggacgggaagaacctcatcgctgcgacgaaaaaattcagcttagagaactatcaac

SEQ ID NO: 576050 - DNA, 100 bp, Homo sapiens
ccagtcggagcctcatggccttttcggtttttcttcccccagtccctcagctgctgctgctgctcaggaggtcagatctgccactgatggtaataccagc

SEQ ID NO: 576051 - DNA, 95 bp, Homo sapiens
gtggcgtccggcgctgccaggatccgcggggagaccttgggcatcatcggacttgttgatattcactgatggactccaaagaatcattaactcct

SEQ ID NO: 576052 - DNA, 75 bp, Homo sapiens
ccgggggctcagagatccaagtgcgcgccctggcgggtccggaccaagagagagtctacagggagattgaacagg

SEQ ID NO: 576053 - DNA, 100 bp, Homo sapiens
tcgatccgcccacagacctcaaattcaaagggttcaactctgccaccaacgtcgtggtgttggctggcaccaaccgccctgacgtcctggacccggccct

SEQ ID NO: 576054 - DNA, 92 bp, Homo sapiens
cgcagatgttgtcaaggtggcctaccaggaggccaggggtgtcgccatgtcaacgaaacggaatattccaatgctctttgtccggggagatg

SEQ ID NO: 576055 - DNA, 74 bp, Homo sapiens
gagcttgctccctacgatgagaactggttctacacgcgagctggtgcctgaaagaagaccctgctaccatgtcc

SEQ ID NO: 576056 - DNA, 87 bp, Homo sapiens
atactgggactgacttacctaggaatgagagggacaggagtatctgaggatggagaactcagcacaccctgatatgtatgagagagc

SEQ ID NO: 576057 - DNA, 106 bp, Homo sapiens
aaactttacacattgtgctattcactctgctttacaagatccatccttttacaatccctgctattattcgtccattcagcgtattgaactatgatccacctcaaag

SEQ ID NO: 576058 - DNA, 75 bp, Homo sapiens
agaaggcgacaggaaccagctcgggggccaactctgaggagtccactgcagcagcattatgccagtacatacagg

SEQ ID NO: 576059 - DNA, 83 bp, Homo sapiens
gtggcgccgcccggggcgaggcagggccagcagcaggcgggagacagacagtctagcagtgcttccttggagaccctgttagc

SEQ ID NO: 576060 - DNA, 121 bp, Homo sapiens
catggagtcccgaaccctcctcctgctgttctcgggagccgtggccctgatccagacctgggcagctgaaaatgtgtgtctgacatgcaagctcagtggggcagagacccgtggattgctg

SEQ ID NO: 576061 - DNA, 83 bp, Homo sapiens
ccggacttcaatgcccagtccccagctcgccagcaacggtgtgctgctgaggactgtcttggaccctgtcactggggatttgt

SEQ ID NO: 576062 - DNA, 75 bp, Homo sapiens
ggcctgctgctggcccgcaggtttatacatgaaagcatccatgatgaggttgtaaacagacttaaaaaggcctat

SEQ ID NO: 576063 - DNA, 50 bp, Homo sapiens
actgacctgtaaatcatcctttagctatggaagttgggaccttttccggg

SEQ ID NO: 576064 - DNA, 83 bp, Homo sapiens
gtcagctacaggccagcttatgaccaggttgtatcagagtaagatggacggtagctttgattgtgattgtggtgagctggagc

SEQ ID NO: 576065 - DNA, 76 bp, Homo sapiens
atgcaaaactatgatgtgtaatgagtgtcacccagctctggatgggcagcgtggcaagtgctggtgtgtggaccgg

SEQ ID NO: 576066 - DNA, 94 bp, Homo sapiens
gcagccttgggcctcgcgccggctatggccgtgccctggggctgagccctcaggaaatctggcattttttaaagtttgcgccccacaaagagga

SEQ ID NO: 576067 - DNA, 100 bp, Homo sapiens
tgctgctaggggaccaaggatggcaaaacgacgacaggatttccagactgtattaccatcatttgagctcttctcaaagtatggaaaattatattcaaaa

SEQ ID NO: 576068 - DNA, 144 bp, Homo sapiens
aagcagagaaaggtgaaagccaggttgaccattgctgccgttctgtacttgcttttcatgattggagaacttgtaggtgtcatggagaaactccagctgggcccagagattctgcagcgggaaaatccaaggcttatttatgcc

SEQ ID NO: 576069 - DNA, 82 bp, Homo sapiens
agctgcctcagttcttagcgcaggtgattttcaatgttgggactcaaaggtgaagacactgaaggacagaatttttggcaga

SEQ ID NO: 576070 - DNA, 100 bp, Homo sapiens
tggctggttggacatgaaggcaaaggcagcattctttctttccttaggaaaaagttgttcctcaaagtcattcaagctgtactcgccgaaggagcccccg

SEQ ID NO: 576071 - DNA, 100 bp, Homo sapiens
aggtctctggagacatcttcagcagggtcaaagaattgactgtagatccaactgctgctggtgatgttcgtccaataatgcaccatccaccaaaccagat

SEQ ID NO: 576072 - DNA, 83 bp, Homo sapiens
tggagggcatgctatgctggaagaccacatcagggcgcttgaaaggtggctggtgtcccgcgatggccacaggcgccctcctg

SEQ ID NO: 576073 - DNA, 112 bp, Homo sapiens
ggggctgaagaagcagttctacaaggcgagccaggcgtctacggtgacgtgcagcgcgtgaagatcctgttcaataagaaggagaacgccctagtgcagatggcggacggca

SEQ ID NO: 576074 - DNA, 98 bp, Homo sapiens
ctgcctccgccggctacagcgggaagagcgggctttgttcgcgggggtcacagctctcatggctgcagctagcgtgaccccccctggctccctggagt

SEQ ID NO: 576075 - DNA, 83 bp, Homo sapiens
ccgcagccttgggcctcgcgccggctatggccgtgccctggggctgagccctcagccgaggtgctcggtggagtcatggcagt

SEQ ID NO: 576076 - DNA, 100 bp, Homo sapiens
catctccctgcagtctgagcctgtggtgaccgatgcgttcctggccgtggctggccacatcttctctgcaggtctcctctgagcctccggcctccataag

SEQ ID NO: 576077 - DNA, 80 bp, Homo sapiens
cgcggctcggagccctggaagcagcagctcaccgaggacggggactcattcctggtcgggtggcttccagtggtcttcag

SEQ ID NO: 576078 - DNA, 75 bp, Homo sapiens
tttgattgctaccctggtatatgcacttttcaggcccctagcagtcttcttgatgctttggaacaacatttagct

SEQ ID NO: 576079 - DNA, 50 bp, Homo sapiens
ggagaagatctatgggtcagacagaattggtgccaaggactcacccgtac

SEQ ID NO: 576080 - DNA, 75 bp, Homo sapiens
ctttcatctcattttaactgaaaatgttagtggtcatctaatacatgggagaaacatggattttggagtatttct

SEQ ID NO: 576081 - DNA, 90 bp, Homo sapiens
cagccccaaacaggacgaaggcgtgctgaagccagcagtatctgttggaaatgttggccagcttgcaatggatctgattatttctacact

SEQ ID NO: 576082 - DNA, 100 bp, Homo sapiens
gggtgggggaagctggtaggcacgggcggctccgcagtgaccggactcgggggaggtatgggctacgtgagttcgtggtgattgcccctgctgcacacag

SEQ ID NO: 576083 - DNA, 89 bp, Homo sapiens
gaaaatgaaaccagcagacagaatttgtcagggcaagaatatcacggcatgggcatgagtagcttgaaactgctgaagtatgtcctgtt

SEQ ID NO: 576084 - DNA, 89 bp, Homo sapiens
gtgaccgagagcgcgaatatcgtcatcgttagaaggtgtgtgtggtttcagcgcagcatggctgtggtcatccgtttgcaaggtctccc

SEQ ID NO: 576085 - DNA, 75 bp, Homo sapiens
acaccgacatggaacagggactcactggggggtaaagttctttacaaagttcgctggaaaggctatacatcggat

SEQ ID NO: 576086 - DNA, 98 bp, Homo sapiens
tactatcctcggtgctgtggtgcagagctagttcctctccagctcagccgcgtaggtgaggccgcaggcggtgctctgggtccgggagcgctgtcccc

SEQ ID NO: 576087 - DNA, 100 bp, Homo sapiens
gcagttgtggtcagtttcgctttgattgctaccctggtatatgcacttttcagagagttcctgtgagaacaagcgggcagacctggttttcatcattgac

SEQ ID NO: 576088 - DNA, 100 bp, Homo sapiens
cacagcagtaaatttcagggactagaaactccttctcaggaaaggaaacagattcattgtctgtctgaggatgagttaagttcttctacaagttcaactg

SEQ ID NO: 576089 - DNA, 50 bp, Homo sapiens
cggacggcgacgcagcccgcggcagaagaacatccagtcatggataaaaa

SEQ ID NO: 576090 - DNA, 75 bp, Homo sapiens
gtgccatgagatggctgagcgtctggaggattccgtcctcaaaggaccatggccaacctggagcgcaccttcatc

SEQ ID NO: 576091 - DNA, 100 bp, Homo sapiens
gtctacatgatgtctcagacttcttgctggagtccagccaagaggccctgcatgtgacggagcgcaaatacctgaagcgagactggtgcaaaacccagcc

SEQ ID NO: 576092 - DNA, 98 bp, Homo sapiens
tgaaccaggacctggacccggacccaaagtgccatgtctttaatgtgagttcctgcttggctcgagtttgagtttacagcccctgcaagtaaatccaa

SEQ ID NO: 576093 - DNA, 144 bp, Homo sapiens
gaatcacctccgctgtgaaaagctaactttcaacaaccccacagaggactttaggagaaagttgctgaaggcaggagggcaagataaagccgatcttatccgaccgaaacggaaatatgaaaagaagcccaaagtcttaccatc

SEQ ID NO: 576094 - DNA, 100 bp, Homo sapiens
cttcctactgtccgagggccaccaggccgccgggggcctgctgcgcccggagcaaacagagttcttcctattctgatagagacactactgaagaggagtc

SEQ ID NO: 576095 - DNA, 103 bp, Homo sapiens
tatggtggcagtggggatggctataatggatttggtaatgatggtggcaattttggaggtagccccggttatggaggaggaagaggaggatatggtggtggag

SEQ ID NO: 576096 - DNA, 82 bp, Homo sapiens
tttcattgtgttttcttctcaagcaactattattttgccattaactggagacagttcaggcccatgaagttcatcagaaaat

SEQ ID NO: 576097 - DNA, 88 bp, Homo sapiens
cagccgcttcctccagggcaagccccggctgagcctcaaggcaaaatcctgacagatgactttgcagacaaggagggtctggaaatgg

SEQ ID NO: 576098 - DNA, 75 bp, Homo sapiens
ggaggccttccagctgtttgaccgaacagaggccagtaatagtagccatgagtctcgtattggtctagctgaggg

SEQ ID NO: 576099 - DNA, 75 bp, Homo sapiens
cccaacggctccccgtcgtcctggtgctgcagcggtccagctgggagctccccgacctccaggagggcaagatcc

SEQ ID NO: 576100 - DNA, 100 bp, Homo sapiens
attccaagtaactcttatttggtgctaaagtggaattttactaccccacgggatgaatacattgagcaactaaagactcaaatgtctagctgtgtggcta

SEQ ID NO: 576101 - DNA, 97 bp, Homo sapiens
cgggatcgtgaccgagaccgtgaccgagagcgtgaccgagagcgcgaatatcgtcatcgttagaagaaagctgacttcatgagaccgaggatctcgt

SEQ ID NO: 576102 - DNA, 51 bp, Homo sapiens
ccaagctcgtagcctgccactccgtgctgaaactggaacgccaagctgaag

SEQ ID NO: 576103 - DNA, 83 bp, Homo sapiens
gctcacttgcatgtatttggaacaaaaaaaggagatgcctggcagccccgctctctgcagtgtgagatcaaccatgagttccg

SEQ ID NO: 576104 - DNA, 50 bp, Homo sapiens
gaacgtgccatggagacgcttaacgagccctgaggatgatgacaggaagg

SEQ ID NO: 576105 - DNA, 104 bp, Homo sapiens
ccccgcctgcctccgccggctacagcgggaagagcgggactttgaacatgtcggggatcgccctcagcagactcgcccaggagaggaaagcatggaggaaagac

SEQ ID NO: 576106 - DNA, 80 bp, Homo sapiens
aggagtcctgaccagagagcagcggttaagaagattgtctaccaaatatagaacagaaaagatatatcccacagccactg

SEQ ID NO: 576107 - DNA, 100 bp, Homo sapiens
gaggtggccgtggaggcagaggtggcatgggatcaccggcgtaatcaacccagcgttggacaaatactttccgtcagactctggagtgagaatcatagct

SEQ ID NO: 576108 - DNA, 98 bp, Homo sapiens
ctggccgagcaggctgagcgatacgacgagctccactggttcaacagcctctcctccagtttcgaccccagtcacaggacacaagagaatggtcatcc

SEQ ID NO: 576109 - DNA, 74 bp, Homo sapiens
ggcgggacaggcttgctgcttcctcctcctcggcctcaccgctcatcggaacctgtcccagctccctaattttg

SEQ ID NO: 576110 - DNA, 98 bp, Homo sapiens
cagagctacctatctatggagaaaatcattcaagtggccaagacctctgctgcacagacaatgtatttcaaaggcattgaagcagggaaggttcccta

SEQ ID NO: 576111 - DNA, 51 bp, Homo sapiens
gctcagggtgccagacctcatcatagaagagtgatggatgtcatttctcgt

SEQ ID NO: 576112 - DNA, 50 bp, Homo sapiens
gacacatttgtgagaactatttatgcagctatccagtcagttcgctgcta

SEQ ID NO: 576113 - DNA, 74 bp, Homo sapiens
ttcaacctgacccacatcagcgctgagaagaggaaaggaatgggtaccacagaccatgtcatcgtcctggcgtc

SEQ ID NO: 576114 - DNA, 100 bp, Homo sapiens
tgggatcttcttcactgcctctggcatggatgagctcccagttgaggataaaatcaggatcattgcacagaagatctatggagcagatgacattgaatta

SEQ ID NO: 576115 - DNA, 97 bp, Homo sapiens
cgcggctccggccctggccccgatggctctgtgcaacggagactccaaggttgacaggactgaggtgattcgcacctgcataaacccagtgtactca

SEQ ID NO: 576116 - DNA, 100 bp, Homo sapiens
catggttctgctggtgggccagtactccactgggaagaccaccttcatcagaagctcctcctggggtagagacagatcttattgatgttggattcacaga

SEQ ID NO: 576117 - DNA, 50 bp, Homo sapiens
gtgccctaaacacactatgaccgctgctgctgatggagcgaaagctgcag

SEQ ID NO: 576118 - DNA, 101 bp, Homo sapiens
cactctggtctgtggcgggtgtgctgcatcgaaggtttggtgcacctcgatttggaggaagtagggcagggcccttatctggaaagaagtttggaaaccct

SEQ ID NO: 576119 - DNA, 100 bp, Homo sapiens
gcggcctacagtcagctcacagttcaaggttccggaatgaggactacaccatacatgtgcagctgaatgactacgtggacatcatctgtccgcactatga

SEQ ID NO: 576120 - DNA, 101 bp, Homo sapiens
atggatatgtcaggaatgtgattcttcatcttccaaggattaaagcaaggagagccaatcatgactggcaaaacacagaccagcaacgtcaccaataagaa

SEQ ID NO: 576121 - DNA, 82 bp, Homo sapiens
tacatggagagtctggccttagcacatgcagatgagaagtccttagttgcacgtgcattatttaatcacatagacaagtcag

SEQ ID NO: 576122 - DNA, 76 bp, Homo sapiens
tggaagaactccgtgcccagatgctcataaggattgtcctctttctacaaaagccagttctggtgactcagtccgc

SEQ ID NO: 576123 - DNA, 75 bp, Homo sapiens
cgctcatgatcgacttcctcacccgcgcctgcgacctcgtcgccctggcagcatacaagtggctggtttgctacc

SEQ ID NO: 576124 - DNA, 100 bp, Homo sapiens
cacgctggcaagcaagattataatcaggaagtggatgcctccatttttaaggacctgccctcattcacccagaatgtgcacaggctggtcaacgacctgc

SEQ ID NO: 576125 - DNA, 90 bp, Homo sapiens
atttaaacaagagatttccacagaagaactgttcgtcagttggcacaggagcagttctttttaatgtgcaccagatgttgcatgggacac

SEQ ID NO: 576126 - DNA, 50 bp, Homo sapiens
ctgggtttgcgctagcagcgtaaggttggcgtgcagtggtgtgatctcag

SEQ ID NO: 576127 - DNA, 100 bp, Homo sapiens
gtcactgtgcggcgagacaattgcttatcgccaagcagactgttgggaaagatcctgatggctatccgagatgcaggttttgaaatctcagctatgcaga

SEQ ID NO: 576128 - DNA, 100 bp, Homo sapiens
gcacttggagggtctcgccgccagtggaaggagccaccgcccccgcccgaccatggccgaggacaccaatgggaatcccaatggggaagtcgatgctggt

SEQ ID NO: 576129 - DNA, 82 bp, Homo sapiens
aaagtgcagtttgtctacgactcctcggagaaaacccacttcaaagacgcagtcagtgggatcttgcctcggagctggtccc

SEQ ID NO: 576130 - DNA, 88 bp, Homo sapiens
tctttttcactaattgtggcattcacagaatgagctcattctctatacatcactccgtaacttgttgtttttacctagtaaggagtca

SEQ ID NO: 576131 - DNA, 100 bp, Homo sapiens
ccagaatacctcaaacgtctaccattacagtgtccacctctggaggtatgaaggaggctatccagccctcacagaagtcatgaataaactcagagaaaat

SEQ ID NO: 576132 - DNA, 97 bp, Homo sapiens
tgcagctaggctggctgcacttgctccacgggtcaggggatcggaggggtttgctgaatggtgcttagagtatggagaacatggatgcagaacacca

SEQ ID NO: 576133 - DNA, 74 bp, Homo sapiens
ggcggtcccacctctcagagagctgcagcatagctctgtatgaaaaagctgatatcaaggggcctgaagacaag

SEQ ID NO: 576134 - DNA, 74 bp, Homo sapiens
gggagcactggaagtacgggcagttgcagtgttggagctaaaaaatcaatgtggactgaacataaatcacctga

SEQ ID NO: 576135 - DNA, 87 bp, Homo sapiens
gagcccaaaccccgccaccatcatagattcacaatgacatcctttcaagaagtcccattgcagacttccaactttgcccatgtcatc

SEQ ID NO: 576136 - DNA, 75 bp, Homo sapiens
acgtgaccaagcgggccatcagcacccccgagaataacgaaggaggcccaacttcattcaataaggagcctgacg

SEQ ID NO: 576137 - DNA, 74 bp, Homo sapiens
ctgacagcctcatgctggtggacttcgagtacagcagttataactatagaggtcatgacgccagtcagatcaca

SEQ ID NO: 576138 - DNA, 100 bp, Homo sapiens
ttttgtatgtttgaatatcctctcaccatgttcagcataaagtaccattcttaatgattatcctcaacaagacagggagcccatttaccgtgaagatcag

SEQ ID NO: 576139 - DNA, 82 bp, Homo sapiens
ccacaactggcagacagcctgtggcgcggcaaccggaagatcagttttcctgccatccaggctgctccctccttcagcaact

SEQ ID NO: 576140 - DNA, 133 bp, Homo sapiens
gcgaattgtggcagagtgtaatgctgtccgccaggccctgcaggacctgctttcggagtacatgggcaatattggaattccaccagcccctcgtggagttcctcagattgaagttacatttgacattgatgcc

SEQ ID NO: 576141 - DNA, 87 bp, Homo sapiens
ttctacctggtgtttgagaagatgcggggaggtagaagaagtatgtcttcctggaccccctggctggtgctgtaacaaagacccatg

SEQ ID NO: 576142 - DNA, 100 bp, Homo sapiens
cagtggatacagtctaaattgcaggagattatgagcctcaaacaatttgtgagcatctccagtacttgtttgccttgttgcaaaacagtaataggcgata

SEQ ID NO: 576143 - DNA, 90 bp, Homo sapiens
gtcatgactatcctcctggtggttctgtataaatacaggtgctataagtgtacctcggtatgatcaaccacctcctgtcacataccagcc

SEQ ID NO: 576144 - DNA, 85 bp, Homo sapiens
tgaagaagcccaagatccgcaggaagaagcaggaaactgcatatcttctggtttacatgaagatggagtgctaatggaaatgccc

SEQ ID NO: 576145 - DNA, 100 bp, Homo sapiens
gcggagcctctggaatcacccgggtcgctgttcctgagtattaaaggtggaagaaggtccatatctttttctgtgggtgcttcaagtgttgttggaagtg

SEQ ID NO: 576146 - DNA, 73 bp, Homo sapiens
tcaaaaagacaaccagcattcgatccatgatggtatgttacttacggtcatgaactgatttggaagaacaggg

SEQ ID NO: 576147 - DNA, 82 bp, Homo sapiens
tccgccgcgatggtgacccggttcctgggcccacgctaccgggagctggtcaagaactgatcatgatgctgccgccaccgcc

SEQ ID NO: 576148 - DNA, 75 bp, Homo sapiens
gggccgccgagctggacccggaccggttttgggtgcaacacgcaggactacatctggcacaaggggatgcgctgc

SEQ ID NO: 576149 - DNA, 51 bp, Homo sapiens
caaaatgtcaacaaattgatggattgcccaaggactccagatactccaaat

SEQ ID NO: 576150 - DNA, 74 bp, Homo sapiens
tagagtgtttgcttcggcagaaaacggttggatgtactggaaaagtcataggaattgatcacattaaagagcta

SEQ ID NO: 576151 - DNA, 101 bp, Homo sapiens
ggagccagcggctgaggaggggccccagcagcccccgaaggccctatcaggacatggagtatgaaagacgcatggcttctcgctgtttctgggatgctgac

SEQ ID NO: 576152 - DNA, 98 bp, Homo sapiens
acaaacctagtttctttggtctgcctgccaatatcgctcgctcatctcagcgcatgatcagttctcaggcatggaagaggagatggttcgtgttacgc

SEQ ID NO: 576153 - DNA, 100 bp, Homo sapiens
gaccaccatggcagatggcaacagaggatgtcaacaattttttggagcttttaatctagacaacgagcaaccagattatgatatggattcagaagatgag

SEQ ID NO: 576154 - DNA, 100 bp, Homo sapiens
agagagcggcggaaaggataagcctcgacttagaagctaccgagttaccctaagaaagatagtgacgagaggctgcgagactgtggaaatgaccctgagg

SEQ ID NO: 576155 - DNA, 100 bp, Homo sapiens
tgtgacatgtgccaggactggtttcatggcaggatgcccaggctgaggaagagatcaagcaagagatgaacacactgcagcagaagctgaatgagcagca

SEQ ID NO: 576156 - DNA, 100 bp, Homo sapiens
tgggcaaagctgcttccctgttgctggagatcctgggcctcctgtgcaaaagcatggtggaagttaaacgagctgagcctcgggacagcaagagccaagc

SEQ ID NO: 576157 - DNA, 101 bp, Homo sapiens
ttttagctgaactaaggagaaagtcctacaacagtttggcgtgcaacatggggcttgagaaaggtccactgtgtgcagaggcatgggagttgtcatgttgg

SEQ ID NO: 576158 - DNA, 98 bp, Homo sapiens
cgtgcggggcctgggcctcccggtccgcaagcagggtcaccgggagcaagaagtccaccaagaggaccaaatccatcaacggctccctctacatcttc

SEQ ID NO: 576159 - DNA, 75 bp, Homo sapiens
tttgttcaagactgggcttccaccgagcagacagtgggagtagctcaccgttacccaagtatgcttcatctccca

SEQ ID NO: 576160 - DNA, 82 bp, Homo sapiens
tccgcggcatccgtaaccacaaggaggacgagcgctcctggttgcagccagaatgcatgacttcaggaggactgtgaaggag

SEQ ID NO: 576161 - DNA, 97 bp, Homo sapiens
gcgacatggccagctccggagagttggagctcagctgcatggaaggcagctgcacgtgttcgttcccaaccagtgagctggagaaggtgctccccca

SEQ ID NO: 576162 - DNA, 83 bp, Homo sapiens
ggcggcggcgacgcgtccgggccgacaatgcagatcttcgtgaagactctgactggtaagaccatcaccctcgaggttgagcc

SEQ ID NO: 576163 - DNA, 136 bp, Homo sapiens
ggaggagctgtgcagccgcgaggaggcgcgggaggtgttcgagaacgaccccgagacgtgcgcgtcccgggacgactggcgctgtgcgcgctccatgcacgagttttccgccaaggacatcgacgggcacatggtt

SEQ ID NO: 576164 - DNA, 102 bp, Homo sapiens
aaagaattaaaaggaagaacaacttaagagcttcttcaaagaggctaagaatattgtacacaaagattcttgatgttcttgaggaaatccctaaaaatgcag

SEQ ID NO: 576165 - DNA, 73 bp, Homo sapiens
ctggactttgggcgtcccattgccatgagccagccccagtgcctgctgagccgtttgacaacactacctacaa

SEQ ID NO: 576166 - DNA, 75 bp, Homo sapiens
gcgcaggcaaggacaaggccacagagtcggggtcttcacgtgcagagtagaagagccgggaaggaccccatcacc

SEQ ID NO: 576167 - DNA, 103 bp, Homo sapiens
ggttcgtctgcctctgcagtgcgtcctctggggctgcttgctgaccgctgtacctgcgtcgagctctgcacaggtgactgggactgcaaccccggagaccact

SEQ ID NO: 576168 - DNA, 82 bp, Homo sapiens
acggccacggcgctggtcaccggggtctgcctgggtcacaagacacccacttcaggagtcctgcctcacacccacaggaagg

SEQ ID NO: 576169 - DNA, 90 bp, Homo sapiens
cttccctgagccactctccaggctgctccagtactcaagggaacggtctcagaccagtatccttcaggggttctcttactctgatttgcg

SEQ ID NO: 576170 - DNA, 87 bp, Homo sapiens
agtttctgggagccgttatgccaaggcttgggaacgtgtgaaagaagaattgtggggaaaaaaaagcaagcataaccaaagatcatc

SEQ ID NO: 576171 - DNA, 83 bp, Homo sapiens
cagttaatggcaagacttgcagagggatgtacgaagtaggtccaaagttgttgaccgtatttacagtctctacaaacttacag

SEQ ID NO: 576172 - DNA, 75 bp, Homo sapiens
cagggagatatgaagcctccaagctatgattctgggtgctggtgacagctttgtgggagctctggccttctacct

SEQ ID NO: 576173 - DNA, 100 bp, Homo sapiens
cttttgacaagatgtcacctgaaagtggtcacagccgcatctttgaagagtgactcctctttcttcccagagtgtggtgattcaccatggccagacccag

SEQ ID NO: 576174 - DNA, 74 bp, Homo sapiens
tgagatgccagatcaaccactacccatgggtcagatagtgtgtgtaccatatcagtggcgtgtaactatgctca

SEQ ID NO: 576175 - DNA, 97 bp, Homo sapiens
cctcagcctcctgaggagctgggattacagccctttggaagatcattaagtttcacggccttggaagtgagaaatttttccaaaatacggaattaaa

SEQ ID NO: 576176 - DNA, 75 bp, Homo sapiens
caagaggaaaaaagagatcggggtccaaaatcatgataagatcattgtaatggcctgccgagaatttgagatggg

SEQ ID NO: 576177 - DNA, 89 bp, Homo sapiens
tcggggtggtctgtctgctcctggcatgccctgccacagccactgatcaagggaatgaaggaccgcctggagttctggtgcacggatgt

SEQ ID NO: 576178 - DNA, 74 bp, Homo sapiens
cgggaaggccgaccgactgccgcgcaccaaggatgacattgatcttgatgccttggctgcagaaatagaaggag

SEQ ID NO: 576179 - DNA, 104 bp, Homo sapiens
cactggccttgtgggattggctgtgtgcaatactcctcacgaggcctgatggaattgggactgtttcagtggaagaaaaagaaagatttgaggagataaaagag

SEQ ID NO: 576180 - DNA, 100 bp, Homo sapiens
ctttgaagtagaagaagctgatgtgcaccaattccagctggacatcactgtgaaaatgggacgggataaagtccgagaaatgtttatgaagaatgcccat

SEQ ID NO: 576181 - DNA, 74 bp, Homo sapiens
cagagagtaatgctgaacttaagtgctgaagatgctgcaagcaccaaatcatagctcataaaatcaggtcctga

SEQ ID NO: 576182 - DNA, 83 bp, Homo sapiens
gacaggcttacctttgactaccaccagaagctgcagggcaagccacagagccatgagctggctgcctgctgtttcccggggag

SEQ ID NO: 576183 - DNA, 75 bp, Homo sapiens
ggaggcagaggtggaggcgctttgaaagtggctgacaagattttgaaaaagaaagaataccctctttatataaat

SEQ ID NO: 576184 - DNA, 82 bp, Homo sapiens
aggcctcctacacctacctctctctgaacagctttgctgagccatcaaggtctaatggaagcatggttcggcattcttcatc

SEQ ID NO: 576185 - DNA, 100 bp, Homo sapiens
tgcaggaggactctggcacctacgtctgcactactaggtctgccatcatggatgttctcgcagaagcaaatggcacctttgccttaaaccttttgaaaac

SEQ ID NO: 576186 - DNA, 83 bp, Homo sapiens
gaattgcaaataatcctggaaaagtacttggcagagttgatctctctaatgtattagatcttcatgcctttgatagtctctct

SEQ ID NO: 576187 - DNA, 104 bp, Homo sapiens
atccagagaacagactgagaaactctgttgttactcaagatgactacttcaagctgctgaaatgggttgcggattgaacaagttagagaaacgtgatgaaaaac

SEQ ID NO: 576188 - DNA, 78 bp, Homo sapiens
cgggacctgctcctggacccggcctgggagaagcagcagagaaagatttggagcaagaggtggtggtggccttccccc

SEQ ID NO: 576189 - DNA, 75 bp, Homo sapiens
tttaacattccaacacataaaaattatttatccaacagctcctcccaggatttaggtcctgaatatgaaggtata

SEQ ID NO: 576190 - DNA, 98 bp, Homo sapiens
agttgtccatgaccctgaaggtccaggagtacccgaccctcaagcccgtggaccgggagcccgtggaccgggagccggtggtgtgccaccccgacctg

SEQ ID NO: 576191 - DNA, 98 bp, Homo sapiens
tgcgaaggccgggacccggttccccggcccacagtgggggtgtgcaaacccgagagaactgggccctccctatcctgaagacattagctgagagtctg

SEQ ID NO: 576192 - DNA, 97 bp, Homo sapiens
ggggcggccgatcgggccggggtgcgcaagggggaccgcatcctggaggttttgcctgagaatacagatcaacccacagaacaaagcggatttccaa

SEQ ID NO: 576193 - DNA, 115 bp, Homo sapiens
ctgggaagcagaacctggccggagccactagacagagccgggcctagcccagagacatggagagttgctacaacccaggtgtgaaggtcaaaggcctcatcctcatcagccccca

SEQ ID NO: 576194 - DNA, 99 bp, Homo sapiens
agaggatacacagatgcttccaaatccttcttccaaagcaatagctgatggaagaggagctccagcagcagcaggaaaggccgagggggacggcaagat

SEQ ID NO: 576195 - DNA, 87 bp, Homo sapiens
cagatctgctcccagtcctgccagtgaaatacgaatccccatctctaatgtaagcttggagatccgggcccccgggggacaggtgac

SEQ ID NO: 576196 - DNA, 75 bp, Homo sapiens
ggggccagggaaccctggtcaccgtctcctcaggaaagatgaatgggagggctgattttcgagagccgaatgcag

SEQ ID NO: 576197 - DNA, 75 bp, Homo sapiens
cagatgccattccctctcacccaagagatgcctgtgaggagccaccaacatttgaagctatggagctcattggta

SEQ ID NO: 576198 - DNA, 100 bp, Homo sapiens
cctctctctaccacgagcagcgccctgggagccctcacgagtcccggcctctccttccgatgaaaagagaaaggaagaatggactacagccaccaaacgt

SEQ ID NO: 576199 - DNA, 74 bp, Homo sapiens
ggaagatcgcttgagcccaggagtttgagaccatcctggacaaggcctactgaacttgacgcactggtatttgg

SEQ ID NO: 576200 - DNA, 75 bp, Homo sapiens
gccaaggcgactgcttaacacactgaggacatgtctcaggaaggctatggaactagatctcaacctcctctggcc

SEQ ID NO: 576201 - DNA, 100 bp, Homo sapiens
agcaatgtggagctgtgcctgtgccccgccagctaccggggggactcatgccagggaattcctggggaagtcggagcctgagcaccagcactgagcctgg

SEQ ID NO: 576202 - DNA, 83 bp, Homo sapiens
ctgacttggaccctggaaaacctggccctcttcaatttctgacaaaagctacgagttccagggagctctgtcctggtgaccgt

SEQ ID NO: 576203 - DNA, 80 bp, Homo sapiens
aggcggcccggcgggcgactggacggccggacaggagccagcaccgctctttgaccttgccatgcttgccttagatagtc

SEQ ID NO: 576204 - DNA, 95 bp, Homo sapiens
gaggttcgcggctctaacggggctttctacaaggtacttcgtactggatttcgaggctggcatcctgcagtattttgtgaatgagcaaagcaaac

SEQ ID NO: 576205 - DNA, 100 bp, Homo sapiens
gtaaacgtcaatgcacaaaatggatttggaaggactgcgctgcaggagcagatgtctcaagtattagatgccatgtttgaaaaattggtcaaagatgggg

SEQ ID NO: 576206 - DNA, 101 bp, Homo sapiens
cttcaagaagattgaactttattgtgaacaggtagagtacctgttgttgcagagttattttctgagtcagtttcaggaatgtatacaaagactatcgcttc

SEQ ID NO: 576207 - DNA, 96 bp, Homo sapiens
ttcacagcaacccaatggacatgcctggaagagagctcaatgaggacagagacagtggcatagcacggtctggaaagagcatctacggtgagcgct

SEQ ID NO: 576208 - DNA, 90 bp, Homo sapiens
gtgagatggtcccagaggcctggaggagcggactgaataatccagaatggctactctgatctatgttgataaggaaaatggagaaccagg

SEQ ID NO: 576209 - DNA, 98 bp, Homo sapiens
ctggtcccaagggaacatcagttctacgagaccctccctgctgagatgcgcaaattcactccccagtacaaagtctgcgggccaggcatcgacatccg

SEQ ID NO: 576210 - DNA, 75 bp, Homo sapiens
gggaccacggtcaccgtctcctcaggatgtacagttacccagcacgtgtacctcctcctcctcctattgctcggg

SEQ ID NO: 576211 - DNA, 100 bp, Homo sapiens
tcagaatgcccagacgaatgcagcttcgtttgatttttcggctttgtgagaaaccttaccatcaaacacgatggccagcaacgttaccaacaagacagat

SEQ ID NO: 576212 - DNA, 100 bp, Homo sapiens
tattctggtgcttatggtgcctcagagcaactaagaggtctttcttggctctatgagaacctggtgggattcctgaagataaagtccacaaaaatgaagc

SEQ ID NO: 576213 - DNA, 75 bp, Homo sapiens
ttttgtatactttatggaggatttagtagattgtgatcgaactgtgagaatttggaaggctcgcaatttgcaaga

SEQ ID NO: 576214 - DNA, 74 bp, Homo sapiens
accaaagcgcctgaggaccggcaacatggtgcggtcggggaataaggatgaagatttgataaagtggaaggcac

SEQ ID NO: 576215 - DNA, 83 bp, Homo sapiens
ctccattgacctctacgagctggaggaggagtattactcgtccaggtttactcctggcttgggggcattaggaagcactggag

SEQ ID NO: 576216 - DNA, 100 bp, Homo sapiens
ctacctcctggagatttccagaacaagatcatgcgatactttgtcaggctggccctgaaggaccctgttcatacagtgtcactgcagcagttcatctacg

SEQ ID NO: 576217 - DNA, 74 bp, Homo sapiens
tcgctcatcaagcagcaggtccttaagaagaagctcattcacacagaagacccatttaatgatgaacatcagga

SEQ ID NO: 576218 - DNA, 83 bp, Homo sapiens
aaggacgagggctgccgggcgttctacctggaaggccctgagcctgtgcaattatttcgagagtcaaaatgtggatttccgag

SEQ ID NO: 576219 - DNA, 80 bp, Homo sapiens
cagaaggaagcaccacacagagtctctccatttcaaggactaaaacagtcttgcgttaagtaaaaacctgtgaccagagc

SEQ ID NO: 576220 - DNA, 75 bp, Homo sapiens
aggcctccatccagaatggcaaagacagcgttaaaaggatctgaacaaagtctgctcaaatctcctgctgtgaac

SEQ ID NO: 576221 - DNA, 82 bp, Homo sapiens
ggtctacaagactctcttcgctctttgcatcttaactgcaggtactccaaagattcaggtttactcacgtcatccagcagag

SEQ ID NO: 576222 - DNA, 75 bp, Homo sapiens
gtggatgaagttgttcattgtttgtcaccacaaaaaggacagggccgcgatgggcctcttggaacattggtgtgt

SEQ ID NO: 576223 - DNA, 75 bp, Homo sapiens
cgccaccaggtcaccctggaagagtcgctggccgaaggaatgaagccaagagtgatgaaagaagctgtatctact

SEQ ID NO: 576224 - DNA, 90 bp, Homo sapiens
gaagcagtggtgggttccatgtgatggtggagtaggaggcaggtctccgcgggccatgaagcccccaggaggagaatcgagcaatctttt

SEQ ID NO: 576225 - DNA, 90 bp, Homo sapiens
gtctcaaggcaagcctattgagttaacacctctgccgctgctaaaagacaaagaaacagccttggtataatagcacgttagcatcaagac

SEQ ID NO: 576226 - DNA, 96 bp, Homo sapiens
ctgccacaagccggacacgttggagtgtgacaatatgaaccgctttgaccgaccagacagaaatgttcggcagcctcaggaaggtttttggaaaag

SEQ ID NO: 576227 - DNA, 98 bp, Homo sapiens
ccaggaccgccggccgggggacgagctcggagcagcagccaggccatcagcatcagcaaagccatcaacacccaggaggcccccgtgaaggagaagca

SEQ ID NO: 576228 - DNA, 82 bp, Homo sapiens
ggagcccggcaccccccgccgacaaggaggatgttccaggtcatccagccagagcgtgcgctgtacatccaggccaacaact

SEQ ID NO: 576229 - DNA, 51 bp, Homo sapiens
cacacctgtgtggccttcgcctggcggaatggccaaagactatgacgggtc

SEQ ID NO: 576230 - DNA, 90 bp, Homo sapiens
tttaaaatcattggaccatttagtaagaagaattccagtcttataaagttatcaatagtctggctgtctatcgtcatcgtgagactgact

SEQ ID NO: 576231 - DNA, 97 bp, Homo sapiens
ggagccgggcgcaatggagcggaagagaacccttaggagaaatcttgagagtggacagcaattgtgaagatcgccagagagttctgtgtttcatcac

SEQ ID NO: 576232 - DNA, 74 bp, Homo sapiens
cgggacctgttggttgtcgcccatgatctgatccggaagatgtcacctgtgacctccttcagcacaccccccac

SEQ ID NO: 576233 - DNA, 83 bp, Homo sapiens
caaccagtgagacaaagatgggcaaggctctgacaatccgggccaggaactgtggctgcaccatctgtcttcatcttcccgcc

SEQ ID NO: 576234 - DNA, 96 bp, Homo sapiens
atcttggaaatcaaagacggttgtgatgcagttttttgatatgaggataacagctggctcctctcattcaaaaaaaacaactggctctaaagcatc

SEQ ID NO: 576235 - DNA, 101 bp, Homo sapiens
cctgccgccgcccctcaccagacagatcgctgtcaaaaccctaggtgccgacgccaccgccgagcccatgatcctggaacagtacgtggtggtgtccaact

SEQ ID NO: 576236 - DNA, 75 bp, Homo sapiens
gaactggctggaaaagaaggacgtggtgggaagagcaagaggcagccgagaccgacccgcccgcccgcggccccg

SEQ ID NO: 576237 - DNA, 75 bp, Homo sapiens
cttcggcccgggccgctcaggtgcagtgagccatctttatggatttggactgatggacgcagaagccatggtgat

SEQ ID NO: 576238 - DNA, 75 bp, Homo sapiens
cggagctgagaccgggcggccacagtccgcagggatgaacctcgagttgctgggctggagtgcagtggtgcaatc

SEQ ID NO: 576239 - DNA, 74 bp, Homo sapiens
gactggggatagtgaaggtgctacggtgcaggaattagaaggtgacgaggagggagaagacgaggatgatgcgg

SEQ ID NO: 576240 - DNA, 98 bp, Homo sapiens
gacaggaacgtggagatctggaagatcaagaagctcattaagagcttggaggcggcccgcgggaatcctcgtagcccactacctccagagcatcacgc

SEQ ID NO: 576241 - DNA, 83 bp, Homo sapiens
cccaccctgcgccagagaccagataaagtagctacagcaagctgggtagcaggcagatccaaaggatatcatgaagtttccag

SEQ ID NO: 576242 - DNA, 50 bp, Homo sapiens
tcctttatatagaagggagagtagacgccctgcatgccaatggaggcctg

SEQ ID NO: 576243 - DNA, 82 bp, Homo sapiens
ctttcccgagaccgtcctggcgcgatgcgtcaagtacactgaaattcatcctgagatgagcaaattgtggctactaatttgc

SEQ ID NO: 576244 - DNA, 82 bp, Homo sapiens
ttggtgggtctcactgacttcaagaatgaagccgcggaccctcctgctttagccacagtagaagacttccagattcgtccac

SEQ ID NO: 576245 - DNA, 90 bp, Homo sapiens
agcaaggagaagtctaacaggcaggaggaggggagacacaaggagcccccgcaagtgcctggaagagctgggatgtctggttgagtccta

SEQ ID NO: 576246 - DNA, 100 bp, Homo sapiens
acattaccaatgacatcagaaccaagtccttgcagcctcgctgtacaatggtggaagcctttgacagtgtgaccgcaacaagggaaaacatggcttatac

SEQ ID NO: 576247 - DNA, 75 bp, Homo sapiens
cgggatatcgggtggcggctcgggacggaggacgcgctagtactttgacccctggtggacaaacgactgtgagca

SEQ ID NO: 576248 - DNA, 100 bp, Homo sapiens
tgcttcggggcacttagcacagcgcctggcgcaaggccaagctataacatcagaaatggtgaatgaatacaagaaaattcttttgctgaaaggatttgag

SEQ ID NO: 576249 - DNA, 50 bp, Homo sapiens
gataatgggaccaaatcatttcagagttcacatgagactctgaatatagt

SEQ ID NO: 576250 - DNA, 100 bp, Homo sapiens
tggcccggaaacaggaggacaaacgcttcgttaagggactcaggcagtacgggaagaacttcttcagaattagaaaggagctgcttcccaataaggaaac

SEQ ID NO: 576251 - DNA, 83 bp, Homo sapiens
ctgaagccggcgctgctctgtggggctctggccgcgcctggcctggccgggaccatggtgtttgagaagtcccccctgcgggt

SEQ ID NO: 576252 - DNA, 78 bp, Homo sapiens
gcgtcaacttcctcaagtcgcccaaagtgtactaatggtcacttgatgtgcgctggctgttttatccacctactagca

SEQ ID NO: 576253 - DNA, 82 bp, Homo sapiens
gtggatcacgaggttaacctcttagtggaggaaattcatcgtttgggttcaaaaatcctcctccgcctcctcctctctgcat

SEQ ID NO: 576254 - DNA, 75 bp, Homo sapiens
agggtcctttatatagaagggagagtagtgccaggtggagctcaacaggaaagtcctagcggatctggccatcta

SEQ ID NO: 576255 - DNA, 98 bp, Homo sapiens
gcagccgaaaacaaccatctggaagcagtgaagtacctcatcaaggctggggccctggtggatcccaagctgctggctgggcgctggccttttgatca

SEQ ID NO: 576256 - DNA, 75 bp, Homo sapiens
tttgtgggaagttgtattcatcaataatgaaatgctgactaaggaacaaggtgctggagaatctggtaaaagcac

SEQ ID NO: 576257 - DNA, 82 bp, Homo sapiens
tcccctcggaactcgggcatcatggcctcaggtgcctcaggaaccctgaagctgggctgagccatgatgctgctgccagaac

SEQ ID NO: 576258 - DNA, 75 bp, Homo sapiens
cctggtggatctgcagtacgaaggatttacagctgttggaggatggtgatctgactgtgataggagatcggggaa

SEQ ID NO: 576259 - DNA, 74 bp, Homo sapiens
gaccatcctgctggtcagcactgcggctggtgaaagcatgtattgccaatgtagaacccaaccaaacagtggag

SEQ ID NO: 576260 - DNA, 82 bp, Homo sapiens
acttcgacgaacactacgagtaccgggagtgcatccgccccaacccttttccccctcgtctcctgtgagaattccccgtcgg

SEQ ID NO: 576261 - DNA, 50 bp, Homo sapiens
ccaaaacaatccagctgttccctcagaatgcccttctgcctgcagggttc

SEQ ID NO: 576262 - DNA, 101 bp, Homo sapiens
ggagactgggcggccggccgacccttcctgtcgctgacggcgactgcgggaggccagtctgaagatgatgagaaactgaaaaagaggaaggagcgatttgg

SEQ ID NO: 576263 - DNA, 138 bp, Homo sapiens
gggctgactaaccttttaggagcaagattatattttgctccaaaagtgttgacaccctattgttatacaatagctgctacactgaagggaaaaacctgaggaagcccctgaccttcttgaataacctggatattgcag

SEQ ID NO: 576264 - DNA, 55 bp, Homo sapiens
gccgccgcagcccgccgaaggcgcgggtacgcagcccgggacaagagcaagctga

SEQ ID NO: 576265 - DNA, 122 bp, Homo sapiens
cccctccggcgcggaccccgcgtgcgccttgctcgcccgcagccccgagaccgcaggtcctgaacgaggctgtgggggccctgatgtaccacaccatcactctcaccagggaggacctggag

SEQ ID NO: 576266 - DNA, 100 bp, Homo sapiens
atatttcaggagtgtcaactgaaaagaggcacagttagatgaagaaggacagtttcttgtcagaataatatatgatgactccaaaacttatgatttggtt

SEQ ID NO: 576267 - DNA, 74 bp, Homo sapiens
gaaaaactgaaggaggccaaggttaagaagtttgctgacctctctgaggctgccaaccggaacaatgacgccct

SEQ ID NO: 576268 - DNA, 75 bp, Homo sapiens
ccaccatatagacccggctttaccttatatcaggtttgggactgacaatagctgactaacatgtcctgagctgtg

SEQ ID NO: 576269 - DNA, 100 bp, Homo sapiens
ccgagctggacccggaccggttttgggctgtgtggttccgggtgctggtgctgtggaagtggcaatggcagaagccctgaataaatataagctcagtgta

SEQ ID NO: 576270 - DNA, 80 bp, Homo sapiens
aggagattctgaagataaggagctcctggtaacgtttttatccatggatgacttgcttgggtaaggacatgaagacagtt

SEQ ID NO: 576271 - DNA, 100 bp, Homo sapiens
gtaccctaaaattagggcatgattaagctctctatcaatatcagctcacatcattgaaaagataattttgaagacatgttttgctgaaaagacactaaga

SEQ ID NO: 576272 - DNA, 80 bp, Homo sapiens
cttcgagagctaccgcgccagacaggtgtcgtgaaaactacccctaaaagccaaaatgggaaaggaaaagactcatatca

SEQ ID NO: 576273 - DNA, 100 bp, Homo sapiens
ctgctgtacaccctcaacaaacaccagcgctttggaaatgaaagctcattagcatctacactgaagacgctcctgttcttcacagctttaatgatcactg

SEQ ID NO: 576274 - DNA, 100 bp, Homo sapiens
agaggggaaactgagagttcccaattaataatgaagcaggcgggcgctaatattgacacctgctcagaagaccagaggaccccgttgatggaagcagccg

SEQ ID NO: 576275 - DNA, 98 bp, Homo sapiens
agcgggaccccagcgcgggcggcggcggctgggcgggagccccagaggtggaagcagggaaaggcctggagatgaggaagctggttctctcggggttc

SEQ ID NO: 576276 - DNA, 75 bp, Homo sapiens
cacaaggaagccgagtcccaagctggacagtgccacatcgcttatccaggcagctaaaaacctgatgaatgctgt

SEQ ID NO: 576277 - DNA, 99 bp, Homo sapiens
atgatcttgaaggaagccattgaaaaccatcagaacatgattaagcagtttaaagggctggtgaattaccagatctctgtcaagggcagtaacctgttc

SEQ ID NO: 576278 - DNA, 50 bp, Homo sapiens
gctggagctgccgcggcgcagccagatctgccgacaccccaggccatcga

SEQ ID NO: 576279 - DNA, 75 bp, Homo sapiens
gtttgtaaatgtgagtggaagccatgaggccaaaggcagttgtattgatttatactatggtggggaagctttctc

SEQ ID NO: 576280 - DNA, 100 bp, Homo sapiens
aaggattggagcacagaggctcagaagcaagtccaggtttggtgcacctcgatttggaggaagtagggcagggcccttatctggaaagaagtttggaaac

SEQ ID NO: 576281 - DNA, 100 bp, Homo sapiens
gtacctggaggctcaacggcagaagcttcaccacaaaagcgaaatgggcacaccacagatttgtttagtgaatgaccctaggccccagcacaagtacaac

SEQ ID NO: 576282 - DNA, 85 bp, Homo sapiens
ctcctcggctggtggcaagtattgctgtgggtgctgggacttcccgtccgcggcgtggaggagttgtggaaagtaaaaatgtagc

SEQ ID NO: 576283 - DNA, 75 bp, Homo sapiens
tcgacatgagtgatgtggaggaaaacaacttcgagggcagaattcctgctccaaaacgaggagaaatagtaagac

SEQ ID NO: 576284 - DNA, 111 bp, Homo sapiens
taagactctttaaagaaggcaaggagagaatgtatgaagaacagtcacaggacaggtcctcagaatggttggaatgaccctccagctttgaacagagtacccaaaaagaag

SEQ ID NO: 576285 - DNA, 100 bp, Homo sapiens
aaccgccgcagctcagcttggccaccagatagggccagatttgagtgtgtgaatttttgagtgaaacctggaacccaaatgagaagaaatctgcaaggaa

SEQ ID NO: 576286 - DNA, 87 bp, Homo sapiens
tcctgatctctctcgctgtgagacatgtctgagactcctgctcagtgtagcattaagtaatctatgccagcaattatgacaatgtta

SEQ ID NO: 576287 - DNA, 73 bp, Homo sapiens
cgaggtcattgagatcctcatggaaggtgggtgcgtcatctcattacctgcatctccaagtaccagtctccag

SEQ ID NO: 576288 - DNA, 100 bp, Homo sapiens
caacaggctcccgtgtttgtagaagtggctttgtggaatattcccatctcctgcctcctaatagctttgagggagctcgaggccatgagcagatatacca

SEQ ID NO: 576289 - DNA, 100 bp, Homo sapiens
agagtaccctgaagtattgggcagcattcttggagcactgaaggccattgtaaatgtcataggtgatctgtgaaaatggttcgctattcacttgacccgg

SEQ ID NO: 576290 - DNA, 96 bp, Homo sapiens
gcctcatccacgactgcaccttcatcaccagtacatggactggacctgcctggagcccagcccagagcatctcctcagtgctcatctctatccagt

SEQ ID NO: 576291 - DNA, 80 bp, Homo sapiens
tgaaaaggtggaggctgcatcaggatttacctctgaagaaaaaggcatcaagcatgatggaaccatgtgtgatacctgcc

SEQ ID NO: 576292 - DNA, 100 bp, Homo sapiens
tgcctcctgcagcccccatagcagcttcctgcctgacacagctcacttcaagaagtgcacaatgtcagaacgtggaattaagtgggcttgtgaatattgt

SEQ ID NO: 576293 - DNA, 76 bp, Homo sapiens
ttttcatgcagacagcttgtcaagctgtgcagcatcaaagaggcaggagaaaaggcgacggcggattgacagaagt

SEQ ID NO: 576294 - DNA, 100 bp, Homo sapiens
ttgggctcgggaagccggcggaccgcgtcctgcgccggagcagctgcggataaccgtctggtccttgtgcacaaaatccgtgtcttacatcaaatacccg

SEQ ID NO: 576295 - DNA, 50 bp, Homo sapiens
caccaatactgttgcagattgatgctgtgtgctgtggacccacctggggt

SEQ ID NO: 576296 - DNA, 82 bp, Homo sapiens
aaactgctctttctattggatgacagtttcgagtgattaaaaggggacttggcatataattatagaggaccacgaacaaaag

SEQ ID NO: 576297 - DNA, 82 bp, Homo sapiens
ctttggcttctcgactcggtcctgtttcgacagcgaacatgtcgcggcctgtcagataacgaaggaggcccaacttcattca

SEQ ID NO: 576298 - DNA, 75 bp, Homo sapiens
ggatcgatgtttcaatattggaagcgctttgatttacagcagctgcagaaaactttagaaactgttcctttggag

SEQ ID NO: 576299 - DNA, 82 bp, Homo sapiens
aagcttagagcgtctggccaagaatcagaggaagtgggtcgttgaggacttccacatggagattggcacaggaccagactca

SEQ ID NO: 576300 - DNA, 100 bp, Homo sapiens
gaaaaaacttccagaacatctgggagaatatttaatggaaaatcgcttggttaaaacctgacacttttaacagacaaactgggaagattgagcctgtggt

SEQ ID NO: 576301 - DNA, 100 bp, Homo sapiens
aaccattggcgtggatccgctggcctgctcatcggaacctgtcccagctccctaattttgccttctctgttccactggcgtatttcctgctgagccagca

SEQ ID NO: 576302 - DNA, 76 bp, Homo sapiens
gaacgatatgataaagacgatgaagccccctctgatgggcagctttggaagaagtagaaggtgatgtggcagaatt

SEQ ID NO: 576303 - DNA, 119 bp, Homo sapiens
cgtgtctgtccttgtcaagcacacccctcgtgtccaggttcctcatgggcagtgctcggggtgacaaagaaggctggatcctcatagaccgttgtggaaagcactttggcaccattttg

SEQ ID NO: 576304 - DNA, 100 bp, Homo sapiens
aagtggcgatgtgaatactgctacagaagtagagccaaaggatggtgagattgttggcctttcaggaagagtgcttaagttgtgttttctaataccaaag

SEQ ID NO: 576305 - DNA, 97 bp, Homo sapiens
taaatacatcatgcttaaccctagttcacgaatcaagaatcctggccctcttatacctcagccttcgagtcaacagactcctgagaggaaaccccgc

SEQ ID NO: 576306 - DNA, 75 bp, Homo sapiens
tcctttgcctagaggctatcacacgtgggggcccctgaagccactgatggaagccacactaccggggcatcggac

SEQ ID NO: 576307 - DNA, 83 bp, Homo sapiens
gcggccgaggcgcccgccgaaggccctgctgtaaaagggggatatgagactttctactcggaatatcctgagtgttgcgtgga

SEQ ID NO: 576308 - DNA, 75 bp, Homo sapiens
gcctaatccgtatattatggctccagggctgttacatgcctacccgaggtggccgaagacgcagcagaagtccag

SEQ ID NO: 576309 - DNA, 74 bp, Homo sapiens
gatatttggagttcttacaacatggcagacattgacaagagatcatgaatcagacagataaaaatcaacaagaa

SEQ ID NO: 576310 - DNA, 75 bp, Homo sapiens
gaaccaacccccaaattggctgggacagggatgtttcggaaggatgaagaactgacttcctcacagagggattta

SEQ ID NO: 576311 - DNA, 100 bp, Homo sapiens
gaaaatcaccagttccgtgctccattatgtcgtgtgcttccccggcgggattaaggacactgcatgacattgggccagaaatccggcgtgctatatcgtg

SEQ ID NO: 576312 - DNA, 83 bp, Homo sapiens
gaagctgtaccgtgccaacggccacctcttccaagccaagcgctttaacaggatgcacgtgtttagaggccagctcctgcgag

SEQ ID NO: 576313 - DNA, 75 bp, Homo sapiens
cagacggctgcgaggcgctgggcacaggcttcaacggaccacaccaaaatgccatctcaaatggaacacgccatg

SEQ ID NO: 576314 - DNA, 74 bp, Homo sapiens
gggcaccaccctccatgcctttgcagggctgctgttatagtttctgcatggaaagcacttggaacaatgcctgg

SEQ ID NO: 576315 - DNA, 100 bp, Homo sapiens
aaatggtacacgcagaacatggcaaatggcattaaaattggccctcagcatgctgctaccaatgcaacacatgcaggcaatcagggaggacagcaggctg

SEQ ID NO: 576316 - DNA, 75 bp, Homo sapiens
gcattctatcatggaaggaggagatgaagggcaagggccaaaatgatgaatttactcactacgtgagccgcagac

SEQ ID NO: 576317 - DNA, 90 bp, Homo sapiens
ccgggatcgtgaccgagaccgtgaccgagagcgtgaccgagagcgcgaatatcgtcatcgttagaaggtttgatgagaagagggcagtgc

SEQ ID NO: 576318 - DNA, 82 bp, Homo sapiens
ggttgtttatgagtcgcaccaaccggccgcctctgtccctttcccggatggtggccaaacaggagaagaagaagaagaagac

SEQ ID NO: 576319 - DNA, 75 bp, Homo sapiens
aacacaacgatggatgaattcaggcaacatctacaggcaactggtatagggtttaaaccagcaggaggcatccgc

SEQ ID NO: 576320 - DNA, 98 bp, Homo sapiens
ctcgtcatcagagaattcatactggaagaagaaaggcgtatggcatctgttttagccaaaaaagaggaagagaagaagcgggaaagtcataaacaatc

SEQ ID NO: 576321 - DNA, 100 bp, Homo sapiens
gcgcctgttcccggggcagatccaggttcaggggaaggaaagatacaacttccccaacccaaacccgtttgtggaggacgacatggataagaatgaaatc

SEQ ID NO: 576322 - DNA, 98 bp, Homo sapiens
ccttcctgtggccgctgctggaggtgcgtgaccacaacacaggtggcccgaggcagccgggatgacagctctccccaggaatcctgctgcctgctgag

SEQ ID NO: 576323 - DNA, 82 bp, Homo sapiens
cctgacggcgtgaccgacccgagccggagatggcagcagaaaaggccaaagcagcagccggggaggccaaagtgaaaaagca

SEQ ID NO: 576324 - DNA, 83 bp, Homo sapiens
ggaccagcgacccaagcgccgcggttaaccacgtctcgtccacgacctccctaggtgagaagccctaccactgcaactgggac

SEQ ID NO: 576325 - DNA, 90 bp, Homo sapiens
caaaaatttaaacaagaatccactgttgctactgaaaggatggattaccgggccttggtgcatgagcgagatgaggcagcctatggggag

SEQ ID NO: 576326 - DNA, 134 bp, Homo sapiens
ccggtgcatgctgggtaagacctagagtgaatgctcagcttgtctcaaggctgcaatgagggtgagcagggcagcatttccttctcccactgctgctgagatggcagaaattagtcgaattcagtacgaaatgg

SEQ ID NO: 576327 - DNA, 100 bp, Homo sapiens
aagatgaatttcctccgcggggtaatggggggtcagagtgccggaccccagcacacagaagccgagacgaaaagcacttggttctgcttcgagatggaag

SEQ ID NO: 576328 - DNA, 100 bp, Homo sapiens
acatgagtgatgtggaggaaaacaacttcgagggcagagtcatggaaaatggaagatttgcaaaatacaaatattttacccatgtcatgatcaataagac

SEQ ID NO: 576329 - DNA, 75 bp, Homo sapiens
gcgaattcctgatatagttttatggccaagtatttacctcctgagtgttttgtagttggaaaagagccaccaaag

SEQ ID NO: 576330 - DNA, 100 bp, Homo sapiens
taacgacaagaaaaacaatcgcttcaatgatgggaaggtggatcccgccgggaggtactttgctggtaacctggatgaggacatcattgcagaagagaac

SEQ ID NO: 576331 - DNA, 100 bp, Homo sapiens
gaagaatcaatgctttggcccctggtgacatgtacatggtgtaatgacagctatatcgagaagtttactgactttcttcggctctttgtgagtgttcacc

SEQ ID NO: 576332 - DNA, 122 bp, Homo sapiens
ctgggcaggcggccgagctccggcacagcgccgcgtccgccgccgcggtggcagtcagcagccggcagcagcagcgggcgaggattaaatccaccacacagggtgaaatctatctccatgac

SEQ ID NO: 576333 - DNA, 90 bp, Homo sapiens
caatcgtgaaacttcagaatacttcaagaatagcagaggagcaggtctggaacaaaaagaatgcaaatgaaaaaggaagaagccagactt

SEQ ID NO: 576334 - DNA, 101 bp, Homo sapiens
ctgaggatgatgttgacttggggatccaaaggcacaggtcatgctgacagccctgctcctgtgaacgggatcaatggctacaatgaagacataaatcaaga

SEQ ID NO: 576335 - DNA, 98 bp, Homo sapiens
ccggccaagctatcttctcgctagcaggaacctctttcaggagctataaaagaaagggaggaatcatgtccacaattgcagctttctatggcggcaag

SEQ ID NO: 576336 - DNA, 50 bp, Homo sapiens
aggaagctgctggaaggcgaggagagcagcctactcgccctcctaatggt

SEQ ID NO: 576337 - DNA, 99 bp, Homo sapiens
aaattattgatgggctctctgagcaggaggacactcaatcacttgtcggaagtccctcaacccgtatagcacctcatattattggagcagaagatgatg

SEQ ID NO: 576338 - DNA, 75 bp, Homo sapiens
ggtcttcaccgagctcattaaaggattcgtttactgtaaacacaccacctactccagaagacctgatgttaagtc

SEQ ID NO: 576339 - DNA, 83 bp, Homo sapiens
ccagcccggcccggcagcgacatggaaggaacaagatcactcaaggtgaaggataatctactaataccagcactttgaatgaa

SEQ ID NO: 576340 - DNA, 76 bp, Homo sapiens
gggaagttcctttttgaagtagttccaggtgatctgtgaaaatggttcgctattcacttgacccggagaaccccac

SEQ ID NO: 576341 - DNA, 97 bp, Homo sapiens
aggacagcctttccgcgcgggactccggggcgccacgggggccatgtaagcagtcatccgtccttggctcaggatttggagagcttgcaccaccaaa

SEQ ID NO: 576342 - DNA, 100 bp, Homo sapiens
gacgcaaaccaaggatctggggatcttcgcactatcccaagatgtcatctgggtgattctcagtgtggaggtgggtggacttttaggagtaacgcagcag

SEQ ID NO: 576343 - DNA, 76 bp, Homo sapiens
ctcacggcacctcccaccatgaaggtggtctttgggaagaagcttcctgcctttgccaccatccccatccaccagc

SEQ ID NO: 576344 - DNA, 100 bp, Homo sapiens
cgaaccacaaatacctggctatattgtcgatgattcagtcagaggttatggatgatgaatcagatgaaaaagaagcaaactcaccttaaaataatctgga

SEQ ID NO: 576345 - DNA, 100 bp, Homo sapiens
ggcggccgccgctgcaccttcaccgcgtacccgggacccgcccgcccgcgggagtatactgcattggaacaaaaactgaaaaaattgacggaagatttga

SEQ ID NO: 576346 - DNA, 83 bp, Homo sapiens
ctcgcgccggctatggccgtgccctggggctgagccctcaggcccactgctcagtggagcgtggaggacgaggaggaggccgt

SEQ ID NO: 576347 - DNA, 111 bp, Homo sapiens
cctggctcaggaacagggacagcacctcatcccctggatgggggaccacaagatcctcatcgacaggagaaccaggtgcatcagcgcattgcggagctgaggaaagcaggt

SEQ ID NO: 576348 - DNA, 50 bp, Homo sapiens
cagggctacacatttttcatcccttccgtgccggtggtggtgtgcacatt

SEQ ID NO: 576349 - DNA, 83 bp, Homo sapiens
ctccttcggcagtccacccaccgccgccgcctcccaggtggtacagaagttggtcctgccctttgggcgactgaactacctgc

SEQ ID NO: 576350 - DNA, 71 bp, Homo sapiens
ctgggctttaacagcaagggagaggctgcaggatctggagaatcagtaccggaaagaaaaggaagaagccg

SEQ ID NO: 576351 - DNA, 100 bp, Homo sapiens
agcccaagagcggcgaggaggcgctcatcatcccccccgacgccgtcgcggtggactgcaaggacccagagttcaacaatacagatcagattgacctgta

SEQ ID NO: 576352 - DNA, 100 bp, Homo sapiens
tgggtcctgaatcttctgggagctgaggaaccagatatcttgaaaagctgccagaaaggtgagactgtggagatgagaaggtggtggacactcgtgatgg

SEQ ID NO: 576353 - DNA, 82 bp, Homo sapiens
gtcttcgcgctctggctggtctcccctctgctggatcatggaagggaagtggttgctgtgtatgttactggtgcttggaact

SEQ ID NO: 576354 - DNA, 99 bp, Homo sapiens
tatctgtaaagtgaccaattcccttggtcaaagaagtgaccaaaaagtcatctacatttcaggacctgaacccagacccaatcttagaggagaatcaag

SEQ ID NO: 576355 - DNA, 74 bp, Homo sapiens
ctttgccactgacattgcagagctgtgggctgtgttccacaagttcaaaggtatgaggttaatttccaaaatgg

SEQ ID NO: 576356 - DNA, 102 bp, Homo sapiens
atttctggtgaaaatattcctcaagaaaaggatattccagattgcccctgtggtgccaagagaatattggaattccagttctctgtactgccccgtagaaaa

SEQ ID NO: 576357 - DNA, 82 bp, Homo sapiens
ctcacacccggtctggacacagaaagagaaacccaacatgagtgaagtttcctgcaagaaacgggacgactatttggaatgg

SEQ ID NO: 576358 - DNA, 100 bp, Homo sapiens
ctcagtgattcttaatcagcgcactggcaagtgcagcgcctgtaatgtttggcgagtctgatgaactctttgccagcagagaggatccaggaaatacaga

SEQ ID NO: 576359 - DNA, 51 bp, Homo sapiens
attcagaactggatgaaaagcatcaaggagctcactgcaaatctaacttca

SEQ ID NO: 576360 - DNA, 97 bp, Homo sapiens
cagccgtccggagccagccaacgagcgacaattgtggcaattaataaagacccagaagctccaattttccaagtggcagattatggaatagttgcag

SEQ ID NO: 576361 - DNA, 88 bp, Homo sapiens
agatactttaagcttcgagggcgaacgctttactatgccaaaacggcaaaggcccagtgacctggggaagaacgcaggggacacgctg

SEQ ID NO: 576362 - DNA, 76 bp, Homo sapiens
gggaaatctggatgccaaacgagattggggccatgccaaggactatgtggaggcccccaccatgaagggtttcaca

SEQ ID NO: 576363 - DNA, 75 bp, Homo sapiens
gtctaatgagattggagctattgaaaaggctgtgattaaactgcaaatatctcatgaagctgctgcctgtatcac

SEQ ID NO: 576364 - DNA, 82 bp, Homo sapiens
ctttgcctttttattggagaacttaatccacttacgttcagggttatcattcatagaaaaatccagttacactcttaaagga

SEQ ID NO: 576365 - DNA, 83 bp, Homo sapiens
cctgcatgtactgggggattcgcagggaggatgtcgggacaccccggaagctgggaaatggctcttttaagacacttactctt

SEQ ID NO: 576366 - DNA, 90 bp, Homo sapiens
tacggtctggccgtcggctgcggcgccatcgagttgctacgatggaagttaaagggaaaaagcaattcacaggaaagagtacaaagacag

SEQ ID NO: 576367 - DNA, 101 bp, Homo sapiens
gcaagcctggctatgcttcagccttgatgacggccatcttcccccggttagctttatacgtctacgaatatttactgcacgtaggagcacagaaatctgca

SEQ ID NO: 576368 - DNA, 90 bp, Homo sapiens
aaactgaaccacccttcagcaaggatcatgctcagttaagcagacatatccagttcaatcacatggtggaaactatatgggtcagagcat

SEQ ID NO: 576369 - DNA, 50 bp, Homo sapiens
ctttgtctgactacaatattcaaaagggaggagctttatctttatatact

SEQ ID NO: 576370 - DNA, 101 bp, Homo sapiens
attaaagttaccagaagagcctatcacacggtggggcgagtattggtgtgaggtgacggactcagattcagactctgagggaggagccgctggtggagaag

SEQ ID NO: 576371 - DNA, 89 bp, Homo sapiens
gatgatgtgcgggttcaggaggtacccaaactgaaggctgtgatgcgccgctggctgcctgccggagacgccttgttgcagatgatcac

SEQ ID NO: 576372 - DNA, 99 bp, Homo sapiens
caagcacagcagcctcatcaccccgttacaggccgtggcccagccaagttctatagaaattttagagtattcatcagatagtgaaaaagaagatgattt

SEQ ID NO: 576373 - DNA, 90 bp, Homo sapiens
gctcttctatccttgattggagtcctattcttgagacacaagatggtgaaggagacccagtactatgacatcctgggcgtgaagcccagc

SEQ ID NO: 576374 - DNA, 50 bp, Homo sapiens
aggacgcccccggcccaggcccttgggtgctggagaatctggtaaaagca

SEQ ID NO: 576375 - DNA, 99 bp, Homo sapiens
gaagaattagtgtctccatcgtcatcagaaactgaaggcaactttgtctatcgcacagggacaaaagtggctctcaatccagcacatgcacattgaagc

SEQ ID NO: 576376 - DNA, 98 bp, Homo sapiens
catggcactctggcgggcataccagcgggccctggccgctcacccgtggaaagtacaggtcctgacagctgcaatggcaccagcatgatatcattgat

SEQ ID NO: 576377 - DNA, 100 bp, Homo sapiens
cgcagactggcgcgtccaggtggccgtgaagcacctgcacatccacactccgctgctcgacaggcaatctataagatggtttcctctgtaatgaaaatgc

SEQ ID NO: 576378 - DNA, 82 bp, Homo sapiens
gagggagataatcgcagcaccaacctgctggtgatggaggacgaggagaaggcagtggagatcttgggcaacacggaagctg

SEQ ID NO: 576379 - DNA, 100 bp, Homo sapiens
gaagccatcaggacctgaatgcccttttgcttgaggttggatggcaagcatgtggtgtttggcaaagtgaaagaaggcatgaatattgtggaggccatgg

SEQ ID NO: 576380 - DNA, 82 bp, Homo sapiens
cttctcgtggcggcggggaccgtccagcccagcgattctcagtcaggtactccaaagattcaggtttactcacgtcatccag

SEQ ID NO: 576381 - DNA, 75 bp, Homo sapiens
ggattccaagtaactcttatttgttagttgaatccatggacatgaaacccacagatatagagggttggcccggtg

SEQ ID NO: 576382 - DNA, 75 bp, Homo sapiens
ctgatgccacgagcacagccacttctacacgtcacgggtcagtttgaaaaggaggatcgagctcactgtggagta

SEQ ID NO: 576383 - DNA, 96 bp, Homo sapiens
gcatatcaatacttcataacactaggaagtcccacaggatcacatgttgaatggtgtaaacagcttatagctgctacaatttctagtcagatttca

SEQ ID NO: 576384 - DNA, 82 bp, Homo sapiens
ttcaaagagaccctcggaacgtcgggaaagaggttaaagaagacacgcaagtatgatatcatcaccactccagcagagcgag

SEQ ID NO: 576385 - DNA, 100 bp, Homo sapiens
gtgtttgcggttcagccctttgatgaccgcagcaggctcggacatcatcatgcagctggacgacgtggttagcagtactgtgactgggccacgtgtggag

SEQ ID NO: 576386 - DNA, 50 bp, Homo sapiens
tgataacaccctgtaacagctgattaaacgagaagattcatcaccgcttt

SEQ ID NO: 576387 - DNA, 100 bp, Homo sapiens
ccggtccctctctccacggtaagggagaaagagatgacttgatgtctgcactagtttccgtaaggagcagcttggcagatacgcagcaaagagaagcaag

SEQ ID NO: 576388 - DNA, 100 bp, Homo sapiens
cccgaggtctccgcggcccgaggtctccgcccgcaccatgcggctgggcagacaatgcagatcttcgtgaagactctgactggtaagaccatcaccctcg

SEQ ID NO: 576389 - DNA, 90 bp, Homo sapiens
gtgaggcctccccagccacgtggaactgaattaaccgacttgcagagggatcctcctgcccagtgttctgcaggacctgtcggtgatgac

SEQ ID NO: 576390 - DNA, 90 bp, Homo sapiens
gtccgctgtgcccgggcctgcaccatgagcgtcccggccttcatcgacatcagtgaagaagatcagcctctgacctgtccaggtgccctg

SEQ ID NO: 576391 - DNA, 87 bp, Homo sapiens
aacaacgcaagttggattggggcagtctttgtgcgttgaggacccacaggcatgaattatttactcctccggtgataggttctcacc

SEQ ID NO: 576392 - DNA, 136 bp, Homo sapiens
gccgacgcccatccagctgaacccggcccccgacggctctgcagttaacgggaccagctctgcggaatttttcggaattaacactaaacggtagcctggaagaaaggatattctttactaacatggttacctgcag

SEQ ID NO: 576393 - DNA, 82 bp, Homo sapiens
ctcgcactaccctgactacagctggagcgcccagaggcgagccctggtggaggaagaggagccgggtgtgggctgagccctg

SEQ ID NO: 576394 - DNA, 89 bp, Homo sapiens
cccaaatacaacaagaattagaaactccaatgagagaacgttttaggaatctagatgaaagcaagcaccagaagcaccaggcttttgaa

SEQ ID NO: 576395 - DNA, 100 bp, Homo sapiens
cttgaactctgccgaattcctgtgccacctcctcctttagaaaactgatcttaatacagaactcccccactggaaaggattctgaaagaaatgaagtcag

SEQ ID NO: 576396 - DNA, 90 bp, Homo sapiens
caccctcgtgtctgccaccatcttcgacttgagcgaagttttatgcaagctacaagagactgtgaaaaggaagttggaaggagctcgatc

SEQ ID NO: 576397 - DNA, 100 bp, Homo sapiens
gtggaagatggcttgataaagtgactccagaccaaggaggatgagctgctgtccctggaagagaacggatggagggaagcagctcctacgaagttccctc

SEQ ID NO: 576398 - DNA, 89 bp, Homo sapiens
gggcaggccagctgtacctggcctggagctccagtctgaagttgacaagcagcagcatagaccctggtctgagtatcaagcagttgggt

SEQ ID NO: 576399 - DNA, 74 bp, Homo sapiens
catagccctcgattatgtgcttcaggcaggctgcagtgccaccaggctgccaggtgacgggcagacgagcgccg

SEQ ID NO: 576400 - DNA, 90 bp, Homo sapiens
tatactgtgacttcttctacttgtacattacaaaaggctctggaagcaaacaccatctctacagcctcagtaaggcccgcccaggaggag

SEQ ID NO: 576401 - DNA, 50 bp, Homo sapiens
tctggaacaactcctaattctaataatttgcatttggggagcaggtggag

SEQ ID NO: 576402 - DNA, 75 bp, Homo sapiens
gttactcgcacgcggatttggctggcgtcccgcgtctattattagcagaagatttttctgcatagttggcacgct

SEQ ID NO: 576403 - DNA, 75 bp, Homo sapiens
cgagctgtctcggtcccacgtgtgcgggtatgttagagcccaccaaggaaccactgaaaccactttctgctgcag

SEQ ID NO: 576404 - DNA, 48 bp, Homo sapiens
tcttgaatttctctctgtaaaggagcatttaaatattaggacactgac

SEQ ID NO: 576405 - DNA, 88 bp, Homo sapiens
taccatcaaaatgttttgtggagactatgagtgagtcctggaacctgaaggacctggatattacctctccagaactcaggagtgtgtg

SEQ ID NO: 576406 - DNA, 100 bp, Homo sapiens
gaattcatcccaaaaacatccaaagtttggaagtgatcgggaaaggaacccattgcaaccaagtcgaagtgatgtaaataccagctgtcccctacagtga

SEQ ID NO: 576407 - DNA, 75 bp, Homo sapiens
cagcgatgggcaacacggtgcaccggaccctgccaggaatcccgttctgcttccagaagtggaagtgctcacgga

SEQ ID NO: 576408 - DNA, 74 bp, Homo sapiens
ccaggttgagaattctcacttaattctaacaggagctggagccctcaacaaacagctgtttaaggaagacagag

SEQ ID NO: 576409 - DNA, 100 bp, Homo sapiens
agacagaggggagcacagagaaagagaatgatgaagagaaaggcccggagactaacacttaaggagttccgtgatcgaccgaaaggacttaataatcaaa

SEQ ID NO: 576410 - DNA, 80 bp, Homo sapiens
gcctacttgcagcatattacctatcaggagaggaggaggtgtttgacaagcgagcagccaccaaattgaaagagcagctg

SEQ ID NO: 576411 - DNA, 49 bp, Homo sapiens
ggatcccggccaccagcaattgtccggttgaaatcacaaagattagaca

SEQ ID NO: 576412 - DNA, 100 bp, Homo sapiens
tggttcttccaaagtgcccggacccaaaacaggaacttacgaggaaatatttcagtaaaagcagttaaaaaagaagtagaaaagaaactccgatgtcttc

SEQ ID NO: 576413 - DNA, 51 bp, Homo sapiens
ctctgctcgcggccgcgcctttgagtgtgaacgagctctatgtcgatgacc

SEQ ID NO: 576414 - DNA, 73 bp, Homo sapiens
cacatacgcttgcagctttgaggcaggagagggtagttgtgcttccctagtcctcatcaccgggggcatcgtg

SEQ ID NO: 576415 - DNA, 100 bp, Homo sapiens
ccctgcttggatagaggcctccgaacaggagtaaagaatggctgttgaacatccacaaggcacctgcaaggttcttgggtgtctctggggagtccctggg

SEQ ID NO: 576416 - DNA, 87 bp, Homo sapiens
ggaggagctccaggcccgtcggcgcggagtgtggaaattggtgaaagtgtacgtggagaggatgtctacattgttcagagtggttgt

SEQ ID NO: 576417 - DNA, 50 bp, Homo sapiens
ttcccgttaaccccaatactttaaaagagatttatccacctatcaatgtg

SEQ ID NO: 576418 - DNA, 75 bp, Homo sapiens
cccgagtccagcgggcggcgggagggaactgtggctgcaccatctgtcttcatcttcccgccatctgatgagcag

SEQ ID NO: 576419 - DNA, 96 bp, Homo sapiens
cggagtagtcctcatggccgccccgccggagcccggtgagcccgaggagaggaagtctcacagaaagttctccgctcccagacatgggtccctcgg

SEQ ID NO: 576420 - DNA, 100 bp, Homo sapiens
acctgcacctcagagtaaagctgctggacaacaccatggaaatatttgacattgagatgatgaagaacgagagcttcaaatggatcctgcagactatgga

SEQ ID NO: 576421 - DNA, 82 bp, Homo sapiens
gggaggacagggggttcatcatggagctccttaataagcatttatagtcagtttttggcagcaatagaatcactaaaggcat

SEQ ID NO: 576422 - DNA, 100 bp, Homo sapiens
aggaactttgccgttgtagacggaagttattaacctacttagatcgacttgcaacatatgagtgttctaagaacggaagcatctgggctggatggaattt

SEQ ID NO: 576423 - DNA, 83 bp, Homo sapiens
acttcaaaatcagacctctgtggcagcattttttccagaacacaaaaggtaaaagacctcatgagtgtggaatctgtaaaaag

SEQ ID NO: 576424 - DNA, 75 bp, Homo sapiens
cttctgcagtccctcgtccagccacccccagcacctgaaggggaagaacgtgatccacccattcctgtctcggag

SEQ ID NO: 576425 - DNA, 83 bp, Homo sapiens
ctgaccgctccagccgcctgctggagagcctggaccagctggagctcagatgccagtgagagcaggtgccagcaggggaagac

SEQ ID NO: 576426 - DNA, 100 bp, Homo sapiens
tccgttgatattcctggcgctgtccctgaatggctttggtggcatctgcctaacgttcacttcactcacgccaggacgtctgaagaaagttcagggcatt

SEQ ID NO: 576427 - DNA, 116 bp, Homo sapiens
ctcggatcgaatccctcacgcgggcgcggatcgaccggagcagagagctggcgagcaaggcttcaacggaccacaccaaaatgccatctcaaatggaacacgccatggaaaccatg

SEQ ID NO: 576428 - DNA, 100 bp, Homo sapiens
ggggagacaattacaaacatgttttatcaatgcagctaagaacactcctatgccaccttcaccagctgtacaagtgcagggccagcctaacagttctcag

SEQ ID NO: 576429 - DNA, 95 bp, Homo sapiens
ctgagacagaagtacaacgtgcgatccatgcccatccgaaaggatgatgaagttcaggacttgaaagaggagattgatattcgactctccagggt

SEQ ID NO: 576430 - DNA, 91 bp, Homo sapiens
tgacgccatgtcgggttattcgagtgaccgagaccgcggccgggaccgaggtaccatggggcgcaagttggaccctacgaaggagaagcgg

SEQ ID NO: 576431 - DNA, 100 bp, Homo sapiens
ggcagaccctcgggccgggcggcacccgggcgggcgaatccgtcagctcccgcgggaggcccggcgagagaaggacccgcgggtccatatggaatatttg

SEQ ID NO: 576432 - DNA, 83 bp, Homo sapiens
agccgatccagcctgcggagcctgtggggcagggaggagattggacaggctggactccccattgcttttctaaaaatcttgga

SEQ ID NO: 576433 - DNA, 50 bp, Homo sapiens
ggaaattgaagatcttcccgcctctcaaacactcgtgaaactgctcaggc

SEQ ID NO: 576434 - DNA, 100 bp, Homo sapiens
ccctctttgacctggtaaatgcaggcttttatgcgagagcttttaatctagacaacgagcaaccagattatgatatggattcagaagatgagactttatt

SEQ ID NO: 576435 - DNA, 98 bp, Homo sapiens
atgcatggacccagctcagcgggacgcgccgctggagaatgaagtgaccattcttcagtgcatgaagacagacagcatccagaaccgaacggcccgtg

SEQ ID NO: 576436 - DNA, 100 bp, Homo sapiens
caaattgtcaggatcaggaatgtatgttttcttccatctggattctagagcaattgtatgatggctatgatgaagagtatgactgtcccattttagatga

SEQ ID NO: 576437 - DNA, 100 bp, Homo sapiens
cccagacccagacagaggaggagatgaccagatatgtccaggagctccaaaagcatcaggtctacttccccagcaggacagcatcattctcctatatctt

SEQ ID NO: 576438 - DNA, 88 bp, Homo sapiens
tgttgtgccaatggtggagaagaaaacttcggattatttgcatgggtgcaaaagaaaatggtttgccgctggagtatcaagagaagtt

SEQ ID NO: 576439 - DNA, 74 bp, Homo sapiens
tttttctggaatgtcattatcagacacaatggcctcaaaacttccaatgtcaataattatagtaggtgttggac

SEQ ID NO: 576440 - DNA, 50 bp, Homo sapiens
ccaccacgagggcaggttcagagaagaagagcctaaaaggcggcaacacc

SEQ ID NO: 576441 - DNA, 51 bp, Homo sapiens
cccgcgccgacggctgctcaaacatcagggctcttcagaggtgttcctgcc

SEQ ID NO: 576442 - DNA, 90 bp, Homo sapiens
cggaggctgagccggccgcgggcgcgaccggaggcagactgccttttcaaggtgtgccctatgaacagatattctgcccagaagcaatat

SEQ ID NO: 576443 - DNA, 90 bp, Homo sapiens
tttttttctccagccgagaggacgcggctgtgatatacgaagtacgaggatgtcgtccaggaaagattgtgcagatgactgaagcagaag

SEQ ID NO: 576444 - DNA, 100 bp, Homo sapiens
ggctcttcttggtgtctgtatggttgctggcagaactggggctcccttgcatcttccagttacaaattcagtgccttctgcagtttccccagagctcctc

SEQ ID NO: 576445 - DNA, 145 bp, Homo sapiens
atcacagcgggactcttggcctgtccctcacatccgatgcaccctttttgtcagattatcaggatgaggatgatccctctgataagccaccttgccgaggctgctcctcctacctcatggagccttatatcaagtgtgctgaatg

SEQ ID NO: 576446 - DNA, 74 bp, Homo sapiens
agatagtgaagtagagattgtgggagttcaggaacatgcaaggatgtaacagtccctcccaagcctgtctcgct

SEQ ID NO: 576447 - DNA, 100 bp, Homo sapiens
cagcaatgggaccttctcttcggatgaggagaccctggaagacaatctaagctatgtttccagtgtcctctgggtgtttccaagagcaacaagaaacgaa

SEQ ID NO: 576448 - DNA, 83 bp, Homo sapiens
gccacgtccaagcaaaccgggaaaggagaggatcccggagccggtcccgcagcccccggaagccaatagactccctcagggac

SEQ ID NO: 576449 - DNA, 98 bp, Homo sapiens
tggatcatggctgccgcgccgccgctacgggaccgcctgagctttctacaccgggcctcatggcggtccgagcttcgttcgagaacaactgtgagatc

SEQ ID NO: 576450 - DNA, 90 bp, Homo sapiens
tggtgggcggaacggattccagcatggacgtcttccacctggagggcatgactacatctgtcatggggatgtggagacgctggtagcggg

SEQ ID NO: 576451 - DNA, 82 bp, Homo sapiens
gctcatggtcaccggcttcgtcttcatccagggcatcgatacttgccagaactaatacagctgatgaaatacctgacctttt

SEQ ID NO: 576452 - DNA, 100 bp, Homo sapiens
ggctccagggccctcctccggccccaggcctaccccagtcacggacgaaggacagaataacgggctcccagattcacaagccccaccaagaggatcaccc

SEQ ID NO: 576453 - DNA, 102 bp, Homo sapiens
ggaagctgcagccacaatgtgcctttgcaggggagcctgagagccacagagcaagctataccagagaatcagatagcaagccctccctcagaggccaaggga

SEQ ID NO: 576454 - DNA, 82 bp, Homo sapiens
tccccatcgccatcccctatgcaggttggacacgagttgccgctggttgtccaaatcaacaaccaggtcgtccagctcctgc

SEQ ID NO: 576455 - DNA, 98 bp, Homo sapiens
tggagctggccaacgtgcaggaggttgctaggatacttggagtctctgaagagatgaggaggaacatgggggtgagctcaggcctggaactcattacc

SEQ ID NO: 576456 - DNA, 75 bp, Homo sapiens
ggcagccacggagactgcagctcgacaggagtgaaatttacagcaacaatgtcaacaccagataagaaagcttca

SEQ ID NO: 576457 - DNA, 90 bp, Homo sapiens
gggtgactggctgggggtacatcaaagaggatgagggctgcaggggacagcgctggaccgtacagacctgcctaacatgccagcgcagcc

SEQ ID NO: 576458 - DNA, 100 bp, Homo sapiens
aagccattgcccacttcctggtggttcaggaaacgcaactcagcagcaagtacatgggttgtgtggaggtcctccagtcaatgcgtgccctggacttcaa

SEQ ID NO: 576459 - DNA, 100 bp, Homo sapiens
gttgattccaggactggctactgcgtacatccacaggttcactaacgggggcaagggcatggcctgtgtgggccgcaccaaggaatgtaccatcgtcccg

SEQ ID NO: 576460 - DNA, 100 bp, Homo sapiens
cgctgggagcgtaagtgcgggcagagcactgcgccgtttgggaacgcaactttgaggagacagtgcggtggatgcttgcacataccacccaggtgttccg

SEQ ID NO: 576461 - DNA, 75 bp, Homo sapiens
aaaaagctccaggattctgacagggatgttgcgaagtattaattttaaagacccacagtttgctgaagattacat

SEQ ID NO: 576462 - DNA, 100 bp, Homo sapiens
gtattggttattctaacagacatgagttcttatgctgaagcacttcgagagacccgtaatcgacaaaactttgaacgaggctgactgtgccaccgtcccc

SEQ ID NO: 576463 - DNA, 133 bp, Homo sapiens
agtgattctgtcctaaacaagacagtgactccaggatttctgaagactattgtggaagaagcatccattaagacctcggaatatacagaactggatgacagtaacttcgattggacttgtccaaatactcaga

SEQ ID NO: 576464 - DNA, 80 bp, Homo sapiens
ccgcttccatgcggttcgggtccaagatgatgccggtttttagaacttcagccataaaaatgggcagaattttccttgat

SEQ ID NO: 576465 - DNA, 73 bp, Homo sapiens
tccctgctggattactggccctcttcaccctcagacatcacaaatatgatgacacacaataatttttggttga

SEQ ID NO: 576466 - DNA, 100 bp, Homo sapiens
cggagttttgccattgccagtgggacgtctgagactttctccttcaagtacttggcagatcactctcttagcaggcctgtatccggtgtccgaggcgaac

SEQ ID NO: 576467 - DNA, 80 bp, Homo sapiens
agtgaccaagaacgtgagcaagcccaggcacagccgacgccgcgggagacaagaggagcagcagcggcaccgcccctcac

SEQ ID NO: 576468 - DNA, 78 bp, Homo sapiens
cagcgccgtctacgtgctggacctgaagggcaagatgatgttgaatttgaagtatcatcggaccgacggactgggaaa

SEQ ID NO: 576469 - DNA, 100 bp, Homo sapiens
acagtattgaaatgcatttgccttatacagctaaagccatggaaaggtactttagattgattgccgagcggggcagttttgtgagccttcatctgaagcc

SEQ ID NO: 576470 - DNA, 100 bp, Homo sapiens
acgtatgcggaggttgggaaggagggcaagagcgtcacggggttcggacgtcagatgatcgagaaaaccaagcagctggtggagtctaagtacacagtgg

SEQ ID NO: 576471 - DNA, 75 bp, Homo sapiens
gcagacaacccaaccggtatacaatgatccacttcctcatgatactgtcttctaactgggcttacttaaaggatg

SEQ ID NO: 576472 - DNA, 95 bp, Homo sapiens
ctgctaaagaaggctctgggcgtgagcctcagccgccccgcaccccaaatccagattcatgatgttgctatcaaaagttgagaaattgtcagaag

SEQ ID NO: 576473 - DNA, 142 bp, Homo sapiens
caccagcctcacatcaacttccagtgagagtgacacaggtcaggaagcagaatattccttatatgccaagacaatgcaaactccagtgaacattcccgtgcctgtgctccggctgccccggggccctgatggcttcagccgt

SEQ ID NO: 576474 - DNA, 100 bp, Homo sapiens
cgcgcggcccgcccggatcgtggcctctcgagagcaaggtgaattatgtaacctcattacgctggatgtagctcacaatcaacttgaacaccttccaaag

SEQ ID NO: 576475 - DNA, 90 bp, Homo sapiens
cattagtactgaaaacaaatctggaacgtgtggcaggtgtcacagctttagcctgtggaatgatagcagtagggtcctgcaatggagatg

SEQ ID NO: 576476 - DNA, 100 bp, Homo sapiens
aggaggtggcaggcctcggcggagcttgatcctggatagtgtttgtatgatgtgcacacgtctctgcaaatgcttgtttgaagattggctgtgctgcatt

SEQ ID NO: 576477 - DNA, 98 bp, Homo sapiens
gaaaattggttgtatgaggatggagaagaccagccaaagcaagtttatgttgataagttggctgaattaaaagaaagaccacagcaagattctttcat

SEQ ID NO: 576478 - DNA, 100 bp, Homo sapiens
ttgggggtggcagaggaaataccagcatggaacaacatcccaggctgagctgcgagagctgcggctgcggctcgatcaactcaccgccaacagcgcccgg

SEQ ID NO: 576479 - DNA, 97 bp, Homo sapiens
cgcggaccatgggcgacaaagggacccgagacttgcagccaatacaggaagcaaacagcgtagtcgcctctctgttatggctcagtacctctgcaat

SEQ ID NO: 576480 - DNA, 98 bp, Homo sapiens
tcatgcacttcaacttggaatcctcctacctttgtgaatatgactatgtgaagtggtcagtatatatccgagccgctgtccgaaaagagaaaggcctg

SEQ ID NO: 576481 - DNA, 75 bp, Homo sapiens
ccgccatgcagggtcgaacggactgcatccgagccctgatgctagcagatggaggaaaggaagtgctgtccatgc

SEQ ID NO: 576482 - DNA, 88 bp, Homo sapiens
aaacccaaagaggtaagcattcagaaagtgaagtcactgcttttgctgtcttggatcaagaccagaaagaaattattgataccaatgg

SEQ ID NO: 576483 - DNA, 87 bp, Homo sapiens
acttttgatcgaactggcagacggatatttactgtggtctggacttggctattgagggcccctcaaaagcagaaatcagctgcattg

SEQ ID NO: 576484 - DNA, 75 bp, Homo sapiens
gtggaagacagcattggtactaatggccaactcaagcacaaacacagagcagtctaaagcaaccgagcactgaga

SEQ ID NO: 576485 - DNA, 75 bp, Homo sapiens
caaaaagacacttatactatgaaagagatgcttgtggttggtggcatcgaccgggtttatgaaattggacgccag

SEQ ID NO: 576486 - DNA, 101 bp, Homo sapiens
agaggtagccatgatgccccacttggtgaatggagatgcagctcagcaggaatcccgttctgcttccagaagtggaagtgctcacggatcggggaaatctg

SEQ ID NO: 576487 - DNA, 74 bp, Homo sapiens
gaccagtacctgcccaggaaactgcttactttgcaaagaaggaagatggttgtttccgaagtggacatcgcaaa

SEQ ID NO: 576488 - DNA, 82 bp, Homo sapiens
tgtctccttccaagggctaggcctgggggaccagaagcaagagatgtccagctcgccgctgtccaagaaacgtcgcgtgtcc

SEQ ID NO: 576489 - DNA, 98 bp, Homo sapiens
ttcctggctaactggggaggtgccagggctgaaccagtattcaagtcaaacaacgttgaaatggattgggtgttgaagcatactggtccaaatagtcc

SEQ ID NO: 576490 - DNA, 90 bp, Homo sapiens
gttcccatgatgtcacccaatggatccattcctcccattcatgtgcctccaggttatatctcacaggccagaggcattgatgtgcagcag

SEQ ID NO: 576491 - DNA, 87 bp, Homo sapiens
ccctcatcctggttctggaatcctcagttcaagcaggaacgaatgcaggaatttgggaactgagctgtgcaagtgctgaagaaggag

SEQ ID NO: 576492 - DNA, 83 bp, Homo sapiens
ctagagaagcagctccagttcttccagacgaacaggaggcattgaactcaatcatgaacgatctggtggccctccagatgaac

SEQ ID NO: 576493 - DNA, 75 bp, Homo sapiens
caggaccccgggacaccctggaagccaggaaatgctgatgttctaatcatgtcagataaagatgatattgagact

SEQ ID NO: 576494 - DNA, 96 bp, Homo sapiens
tcagatgtatggcaatattattcgtggctgggatcggtatctgaccaaccaaaagtctgtgcagacttttgcagacaaatcaaaacaagaagctct

SEQ ID NO: 576495 - DNA, 75 bp, Homo sapiens
ctcgcctgcgccgcgcactcggccgaagataaccagattggattttaagaagaataaattaaccttggtggttgt

SEQ ID NO: 576496 - DNA, 75 bp, Homo sapiens
gctgctggcgctctggctgtgctgcgcgacccccgcgcatgaaaaatggctactggacaggatcgagtggttgct

SEQ ID NO: 576497 - DNA, 100 bp, Homo sapiens
aacaagatttagaagaattctggtgtgatgaatgcagactctgctaccattttggctgtttggatcctcctttgaaaaagtctcctaaacagacaggcta

SEQ ID NO: 576498 - DNA, 76 bp, Homo sapiens
cctcactgctgtcctcctgggagggtggattctctttgtgatgaggcagctactcccgagcccggagaggacccac

SEQ ID NO: 576499 - DNA, 75 bp, Homo sapiens
aaagcaggcgactacagccacgtgaaggtcctgaacgaggctgtgggggccctgatgtaccacaccatcactctc

SEQ ID NO: 576500 - DNA, 75 bp, Homo sapiens
gagattgaaatgttccttagaaaggagcagcagaccatatactccttgacgacagggactaccaccttcaccttc

SEQ ID NO: 576501 - DNA, 98 bp, Homo sapiens
atgggtccgtggtcgtttgtttctccaaggtttgaaaagcagctggcctgcaaggacccagattcaagaacatggcatcattatgtataccagcccaa

SEQ ID NO: 576502 - DNA, 100 bp, Homo sapiens
tccctcctcccagggccaggcgccgctcagaacggtatgagggtgctggttgatgctcgagagaagcttcatattccctggggagacaactcaaaccaac

SEQ ID NO: 576503 - DNA, 75 bp, Homo sapiens
ctctgcacaaagcgaacctgccagggtccagtgtagacagccctattacttatgcctgggaaggtggaaaattga

SEQ ID NO: 576504 - DNA, 104 bp, Homo sapiens
gtgggggtgtgcaaacccgagagaactgggtcatcgtattgaggaagttcctgaacttcctttggtagttgaagataaagttgaaggctacaagaagaccaagg

SEQ ID NO: 576505 - DNA, 100 bp, Homo sapiens
caacagctctgccggctggaagttaatcagctgtgttcagcgaatacttatgaacagaaggctccagcagcagtacaatcagcagcaacagcaacaaatg

SEQ ID NO: 576506 - DNA, 100 bp, Homo sapiens
caaaaggaacgagacgtgattatgagggagtttcgttctggctctagcagagttttgattaccactgacctgctgactctgaagaagaagctatggagac

SEQ ID NO: 576507 - DNA, 75 bp, Homo sapiens
cccccgggactgtggactggaaccacatctactttgaaagataacaacgaacttgatgcaagtgataggtttgcc

SEQ ID NO: 576508 - DNA, 100 bp, Homo sapiens
atcaagatgatttatggtaataaggaattgaaagatgttggccatcgtgatcagatggctgcagctagaggaatcctgcagaagaacgttccgatcctct

SEQ ID NO: 576509 - DNA, 83 bp, Homo sapiens
cgggaccccagcttttcagaactgcagggaaacagccatcatgaggaactgtggctgcaccatctgtcttcatcttcccgcca

SEQ ID NO: 576510 - DNA, 50 bp, Homo sapiens
cagaaatccaggagattgttgataagattgagaggatccagaatccagat

SEQ ID NO: 576511 - DNA, 100 bp, Homo sapiens
tccaaaagctcaagggctccaatttgtactctcagctggaacggcaggcctggttaagtgggcagaccaacatccacctcagcaaaaacttcttcctgac

SEQ ID NO: 576512 - DNA, 50 bp, Homo sapiens
cggcgcggcgctcgctcctacgaacccagtgacttgattgtaaaaattta

SEQ ID NO: 576513 - DNA, 100 bp, Homo sapiens
ctgctcaagaccgccttccccagcgtccagagctccctctttgcccactagcagggcattagctggtgctgaagacagtggctgcttggcgagcctggat

SEQ ID NO: 576514 - DNA, 95 bp, Homo sapiens
ctttgctaagtgctgctgttgcttcccgtgtagagattgagaggatccagaatccagatctctggaatagctaccaggcaaagaaaaaaactatg

SEQ ID NO: 576515 - DNA, 74 bp, Homo sapiens
tgactccacctttacttttacctacgttggcggccccagaagatggatcctgagcttgaaaaaaaactgaaaga

SEQ ID NO: 576516 - DNA, 97 bp, Homo sapiens
ttcattcatctggatcttcagatgcacatgcagttgagaattttgaaccagcaactcagagaacaacagaaaactcaaaaaccatctggtgctgtgg

SEQ ID NO: 576517 - DNA, 80 bp, Homo sapiens
gatccagatcgggatttacgtggagatcaagcgcagcgatgtggctacagcaaaccaaacagcccagcagcccagcagcc

SEQ ID NO: 576518 - DNA, 51 bp, Homo sapiens
tgtgattttcagaggggaatgctaagagatgcaagtgctgctggaccaggc

SEQ ID NO: 576519 - DNA, 75 bp, Homo sapiens
aagcccgagaggagccacaatggagacgccgccgctgcctcccgcgttcgtgacaataaaaaattaagagtaaat

SEQ ID NO: 576520 - DNA, 100 bp, Homo sapiens
gagagcgagtgcctgagcaacatccgcgagttcctgcgcggctgcggggcttccctgcggctggaggccatcgaagacggcaatttggaggaaatggaag

SEQ ID NO: 576521 - DNA, 75 bp, Homo sapiens
aatgtcttgggggttttgatcctgtcactgtgcatgtttgctgtgactgcaagaaggatttttgctccgtttgtt

SEQ ID NO: 576522 - DNA, 76 bp, Homo sapiens
ccatgtgaacccaatcttgatgctttaatacagaaccagcatgtacagcagggaagaactggaaactcagagaaag

SEQ ID NO: 576523 - DNA, 98 bp, Homo sapiens
cttcacccttggagcggcttttgtctacttggctgacctcctgatgcctcacttgtaatagctcttcaagtctgcaataaaaaatggcctccaacaaa

SEQ ID NO: 576524 - DNA, 80 bp, Homo sapiens
ccgccggccttgcgcggcgcgcccagggaaggcatttccagcccgcccacccaggtgagaagccctaccactgcaactgg

SEQ ID NO: 576525 - DNA, 75 bp, Homo sapiens
ttgacatttaattttagggtcctttatatagaagggagagtagcatttgctgacgctgctgtagaacctattgat

SEQ ID NO: 576526 - DNA, 100 bp, Homo sapiens
aatcccccctcacccaggcccctgtcaagaaggtgccggtggtgcgagtcttcggagcgaccccggcagggttatgtaccgaaggactctaccgtgtcag

SEQ ID NO: 576527 - DNA, 100 bp, Homo sapiens
tcctatccttacccgacctcagatgctcccttctgctcctggtcctcgaggccacacgggttaatcgaagaaagagcgcactggctttgcgctgggaagc

SEQ ID NO: 576528 - DNA, 90 bp, Homo sapiens
cactgatcccaagactctggcctttaaccctaaggacctcagcagccatgtcgaagccccatagtgaagccgggactgccttcattcaga

SEQ ID NO: 576529 - DNA, 75 bp, Homo sapiens
gtggagacatcaatgtatttcttaccaaaagacactttcagaccaatgatgcgagctcagagtcaatagcatcct

SEQ ID NO: 576530 - DNA, 83 bp, Homo sapiens
cggagttgctgggtccaccgacccttaccctcagcgagagaagtaaccagaagaagagctgtgtcatcattccagttcttcaa

SEQ ID NO: 576531 - DNA, 83 bp, Homo sapiens
gtttgcccttccagtgttacatggctctatacacagaatgggattttacatatgctggacagaaataagagaatcaagccccg

SEQ ID NO: 576532 - DNA, 98 bp, Homo sapiens
tccatcaggaccccagatgtctgacagccctgtgtgacaccaagataagtaacgtctctaattaacagaagatggcaaagcccagccacagcagctat

SEQ ID NO: 576533 - DNA, 100 bp, Homo sapiens
tcggagaataatttctttctcgctgatcgcctaacttctactgacgaagcttggaagttgcagaagtttgcatttatgtcggatcctcagtgaaaataaa

SEQ ID NO: 576534 - DNA, 98 bp, Homo sapiens
taatgaaaaagcagcagcaaaagccttaaaggaagctaatggatatgtgctttttggaaaacccatggtggttcaatgtgacagaactgacagatctg

SEQ ID NO: 576535 - DNA, 96 bp, Homo sapiens
agtgaaaaatcatcaacctttctaatgaagaatggctttactcctttatacatggctgcccaagagaatcacattgatgttgtaaaatatttgctg

SEQ ID NO: 576536 - DNA, 97 bp, Homo sapiens
ggtgctgcagaaccagatccgggagcacgtcatcgccatcgaaggtctgtaaacagatttggctaggattatttgatgatagatcttcagcaattcc

SEQ ID NO: 576537 - DNA, 83 bp, Homo sapiens
ccgcagagtcccaccgccacagacaatgcagatcttcgtgaagactctgactggtaagaccatcaccctcgaggttgagccca

SEQ ID NO: 576538 - DNA, 80 bp, Homo sapiens
cgccgccgccaccatgcccaagagaaaggggaacgcccttttgcttgtgactggcagggctgcgacaagaagttcgcccg

SEQ ID NO: 576539 - DNA, 100 bp, Homo sapiens
acatgtgggagaaaaagtgaggatggatctttataagagaggaattccccctgctaggtggtacatgccagagtcctgctctcccggcccttgtccgtcc

SEQ ID NO: 576540 - DNA, 100 bp, Homo sapiens
gccaaatgattcagtccttgaaaacaagaccatgctcgacagctgaccaaggccatgatgcgaaaggccacggccagccgcctggtcacgcagcgcgatg

SEQ ID NO: 576541 - DNA, 98 bp, Homo sapiens
ggccttcgaggaggtcatgaaggacctgagcctgacgcgggccgcgcggggcggcgacgacctggaccccaactacgtgctgagctcgcgggtgcgca

SEQ ID NO: 576542 - DNA, 90 bp, Homo sapiens
ctgaaacaggcggatctctacatttctgaatcataccctaatgatcccagcaagataatgtcctgtcttctaagatgtgcatcaagcctg

SEQ ID NO: 576543 - DNA, 100 bp, Homo sapiens
ccggtacggacctgtgcaggtgaggacaggccagagcctgccttctggtacaagatgcctgtggaatgttcggtgaagtgcacttggagttcaccatgtc

SEQ ID NO: 576544 - DNA, 83 bp, Homo sapiens
gttacctctcatcattgtgttaatggtgaagcacagcgattcccatcaccgaagtggccttggagtacaacaactgtcatggg

SEQ ID NO: 576545 - DNA, 76 bp, Homo sapiens
cgaccccagagcggcgctggacagtcaggatggctaaaggtgaccccaagaaaccaaagggcaagatgtccgctta

SEQ ID NO: 576546 - DNA, 50 bp, Homo sapiens
aattcatatgaccatgctcacaagcagcctcacttttaactttctggaac

SEQ ID NO: 576547 - DNA, 90 bp, Homo sapiens
acaattgcagcagatgaagatccattggtaaattgatcaggatttttggcctaccctccaaagaaaagttcaattttgtggggaaattgc

SEQ ID NO: 576548 - DNA, 100 bp, Homo sapiens
ccccttggaagagctcaggcctagccctaggggtcaaaatgtggggcctgggccccctgcccagacaggcctggaggagaaacccaccattgcgtttgcc

SEQ ID NO: 576549 - DNA, 83 bp, Homo sapiens
ggaaatattcaggcatctcaacagggccttgatacaaagcatgcttgaaaaatgcgatcggtttctctggtcccagcaggcct

SEQ ID NO: 576550 - DNA, 97 bp, Homo sapiens
aggaggccccttacatggaggactgggaagataatgagaagcccatgcgagtggtggatgatgaagacttggtagaccagcgtctcatcagcgagct

SEQ ID NO: 576551 - DNA, 100 bp, Homo sapiens
cagccgatcatggcggatggcccccggtgcaagaggcgcaaacaagccaatcccaggaggaaaaacggaagacacgtttcagcagtatgtaagaccagag

SEQ ID NO: 576552 - DNA, 80 bp, Homo sapiens
ccctggagtaaccctcactggagaatccagagagtgcgatgacatggatcctgcggacaaaccgccccagggcgtaccta

SEQ ID NO: 576553 - DNA, 83 bp, Homo sapiens
cagccataacccaggagtaacatcaggtaatagcctgcagctggtgttttgagaagccctactgctgaaaacttaacaatttt

SEQ ID NO: 576554 - DNA, 74 bp, Homo sapiens
gtgcttttatcaaaaagaacccaccaggcatggatgaccaactttggccaccagctgaacaggccaaagccaga

SEQ ID NO: 576555 - DNA, 90 bp, Homo sapiens
gaaaaatgaaagatacagatagtgaagaagaaatccgtgaggcattccgagtctttgacaaggatggcatagttcttggagcagatacaa

SEQ ID NO: 576556 - DNA, 83 bp, Homo sapiens
cagcccggcccggcagcgacatggaaggtcaaaatgcagatcttcgtgaaaacccttaccggcaagaccatcacccttgaggt

SEQ ID NO: 576557 - DNA, 83 bp, Homo sapiens
gctctggctgtgctgcgcggcccccgcgcatggttgtgaccgagattcccgacgagagagactgaggggaagagaggaaggag

SEQ ID NO: 576558 - DNA, 100 bp, Homo sapiens
gagatctcagtgattgatggagatgaagacgaagcggcgggctctggagaagattgaccttaagttcattgacaccacctccaagtttggccatggccgc

SEQ ID NO: 576559 - DNA, 87 bp, Homo sapiens
aaaactgaagtttgccataaaagttgatggagattacctttggccagcagaaaactgagcttccggtcacagagaacgtgcagacga

SEQ ID NO: 576560 - DNA, 82 bp, Homo sapiens
gcgaaggccgccgaacctgcctggctagccggcgacttgagtgacgacacatgattaagtaccggtacatcccgttcacaca

SEQ ID NO: 576561 - DNA, 83 bp, Homo sapiens
cctctctaccggagtctgtggaagcagagaactgggaggccaaggtgacaccggaaactggtactcaagtgatgaggatgagg

SEQ ID NO: 576562 - DNA, 143 bp, Homo sapiens
ctcgcactgtgtccagcccgatcccttacacaccttctccgagttcaagcaggcctatatcacctggtgaagatgcaatgaccggggacacagacaaatatcttgggccacaggaccttaaggaattgggtgatgattccctg

SEQ ID NO: 576563 - DNA, 100 bp, Homo sapiens
ttgaagcagaagaataaggagaaggataagtcgaaggggaaggcgcctgaagaggacgaagatgacacctttgaggccctgtgcatcgagccgttttcca

SEQ ID NO: 576564 - DNA, 98 bp, Homo sapiens
agatacgaagggagggtgtaccattacaggatcaacactgcttctgatggcaagacaatgcagatcttcgtgaagactctgactggtaagaccatcac

SEQ ID NO: 576565 - DNA, 130 bp, Homo sapiens
agatcatggaccagaaggagggcagcctgcgggattggtatgacttcgtgtggaaccgcacgcgtggcatacggaagtttccacgggctcccttgctcagcagtatgcgcaccctaacgctaccctgcac

SEQ ID NO: 576566 - DNA, 98 bp, Homo sapiens
acagactgaaaatatgttttcagaggcatagaatcttcaggaaaatactggagttcctgagatctcaagttccttctacagatcttgaacctggtact

SEQ ID NO: 576567 - DNA, 50 bp, Homo sapiens
ctggactttgggcgtcccattgccatgatttcaggtatgctgctgaaagt

SEQ ID NO: 576568 - DNA, 50 bp, Homo sapiens
tacaagacgtgccgccgaccacgtcgtgctggcatcggccccaccattca

SEQ ID NO: 576569 - DNA, 95 bp, Homo sapiens
cccaccctgaaggttacctctttggagagaacatggatctgaacttcctgggcagccgcccggtccagatgaagttgcggagaataatgaacatg

SEQ ID NO: 576570 - DNA, 71 bp, Homo sapiens
tgggagccagcgagcctctctccctgatcttacgtgctcaagggagcacctttcagagtccacctcgtcca

SEQ ID NO: 576571 - DNA, 100 bp, Homo sapiens
gctgttatggtttgcactggacatttcctgaatccccatttacctttggaagcctttcctgaaaattacttggggcacacagcaaaaaatgctgtgatca

SEQ ID NO: 576572 - DNA, 100 bp, Homo sapiens
agctgggccggagcagccgcgggcgcccgaggggccgagcgagtactaccaacaagaagatgtggggtgaacagcttcagaaagccatctcacgctctca

SEQ ID NO: 576573 - DNA, 99 bp, Homo sapiens
gaaacggagccagcggctgaggaggggccccagcagcccccgaaggccctatcaggacatggagtatgaaagacggattcgctaaatattgtaatggat

SEQ ID NO: 576574 - DNA, 83 bp, Homo sapiens
gaaggaacgaggcaaggagctaaagcagcgtgcgttcagccctgggatgatgactttgaccagtttgataagcctggcgcgga

SEQ ID NO: 576575 - DNA, 100 bp, Homo sapiens
cagattgtgtcaggcaggaatgctgcccgcctttgcttcatctacagtcaggatgctggatgttcatggagtgagagatggggttttgccgtgttgccca

SEQ ID NO: 576576 - DNA, 50 bp, Homo sapiens
ttctgatagcaactttaatgtggtatacactgaatatcctcgaagaaatt

SEQ ID NO: 576577 - DNA, 88 bp, Homo sapiens
tcaagataaagtgattttttgcctttgttgattaactggacaaattcaggtattgggagagttgctgctacatctttaggaaatttga

SEQ ID NO: 576578 - DNA, 51 bp, Homo sapiens
aaccagttaaaaatgttgcctaaatgctttgcatgcatactttgggatctg

SEQ ID NO: 576579 - DNA, 83 bp, Homo sapiens
caaggagggcatgatcaacctcgtcatgtcctacgcgcttgatggaccagacaaataggatgatggctgcccccacacaataa

SEQ ID NO: 576580 - DNA, 75 bp, Homo sapiens
cgccagatggtggaggaatacacttatttatgaactacgtggtgaacatgggtctgattgacaaactgtgtgcct

SEQ ID NO: 576581 - DNA, 50 bp, Homo sapiens
tggatccaggataacggaggctgggtggaagttgatgggtcgaaactaaa

SEQ ID NO: 576582 - DNA, 75 bp, Homo sapiens
ttcccatcctcgaagtggagctgggcctgcctgactcacccattcatcagcatgtattccactgatgagaacctg

SEQ ID NO: 576583 - DNA, 75 bp, Homo sapiens
tgtccatcgtgtgcctgatgatcacgcagctggctggcttcagtggaccagtccagtccaggtgcagcagcaagg

SEQ ID NO: 576584 - DNA, 51 bp, Homo sapiens
cggaagagcgctcccaggagaaacaaatatctcttccaaatgcatgatgaa

SEQ ID NO: 576585 - DNA, 97 bp, Homo sapiens
tccagccccccaggcgagcgtgggcgctcggcctcgcccccacagattatgtttgagaccttcaacaccccggccatgtacgtggccatccaggccg

SEQ ID NO: 576586 - DNA, 51 bp, Homo sapiens
cgaccaggtcatcctgctgcgggcagtaagactttgaccccgacgcaggct

SEQ ID NO: 576587 - DNA, 82 bp, Homo sapiens
aaaactgaggaatttgaagtgaccaaaacagcagtgtgtcccggcatggatatccggaacaacctcactaggttgcatgagc

SEQ ID NO: 576588 - DNA, 100 bp, Homo sapiens
cagtggtcgcttcttctccttggcacaaatatgccagctacctttggacatttggcagggggatacgatggccaatattatggatatctttggagtgaag

SEQ ID NO: 576589 - DNA, 100 bp, Homo sapiens
agttatttggatttaaagaagatccatttgtatttattcctgaagatgacccattatttccacctattgaaaaccagcctggacaccaagtctgtgtcag

SEQ ID NO: 576590 - DNA, 83 bp, Homo sapiens
cccaaatccaaaggacgcatcagggcagctgcaatgactctccgcacggtattattgtcattgcaagcactattggcagctgc

SEQ ID NO: 576591 - DNA, 100 bp, Homo sapiens
gaaaacggaagcgcagggagaaggaagaggtgtttgaaaagtgccctctggtggtcagaagatgctgtgctgtctcgttaggatgaatggattaaaatgt

SEQ ID NO: 576592 - DNA, 83 bp, Homo sapiens
agctggcagtacctgaccactctctcccagacctgaagattatcggctataagagaataagaattgcagaaaataacagtgaa

SEQ ID NO: 576593 - DNA, 75 bp, Homo sapiens
gaaatttggaggggtgcaagaacttttaaatcaacggacgtgcgctggaacaagggcaccatcctcaaggcctct

SEQ ID NO: 576594 - DNA, 100 bp, Homo sapiens
gaaatgatgaccccatttattttgcagtgacatttgccttgcctgaaggaccacttggaaatgagaaggaggagattatccatatcgctgaggaagaagc

SEQ ID NO: 576595 - DNA, 76 bp, Homo sapiens
aagccaatggcagaggcgatcctgtgctgtccttctttattcagggcaacagatgatgtggagaaagcacaaaaac

SEQ ID NO: 576596 - DNA, 50 bp, Homo sapiens
gaaaaatggccctcttcaagcctgaccccatgccacagctggatgtgact

SEQ ID NO: 576597 - DNA, 100 bp, Homo sapiens
gctacgccagcggcgtcgagaggaccatcctgggtgctggccctgtgctggaggtaaaagtacacctgtaagccagcttggttccgcagactttcccgag

SEQ ID NO: 576598 - DNA, 50 bp, Homo sapiens
gccactcagagtcgcccgagaagtacaatggcttggtgaccggcacgagg

SEQ ID NO: 576599 - DNA, 104 bp, Homo sapiens
ccagagccattggagggcgcggggactgcaaccctaatcagtcaagaaccctattgaggcaagtgtcttgctggctgaagcctcgctggcacggaagcagcgga

SEQ ID NO: 576600 - DNA, 86 bp, Homo sapiens
gcggcggcggcgagcggttccttgtgggctagacaatgcagatcttcgtgaagactctgactggtaagaccatcaccctcgaggtt

SEQ ID NO: 576601 - DNA, 109 bp, Homo sapiens
cacggcgtacgccctcatggggaaaatctccccggtgactttcaggcctcctcgctggggaggcagagtcctcgcgtggtctcctgcctcgagcacagcctgtgcccag

SEQ ID NO: 576602 - DNA, 140 bp, Homo sapiens
tacaacatcaccaaatggtccatccagcacccggggggccagcgggtcatcgggcactacgctggagaagatgcaacggtggacaaaaatcttcgattcatgatcttgatggacggtgttcatcctgagatggacacttg

SEQ ID NO: 576603 - DNA, 96 bp, Homo sapiens
tggaggacatctgggggccacaaatgctccttctcctggagacgcaactcaaggtggggtggaagacaacccgtgagtattacaccttcatgtggg

SEQ ID NO: 576604 - DNA, 59 bp, Homo sapiens
ttgtgatgatgaagaaccgcagatccaggccaggagatggcgaggtccgtgggcgcggt

SEQ ID NO: 576605 - DNA, 71 bp, Homo sapiens
gccacctaaaaacaaagaggattttgagaaggagacaaatgacctgaagcgtgctggactcatgcttcaag

SEQ ID NO: 576606 - DNA, 75 bp, Homo sapiens
cagttctatgccctcaactacagcctccggcagcgcatggacatcctggatattgtgaagtttgcccgagggcca

SEQ ID NO: 576607 - DNA, 75 bp, Homo sapiens
tatcgatggtgtctcatgtgagaaaaggtgctggatgtgtctggggcagacatgttggccaagtcaattgccaac

SEQ ID NO: 576608 - DNA, 75 bp, Homo sapiens
gtgctgaacaagagcaacgaggggtcctgaggacaccgtgagccagccaggcctggccgctgggcctgaccggcc

SEQ ID NO: 576609 - DNA, 100 bp, Homo sapiens
ttactttatcccttcatctgtggatgggcagccggttgctgaaccaatccccatctgtagtttctgtcttggtacaaaagaacaaaaccgagaaaagaag

SEQ ID NO: 576610 - DNA, 85 bp, Homo sapiens
gactcaagtacaactcccggcacgagacaatgcagatcttcgtgaagactctgactggtaagaccatcaccctcgaggttgagcc

SEQ ID NO: 576611 - DNA, 101 bp, Homo sapiens
ttacaagaaacggctttcagttgagctgaccagctctctcttcagaacagagccaatggcttggaatgagatggactagaggcttttaccagatttcttaa

SEQ ID NO: 576612 - DNA, 83 bp, Homo sapiens
ggttgtgcgaaccccgggcagcccgggaaatctccaagtcagaaagctgacagcagccatggcgagcggcagtggagacagcg

SEQ ID NO: 576613 - DNA, 125 bp, Homo sapiens
gacaagcagctcaatgagaaaatctccctgctccgcagcgacatcaccaagctggaggtggacgccatcgtcaacgccgagttgcatgctgagaatttgaaaaatgaagatgatgtagacactgg

SEQ ID NO: 576614 - DNA, 50 bp, Homo sapiens
acttccttccagcagctacacagtcagtactgctccccagcctaaaccag

SEQ ID NO: 576615 - DNA, 100 bp, Homo sapiens
aagttgacacaggaacatatagaggccctattggacaaatttggtggggagcataatccaccatcaatatatctggaggacccacctgccatgctgtgag

SEQ ID NO: 576616 - DNA, 75 bp, Homo sapiens
ctcagatgttggatatttgcttggaaaaacgtgtgggtacgaccttgtattgcctaagtgtaatcttgaacatgg

SEQ ID NO: 576617 - DNA, 101 bp, Homo sapiens
ggtcatcaccaacagaatggagtggaaaacatgatgttgtttgaagttgttaaaatgggcaagagtgctatgcaggtatggcctcacaagtcttggtctac

SEQ ID NO: 576618 - DNA, 75 bp, Homo sapiens
cagggaagtgcatcacatgtcagttacatgggaattggtctttctgctcaaggtgtgaacatgaatagactacca

SEQ ID NO: 576619 - DNA, 147 bp, Homo sapiens
gatcttttgccagaaatgagggcatactggcctgacgtaattcactcgtttcccaatcgcagccgcttctgagatcatgtgatagcttcaaaaacaggtgcagaaagtaagatcacagccctggaacaaaaggaacaagagctccaa

SEQ ID NO: 576620 - DNA, 100 bp, Homo sapiens
cggaggccctgccctcagagacgcgccccctagtggaagcagagtgggaagcagaaattcgagctcaactggtagaacaacaaaaatgcctggagcagca

SEQ ID NO: 576621 - DNA, 100 bp, Homo sapiens
cgctgcggcgcccgagtgccggcttctcccctacgcgctacacaagtggagctccttttcctccacctaccttcccgaatcaatgaactgagccatgttc

SEQ ID NO: 576622 - DNA, 73 bp, Homo sapiens
aaaaaaggagcttgccttctgagctttgtaccaaagacctgggaaaacaagtaactggcagaagttttggtga

SEQ ID NO: 576623 - DNA, 91 bp, Homo sapiens
aaaagcaatacaaactgggtggacattacccaagattttgaagaagcttgtcgagaaataagagtcgtcagcatgcaagttcagacagtca

SEQ ID NO: 576624 - DNA, 96 bp, Homo sapiens
ccagcctgcggagcctgtggggcagggacgatgatgacattaatgatgttgcatcgatggctggagtaaacttgtcagaagaaagtgcaagaatat

SEQ ID NO: 576625 - DNA, 118 bp, Homo sapiens
atagtcctcgagtccctgaagagagaaggcaaagaacctctggtgttgaaaggttatgaagttcatggaatggaaaaaataccagaagatggaccagcacttataattttttatcatg

SEQ ID NO: 576626 - DNA, 82 bp, Homo sapiens
cttaccgtgacgtccaccgacacaatgcagatcttcgtgaagactctgactggtaagaccatcaccctcgaggttgagccca

SEQ ID NO: 576627 - DNA, 83 bp, Homo sapiens
cgcaaccccagatccatttacactttacagaatcaaagatcaactcccactgaggacaaatggacctgtaattccgggtgtga

SEQ ID NO: 576628 - DNA, 100 bp, Homo sapiens
agatatgtatgacgagattattgagttaaagaaggacgtggcccagtggaacatcgggagcctccggaccatcctggacatggtggagcgcgagtgcggc

SEQ ID NO: 576629 - DNA, 75 bp, Homo sapiens
cgaaagctttcctaggccaaaaagaggtataggaagaatgcgtatcttttcatctattacttaatccagttctgt

SEQ ID NO: 576630 - DNA, 100 bp, Homo sapiens
ttttttttaggtccccagaggcaaattttagacaaatcttactatcttgggcttcttaggaatttccgcgttggtccctggctttccttgtcactttccg

SEQ ID NO: 576631 - DNA, 100 bp, Homo sapiens
tgaaacaagttcctgccttaactcctctttacttgctgtcagctgcggagcttttgttaggagtgataaacccaaactgttcagaggactgcaaatcaag

SEQ ID NO: 576632 - DNA, 97 bp, Homo sapiens
gttatatatggaattatggtaccctccctcaggtctcgtctacagaggactggtctttcaatagcaagttttcacttcatcgacaacatcacgaagg

SEQ ID NO: 576633 - DNA, 100 bp, Homo sapiens
attatttatccaacagctcctcccagtcgtgagatggagaataaagaaactctcaaagggttgcacaagatggatgatcgtccagaggaacgaatgatca

SEQ ID NO: 576634 - DNA, 98 bp, Homo sapiens
gctgctgaagcaaacaaaaacgccagcattttgttagaggagttagacttggaaaagatgttctttgaagatcatattgatgatgccaaatattgtgg

SEQ ID NO: 576635 - DNA, 74 bp, Homo sapiens
tacctgacgggcctgcgagggttgaagattgtgaagcaatagcctaaggatcttagtaagagccctaagaccat

SEQ ID NO: 576636 - DNA, 76 bp, Homo sapiens
agatctatgccatgcactgggggaccgactcaaggtgaaaggtgtagcagtcactcggcctacacccacagcatcg

SEQ ID NO: 576637 - DNA, 78 bp, Homo sapiens
ccgtgattgcgttacaagctttgtctccttcgacttggagtctttgtccaggacggtgtccctggccagtgtccttcc

SEQ ID NO: 576638 - DNA, 50 bp, Homo sapiens
ggcatggcagacaaatctgtagacttaattcagtgcacaaatgagatgaa

SEQ ID NO: 576639 - DNA, 100 bp, Homo sapiens
gtactttaagcagctatagtcttgtattgatggttttgcactatttacaaagatctagtgaaaagccatttgatgtatgcggtcagagaagaagtggagg

SEQ ID NO: 576640 - DNA, 90 bp, Homo sapiens
gtgcccgaccgccgcccgactgccatcgcccggcccggccgcgcccgcggaaccagaccaggagcgagcccagggcgtggtgctgaaagt

SEQ ID NO: 576641 - DNA, 89 bp, Homo sapiens
ggaaggcacagctcactccagcactacgtgaccagcacgttcctggagccgagagaatggtcagtttttcccctacatcctgctgctct

SEQ ID NO: 576642 - DNA, 90 bp, Homo sapiens
tatcaaatagccttgaggaaatatatatttgcaggaagaggcagaggaagaggaagaggaagaggacgtggccgtggcagaggaagaggg

SEQ ID NO: 576643 - DNA, 100 bp, Homo sapiens
ttctccccttcctctagcccctggcaaccactaatctgctttctatctatggatttgcctattctggacatttcataattggtggatccaaatattttta

SEQ ID NO: 576644 - DNA, 97 bp, Homo sapiens
gggagacgtcggttgagcggcggcgaacatgcgcttttgacacattggaggccaagtcctgtatctgccatgtctgtggcgtccacctcaacaggct

SEQ ID NO: 576645 - DNA, 100 bp, Homo sapiens
cggacagaagatggtgcagaagaaaccagccgaacttcagggtttccaccgttcgttcaagatggagttttaacattgaatgcggagaacactaattatg

SEQ ID NO: 576646 - DNA, 74 bp, Homo sapiens
cagcaagtgcgcggttggggccactgcgaggccgttttaggataaaagaatcagagtgtctcaacccttgacaa

SEQ ID NO: 576647 - DNA, 111 bp, Homo sapiens
tgaacaaccaagtgattcattccaaggacaggcagcccagtctggtgtttggaatgacgacagtatggggggaccttccttggagcagaggtttgaatcctattacaacta

SEQ ID NO: 576648 - DNA, 90 bp, Homo sapiens
gtggcggagggggagactgtgccgtggagggcctcgccatgtcctgctgcccgaacccagtgacttgattgtaaaaatttacagagcgga

SEQ ID NO: 576649 - DNA, 100 bp, Homo sapiens
tgataacactggagatcagcaccaaatcccacagaggcatctgaggggatcatcgtcttgctcttcttttatctcagtttgtgggtagccagtcagtccg

SEQ ID NO: 576650 - DNA, 100 bp, Homo sapiens
aaatccaagacttggttgacttaaaagacatgtatgttatactcaacctggatgaggaaaataaaggcaactctgctaaagttggtgtcctaggcctgcg

SEQ ID NO: 576651 - DNA, 79 bp, Homo sapiens
gggacaggcaagaaggcagtggctggacagcagcaggtcggtcctgtcagccttctggccatcggggtcctcaccgtgc

SEQ ID NO: 576652 - DNA, 80 bp, Homo sapiens
agggccccgtccgcgtgacgctcctgcctgcgcgcggccaagccatgctcggccccagggtgcttcaaggatgaccgcat

SEQ ID NO: 576653 - DNA, 75 bp, Homo sapiens
caagcccaggaacgtggcgctcatcaccggtatcacaggccagccagcgtcccatgctcggtggccccagaaaag

SEQ ID NO: 576654 - DNA, 98 bp, Homo sapiens
acattgtggacttggcttcagtgaggcagccgacttggatggagaaattgacttgtccgcatgttacgatgtcacagagtatccagttcagagaaact

SEQ ID NO: 576655 - DNA, 75 bp, Homo sapiens
gcaaaggccatggcagtaatagcgtgtttatctgacacggacatacagtactgtagtcttgaagagaaaattcag

SEQ ID NO: 576656 - DNA, 88 bp, Homo sapiens
ggcggccggccgacccttcctgtcgctgacggcgactgcgggaggccagctgataggaagatgtcttcaggaaatgctaaaattgggc

SEQ ID NO: 576657 - DNA, 100 bp, Homo sapiens
gggtaacagcctggtgttctaccgagagccaccgccgacagcgccctcctcaggctgggtgctgggtaggccaggtttcagcatcgcagacaagaagcgc

SEQ ID NO: 576658 - DNA, 94 bp, Homo sapiens
acgcagccgtagacaccagctccgaaatcaccaccaagggtttccaggcctgaggtgcccgccctggccccaggagaatgaaccagccgcagag

SEQ ID NO: 576659 - DNA, 97 bp, Homo sapiens
cctggagcaagccaagaagcctcaggaagctgtgtttgtcccagagtgtggcgaggatggctcctttacccagggagatgcacttatttacatggaa

SEQ ID NO: 576660 - DNA, 103 bp, Homo sapiens
gtcctgttgtggggcttttacagcctttgggcaccaccaggaccagctgatcattccagcccacagcaatggagccacatgactcctcccacatggactctga

SEQ ID NO: 576661 - DNA, 50 bp, Homo sapiens
gacggctgctcaaacatcaggattgctgctaaaattgattcaattcctca

SEQ ID NO: 576662 - DNA, 88 bp, Homo sapiens
gcgagggatcattgaccaaatccaaggcctttccgttccgaacgtccacggcgccctggcccccctggccatcccctcggcggcggcg

SEQ ID NO: 576663 - DNA, 74 bp, Homo sapiens
aataaccctatcgcagccgggagagagaagaagaaggaggttcctgctgtgccagaaacccttaagaaaaagcg

SEQ ID NO: 576664 - DNA, 100 bp, Homo sapiens
caaaagagaggcaccgctggaacactaatgagagcttactcacatagcatattggtatatcaaaatgaaatgcaaggaaccaaaaataacataattgaag

SEQ ID NO: 576665 - DNA, 75 bp, Homo sapiens
gatgtgaggctgatgaagaggaaaacaggcagcgtgccgtccctggctgcagggctgctcttcggcagtctagcc

SEQ ID NO: 576666 - DNA, 59 bp, Homo sapiens
gtaaatagtatggatgtagcagcaggctatcgcagcaaaggttggcatggacagtacga

SEQ ID NO: 576667 - DNA, 88 bp, Homo sapiens
ctgcagagcgcgcagtacctccggtgacgcatccaaagaagacattgacactgctatgaaattaggagccggttaccccatgggccca

SEQ ID NO: 576668 - DNA, 74 bp, Homo sapiens
attgagagcaaaatctacaagatgatgcagggaggagatgtggacgagtgctcactagcagaaaaaacctgtgt

SEQ ID NO: 576669 - DNA, 100 bp, Homo sapiens
caatgcctcagaaattcattgttaatcagctgtgttcagcgaatacttatgaacagaaggctccagcagcagtacaatcagcagcaacagcaacaaatga

SEQ ID NO: 576670 - DNA, 82 bp, Homo sapiens
ggcggagccgctgctcgagctgctgctggattgaactcagagaagccgggaaatggaatctatttggaatttgcagaagcaa

SEQ ID NO: 576671 - DNA, 75 bp, Homo sapiens
ccagagctacaaaagtttttccaggaggcaggtggaagtcatcataaagtttctgtttcacccgtcgtccatgtt

SEQ ID NO: 576672 - DNA, 90 bp, Homo sapiens
gggacttatgaatgatgatgtggggaatgaagatgcctggagttactgtaaaagacgtgaaccagcaggagttcgtcagagctctggcag

SEQ ID NO: 576673 - DNA, 50 bp, Homo sapiens
tctctttcctttctgaaatgccagggacgcttgactttcagggatgtggc

SEQ ID NO: 576674 - DNA, 83 bp, Homo sapiens
ggccccgcggggggcgatgaccgtgcgctgaccctgactcactccaggctgaaggggatgctaagggagataaagcaaaggtg

SEQ ID NO: 576675 - DNA, 48 bp, Homo sapiens
gtgttcgagaacgaccccgagacggaaacttttgagaagaactttgaa

SEQ ID NO: 576676 - DNA, 73 bp, Homo sapiens
tgcatggaaggaaagccaatgcgcagacacgttggtcgtcattgcctccgagcccactttagccctcagctct

SEQ ID NO: 576677 - DNA, 80 bp, Homo sapiens
aaacctgaagggccttgacgatctggacgccgatgccgatgatggctgggcaggacaaattgatggccaggagatcactg

SEQ ID NO: 576678 - DNA, 90 bp, Homo sapiens
cgacgcagacgacgagggcgtgcgcggcacctgcgaagatgcttccctgtgcaagaggggccctgtgtctggaggctgcatgaatcccgc

SEQ ID NO: 576679 - DNA, 100 bp, Homo sapiens
gggaagttacggtttacagcgaagtccacccagcgtttccgaggtgaaggcgccgcgccaggccgggcgggcggccagatcagaaaagggagctcaggta

SEQ ID NO: 576680 - DNA, 100 bp, Homo sapiens
gcaccaaaacacactggaaacaaacagtatttctactggaaaaaccattttcagttaaagcagtgtggtgtaaaggaattcattagccatggatgtattc

SEQ ID NO: 576681 - DNA, 100 bp, Homo sapiens
caacatactttctattgccaggaactaggcacactgctaatgtgtctgatccacatcttcaagtctggccaaacgtaccaagaaagtcgggatcgtcggt

SEQ ID NO: 576682 - DNA, 98 bp, Homo sapiens
cggggtccaggtcggaaatgtagccagtggggccgccagatacttttctgctgtgagaatgtaagatggatccagaagagcaggagctcttaaatgat

SEQ ID NO: 576683 - DNA, 100 bp, Homo sapiens
tgactgctgaaggcagtgcgcccgggacatcaaagacgtcagactggatggcgagtcccagtgaggcgatgtgggcagaggagctccgagccgcccaccc

SEQ ID NO: 576684 - DNA, 96 bp, Homo sapiens
atggagtcacatcagcattttctgttgactgtaaaggtgctggtaagatttcttctgttattcaagcggagaaatgttgctacagcagaagaagaa

SEQ ID NO: 576685 - DNA, 90 bp, Homo sapiens
agctcatacaacagcttcttaggattgtttgatggtgggtctccacacttgtggtgatctggctccaaatactttgcgaatatttacctc

SEQ ID NO: 576686 - DNA, 114 bp, Homo sapiens
agtatgtggaaatagcgcggctgtgcaagtacctgccagagaacgacctgaagataacgaaggaggcccaacttcattcaataaggagcctgacggatttatcccagacggtag

SEQ ID NO: 576687 - DNA, 75 bp, Homo sapiens
aggagtaccgcatcgcccagctgtacatgatacaggaattgaaagatgttggccatcgtgatcagatggctgcag

SEQ ID NO: 576688 - DNA, 82 bp, Homo sapiens
tgtaccaggcgaagctggccgagcaggctgagcgatacgacggtccgcgggagagctgtggggcttggtgagtgtttcgtgg

SEQ ID NO: 576689 - DNA, 88 bp, Homo sapiens
cggactggagctctgggctgcggcgcacgccttgcccgcccaggtcaaaatgcagatcttcgtgaaaacccttaccggcaagaccatc

SEQ ID NO: 576690 - DNA, 50 bp, Homo sapiens
tgctaccctggtatatgcacttttcagtgttctaagaacggaagcatctg

SEQ ID NO: 576691 - DNA, 122 bp, Homo sapiens
ctccgagccagcgagccagcgagccgccgacccgccgagcaaaatgatagtacacatcctaaatatgacttctgcaaagataatttcttttctgttaccacctgatgaaagtcttcattcac

SEQ ID NO: 576692 - DNA, 71 bp, Homo sapiens
tggcacctgcttctacaccaagaatggccacagccttgggtgtccgcaatgttgccagtgtctgtctgcag

SEQ ID NO: 576693 - DNA, 75 bp, Homo sapiens
gccatccagctcatcgctcgcatcgctgccgccaacggggagctacagaaggcccaaaagaagaaatatatcaag

SEQ ID NO: 576694 - DNA, 83 bp, Homo sapiens
ccggatcaatccagatggcagccagtcagtggtggaggcagaggaacgaggacgcctgaaggaagagctggaagaggctcggg

SEQ ID NO: 576695 - DNA, 74 bp, Homo sapiens
gtggggcccgcgaggcgggcagccggggcgtccaggaccatggccaacctggagcgcaccttcatcgccatcaa

SEQ ID NO: 576696 - DNA, 75 bp, Homo sapiens
aaaagagatgtggggggattctcgacctgctaacagaactggaccttttcggataaaattgtccatggaccacgt

SEQ ID NO: 576697 - DNA, 96 bp, Homo sapiens
tggtgaagtccgagtcgtgtcagcaagaacgctcctgccagtacctgcaggcatccgctgtgacagcacgtgtccacctggccgctggggccccaa

SEQ ID NO: 576698 - DNA, 75 bp, Homo sapiens
gcctagtgaatgaaggagtgtctggacttgaggctggcaggcagccatgttgttcagttctggagtcttttggat

SEQ ID NO: 576699 - DNA, 75 bp, Homo sapiens
ccaccacagccgcccacttctggaaggttccatcccctgcaggcctagactcccgaggcttcctctttggcccct

SEQ ID NO: 576700 - DNA, 98 bp, Homo sapiens
ggccgcctcactaagcccatcgtctgctggtgcatcgggacgtgtgccaccatgttctcctctgagattctctcgggcctagccgtccttggaacccg

SEQ ID NO: 576701 - DNA, 50 bp, Homo sapiens
gccttcgttgagttcgaggacccgcgcatttaaatcaaacggtattgaga

SEQ ID NO: 576702 - DNA, 98 bp, Homo sapiens
cttaacatttctgttgattcagggaaaaagaccttgatgaagttctgcagacccactcagtgtttgtaaatgtttcctaaggtcaggttgccaagaag

SEQ ID NO: 576703 - DNA, 100 bp, Homo sapiens
catccgatagaatccagttcaatgaccttcagtctttactctgtgcaactcttcagggtctgttcctggtttcccagatgcataaaggaagacatatccc

SEQ ID NO: 576704 - DNA, 83 bp, Homo sapiens
cttagactaccccaggaacccgcgccgcgagggctccttccctcagtgagacggtttaagcggaagcatcttactgccattga

SEQ ID NO: 576705 - DNA, 75 bp, Homo sapiens
gaaacctttccaacacagatgtccaagctgccaagatcaataagccgagagctgaggattcaggcgaataccact

SEQ ID NO: 576706 - DNA, 100 bp, Homo sapiens
gctttgtaatggaatatgctgccggtggggacctaatgatgcacattcatactgatgtcttttctgaaccaagagctgtcattagtgaccagaaggatcc

SEQ ID NO: 576707 - DNA, 100 bp, Homo sapiens
cccgactgcaactgctggattgctgcaaggctgagggacgagaacgagatcaatgaactgagccatgttcaaatccctgttatgttgatgccagatgact

SEQ ID NO: 576708 - DNA, 83 bp, Homo sapiens
gggagtggaccatcgggcggagacgaggtgaaatgacaatggatgctctgttggctcgattgaaacttctgaatccagatgac

SEQ ID NO: 576709 - DNA, 75 bp, Homo sapiens
tcgccaagggccccaatgagtggcacacagtctactatcaccgacaggctcttgcagccaatgccggaacaggat

SEQ ID NO: 576710 - DNA, 82 bp, Homo sapiens
ccgagacggcgatccgggcgctcgagacttaccagagccacaaggatggcacagtgttcgacggccgccccatagagtccct

SEQ ID NO: 576711 - DNA, 96 bp, Homo sapiens
agtcttcactccttcctgcgagccctgaggaagccttgcccagtactacggggagattggcatcgggacgcccccccagtgcttcacagtcgtctt

SEQ ID NO: 576712 - DNA, 112 bp, Homo sapiens
aggaggataacaagttttgtgcagattgccagtctaaaggtgacaaaacacgacagccttcttcaagcccctccagtattatccgacgcacttcctccctggatactcttgc

SEQ ID NO: 576713 - DNA, 75 bp, Homo sapiens
gggctacccactagccgtgaaactgggaaccatcactcctgacggggcaggaggatggactcagacaagttctgg

SEQ ID NO: 576714 - DNA, 99 bp, Homo sapiens
gggctgcatcatggctgagctgctccagggcaaggccctcttcccgggaagcgactccaaatgaccctgtgactaacatctgtcaggcagctgacaaac

SEQ ID NO: 576715 - DNA, 100 bp, Homo sapiens
ctttcacccggggcctttccgtccgagaaattctcgcagagcttacaggccagaagcggactcctagaagaggggagcagcaaggatggaatgacagccg

SEQ ID NO: 576716 - DNA, 100 bp, Homo sapiens
ctatcctcgaagatatggtgagacttgggaaggattctggtctgaaaccatttgaacaggtcaaagaaagtatctgttccatcaactgtgatatccagag

SEQ ID NO: 576717 - DNA, 73 bp, Homo sapiens
atctgcctaacgttcacttcactcacggttgaaatcacaaagattagacacctttttagataggtgttcttca

SEQ ID NO: 576718 - DNA, 100 bp, Homo sapiens
ctctcctcaacatcacccaaaggagaacaccttccaccatgaccacctcagcaagttcccacttaaataaaggcatcaagcaggtgtacatgtccctgcc

SEQ ID NO: 576719 - DNA, 98 bp, Homo sapiens
aggatcaagcctagaaaatattcaagaaaaaataactgagtatctggaaagagttcaagctctacattcagcagcttttagaatgattccatacccgt

SEQ ID NO: 576720 - DNA, 75 bp, Homo sapiens
gggtgagaagcagaaagtaaatattatccagttcggcacagggttgttacaagttgagttgaaaacaagaaaaac

SEQ ID NO: 576721 - DNA, 100 bp, Homo sapiens
tgtgtctcccagagctggctgtgtgatggggaccctgactgccctgatgattcagacgagtctttagatacctgtatttctttacccctctggattcccc

SEQ ID NO: 576722 - DNA, 100 bp, Homo sapiens
tgccgctcctaagcctgcacagccgcggcggcagcagcagtgagagggtctccatcacccaactccatgcttcgagtcctgctctctgctcagacctccc

SEQ ID NO: 576723 - DNA, 74 bp, Homo sapiens
tctgcccctgtcaaatcattccaggaagtggttctgaaagatggaagaattgaaagactaaagttagagcttga

SEQ ID NO: 576724 - DNA, 100 bp, Homo sapiens
aggactctggcacctacgtctgcactactagaggatatgccacaggacttcaaggcttccctgtgcctgcccacaacctcggccccagcctcggccccct

SEQ ID NO: 576725 - DNA, 75 bp, Homo sapiens
attcgttacagccagagattgaggcggggtttcaccatgttgcccagactggtcttgaactcctgagcttaagca

SEQ ID NO: 576726 - DNA, 80 bp, Homo sapiens
tggctcctccttggcgtgctgctgctgcccgggaccctgcgactggcaggagaataaaggcagccccgttgatgactgaa

SEQ ID NO: 576727 - DNA, 82 bp, Homo sapiens
cggccaagcagccaaccatgctcaacttcggtgcctctctccagcagactgcggcaagtgaaccggagcaaacgacttccga

SEQ ID NO: 576728 - DNA, 100 bp, Homo sapiens
ggcagttggaggctgcgcggtaccggtccgattctacaagggcactgtcccccgcctgggccgggtctgcctggatgtggccatagtgtttgtcatctat

SEQ ID NO: 576729 - DNA, 100 bp, Homo sapiens
ccttgagtgatgaacaggagaattctcacaccctcctcagtcacaacgcatgcaacaagtctcctctaagccatgacctcattcttaacctgactcagga

SEQ ID NO: 576730 - DNA, 98 bp, Homo sapiens
gtgaggagctctacccagaggaactgctgattgaccatcagatgactttgaagaagccaaggaaattttgacaaagatgagatacttttcaaatatag

SEQ ID NO: 576731 - DNA, 50 bp, Homo sapiens
ctggaaagcagatggtactcgacttttaatacaggcaggctatgatgtta

SEQ ID NO: 576732 - DNA, 75 bp, Homo sapiens
atttcctgaaggggaagagcaagatgcagtcagtggagggcaactccaacaacattgccaccgtggacatctccg

SEQ ID NO: 576733 - DNA, 82 bp, Homo sapiens
taggataatcagtttagatggctcaaagagcattagtttggatgaattcaagtcattttgccattttacaacccacttggaa

SEQ ID NO: 576734 - DNA, 101 bp, Homo sapiens
gtgcttgtgaaaggctccatggtcttgcctccttgcaggggtgaagctaagtagtcttcttggtaaaaagggaaacttggaaaaactccagagctactggg

SEQ ID NO: 576735 - DNA, 78 bp, Homo sapiens
cagcctcccgagtggctgggattacaggtgctgccatggccacgactgatgttacactcgagctgaggaggccggctg

SEQ ID NO: 576736 - DNA, 98 bp, Homo sapiens
tcgactatgcagagacatgagatggtagccaacccctcaggtcctcagaatggttggaatgaccctccagctttgaacagagtacccaaaaagaagaa

SEQ ID NO: 576737 - DNA, 75 bp, Homo sapiens
gcccggacggtgttggttggggatgagcagcagcaagagatggccgcttctgccgccttcatagaccggcattac

SEQ ID NO: 576738 - DNA, 89 bp, Homo sapiens
tacaaaagttttcttaagatttcttcagaacccagttttcggctttgtgagaaaccttaccatcaaacacgatggccagcaacgttacc

SEQ ID NO: 576739 - DNA, 83 bp, Homo sapiens
ctggttgctgaagaggaggcggaagccaaggtgagaaaccttaccactgtgactgggacggctgtggatggaaattcgcccgc

SEQ ID NO: 576740 - DNA, 100 bp, Homo sapiens
tccgacaacaaattttggaacataaaaataaaatgcttaaaaatcatcttcgaaatgacaatcaagtgggatgaagctctcttgactatgagtaaaggag

SEQ ID NO: 576741 - DNA, 75 bp, Homo sapiens
caaaacagcagatttcccaagagcagcggaaaatgatccagtcacaggagagctgaccaattaatccaggaagat

SEQ ID NO: 576742 - DNA, 75 bp, Homo sapiens
catacagtgacgcttcacaggtacgaattggagcaatgttggcttatacacctctggatgagaagagccttgctt

SEQ ID NO: 576743 - DNA, 50 bp, Homo sapiens
cgcggctactacaatcagagcgaggccgctatggcctgctgtgcagttag

SEQ ID NO: 576744 - DNA, 90 bp, Homo sapiens
gtgaggttgggccttggccgcctgagcccttgagttggtcacttgaaccttgggaatattgaggtgctggagaatctggtaaaagcacca

SEQ ID NO: 576745 - DNA, 90 bp, Homo sapiens
gaactgtctttggactctcaggaatctttcagatgctgcaactaaacaggaaggacatcaagaagggggagaagaacacaatcgtcacct

SEQ ID NO: 576746 - DNA, 83 bp, Homo sapiens
gaatggtggccacctggatgctggaggaaggatatggagtaatagtactaaatcccaatgaaaactatattgaagtagaaaag

SEQ ID NO: 576747 - DNA, 100 bp, Homo sapiens
cctcgatctcctcgtctcccgctccgccctcccttttccctgaaaccaaggtgtatgttggtaacctgggaactggcgctggcaaaggagagttagaaag

SEQ ID NO: 576748 - DNA, 102 bp, Homo sapiens
agaagaaaggattcgttacagccagagattgacaagttggatggcttgaggactggtactaaaaggaaacgtgactgggaggccattgccagcagaatggag

SEQ ID NO: 576749 - DNA, 100 bp, Homo sapiens
ggaaagttgactgaaaatggggcggaagaaaatacaaatcacacgcataatggatgaaaggaaccgacagaaagttcgtcgctgcttcctgtgctccagg

SEQ ID NO: 576750 - DNA, 74 bp, Homo sapiens
aaaggagcaagagcaagatcaccgtgacatccgaggtgcctttctccaaaagctgtctcgaagcaggtacaaag

SEQ ID NO: 576751 - DNA, 100 bp, Homo sapiens
atccagctagactcaccagagcccgtgttagtcatggatgatccattcagcccctgcagatgttgctgacaaaaatgcttctaacagaaattctgctgga

SEQ ID NO: 576752 - DNA, 100 bp, Homo sapiens
gcaatctatggagcagattcggagaattatgagacctactgatgtccctgatacaggtacgcaataactgtttggtattttgatgcagatgagagagcac

SEQ ID NO: 576753 - DNA, 100 bp, Homo sapiens
gcgggcgacctggtcttcgccaagatgaagggctacccgcactggccggcccggaacattgacatcaccaatttcagcagcagctggagcgatggcctgg

SEQ ID NO: 576754 - DNA, 100 bp, Homo sapiens
tgcaagaggtactgtccatcaaacatcttccaccacagcttagaggtctacttccccagcaggacagcatcattctcctatatcttctagacatcactca

SEQ ID NO: 576755 - DNA, 100 bp, Homo sapiens
gagtcgccccctacccgcttctcgtagtcctgggagcacagcagaagtaaatgagccgtcagactgctacagcattacctaccggtacctcgaagtgtcc

SEQ ID NO: 576756 - DNA, 83 bp, Homo sapiens
tttgtgcgttatattctctgctgcaagcatttgtctggccttcccttttactgctggctgggaaggaggagcatcagaccaca

SEQ ID NO: 576757 - DNA, 75 bp, Homo sapiens
cagagtgtatgcactttactacaaagatggacttctctgtacaggtcgagtcccagacaccagaagtctgaattt

SEQ ID NO: 576758 - DNA, 83 bp, Homo sapiens
tgaccctgtaacccaaaggaggaaacagctggctaagctcatcattgttactgggacacggccaacacggtgaaggaaaagtt

SEQ ID NO: 576759 - DNA, 82 bp, Homo sapiens
ctgagaatttgaaaaatgaagatgatgtagacactggactattaggaggaatgccagctcctgagcaggcctcattggtgga

SEQ ID NO: 576760 - DNA, 74 bp, Homo sapiens
gatccagatggaggctgcccccttccgcagcaaaggcattgaatccagctctccagaggtgaaaggctattggg

SEQ ID NO: 576761 - DNA, 50 bp, Homo sapiens
gcgcaaagcttgcgaggtggcgttaggagatgacccattcctggcctact

SEQ ID NO: 576762 - DNA, 98 bp, Homo sapiens
ctggtagtatgcattgtaattggtgtgctgtattttgctattcatgtaagcacagtcttcacagtattgcagggattaatgaaaatcaagttccatcc

SEQ ID NO: 576763 - DNA, 101 bp, Homo sapiens
cgcgagccgccagaggaagctggaggcgctgatccgagaccctcgctcccccatcaacgtggagagcttgctggttctttcagagcacggcttcggcccca

SEQ ID NO: 576764 - DNA, 75 bp, Homo sapiens
catgtgagtgaccatgcagcaaaagaaggagggtcctctcagtgattaagattatcctcttgacttgaaccacag

SEQ ID NO: 576765 - DNA, 100 bp, Homo sapiens
tagtggatatagcacaccatccccagccatccacaggtcctggctaccctgggaagagacaagaagtaaatgaagaaagaggaagattccaggacctaga

SEQ ID NO: 576766 - DNA, 75 bp, Homo sapiens
ggccacgtgcttcaacgctctgctgcccgctgtgagggaaaaggaagaaggaccatggaaatctcagttatcttc

SEQ ID NO: 576767 - DNA, 98 bp, Homo sapiens
tttctctcgctgccgctgggaccccgtgtcatcgcccaggccgagcacgaccagcatctcagacatgtcgaaaaagatgttttgatccctaaaataat

SEQ ID NO: 576768 - DNA, 100 bp, Homo sapiens
atatttgacctttccgacccgcggttttcttctcctctatccagaagttaaaggagagattgctcgtaaagatgaaaagctgctgtcgtttctaaaagat

SEQ ID NO: 576769 - DNA, 100 bp, Homo sapiens
aggacccccagccaaacagagagaccttgaaggggcagtcagtagtgccggtggtggtgtgcacattgagccccggtatagacagttcccccagctgacc

SEQ ID NO: 576770 - DNA, 74 bp, Homo sapiens
gatgaattgagctctctgttacctgcgcatcacaaccggagttgtaagacgttcatcgccgtgttatccttgag

SEQ ID NO: 576771 - DNA, 82 bp, Homo sapiens
gcggattcgccgaggcaccgaggcactcagaggagctgtttttggaaggaagaaagatggaaagcggtgcagttctgctgga

SEQ ID NO: 576772 - DNA, 100 bp, Homo sapiens
ctggaacgaggggagaggctgccacggcccgacaaatgtccctgtgaggtaacaattctgtttgcggacctccacgcatacctggataacatgaaagccc

SEQ ID NO: 576773 - DNA, 100 bp, Homo sapiens
cacacagctcagaacagttggatcttgctcagtctctgtcagaggaagatcccttggacccattccaacaatctcgtaaaacatggtggattactatgaa

SEQ ID NO: 576774 - DNA, 99 bp, Homo sapiens
gccatcagctcgctgcttaaagtttctgctttgggacaaccatacatctaattccttaaagtagttttatatgtaaaacttgcaaagaatcagaacaat

SEQ ID NO: 576775 - DNA, 82 bp, Homo sapiens
cggaacccgagctggagctgaagcgcaggctgcggggcgcggagtcgggagggggatatgagactttctactcggaatatcc

SEQ ID NO: 576776 - DNA, 82 bp, Homo sapiens
ccggcgcatcatggcggctggccgggcccaggtcccttcctccactgtgccctgtccacggtgcctcctgcatgtcctgctg

SEQ ID NO: 576777 - DNA, 100 bp, Homo sapiens
agctgagtgccgccaccacctcctccagccagtcccactccagctccatgatctccaggaaggctttgtgatacctgatgaagggggcccacaggaggag

SEQ ID NO: 576778 - DNA, 49 bp, Homo sapiens
ggaagccttcgtctcccagattgcagcaatatgttaaggatacctgtaa

SEQ ID NO: 576779 - DNA, 82 bp, Homo sapiens
tgtgggacacctggaaggttgctcacctgaagctggtaggtgagtgctgtcctcggctcactttcctcaagctctccggctg

SEQ ID NO: 576780 - DNA, 83 bp, Homo sapiens
acaggctccggctcatggcatcaagtggcatccatcataagttgatattcactgatggactccaaagaatcattaactcctgg

SEQ ID NO: 576781 - DNA, 98 bp, Homo sapiens
cagctgctcccttcgccttcgccctttccacctcgcggcagttcggtggataaagtttgaagaaaaggtagaggaaggcggcgaacgctggagcaagc

SEQ ID NO: 576782 - DNA, 100 bp, Homo sapiens
cccgaacgctctctggggaacgagcaatgggaattcacgctggagcccggagagccctgcttgaaacggcttcccccaggaagttgagtggccaaacaag

SEQ ID NO: 576783 - DNA, 80 bp, Homo sapiens
cttggataaagttccagagcctggagtgcccactgaaaccataaagctgcagaagaaagatcagcaactggagcctaaaa

SEQ ID NO: 576784 - DNA, 100 bp, Homo sapiens
atcccatgcgtggtgggggatgaggaggtgtggacgtcggacgtgcagtaccaagtgtcggttctgattggaactgattccatcccgaacctgcataagc

SEQ ID NO: 576785 - DNA, 100 bp, Homo sapiens
ctggcggccatcgtcatcctgctgctgaagatctggaagacgcgctcctgcgccgatctaattatcatggacctgcgacagtttcttatgtgcctgtccc

SEQ ID NO: 576786 - DNA, 83 bp, Homo sapiens
ggagatcctgatgaagttcgagcactaatatttaagaaagaagatgttaactttcaggaaccgcggggaaaggcgaatgggtg

SEQ ID NO: 576787 - DNA, 125 bp, Homo sapiens
atctgggcggcgtgcccagcaagagattaaagatgcagtacgccacggggccgctgctcaagttccagatttggtaacaccatgttgttgagagtgttacctgctgtgtatgaaaagcagcctca

SEQ ID NO: 576788 - DNA, 83 bp, Homo sapiens
gaagaataacaacagagatctatcaatggcttctggagttacagtgaatgatgaagtcatcaaagtttttaatgatatgaaag

SEQ ID NO: 576789 - DNA, 100 bp, Homo sapiens
ccagcctcaagtttcacctatcctcactgatccgtggacttctgtatgatcagagagaagaagaaggaggttcctgctgtgccagaaacccttaagaaaa

SEQ ID NO: 576790 - DNA, 82 bp, Homo sapiens
ggaggatggagcagaggacattctagagaaagattccctcccaggctgtccctcgccgccttgctacagcccccaagactga

SEQ ID NO: 576791 - DNA, 90 bp, Homo sapiens
tgcaaacttaattaaagaactggccagaaaggaggagtcaaggaagcccttagtgaacgagaactcttcaatgctgtttcaggcttaaac

SEQ ID NO: 576792 - DNA, 83 bp, Homo sapiens
ccacacggtggggcccaacgaggcgctggtggtttcaggcttgggcactgtttaaaggaaagttccgagaaggcatcgacaag

SEQ ID NO: 576793 - DNA, 72 bp, Homo sapiens
gaatttcttttggcacctcctctccgcgcgttcttgggatacttgccagaactaatacagctgatgaaatac

SEQ ID NO: 576794 - DNA, 82 bp, Homo sapiens
ggatgacatatttttggacctgaaacagaaattctggaacacctatatgcgctcctggttgcagccagaatgcatgacttca

SEQ ID NO: 576795 - DNA, 75 bp, Homo sapiens
gaagcaagcggaacttcctgagcaattctgtggtgttcttggtcacacatttatggagtttctgaagggcagtgg

SEQ ID NO: 576796 - DNA, 60 bp, Homo sapiens
cccggaggaggttcgaagctgagtatgtgacagatattgatgatgttaagaagttcaaac

SEQ ID NO: 576797 - DNA, 75 bp, Homo sapiens
cgacaagctgcccatcgaggagacgctggaggacagcccgcaggtcatcatcagatttgaaatatttaaagtgga

SEQ ID NO: 576798 - DNA, 74 bp, Homo sapiens
atggcctctggacatccgagtgggcttccagctggtctttttaccctttgctgatgataaaaggaagatgccct

SEQ ID NO: 576799 - DNA, 75 bp, Homo sapiens
ataagatctgtggttggaattatgaatgtccaaagtttgaagagactgcagaattccttcttagtagtgaagaaa

SEQ ID NO: 576800 - DNA, 98 bp, Homo sapiens
gcagaaagcaggcgaacccgcggcgcaataacgatgccttcaattaagttgcagagttctgatggagagatatttgaagttgatgtggaaattgccaa

SEQ ID NO: 576801 - DNA, 82 bp, Homo sapiens
cctctcgcgctgcactgtctctccgacgcaagactgtcccggcccgggtactccaaagattcaggtttactcacgtcatcca

SEQ ID NO: 576802 - DNA, 100 bp, Homo sapiens
gtggaccctcgtgagcgacccggacaccgacgcgctcatctgctggagcccgatgcagacggtgcagcaggagcagctgctgcaggagacgcaggccctg

SEQ ID NO: 576803 - DNA, 75 bp, Homo sapiens
ggtgctccggggaggtcacctgacgaggagttaccggtattgtaagaacaagccgtacccaaagtctcgcttctg

SEQ ID NO: 576804 - DNA, 75 bp, Homo sapiens
tggatgccaaacgagattggggccatgccaaggactatgtggagatttggagcaagaggtggtggtggccttccc

SEQ ID NO: 576805 - DNA, 75 bp, Homo sapiens
gcaatgctggatagataccgaattcttatcacaaagttgctagaacctgtctgtcaccagctctttgaattctat

SEQ ID NO: 576806 - DNA, 100 bp, Homo sapiens
cgcggacctgcggactagcgaacccggagctttcggaaaatgtgattgatcgaatgaaggaatcctctccatctggttcgaagtctcagcggtattctgg

SEQ ID NO: 576807 - DNA, 100 bp, Homo sapiens
aacctcagacagatcgccggggaggcagcgcgggatcccagcctcaggcgtgcgcggacggtgtgcgggtcaaactgtgctgaaaatatccgcaaacaca

SEQ ID NO: 576808 - DNA, 100 bp, Homo sapiens
gcaagtactccaggaagcacagagctgtaccagtacacggcccacgttgccaggtttttcgttggaatatacgttgcacatttatggcgattctgagtgt

SEQ ID NO: 576809 - DNA, 100 bp, Homo sapiens
aatccctacgcgtccctttgggtttagcacgatgagctcaatcggcactgggctccctcgtgaaagatgcttctgttcctctgattgatgttacaaacct

SEQ ID NO: 576810 - DNA, 74 bp, Homo sapiens
aggacctggatgatgatgtcatcctgacagaagtggccagcatcgaaatgttcagccttttagtgatgaagatg

SEQ ID NO: 576811 - DNA, 98 bp, Homo sapiens
gcaccgcagcctggtgcagatcatctacgacgagaaccggattcctgggaacaccaccatggagggcctggcctttggcggtggacagtctgtggctg

SEQ ID NO: 576812 - DNA, 76 bp, Homo sapiens
catggctagcaggaatgcttactgttgcgtggttcgttattaacagccccatggctgggggttatggagtgatggg

SEQ ID NO: 576813 - DNA, 73 bp, Homo sapiens
tggcccaagacggggtccccgagtggttccatggtgcaatctcaagagatcattgaaattatgagactatcat

SEQ ID NO: 576814 - DNA, 75 bp, Homo sapiens
gtgtccatcgcggagaggtaccttgcacagtgacctctgcatctgtcattaagaaggcaaatgataccttaaatg

SEQ ID NO: 576815 - DNA, 101 bp, Homo sapiens
caaggatgttattgccaaatatgcccgatgagagaaagggaaagttaaggatgctggagcagaacaatggatttctctttctctttcatgcaagggatcat

SEQ ID NO: 576816 - DNA, 83 bp, Homo sapiens
cttagctgtgctcgcgctactctctctttctggcctggaggctatccagcgtgtgtgtggtttcagcgcagcatggctgtggt

SEQ ID NO: 576817 - DNA, 82 bp, Homo sapiens
ctctctcctgatacagcaggcgctcaccatgttccctggagcagcccctgtcaaagggaacaggaagcagtccacggagggt

SEQ ID NO: 576818 - DNA, 50 bp, Homo sapiens
cttctcagcctccataatcatacaatgcagatcttcgtgaagactctgac

SEQ ID NO: 576819 - DNA, 50 bp, Homo sapiens
aaagaaacagcgtgaaattgaggcctatatgaacccaatagcaatggcga

SEQ ID NO: 576820 - DNA, 102 bp, Homo sapiens
cccccactaacggggacttcacctttgtctcctcagcagacgcggaagaatttgcaccatcctgggattgtaaacctggaatgtatgtttgaaaccccagaa

SEQ ID NO: 576821 - DNA, 75 bp, Homo sapiens
ggataaggaccagtacctgcccaggaaactgatcctgtgttgccataagcccttggcccacatttaagtgggaat

SEQ ID NO: 576822 - DNA, 87 bp, Homo sapiens
tctgactgtgtttctttgtctaccacgaggatcatcaggtgcccctccccctgggcagtcaggatcccgttgaagataccacattac

SEQ ID NO: 576823 - DNA, 90 bp, Homo sapiens
gctgtcctctggcctcccacacgatggagtctcgccctgtcacccaggctggagtgcaatggcgtgatctcggcgcacttcaacctcgcc

SEQ ID NO: 576824 - DNA, 50 bp, Homo sapiens
gacctccacacactaaaaactggaggccaagctataacatcagaaatggt

SEQ ID NO: 576825 - DNA, 113 bp, Homo sapiens
cgatcatgaaggaacacatagcaccaagagaggccatgctaaatctcgccctgtcagaggtggcacttactcaaaagcatctactcctaatggttatgataatggcattattt

SEQ ID NO: 576826 - DNA, 100 bp, Homo sapiens
cccgagcattgtgggcctcatcatcttcctcctgtgcaccctcttcatcagagcaaaatatgctgtgaattccatcaagaagaaagtcaacgacaagaac

SEQ ID NO: 576827 - DNA, 100 bp, Homo sapiens
gaaattcatttacgacttgggctcatgttcaaagtgaacacagactacaagtctagtttaaagttattggagggtggtgaagagaggatggagacacccc

SEQ ID NO: 576828 - DNA, 75 bp, Homo sapiens
ggagcctcagttggaagcagccgatccagcctgcggagcctgtggggcagtcctgtgcctcctgattgctgagtg

SEQ ID NO: 576829 - DNA, 90 bp, Homo sapiens
gatggttccttgcaaagggcacgtatagcattggtaaagaacgatcgtccagtggagggagtttgcctggcgtgatcctgagttgcctga

SEQ ID NO: 576830 - DNA, 85 bp, Homo sapiens
catcaaaattgatggaaaagagttagcagccaacagcagtagatcaaccactccgagagcccacctgaatgaccttgaaaatatt

SEQ ID NO: 576831 - DNA, 95 bp, Homo sapiens
tggggttcggcgctatggaggagctcgatggcgagccaacagtcactgctcagatgaaggattaccaacgtgaattagaagaagctcgtgcatcc

SEQ ID NO: 576832 - DNA, 100 bp, Homo sapiens
caccgacctcatcagtgagctgtccctgctggaggagcgctttcggtgacaaagcataaatcatggacaccagagaataaggtggacctcaggaatccgg

SEQ ID NO: 576833 - DNA, 97 bp, Homo sapiens
ggacttggcggtgggagccggagcctgcttgttgcagctgtgggtgaggacggctctagctagggctctcacctttgtgtatccttttggtgccaca

SEQ ID NO: 576834 - DNA, 75 bp, Homo sapiens
ggtctgatactagtaataaccacagtggaaggttgcagttacaggtaactggaaaaaccatatggcatagttgaa

SEQ ID NO: 576835 - DNA, 50 bp, Homo sapiens
tgaatgcatcagaaccatgcacgggggcctggctgtggattgggtccatg

SEQ ID NO: 576836 - DNA, 90 bp, Homo sapiens
tttcttatgcttataagagtggaacaggcatcagtgtttttctgaccgaagttctcatttcctgacaatggaaatggaacaagaaaaaat

SEQ ID NO: 576837 - DNA, 75 bp, Homo sapiens
ctccctaatgaagatgctattaaggagggcccaagggatgcagacagtgatgaaaacgacaaaggtgaaaagaag

SEQ ID NO: 576838 - DNA, 100 bp, Homo sapiens
ccggaagccctgagggcagctgttcccactggctctgctgaccttgtgccttggttgaaatcacaaagattagacacctttttagataggtgttcttcag

SEQ ID NO: 576839 - DNA, 100 bp, Homo sapiens
cttcgactattcctactggtctcatacctcagttcctgatgaaaagttatgatcaggtgcactcaggaaagttggtgtgtggcatggtgtcctatttgaa

SEQ ID NO: 576840 - DNA, 75 bp, Homo sapiens
ggaagccatgagccagcagcccaaacagcaggttgttgatcattatgaaaatcctagaaacgtggggtcccttga

SEQ ID NO: 576841 - DNA, 100 bp, Homo sapiens
ttgatttttatattcccaggactattttatcttaaacttagcagagaggattttctgtcatggaaaaagcttggggataagttctgaacgtcgaaaagaa

SEQ ID NO: 576842 - DNA, 83 bp, Homo sapiens
cagcgcgaggtccgcgcagcccagcgcagccattgtcttgggacaaggtgcgcattcctggtgtgctgcagcgattgggagtg

SEQ ID NO: 576843 - DNA, 90 bp, Homo sapiens
tcaagcgcctccgctcggtgcccactaacaagtgcgcgtcccgggacgactggcgctgtgcgcgctccatgcacgagttttccgccaagg

SEQ ID NO: 576844 - DNA, 59 bp, Homo sapiens
aaatcacacgcataatggatgaaaggaaccgacagatgtacagatcagctctcaaaatg

SEQ ID NO: 576845 - DNA, 50 bp, Homo sapiens
catcacctacttggaggaagagctggagctgagctcaatgtgcagcaatg

SEQ ID NO: 576846 - DNA, 50 bp, Homo sapiens
tctcaattcaccacttggatcacaggctattcctcagtatgctattcctt

SEQ ID NO: 576847 - DNA, 100 bp, Homo sapiens
tcgggctgaagcgactgagtccgcgatggaggtacccactgatggtaatgctggcctgctggctgaaccccagattgccatgttctgtggcagactgaac

SEQ ID NO: 576848 - DNA, 50 bp, Homo sapiens
ccacctgcaaggattcaaagaaggactctgaggaggaagaaaatgagctg

SEQ ID NO: 576849 - DNA, 75 bp, Homo sapiens
gtcccggccatctcgctgcccgacgatgtccgcaggcgcccgagcgggaagaagttccgcagcaagccgcagctg

SEQ ID NO: 576850 - DNA, 96 bp, Homo sapiens
ggcaggacgctgtgagttggcgtgctagtgggatggcagatgaggaagaagaccccacggtttactcctggcttgggggcattaggaagcactgga

SEQ ID NO: 576851 - DNA, 75 bp, Homo sapiens
gtctgagctagagggtgaagctggcggagcaggaggatgggcgaaatgctgttaacctggcagtattaaaactga

SEQ ID NO: 576852 - DNA, 100 bp, Homo sapiens
aaaaattcaaaactagtccttattttccaaccacagaaaatgtttataggaggccttagctgggacactacaaagaaagatctgaaggactacttttcca

SEQ ID NO: 576853 - DNA, 82 bp, Homo sapiens
atccgaaaaacactgaatgctggggcgtactccaaagttgttcaggaacgaatgtcaaaactggaccaatggggccaggctg

SEQ ID NO: 576854 - DNA, 100 bp, Homo sapiens
aagggctacaccgagtacaaagtaaccgcgcaggtaccaggatttctatgcattcgacctgtcaggagccactcgagtccttgaatggattgatgacaaa

SEQ ID NO: 576855 - DNA, 100 bp, Homo sapiens
ccagaggcacccgagccctgagagtccgccgccaacgcgcaggtgctagcggccccttcgccctgcaggtgctgatattcgtggcttcagtgctcctagg

SEQ ID NO: 576856 - DNA, 100 bp, Homo sapiens
gtcgcggaacagcaggcccgagcccaccgcgccgggccccggacgccgcgcggaaaagaggactttatcagctcagactccaaggtccgcgcagccaccc

SEQ ID NO: 576857 - DNA, 100 bp, Homo sapiens
ggcaaatatgagtgtgtggccaccaacagcgccggcgtgcgctactcctcacctgccaacctctacgtgcgagaggtggccgaagacgcagcagaagtcc

SEQ ID NO: 576858 - DNA, 87 bp, Homo sapiens
gtcttctctgcatcccagccatcacctggatttacctgttttctgggagcttcgaaggctgtggaaaatctctgttctcacaaagtc

SEQ ID NO: 576859 - DNA, 100 bp, Homo sapiens
cagggaccctacagtcttcgcccccatcctcaacttcctgcgcaccaaagagttggatcccagaaaccccaatgatgggaatctgccctgctggccacgc

SEQ ID NO: 576860 - DNA, 75 bp, Homo sapiens
cgtggatggcataccattctcatcgttgacatgtcctatttgtgtgtctcttccttggggagatcctagccagat

SEQ ID NO: 576861 - DNA, 82 bp, Homo sapiens
gactacgtggcggcgctggaagggatgtcgtctcagcagtgctcgggcgcaggattttttatcaagcagaaatgcatcgaac

SEQ ID NO: 576862 - DNA, 74 bp, Homo sapiens
ttcctgctgctattgcagaatttttgactggagactatagtagagtcattcttatagaagagcatcagaggaag

SEQ ID NO: 576863 - DNA, 100 bp, Homo sapiens
acaaaaacccccatcctgggaaaaatggggaagctggcatggagggatttttgaaatcagatgagaggcagagattggccaaagaaagacgagaagaaag

SEQ ID NO: 576864 - DNA, 100 bp, Homo sapiens
agatggagacagttcagagtatcaggtattgaaatagaagagttacagaatgaggaagaagaactaagtccacctctcatggagtacaatataaatgtga

SEQ ID NO: 576865 - DNA, 83 bp, Homo sapiens
caacaaatggcaactttctgacttggtcgggaggaacctgccatgtccatggatgccaatggaaagataatttgggccaagca

SEQ ID NO: 576866 - DNA, 87 bp, Homo sapiens
tggacgagtaatcgcctgctttgattcattgaaattgagacatttgggaaatgatgaagtgcacattgtttggtcagagcatactag

SEQ ID NO: 576867 - DNA, 80 bp, Homo sapiens
gctgctggaggacgagggccagctgacggagatggtgcagaagatggaggagttcctgacggagctgaccagacttttcc

SEQ ID NO: 576868 - DNA, 74 bp, Homo sapiens
gcagatatagaacatttcttttatcacagttatgatgtgattgctcaagcccaatctgggactgggaaaacggc

SEQ ID NO: 576869 - DNA, 50 bp, Homo sapiens
cttagctcagcaattcttaccttgggagattagtaatttttaggtattaa

SEQ ID NO: 576870 - DNA, 90 bp, Homo sapiens
gcaggtgcccaccggcctcggcctggatgggcagcgccagaggtgctgggcgtcctcttctttgccatagcctgcttcttatacaagccc

SEQ ID NO: 576871 - DNA, 98 bp, Homo sapiens
aggtggccccggatgctgcggcgcccgctggccgggctggctgcggccgccctgggccgggccccaccggacgtgttgttacagatcttataacagtc

SEQ ID NO: 576872 - DNA, 75 bp, Homo sapiens
cctttatatagaagggagagtagggtcttaccaggatgtgcttccagccctatacatatagccagctgcagcaga

SEQ ID NO: 576873 - DNA, 50 bp, Homo sapiens
attgaacacggcatcgagctgaggaaacttgttcctttgagtaagaaggt

SEQ ID NO: 576874 - DNA, 80 bp, Homo sapiens
gctcagcctgccaggagtgccaagaccccaaccggttcgggcctgactgccaatcgggagaacgcggtctccctggagcc

SEQ ID NO: 576875 - DNA, 96 bp, Homo sapiens
gtccccctggatcttcacacagctgcttccattggccagtatgaagtggtgaaggagtgtgtgcagcggaaaatgtttataggaggccttagctgg

SEQ ID NO: 576876 - DNA, 101 bp, Homo sapiens
atgatagatggacgatggtgtgactgcaaacttcctaattctaagatcccaccaaatattttggttgtgagctgggagcacagacccagtttgatgttaag

SEQ ID NO: 576877 - DNA, 82 bp, Homo sapiens
gtcattctcgctaacaactgcccagctttgaggacacagcattgttggttttgccatgtactattttacctatgacccgtgg

SEQ ID NO: 576878 - DNA, 76 bp, Homo sapiens
agccaagagtcagtattccggccagcttcacgaagtcagagagccctttggagtgaatcaacctggaccttatatc

SEQ ID NO: 576879 - DNA, 51 bp, Homo sapiens
tgtggcaaacctttcttgagctcagttgttcagcacttctggtctcttcag

SEQ ID NO: 576880 - DNA, 50 bp, Homo sapiens
gcctccccagccatgtggaattgaataatgtatttgtggccttggacatg

SEQ ID NO: 576881 - DNA, 100 bp, Homo sapiens
cattggttctgtggaattagtgacccaggattgacatgtacgtggaggggacactggatctgctggaactgcttatcatgcatcctttcttaaaaccaga

SEQ ID NO: 576882 - DNA, 98 bp, Homo sapiens
agaagaagaagcaggatgaactgaaacggattgccagagaattggcagaagggttatgggacccacctgatgaaccacctgaaggagtatcacatcaa

SEQ ID NO: 576883 - DNA, 83 bp, Homo sapiens
ggaagatcggcagcggctccttcggagacatctatctcgtgatcagggccaaagcggtcagtgagaaggaagtggactctgga

SEQ ID NO: 576884 - DNA, 88 bp, Homo sapiens
gcctatggtcagacgggctcagggaagacatacaccatgggggaggccagtgtgggaattcctcctgatcagcagagactgatctttg

SEQ ID NO: 576885 - DNA, 100 bp, Homo sapiens
gtgagggggtgacgggttaagattcggagagagaggtgctagtggctggacttgacctggaaaggttcagccctatgtagctacaacctaaagccttctg

SEQ ID NO: 576886 - DNA, 100 bp, Homo sapiens
cggccgccgaagaggagcccggggccagaatgtcgtactctcaggaggctccaccatgttcagggatttcggacgccgactgcagagggatttgaagaga

SEQ ID NO: 576887 - DNA, 83 bp, Homo sapiens
ctcgtggcctggtctccattatttgagatgagttacatcttggaggtacctagtcgatagtcgctggttcaaacagtggaaaa

SEQ ID NO: 576888 - DNA, 100 bp, Homo sapiens
gtagccgtatggtacgcctgtgagaccggctgccggctgacgtctccttgcgatggagcatatccggacgaccaagaggaaatactatgtgaagtatgcc

SEQ ID NO: 576889 - DNA, 100 bp, Homo sapiens
gccagatccacgccaaccacgaggctgcgctgaagaaataccagactgagcaaaggagcaaaggcgacgccctggacaagtgtcaggctgagctgaagaa

SEQ ID NO: 576890 - DNA, 105 bp, Homo sapiens
ctcggatctgctggacgaggtcttcttcaacagcgaggtggacgagaaagtggcgcagcccagcctcgaaatgcagaacgacgccggcgagttcgtggacctgta

SEQ ID NO: 576891 - DNA, 90 bp, Homo sapiens
cagctccatgctcctcgatatcagtctatgagaaggccacaagtatatggttatgatgacttgcagatgcttcagacaagatttccattg

SEQ ID NO: 576892 - DNA, 98 bp, Homo sapiens
agatgctgtaaaaagattgaaagctttggcgacatgggactcagagaagggcttgaatggcagcttgcaagagaggcccatgggcagccgcctccaag

SEQ ID NO: 576893 - DNA, 75 bp, Homo sapiens
ggatgatgctgactttgatgaagctgccttcctatttcaaggaaagacgccaaggtaattttgacccagaggagc

SEQ ID NO: 576894 - DNA, 76 bp, Homo sapiens
ctcactagtgttttgagtctccaggaagaaattaatgagcagggacatgaggttcacagaagaaaagcttggccag

SEQ ID NO: 576895 - DNA, 87 bp, Homo sapiens
acttggattttttccagtctgatccttttgttggcaatccttttatcctgccacaccagcaggttgataaaggagccatcaaatttg

SEQ ID NO: 576896 - DNA, 82 bp, Homo sapiens
caagccctgtcagtagctcctcagattggaactgtggctgcaccatctgtcttcatcttcccgccatctgatgagcagttga

SEQ ID NO: 576897 - DNA, 87 bp, Homo sapiens
ctttgggagcggttctgtgccaacatcataaagacatttctcttgggaagttgtgcatctgacaggaatatagtactgtacgatatg

SEQ ID NO: 576898 - DNA, 75 bp, Homo sapiens
gcccgtcaagcacctcttcaccacaggtacagacagtgtttgtgtgttcctgttgtggctaactttaagaagcgg

SEQ ID NO: 576899 - DNA, 96 bp, Homo sapiens
cttcatgttccagtgcctcgagcgctcaggatggaggaagactcgatccgcctgcctgcgcacctgcctggagctctcaaacactgctgtcctgca

SEQ ID NO: 576900 - DNA, 83 bp, Homo sapiens
tcctgctgctcctgtttgtgggtgagaagccctaccactgcaactgggacggctgcggctggaagtttgcgcgctcagacgag

SEQ ID NO: 576901 - DNA, 90 bp, Homo sapiens
caaaagctgctcagagtctcaatgaacttgattacataccggttacggcacctccttcgtgcaaggtgtgatgcatccccagtgaccaac

SEQ ID NO: 576902 - DNA, 51 bp, Homo sapiens
ctcactgctgtgctccagaacaagactaagaagtcattacatatgaacctg

SEQ ID NO: 576903 - DNA, 82 bp, Homo sapiens
ggggcctctccagggagtgctctgttcacggctccatcgctgttattgtcactcagcccagtccatcagtttctcagcccag

SEQ ID NO: 576904 - DNA, 74 bp, Homo sapiens
ctgggagtttgaccgcgttgacgacggctcgcagaagttcaaagaggccttttcattgtttgaccggaccccga

SEQ ID NO: 576905 - DNA, 80 bp, Homo sapiens
tgcgggtgcgagtgcttggaggagcgcgccctgcctgagaaggagcccctcgtcaggattttttatcaagcagaaatgca

SEQ ID NO: 576906 - DNA, 95 bp, Homo sapiens
aacggccagacgccgacgtcgaccagcagagactgccggaagtcggtgcagcccacctcagaggagcgcatccccaagaccatcgagatcaagtc

SEQ ID NO: 576907 - DNA, 87 bp, Homo sapiens
acagattctgttgcgaaggcagccatctttagttcgtctttcctagagaggccaagattgacagacacctaatattcatgacttgag

SEQ ID NO: 576908 - DNA, 75 bp, Homo sapiens
gatcggcctggagccagtgcccaagtacggtttggcggcttacagggagaacacagttggcctccaccgtttctg

SEQ ID NO: 576909 - DNA, 98 bp, Homo sapiens
ttccctcggtctgggcttctctgaggcggcgagagatggtcaggtctggagctcgaccgggccagggatgacctttcatcacttggaatatgatcaga

SEQ ID NO: 576910 - DNA, 101 bp, Homo sapiens
atgcccgtgagcctgttgtcggggccagatttaaggaccatagtacagctatggatactgaaccaaacccgggaacatcttctgtgtcaacaacaaccagc

SEQ ID NO: 576911 - DNA, 100 bp, Homo sapiens
cgtggatgtagctaacagcatcaaggaaggacaaagagaccgttctcaggtattgaaaaccttccctttgaattacagagaaactttcagctcatgaggg

SEQ ID NO: 576912 - DNA, 75 bp, Homo sapiens
ggttcttgccaggctgtgtgagcaggagcccgctgctcttccccactcagatttgatggtagagtggtggcaaag

SEQ ID NO: 576913 - DNA, 75 bp, Homo sapiens
ccctggatgtcatttggaaaaacactagagacagacggctggcagaatagcctaacatggcagaccagagacagc

SEQ ID NO: 576914 - DNA, 119 bp, Homo sapiens
gccaagctggatcttgatgcgggacttcagtcctagtggcattttcggagcgtttcaaagaggttattcacagtcctatggtggttatgagaatcaaaagcagagctcatatagccagc

SEQ ID NO: 576915 - DNA, 90 bp, Homo sapiens
ccaatgttgagcacattctgaaaattggatatctaaatgatagacctctggacgagaccagccagatgagcgacctcccggtgaaggtga

SEQ ID NO: 576916 - DNA, 100 bp, Homo sapiens
gggctgccagggacagaggccagcgcgctgcaacacaagatcaagaactccatctggttagcactctacgtatatgaatatctgctccatgtaggagctc

SEQ ID NO: 576917 - DNA, 75 bp, Homo sapiens
atccagagctgcatcattccttggggcaaaatgtggacaaggttgaaacacagtttgtaaatcaatttactacac

SEQ ID NO: 576918 - DNA, 80 bp, Homo sapiens
ctctcttcgctctttgcatcttaactgcaggatttttagactctgaggagcagttggagctaatccacattatggaaatg

SEQ ID NO: 576919 - DNA, 100 bp, Homo sapiens
ctacgagtggatggtcaagagcgtgccctacttcaaggataagggtgacagcaacagctcggcgggctggaaggtaactgaactgcacaatatcaaaaat

SEQ ID NO: 576920 - DNA, 96 bp, Homo sapiens
cttccaaagaatgccacagaatcaggggaggcatgcttcagccacagatgaagatatccttgctaaaggaaaacagtccatcaggagtcaggcttt

SEQ ID NO: 576921 - DNA, 100 bp, Homo sapiens
tggcttcacgtggatatgggcgtctccagtgtgagggagaagtatgagcttgctcacccaccagaggagtggaagtagtgaaaagagaatactgaagaat

SEQ ID NO: 576922 - DNA, 115 bp, Homo sapiens
aagagactaaaggcttatgaagaccaaacaaagccagtcctggaatattaccactgtgcggtcagagaagaaacgccttaggaagccaagcaagtggcttttggaatatacagaa

SEQ ID NO: 576923 - DNA, 82 bp, Homo sapiens
accctcgtcttgcattttcccgcgtgcgtgtatggaaatcctgtatgaatgtggaagccattagcagagtaattgctgtctg

SEQ ID NO: 576924 - DNA, 95 bp, Homo sapiens
gtcggcgcgcaccgatttccgcatccggctccggacgcttccggtcttagctggacccgtctgggagggcgcactgtgtgaggagaacatgcggg

SEQ ID NO: 576925 - DNA, 98 bp, Homo sapiens
cacccccaggacttgttggcagccctgcccctggcgctggtcctcctggccatgcgccttgcctttgagagctgttcctcctcccactgacctgcgat

SEQ ID NO: 576926 - DNA, 100 bp, Homo sapiens
gtgtcccagaaacccaggaaatcgagactcatgactcccagagaggatggcatctagaaggcaacattaaatatcattcacagtgttgttctctcagttc

SEQ ID NO: 576927 - DNA, 83 bp, Homo sapiens
atcaaaatagctacaaaccatactaaattattccatttgcaacttatccccaacaggtatccaaaccttgaaacctttgctct

SEQ ID NO: 576928 - DNA, 100 bp, Homo sapiens
gagagctccccaggggagttctctgtgtctgtgaatgaacagcagagaatttcaaaggaccttgctaatatctgtaagacggcagctacagcaggcatca

SEQ ID NO: 576929 - DNA, 90 bp, Homo sapiens
ggccatcttgtgttgttgaggctgaggactgactggggttctgagactccctgtcccggaccgcaggaagaggagcaggacttggatggt

SEQ ID NO: 576930 - DNA, 83 bp, Homo sapiens
cattaacctgccgccgcccctcaccagacagatcgctgtcaaaaccctaggtatgaggatacatgggctgcacttcacagaag

SEQ ID NO: 576931 - DNA, 100 bp, Homo sapiens
atcaagaatacttcagtcaccaacgtgccaaatatggttaatgttcgtgaagaaattgaagagttttttccaagaatgtggaagataaatcaagataaaa

SEQ ID NO: 576932 - DNA, 100 bp, Homo sapiens
cctgcggtgtgcaagtccgactggaacagcacatgattaagtaccggtacatcccgttcacacatgggaagagaaggtacagaggcaaggaggatgccgg

SEQ ID NO: 576933 - DNA, 82 bp, Homo sapiens
ggtctctggctccctcctcccagggccaggcgccgctcagaacgctttcatgacgctggtcattatcttgctgcatgtattc

SEQ ID NO: 576934 - DNA, 98 bp, Homo sapiens
cagacattactacttcctaggcagaatgcttggaaagaagacccttttgaggacttctttgggaatcgaaggggtccccgaggaagcagaagccgagg

SEQ ID NO: 576935 - DNA, 100 bp, Homo sapiens
gcatcggctgcgagctcctcaagaatctcgtgctcaccggtttctcccacatcgacctggccttggtatgttcctgcttcatccccttctacagtggcct

SEQ ID NO: 576936 - DNA, 100 bp, Homo sapiens
ggccgggagggctgcctccccgtccagaagcctgtaggaaagcggaagcggcctggcaggggaaggatcgaggaatactcccccagttgcaagaggcgca

SEQ ID NO: 576937 - DNA, 82 bp, Homo sapiens
cgattatcttcatattttgaaacagtgggtggaatgaatcatctacgagagaatggtatagtgcaccgtgatatcaagccag

SEQ ID NO: 576938 - DNA, 83 bp, Homo sapiens
ggccgcgcgcgccagcaagaagatcctgctgcccgagcccagcctgtcaggattggagctgctttccgagcacctggacccca

SEQ ID NO: 576939 - DNA, 75 bp, Homo sapiens
tgcggtcgaagaaggggacgccgacaagggagtgcatccgccccaacccttttccccctcgtctcctgtgagaat

SEQ ID NO: 576940 - DNA, 75 bp, Homo sapiens
gatactgtatggaggatggcctagagggctgaactgatgcttgaagatggagtttcgctcttcttgcccaggcta

SEQ ID NO: 576941 - DNA, 87 bp, Homo sapiens
tgctgctgcaggttccggatcccagagcccgtgcgccaggagactccagacccctggcagagcctggacccctttgactccttggag

SEQ ID NO: 576942 - DNA, 73 bp, Homo sapiens
ctgctgggattcgcgctgctgggcacccacggagcctccggggctgggtgaggtggctttgaccccgggttgc

SEQ ID NO: 576943 - DNA, 100 bp, Homo sapiens
gatctctccatcccttccgaggcccgacttcggcagaggtggaggagacactgaagcgactgcagagccagaagggagtgcagggaatcatcgtcgtgaa

SEQ ID NO: 576944 - DNA, 88 bp, Homo sapiens
tggtcgcgtctcggaaaccggtagcgcttgcagcatgatgccacaccacatgaagcccttgccatattacagctatgaccagcctgtg

SEQ ID NO: 576945 - DNA, 98 bp, Homo sapiens
acaaatgcttccgacaccccatcagcaaagtcaggagccctatgagtttgtctctctggaatggctgcaaaagtggttggatgaatcaacacctacca

SEQ ID NO: 576946 - DNA, 50 bp, Homo sapiens
aagatcctggaggtggatctgaagaacggagttataaggattcatctggg

SEQ ID NO: 576947 - DNA, 100 bp, Homo sapiens
aatgtacctattgaacagattccacttgtgaagagtcactgctagttggattgaagcacacctgccagatgattctaaagacacatggaagaagaggggg

SEQ ID NO: 576948 - DNA, 51 bp, Homo sapiens
cggcggcgcagttgcgagtgcagtggtaagcatccgtggcattcaagacga

SEQ ID NO: 576949 - DNA, 88 bp, Homo sapiens
agctgaggtccagatgaaagagaagtttctggtcactccccaggattatgcgcggtacatccagacactgaaggaccacaggccccgg

SEQ ID NO: 576950 - DNA, 100 bp, Homo sapiens
aggtgaaacagattgagccagaaggaagacaatgctggtgtggaattcttactttagcctggcagttctattcataaatcagccaagccttcagctagaa

SEQ ID NO: 576951 - DNA, 75 bp, Homo sapiens
gaggtggccataccgttgaccgctcctccaactaaccagattctgagaaacgaacccctcttcatgtggccgcat

SEQ ID NO: 576952 - DNA, 100 bp, Homo sapiens
atcaagtatacagaaaatcggtgaagagaggttttgaattcacgcttatggtagtgggttatgagtgccagtgagccgccttagatagaagcatcgtcag

SEQ ID NO: 576953 - DNA, 90 bp, Homo sapiens
gccgcgcccccgcctagcccttccggatcctgcgcgcagaattttgtggaagtataatactttgtcattatgagatgtcgtctctcggtg

SEQ ID NO: 576954 - DNA, 100 bp, Homo sapiens
ccagcggcagcatgcatctgatgctctctctccagtccttgctgaagagactttccgttacatgagttagcactctacgtatatgaatatctgctccatg

SEQ ID NO: 576955 - DNA, 75 bp, Homo sapiens
atttaacccccctccaaaaagtctcagccaatttcttctccagtcatcctccagtttggtcatgcagagactctt

SEQ ID NO: 576956 - DNA, 100 bp, Homo sapiens
gtcattactctggatggcctaaatgaaaatgctgttgtatgcagtgaaagagttgctgaactacaaagaaaggttggaaaagagactgttcaaaccactg

SEQ ID NO: 576957 - DNA, 90 bp, Homo sapiens
aagcatcgcaacctgggcctcagcatgctgctgcagaacggaaagatgctgaaggatgggagaccgttcagagaggaaggcctattcgtt

SEQ ID NO: 576958 - DNA, 100 bp, Homo sapiens
aaattaactgcctccattacactgctgagtcacacacaacgcttgttatgttttcatcacttctctccagaaggagatcatgaatcagacagataaaaat

SEQ ID NO: 576959 - DNA, 75 bp, Homo sapiens
accaaggaggagcctgttccagaactgctggaagctgaggaagagctggacatccgcccaaaggtatcgtctctt

SEQ ID NO: 576960 - DNA, 101 bp, Homo sapiens
cctgtgtgtgtgaagcacccgccgtcagtcaagtatgcccggtgctttctctcagaactcatgaaaaagggtcccatccagaatggagaactgggttccag

SEQ ID NO: 576961 - DNA, 83 bp, Homo sapiens
ttttggtgcccacaggagaggtttttgaacagcaggtgtttcccattaaacactaccaggacaaaatcaggccttacatccag

SEQ ID NO: 576962 - DNA, 95 bp, Homo sapiens
ttgggacttagagtggtctgtgtttacggaggaacaggaatcagtgagcaggtaatctgtaagtcagatgctccaacaggggatgttcttcttga

SEQ ID NO: 576963 - DNA, 82 bp, Homo sapiens
agcacagttcctgggaaggtggagccaccagcctctccctggtgcaatggatgagcttcatagtctggatccaagaaggcaa

SEQ ID NO: 576964 - DNA, 82 bp, Homo sapiens
cttcagggcccggagtactagtctcaacgagagacccaagaggatgaccgagtgggagacagcagcaccagcggtggcagag

SEQ ID NO: 576965 - DNA, 75 bp, Homo sapiens
gcctgacatatctgagggagaagcacaagatcatgcacagaggtgctggagaatctggtaaaagcaccattgtga

SEQ ID NO: 576966 - DNA, 82 bp, Homo sapiens
ccccctgacccttcgcccccaaagaccagctctaacatatggctcgtggacagcagaaaattcagtctcagcagaaaaatgc

SEQ ID NO: 576967 - DNA, 49 bp, Homo sapiens
ccaggcccgccgcctccctgccaagtctcaaaccatgaattatgtggga

SEQ ID NO: 576968 - DNA, 101 bp, Homo sapiens
gcacaaagagcttgctccctacgatgagaactggttctacacgcgagctgaaatctatgacaagttcaagcagagtacacacagcatatatatgttcttca

SEQ ID NO: 576969 - DNA, 103 bp, Homo sapiens
gttttaccagcaaggaggagaacttatgtagcctcattatcccgctccgtgaggatttggagtggatcagttacgagatgacaatctagaaacttattggcaa

SEQ ID NO: 576970 - DNA, 83 bp, Homo sapiens
tgttcataccttttaatcccctggccgaaagtcatcctttaatagacgaggatgttttagaagaatgtatgtctcttcccaag

SEQ ID NO: 576971 - DNA, 100 bp, Homo sapiens
caccctgctggggctcgccgtcaacgtggtcaccacgctcgtgctcatctcctactgtcccacggccaccgaagagatctgttacctaaagcaataaaaa

SEQ ID NO: 576972 - DNA, 100 bp, Homo sapiens
cgcgaggtccgcgcagcccagcgcagccatagactggtgaactagagaatgctgagtctggaggagacggaggcaggagaggagggaagcaggataacgt

SEQ ID NO: 576973 - DNA, 50 bp, Homo sapiens
aatagtgatagctttgataacttagcagtgtctgcaaaaacgaatctttt

SEQ ID NO: 576974 - DNA, 90 bp, Homo sapiens
tcggtgcacttgtaatatacttcatagattcatcaaaatgtgttcagagcaacattgttttgttgacacaagcatttagaagaaagtttg

SEQ ID NO: 576975 - DNA, 75 bp, Homo sapiens
aaaagcttccagcaaagatgccatcagccatgaagactttgaatttatttcaggaacacgaatgcgcaaacttgc

SEQ ID NO: 576976 - DNA, 100 bp, Homo sapiens
caagcctggaagaactcgtcatgctctttgtagcgtggtgcttctgttgctcacagtagcttggagctcggcggcacaaccagcaccatctggtcgcgat

SEQ ID NO: 576977 - DNA, 75 bp, Homo sapiens
gggccaactacacagaccttactccccttagaacagtcaagctgtattagtcgacaggaccatttacatttcagg

SEQ ID NO: 576978 - DNA, 98 bp, Homo sapiens
gaagcggcggcggcggtggccgaggcggggaggcggctgggccggggcctgagctgccgcggcggccgctcctcggagaaaatgcagaagtctccatg

SEQ ID NO: 576979 - DNA, 100 bp, Homo sapiens
ttcatggcttccatggacatgaaaacatgcattggggttcattagaccagtcattaaaggatacactgaagaaattttccatcgagaaacgctttgccta

SEQ ID NO: 576980 - DNA, 98 bp, Homo sapiens
ggcactcacctgtgcaaccccagggacctggaaagacagacaggatggggaggaggttcttcagtgtatgcctgttaacaagcacaagccctggctgg

SEQ ID NO: 576981 - DNA, 100 bp, Homo sapiens
cgatgggaagaagaagatcagcactgtggtgtttgagaagtcccccctgcgggtgaagaacttcgggatctggctgcgctatgactcccggagcggcacc

SEQ ID NO: 576982 - DNA, 119 bp, Homo sapiens
ctggcgtgcactccgcacctcggggacattattgcgcgtggaacggctgcttttggaagggaaatcctcattgacgattcaatttgttgaaggccaatttgtggactcctacgatccaa

SEQ ID NO: 576983 - DNA, 82 bp, Homo sapiens
gaggaggcgcgggaggtgttcgagaacgaccccgagacggcttgccgctgttccgtaacccagtgattccagtcttggctgt

SEQ ID NO: 576984 - DNA, 100 bp, Homo sapiens
cttcgagaaaaaatttatttacagctcttaatgcagcattagtgaccagaaggatcccaaggatcgaatggttcaggttgtgaaatggtacctctcagcc

SEQ ID NO: 576985 - DNA, 100 bp, Homo sapiens
cagtaaggacttcaactgaccttcctcagactgagaactgtttccagtatatacatcaagtcactgagactcctcagacccctgcacaattgagagaaaa

SEQ ID NO: 576986 - DNA, 98 bp, Homo sapiens
aatatcatgagagcatggctcttccagcatctcacaacattgccatcttccccaactaccaccaagtcctctccatctgatcccatgaccacctccag

SEQ ID NO: 576987 - DNA, 100 bp, Homo sapiens
ctacactgaagatgaagcaaggcccaatgacccaggcggtgtggaaacaggaagagaactagaactggaagtaaagcattgaagatgtgactgaattgct

SEQ ID NO: 576988 - DNA, 75 bp, Homo sapiens
acaaagaatagagttgagcctgtgggacacttcggagacacctatggctgccgatgaaggctcagcagagaaaca

SEQ ID NO: 576989 - DNA, 75 bp, Homo sapiens
tccaaacaggagttcatggatggcatgacagaattagggcgccaagcccatctttgtgtgcttgcatccaactgt

SEQ ID NO: 576990 - DNA, 100 bp, Homo sapiens
actccttcctgctgcggttcctgcgcgcccgggatttcgatctggacctggcctggcgggtttaagaattgtttaagctgcatcaatggagcacatacag

SEQ ID NO: 576991 - DNA, 96 bp, Homo sapiens
gctgacattgggaagacagtctccagtgcaagtaggatgtttaccaaccctgataatggtgatgatgaacagtctacacagatggctgcaagttgg

SEQ ID NO: 576992 - DNA, 88 bp, Homo sapiens
ggactgacttacctaggaatgagagggacaggagtatctgaggatggagaactcagcagactatacaggctccaacccaagttccagt

SEQ ID NO: 576993 - DNA, 100 bp, Homo sapiens
cgccagccaagggaggcgccccaggacccaggcaatggagtgaccaccagctcatttataatagctttgcccagttcctagttaaggagaaagggtacga

SEQ ID NO: 576994 - DNA, 75 bp, Homo sapiens
ctcaatttaagcctgatctaacccctagaaacaggcattatattgtacttctagcaagtgcaccaacagaaaaac

SEQ ID NO: 576995 - DNA, 95 bp, Homo sapiens
gaagtcaagccgatcttgcagaaattgcagtggtctcggaaagagggtcgtggtcccgcacggatgcgcttgttgggagaaaccttggagattca

SEQ ID NO: 576996 - DNA, 100 bp, Homo sapiens
actcaacttgattccatcaaccagggaaacagatccagatggaggaaacatctgataaagtttgcctaagcagccagcagtctatcaatcatgactcttc

SEQ ID NO: 576997 - DNA, 98 bp, Homo sapiens
ctatagttgattgaatgctcttaacacggagaggaatagccaggtctggctgggtcggcacaacctgtttgagcctgaagacacaggccagagggtcc

SEQ ID NO: 576998 - DNA, 100 bp, Homo sapiens
atctggcttggcgcctgaggttctcccattagatttgaagaacccaagtgattcagcagtgcacagcccctttacaaagcgccaggcttttaccccatct

SEQ ID NO: 576999 - DNA, 75 bp, Homo sapiens
gcacagctcaggccagttcgtcggctgccagcaacaatcaccaggggatgttcgtctaaccccagaagactttgc

SEQ ID NO: 577000 - DNA, 100 bp, Homo sapiens
gatattttgatctgccgtgatcaatatcaggaaaggccccatcttcccttcacacctgatgtaaaatggggtaaactgagagattatcaggtccgaggat

SEQ ID NO: 577001 - DNA, 98 bp, Homo sapiens
ttaaagtaaaacaaggtgcagagaatatgatacagatgtattcaaatggatcttcaaaggatgtctcccgtgctaagctagcagctataattccggac

SEQ ID NO: 577002 - DNA, 100 bp, Homo sapiens
caggccagactcaagatgaggctgtgggacctgcagcagctgagaaaggagctcggggactcccccaaagacaagactccattcagaagagagaagaggg

SEQ ID NO: 577003 - DNA, 50 bp, Homo sapiens
aaagcttgaaatgctacatttccaagatctgagtgggacatacttttgaa

SEQ ID NO: 577004 - DNA, 96 bp, Homo sapiens
ttcctcgcaggacctcatgagtaagctgtggcggcgtgggagcacctctggggctatggaggcccctgagccggaggcgttggggctgaacctctg

SEQ ID NO: 577005 - DNA, 100 bp, Homo sapiens
acgaacaacctcactttatgaacacaaaattcttgtgtattaaggagagtaaatatgcggctttgatgacagtagggaaagaaccatttcctaccattta

SEQ ID NO: 577006 - DNA, 90 bp, Homo sapiens
ctacggggtgtacttgggaacgaggggtgaagcggcccaggtgagggtcgcctgcgaggccgctggccaggcctgagcctctgccaccat

SEQ ID NO: 577007 - DNA, 74 bp, Homo sapiens
cggacccagtggatgtaaaccccttccaggtggccaggcatgatagaatctgatcctgacttaggggaatattt

SEQ ID NO: 577008 - DNA, 82 bp, Homo sapiens
acatggaagaaccttgttttgacttccttcgaaccaagcagacccttggagctgaagatccctgaaaacgccaacgtcttct

SEQ ID NO: 577009 - DNA, 100 bp, Homo sapiens
caccggccccgagcaggtcacgaggacggagggccatgtgttgggtcagcaccatcagagagaagaagaaggaggttcctgctgtgccagaaacccttaa

SEQ ID NO: 577010 - DNA, 101 bp, Homo sapiens
atggttcgttacatcagaaggatacagttcatgacaatgactttgagccctaccttactggacagtcaaatcaggagcttactccacgggaacagcctcta

SEQ ID NO: 577011 - DNA, 100 bp, Homo sapiens
gggcagtttccagtggcagcagtacagcattactttatagcaaacgactggttgctccttgagggcaggacagttcttatggctttatccgttgcgtaag

SEQ ID NO: 577012 - DNA, 100 bp, Homo sapiens
aggacagcacctagtcgtggccggaggagtctcagagctgtcagaaaggtattgggagagttgctgctacatctttaggaaatttgactaaccatggttc

SEQ ID NO: 577013 - DNA, 153 bp, Homo sapiens
ttgactttctcctcattgaagctatgcagtatttctttggcatcactgcagctagtaatttgccttctggattcctgcctagggtagttaaaagacgagtgaatgctctcaaaaacctgcaagttaaatgtgcacagatagaagccaaattct

SEQ ID NO: 577014 - DNA, 74 bp, Homo sapiens
cggcacagctccgaccgcgaggacgacttctccgcagatgccatggacaatattaccaggcagaaccaattcta

SEQ ID NO: 577015 - DNA, 75 bp, Homo sapiens
tggagaaacatgcagattatatcgcatcctatggctcaaagaaagatgattatatggaggagatgtataagaaag

SEQ ID NO: 577016 - DNA, 98 bp, Homo sapiens
gctcatccccaaagccaagccactcactctgctctgggtctgttctctggggaggcagtaaggggccgtggagctggcctcggcctcggcatcgggag

SEQ ID NO: 577017 - DNA, 82 bp, Homo sapiens
ataaagctcatggcccaccagctagaaagactgtcttctgaagattgatgtctatttccttgagctctttaattttgttgcc

SEQ ID NO: 577018 - DNA, 98 bp, Homo sapiens
aaatggcaggacctgtcggagaaggtggtctaccggcgcttcaccgagatctacgagttccattgcctttcttcctgacgtggagtgtggtgaactca

SEQ ID NO: 577019 - DNA, 76 bp, Homo sapiens
atgcctctcagctgccacctgcctttgacctttttgaagcctttgcaaaagaggagatgttaaagtaacccatctt

SEQ ID NO: 577020 - DNA, 75 bp, Homo sapiens
gatccttagaggcagaggcagctcttcagcctatggggttgttttccgaggaggtgaaggggctttgcaggtttt

SEQ ID NO: 577021 - DNA, 82 bp, Homo sapiens
gccgtgtctgcagagattgtttcctgacacagccagtggcccctgagagcacagaggaaaaacagcactggaggcaatgttt

SEQ ID NO: 577022 - DNA, 101 bp, Homo sapiens
gggcgccgcgccgcacgagcaccagcctagagccaggctttaaggagttttaagctgagtgtcactgtagaccccaaataccatcccaagattatcgggag

SEQ ID NO: 577023 - DNA, 90 bp, Homo sapiens
gccagatgtttatgaaactagcgacctacctgaggatgatcaagcggagttcgatgcgggtgggacttccaggaagggaaatgccgagcc

SEQ ID NO: 577024 - DNA, 89 bp, Homo sapiens
gacattgtggacaagctgcagtactctcggtgctacctgggcgatgccttccgctgtgccagctgcccctaccttgggatgccagcctt

SEQ ID NO: 577025 - DNA, 97 bp, Homo sapiens
gaagtgatcgctcagctggagaacgcggctaaagttctgatggaaggatgataaagactatgctttaaaacaaatagaaggaactgggatctctatg

SEQ ID NO: 577026 - DNA, 110 bp, Homo sapiens
ggagcagtgagaaagcaaaggctgctctgaagcgcacgacctccgactactttctccttcaaggtgtgaacttcaacccggagcactgcagccccaatggcaccgacccc

SEQ ID NO: 577027 - DNA, 73 bp, Homo sapiens
gagtatgaaagtcaagtcaaagaatcatattctaagaactcagccactcaggtatccaccatggtgctgggtc

SEQ ID NO: 577028 - DNA, 100 bp, Homo sapiens
ctagaagacctgagtcttcctgaccgactccaccatcacccaatctgttgattctccattgggaaaggcatttacagtgttctccgtggcccgatgcccc

SEQ ID NO: 577029 - DNA, 78 bp, Homo sapiens
ttacgtctgcggaagtgcagctgcctcagttcttagcgcagggggatatgagactttctactcggaatatcctgagtg

SEQ ID NO: 577030 - DNA, 75 bp, Homo sapiens
cagctgagcccgaggctgacaagcttcttggacacttaatgattgttggcaagaaatgtgctgctgatctgggcc

SEQ ID NO: 577031 - DNA, 96 bp, Homo sapiens
aacatcggggacagtagctctgggctcatccagaccggtatgatctcgtgaaaccttgagagaaactgaatgacgaatgaaactattgttcctgtt

SEQ ID NO: 577032 - DNA, 90 bp, Homo sapiens
aggagatgtacagaatgggccaagctccactgttcagatgcaaagctatgacagagactccactttcaatgtgtttgtgggaaaaggaca

SEQ ID NO: 577033 - DNA, 100 bp, Homo sapiens
gaagatggaattatccaatcccaatttgtttaggtgaatctgatcttcataagaactcagaagacttagtaaatgctgaagaaaaacatgatgagacaca

SEQ ID NO: 577034 - DNA, 100 bp, Homo sapiens
ggaactgtttccagagctcaataaggaatgttacgttcataacttactaaggattagtgtatattttccaaccttgaggcatgaaattctggagcttatt

SEQ ID NO: 577035 - DNA, 75 bp, Homo sapiens
ccttcagctactatcagagcttctttgacgtggacacctcacagtgggctcgggatgagtttgaaggcctcttca

SEQ ID NO: 577036 - DNA, 100 bp, Homo sapiens
gccagtgccaagttatattcaaagaccagattatgctgatcatcccttaggtatcgggttgaatatgaagctttgtgtaaagtagaagcagaacaaaatg

SEQ ID NO: 577037 - DNA, 50 bp, Homo sapiens
cttcccagtagctggaactacagatgaagcgccctcagttcagcaagccg

SEQ ID NO: 577038 - DNA, 80 bp, Homo sapiens
agagactgctgagcccgtccgtccgccgccaccacccactccggacacaggaatactcccccagttgcaagaggcgcagg

SEQ ID NO: 577039 - DNA, 76 bp, Homo sapiens
tcggcggtgagatcgtcagcgctgactccatgcagccatgcctttcttggacatccagaaaaggttcggccttaac

SEQ ID NO: 577040 - DNA, 75 bp, Homo sapiens
tgaagaactcagatcaaaacctgttactgaaggaactggtgatattattaaggagggggctgtatgtggaattgc

SEQ ID NO: 577041 - DNA, 98 bp, Homo sapiens
tggttttgaaaaatgtcaaaccagaccaatgggtgaagatgcaaccttaaaatcagtgacaagaaacattccaaacaagcaacagtcttcaagaaatt

SEQ ID NO: 577042 - DNA, 74 bp, Homo sapiens
caagaagggctttgggggcagtgacatggaagagaaggtgagaagttgtgaaacgctgaggctccagccctaag

SEQ ID NO: 577043 - DNA, 75 bp, Homo sapiens
gtcgcgtgtctaggtgagtcgcggtgggtcctcgcttgcagttcagcgaccacgagtgtgaacatggctacgcct

SEQ ID NO: 577044 - DNA, 97 bp, Homo sapiens
ccacagttcctaccttatgagctcggttttcttatgcttataagagtggaacaggtttacccaaggtccagcctagcccctaggcaccatgtcggac

SEQ ID NO: 577045 - DNA, 98 bp, Homo sapiens
gtaggtgaggcttccccggacgggttgagtgctcctgcttaggcaagaaattatagagcagcttctatcaaatattttccacaaggagaaaaatgagt

SEQ ID NO: 577046 - DNA, 75 bp, Homo sapiens
gtgatttgtcggatgaagataagacactttctcagttacagagagtctgcagccaggagagcagggacgtcctgt

SEQ ID NO: 577047 - DNA, 82 bp, Homo sapiens
ggcaagaagatcggctgcggcaacttcggggagctccgcctaggccagctgcgggccgtccagcggctgtgccacttctaca

SEQ ID NO: 577048 - DNA, 75 bp, Homo sapiens
gcagggagcattgcagcagccactggctttgtcaaaaaggaccagttgggcaagtatcctggtgtgaaccagcta

SEQ ID NO: 577049 - DNA, 80 bp, Homo sapiens
agggaaccctggtcaccgtctcctcaggatcccatgacagattctgttgtcacgtctccttacagagtttgagcggtgct

SEQ ID NO: 577050 - DNA, 83 bp, Homo sapiens
accttcacgatgtttcccttggtcaaaagcgcactaaatcgtctccaaggatcagttcttaagagcagccccggtaactggag

SEQ ID NO: 577051 - DNA, 82 bp, Homo sapiens
ctctcccaggccacaagacatttcctgctcggaaccttgtttactaattgtcaaaatgcagatcttcgtgaaaacccttacc

SEQ ID NO: 577052 - DNA, 74 bp, Homo sapiens
ccggcccggagcaccgagctcgcggcacggtaggagagaggcgtttccatcaaccagttttgcaaggagttcaa

SEQ ID NO: 577053 - DNA, 75 bp, Homo sapiens
cagtgcagcctaattttgacttcaggtactagcaaaggccagacgtcttactcaacaacttccctgccaccacct

SEQ ID NO: 577054 - DNA, 98 bp, Homo sapiens
gccggcctagcgtcctggaattacttcaatcaaatcaccggcgtaatcaacccagcgttggacaaatactttccgtcagactctggagtgagaatcat

SEQ ID NO: 577055 - DNA, 82 bp, Homo sapiens
ccgggggtgaagcctcctgcgccggccttgcctcggcaacatggctgacaaggccaagcctgccaaagctgccaacaggacg

SEQ ID NO: 577056 - DNA, 75 bp, Homo sapiens
gaatacctttctctcgtggccaggctcattatccattttcgagacattcgtggagccttttgccagcttgaccga

SEQ ID NO: 577057 - DNA, 75 bp, Homo sapiens
agaactacaagaacagagggattctttgactcagaaactacagctcttcagagaagtaagaataatgaagatttt

SEQ ID NO: 577058 - DNA, 100 bp, Homo sapiens
aggagcacccggcgtcccagacaagaaacaggaagagcgagtacagcaagtacgcaagaaattggaagaagcactgatggcagacatcttgtcgcgagct

SEQ ID NO: 577059 - DNA, 100 bp, Homo sapiens
tttttgatattgcaactggaaaacttctgcataccctggaagagtctctacaaggaagataacggactgtaaaattctataaagcaaagctacacatcac

SEQ ID NO: 577060 - DNA, 75 bp, Homo sapiens
gctacgctcctccatcacgtgggaactctaatgatccaggacaaagaagttaccctggagtatgtatcaagcctg

SEQ ID NO: 577061 - DNA, 100 bp, Homo sapiens
cttattgaaacattaaatgacagttcacataagaagttcttcgatgtatctaaacttggcaccaagtatgagaatgtaactggtcactacatttccccct

SEQ ID NO: 577062 - DNA, 83 bp, Homo sapiens
gggagcactatgtctgcggaagtccccgaggcagcctccgcggaggagcagaaggtgtcgtgaaaactacccctaaaagccaa

SEQ ID NO: 577063 - DNA, 75 bp, Homo sapiens
caacctggaattcaattggctcttgccttatgttagtttagcctacgcttatgaaaccaaagatgccttgtgctt

SEQ ID NO: 577064 - DNA, 75 bp, Homo sapiens
gtagtcctgggagcacagcagaagtgcttgcagccaatttactggagcagggatgacgtagcccagtggctcaag

SEQ ID NO: 577065 - DNA, 111 bp, Homo sapiens
ctgacaaatcctagcgaatttttggagcatctccacccaggaacctcgccatccagaaacagagctgtgaaccaaccccgctcacggctaacaagcccacccaccatggcg

SEQ ID NO: 577066 - DNA, 100 bp, Homo sapiens
gcgctggctccgggtgacagccgcgcgcctcggccagaatattgaaggatgtttgttccaagatctctaaaaatcaagaggaatgctaatgatgatggca

SEQ ID NO: 577067 - DNA, 75 bp, Homo sapiens
tcctttatgtcttcccatctgacttttgcagttctaggtctcgttccagatcatattctccagctcataacagag

SEQ ID NO: 577068 - DNA, 100 bp, Homo sapiens
gcaagggcgagatcctggagagcctgcaggacggcgcggcagagtccccgtacgcctacagtaacggagaaccaggtgcatcagcgcattgcggagctga

SEQ ID NO: 577069 - DNA, 97 bp, Homo sapiens
cccacctgtgtcctggttgagggtctccagggttctttggggcccgagggaagaactgctaaagctttgaggtcattacaatttacgaatccaggaa

SEQ ID NO: 577070 - DNA, 75 bp, Homo sapiens
ggagaagaaggccttgactacggaggggttgccaggttggcaaggccacaggcttcctcaagaactttctgatcg

SEQ ID NO: 577071 - DNA, 90 bp, Homo sapiens
gcaggaagacttgtgaagatgggaactatacaagaggcaggaaaaaagacagatgttggcctgcttagacgcctggtgactctcatttcg

SEQ ID NO: 577072 - DNA, 112 bp, Homo sapiens
tgtgctcgcgctactctctctttctggcctggaggctatccagcatcgcccaggaccacaccgcagcgtaactgcaggcctctcagcgaaaaagggggaaagcaaagacccg

SEQ ID NO: 577073 - DNA, 100 bp, Homo sapiens
gccgagccatcccaattaaacagatgtgaatcccgatggagcggcccgaggaaggcaagcagtcgccgccgccgcagccctggggacggctcctgcgtct

SEQ ID NO: 577074 - DNA, 100 bp, Homo sapiens
gccattcttgctgtctggatccagagacaagactattaagatgtgggatgtcagtactggcatgtgccttatgaccctcctcccagatggacgtatcatc

SEQ ID NO: 577075 - DNA, 74 bp, Homo sapiens
gatcgggatttacgtggagatcaagcgcagcgatggtgactgccaacagccagcccaatgtcgaatccagaaat

SEQ ID NO: 577076 - DNA, 96 bp, Homo sapiens
gggatttttgtattattctgcgtggaagctacacttactccagtgggaggaggactccatggaggacgtgagatatgcgtccgtggccagaatctg

SEQ ID NO: 577077 - DNA, 125 bp, Homo sapiens
gtccagtcgcaacaaactgctgagacgcacagtctccgtgccggtggaggggcggccccacggcgagcatggacctgaaggagaagaaggagaaggtggaggagaaggcaagccggaaagagcga

SEQ ID NO: 577078 - DNA, 100 bp, Homo sapiens
aagcccttgcgcctgcctctccaggatgtctacaaaattggtggtgtgatgaatgcagactctgctaccattttggctgtttggatcctcctttgaaaaa

SEQ ID NO: 577079 - DNA, 99 bp, Homo sapiens
gtactgttgcttttttggcatctgtggtggaccctcgcgtggcatctgctgcagcaaaagcggctttggcatcagaagagctaacaattgctggaatga

SEQ ID NO: 577080 - DNA, 74 bp, Homo sapiens
tcttttttggaactcatgagacgtacagcaatcatttgaaactccaagggccaaagctcaaatgcccaccatag

SEQ ID NO: 577081 - DNA, 98 bp, Homo sapiens
gaggccccgagccccgtggatccgctggagcggagccggccgtacgcggtgctgcgagggcagaacctgggtggccaagactaagcagcagattgagg

SEQ ID NO: 577082 - DNA, 73 bp, Homo sapiens
caacctcaatgagaagatcaagaaggatggtggtataagttgaaatccaaaccaggaaagaaggacaaggagc

SEQ ID NO: 577083 - DNA, 75 bp, Homo sapiens
gacaacatcaccgtgaggcagggggacacagccatcctcagtgggaagagatcagtggtgtggatgaacattaca

SEQ ID NO: 577084 - DNA, 87 bp, Homo sapiens
gcgaatatcgtcatcgttagaagatgctatgtggtcgtggcacgttttgttgggggtttctgtagtcgtcttgtttggatcaactcc

SEQ ID NO: 577085 - DNA, 80 bp, Homo sapiens
gctgcttatggctataaaattacagctgtgttccagatcatctccctggtaatttaccccgtgaagtacacccagacctt

SEQ ID NO: 577086 - DNA, 83 bp, Homo sapiens
atagaggcagcagaagccagggcagctgaaagacagagaccttcagagctcaaatgatacttttcccacagcaatgcacattg

SEQ ID NO: 577087 - DNA, 100 bp, Homo sapiens
aagagtcgtaccaagtacaccattacaccagtgaagatgaggaagtctgggggccgagaccacacaggacgactgggtttggattcagaagaggattatt

SEQ ID NO: 577088 - DNA, 75 bp, Homo sapiens
ggatgtggcaattttggagaattacgattagatagggccagatttgagtgtgtgaatttttgagtgaaacctgga

SEQ ID NO: 577089 - DNA, 134 bp, Homo sapiens
gccgtgacaactttcgtttccctctgagggaattgggaggtcggcggccccaaaagtggttggaggcaaagtaaagaagcccggtaaacgtggtcggaagccagccaaaattgacttgaaagcaaaacttgaga

SEQ ID NO: 577090 - DNA, 100 bp, Homo sapiens
aaggaccctgacctgcctgtcgtcgtggtggccaacaagcaggaccccatcctgttctctggaagcctgaggatgaatctcgaccctttcaacaactact

SEQ ID NO: 577091 - DNA, 76 bp, Homo sapiens
tagacttaggtctgttagaggaagacgacgagtttgaagagttccctgccgaaggacgtagacaagtttggcaacg

SEQ ID NO: 577092 - DNA, 80 bp, Homo sapiens
ggatacttaacaaacccaagaagcctctgggaagactacccgcatgtgcacctccctccagatggcccctccatccctca

SEQ ID NO: 577093 - DNA, 100 bp, Homo sapiens
ggctcggatggggcttgcgggcgccgctggacgctggtggggactcgctctcggcttgaccgcattcttcctcccaggccaggggttatcaccatgcaag

SEQ ID NO: 577094 - DNA, 100 bp, Homo sapiens
gttcagttttatgatggagtaattcgttgtttaaaaagaatgcacattaaagccatgcccgaggatgctaaggggcagggtcgagctgtgcagttttagc

SEQ ID NO: 577095 - DNA, 100 bp, Homo sapiens
cgtgtctgccatccccatctgaattacatgaatgacagtcttcgaaccaatgtgtttgttcgatttcaaccagagactatagcatgtgcttgcatctacc

SEQ ID NO: 577096 - DNA, 100 bp, Homo sapiens
gccggaatctgaggtgtgagtagagcctgggggagagtggatccaggtgaagggggcagaggttttcgaaaggccttacactctgaccgtcctccttctg

SEQ ID NO: 577097 - DNA, 100 bp, Homo sapiens
cgagttcaaagagaccctcggaactggctgcttcaacccccaactccactgctggtgcagccatgaactccttgacctctctcgggactctgcaaggact

SEQ ID NO: 577098 - DNA, 117 bp, Homo sapiens
gaaaattgagctgtccatgcagccatggaacccgggttacagcagtgagggggccacggctcaaggagtctccccaggacagtgctatcacccgggatattaaccgaacattcccag

SEQ ID NO: 577099 - DNA, 100 bp, Homo sapiens
aatgactggaaactgattggaaactctttgggaaagccactcgaaaagcactattcctgatcagagaactccagttgcttcaacacacagtatcagtagt

SEQ ID NO: 577100 - DNA, 87 bp, Homo sapiens
cagatggacacttacacctcggatgaacaagaaagtttggaagcctatccctcggccagatcctgtgcataataatgaagaaacaca

SEQ ID NO: 577101 - DNA, 75 bp, Homo sapiens
ccccttggatattccagtcgatgtatttgtacaccaaggaagtcgagataacatgagtattgtactagtttgctt

SEQ ID NO: 577102 - DNA, 100 bp, Homo sapiens
tggagtcttccatcaatcatatctcacagatttgaacatggaattcaatccttcagatcatcctcgggccagcacaatattcctcagtaaatctcagacg

SEQ ID NO: 577103 - DNA, 100 bp, Homo sapiens
gatctacctaccaatcgtgaaaactatattcacaggacttcggcagtctgtccaaccttcaggtcactcagcctacagttgggatgaatttcaaaacgcc

SEQ ID NO: 577104 - DNA, 82 bp, Homo sapiens
gaccggcagcggctggcccgggagcgacgtgaggaacgggagaaacagctaggtcacctggcggtagacccattcataagag

SEQ ID NO: 577105 - DNA, 100 bp, Homo sapiens
gaccaacgggatagccgatgacaggcagtccttgtcgtcagcagataatctgatcctgctcatctctgattacttctatgccttcctgcggcgggagtac

SEQ ID NO: 577106 - DNA, 51 bp, Homo sapiens
acataaagcattttggactttatgacagagcgggatgccaccagcttgtcc

SEQ ID NO: 577107 - DNA, 100 bp, Homo sapiens
gtgctactcaaggcccgggaaggtactccaaagattcaggtttactcacgtcatccagcagagaatggaaagtcaaatttcctgaattgctatgtgtctg

SEQ ID NO: 577108 - DNA, 50 bp, Homo sapiens
attccaagtaactcttatttgattccaaattacagaaatgcagtcattgt

SEQ ID NO: 577109 - DNA, 83 bp, Homo sapiens
gtgctctacgtcacggagaagatccttcatctgtacctaatgcagacaatgccttcacattattttatgtgaaatttcgagct

SEQ ID NO: 577110 - DNA, 82 bp, Homo sapiens
gccacaaaccgaatagaaactttggatccagcacttatcagaccaggtgtctgctttttcaacgtgggagaaggagttgcac

SEQ ID NO: 577111 - DNA, 75 bp, Homo sapiens
cagcagaccatagagctgaaggaagagtgcaaagactttgtggacatctgcagatctccaggggagcccaccagc

SEQ ID NO: 577112 - DNA, 74 bp, Homo sapiens
tctgattcaggcctctgacagctcttggaagaattatatccagatcgagagacagaagattctgaaagggttca

SEQ ID NO: 577113 - DNA, 89 bp, Homo sapiens
tacgttttctcaggtcctgcagctgggagacggcacaggacactaaaccagcacaacctccaagagggaaaacatttctccagattatc

SEQ ID NO: 577114 - DNA, 100 bp, Homo sapiens
aaacgcttttcacgtcacctggagagatgcacagggtttgtaccagttgctggagccccgaatgattgttcgttgcaggaaacaagatttccctctggta

SEQ ID NO: 577115 - DNA, 100 bp, Homo sapiens
gagtactacgaggtgctggaccactgctcttccatcctcaacaagtacgacgacaatgcagatcttcgtgaagactctgactggtaagaccatcaccctc

SEQ ID NO: 577116 - DNA, 101 bp, Homo sapiens
gggtcctcagaaagctctggaaaccatcggtgcaaatttacagaagcagtacgagaactggcagccaaggcatcagaggctccttgaaatgctagatacag

SEQ ID NO: 577117 - DNA, 82 bp, Homo sapiens
ccctccagcggccccggggacaccagcagctctgctgcggagcgggaggaggaccgaaagtgtggacgaatgtggaacctcg

SEQ ID NO: 577118 - DNA, 98 bp, Homo sapiens
cagaggccgggctgggcctggaggactgtcggctccagaaagaacaccgagttcgggtggggcaggagaccctgtaggaggaccccgggccgcaggcc

SEQ ID NO: 577119 - DNA, 74 bp, Homo sapiens
accagaagaggaggttgcccagaagaaaaaggcgtggtgaccaagatgaagatgcagaggaccattgtcatccg

SEQ ID NO: 577120 - DNA, 82 bp, Homo sapiens
gcggccgcggggcccgagcgcagagtgggggcggcgggcccgacgtggcgtggaggtggcagcaggggccagcagcggtggt

SEQ ID NO: 577121 - DNA, 100 bp, Homo sapiens
tgttttcctggcgtgttagcggtggtcagcaggtggaagccagtcagaaactgaagtcagacagaaacaacaactccagctgatgcaatctaaatacaag

SEQ ID NO: 577122 - DNA, 82 bp, Homo sapiens
cagattcgcagtggtcgcttcttctccttggtatgttcacatacgatgaatctacaaaattgttttggtttaatccatcttc

SEQ ID NO: 577123 - DNA, 146 bp, Homo sapiens
tcaaggcaagaccgaattcagaaggatatcgacgtcgtgatccagaagtccagagctgaggactgcctgtttgcagcatggcggacaccgacctgttcatggaatgtgaggaggaggagttggagccatggcagaaaatcagtgat

SEQ ID NO: 577124 - DNA, 80 bp, Homo sapiens
tgccggcagctccaaccatgggaggccgcgtctttctcgccgactccacgggaacccactccctctacacgatgtaccag

SEQ ID NO: 577125 - DNA, 100 bp, Homo sapiens
tctacacccagattatgcttttggaaaatgagaacaaaaatttaaagaaagatttgaagcactacaaacaagcagctgaaaacctctgcgccatgagagc

SEQ ID NO: 577126 - DNA, 100 bp, Homo sapiens
tgaagggagtggatcagagcactgcctgagaacccttaggagaaatcttgagagtggacagcaattgtgaagatcgccagagagttctgtgtttcatcac

SEQ ID NO: 577127 - DNA, 98 bp, Homo sapiens
ggagcgccgctcgccgcagacttacttccccggctcagcagggaaagcatgcagccaagcaggctgcagcctcagccacacagaccatcgctgcagct

SEQ ID NO: 577128 - DNA, 74 bp, Homo sapiens
ccggcggcggcggcggcggcggcggcggcgcagtgtaaacaggaacatcgataagtagtgtaaaaacttgcaca

SEQ ID NO: 577129 - DNA, 101 bp, Homo sapiens
cgagtgggtatgcctggagtctcagctggtggcaatacagtcctgttggttagcaatttaaatgaagaggatggagatgaagatgaggaagctgagtcagc

SEQ ID NO: 577130 - DNA, 100 bp, Homo sapiens
tggttaagaatgtgactttggagccagcctgctaggggctgaattctgactcagccatttactaactgtgtgaccttagtaattcgccaaaatgacgaac

SEQ ID NO: 577131 - DNA, 90 bp, Homo sapiens
ccgctgtgtgccaggccgggtgctgggcacggtcccgcgaggcatgtgggcacattccatgacagtacaggattatcaggatctcataga

SEQ ID NO: 577132 - DNA, 101 bp, Homo sapiens
agagagaaaagtgagtttattctgaagagcatccagagttgccatataatgattactttgagtattttggaccagacttcaaactgcatattagtccttca

SEQ ID NO: 577133 - DNA, 75 bp, Homo sapiens
cgtaaaagccccaatcttagcaagtgcggggaagagctgggtcgactcaagggctgcccagggattgccaggagc

SEQ ID NO: 577134 - DNA, 100 bp, Homo sapiens
cacggagctggacccccagagccgcgcggcgccgcagcagaaaggagatgtaagattcttgatttgcacagatgtagctgctagaggaattgatatccac

SEQ ID NO: 577135 - DNA, 98 bp, Homo sapiens
cttccggaagccgggacgatgtccgcatgacaaccgacgttggagtttggagatgcttgctctgtcaaggcacagcctattgtctcctttgctcagtg

SEQ ID NO: 577136 - DNA, 75 bp, Homo sapiens
cagcagtcaatcctccagaacctatgctggtggaacagcctcggccaccaaggtttggaattcacccagttgcag

SEQ ID NO: 577137 - DNA, 75 bp, Homo sapiens
ctggctgcgtgcacagcgccttgttccagcagggcctgatccaggagaggagaggcagcagcatggcgagtgtcc

SEQ ID NO: 577138 - DNA, 75 bp, Homo sapiens
accatttagcgtcagaaataagccgttttttgacatctgtacttcaagaaagattgggactttaaccaggacatc

SEQ ID NO: 577139 - DNA, 100 bp, Homo sapiens
ccatctttatgcaaagccagcgttacagtaatgttccaggtggctgtgcaatgaccagatcgacgcaggcactcggcgctgggcagtggagggcctggct

SEQ ID NO: 577140 - DNA, 100 bp, Homo sapiens
acagagctgcaggagctggaggctgtatacgaacggctctgcggcgaggaggtatgtgcactgcgcgtgaccagccgggcccgcagccgcatcctcaggg

SEQ ID NO: 577141 - DNA, 90 bp, Homo sapiens
ctccagctccgctctcttcggctgccccaatccccggcagctctctcagtttcagagactcctccactctctgggaatgacacggactcc

SEQ ID NO: 577142 - DNA, 75 bp, Homo sapiens
aagcaccaggagtttgacaatcacattaattcatatgaccatgctcacaagcagctctgatccagtatatacggc

SEQ ID NO: 577143 - DNA, 82 bp, Homo sapiens
tgcaggatgctaccatcaaagtgcgcccacagcagcaaccttggagcaggcaggattttttatcaagcagaaatgcatcgaa

SEQ ID NO: 577144 - DNA, 73 bp, Homo sapiens
ggaaccgagagctggaggccactcgacgccagaggatggattacccagtacccttatagttgcctggatcaaa

SEQ ID NO: 577145 - DNA, 98 bp, Homo sapiens
ttgtaaagagtctgccttctggatctcaccaggtagatatagttgtaggtactccgggaagactagatgacttggtgtcaactggaaagctgaactta

SEQ ID NO: 577146 - DNA, 83 bp, Homo sapiens
cacgcccacagcgatccacctgactgtggccgtgctcatgtaccacactcgagatggccagggtcccctgcaccacggcgtct

SEQ ID NO: 577147 - DNA, 75 bp, Homo sapiens
gaaggacctgctgatgaatattacatcatataccgaaatgtttttgataaggagaaggatgtggtgtctgcccat

SEQ ID NO: 577148 - DNA, 82 bp, Homo sapiens
ccacctgtgcctcttcaccatgttcggaatgctgctgttcgctggtgggaagcaaacggggattcagcgtccgatcctttgg

SEQ ID NO: 577149 - DNA, 88 bp, Homo sapiens
aagactgtggaacttttaagtggagtggtggatcagaccaaagatggtgatttgctgtcctctgaatacatagagagacacattgaac

SEQ ID NO: 577150 - DNA, 97 bp, Homo sapiens
cggctttctgaactagattgggtgtttggagaagagggattgaccctgaatcttgaagacgttcagcctcatgacttaggaaaagttggagaggtca

SEQ ID NO: 577151 - DNA, 50 bp, Homo sapiens
tgccatatagaagatttggactttgcagtgaaattaaatggtggcagaca

SEQ ID NO: 577152 - DNA, 75 bp, Homo sapiens
gtctgaaggaagaaaggaaaattctggaaaacgcccagagatttaatcagctgtgctccattgaagtgacttgtg

SEQ ID NO: 577153 - DNA, 74 bp, Homo sapiens
cgcagatgttgtcaaggtggcctaccaggaggccaggggtgtcgccatgcgccagcagagacttcagaaggaac

SEQ ID NO: 577154 - DNA, 98 bp, Homo sapiens
atgcccgtggtggtgcagagcatgtacatctttaagggcagcaggatgggtgtggaagcagtgatggcacttttggaggggaccccagataccccagc

SEQ ID NO: 577155 - DNA, 83 bp, Homo sapiens
gtcccgtccgacagccaggcccgggagaaattcctgtgaggtttctcgggcttatttggtggagtttctgttccagaccagag

SEQ ID NO: 577156 - DNA, 100 bp, Homo sapiens
cctactcgtccagagccgccaggttcaaagcagtattcagcgatttcaagagaagttttttatttttgctttgacacctcaacaagttagagagatatgc

SEQ ID NO: 577157 - DNA, 97 bp, Homo sapiens
gcgcccctccccgtgaccaccgctgcgttttctcggggcgttgcttgagtccatggttgatgctgctgagaatctttgtcccaatgtgatgaaaaaa

SEQ ID NO: 577158 - DNA, 100 bp, Homo sapiens
attcctgatatttttggtatcacaaatgaatccaaccagccacagatactattaggagggcgcacctatgttggcagcatgcctggtcgcatcatcaacg

SEQ ID NO: 577159 - DNA, 75 bp, Homo sapiens
caaggggatgcagctgctgcgggagagacgtctcagagaggctgtgcagctgctggaggactataagcatgggac

SEQ ID NO: 577160 - DNA, 99 bp, Homo sapiens
gttgaaacgctgcctggaaaggaagtaccaggacttgcacagttgcagaggaaagtggtcgcttatggtcagaggagcagcctgctcaccctctccagg

SEQ ID NO: 577161 - DNA, 75 bp, Homo sapiens
cctccgagtagccaccccgcagaaggcgtgcgattcttccagcagatatgaagctaatgatggaaactggccaac

SEQ ID NO: 577162 - DNA, 100 bp, Homo sapiens
agtgagaagcccaactaaagccccacatttgcagctcattgaaggaaagtatcaccttttgccatgatagcatttctttcattggacagttccttacaag

SEQ ID NO: 577163 - DNA, 98 bp, Homo sapiens
tttaagcctatactttctaccagaagcttgaagggtttggttaagggcagaggagagagaccagtgaaggttgggaggaggcggccaaaaggagacag

SEQ ID NO: 577164 - DNA, 50 bp, Homo sapiens
ccaaaacgtgctgtagcaagagaggaacttaaaaggagtctagaaaatcc

SEQ ID NO: 577165 - DNA, 50 bp, Homo sapiens
cccaggtggagtacacggcagactgtataaaggaccattgttagaagagc

SEQ ID NO: 577166 - DNA, 100 bp, Homo sapiens
gatcagccacaaatgtacccccagtacacttactactatcctcattatctccaaaccaaggttcgagaacttgtcttggacaattgcaaatcaaatgatg

SEQ ID NO: 577167 - DNA, 100 bp, Homo sapiens
cgcggggccatgtgcaggaccctaacgacaggcgcctccggcccatttacgatatgatgcttcctggtgtgtttagtggttggtgccattccaattttct

SEQ ID NO: 577168 - DNA, 100 bp, Homo sapiens
gggatatccacagttcgatcaagacagtgggagtagctcaccgttacccaagtatgcttcatctcccaaaccaaacaacagctacatgttcaaacgggag

SEQ ID NO: 577169 - DNA, 51 bp, Homo sapiens
tctggagctggccaacgtgcaggagggtatgttagagcccaccaaggaacc

SEQ ID NO: 577170 - DNA, 100 bp, Homo sapiens
ctttgaggtgtggaatgcgatgactcgctctggcaggctgccctgagcacgctcaaccccaaccccacggacagctgtcccctctacctgaactacgcca

SEQ ID NO: 577171 - DNA, 100 bp, Homo sapiens
ccagatccatttacactttacagtgcagcagtagcgggcatttacagagtagctgggaagaacatggcccctttggaagcgctggtatggggcgttggac

SEQ ID NO: 577172 - DNA, 100 bp, Homo sapiens
cactgttaactgagccagcatagggaggctcagcaggctttgtctgcccatgccgattgacgttgtttacacctgggtgaatggcacagatcttgaacta

SEQ ID NO: 577173 - DNA, 89 bp, Homo sapiens
tgcctaggcattttgctgtctcctcctaatacgaactgtcaagtaatccacctctggctaccatccttattcctcctcatgctcggatt

SEQ ID NO: 577174 - DNA, 100 bp, Homo sapiens
cagcgactagggctcgggcgccggcgagatgcctttgttcaccgccaaccccttcgagcaagacgtgggaagaagccatggatttaataaatagagaaac

SEQ ID NO: 577175 - DNA, 80 bp, Homo sapiens
attcagagcctttccgtcagccggtagatctccttgaatatccaggctggggagcagaataccaccgccaggatgttact

SEQ ID NO: 577176 - DNA, 100 bp, Homo sapiens
tttctggatgaacctgggcggatgtcagaccagagaagagcacagaatgtaccagagaggttttgtggtctttgcaacccttgtggtcattgtggccttg

SEQ ID NO: 577177 - DNA, 75 bp, Homo sapiens
cagcagaagctgagagtaaactgaaacaagtatatatcccaacctagtaatttcatctgtgccaaagcctccaga

SEQ ID NO: 577178 - DNA, 75 bp, Homo sapiens
gggaggagaccctcgagctgggcctggagcctggctacagcatgctggccatagggattggaaccctgatctacg

SEQ ID NO: 577179 - DNA, 75 bp, Homo sapiens
gggctctgccgcttctctccctctccgggatcgactacaagaccaccaccatcctgctggacggccggcgcgtga

SEQ ID NO: 577180 - DNA, 88 bp, Homo sapiens
ccgagaagttattcagagtgatagtttgtggcttgtagaattctatgctccatgggtcagtatagaccttctgatttgctgtgccctg

SEQ ID NO: 577181 - DNA, 83 bp, Homo sapiens
ctatggcgtccgcctcgacccaaccggcggccttgagcgctgagcaagcaaagggtgaggaagaggatggagatgaagatgag

SEQ ID NO: 577182 - DNA, 100 bp, Homo sapiens
gccaggagggctactatggcaacgccgtccacggatcctgcagggcctgcccatgtcctcacactaacaggcagcctgcttctgcaaagtggtacgatcg

SEQ ID NO: 577183 - DNA, 98 bp, Homo sapiens
ctcaccgctgtcacctgcacggtgtggctggcggcctacggactcttcaccctctgcgagggaggaggtacaggagaactgtgtgcggtggcgaaaga

SEQ ID NO: 577184 - DNA, 100 bp, Homo sapiens
tgatgatggacagaaaagaaagacagaaaaatagagcctctattaatggacacttctataaccatgaagacccagatgatgtggtaccagttggccaaag

SEQ ID NO: 577185 - DNA, 118 bp, Homo sapiens
ggaatacttccctcgggtgaaactgaagttaatttttttttttttccaaacacaaggtatcagcagatgttgcacacaaacttggtataccttgctacaatagcagattctaatcaaa

SEQ ID NO: 577186 - DNA, 76 bp, Homo sapiens
attttgatgtggatgatgccaaagttttattagtaaaagatgatgaatgcgagtcagatgcagaaaatgagcaaaa

SEQ ID NO: 577187 - DNA, 83 bp, Homo sapiens
ggaggctccatgttgtcccctcagcgagtggcagcagctgcctcaagaggagcaggttgtgaccgagattcccgacgagagag

SEQ ID NO: 577188 - DNA, 100 bp, Homo sapiens
caaattcttctttaagtccatggaccaggacttcggctggtgaagctgtgcagtggcatggtggaagccggtaaggcctacgtcagcaccagcaggcttt

SEQ ID NO: 577189 - DNA, 83 bp, Homo sapiens
ggccctgggagctggaggaaccgcggtggacacccacatccatgcctcgtcctgcatgaaccagaagcatctgctgcgcttca

SEQ ID NO: 577190 - DNA, 96 bp, Homo sapiens
aaatttcggaccaggaccaggaagtaactttagaggaggatctggacaacttgcctttgatgattttcaagagagttgtgctatgatgtggcaaaa

SEQ ID NO: 577191 - DNA, 83 bp, Homo sapiens
aggcagcccccaaatcccggcccagtgagtgacctgcaggaagaaggcaagaatgccatcaactcaccgatgtcccccgccct

SEQ ID NO: 577192 - DNA, 74 bp, Homo sapiens
cggagctgtggtcgctgctgtgatgtgtaggaggaagagttcaggagaagaaggaagttgtggaagaggcagaa

SEQ ID NO: 577193 - DNA, 100 bp, Homo sapiens
catgtgagcactgggggtggtgccagtttggagctcctggaagtaatgtgtgtggctggtattggacttgttgtattattcttcagttggatgctctcta

SEQ ID NO: 577194 - DNA, 82 bp, Homo sapiens
tcagttggaagcagccgatccagcctgcggagcctgtggggcagacacgatgaggcgagtggtacgacagagcaagtttcgg

SEQ ID NO: 577195 - DNA, 108 bp, Homo sapiens
caacatggcggagctgacggtggaggttcgcggctctaacggggctttctacaaggtagtagattccatggatgcattagataaagttgtccaggaaagagaagatgc

SEQ ID NO: 577196 - DNA, 100 bp, Homo sapiens
aattctggaccaaaaggccagaaaggggaaaaggggagtggaaacacattaatggagcccacagtgaccatctccccatccaggacagaggccctcaacc

SEQ ID NO: 577197 - DNA, 75 bp, Homo sapiens
ccggagctggtgaggacagcctgccagagtctgctacctctacccagatggaaagacccacaacccagacctgac

SEQ ID NO: 577198 - DNA, 94 bp, Homo sapiens
ccgcgaggagccgccgcgcgcccgcgccctccgcgcgacgccaggtgaaatgacaatggatgctctgttggctcgattgaaacttctgaatcca

SEQ ID NO: 577199 - DNA, 98 bp, Homo sapiens
ggggcgggtctgagtggtaccccggaggagaccctttgaaggtcccttgtggggactggaaagaggacgccgcggcccatggagcccgccggcccggc

SEQ ID NO: 577200 - DNA, 140 bp, Homo sapiens
aggaggacttcctccgcgccaccaccctctacaacacggaagtgctgttgtcacacctcagttacctcagggaaagtgctggagaatctggtaaaagcaccattgtgaagcagatgaggatcctgcatgttaatgggttt

SEQ ID NO: 577201 - DNA, 82 bp, Homo sapiens
aaagatccaaaacaagtggctgcggccgtcgcccaggagtcatcggacgccagaatctgggttgaaaggaggagcaggaggt

SEQ ID NO: 577202 - DNA, 75 bp, Homo sapiens
gaggtgctgggacagccatggtttcagacgattcacagttaatagaaggatctctatagttggatttggcttgta

SEQ ID NO: 577203 - DNA, 75 bp, Homo sapiens
actcagcacgagccattttgcaggatacttatccgctttttccccttggagtcctggcagattggcaagataggg

SEQ ID NO: 577204 - DNA, 75 bp, Homo sapiens
ctaaagcagcgtgcgttcagccctgggggctttgttcgcgggggtcacagctctcatggctgcagctagcgtgac

SEQ ID NO: 577205 - DNA, 100 bp, Homo sapiens
gtggaatcggagctgttgtattacctgggtgccggtggtggtgtgcacattgagccccggtatagacagttcccccagctgaccagatcccaggtgttcc

SEQ ID NO: 577206 - DNA, 75 bp, Homo sapiens
tatacttcgcaaaactcagcaattttttgatgaggcagagtggcatgattccgactggatactctcagtgccagc

SEQ ID NO: 577207 - DNA, 100 bp, Homo sapiens
tttctttggaagcctaatggatgtcaccgaggaggtgtgggacaagaatctacctgttactcgtattttggacaatcttatggagatgaagtcaaacccc

SEQ ID NO: 577208 - DNA, 100 bp, Homo sapiens
ccgagaaccgtcagtttgagccagatgaaaagatttaggtcatgctcaaatggtggttgatgagctcttttcctctcactctgatttggattctgattct

SEQ ID NO: 577209 - DNA, 100 bp, Homo sapiens
cggaatggttcctcttgctctttggcccgtggctccttaggaaggtatgataagtattatcagcaacataatagttctgggcatcttcattaagtacaag

SEQ ID NO: 577210 - DNA, 75 bp, Homo sapiens
tgaccctcgtagtggctgcggcgcgggccgagaaggaaggatgtcacatgtacttcagtttgaggataaaagcag

SEQ ID NO: 577211 - DNA, 75 bp, Homo sapiens
gaacatttgacatgtgttaatcatcagctgcaggtctgttggagtttgctggaagtccactccagaccctgtttg

SEQ ID NO: 577212 - DNA, 102 bp, Homo sapiens
gccggaatttgaaaagtgcctgtgatgacgcacttccaaatgggttagacgttacctttgaagtaactgaattgaggagattaacgggcagttataacacca

SEQ ID NO: 577213 - DNA, 100 bp, Homo sapiens
gagatgctcagaatgcattgactggggggaaaagcgcaatactattgcttccattgctgctggtgtactagctgaccccgcactacatctacccaccagc

SEQ ID NO: 577214 - DNA, 75 bp, Homo sapiens
aagaaggaagtgaaccctcagaacttataaagccttctttgaatcctggggggagccagtcatctgatgtggtgc

SEQ ID NO: 577215 - DNA, 100 bp, Homo sapiens
caaaaagagtaacggaaatccttgggtttgaagatgatgttgtgattgagtttatattcaaccagctggaagtgaagagtgttgcggagataggaacatg

SEQ ID NO: 577216 - DNA, 49 bp, Homo sapiens
attccaagtaactcttatttggaatatattaaaggaatctgtgaacctg

SEQ ID NO: 577217 - DNA, 82 bp, Homo sapiens
aaggagctaaagcagcgtgcgttcagccctggggacatttcattaccatccagaagtgtctcccactgaaggcatccgtggt

SEQ ID NO: 577218 - DNA, 100 bp, Homo sapiens
cttcaaagctgaactgaatgagtttcttactcgggagctggctgaagatggctactctggagttgagggcctcatctttgtggtggacagtaatgaccgg

SEQ ID NO: 577219 - DNA, 100 bp, Homo sapiens
ttttgaccactatgatttctccagggccaaaatcgcctgcaatctggcctggctggtggccaaagcctttgggacaggctttcaaggatatgctgtattc

SEQ ID NO: 577220 - DNA, 75 bp, Homo sapiens
ggagtcggaggcgatatttctaggggtgtacttgttggggtcagggtcgcaatggaagaagagatcgccgcgctg

SEQ ID NO: 577221 - DNA, 87 bp, Homo sapiens
cggaccggcgtccccggcgcgaagaggctggactcggattcgttgcctgagcgtctgttcctcacacaccccgcccaaggacgtgcc

SEQ ID NO: 577222 - DNA, 83 bp, Homo sapiens
cagagacatcccgatctggggaaggtctcagcttcttggaagtgaaagaccagctgctgctcatgtaccttatggatttgacc

SEQ ID NO: 577223 - DNA, 75 bp, Homo sapiens
ccctgagccctgctgacatcaattacgaggagactctcagcaccctcaggagagaagatggggctctcaatcttt

SEQ ID NO: 577224 - DNA, 51 bp, Homo sapiens
ggctttgagcatccgtcagaagaagggagttaagccccaagccaaggcagc

SEQ ID NO: 577225 - DNA, 100 bp, Homo sapiens
gcacagcaaacccgccgggatcaaagtgtaccagtcggcagcatgggatcaacggccaccccgggaagtccacgcgcctggcgggcttgtggaagctgga

SEQ ID NO: 577226 - DNA, 82 bp, Homo sapiens
cgccctggggccggcgatgtgccaccgaggctgaggatgatggtagattgccagtgcctccggagccagcgtggtggccata

SEQ ID NO: 577227 - DNA, 115 bp, Homo sapiens
cccggctgccctgcagtcgcctccaacacccgctgctgcccgcccgctgcctgcctgcctggcatctctctctcccggtccacgctgcttttatgagctgtaacactcaccgcga

SEQ ID NO: 577228 - DNA, 51 bp, Homo sapiens
aggtcttcgctgtgctccggagagatgtatttataacagcaatgatgtagc

SEQ ID NO: 577229 - DNA, 75 bp, Homo sapiens
ctaatgagctctccagaaaattgatgcagaggatgtccggcttccagatcaacctcaacccgctcaaggagccac

SEQ ID NO: 577230 - DNA, 100 bp, Homo sapiens
agaagcggtccgtcgtgtcctttgataaggtcaaggagcctcggaagtcaagagactcagagtcccataggtcatttgaaccaattctccgcctccttcc

SEQ ID NO: 577231 - DNA, 83 bp, Homo sapiens
caggagctgaagccctttgtgactgcaatctcgagagttacactgttagaccttatgatagccaagataacgagtgatgagcc

SEQ ID NO: 577232 - DNA, 96 bp, Homo sapiens
caacaggttcccctctccatccccaccaaccgcctcacccagcgcatcatccccagaagggagaattccacaagttggctgatgccaagatatttt

SEQ ID NO: 577233 - DNA, 101 bp, Homo sapiens
gctgcagctcgggacttcggcctgacccagcccccatggcttcagaagagtgaagctgtggtctaccaatctagacaactcagtggcaagcattgaggcaa

SEQ ID NO: 577234 - DNA, 71 bp, Homo sapiens
ctcctctcaagaaatctcaagatattaaagttactgctgttaaaaaggagtcgatagcagcagttggtgac

SEQ ID NO: 577235 - DNA, 100 bp, Homo sapiens
ctgctgcaacctacggggtgtacttgggaacgaggggtgaagcggcccaggtgaggcaggtagcatctaaaggaactggtttaaatcctaatgccaaagt

SEQ ID NO: 577236 - DNA, 50 bp, Homo sapiens
cacggacattcagcaagattttgacagagcgggatgccaccagcttgtcc

SEQ ID NO: 577237 - DNA, 100 bp, Homo sapiens
ccaggatttcttgcgtgcagtttgtgaagaaaaaattaggttggatttggtctagggagtcccagaaagaagtagaaaaagagagagaagcctaccgtcg

SEQ ID NO: 577238 - DNA, 100 bp, Homo sapiens
gcctggaccctgctcagagggacttgtacagggatgtgatgttggagaactacagcaacctgatctcattggattcccaacctgctgagcatccgcacac

SEQ ID NO: 577239 - DNA, 100 bp, Homo sapiens
agcgggcggagctgtgcgagagcctcctcacttgggttactataacaacagtaccaaggtggctgtgaaaaccctgaagccaggaactatgtctgtgcaa

SEQ ID NO: 577240 - DNA, 71 bp, Homo sapiens
cttcgatgccatcctgcagacagctgtgtgcacgattgactggggcgactttggggtagaggcagtgtctg

SEQ ID NO: 577241 - DNA, 101 bp, Homo sapiens
gaagttggagaagtatccaatagggatattgtagaaactgtctttaacctggtttttcgttggaatatacgttgcacatttatggcgattctgagtgtgag

SEQ ID NO: 577242 - DNA, 75 bp, Homo sapiens
gacgtcgctgaggggcttgcctgaagcgaggggaacttagtgatttggcccgtgaccctccagcacaatgttctg

SEQ ID NO: 577243 - DNA, 74 bp, Homo sapiens
cggcgcagtacaccaacgcggtgcgcgaccgggagctggacctccgggtgtgctggaattgatgttcgtctgtg

SEQ ID NO: 577244 - DNA, 75 bp, Homo sapiens
aagatggggttgtcctctttaagaagatggtaattgcgctgcagaacaccaccacgaccagccgctacctgcgag

SEQ ID NO: 577245 - DNA, 80 bp, Homo sapiens
gacctactgcagccacgcgggcgagcggctgtgtggatgtcggcgaagccgcgggcgagactgattcttgctattccaaa

SEQ ID NO: 577246 - DNA, 75 bp, Homo sapiens
ccgaaggctccgctcacgcccggaacattctagtatgccagtagaaaaaaatatcactttagaaaggccttctaa

SEQ ID NO: 577247 - DNA, 75 bp, Homo sapiens
aagtaaaacaagtttttcaaagcctaccaaaatctgtcccatgatgtgaaaaatggaggtgaacttactcatccc

SEQ ID NO: 577248 - DNA, 90 bp, Homo sapiens
atgctgttgtcatttttctcagcatctttgttattatagtaacgtgtttgatggagttccatctggaatatgacaaattagaagaacggc

SEQ ID NO: 577249 - DNA, 124 bp, Homo sapiens
cgccggctttacgttcacctcggtgtctgcagcaccctccgcttcctctcctaggcgacgagacccagtggctagtttgtagaagactatgaacctaccaaagctgacagttatagaaagaaag

SEQ ID NO: 577250 - DNA, 51 bp, Homo sapiens
cataaaatactcattcccctctcagttttaaccgtgattggagataccaca

SEQ ID NO: 577251 - DNA, 75 bp, Homo sapiens
aagtgcgaccttaatgggaggccccgggaggccgaggttcggcctctcctcctcccagttctcctctggatcgca

SEQ ID NO: 577252 - DNA, 85 bp, Homo sapiens
attaattgctatcaatgcgaatgatcctgaagcctcaaagtttcatgggaagtatggccacggctgcattaccggaaagcgggtc

SEQ ID NO: 577253 - DNA, 75 bp, Homo sapiens
acaaatctgaagatggtgtcaaagagaaattctggtggccccagaagaatttaaaaccagcattggccgtgtgaa

SEQ ID NO: 577254 - DNA, 73 bp, Homo sapiens
acatctatgccatcacagacaccgcctacaggagtatgatgcaaggtgaaatgacaatggatgctctgttggc

SEQ ID NO: 577255 - DNA, 75 bp, Homo sapiens
agaagatgcctcgaactaaacaaattcatcccagaaatctaagagctggtgctcaagaccgaatcggctgggctt

SEQ ID NO: 577256 - DNA, 100 bp, Homo sapiens
agagtgggcggcctgaagagctggtgtcctgcgcagactgtggacgctctgaaatacaggtatcaggatgaagatacacctcctcaagagcatatttccc

SEQ ID NO: 577257 - DNA, 83 bp, Homo sapiens
tctattctgctgattcacaattatggagactgtatgaatactttgctggtggcttacactcatcttttgatgatctttgtgga

SEQ ID NO: 577258 - DNA, 82 bp, Homo sapiens
cgaggagtagtcgctggagtccgcgcctccctgggtcttgagtcaccacgtccgaatataattcttgggttagtaatctgcc

SEQ ID NO: 577259 - DNA, 50 bp, Homo sapiens
agggttgcttttgaatgtgcctgagagcgccgccctgtgctgggctgccg

SEQ ID NO: 577260 - DNA, 82 bp, Homo sapiens
cttgaacagggctgacaacatttttccttttccgaaaatggtgtgaatggaacattaacttcaaatgtagcagactctcccc

SEQ ID NO: 577261 - DNA, 75 bp, Homo sapiens
cttccgggccgcggcctccgagcgcgcgggatttgcaggtgtggtctggtgttcctgcagagatgccaggcacca

SEQ ID NO: 577262 - DNA, 75 bp, Homo sapiens
cagaacaaagcaacggaaagatgaacggtagcaccttaaataaagtctcttcagcactggccaataccaaagata

SEQ ID NO: 577263 - DNA, 100 bp, Homo sapiens
gcagcggctgcgccgaggcgcccgactcagacgccctgctggcggacttggagtctaccacctcccacatctccaaacggcctgtgttcttgtcggagga

SEQ ID NO: 577264 - DNA, 100 bp, Homo sapiens
caggatggagactacgagttttcttattgccagcagttttgaagatgactcccgtgtagcctcaccgttagaccagaacggaagcttcaatgttgttatt

SEQ ID NO: 577265 - DNA, 82 bp, Homo sapiens
cagcgggagctggacggcgagcgcgagcggcgcgagaaaccgaggtgctcggtggagtcatggcagtgccctttgtggaaga

SEQ ID NO: 577266 - DNA, 97 bp, Homo sapiens
ggaacaaactgaggagatcgcttgagacgaacggtactctgtggatatccccttggacaaaactgtcgtcaataaggatgtcttcagagatcctgct

SEQ ID NO: 577267 - DNA, 51 bp, Homo sapiens
gcctcctgaggagctgggactacaggtgaccctgacgagtttggatatacc

SEQ ID NO: 577268 - DNA, 83 bp, Homo sapiens
gcaaaggaacagcccggcttattgaacacatcagaatccacacagcgtccagaggaccagaggttaatttattctgggaagct

SEQ ID NO: 577269 - DNA, 100 bp, Homo sapiens
ctggcagcctggccctgccgctgcctcaggaggcgggaggcatgagtgagctacagtgggaacaggctcaggctccctggcattgggcagtgttacagtg

SEQ ID NO: 577270 - DNA, 90 bp, Homo sapiens
aacatacccgtactacaggatgatggctttctcttcctctgggtcacaggcagggattttgtcagggagaaaaagtatcggacagaagct

SEQ ID NO: 577271 - DNA, 100 bp, Homo sapiens
cagcatggctttttacagcagcccggaaattctgaggagtcaactactggattttctgtctggcaaacagtatgcagtaggtgatgaaactgatctttct

SEQ ID NO: 577272 - DNA, 90 bp, Homo sapiens
tgtatctcaaaatgtggaagggacccaggctgattcaggatttgttgagaaagagataagaaaagctaacattccgattatggacaccgg

SEQ ID NO: 577273 - DNA, 97 bp, Homo sapiens
agaccgccaacctggatggagagaccaacctgaagcggcggcaggtggtccgcggcttctcggagctttgttctctcgaggcctgaagaagtcatcc

SEQ ID NO: 577274 - DNA, 90 bp, Homo sapiens
gaagagcccccaggagaaaagccagtattgcttgtgctcctaacaacctgtctcttgaccggaaaggagaaacagtctaaactgcatgaa

SEQ ID NO: 577275 - DNA, 96 bp, Homo sapiens
cgaacattgatttgaggaggatgcttcgcagtttacgaaatatggatcagaaactttcgaagttggtagaagagctcacaacttcaggagaacccc

SEQ ID NO: 577276 - DNA, 90 bp, Homo sapiens
cttttctctctctcctctggcaggatgaggcgtgcaggcctgggaacgggattttccaacagaaaccattaaatttggtcctgaacgcat

SEQ ID NO: 577277 - DNA, 75 bp, Homo sapiens
tctccagttctccacgctctgtctcctcaacctctacctggcggagccctttctaaggcacaaaatgatgtgatg

SEQ ID NO: 577278 - DNA, 100 bp, Homo sapiens
aggacaagaccatcgagctcatgtcaagtccatcatctccagaaccagctagtcttcctgcagaagatattagtgcaaactccaatggcccaaaacccac

SEQ ID NO: 577279 - DNA, 74 bp, Homo sapiens
tcagctaaccaatcaaccaccttgtctggacagcagtcagcatatcatcacttaccgggactacctgcccctgg

SEQ ID NO: 577280 - DNA, 75 bp, Homo sapiens
tggtgtccacgtgatcattggggggcacgattctccctctcctagaggcgcccctgcagatcaagtcagtagtgg

SEQ ID NO: 577281 - DNA, 82 bp, Homo sapiens
ggacggcgctgcggtacatccaggtgtcgtgaaaactacccctaaaagccaaaatgggaaaggaaaagactcatatcaacat

SEQ ID NO: 577282 - DNA, 76 bp, Homo sapiens
ctctcggttgcacaataaaccgacgtttagccaggaaagatgaatgggagggctgattttcgagagccgaatgcag

SEQ ID NO: 577283 - DNA, 75 bp, Homo sapiens
ccaccacgcactgggtcgtcacggaggacgggaaaatccagcagcaggagtgtgaggaagaggctgtctgtgtca

SEQ ID NO: 577284 - DNA, 50 bp, Homo sapiens
cgtggtgacattgtatcattggtaaaacgttgtgtgacgtgatcctcatg

SEQ ID NO: 577285 - DNA, 83 bp, Homo sapiens
gcttaaggtcttcagcggggcgctccaggaggcactcacaggttttaaaatcaaagatgggaaaatcggagaaaattgccctt

SEQ ID NO: 577286 - DNA, 75 bp, Homo sapiens
aggaggtggcggcggcgggaagataccacaccaccccagagccaagtgcaccgaggccttggccaagcagagcct

SEQ ID NO: 577287 - DNA, 75 bp, Homo sapiens
gttttaactacagacccagtctctgccaagtttcagactgaaattcaaacagtgaataaacagttcccatgtgag

SEQ ID NO: 577288 - DNA, 100 bp, Homo sapiens
acggaccattaatggacaaaaacatgagtcaatatgtattgtggcattcaaatcctagcactctgggagagaatgaagagcttcgaaacttgtctttgtc

SEQ ID NO: 577289 - DNA, 50 bp, Homo sapiens
cctgaagagggaagacacgcggaaacagtgcaaaatggcaactcttaagg

SEQ ID NO: 577290 - DNA, 100 bp, Homo sapiens
gccgatccgccgcccgtccacacccgccgccaggtatggatcctggcgggagccagtcaacccctattatgtcaatgccggctatgccctggccccagcc

SEQ ID NO: 577291 - DNA, 75 bp, Homo sapiens
tgctccaaagtcatcgtccggtttctcactgtgatgatgaagcatggggcaagattcttgccaagagaattaatg

SEQ ID NO: 577292 - DNA, 100 bp, Homo sapiens
agactgggcggccggccgacccttcctgtcgctgacggcgactgcgggaggccagaattaaatgtgagggagtctgacgtaagagtttgtgatgagtcat

SEQ ID NO: 577293 - DNA, 100 bp, Homo sapiens
ctgcactaacgcaggatccggctgccgaaggtcctcgccagtggtagtcgctcttctaaaacttttaaaccaaagaagaacattccagagggttctcacc

SEQ ID NO: 577294 - DNA, 51 bp, Homo sapiens
gccagattacattcaaccattaatttaagctcagaattctgcaaatgcaga

SEQ ID NO: 577295 - DNA, 100 bp, Homo sapiens
tttggaaatgagaaattaacctttgggactggaacaagactcaccatcatacccagtgctggagaatctggtaaaagcaccattgtgaagcagatgagga

SEQ ID NO: 577296 - DNA, 95 bp, Homo sapiens
gcagcatctacaaccctgaagtgcttgatatcacagaggaaactctgcattctcgcttcctggagaaaactttagaaactgttcctttggagagg

SEQ ID NO: 577297 - DNA, 100 bp, Homo sapiens
taccctcgctcctcgatcgaggacgacttcaactatggcagcagcgtggcctccgccaccgtgcacatccgaatggatatttggagttcttacaacatgg

SEQ ID NO: 577298 - DNA, 100 bp, Homo sapiens
gaggaccggagcggaaaaccttctgaaaaattctgctgaccccacgtagaagacaacgactcagtaatgaatctactacccctggaggaataagtgaata

SEQ ID NO: 577299 - DNA, 74 bp, Homo sapiens
ttttgaccagaaaaccgacaaccttcccagaaagtccaagctcgtgagttttgcggcctccaggtggtggatcc

SEQ ID NO: 577300 - DNA, 50 bp, Homo sapiens
ccgcaacccatgggtggccagggattctgaagtcacctgcaccggtgccc

SEQ ID NO: 577301 - DNA, 98 bp, Homo sapiens
ttccaatgctgatgaagaggacattcgcaatgccatcatggccatccgccggaaccgcgtggccctgaagggcgtccgagctgggccacagcctgaac

SEQ ID NO: 577302 - DNA, 75 bp, Homo sapiens
gccatttttaacaaaccctaatacaggagatatgtatactccaggaatctccacacaaatgtcccacatgtggaa

SEQ ID NO: 577303 - DNA, 98 bp, Homo sapiens
tggtgccgacaagaaagccgaggctggggctgggtcagcaaccgaattccagtttttgactatattgtggagtatgactatgatgctgtacatgatga

SEQ ID NO: 577304 - DNA, 95 bp, Homo sapiens
gaaattaaagatgcatgctgatggcgataagtcattaccacagaagctgctaacctgtgccaaacctccacggctgctacgacacctgtgactct

SEQ ID NO: 577305 - DNA, 111 bp, Homo sapiens
gtcggcggctcagttgtccatgaccctgaaggtccaggagtacccgaccctcaaggagtccaaaactacttacctggaagaccttccaccaccccctgagtatgaattggc

SEQ ID NO: 577306 - DNA, 75 bp, Homo sapiens
tgatcccaagacagacttcagaggcatgggcatacttgggttaatcaatcttgtatttccacaagacggcaccct

SEQ ID NO: 577307 - DNA, 95 bp, Homo sapiens
caagcaagcacgtgcaagaggcgccaaggttctcctggtgcggttgaagaagaatgaccaaatttacgccatgaaagtggtgaagaaagagctgg

SEQ ID NO: 577308 - DNA, 100 bp, Homo sapiens
caggattctgacagggatgttgcgaagctttgaagattatgaaacagatgaacctgcctctccctctgaatttggaaacaaaagcaataaaatattaagt

SEQ ID NO: 577309 - DNA, 74 bp, Homo sapiens
cctggatgaagccaccagcgctttggatgccgagagcgagtatctgattttgcaagaacgaggctcaaggatgt

SEQ ID NO: 577310 - DNA, 100 bp, Homo sapiens
gcaaaaccatacagggctatgatgctattgtggttgaacaatggacagtcctggaagtaggtgagctcgtgaaacaatatgaagaggagaaaatagcctt

SEQ ID NO: 577311 - DNA, 51 bp, Homo sapiens
catgccagagacttcacagtttctgctctgagtgttctgccagttctggat

SEQ ID NO: 577312 - DNA, 82 bp, Homo sapiens
gagcttggaggacgatgatgttctgcattaccttctacaattggtccaggtgctgctgcatgaggaggcgggtgattctggc

SEQ ID NO: 577313 - DNA, 88 bp, Homo sapiens
gggactagtggaccagctggtgaaggcagacagcgagtggcgacgataaatgttgctgaagtgctgctgaaagggccagagatgcaag

SEQ ID NO: 577314 - DNA, 97 bp, Homo sapiens
ggcaggttcccgcccggaagaagcgaccaaagcgcctgaggaccggcaacatggtgcggtcggggaataagtaccacttccgctgtcacggtaaagt

SEQ ID NO: 577315 - DNA, 82 bp, Homo sapiens
tcccgagcagcgtcatgtaccccttgtgctggaattgatgttcgtctgtgtgatgttggtgaggccatccaagaagttatgg

SEQ ID NO: 577316 - DNA, 75 bp, Homo sapiens
cggatgcaggacagacccctcaggtcagtgtgagaagaagattgtttctgagcttgagaagcttctggaggattg

SEQ ID NO: 577317 - DNA, 91 bp, Homo sapiens
ctgtgctggccgccatcctgcagctgggcaacatctgcttctcctcctcagagagacgagttgtactgctgtcacaggaaatggacgctgg

SEQ ID NO: 577318 - DNA, 100 bp, Homo sapiens
cgcgcccgccgcgccgggagcagcaccgcggggccagatccagacatttaatgtggatgcaccatgccagaccgtggaagatttaacgaatggggttgtg

SEQ ID NO: 577319 - DNA, 83 bp, Homo sapiens
cttcgcgtcccctgcaccatgagctggggcaccgagctctgggagtgtggccatctggggccgtgtggtatttgccactcagg

SEQ ID NO: 577320 - DNA, 96 bp, Homo sapiens
ctttgccctcagcatctcccttcatgtctgggtcatgaaaccaaagcccaaaccccggccatccatcacaaaggcaacctgggagagtaactattt

SEQ ID NO: 577321 - DNA, 51 bp, Homo sapiens
tgcagatgacttccgaaccaagtgtgggatgtgattggccgcagcctgatt

SEQ ID NO: 577322 - DNA, 100 bp, Homo sapiens
aaaacacgaggtgcagaagatgaccttaacacagtagcagctggaaccatgacaggcatgttgtataaatgtacaggtttctaagcatgaattgaggaac

SEQ ID NO: 577323 - DNA, 100 bp, Homo sapiens
tcggagtgtactccgcctgcaaggtgcgcttcccttcccacttcagctctgacttgaaggacctgctgcggaacctcctgcaggtagatctcaccaagcg

SEQ ID NO: 577324 - DNA, 100 bp, Homo sapiens
ataatgtaaacgtcaatgcacaaaatggatttggaaggactgcgctgcaggaaggtgggagtcaatcattttgacaagtctcctgaaaggaacagctagc

SEQ ID NO: 577325 - DNA, 100 bp, Homo sapiens
cccggagctggaatacattcccagaaagaggggcaagaaccccatgaaagctgtgggactggcctgattccagactccatcatttctcgtggtgttcagg

SEQ ID NO: 577326 - DNA, 123 bp, Homo sapiens
cctcgttgcgaagggaccagcgcagccaatcaggcgtcgttgctacctgaggcatacacggaatacctgaggagcatccactatatctcccaggtgttactagaagaagtggaaaccactaaa

SEQ ID NO: 577327 - DNA, 90 bp, Homo sapiens
tatagcaatctggttttcttggtttcagatagtacttctgagtttttgatggctgaaaacttagtgaaagcatcagtgccggaggatgag

SEQ ID NO: 577328 - DNA, 75 bp, Homo sapiens
gtcagtgaggcggaaattgtggtgtacttgttacgaatgtaaagttatcgcagaaaaatctcatcaggaatgaag

SEQ ID NO: 577329 - DNA, 75 bp, Homo sapiens
cgcagtggtcgcttcttctccttggaaaaattccggaactgttggcttcgggcatggttgataacatgaccaaac

SEQ ID NO: 577330 - DNA, 50 bp, Homo sapiens
cctgcctgcaaactcatacgcctgggccatggacctggctcaggcaggca

SEQ ID NO: 577331 - DNA, 112 bp, Homo sapiens
tgtgcgcgccgctgcgcaagtgccgcccgggcttcggcgtggccagaccagtcccaagaggaattacaagagtactgcagacatcatgaaatcacctatgtggcccttgtct

SEQ ID NO: 577332 - DNA, 101 bp, Homo sapiens
ctgttggaccttcgagcctagctgctcgcacaggactcggccacctgcccttcctgcaccgactggccagggacagaagatgagcctgtcggtcctggagg

SEQ ID NO: 577333 - DNA, 78 bp, Homo sapiens
gttggagaactacagaaacctcgtctccctggttattttaccaagaaaatggtttgcacgactttgaacatatactat

SEQ ID NO: 577334 - DNA, 96 bp, Homo sapiens
ccgagttgccgccggagaggagtggcctcgcccgcttggtgtcatggagaaactccagctgggcccagagattctgcagcgggaaaatccaaggct

SEQ ID NO: 577335 - DNA, 51 bp, Homo sapiens
aaccagctcttcttcctgggctttgcacagtagagacagggattcaccatg

SEQ ID NO: 577336 - DNA, 97 bp, Homo sapiens
tgtggcaaatgtgactgccatggagtgaagggacaaaaggcacttttaaatcaacttagagctgtgtttgatcaaattattgaacttcagaatgctc

SEQ ID NO: 577337 - DNA, 51 bp, Homo sapiens
ccacaggatgctgtagtagcaaatcaggctgtggatgagatgaacggaaag

SEQ ID NO: 577338 - DNA, 100 bp, Homo sapiens
ctgcagtggcagtgctttctcttctgctcacggggacccgctcaggctggaggccagccagatattcatgatcagaacagtaagaagcccgtcatggtct

SEQ ID NO: 577339 - DNA, 88 bp, Homo sapiens
tcttcccgcgtccgccgattcctcctccttggtcgccgcgtccttggctggcgtatccggaagaccacggccagccaggtgtacgaga

SEQ ID NO: 577340 - DNA, 78 bp, Homo sapiens
tttcttgagggctccccagccatgcttcctgtacagcctgcaaaactcaaagaatggccgagtggattctgaggaccg

SEQ ID NO: 577341 - DNA, 50 bp, Homo sapiens
gggagtgcatcaaaggtgtgaacacagtagagacggggtttcaccgtgtt

SEQ ID NO: 577342 - DNA, 51 bp, Homo sapiens
ttcagtgctgatgaattcttcataccccggacagtctcgctctgttgccca

SEQ ID NO: 577343 - DNA, 51 bp, Homo sapiens
caggactccaaaatggcgtcagttgatccgctttatcctcatccagaaccg

SEQ ID NO: 577344 - DNA, 83 bp, Homo sapiens
ggccagggatgccggcgacggttgtgtcgcaggttatggaaacaaaggacatgctttacatcgtcactgaatttgctaaaaat

SEQ ID NO: 577345 - DNA, 90 bp, Homo sapiens
cggagccgaaacaccggtaggagcggggaggttgaaaggattgttgacaaaaggaaaaataaaaaagggaagacagagtatttggttcgg

SEQ ID NO: 577346 - DNA, 100 bp, Homo sapiens
ctccaggacccaagggcgccaaaggagaagtgggcccccccggaccaccaggtctgtttggcaccccactgctgaccagcctcccagagaaagtgtgcaa

SEQ ID NO: 577347 - DNA, 100 bp, Homo sapiens
tggtcatacaccagtactaccaaggacagcttttttcctgcaaggtgttgactttaaggtgaaaacaatttcagtggatggaaataaggctaaacttgca

SEQ ID NO: 577348 - DNA, 90 bp, Homo sapiens
accagcatgaaaaagaagctgcataccctgagccagattgaaacttctattgcaacagttcaggcagtcaagaaagtactgtaatttctc

SEQ ID NO: 577349 - DNA, 75 bp, Homo sapiens
aggagccttctcaagaacagagtgtgccacctgggcttgaaggcatgaaggaacaggacctgtgcaacaagataa

SEQ ID NO: 577350 - DNA, 90 bp, Homo sapiens
atgacgacgaggacgccagttactccacggaaagcagcttcagcagcactccagatcgtaaagctgaaaattgaaatcatgaaagtagac

SEQ ID NO: 577351 - DNA, 50 bp, Homo sapiens
aagcactgtgatcttcaaatcttcttggacacttaatgattgttggcaag

SEQ ID NO: 577352 - DNA, 75 bp, Homo sapiens
cgcttcttgaatttctctctgtaaaggagggtctgcggaagagggagctgctgaaggagctgctaccagtcatcg

SEQ ID NO: 577353 - DNA, 126 bp, Homo sapiens
gaggtgcttcaggaaacctgcattctcgaaaacttgttagctttacattgtcagcctcagactatggcatgaaactgccaatcctgcgttccaaccctgaggaccagatcctgtatcaaactgagc

SEQ ID NO: 577354 - DNA, 51 bp, Homo sapiens
taccgctgaggagctgcagtctctgtcaagtgttctaagaacggaagcatc

SEQ ID NO: 577355 - DNA, 74 bp, Homo sapiens
ttaaatgccctcaagtcgacaggggatgggaccctagacctttccaaagtgaaactgatgagatttgatgatcc

SEQ ID NO: 577356 - DNA, 99 bp, Homo sapiens
tatcaaaagtagagaaaatgaaaggagagcaagaatctcatagaccccaagactgcttctgagacagaaacagatatctgtgctgaatgggagataaag

SEQ ID NO: 577357 - DNA, 104 bp, Homo sapiens
acgcctcccggctctcgtcagcctcccgccggccgtctccttaacaccgaacaccgaggaggaagccaagaatctggtgagcgaagccatcgcagctggcatct

SEQ ID NO: 577358 - DNA, 96 bp, Homo sapiens
gcaggactatgaccaggcccgccactacctcctggctgccgtgaataggcagcctaaaggcagctgagtatgtcccagagaaggtgaagaaagcgg

SEQ ID NO: 577359 - DNA, 74 bp, Homo sapiens
ccgggctccgggaaaactacactggccaggtttttcgttggaatatacgttgcacatttatggcgattctgagt

SEQ ID NO: 577360 - DNA, 83 bp, Homo sapiens
cgcgggccggccccgcggggagcgcccccggcgcgatgcccttcaggaaaggtcaccgacgatgagggcgcacctgctgtcct

SEQ ID NO: 577361 - DNA, 83 bp, Homo sapiens
ctgcaaagcgaggctgaagaaggccaaggctgcagaagccaaagccacggacagagcgggatgccaccagcttgtccaaaggg

SEQ ID NO: 577362 - DNA, 100 bp, Homo sapiens
gaggacgcgggctctgaggatgagctggaggagggggtgagagaacgccgagccgtcgccgcagcctccgccgccgagaagcccttgttcccgctgctgg

SEQ ID NO: 577363 - DNA, 100 bp, Homo sapiens
ctctggagccgagagaggccggtttcccccacccttctggctagcaaggaggacgaggacacgatcaaaattggggaggatgacgagattaatttcctga

SEQ ID NO: 577364 - DNA, 50 bp, Homo sapiens
tgaaggttgtgaccaaaagaggctccgcaaagtggaagatgctttctaca

SEQ ID NO: 577365 - DNA, 101 bp, Homo sapiens
ccggctgcagccccaagacagagcgctactcctggcagtgcgtcaatcagagcgtcctgtgcggtttggtgcacctcgatttggaggaagtagggcagggc

SEQ ID NO: 577366 - DNA, 75 bp, Homo sapiens
cagaaccagatccgggagcacgtcatcgccatcgaagtccctcacagatgagtcctgctcagagaaggcagcccc

SEQ ID NO: 577367 - DNA, 97 bp, Homo sapiens
ggaagccatggcggagcccagtcccgaagttggaatcgaagcctcttaaaatggcagatgacttggacttcgagacaggagatgcaggggcctcagc

SEQ ID NO: 577368 - DNA, 83 bp, Homo sapiens
ccggccgcgggcgcgaccggaggcaggtccctgtacccctacccgaccggcgtcgccgcttcctagccatgaagtggatgatc

SEQ ID NO: 577369 - DNA, 87 bp, Homo sapiens
agtcggtgtctgctgcgttcacggcaggattcggttagatcctgataacttaagtgactctctcttttccggtgatgaagaaaatgc

SEQ ID NO: 577370 - DNA, 100 bp, Homo sapiens
gcacccctccgagcagcccggggatccagcacgcagacaagttggatggcttgaggactggtactaaaaggaaacgtgactgggaggccattgccagcag

SEQ ID NO: 577371 - DNA, 100 bp, Homo sapiens
cacccgtaccttacccaactctactgctgcttccagaccaagactccagggattagagctcgatctgcaaggcttcagtggttttgtgacagatgtgttg

SEQ ID NO: 577372 - DNA, 83 bp, Homo sapiens
gtttaaacagccaaaacagttcattcatattcagcattgctgctgcagaaaacaatggaaatgaatcaggtgtaagagagcta

SEQ ID NO: 577373 - DNA, 96 bp, Homo sapiens
gcacttcctggcaatgatagatacatcagtgtgggaagccaagcagatacaagaagaaggtagataatgactataatgcccttcgagaaagactca

SEQ ID NO: 577374 - DNA, 101 bp, Homo sapiens
cgaggccgggtacctgggctgggatccggagcaagcgggcgagggcagcgccctaagcagactcggtgaaatacctggagtgctcagctctcacccagaga

SEQ ID NO: 577375 - DNA, 75 bp, Homo sapiens
aagggcttttcagaaatcggtttgaagttagaaatggctccacataaacacggtttccttgaaggccgccatgca

SEQ ID NO: 577376 - DNA, 124 bp, Homo sapiens
aaagatccctggaatatgaagagacacagtatggtagccacacccccaggacccactgatctcagcatgaagagacaattggcgactagctcaggatcctccagcagctcaaactccagacccc

SEQ ID NO: 577377 - DNA, 88 bp, Homo sapiens
cacatcagtggagtccatgctacctgattgcccccgggtctcagcaggtccaactggcccaccttcaacactccctctaagcacccag

SEQ ID NO: 577378 - DNA, 98 bp, Homo sapiens
ggctacgtactcaggtagaaccatcatgaaaatgacccacagtgaacttatggaaaagttcttaacagttttctggatatgccgcagaaggatccgtg

SEQ ID NO: 577379 - DNA, 109 bp, Homo sapiens
cccagagactgctgagcccgtccgtccgccgccaccacccactccggacacagcaaacggggattcagcgtccgatcctttggaacagggactcacgtgaagcttccag

SEQ ID NO: 577380 - DNA, 100 bp, Homo sapiens
tacctcattgctctttggcgactcttattggttgtggcagcactgcctgaaggtatgagaccagattctaatctttatggttttccatgggaattggtga

SEQ ID NO: 577381 - DNA, 98 bp, Homo sapiens
caatcagcagcagcagtagtaccagcagtgacagaggtccagttccggccgtaccgcacagacgacttcatcacgcgcctgtactatgagacgcccag

SEQ ID NO: 577382 - DNA, 100 bp, Homo sapiens
gcgcacgttgtaatcagctgaggccatgtcaggagacggagccacggagcagctatgtggtatcttgatcctagcattagcaatatgggtacgagtaagc

SEQ ID NO: 577383 - DNA, 90 bp, Homo sapiens
tctgtgcggagactgggcggccggccgacccttcctgtcgctgacggcgactgcgggaggccagacaaatttacatgtattggagaccag

SEQ ID NO: 577384 - DNA, 95 bp, Homo sapiens
ccaagtcagagaaaagaactttcttacgccaagctttggaggttggtttcagtgctgatgaaacttgggactctgcaatagatacatggagccca

SEQ ID NO: 577385 - DNA, 100 bp, Homo sapiens
cccaggcgctcgctgcttaccaagagggtcgccgcaccccaggatggatcccccagaggaaattcagttcatgaagataagaagtttcttgacaaataca

SEQ ID NO: 577386 - DNA, 82 bp, Homo sapiens
gggcttcagtctggagccgcccagaggaatactcccccagttgcaagaggcgcaggaccgtggaagacttcaacaaattctg

SEQ ID NO: 577387 - DNA, 100 bp, Homo sapiens
cgaatatgtgttagctgtgagaatgacttctattcagtgcaagctctatcagtactacttagatcacttaacagatgaaggcttgactattgacctgaag

SEQ ID NO: 577388 - DNA, 100 bp, Homo sapiens
acaagccattcatgggccggttttatgagtgggaaccatttgcagaagatttttcggaattaacactaaacggtagcctggaagaaaggatattctttac

SEQ ID NO: 577389 - DNA, 100 bp, Homo sapiens
ggctgcttcctccatcctggtattttttggagcttccatcctggttcttccaaagtgcccggacccaaaacaggaagtggaggagaatgagattgagtgc

SEQ ID NO: 577390 - DNA, 100 bp, Homo sapiens
acctggaagttgtgctttttaagataacaacgaacttgatgcaagtgataggtttgccaaggtcagacctctcatcatccggatgaactgcaatttccag

SEQ ID NO: 577391 - DNA, 83 bp, Homo sapiens
gggctgctcatcgctgcgggcggaggaggcgccgccaagacaggcataaagaatggcgtgcctcgagtttggaagaaaacaag

SEQ ID NO: 577392 - DNA, 96 bp, Homo sapiens
ctcagtacaacatccagaaaaaagcgatgactgtgaaggagttcaggcagctggccaacagtggcaagttttactgcaatcacagcaaccaacccc

SEQ ID NO: 577393 - DNA, 124 bp, Homo sapiens
cgaatgctgctgcagagctcggaggggcgctgtgtgtacatcacccccatggaggccctggcagagcaggcagagaacatttataatgatgaagaccctgaaggaagcgtggatccagaaggac

SEQ ID NO: 577394 - DNA, 75 bp, Homo sapiens
atgtgaaatttgttctcaagcacaattttccacctatttccctggatattttgatggtcagtactggctctggtg

SEQ ID NO: 577395 - DNA, 100 bp, Homo sapiens
aaggtggcctttccactggagttgcttcacttagctctacaatcaacccatgtgatactggctccaatactacagaatgaatagaaaaaatatgactttt

SEQ ID NO: 577396 - DNA, 90 bp, Homo sapiens
ccctgtgcagccaggagccccaggcttctatccaggtgcaagccctacagaatttgggacctacgcctcatctagttgaatctgaagatg

SEQ ID NO: 577397 - DNA, 75 bp, Homo sapiens
gccagctcgatcgcaggcttccacctggcggccaggactgatagaaggttctgctcagtaccgggaaaggctaga

SEQ ID NO: 577398 - DNA, 98 bp, Homo sapiens
taaagtcagtgatgtgaaaagacttgaaatgggcaaattggcccaagaactttggtgtggtctgagaaagagcaggtggaaaagtctgcttatgagtt

SEQ ID NO: 577399 - DNA, 95 bp, Homo sapiens
ctcccaagtggctgggattacaggtgtctgcttttggggcagagttttcatcggaggcatgcagagagttaggcttttctagcaacttgctttgc

SEQ ID NO: 577400 - DNA, 112 bp, Homo sapiens
ccattgacgccatgtcgggttattcgagtgaccgagaccgcggccgggaccgaggggctgaaatctctttaatgatggagggaagcaggcagacgcgagtgtctcggccata

SEQ ID NO: 577401 - DNA, 83 bp, Homo sapiens
gcctgcggagcctgtggggcaggatacagttgatatattagttggatggcatatagatcatactcagaaaccttcgctcacgc

SEQ ID NO: 577402 - DNA, 83 bp, Homo sapiens
ccacggaggaagagccgggcagtccctggagcgggccagacaatgcagatcttcgtgaagactctgactggtaagaccatcac

SEQ ID NO: 577403 - DNA, 97 bp, Homo sapiens
cacttgtggagagctcgaattccagaatgatgaaattgtgctcagtagatgaaggcgtttctgagggcttgcctacacttcaaagcacgtctagcac

SEQ ID NO: 577404 - DNA, 100 bp, Homo sapiens
tgaacatagacgtggagttccacatccggcacaactacccctggaacaagttgccggccaacgtgagacagcctttccgctgtgcccattgccattactc

SEQ ID NO: 577405 - DNA, 100 bp, Homo sapiens
cgggaagaaagaccttagggtgctgatggcagcagtctttccgggaagctggttgatccttgaagattaggtttctgagtcccttcaacatgatcctggg

SEQ ID NO: 577406 - DNA, 99 bp, Homo sapiens
acaagcagcaagtgcgcggttggggccactgcgaggccgttttaggggaaggtgtggctcattgactttaatccatttggtgaagtcacagattcactg

SEQ ID NO: 577407 - DNA, 100 bp, Homo sapiens
ctttgccaaggagagccagtgggaccccacgtggctgtacctgtgcaagagagcaacgaaggttttgggaacagtaaaatggttcaatgtaaggaacgga

SEQ ID NO: 577408 - DNA, 90 bp, Homo sapiens
cagacactcctgcaacccagttttccagccaccagtgggatgatggagacagacttattactagatgattcgctggtgtccatctttggg

SEQ ID NO: 577409 - DNA, 82 bp, Homo sapiens
gtctccttcgacttggagtctttgtccaggacggtatcaacttgaactgaaggatgactacatcattagaactaatcgactg

SEQ ID NO: 577410 - DNA, 51 bp, Homo sapiens
ctgcgagggactaagagcagatctttaacacctctgtgtgaagatgacaac

SEQ ID NO: 577411 - DNA, 83 bp, Homo sapiens
gccactgactcatgggccctggcggtggacgagcaggaagctgcggctgagtcgaccctcaaactgacacaagacctacagag

SEQ ID NO: 577412 - DNA, 100 bp, Homo sapiens
agaaggtgtatgagatccaggacatctatgagaacaggaaaggggactaccacaggtatctggcagaatttgccacaggaaacgacaggaaggaggctgc

SEQ ID NO: 577413 - DNA, 74 bp, Homo sapiens
tttgaaaaggagaaaatgaatgccaaatgggacacgttttgatgtggacaatggcacatctgcgggacggagtc

SEQ ID NO: 577414 - DNA, 101 bp, Homo sapiens
ggatgccctgcagtacctgcagaaggtctctggagacatcttcagcagctactcccgagcccggagaggacccacgcgtgacccgggccaagtacttcatt

SEQ ID NO: 577415 - DNA, 100 bp, Homo sapiens
gtcttatcgaactgccaagtttcacagccggtttcttatctcagtcatcactatggtgcttctgacgttgatgactgtcacactggatcctcctcagaaa

SEQ ID NO: 577416 - DNA, 127 bp, Homo sapiens
gcagtgaggccaagctccagtgtcccacttgcatcaagctgggcatccagggctcgtacttctgctcgcaggagtccaaaactacttacctggaagaccttccaccaccccctgagtatgaattggc

SEQ ID NO: 577417 - DNA, 76 bp, Homo sapiens
tggtggtcatggagtagaagggagcgatactacagttgaggtactaaagaaaattgacattccatctgtctttatt

SEQ ID NO: 577418 - DNA, 100 bp, Homo sapiens
ctagcttgtgccaagaggttctctccccctcctgctatggagaagacatcaactagtcaggcagtcttccgtctccagtctggcatctgccatctcttcc

SEQ ID NO: 577419 - DNA, 98 bp, Homo sapiens
cggccggagctgggtctggagacgccgtggcagcctgaacggagtgtgcgacggattgggagagctgcagagagacaaggcggcggcggctgctgtgc

SEQ ID NO: 577420 - DNA, 105 bp, Homo sapiens
ctctgctggagccaccagttcccgcaagcccagacaatgccggtggaggaatttgtggctggctggatctctgacacctggatttcattagcatcatgacctacg

SEQ ID NO: 577421 - DNA, 75 bp, Homo sapiens
ttcaagtatgccaccaacagtgaagagtggtcaaatgtcgatttccagtagtcgaaaatggaaaacagatatcag

SEQ ID NO: 577422 - DNA, 74 bp, Homo sapiens
agcaaggggaagatcatcagcggcagcagcggcagcctgctgtcttcaggaaatgtgactggaaacagtaactc

SEQ ID NO: 577423 - DNA, 75 bp, Homo sapiens
caagactcataccagagggccacacttttcaagtgagacgagttgtactgctgtcacaggaaatggacgctggat

SEQ ID NO: 577424 - DNA, 75 bp, Homo sapiens
ggactctgagggaggagctggggacggcgaccctaggagaggccatcgaagacggcaatttggaggaaatggaag

SEQ ID NO: 577425 - DNA, 75 bp, Homo sapiens
gcctgctggtccacaggtccatacatgaagtcaccataagacttagaaggttttgactccgtggtatcatctact

SEQ ID NO: 577426 - DNA, 100 bp, Homo sapiens
catccaacaactcccctcggacctcagtatgggctggaacctgacacttggcatgacagtgggattgcttggcattttgtacagaaccagtttttgccag

SEQ ID NO: 577427 - DNA, 100 bp, Homo sapiens
ccggaagtattgacggaaagcttgaattacctacatgctgccactgcagagccccgccatggaagacacgccgttggtgatatcgaagcagaagacggag

SEQ ID NO: 577428 - DNA, 100 bp, Homo sapiens
agcactgactttcagctatggaatcggtaatttcatctgtgccaaagcctccagaggacaagccagaagatgtacatacaagtcatccattaaaacaaag

SEQ ID NO: 577429 - DNA, 82 bp, Homo sapiens
atctgtcttcggtggactccttcggcagtccacccaccgccgccgcctcccaggtgtggaaacaggaagagaactagaactg

SEQ ID NO: 577430 - DNA, 52 bp, Homo sapiens
gctcccctcgcccgcccgggccgccagagctcatggtccatgtgggtggatt

SEQ ID NO: 577431 - DNA, 114 bp, Homo sapiens
ccggaggcaggttcggctggaaggaaccgctctcgcttcgtcctacacttgcgcaaatgtctccgcatcaacaacagcaacttgtgattggcggtgaccggatattcagttgca

SEQ ID NO: 577432 - DNA, 85 bp, Homo sapiens
ccagccgcaccatgccgctcctaagcctgcacagccgcggcggcagcagcagtgagagatcatggaagggaagtggttgctgtgt

SEQ ID NO: 577433 - DNA, 96 bp, Homo sapiens
acgagctgtgcgaggtgatcggaaacccgcgtgaccccaactctgccgaagcaggaccgtcctgtgcgtgaggggacccgggtagcctctattgag

SEQ ID NO: 577434 - DNA, 90 bp, Homo sapiens
ctgccccgtctgagaagtgaggagcctctccgcccggcagccaccccatctgggaaataaactcatcctgaaagtcgctgttgttctcct

SEQ ID NO: 577435 - DNA, 100 bp, Homo sapiens
gtaaaattgcttggttccttgtcacaaggtatattactcgaggggtttttaaatattgtcaggaaaaagaaggaagctcaacgatatcggaacgaagtaa

SEQ ID NO: 577436 - DNA, 83 bp, Homo sapiens
cagcagccttcagcttttggcagcatgaaagttagcagttagagcagccagcgggtacagaatggattttggaagagggagtc

SEQ ID NO: 577437 - DNA, 80 bp, Homo sapiens
cacaaatgacgggcctgctctgaagaaagcggatgttggttttgccatggcggtgacagtgatcctccattaaagcgtag

SEQ ID NO: 577438 - DNA, 96 bp, Homo sapiens
gacaaagcagcgcccgtctgcttcgggcctctggaatttagcgctcgcccagctagccgcagaacatccagtcatggataaaaatgagctggttca

SEQ ID NO: 577439 - DNA, 100 bp, Homo sapiens
caaaatgatctcctttgactccatgtctcacatccaggtcatgctgatgcaagaggagaaaatgcagaagtctccatggacgtttccctggcttaccgtg

SEQ ID NO: 577440 - DNA, 74 bp, Homo sapiens
ggaggctgacgaggaggcggatcccccggcgtcagcccgtggaccgggagcccgtggaccgggagccggtggtg

SEQ ID NO: 577441 - DNA, 100 bp, Homo sapiens
aggcttccttctgaaaggccggctccagcaggagttcatcctttgctgcctggcccgggaccctgcccgccggccctctgcccacagcctcctcttccac

SEQ ID NO: 577442 - DNA, 100 bp, Homo sapiens
tgcctcaccgccctcagccagaagggctacgccagcggcgtcgagaggaccatcctgggtgctggccctgtgctggaggggctgtgctcttggatctgga

SEQ ID NO: 577443 - DNA, 50 bp, Homo sapiens
aatacaagtgtcatgtctgtgggtaactttcgaccgactttccccaagag

SEQ ID NO: 577444 - DNA, 100 bp, Homo sapiens
gggactctgctctcaaggcccagagtgcactgcacgagcagaagaccctgccaggggtgcccctgtagacaatggccctcgtgtctgccgattcccgcat

SEQ ID NO: 577445 - DNA, 100 bp, Homo sapiens
ccgagcgtcgccgccgccgccgccatgaacaactcgggcgccgacgagatcgggccacggcatatgcctccaaggacggggtcctcactgaggccatgat

SEQ ID NO: 577446 - DNA, 80 bp, Homo sapiens
cacgccgcggggagcgcgggcgtccggggctggagtcgcgcaggtgcagcctgacttctgagcaggtgaggaagcactac

SEQ ID NO: 577447 - DNA, 100 bp, Homo sapiens
catacccgggtcgcgggtgaacaccgcggagccccgggacttgttccagagtcacggttcgaccgagattccggggagagtgaagaagcagaggaagaag

SEQ ID NO: 577448 - DNA, 100 bp, Homo sapiens
aagccttttgtgctgatcaacttgatgtctttttacaaaaagcctggtgtgtccgtttctctggtgaatccccagccatccaatggccacttctcaacca

SEQ ID NO: 577449 - DNA, 90 bp, Homo sapiens
gactatgggcgaatagctctgaccacccggcgaagctcaaatagctataactgtaccaaagacatggaagaaaccaaaagatcggacccg

SEQ ID NO: 577450 - DNA, 86 bp, Homo sapiens
aatgaggagggcccttcacagaaccggggtatttaacatgaagtcgctccagattgtgttacctgcccgagcagaccccgaaagcc

SEQ ID NO: 577451 - DNA, 100 bp, Homo sapiens
ctactgcctgatgatgagaagttccatgggggctgggccctcattgactgtgaccctagggattacatggatcgtcttctagacgaaagtgaaagtgctg

SEQ ID NO: 577452 - DNA, 88 bp, Homo sapiens
gccgcgggagcctcgtggctgcgtcaccgccgcccccccagacaagatggacaccgcggaggaagatgtcctcctcgcactttcttac

SEQ ID NO: 577453 - DNA, 88 bp, Homo sapiens
ctgcctgtggagatccgcggaggccgacaggattcgttggctgccgtccccgctgctgtgcattgggggtgttgggctcttcattggt

SEQ ID NO: 577454 - DNA, 51 bp, Homo sapiens
cgacaattgcaggatgcacagattctgcctccagaggtgaagtccccagtg

SEQ ID NO: 577455 - DNA, 100 bp, Homo sapiens
gtacaaaattacaagtggaaatccacaaggattcttttcaatacatcctaaaacagtcagttgcagggctgggacctattatgatggagcacgagaacgc

SEQ ID NO: 577456 - DNA, 82 bp, Homo sapiens
gatggtggtcgccgcggcggcgtgtgcgcccctcaggtaccttgtggtctataatcctttagaacaagaccgaatctcgttg

SEQ ID NO: 577457 - DNA, 101 bp, Homo sapiens
agacggaaatagagaagcttcagatcacttcagcatcggtgaggttggtctctcaagaacccaaagctctggtcagtgaatggaaggagcctcaggccaag

SEQ ID NO: 577458 - DNA, 83 bp, Homo sapiens
acccctgaaaccggatgctgagtaccctgaatgaggacgggaggggcaagctgcggccaaccaaggccaagagcgagcggaag

SEQ ID NO: 577459 - DNA, 75 bp, Homo sapiens
gcctgcaggtctctgtcgagcagcggacgccggtctctgttccgcaggatggtggtgatggcacttctcaaatac

SEQ ID NO: 577460 - DNA, 75 bp, Homo sapiens
ggagcacaagagacgcagggacaggttgaggctgcaccaaggtgattctcctaggtcactggctgctgacaacct

SEQ ID NO: 577461 - DNA, 75 bp, Homo sapiens
ccagctccgaaatcaccaccaagggcacagactccatcaagatggagaacgggcagagcacagccgccaagctgg

SEQ ID NO: 577462 - DNA, 100 bp, Homo sapiens
agcgcccccaggccgctcccggggctcacgatatggaacccattcacatggactttttaagaagcttggaattccagggcccacacctctgccttttttg

SEQ ID NO: 577463 - DNA, 82 bp, Homo sapiens
aacaagagtgcttatcccagctaagctccagggtgaaatgacaatggatgctctgttggctcgattgaaacttctgaatcca

SEQ ID NO: 577464 - DNA, 122 bp, Homo sapiens
accacaacagggacacctggttccagctgcagcacgtggacgctgactcggaagtgcagacaatgcagatcttcgtgaagactctgactggtaagaccatcaccctcgaggttgagcccagt

SEQ ID NO: 577465 - DNA, 87 bp, Homo sapiens
ctgaaagagacttgtgagaagttgggctatcaatggaagaaaagttgtatgaatcaggtgtagaatgagccaaggagactcaaaccc

SEQ ID NO: 577466 - DNA, 97 bp, Homo sapiens
agaaagtggtgaatcccctgtttgagaaaaggcctaagaattttggcattgggtgaggacgcttgagcggaagttagaagcaaaaatgatcaaggag

SEQ ID NO: 577467 - DNA, 74 bp, Homo sapiens
cgagcggccgcgagcagagccgcccagccctgccagctgcgccgggacggaagagcaaccgaggtttcaatctg

SEQ ID NO: 577468 - DNA, 88 bp, Homo sapiens
ctttctgcgccatcctgcaccgccaccggcccgacctcatgcacttccgttccggcgcccctccggtcatcaacccgctgggcaccag

SEQ ID NO: 577469 - DNA, 100 bp, Homo sapiens
cttgggacccaccgctgccctcagctccgagtccagggcgagacctgcctagagctggaacgttacctccagagcgagccctgctatgtttcagcctcag

SEQ ID NO: 577470 - DNA, 50 bp, Homo sapiens
cttctgcatctcactgcttcgggaacggtcttaaaatccttgcacgtttg

SEQ ID NO: 577471 - DNA, 82 bp, Homo sapiens
ttactgcatcagtgatggaggacagagtgcgttctaggtctcgttccagatcatattctccagctcataacagagaaagaaa

SEQ ID NO: 577472 - DNA, 97 bp, Homo sapiens
gatattgactcctgtggcagtggaaagacccaagaatgccagtcaagaagacaggctgtgtggttccggtgctggtgccgtggaagtggcaatggca

SEQ ID NO: 577473 - DNA, 100 bp, Homo sapiens
ggttccaccatctgtagcctgtggctttcatcctcaagggctccatgcgaccgctgcacatccaggtgaaagaactcttttcttctttgggagtcgaatg

SEQ ID NO: 577474 - DNA, 82 bp, Homo sapiens
gctcaccccgtgggacactggcaagcagtggagatgggcgtctctggccgagcctctttttgtggaaaacgacagcagcagc

SEQ ID NO: 577475 - DNA, 82 bp, Homo sapiens
tttgctaacgtttagagagtgcttccccttgccgagcactgggcagcctgcttctgcaaagtggtacgatcgaagggactat

SEQ ID NO: 577476 - DNA, 75 bp, Homo sapiens
gccagctgccctctgaggagatggtcatgacagggcgaccattgacgaggtggagacggacgtggtggagattga

SEQ ID NO: 577477 - DNA, 76 bp, Homo sapiens
agctcatattttgaagtgtttacggtgccggtggtggtgtgcacattgagccccggtatagacagttcccccagct

SEQ ID NO: 577478 - DNA, 82 bp, Homo sapiens
gccgaacttcagggtttccaccgttcgttcaaggttatgaagacagtatggagtttccagaccatagtagacatttgctaca

SEQ ID NO: 577479 - DNA, 96 bp, Homo sapiens
tttcgcttttttacctgccaatcaaactgctacaagacaacaccctgatctggcatggacataacgagcgacgtgacacaagaggtcccaagggag

SEQ ID NO: 577480 - DNA, 83 bp, Homo sapiens
cgcaactctcagttcgagagtaaagttacagaatgtctgaaggggacagtgtgggagaatccgtccatgggaaaccttcggtg

SEQ ID NO: 577481 - DNA, 83 bp, Homo sapiens
aagaactctggctagagaccctccaagggacctgagagtcagtatactaagactgcccaggagattgtgaacgtctgttacca

SEQ ID NO: 577482 - DNA, 100 bp, Homo sapiens
cagcgggggaacagctagcggcaagggacatccaacgggctcatagagtggtagctgagcttcaggctgggacgtgcttcattaacaactataacgtcag

SEQ ID NO: 577483 - DNA, 95 bp, Homo sapiens
cctattccactggattgggaaagaccatggcagatcccaaagagaagattgatattgggctgcctccacccaaagtctcccggacccaacagcta

SEQ ID NO: 577484 - DNA, 90 bp, Homo sapiens
aactgggcagtgaattttgtgaattggaagtttttgctaaagtactgagagctttggataaaagcacaagcccaccgtactgttgtgtgg

SEQ ID NO: 577485 - DNA, 83 bp, Homo sapiens
gctgaggctgggctcgaaaccgaaagtcccgtccggaccctccaagtggagaccctggtacaagaaaattccccaggacacag

SEQ ID NO: 577486 - DNA, 75 bp, Homo sapiens
ctgctgcctgtcatcattgactgctggattgacaatatcagggtaatagatggtctggaaactctagatgagttg

SEQ ID NO: 577487 - DNA, 82 bp, Homo sapiens
aagctggaggagcggctgaagcgcgtgcgcatggaatcagagatcattgatttcttcctgggggcctctctcaaggatgagg

SEQ ID NO: 577488 - DNA, 75 bp, Homo sapiens
gtgagacgacaggctgtggatgtgtcccccctgcgccgtgtgaaccagatccggacgctgcggctgaagatcttg

SEQ ID NO: 577489 - DNA, 100 bp, Homo sapiens
atggtcttcaagcctcaagctgtgaagttcctttacactgggtgtgtaagaagatcgtcagtatttaaacagatcacatcatgcgtgagtacaagctagt

SEQ ID NO: 577490 - DNA, 100 bp, Homo sapiens
aggggtgaatcagtatgttgtgcaagaggtactgtccatcaaacatcttccaccacagcttagaggtgctggagaatctggtaaaagcaccattgtgaag

SEQ ID NO: 577491 - DNA, 96 bp, Homo sapiens
cgggaggaccaggatgctgccttcttcaagagtgcaaggatgtgaacaaggtcgcctactgccccctggtgctcaaatttcagttctgcagccgag

SEQ ID NO: 577492 - DNA, 143 bp, Homo sapiens
attttggttttcttatgttttggagtcacacaagctaaagacgggccattttccagacctcatccagagtgaagccaccactcgctctcgaatcgcgcggacgctgggcctgcgcaggcctgttcacagcagctgcatcccgt

SEQ ID NO: 577493 - DNA, 96 bp, Homo sapiens
ttgggcagcatgcagtgctttctggggtctcactctgtcacctgagctagagtgcagtggtgcgatcacagcttactgcagcattgaactcctggg

SEQ ID NO: 577494 - DNA, 100 bp, Homo sapiens
cctgagtctgttcaaccatatgtaacctgtgtatggtgactggaggtgctaacctaggaagaattggtgtgatcaccaacagagagaggcaccctggatc

SEQ ID NO: 577495 - DNA, 98 bp, Homo sapiens
ccgcgcacaaccgcacgtgcaggtgtcatggagaaactccagctgggcccagagattctgcagcgggaaaatccaaggcttatttatgccaggctgag

SEQ ID NO: 577496 - DNA, 90 bp, Homo sapiens
ctggcctaaaagaagaatttcgtaaagaatttaccaagctagaggaggcggccatcgtgagaatcatgaagatgaggaaggttctgaaac

SEQ ID NO: 577497 - DNA, 100 bp, Homo sapiens
cttatcgaacagagccgggagttcaagaagaacactccagagggggcccgtctgggcagaaaccatgtggaagagctgctgcgctgcctcggggcacaca

SEQ ID NO: 577498 - DNA, 100 bp, Homo sapiens
cttcacttccctcggtctgggcttctctgaggcggcgagagatggtcaggtctggagctcgaccgggccagcataaatgcagttccaactacaacgaaga

SEQ ID NO: 577499 - DNA, 74 bp, Homo sapiens
gggaaggcacagggagaagggataaccctacacccagaccccagagcgcaagtactcggtgtggatcggtggct

SEQ ID NO: 577500 - DNA, 100 bp, Homo sapiens
ggggcatctatgccagtgagaggcccaagtccctaggggccaactcaccctatgcagcacagcccaccagctacgactatgatgccccactgagtgaggc

SEQ ID NO: 577501 - DNA, 95 bp, Homo sapiens
gtggagtatttccaggacaacagcccagacagcccggaactcaacaaagtgacagtgaaacgtccccggaggatccacctgcccgccaccaaagc

SEQ ID NO: 577502 - DNA, 83 bp, Homo sapiens
ccaggagttcgtctcttacgtctgcggaagtgcagctgcctcagttcttagcgcaggtgctgagcgccgtcctcaaggatctc

SEQ ID NO: 577503 - DNA, 75 bp, Homo sapiens
ccaagaaactggagaaactcggagtgtactccgcctgcaagtgatcctggtggagggattgaaatgtctgagttc

SEQ ID NO: 577504 - DNA, 83 bp, Homo sapiens
cttcggcagtccacccaccgccgccgcctcccaggccccttcccagctgcctgcctgccctagccagctcccaggtgaagaga

SEQ ID NO: 577505 - DNA, 89 bp, Homo sapiens
cgcgcccggcgtgccgagcggcaacggggctccgggccctaagggaactcagcctcctcccaagctccctgtgggtcctagccacaagc

SEQ ID NO: 577506 - DNA, 100 bp, Homo sapiens
gctaatcagatgggagtatctgccaaacgtagaccaaaggctcagcccacaactcttgtcctaccacctcagtatctcgggggagctttgtgccttgatg

SEQ ID NO: 577507 - DNA, 90 bp, Homo sapiens
ggaggacctcactgagatcagggacatgttgctggccaataaggatgagaacaagttgagcagtgccaacggccatgaagaacgtagcaa

SEQ ID NO: 577508 - DNA, 50 bp, Homo sapiens
tgatttctccaaaatttggaaactatttggtctcattttgtcacccaggc

SEQ ID NO: 577509 - DNA, 83 bp, Homo sapiens
ctgagagtcaccacaaggccaagggctatgaaaggagaaaagggaattggtggagcagtcacagctacagatggactaagtga

SEQ ID NO: 577510 - DNA, 76 bp, Homo sapiens
ggcgaaaggagctggtgcctgtgcaagttgttgaggtgtgctctgtgggatgatcgcaatcgcagacgctgtcaag

SEQ ID NO: 577511 - DNA, 97 bp, Homo sapiens
gaaagacaaaattagttggagatgtggacttcgaaggccattatgctgctggattggacctcaatgacacctactctgggaagcgtgaaccattttc

SEQ ID NO: 577512 - DNA, 75 bp, Homo sapiens
aggatgttggcggtccctgtgacctgtggagacacggccagatctgccctccagggtcctgtcccaggtgcagct

SEQ ID NO: 577513 - DNA, 50 bp, Homo sapiens
cgccaccggccgcttctgtcctcgaacatacatatgatagttgagaaaga

SEQ ID NO: 577514 - DNA, 90 bp, Homo sapiens
gtgcccgcgtgtggctgcgtgcttgtgggctgtacgggtttttcgttggaatatacgttgcacatttatggcgattctgagtgtgagggc

SEQ ID NO: 577515 - DNA, 100 bp, Homo sapiens
agtaaattccgggaaattcaacaggagctttccaggctggttatgatggtgagagtatcggaaattgcccgttttctcagcgtctctttatgattctctg

SEQ ID NO: 577516 - DNA, 75 bp, Homo sapiens
tggcctcgaggccgctgctgctggcgctcctgtcgttgggttcttccaggggacccagccccctaaccatgggag

SEQ ID NO: 577517 - DNA, 85 bp, Homo sapiens
atgatacaattacctgcacgacacatggaaattggactaaattaccagaatgcaggggacacattcagctaacgtattttagcag

SEQ ID NO: 577518 - DNA, 100 bp, Homo sapiens
tatcgcgacagcaagctcacccggctcctgaagattgtctacaacctgttgtctctgcgcttcaactcacggatccgtgtgaagacctacacagatgagc

SEQ ID NO: 577519 - DNA, 50 bp, Homo sapiens
ctatttcaccttcaaacaggaatgggttcaacagaaatatttggtggtta

SEQ ID NO: 577520 - DNA, 51 bp, Homo sapiens
ggagagcaaacttggctcagcccaacctgatggccaaaagaaaggaagaaa

SEQ ID NO: 577521 - DNA, 100 bp, Homo sapiens
atatgttgatgatcctcgaaacactgataatgcatggatggagacagaagctgtgaactaccatgacgaaacaggctctgtatgtggatgtgatccgtgt

SEQ ID NO: 577522 - DNA, 98 bp, Homo sapiens
gcggagccgctgtcctcgtccccagcggtcccgcccaacgcccgactctggtcttactctgtcacccaggctggcgtgccatggtgcagtcatagctc

SEQ ID NO: 577523 - DNA, 75 bp, Homo sapiens
tcccccttcggcgacgtctcctcccgcctcaccacaggtgttcattgtactcatggcttcaatcgcactggtttc

SEQ ID NO: 577524 - DNA, 100 bp, Homo sapiens
cgaagcacagctgtcacccggacatcaagtattcaccagttaatagcaccagggttgtggtctcctgaacagaagtctgtctccaaacacaaatcaagca

SEQ ID NO: 577525 - DNA, 100 bp, Homo sapiens
gcaaaagaaaaaagaatgggtcaaccaagaacgtcaaacactccaacgattgagagcatttaaagatacatcgctattgcggttccgaggcagtgggaag

SEQ ID NO: 577526 - DNA, 85 bp, Homo sapiens
gtcgactgcccagagtccgcggccggggcgcgggaggttggtcaaagaaaaagtgatgtatgaaaaagaggcaaaacaacaagaa

SEQ ID NO: 577527 - DNA, 100 bp, Homo sapiens
tgggagcccggaccccgccccctgcggcccagcgcccccaggaacttagtgatttggcccgtgaccctccagcacaatgttctgcaggtccagttgggga

SEQ ID NO: 577528 - DNA, 75 bp, Homo sapiens
gggggaagtagtccgggccatggataagaagaaagtgttggtcaaggctgagaacgggaagcttgtcatcaatgg

SEQ ID NO: 577529 - DNA, 71 bp, Homo sapiens
cacgtctaccataagtatcgtaggcgctgccttaatggaggcagcgtgggtgacaagatcacatccctagg

SEQ ID NO: 577530 - DNA, 100 bp, Homo sapiens
ctacaacaaatcatcgtcaacctgttccaccttctccagtctggtagcaaaaaggggtgtctcagcgggctgacgcacgaggcacacaggaaggaggtgg

SEQ ID NO: 577531 - DNA, 100 bp, Homo sapiens
gggccgcgggctgcggacgctcggtcccgcgctgcgcatccccgcggacgccacagcgctggatccggtgtgattaaagctggttttgctggtgatcaga

SEQ ID NO: 577532 - DNA, 90 bp, Homo sapiens
cctggatatgcccgttcagtttacagttcattttttgcttggtttggaaaaatttcattagagaaataagcgggttttgaaaacaaaaaa

SEQ ID NO: 577533 - DNA, 90 bp, Homo sapiens
cgcgggatcccagcctcaggcgtgcgcggacggtgtgcggaccaagatcactccatggatgaaatgacagctgtggtgaaaattgaaaaa

SEQ ID NO: 577534 - DNA, 98 bp, Homo sapiens
gtgggcccgggcgagcagccctgcctccggacggaagaagaagaattttcagttcttgccagctgcctgggacttctgccaacgttttaccaaacaga

SEQ ID NO: 577535 - DNA, 88 bp, Homo sapiens
cggggaccaggacagtcgcgaggttcgagtgttgcagagcctgcggggcaagatctggctctccaatgtcagatgtggtcagtaggga

SEQ ID NO: 577536 - DNA, 110 bp, Homo sapiens
cgtcggttgagcggcggcgaacatgcgcttttgacacattggaggtccagcctgatgagtgaagaggctaagcgaggagcacccaacccttggctctttgaggagccaga

SEQ ID NO: 577537 - DNA, 82 bp, Homo sapiens
gcaaccattgacgccatgtcgggttattcgagtgaccgagaccgcggccgggaccgaggaatgaggagaaacctgtgcaaat

SEQ ID NO: 577538 - DNA, 75 bp, Homo sapiens
ccagcggaagatcgtcatgcataagaattacctggcaaccagaggtttgacatggaaaaacatgttgaccgagag

SEQ ID NO: 577539 - DNA, 74 bp, Homo sapiens
accgcagtcgtgcaggatctgaaggagctcgatcaagtcatccgccaaagaagcctgtccagtttggaactgtt

SEQ ID NO: 577540 - DNA, 49 bp, Homo sapiens
caacaatagcaaacctacagactgaagctcagggcgactgtgaccctga

SEQ ID NO: 577541 - DNA, 100 bp, Homo sapiens
ccgaggcggccgccgctgcaccttcaccgcgtacccgggacccgcccgcccgcgggaggtcctttgtcatccagcaaatcccaagcagcaacctgttcat

SEQ ID NO: 577542 - DNA, 51 bp, Homo sapiens
ccggaaaagttgtagctttcaagctccctgtgctgtcaggaatctacagga

SEQ ID NO: 577543 - DNA, 98 bp, Homo sapiens
tgcgccgaaatcctgcggagcgagttccccgaaattgacggacaagtcttcgactacgtgaccggatacaggatcactgtggtgatcgagatactcct

SEQ ID NO: 577544 - DNA, 97 bp, Homo sapiens
tctccatcacccaccaacaacaccacaataatccacagccaaggaagaagatgaagtaccggacgatgagactctgaaccaaatgattgctcgacga

SEQ ID NO: 577545 - DNA, 50 bp, Homo sapiens
gaatgtatgaggagaattctcagcctagcctcctgacaaggtgatccggg

SEQ ID NO: 577546 - DNA, 87 bp, Homo sapiens
cacacacaccatcatggtcctggtctcggtccagctcgacttccagctcaggctccagcaccagcactggctcaagcagtggctcca

SEQ ID NO: 577547 - DNA, 90 bp, Homo sapiens
gtttgtaagaaaatttttaaaggcaaatcaagtctggaaatgcattttcgaacgcattcagattccttttgcaataaaaacaacaccagg

SEQ ID NO: 577548 - DNA, 88 bp, Homo sapiens
gctgggcttcgtccagatcgggaagggagggccctcctggacccgggagcggaccctggtggcggtgaagcccgatggcgtgcaacgg

SEQ ID NO: 577549 - DNA, 98 bp, Homo sapiens
agtaactctgtccttattatcggaccccgaggatcaggaaaaactatgggtccacatatagcctcagttacattagctgcttatgaatgcaattcagt

SEQ ID NO: 577550 - DNA, 50 bp, Homo sapiens
ctgacccaggcctgctcggccctcacaggaacaccttccaccatgaccac

SEQ ID NO: 577551 - DNA, 83 bp, Homo sapiens
ctccggagccgctgcacatttcggtggaagccattatctactgatggaccgggtttctcagattcttcaagatcacggtcata

SEQ ID NO: 577552 - DNA, 51 bp, Homo sapiens
tgaaattatctctggtgctgcagctctggaacaacctatcttcagcactcg

SEQ ID NO: 577553 - DNA, 94 bp, Homo sapiens
gacagattcgcagtggtcgcttcttctccttgatttggatcatacagcagatgtccagtgagtatagcgggagttcattcctttgaaaccacgt

SEQ ID NO: 577554 - DNA, 90 bp, Homo sapiens
cctggggggcaaaatcacccccaattgagaactactgctctaaactattagtgacaagagctggggttaggatccggttggactctgaca

SEQ ID NO: 577555 - DNA, 101 bp, Homo sapiens
ggagctgggcgacgagctgaccctgggagacatcgacgatggcccctgagttctgcagcctcgaggaaggcctgccctatctggacatggtgattgcagag

SEQ ID NO: 577556 - DNA, 97 bp, Homo sapiens
agatgtaaatgtcagtggaaaggagagctaccatcactaagagatgtgaaagctggaaacattcttcttggagaagatggctcagtacagattgcag

SEQ ID NO: 577557 - DNA, 75 bp, Homo sapiens
agagatgccagccatgcatgaaatcggggaggaacttatctggacaggaagacctcctgccccccgaggtctgca

SEQ ID NO: 577558 - DNA, 76 bp, Homo sapiens
agcaatggcaaactatgaaagtacagtcagcaccttgctggatgcctcggcaacactggaagaaggacatgcaaag

SEQ ID NO: 577559 - DNA, 123 bp, Homo sapiens
gggagagcgcgccgctgctcccggaccgggccgcgcacgccgcctcaggtgaccagaagtcagcagcttcccagaagccccgaagccggggcatcctccactcactcttctgctgtgtctgcc

SEQ ID NO: 577560 - DNA, 95 bp, Homo sapiens
tctgagagaaacctgacatgtgggcatacctcagtgatccttaatagttgcatttgctggtctggcctttgcgtccttctacctggcagggaagt

SEQ ID NO: 577561 - DNA, 80 bp, Homo sapiens
ggcgcggggaagcagtgggaaaatcgcaaggaagccggcaattctgtggtgttcttggtcacacatttatggagtttctg

SEQ ID NO: 577562 - DNA, 75 bp, Homo sapiens
caaaagtgccaccgaagaggtgagaacaaaatcatgtactaaggctcgtacgtctgcatcgattatcttacgtgg

SEQ ID NO: 577563 - DNA, 50 bp, Homo sapiens
gtcagaatgccaatacaagcagttgtttgggacagagcactgaatatcgt

SEQ ID NO: 577564 - DNA, 82 bp, Homo sapiens
cagatggtgttacctggagcttaaaaagctgcacgcaagtgttaaacttctgagaaaccctaaagcaggcagcagctcagaa

SEQ ID NO: 577565 - DNA, 131 bp, Homo sapiens
tctaccagatcaacgtcctccgggaccggagtcagaaccctccgcagagtaaaggtgctgttacactaccaaactgtcagtgaacccgccgttattaaacgattgattagtgtcttaaacaaaagcacggg

SEQ ID NO: 577566 - DNA, 75 bp, Homo sapiens
cggaaatgttttcaaccgtgacccataaagatccagctccaggtcccacaggggctcttcttccccacgaaaaag

SEQ ID NO: 577567 - DNA, 75 bp, Homo sapiens
gctgctttgccagtcaatttctcatttaagcgtgacagcaactgtgatgagagagacctagagaaagatgatgaa

SEQ ID NO: 577568 - DNA, 100 bp, Homo sapiens
gcccgagagatggctccaaatatggcagagtgggaccagaaggcatccgtgtcattctggaccttactcccaactaccggggtgagaactcgtggttctc

SEQ ID NO: 577569 - DNA, 74 bp, Homo sapiens
aagaacttcagagatgtttgacacagtctggaattaatggaacttactctcgtatatgaatgacctaaaggtac

SEQ ID NO: 577570 - DNA, 101 bp, Homo sapiens
ctctcgctgttgctggtctctggctccctcctcccagggccaggcgccgctcagaacgatgaagaaactgagtctcagagaggtgaagtgacttgcccaag

SEQ ID NO: 577571 - DNA, 100 bp, Homo sapiens
ttagatatccttcagaatcgatggagtccaacatatgatgtatcttctatcttaacatcaattcaggaatatatatgtcccagatgtgaatcaggcttta

SEQ ID NO: 577572 - DNA, 100 bp, Homo sapiens
ctgtcaccgctggaagaggctggtggacgaccggtggctgtggcgacatgtcgacctgacgctctacacggactggacctacagagacatctgggatttt

SEQ ID NO: 577573 - DNA, 100 bp, Homo sapiens
gaggaacagaccctcactctctctgtcagaaaaatgtcttattgaagttaaaacagatgagtttcctcgccatgggagcaacatagaagccatgtccaag

SEQ ID NO: 577574 - DNA, 75 bp, Homo sapiens
accatagccagagaacagccctccatcttgcagcccagaaggtactacctttcccaagccaggtggtgtacaaca

SEQ ID NO: 577575 - DNA, 75 bp, Homo sapiens
aaaaaaaagaggaattccagaagggccaccccgacctccaagggcagcctgcactgaagtcagtggatctgcatg

SEQ ID NO: 577576 - DNA, 76 bp, Homo sapiens
ttcagatcctatggacccgaacccttgtagtgcaacatacagcaacttagtccatcctaaggtgactgtgtatcct

SEQ ID NO: 577577 - DNA, 82 bp, Homo sapiens
gtcctcccctttcatccctatgtggaaaacgttggtagctggcagtgttgtgatggcttttgaagaagtatgcccggacaga

SEQ ID NO: 577578 - DNA, 100 bp, Homo sapiens
accccgcgtgcgccttgctcgcccgcagccccgagaccgcagattctgcttctcagaagatgcactattatagatactctaacgccaaggtcagctgctg

SEQ ID NO: 577579 - DNA, 100 bp, Homo sapiens
caggaaccctctctataaaggcttcactatgtatggggtactcaatcctagtactgtgccctacaacattcagactgcatcaaaacatgtaaacaaggac

SEQ ID NO: 577580 - DNA, 100 bp, Homo sapiens
ttcttgcctcaggccagtcgcctccaggccaagagggatccttcacccgtgtctggctatgactttgcagccgtcctggagtggttcgcggagcgtgtgg

SEQ ID NO: 577581 - DNA, 82 bp, Homo sapiens
cttttctcagatgttggatatttgcttggaaaaacgtgtgggtacgaccttgtagacccaaatgatttgtacattgtagaac

SEQ ID NO: 577582 - DNA, 96 bp, Homo sapiens
gtgctgggtggcctgctgctgctcaccatcctggtcctggccatgtggaaggtgcccgctcccagcccttggtgcagttccagcgccgggctgccc

SEQ ID NO: 577583 - DNA, 50 bp, Homo sapiens
atttatgtcatcaagaagaatgacgatggaatcagagtcagatcaagaac

SEQ ID NO: 577584 - DNA, 114 bp, Homo sapiens
gaagagcttcagttgcccccaaatgccgaaggccacgtaaaacagctatgatttaggcatagagaatcgtgatgccaccaacgaccaagtcaccaaggatgctgcagaagctat

SEQ ID NO: 577585 - DNA, 100 bp, Homo sapiens
gttggagcaaggagaagagccgtggtcagtggagcaggcatgtcctcaacgcacttgtccaggctttcctcggagacgggtggcatggggagcagctaga

SEQ ID NO: 577586 - DNA, 100 bp, Homo sapiens
gtctgacagccctgtgtgacaccaagataagtaacgtctgtttctgtcgactgtggaccacttatgtgcgatccgtggaccacttgcgtgcgatctgtcg

SEQ ID NO: 577587 - DNA, 98 bp, Homo sapiens
ctttacctgcgcctggtggagacctcgctgaaaggcaactcagcatatctgccaccaaaaatgtaaagaggaaaaatgcacttatgctgataaatata

SEQ ID NO: 577588 - DNA, 100 bp, Homo sapiens
gttactgggtctcctctcaagaaatctcaagatattaaagttactgctgttaaaaaggtgacagagctgaatgaacctctctccaatgaagatcgaaatc

SEQ ID NO: 577589 - DNA, 89 bp, Homo sapiens
gcgtgacaaatggtcagtctaaccaaccaagcttgccaacacttggtgtcacatgtgagcctcccacatgtattcactctccattccag

SEQ ID NO: 577590 - DNA, 115 bp, Homo sapiens
gcggcgcccgctggccgggctggctgcggccgccctgggccgggccccaccggacggtgagaagccctaccactgcaactgggacggctgcggctggaagtttgcgcgctcagac

SEQ ID NO: 577591 - DNA, 83 bp, Homo sapiens
acgggacggacggtgatggtggtcgccgcggcggcgtgtgcgcccctcaggtcttgaggaccggcccagctcaggctcctggg

SEQ ID NO: 577592 - DNA, 71 bp, Homo sapiens
gctggtaggccttggagaggcgggttaggaagaggatggagatgaagatgaggaagctgagtcagctacgg

SEQ ID NO: 577593 - DNA, 88 bp, Homo sapiens
ctctgtacaactcaatcaagaatgagaagcttgaatgggcagttcacagcccgttggagattgtgattttaatgttcgtctgcagtgt

SEQ ID NO: 577594 - DNA, 75 bp, Homo sapiens
aggagactctcaacgggggaatcaccgacatgctcacagactgggagtcttggtgtgaaattgaggaattatctc

SEQ ID NO: 577595 - DNA, 75 bp, Homo sapiens
tacttatacccggtctccagatggtgatggcgttggaaacagctagtgaaagacccctgacaaaagacaatcatc

SEQ ID NO: 577596 - DNA, 90 bp, Homo sapiens
tttactccaccttgaaagataaggatgtggagctctacctgaaactgattgtccccttggggcggaaagaagccaaggccaaggagctgg

SEQ ID NO: 577597 - DNA, 75 bp, Homo sapiens
gctggtcatcaatgttactcaggtagaggctccatctactctttgaagcttctgcccagcttgcattgtttctag

SEQ ID NO: 577598 - DNA, 83 bp, Homo sapiens
agatcctggcgagcctgcaggatggcgcggccgagtccccgtacggccacccggcgggtattagaaaactactcggatgctcc

SEQ ID NO: 577599 - DNA, 50 bp, Homo sapiens
acagaactttctaatttagccaaggaagaaggacaagttctgcgtgtacg

SEQ ID NO: 577600 - DNA, 75 bp, Homo sapiens
ctgctagagccgagcgaagccctcagactatggcatgaaactgccaatcctgcgttccaaccctgaggaccagat

SEQ ID NO: 577601 - DNA, 98 bp, Homo sapiens
aagtaccagccagcgccagctgcagccctggccgcgcactcgcctcagctgagcctgggttcatctctaacaagtatttagtgaaacgacagagcaga

SEQ ID NO: 577602 - DNA, 101 bp, Homo sapiens
agcacacactcccgcaggatcccgccattgttcaggctagagctaatggtctgcagtcctgtgtgattatcatacgcattcttcgagacctctgtcagcga

SEQ ID NO: 577603 - DNA, 100 bp, Homo sapiens
aaaaccagttggtggtgacaagaacggcggtacccgggtggttaaacttcgcaaaatgataaacattgacgatcttgaggatgaccctgtggtgaacggg

SEQ ID NO: 577604 - DNA, 100 bp, Homo sapiens
gggaaatggcggagtatctggcctccatcttcggcaccgagaaagacaagtactccaaagattcaggtttactcacgtcatccagcagagaatggaaagt

SEQ ID NO: 577605 - DNA, 74 bp, Homo sapiens
ccaatgtttgtcatcaatgagatgcggctatggtggtgatattacccgaaaaatgaagcttttgaagagacaag

SEQ ID NO: 577606 - DNA, 82 bp, Homo sapiens
ccatcggccccgacttccagaagggcctgaaggatggaactatcttatgcaccactatcctgaggagcgacatgtggttgaa

SEQ ID NO: 577607 - DNA, 96 bp, Homo sapiens
gaggatgataaacacccaggacaggcggcaaagatctgcaacaacatgctgttagctattagtatgattggaactgctgaagctatgaatcttgga

SEQ ID NO: 577608 - DNA, 75 bp, Homo sapiens
ttactgtaatgggactatttctactccacataatctggatttacaaaaggtgcaggtatgagcaggtctgaagac

SEQ ID NO: 577609 - DNA, 100 bp, Homo sapiens
ctacgagtgcagcagccggtgttccctcgccctgccccacatctatgggagtcgtcagattatactggagaaagaggaaacagaagagctaaaacggttt

SEQ ID NO: 577610 - DNA, 75 bp, Homo sapiens
cgccagcagcttgcttatggcatctatgtcatccaccaggtggtgccaccaccacaacagaatgatcttgagatt

SEQ ID NO: 577611 - DNA, 100 bp, Homo sapiens
aattaaattattcttgtcggtttgattctaaacatctggcagctgctctggagaatctcaataaatatatagtcaacatgtggcactgtgcagaatggag

SEQ ID NO: 577612 - DNA, 74 bp, Homo sapiens
cccgtgtgactgtggaaccaagacattgccgagaatggctgcgcccccaccccagaagagcagctgccaaagac

SEQ ID NO: 577613 - DNA, 82 bp, Homo sapiens
cgccctgcaccttcagcggatttggggattaggctcttttaggtgccgacgccaccgccgagcccatgatcctggaacagta

SEQ ID NO: 577614 - DNA, 76 bp, Homo sapiens
cggagtttgagccccggaggcagagcggctgccatgacaccatgccacaaggagagtgatctcttcccctgttttc

SEQ ID NO: 577615 - DNA, 83 bp, Homo sapiens
taaaaacaaccaaacaaaagccaggttgaggcctctagccttatgccagcctggaccatcttggaggcagtgtaggatcatgg

SEQ ID NO: 577616 - DNA, 50 bp, Homo sapiens
ggtctttgtgcacatttacatcaaggaatgggaagcatgcccaatctgtc

SEQ ID NO: 577617 - DNA, 100 bp, Homo sapiens
ggagagtagaatttcgacccatggaggactgtcctgattgcctgtaatgttaagcagatgagcaaggatgctcagccctctttctctgctgaggatatag

SEQ ID NO: 577618 - DNA, 50 bp, Homo sapiens
atttctctggcccagcttacaaaggtccagctgggagctccccgacctcc

SEQ ID NO: 577619 - DNA, 100 bp, Homo sapiens
attccatgacttggatatgctgacgactgtgcaggaagaaaacgagccagtgatttacaatagagcaaggcgcttgaagaggctcagaaagctatccaac

SEQ ID NO: 577620 - DNA, 82 bp, Homo sapiens
tctatcagcaggctccgggctgaagattgcttctcttctctcctccaagggtgagcccatcactttctgtgaggagagtttt

SEQ ID NO: 577621 - DNA, 100 bp, Homo sapiens
atgatgaagagaaaggcccggagacttttgaccttgtctgtgtcaatgcgtggatgctggacctcacccaagccatcctgaacctcggcttcctgactgg

SEQ ID NO: 577622 - DNA, 100 bp, Homo sapiens
tcactcagaggtttgtcctgaggcttaaatgaggcaacatggacacagcattttagcacaaggccaggtcagggaagtcaaagatgcatccctgagttct

SEQ ID NO: 577623 - DNA, 100 bp, Homo sapiens
gagaactgcctagaaggttatgttcacgacctcgagggaaattgcatcaagaaaggccaagatcaaggctcgagatcttcgcgggaagaagaaggaggag

SEQ ID NO: 577624 - DNA, 83 bp, Homo sapiens
ccgcccggagaggctctgcagccatgaagccaaccgtcccgagggggatatgagactttctactcggaatatcctgagtgttg

SEQ ID NO: 577625 - DNA, 60 bp, Homo sapiens
gttacttccaagtcatcaccagaaagataaaccacataatcctatggtaaatgctggagc

SEQ ID NO: 577626 - DNA, 96 bp, Homo sapiens
tttcctctcctcccctctggatttctcagagcaattctgtggtgttcttggtcacacatttatggagtttctgaagggcagtggagattactgcca

SEQ ID NO: 577627 - DNA, 82 bp, Homo sapiens
cagcagatggcggatgccctgcagtacctgcagaaggtctctggagacatcttcagcaggccccccggacagaccacccagc

SEQ ID NO: 577628 - DNA, 50 bp, Homo sapiens
ctggaggtggatctgaagaacgggtgcctggacttggagaaccaggaggt

SEQ ID NO: 577629 - DNA, 90 bp, Homo sapiens
ctctggctttatggaaacttctttgtgaacatcaattcactatcattgtggcagaacttcagaagtccaatggatgggaccccaatgaaa

SEQ ID NO: 577630 - DNA, 100 bp, Homo sapiens
gggaaatacaaatgaaccaagcacacgtgtccgaaaacaagtgttgaaaatgttaaaggctgtgctgaagaagagccgagagggaggaaagggaggcaag

SEQ ID NO: 577631 - DNA, 80 bp, Homo sapiens
ttgtatctgtttttctcagaagagaattccacaagaccctcaggcagtttgattgcatctacacaagataaacccaacca

SEQ ID NO: 577632 - DNA, 80 bp, Homo sapiens
agatcagaggccctgtgatgatcgtgtcaggtcctctggtgatgttcttgagacgttcaatttcttagaaaatgccgatg

SEQ ID NO: 577633 - DNA, 82 bp, Homo sapiens
ggaaatcgggctgaagcgactgagtccgcgatggagctcctgtccaaatatgacccccagaaggaggcagagctccgcacct

SEQ ID NO: 577634 - DNA, 90 bp, Homo sapiens
cactgtatttgaccttaaaaacttggattccttagcaccaccacagctcagccagaacagaaggcctcgaatctcattggcacataccgc

SEQ ID NO: 577635 - DNA, 87 bp, Homo sapiens
gctcatacagaattacgcatttccacttctaatgatattcttgtgactactccaaatcgactaatctatttattaaagcaagatccc

SEQ ID NO: 577636 - DNA, 75 bp, Homo sapiens
ttgaggatgggggagtagctacaggaagcgaccccgcgatggcaaggaactgtggctgcaccatctgtcttcatc

SEQ ID NO: 577637 - DNA, 75 bp, Homo sapiens
gagtactcttatgcagtccccatggctactggcgcaactacttgagctgcacgtctgcccacaccagcaccagcg

SEQ ID NO: 577638 - DNA, 75 bp, Homo sapiens
tgacagcggcgaggagaacgtcccgctggatctgacccgaggacaatgccgtcttctgtctcgtggggcatcctc

SEQ ID NO: 577639 - DNA, 75 bp, Homo sapiens
cactctttaatacagagcaaaggtttactcctggcttgggggcattaggaagcactggaggctcttcgggaacta

SEQ ID NO: 577640 - DNA, 75 bp, Homo sapiens
gtttggagcacagtctgcagcatcttctttatgtctaccttgactgttacaagcagcctgcttctgcaaagtggt

SEQ ID NO: 577641 - DNA, 100 bp, Homo sapiens
tggtttccgtagatggtggctttctttggacccttgacatcaaccagttactatttggcaaagaacagagcagttcaccatttgcattatatagaacgat

SEQ ID NO: 577642 - DNA, 100 bp, Homo sapiens
cgccggcggtggcgcctgcggacctaactagctccaggttaggccgagctttgcgggaaagcagcgcctcgagtttggaagaaaacaaggcagtagtaag

SEQ ID NO: 577643 - DNA, 76 bp, Homo sapiens
ctggcccaacggtttccccagcagtagcctctgcgaccagatggtgatggaatttcctgataatgtgttaaatctc

SEQ ID NO: 577644 - DNA, 101 bp, Homo sapiens
tccttcaacccgtggctgatagctgaaagcttggtgtaaaaattgccaaagcagttgcctgccacaactttgtaaaagccaaaaaggaggttgaaaattca

SEQ ID NO: 577645 - DNA, 82 bp, Homo sapiens
ccaggagcagcgaggcactcatcctgcacgccggcgagtgccagcgcaatggctgccatccggaagaaactggtgattgttg

SEQ ID NO: 577646 - DNA, 78 bp, Homo sapiens
tcagaagaaggatgctgttaaaaggaatagcgggttttgcagcaattgttgcatatggattatataaactgaagagca

SEQ ID NO: 577647 - DNA, 100 bp, Homo sapiens
ctgcttccaccgtgactcctggcacctgcgccaccaagtcctgctgcatgtgggctcagtggaagacaggaagctgtttattggtatgatttccaagaag

SEQ ID NO: 577648 - DNA, 100 bp, Homo sapiens
ccggtggagccggccgagcggaggcctgagtgcacccgctgcagatagaatgagtccatttaagtcccaggacggtggaaactagctagtagattgcagc

SEQ ID NO: 577649 - DNA, 98 bp, Homo sapiens
cgtaccagaggtggaagtccaagtcaaacgcagaaggactgcctcactgagcaaccaagagagccgggtgtgggctgagccctgcctgattgatgctg

SEQ ID NO: 577650 - DNA, 83 bp, Homo sapiens
caggctgtggccatcttcaccgtgtacctgggctcgagcctgcacatgaagatattatgcctggtgatcctgatctgcttcag

SEQ ID NO: 577651 - DNA, 90 bp, Homo sapiens
cacctcggtggagaggatcaatcactacattaaggctggtaatcctggtggacctggacctggtggtcgaggaagaggtagaggtcaagg

SEQ ID NO: 577652 - DNA, 100 bp, Homo sapiens
tgcatcatgatgtcaacaaccgtggctcacaagatgaaagagcacgaattctcacactcaagaaagcaaatgaacttcttctgagcacaggcatgcccgg

SEQ ID NO: 577653 - DNA, 89 bp, Homo sapiens
agcgtgaactacagtcagggcagcctgaaggatgcagcctactctgtgtatgatgaagacattgggtactgtcaagggcagtcttttct

SEQ ID NO: 577654 - DNA, 75 bp, Homo sapiens
tgctgtcaaggatcttgtgtgctccatagtttatcaaaaggtaaagcagctgagcagccattttcagatttaccc

SEQ ID NO: 577655 - DNA, 82 bp, Homo sapiens
aggaggaggttttcaggaccaaaattgtggaaaagtcactctgatgaggacggggacttggttgccttttccagtgacgagg

SEQ ID NO: 577656 - DNA, 75 bp, Homo sapiens
ggaccaggtggtagtggtgtcagcgtgtgaaggcaaagaagaatgctgctccattcagaagtgaagtctgctttg

SEQ ID NO: 577657 - DNA, 75 bp, Homo sapiens
cagccctcaagatctacagctcaacagtctcgctctgtcgtccaggctggagtccaatgctgcgatcttggatca

SEQ ID NO: 577658 - DNA, 88 bp, Homo sapiens
agaacagatccgggaattaagagagacatttctcttgggaagttgtgcatctgacaggaatatagtactgtacgatatgaggcaagct

SEQ ID NO: 577659 - DNA, 98 bp, Homo sapiens
gattgcctgcattggaggcccgcccaacatctgcctagatcggctagaaaactgtccagcctagggtgaatgtttccccctccaagaaggggcccttg

SEQ ID NO: 577660 - DNA, 100 bp, Homo sapiens
aaggagtaagcgaccaagtacttgtggcagttgtggtcagtttcgctttgattgctaccctggtatatgcacttttcagagggctgtgctgaagtttgct

SEQ ID NO: 577661 - DNA, 100 bp, Homo sapiens
tctccgagctcgcctgcatctactcggccctcattctgcacgacgatgaggtgacagtcacggtgtctcccagtctgctaaagccctaaggccatcacca

SEQ ID NO: 577662 - DNA, 74 bp, Homo sapiens
cagctgtgtgtccagaacgtgccatggagacgcttaacgatatgtaactggttcatcaatgcccggcggcggct

SEQ ID NO: 577663 - DNA, 82 bp, Homo sapiens
gcgcaggaaacatggcggcggcgggtgttgtgagcgggaaggggttgcagatggtgtaggaggctggagagactatggagtt

SEQ ID NO: 577664 - DNA, 107 bp, Homo sapiens
ctaccactcacccgcagactccttctccagcatgggctcgcctgtcaacgcgcaggtccattatcttggcagagaagttggagcaaaattttgggagctcctccttg

SEQ ID NO: 577665 - DNA, 82 bp, Homo sapiens
agatgtatgctcatcagtattatatgcagtaatatgtgtcacaaagatgtctacacggaactgccagggaatggactcagtg

SEQ ID NO: 577666 - DNA, 75 bp, Homo sapiens
gaaagaaatagcgtctgagatcataggattactgatgctggagacagggtctcactttgtcacccatgctggagt

SEQ ID NO: 577667 - DNA, 75 bp, Homo sapiens
gcttttttttgctgctagcacatatgtatgggttcagtacgtatggcacacagacgtgaacgatcaagagagagg

SEQ ID NO: 577668 - DNA, 100 bp, Homo sapiens
cctgagttgccaatcattatcacaggttcagaagatgcttctaaagatggcacagctgggatacccaacctacaactttatgatgtgaaaactgggacat

SEQ ID NO: 577669 - DNA, 75 bp, Homo sapiens
aagtggaggcgccgctctagcggccgggactctgaactatggcgcacccagtcagcttgaagagtttcaaatgga

SEQ ID NO: 577670 - DNA, 90 bp, Homo sapiens
ggggtgcacctcagcactatcccaagactgctggcaacaggtatcccatgtataaccgattgtgtaatggctgaaattgagaaattgggg

SEQ ID NO: 577671 - DNA, 100 bp, Homo sapiens
gtcctcggcaattacgagattctgctctactacccgaaggatagtgcccgaagttgctgcttggcatagatgagcctcagcttccagggcactgtgggcc

SEQ ID NO: 577672 - DNA, 51 bp, Homo sapiens
tattctctcattgattaatgtcaatgggctccgctgatcctctaaatagtg

SEQ ID NO: 577673 - DNA, 100 bp, Homo sapiens
ttcgccaccaattatgggagggctggccaacttctgctacagacgactcaatcagccaaatggccgatgacacagtggcagaactggacaggcatctggc

SEQ ID NO: 577674 - DNA, 115 bp, Homo sapiens
tagttgcttcaggaatcttgcagaagaccgcagtgggataaatctcaaagatctcgtacaagatccttcttttgccggtggtggtgtgcacattgagccccggtatagacagttc

SEQ ID NO: 577675 - DNA, 90 bp, Homo sapiens
atgggaacttgtgtgttaaagtaacagatgatttagttgaccgtataattgatgccggcccaaaaggaaattattctcgcttcatgaacc

SEQ ID NO: 577676 - DNA, 100 bp, Homo sapiens
ggcggggttcctggagcctcccgccgcgctccctccgccgccgcgcaacggactcacaccacccggcaagaactgctcactacggctccctgccccagaa

SEQ ID NO: 577677 - DNA, 99 bp, Homo sapiens
agcaaggtcggcagagcaaggggcttacgcagaaggacctggccacgaggctgtggccaggccagctgggctcggggagcgccagcctgagaggagcgc

SEQ ID NO: 577678 - DNA, 82 bp, Homo sapiens
agaaatgaagcagagtggcctagatcaacaagttggagaaagctgttgctgcagcacacaccttcttcgtgggcaatcctga

SEQ ID NO: 577679 - DNA, 95 bp, Homo sapiens
cgtcttgcctgtgtcccacttgttcgcggcctatagggtttccaggcctgaggtgcccgccctggccccaggagaatgaaccagccgcagaggat

SEQ ID NO: 577680 - DNA, 51 bp, Homo sapiens
ctctttcaagtccttcctggggaccggggtcctggaccggatcaaaggctc

SEQ ID NO: 577681 - DNA, 96 bp, Homo sapiens
taatgcaagtggaaggaaactcttcaccaaagaattgatcacatcatgaaagccgactccacgggaacccactccctctacacgatgtaccaggac

SEQ ID NO: 577682 - DNA, 92 bp, Homo sapiens
tggggcgtcgtgcgcaaaggcctgcagtgcgcgcacctcctgccccccgaggtctgcagtctcctgaacccagcagccatctacgccaacaa

SEQ ID NO: 577683 - DNA, 109 bp, Homo sapiens
cgggcatcgggcaggaactgggcgccggcgcttacagcatgagggtcctgatgaagaagctgttgtggatcttggcaaaactagctcaactgtgaacaccaagtttgaa

SEQ ID NO: 577684 - DNA, 100 bp, Homo sapiens
ggctgctgaatcaggaataataaaagttaaaacaattgctgcacgaaacactgaaattttggcagattacatgaagcagatgacatttgaagcccaagcc

SEQ ID NO: 577685 - DNA, 90 bp, Homo sapiens
tagttaagaaaatcatcgaaaagatgctgaacagcttcatggcggctgaagagatgcattggcctgtccctatgaaggccattggtgccc

SEQ ID NO: 577686 - DNA, 50 bp, Homo sapiens
ctccttttccctctccctttccctaagattattcagagctgggagagctt

SEQ ID NO: 577687 - DNA, 74 bp, Homo sapiens
ccgctcacctgcgctgtgatgcctgcagagctgtggcttaccagacgctgaccggaaaggagattgagattgac

SEQ ID NO: 577688 - DNA, 100 bp, Homo sapiens
acccccaccaggatttgggcctgatgagcccagctgggtgcctgcctcatacttggagaaagagttgcatgctgagaatttgaaaaatgaagatgatgta

SEQ ID NO: 577689 - DNA, 98 bp, Homo sapiens
cgccggtgtcctggcctcttcctcagctaaaccaggtggacaggtgaaatgtcagtatatctctgctgtggataaagttatatttgtggatgattatg

SEQ ID NO: 577690 - DNA, 97 bp, Homo sapiens
caccatttgcagtttgcaagcatattttggcagattgcacagagtttgaaagatgaacagaagaaggtaccttcagaagcttcattttcagatgttc

SEQ ID NO: 577691 - DNA, 100 bp, Homo sapiens
gacactccacgccacccggggggctgcactcctctcttgggcctagaatatcctgcagtggtagagtttgctccattccagaagatagccaaaaagaagc

SEQ ID NO: 577692 - DNA, 125 bp, Homo sapiens
ttgtgtctgccagcagggtttctcaatctctgcagatggccgtacgtgtgaaggtgctggagaatctggtaaaagcaccattgtgaagcagatgaggatcctgcatgttaatgggtttaatggag

SEQ ID NO: 577693 - DNA, 83 bp, Homo sapiens
tggaagagagggtggtgcggatagcttgaggaagcggagctggagtttgttcagatcatcatcatcgtggtggtgatgatggt

SEQ ID NO: 577694 - DNA, 83 bp, Homo sapiens
tttcgtacgggcggccgtgcgcgaggcgaggcaatagccctctggaacaagacaattcatgtgagataagaaagaagagccca

SEQ ID NO: 577695 - DNA, 100 bp, Homo sapiens
tccggctctgttggacagtgatgtgaagaggttcagctgtcctaatcctcactgccgaaagggaagtgtgaaatcggctgggcctactactgcacgggag

SEQ ID NO: 577696 - DNA, 96 bp, Homo sapiens
gtcttcccgcgtccgccgattcctcctccttggtcgccgcgtccttggctggcgtgaagctcttcgtgggcggtcttgactggagcacgacccaag

SEQ ID NO: 577697 - DNA, 100 bp, Homo sapiens
tatacatccgaggattgcaaccaggcactactgaccaagatcttgtcaagctgtgtcagcccaaaatcgtgtggtgggagctatgcagctatattctgta

SEQ ID NO: 577698 - DNA, 96 bp, Homo sapiens
ggaagaatcggatcagagttcccaggggctcaagttacaatcgttcctgacaaagatgatggcttgttgattggtgctggctgtgccctctacccc

SEQ ID NO: 577699 - DNA, 101 bp, Homo sapiens
tgatggcctggcgacccattcaggcacttatggccatttcagccaaagttgggatatctaaagcagaagccttagaaactctgcaaattatcagaagagaa

SEQ ID NO: 577700 - DNA, 83 bp, Homo sapiens
acgacgcggacatggtcatgagctttgtgaacctgggtcgtggagggcccccaagacccaacagagggatgccgcaaatgaac

SEQ ID NO: 577701 - DNA, 73 bp, Homo sapiens
agaggcgagctcgcgatgagtggtctcggcaggctcttcgggaaggggttcttgatggtgctagacattcccc

SEQ ID NO: 577702 - DNA, 100 bp, Homo sapiens
gcagcaaccaggagattccctgggcctgcaggaagcccttccgcggaccgaaagcatgttggaacaggattccaggagaatgaaccctagtgtgagccct

SEQ ID NO: 577703 - DNA, 100 bp, Homo sapiens
ctcaaggctcggaagaatgtggagagttttctagaagcctgtcgaaaaatgggggtgcctgaggggacggcaaaacagaacagaaaggcggagataaaaa

SEQ ID NO: 577704 - DNA, 83 bp, Homo sapiens
caaggatacccacagtacggctggcagggtggacctcaggagcctcctaaaaccacaggatttttagactctgaggagcagtt

SEQ ID NO: 577705 - DNA, 83 bp, Homo sapiens
cagcagcccagacgcggcacagagagggcctgggagcttgctgcagcttcaggtttggtgcacctcgatttggaggaagtagg

SEQ ID NO: 577706 - DNA, 83 bp, Homo sapiens
gtatcatcattggggtctgggcttcctccaccaggaaatttctcctcttctctccatggaggctatggcatttgttactgaag

SEQ ID NO: 577707 - DNA, 100 bp, Homo sapiens
gacacaacgaactttatattttaccacttccttgaataggcattttgttcccaacatcacctttggtcaccctgtggtagaaagccttcgaaagcagcta

SEQ ID NO: 577708 - DNA, 100 bp, Homo sapiens
cacaaaagaagtaggaaaggctgctttggaaaaacagcaagaggtggaaacatacagaagaagcaaggaaattacagttagaggtcacaactgcccgaag

SEQ ID NO: 577709 - DNA, 100 bp, Homo sapiens
aaaccactgaggatcagattttgaagagagatatgccaccagcatttattaagtcactggaaggactgagcgcattcaggagcctggaggaactcatctt

SEQ ID NO: 577710 - DNA, 82 bp, Homo sapiens
aagcaatgataattcccaggacagtcagtctggtactaacaatgcaggtacaggtgaacaaaggcagagtaaactgtcaccc

SEQ ID NO: 577711 - DNA, 100 bp, Homo sapiens
cctgccccatcatcgtgcccttcgacaacctctcctacattgagcacatctttgagatctcccgccgtcctgacctactcactatggtggttgactacag

SEQ ID NO: 577712 - DNA, 101 bp, Homo sapiens
caggaacacatcgatctgggtatcaaatatgacccaagcattggtatctacggcctggacttctatgtgctctcgtggcattatccttcagtggggctatt

SEQ ID NO: 577713 - DNA, 80 bp, Homo sapiens
gttggtgggagccgtgctctacctctatccgaacctaaaggcagacccagaagagctttttacaaaactagagaaaattg

SEQ ID NO: 577714 - DNA, 95 bp, Homo sapiens
gtccgagttgccgccggagaggagtggcctcgcccgcttgacccaacatgagtgaagtttcctgcaagaaacgggacgactatttggaatggcca

SEQ ID NO: 577715 - DNA, 75 bp, Homo sapiens
gctcagctgctccaaagacatccagtatctcaaggacagagcgggatgccaccagcttgtccaaagggaagttcc

SEQ ID NO: 577716 - DNA, 83 bp, Homo sapiens
cacatctctcctggggacaccaagaccctgaggaagaagggcttcaacggctgcgacagccccgagcccgacggggaggactc

SEQ ID NO: 577717 - DNA, 83 bp, Homo sapiens
cttcgctctcttcctggctgcgtccctaggtaaaattgcggagttgctctctccgggctcagtggatccattgacaaggctgg

SEQ ID NO: 577718 - DNA, 100 bp, Homo sapiens
tctagatcttcttcatctggtgatcgcaaaaaaagacgaacaagatcacggtcacccgaaagatcctggaaaggctgaacaagatgtgcggggttgggga

SEQ ID NO: 577719 - DNA, 83 bp, Homo sapiens
caagtcctggctggccaagttactggagccgatgtggtatggtcaggaaaaagactacaatgtactagtcatggatcttctgg

SEQ ID NO: 577720 - DNA, 135 bp, Homo sapiens
atttccatttctaccttgtatgcctcaatttgctggatttaagcactgctgcactttatgaggctgacttgacaggaattaagtggaaaaaatatgtatggcaaggcccaacttctgcccctattctgtttcctg

SEQ ID NO: 577721 - DNA, 74 bp, Homo sapiens
agcagtagcagtgaatctacagggacgccatcgaatccggcacaacgactctgtaaacgctgtggtcaagcatg

SEQ ID NO: 577722 - DNA, 100 bp, Homo sapiens
ccgaccccagagcggcgctggacagttccagggtctccctccactgctgtagtaacccgggtccggggcctcggtggtgctcctgatgcccctcacccac

SEQ ID NO: 577723 - DNA, 75 bp, Homo sapiens
atgagatgattgccaaacccccagtgatcgaactgtgagaatttggaaggctcgcaatttgcaagatggtcagat

SEQ ID NO: 577724 - DNA, 100 bp, Homo sapiens
atgggagccgcctcccgcgtgggcgtcccggagcctggccagctgcacttcaaccagatttttcggacgccgcccgatactacattccctgagcccacct

SEQ ID NO: 577725 - DNA, 100 bp, Homo sapiens
acacccggctcggagctgctcatcaccaaggccaagaacgggcacctggctgtgaaaccagcctggacaccaagtctgtgtcagaaggccacctcaagag

SEQ ID NO: 577726 - DNA, 75 bp, Homo sapiens
ggacacttggaaattgaacaagcgtcacttgacaagcctatagaatcggatgagcacaagcctgggagatggcag

SEQ ID NO: 577727 - DNA, 99 bp, Homo sapiens
gtttgatgctcgctgggtaacatacttcaacaagccagatatagatgcctgggaattgcgtaaaggccatccttcttgcctggatatgacaatggagct

SEQ ID NO: 577728 - DNA, 75 bp, Homo sapiens
gttgtggcatttcaaccggttatggtgctgctgtgaacactgccaaggcaatcatcaaatgcttagaagatcgag

SEQ ID NO: 577729 - DNA, 100 bp, Homo sapiens
ggagctgttggagctttgcagctgacctacatctcgaagtgatcagggccaaagcggtcagtgagaaggaagtggactctggaaacgacatttatggcaa

SEQ ID NO: 577730 - DNA, 83 bp, Homo sapiens
gaacgaggcaaggagctaaagcagcgtgcgttcagccctggggactccatccccgtgtctacctccctccttggagacacttc

SEQ ID NO: 577731 - DNA, 100 bp, Homo sapiens
agtaaagaatggctgttgaacatccacaaggcacctgcaaggagattagcagaggcatttcatatcagtgaggattctgatcctttcaatatacgttctt

SEQ ID NO: 577732 - DNA, 98 bp, Homo sapiens
gggaaacacagcaaggaaatgtgagccccaggctgcagaagcaggtagcatctaaaggaactggtttaaatcctaatgccaaagtatggcaagaaatt

SEQ ID NO: 577733 - DNA, 109 bp, Homo sapiens
ggtggcggtgctgaggcacctggagaccttcgagcaccccaacgtggtcagtgccggtggtggtgtgcacattgagccccggtatagacagttcccccagctgaccaga

SEQ ID NO: 577734 - DNA, 73 bp, Homo sapiens
tgagtcagctacgggcaagcgggcagctgaagatgatgaggatgacgacaggccgatgattgatgtcatggat

SEQ ID NO: 577735 - DNA, 50 bp, Homo sapiens
ttttaaccaaggcagttggtggaaatgagatttttcggacgccgcccgat

SEQ ID NO: 577736 - DNA, 83 bp, Homo sapiens
gaacgctctcatccggaggcaggaccagctgcagctgctaccccaccaacaactgaacgctttggtcaggctgctacaatgga

SEQ ID NO: 577737 - DNA, 100 bp, Homo sapiens
tgcccaggaatcaccacctggtaccagaagcggtgccagccagcaggtcctatgcccaaacacttggtatctccatacagccaagaataaagaaagaaag

SEQ ID NO: 577738 - DNA, 75 bp, Homo sapiens
gccagaagcgggcggcgcgggggagatgataaaataccatgaggagtttgagaagagccgcatgggccctagcgg

SEQ ID NO: 577739 - DNA, 82 bp, Homo sapiens
cgggagatcccaggcggtgacagagtggagccatggctagagaactgccattggatgtccagaatcccctgtagttgataat

SEQ ID NO: 577740 - DNA, 100 bp, Homo sapiens
tctgtcaacattctccagtttatattcattgccttaagactggacaagatcatccactggccctggcttgttaatttggagtggcccctggagtcagttt

SEQ ID NO: 577741 - DNA, 90 bp, Homo sapiens
tagacttcaagtcccggaccttatccgtgcgccgcttcggtttgcaggcatcaagcatgatggaaccatgtgtgatacctgccgccagca

SEQ ID NO: 577742 - DNA, 97 bp, Homo sapiens
cgagaatgaatgggggtaccacggagagggcaataagagcctggtggtggcccacgcgcagctgttcgggggtcttgtctggattttggttgcctcc

SEQ ID NO: 577743 - DNA, 100 bp, Homo sapiens
gtgcgagatccgctgctgctgaggagaggagcgtcaacagcagcaccatggttaccttatcccatatcacacaactggtcctcagccataacaagctaac

SEQ ID NO: 577744 - DNA, 93 bp, Homo sapiens
tccactttcgccagcccgtgccgcgagcgcggcctgcaggagcccccaccttctggccctttcacctcctccttgggaggggcaggattctca

SEQ ID NO: 577745 - DNA, 89 bp, Homo sapiens
gggcatgagttagtcgcagacatggacaccaaacatttcctgccgctcgacaatgcagatcttcgtgaagactctgactggtaagacca

SEQ ID NO: 577746 - DNA, 100 bp, Homo sapiens
tgatgaagatgatgatgtcctcagtattgattcagttcacacaaaagatgttggacaatttctacaattttgcttcatcatttgctgtctctcaggccca

SEQ ID NO: 577747 - DNA, 96 bp, Homo sapiens
ctcaggctggaacttgccctgtctcctcgcagatgagagccaaatggagaagggtatatttaatgagcgaacaggtcacagtgaccaaatggcaaa

SEQ ID NO: 577748 - DNA, 83 bp, Homo sapiens
ggcatccgggacatcaggaaagcagtgctgatgataaggtgatgatgatgatgattttgatgatgaggaagctgaagaaaaag

SEQ ID NO: 577749 - DNA, 75 bp, Homo sapiens
gaaaaaaatgcattatgtggaccctgaccatgtaaaggctgaccggttccctgatgtgttacctgcttctgctac

SEQ ID NO: 577750 - DNA, 100 bp, Homo sapiens
cgggcatcttcacacgtctcaatctctacctgcattctggtcaggtggccttggccaaccagtgcctctcccaaggccaggagtggtggctcacacctgt

SEQ ID NO: 577751 - DNA, 74 bp, Homo sapiens
caacataaagcaagagtctgggtcttctacttcttcatacagtggctatgaagaggatgaagcatcttcccaaa

SEQ ID NO: 577752 - DNA, 82 bp, Homo sapiens
caaaaaacaggataaaatcttatgattatgaggcatgggcaaaacttgatgtgatttgtttgtgagggaacagtagaagaaa

SEQ ID NO: 577753 - DNA, 78 bp, Homo sapiens
gatatagttgctgctatacaacacaattataaaatgtcagcttttaagggtatgcaaccactcatgtattcggttcag

SEQ ID NO: 577754 - DNA, 82 bp, Homo sapiens
atccttggacttcctgaaaatgacccagcaagagtgagccatggagctacgtgtggggaacaagtaccgcctgggacggaag

SEQ ID NO: 577755 - DNA, 100 bp, Homo sapiens
ccatgcacttgttgcagaaacagccaagatgccgtgagagcaggggcttgttttaccgcttgctgtttcctaagtctctagtacagtgcgtgacatccag

SEQ ID NO: 577756 - DNA, 82 bp, Homo sapiens
tcaccttggacacctcgcttggaacatccagtcatggataaaaatgagctggttcagaaggccaaactggccgagcaggctg

SEQ ID NO: 577757 - DNA, 75 bp, Homo sapiens
ggccgagcgggcggcttcctggcctgggcgctccggtggcggcggaggtcgagtcccagacaccagaagtctgaa

SEQ ID NO: 577758 - DNA, 136 bp, Homo sapiens
catccacaatgatttctccagtgctcatcttgttctcgagttttctctgccatgttgctattgcaggacggattttcagtgtggacagcagatgaaggaattgagagcacagcatgaagaaaatattaaaaagtta

SEQ ID NO: 577759 - DNA, 100 bp, Homo sapiens
tggacgaagatggggagaaggaagcgagactcatacgcaacctcaatgataaggatgacattcggctgctgccgtcagcattgggtgtgaagaagagaaa

SEQ ID NO: 577760 - DNA, 97 bp, Homo sapiens
gcttggcgtgtcccatgtttttgagtatatccgttctgagacatacaaatagaggagatgttaaagtaacccatcttgcaggacgacattgaagatt

SEQ ID NO: 577761 - DNA, 100 bp, Homo sapiens
caatcctcacattcaagctgataggctgcgctaccggaatgtcatccagcgagtgattaggagccgggtgtgggctgagccctgcctgattgatgctgcc

SEQ ID NO: 577762 - DNA, 100 bp, Homo sapiens
agcctggctggccaagagaggcccaatctccgtggccatcaatgcctttggcatgcagttactgctaccaatgccaaagccaggtgccgccacgcagcgg

SEQ ID NO: 577763 - DNA, 100 bp, Homo sapiens
gaagaaaagcaagatactgaaatgtgatgaacatattggaattccaccagcccctcgtggagttcctcagattgaagttacatttgacattgatgccaat

SEQ ID NO: 577764 - DNA, 80 bp, Homo sapiens
tgaacgtggacagcctcatcacccggctgctggaggagatgctgcccccacccccttaggcccgagggatcaggagctat

SEQ ID NO: 577765 - DNA, 75 bp, Homo sapiens
caggatctgccccagagaaagtcctcgctcgtcaccagcaagcttgcggggaaagaccacagcaagattctttca

SEQ ID NO: 577766 - DNA, 95 bp, Homo sapiens
agagggagagcaagaccatcatgctgcgcggccttcccatcaccatcacagagagcgatgcaacgccctgctgcggcggctggtccgcattgggg

SEQ ID NO: 577767 - DNA, 97 bp, Homo sapiens
ggaattagcagtgctcctcctccaaagtgatcctttttttatgcccgaggctctccctgcatgtcctatccaggccacctgtgaggctgcttccaag

SEQ ID NO: 577768 - DNA, 75 bp, Homo sapiens
cacaggtagccctggacggcattcagtgttttggtcttgttgcagtaggagaaagagcacaaaagaggtctggga

SEQ ID NO: 577769 - DNA, 74 bp, Homo sapiens
gtgacttgactcttcaaacacaaagtaagactttgaccccgacgcaggcttcagtgattgccgcggatcagaag

SEQ ID NO: 577770 - DNA, 74 bp, Homo sapiens
aagcttacgtctctgctcttcagtacaatcctgctcgggttatgtatgattttgctgctgaacctggaaataat

SEQ ID NO: 577771 - DNA, 100 bp, Homo sapiens
aacatcttcactcactttgtcgccagctttattgcagtagatcatgccactaatcgtacccagtttggggagaaaattcacaactttgggctgatccagg

SEQ ID NO: 577772 - DNA, 100 bp, Homo sapiens
ccagaattcaattaaagtggctcaggtactgctagttgaacagctcttccgcaaggagttccaaccatttttgaagaaatggtatcgtgttattggatta

SEQ ID NO: 577773 - DNA, 89 bp, Homo sapiens
gccaaagtggacgctgccaacagggctgtctacctggtctccagaatggacggccctgtggcagagcatgccaagcaggagccctttca

SEQ ID NO: 577774 - DNA, 83 bp, Homo sapiens
ccgttggggaaccgttgagaatccgaaatccagtaacaatgttagaataagcatgatcaataatcctgccaaagagataagct

SEQ ID NO: 577775 - DNA, 100 bp, Homo sapiens
ccaaccagaacatgcagtccctgcttcctgccggagtggagagtgttttcgacatcatggagatggaggatgaagaacggaacgcgttgcttcagctgac

SEQ ID NO: 577776 - DNA, 83 bp, Homo sapiens
ggcgaaccgtggcaccgagagcaagaaaatgttgttgacctcctgtactggagagacattaagaagactggagtggtgtttgg

SEQ ID NO: 577777 - DNA, 100 bp, Homo sapiens
agcaggaggaggtggcggcggcgggaagatgttgacatcatggacatatgtgagtccatcctggagaggaagcggcatgacagcgaaaggtctacttgca

SEQ ID NO: 577778 - DNA, 96 bp, Homo sapiens
ctctggcgttcctcacactccccctgaagttcatctaagatcttcattcttcaaagtgaaactgcttttggttacaagggtctaaagatcctgtta

SEQ ID NO: 577779 - DNA, 107 bp, Homo sapiens
ttaacatcacggagctgaatctgccgcagctagaaatgctcaagaaccagctggaccaggctgagctccaagtggcacaacaggagaaccatcacttaaatttggac

SEQ ID NO: 577780 - DNA, 95 bp, Homo sapiens
ccgcgttcccagcccgggtccccgcgttcacagccccagcgcaggtttttagaacttcagccataaaaatgggcagaattttccttgatcatatc

SEQ ID NO: 577781 - DNA, 99 bp, Homo sapiens
tccttgtagataagcaactggattttttaactgaagatagtgcctttcagccctaccaggttccttgtggagaagcactggtataagcagtgggaggca

SEQ ID NO: 577782 - DNA, 82 bp, Homo sapiens
tggctccccatcgccagccccccacgcccaccagacgactgcaagaacattgccaacatcatgaagacactcgcctatcgag

SEQ ID NO: 577783 - DNA, 100 bp, Homo sapiens
agcctcaagggcaagctggaggaggagcgagccaagctgcacgatgtggagcgtactaggttttgacaagcttgcatcatgcgtgagtataagctagtcg

SEQ ID NO: 577784 - DNA, 82 bp, Homo sapiens
caactgcagagacgagagatctttctgctgtctatactcttggaaagcacatcctaaggaaactactttccagagaaaaaca

SEQ ID NO: 577785 - DNA, 100 bp, Homo sapiens
tttccatcaaaaagtgattaagcagagaatggagaagaaggttgattccaggcatgtggagaccccaaggcaaaaccatcctatcttatcgacaaaaacc

SEQ ID NO: 577786 - DNA, 51 bp, Homo sapiens
gtgagcatgaggttttccaatcaggaatcacagtgcattgataacaagtgt

SEQ ID NO: 577787 - DNA, 73 bp, Homo sapiens
cagtgtcttcgatctgcttctgatgaactttctaaaaccaatttttccaacaacaacgatttccgtgctcttc

SEQ ID NO: 577788 - DNA, 90 bp, Homo sapiens
gaaactgcaaaggatgaagaggaagagcctcccagcatgactcagctacttcgatggaaagaggcaaaacctgatgaattaatggattcc

SEQ ID NO: 577789 - DNA, 80 bp, Homo sapiens
gcccgtgccgcgagcgcggcctgcaggagggctgaagaagatgcagagcagcctgaagctggtggactgtatcatcgagg

SEQ ID NO: 577790 - DNA, 100 bp, Homo sapiens
acagcgctgcccgggcggtgtctcgggaccccgacagctgcggttggcgggcaccataggccgaagcacccgggttatgaagacagtatggagtttccag

SEQ ID NO: 577791 - DNA, 75 bp, Homo sapiens
cctcgggcccatcgactccagcgtgctctctcggaataagacagaggccagaggcattgatgtgcagcaggtttc

SEQ ID NO: 577792 - DNA, 100 bp, Homo sapiens
tgctattaattaacagactttgtggggaaaaaaaggagcttgccttctgagctttgtaccaaagacctgggaaaaatccctgcatgtcactgagtccacc

SEQ ID NO: 577793 - DNA, 98 bp, Homo sapiens
gcagacgggcgtcttctacctgacgctcgtcctcatcctggtcactagcggactcttcttcgccttcgagtgactctgttttgagaagtgcaaccaga

SEQ ID NO: 577794 - DNA, 82 bp, Homo sapiens
cgggctccgcgcccggccggacccgggcccgagccctgccaggagcccggaagtgggtccgcacgagacagaatagactaca

SEQ ID NO: 577795 - DNA, 97 bp, Homo sapiens
agggttaccagacaggcctttttatagttggcttcaggtcacatgttgctctggagaaccgagaagggtgagcagacaccaatcatgaccccaaaca

SEQ ID NO: 577796 - DNA, 98 bp, Homo sapiens
acatatattttgcctggcaagggaaaactcagatatcagatccaggtcactgggatcgttaccactacagtgctagagtcagggacccccgcacctat

SEQ ID NO: 577797 - DNA, 100 bp, Homo sapiens
caagttcgtcttcatgaagatgagcttcttcagttagtaacccaggcagatgtggaaacagagatgcaacagggaatgacagaggaagaggaagacaaac

SEQ ID NO: 577798 - DNA, 98 bp, Homo sapiens
gggcagatggcaaaatgatcaagaatgaagtggacatgcaggtcctggtgaacgccatcatcaacagtggtccccgggaggactccacacgcattggg

SEQ ID NO: 577799 - DNA, 83 bp, Homo sapiens
caaaaatcccatctaccgcaactctcagttcgagagtaaagactttccatttcaacacggttgaagaggttcattcaagattc

SEQ ID NO: 577800 - DNA, 90 bp, Homo sapiens
gatctgaagggaaagctccagatactatggaaaggaccatgctagactttccccagcatgtatcctctgacaaagaagtacgagcagcaa

SEQ ID NO: 577801 - DNA, 96 bp, Homo sapiens
gccaggccagtgtggagacctggaagtacaaggccaagaattccctcatgtactatccagaggaagtgaccggggaggtgcgtcctcatcatggga

SEQ ID NO: 577802 - DNA, 82 bp, Homo sapiens
agtggcggggactgcacttttattcatcaattcatagaatgccagaaattcagaaggagctggcggacatcactttagaccc

SEQ ID NO: 577803 - DNA, 96 bp, Homo sapiens
caaccacaagacgactcaataggaggaaggaagtctgtttactgttaaaagaaaccattgattcaagagttcaggagtacttggaagttcgcaaac

SEQ ID NO: 577804 - DNA, 100 bp, Homo sapiens
aggactacctgcagggttgtcgagctgctctgcaggaaccacgtgaatgttgagggggcgacacacaagcaggtggtggacctgattcgagcaggcgaga

SEQ ID NO: 577805 - DNA, 85 bp, Homo sapiens
agcccgagggcggcgcaaggcctgaggcccagcacaggaaactactttgcttcgcactttttcatgggaggagagaaattcgaca

SEQ ID NO: 577806 - DNA, 75 bp, Homo sapiens
cccacgccggaggaggcattaacgagaccgggtaagtgtatgggtttcgacagaccatgatgaaattgagaatgt

SEQ ID NO: 577807 - DNA, 50 bp, Homo sapiens
gcaggcatttcaatcacattatgctgacttcaaaagagctgaggacacac

SEQ ID NO: 577808 - DNA, 75 bp, Homo sapiens
caaggaggccttccagctgtttgaccgaacagagtgcctggtgaagaatgtgatgggatcactagcatgtctgcg

SEQ ID NO: 577809 - DNA, 114 bp, Homo sapiens
aaaaaccagcccagtgtatgatttctggctgggtatgtccaatgctatggaccagaagtaaagcagctttacaacaaatacccagatgctgtggccacatggctaaaccctgac

SEQ ID NO: 577810 - DNA, 51 bp, Homo sapiens
atgtcagaaggtgcattttaccttttgtgtcgttcaaggaatgataacagg

SEQ ID NO: 577811 - DNA, 75 bp, Homo sapiens
ggaagaacaacagatggatcccttcagattagtgatgatgaaccaggttatgaccttgatttattttgcatacct

SEQ ID NO: 577812 - DNA, 101 bp, Homo sapiens
ccgggcggttgaaaagtccgagagaatcaggatggaggccgtggcgacggcgacggcggcgaaggaacccgataaggctccacggagaagaactgctgcgt

SEQ ID NO: 577813 - DNA, 100 bp, Homo sapiens
ggcagctgtactaggactgggaacgggcctccggtgtggctgtctctgatggtgtcatcaaggtgttcaacgacatgaaggtgcgtaagtcttcaacgcc

SEQ ID NO: 577814 - DNA, 100 bp, Homo sapiens
atttctactggaaaaaccattttcagttaaagcagaatgcagagagcagtttgcagcagaagaatgaagccatcacatcctttgaaggaaaaaccaacca

SEQ ID NO: 577815 - DNA, 98 bp, Homo sapiens
agaatggcatgctggtgacggacagtgcagggaagcaactgcagaggacagaagcagtacaacatccacgtgggaactgctggatcaaaggacaaaag

SEQ ID NO: 577816 - DNA, 87 bp, Homo sapiens
ggagctagctgaaataacccttgatcctcctcctaattgcagagtatttgatttctgacactggaggacaacagctctcaataagtg

SEQ ID NO: 577817 - DNA, 73 bp, Homo sapiens
tgacgatgtctctatgacgttcatcaccagcaaagaggaccttgcagatgcttcgggagaacctggaggagga

SEQ ID NO: 577818 - DNA, 99 bp, Homo sapiens
cagaatttcagcagttctctgatttttatattttattcctcttcctatccaatccctgccttttgagtccaggtgtaaaatgtttatcggtggactgag

SEQ ID NO: 577819 - DNA, 83 bp, Homo sapiens
gagacaacagcaggggtcagctgggccgcaggggcgcgcagcgcggggagctgccagtctttcccagggaactccgatgaagt

SEQ ID NO: 577820 - DNA, 100 bp, Homo sapiens
caaatcagtcactgggatttgggaagttccttcttctttgctggcactgttattacaaccatagggcgatttgatgaaactgttatcgaagagagaagac

SEQ ID NO: 577821 - DNA, 100 bp, Homo sapiens
gttactatatttgaaagaagccatattttcaggtgtttcagtcacctccagtaacacgggcgtgccagatatctcgggttctgtgtactccaaaacccag

SEQ ID NO: 577822 - DNA, 82 bp, Homo sapiens
cgggctgcggcgtgtgcgcgcccgccagctgctccggagatacgtcctctttgatacgcaacctacggctctctgagtcctt

SEQ ID NO: 577823 - DNA, 152 bp, Homo sapiens
gtccaacacaatcacagcaacagactctcctgcagaccttcccaggaagccagagccacacacaccatcatggtcctgggaaatgatgtcactctgaaactcaggctggaatacactggcatggtcatacctcactgcggcctcaaactcct

SEQ ID NO: 577824 - DNA, 75 bp, Homo sapiens
aaaaaggctgtctctagacagcagtcttgtgttggtgatgtatattggccaagtggccaaggatgtcttgaagtg

SEQ ID NO: 577825 - DNA, 82 bp, Homo sapiens
gtctgactctgactctcggactgagaaacgcaagcagggtttccaggcctgaggtgcccgccctggccccaggagaatgaac

SEQ ID NO: 577826 - DNA, 100 bp, Homo sapiens
gaaagcagctaggccaggaccctttctttggtggggaccaaggcatactgaacacattttttagcagctgggcaacaacagatatcagaaaacacctgcc

SEQ ID NO: 577827 - DNA, 82 bp, Homo sapiens
gccgagataaagccaccacgtctgtttaattggttggggtcagataagaagaggagtgacaatcaagccaacagtagatgat

SEQ ID NO: 577828 - DNA, 100 bp, Homo sapiens
tgatgttggaggatacctgtggtcgttcttccctctttccaatagatgatggcttgcttgatgatggtcacagtgatcaagttggagttttaaattcacc

SEQ ID NO: 577829 - DNA, 75 bp, Homo sapiens
tggagagcctgagttggcattcgtataaatgacctggtggataagattgtggaccagctgcagcagttaatgcag

SEQ ID NO: 577830 - DNA, 145 bp, Homo sapiens
ctgcgctgcgtcctgctcctcgggtgcctgcacctcggccgtcccggcgcccctggggacgccgccctcccggacgaacaggaggcattgaactcaatcatgaacgatctggtggccctccagatgaaccgacgtcaccggatgc

SEQ ID NO: 577831 - DNA, 75 bp, Homo sapiens
ccgagaaggagggaggggaaacacaaagccggctacgcgctgcgaggggatatgcaacgaagcatgttgttgaag

SEQ ID NO: 577832 - DNA, 82 bp, Homo sapiens
gccggggaccgccaccccgcaggtacgggggcggtggctacggacgccggagccgcaggtaccccaagaagctagtgcagac

SEQ ID NO: 577833 - DNA, 90 bp, Homo sapiens
tgatctctctcgctgtgagacatgtctgagactcctgctcagtgtagcattaaggtgccttcttcatcccctacctcgtcttcctcttta

SEQ ID NO: 577834 - DNA, 89 bp, Homo sapiens
ggaaaatcgcttggttaaaacctgacacttttaacaggaatgtttacccttgcggaagttgcatcacttaatgacattcagccaactta

SEQ ID NO: 577835 - DNA, 100 bp, Homo sapiens
cctcggcactgtattctttacctgcttcccaatcccactgatgaggatcagcccatgattgaggaacttcagcaggctttaatagtaaagcaaaatgaag

SEQ ID NO: 577836 - DNA, 98 bp, Homo sapiens
gagtgcgtcaaggactccccgcgcttcagagaagttgatgacgcctgagatgttttcagaaatcctctgtgacgatctggatttgaacccgctgacgt

SEQ ID NO: 577837 - DNA, 74 bp, Homo sapiens
ccctttataattggctaatacaagtcgaccttgcagataagctgctacaggagacggtggctcagggagtaaag

SEQ ID NO: 577838 - DNA, 75 bp, Homo sapiens
tgccaaagcattctctaaagacttgccaagaggtgcaagttttgaaactgcttttgaatttgtctgaaaatccag

SEQ ID NO: 577839 - DNA, 100 bp, Homo sapiens
aattactacaaaactcccatcgcgtcgtggaggagtactttgtggcccccccaggtgtacgtgaacggagagtgggtgaccaacatcagcgagggaggca

SEQ ID NO: 577840 - DNA, 97 bp, Homo sapiens
caaaactgatagagaaactggacatcaaactggacagcgaggacaaggacaaagaaggcaaacccctgctgaaggaaatgcattctacagcaacgtc

SEQ ID NO: 577841 - DNA, 100 bp, Homo sapiens
tccatacctcaggagctgctgtcacctggaaaacacgtggcatgatcacacaacagacaggccaccaggaaaccctccccgaagaatgggtagaatcaat

SEQ ID NO: 577842 - DNA, 83 bp, Homo sapiens
catgagcgacagcggcgagcagaactacggcgagcggatttgaacatggaattcaatccttcagatcatcctcgggccagcac

SEQ ID NO: 577843 - DNA, 100 bp, Homo sapiens
tatgatttgtatttgactgagagaaacccactgaagacgtctgcgtgagaatagagaccaccgagatttggtcgtattgggcgcctggtcaccagggctg

SEQ ID NO: 577844 - DNA, 50 bp, Homo sapiens
tgagatggtagccaacccctcaggtccaagacaagctgctgctatctgcg

SEQ ID NO: 577845 - DNA, 74 bp, Homo sapiens
cgccgctgagcaagctgatgaaggcctactgcgagaggcaggacggggctcttcacccccgacatggcctttga

SEQ ID NO: 577846 - DNA, 101 bp, Homo sapiens
ctccatggcctctcctggactggctgcgtgaccccgacggctgcttctgggtgcaaatatatacagagcttcataatcagcccaagaccacatagagcaaa

SEQ ID NO: 577847 - DNA, 74 bp, Homo sapiens
ggagaagtgggcccccccggaccaccagactccgtgggaaggaggcttgtttaaactacggatgcttttcaaag

SEQ ID NO: 577848 - DNA, 96 bp, Homo sapiens
ggaatgtcggattgcacaccctgttgtgaagtgcacctactgcaggactgagtaccagcaggagaggttataagccctgagaagtatgacataaaa

SEQ ID NO: 577849 - DNA, 91 bp, Homo sapiens
ccatgttatcaatttcaggaagtcactgtaaatgtgaaaaaccccttccatacggctggggacttcaggctgaagtgcagtggcgtgatct

SEQ ID NO: 577850 - DNA, 100 bp, Homo sapiens
tcctggtcctgacgcccccctcccgcccggaaagctgcccagccaccagcaaccccccagattgggaaaatgaggtacgttagtgttcgcgattttaaag

SEQ ID NO: 577851 - DNA, 75 bp, Homo sapiens
gccagttaagattattcttaaaactctgaatttgccattttcagtggaaaacaagtggtcgttactagctaagat

SEQ ID NO: 577852 - DNA, 100 bp, Homo sapiens
agttggtcttgctgtctcaggagtggcaaaggtggaagaaaattcttgtcacttttgatatcaagcaagtggcttcctttttgagatattaaaaaaaaaa

SEQ ID NO: 577853 - DNA, 97 bp, Homo sapiens
ggaacaactaggctgcaagactttaaaggcaacattctacgagtttttgccagctcagacaccatcaagcatcctctggtatcacgattccaaaacc

SEQ ID NO: 577854 - DNA, 100 bp, Homo sapiens
gaggactttgtggaggtccctgagaaggaggggtatgagccacacatccccgaccacttgcggcctgagtatggacacgcaccaggctagcgccttcgat

SEQ ID NO: 577855 - DNA, 81 bp, Homo sapiens
aaggccaggccacagatgagaagaaggagcccaaggaaatgaaacacgatttccaaaatgaacttaatctttcatgagaaa

SEQ ID NO: 577856 - DNA, 74 bp, Homo sapiens
tctgcagaactagccctgggtgagaacagcgaagtcttgaagagtggccgggttcgatacaagaggctgttttc

SEQ ID NO: 577857 - DNA, 107 bp, Homo sapiens
accggctgtatgattaggccacaatcttcaatgagtaaacatattcctacctgcctagagctggaacgttacctccagagcgagccctgctatgtttcagcctcaga

SEQ ID NO: 577858 - DNA, 101 bp, Homo sapiens
atcaaatggcattagatttagaacaacttctaaatcatcgtgagtttttcagaagaagtgaagtcaagatgaagaaccatttgcttttctggggagtcctg

SEQ ID NO: 577859 - DNA, 50 bp, Homo sapiens
atcctgcactcttcctccctcaggcccgatgagagaaagggaaagttaag

SEQ ID NO: 577860 - DNA, 80 bp, Homo sapiens
ggcctgggttacaagcagcaagtgcgcggttggggccactgcgaggccgttttagttttccaagagataacttcaccaag

SEQ ID NO: 577861 - DNA, 100 bp, Homo sapiens
ggatgaagaacgggatcctctgctgcatagtttcggtcatctaaaggaggttttaaacagtataacaggtaagaatgattgatgttggctgatattggag

SEQ ID NO: 577862 - DNA, 75 bp, Homo sapiens
agagcgtgaccgagagcgcgaatatcgtcatcgttagaagggtcaaagaaggctcttccaagaaacatgtagaag

SEQ ID NO: 577863 - DNA, 82 bp, Homo sapiens
ccgagtggtctgccgagaagccagtcacgccgggagctggtacacagcctcaggctaaaactccagttctggttgagacaca

SEQ ID NO: 577864 - DNA, 83 bp, Homo sapiens
cacactatggcgctgaaacggattaataaggacaccattggagaaactgggcattttaccaaggatttgactggaatggcatg

SEQ ID NO: 577865 - DNA, 82 bp, Homo sapiens
ggaaaaggacgcaaagttctccggcgaggtgagaagccctaccactgcaactgggacggctgcggctggaagtttgcgcgct

SEQ ID NO: 577866 - DNA, 74 bp, Homo sapiens
aaactccccttgaacgtgctgggctgaccttcctctgatcacaggcaagattattcaccttaagcgatttcaat

SEQ ID NO: 577867 - DNA, 83 bp, Homo sapiens
atctcattgccacggctgaaccctccttctcaatcttggaacagcacccccttctttaaggccaaacgtaccaagaaagtcgg

SEQ ID NO: 577868 - DNA, 103 bp, Homo sapiens
ctgcccaacatccaggctgtactgctccccaagaagactgagagtcaccacaaggccaaggatggagcagcatattgtatgggacgtatgaattctgactgtt

SEQ ID NO: 577869 - DNA, 100 bp, Homo sapiens
ttaggaggctgggaccgcagcccagagccatgatgtactctggggagcttaagtttgagaagagaacgtcctcagcccaggtggaaggtggcgtccatag

SEQ ID NO: 577870 - DNA, 110 bp, Homo sapiens
aggcgaggctagggaggacctcacttccccggggtgtaataatgttaactgagttgaaagatgcatgagtgtgatgcagtccgggacacagatgatcaagctgaaacgtg

SEQ ID NO: 577871 - DNA, 89 bp, Homo sapiens
gtccaggcgggcctcccgtttctggctccgggctgagcttcctggagaagaggaagttctggcataaagcatgcttccattgcgagacc

SEQ ID NO: 577872 - DNA, 75 bp, Homo sapiens
gggcaagtgtcattgcgagggttcaggaagccccggcctgtgatcgtgagcgggtaagaaggtggatggctctgt

SEQ ID NO: 577873 - DNA, 82 bp, Homo sapiens
gagagcgcgcctagccggctcgcgaccgcggcgagtcctttgcacatgttggcaacacacgcatccgcatcggcctccctgc

SEQ ID NO: 577874 - DNA, 74 bp, Homo sapiens
catcacccaccaacaacaccacaataatccacagccaagaacattaaccaggtggtatttgttggaaatttctt

SEQ ID NO: 577875 - DNA, 75 bp, Homo sapiens
tcaaaaatagtgatagctttgataagttatgagtgccagtgagccgccttagatagaagcatcgtcagcacttta

SEQ ID NO: 577876 - DNA, 82 bp, Homo sapiens
cagagatgcagcggcattatgtcatgactctttttgatcagaacaatgctgcaaaaaaagaagagtcagaaactgccaacaa

SEQ ID NO: 577877 - DNA, 90 bp, Homo sapiens
tgaaggggcagatgacttacaattccaaaagctgagacaagatcttgaaatggtactgtccactaaggagtcaaagaatgaaaagttaaa

SEQ ID NO: 577878 - DNA, 100 bp, Homo sapiens
ctgcgcatcactggctactatggctaccagccctgggcagcgagctgcaaaagcaaggcactgacgtttcttctgctacagcctccaagccccaaacttc

SEQ ID NO: 577879 - DNA, 75 bp, Homo sapiens
ggcgcttcagctgcgaccgcgagccctctcaagcaaggtcctggctataagtcaccatggcacagcaagctgccg

SEQ ID NO: 577880 - DNA, 100 bp, Homo sapiens
atcgcaaggctcttccctgaccattttctactgtccctgcgcgaggatgaatcaatgagacacatttctgagggctgcccgggggtcctgtgtctcaatc

SEQ ID NO: 577881 - DNA, 85 bp, Homo sapiens
tcggaacacgagcgagattcctctggttctggtgggaacccaggatttagctttggagtcaaacccttctgaccatccaagggca

SEQ ID NO: 577882 - DNA, 80 bp, Homo sapiens
tataccttcacccagcatttcatccctcgtcgaaaggattggattggcatctttagaggaaatgatcttcattggttagc

SEQ ID NO: 577883 - DNA, 75 bp, Homo sapiens
caaatccgcgatcccagtcatgcatctgatcactggagattccatcgttagtgctgaggcagtatgggatcacgt

SEQ ID NO: 577884 - DNA, 97 bp, Homo sapiens
cggaagcggaagcggtgggaaatggatcgaggctatggaggctatgatgattacaatggctataatgatggctatggatttgggtcagatagatttg

SEQ ID NO: 577885 - DNA, 100 bp, Homo sapiens
ctcctgtgccgcctggagctctaccgggctgcccagatcatcctgaactacctgcctagagctggaacgttacctccagagcgagccctgctatgtttca

SEQ ID NO: 577886 - DNA, 100 bp, Homo sapiens
agaggaagatggacagctgggaattgctgaattagaactgcagaggttcctctacagcaaggccccatcacaggtatatggaggagtgacctactataac

SEQ ID NO: 577887 - DNA, 50 bp, Homo sapiens
cggctgtgaaggacctgtttggggaggttctgacaacaaaggagattgtg

SEQ ID NO: 577888 - DNA, 83 bp, Homo sapiens
tgtatttggaacaaaaaaaggagatgcctggcagccccgctctctgcaatatggctcgtggacagcagaaaattcagtctcag

SEQ ID NO: 577889 - DNA, 100 bp, Homo sapiens
gggactgctggttatcctgaggcccgggccctacatctgtgcagagtgggaaatggttcgttccaccagtcataaaccagatgaaatctatggcatgatt

SEQ ID NO: 577890 - DNA, 97 bp, Homo sapiens
aagagaaaaatggcacctgtcaagataatggagacatcaaatttctgactaaaggagataataatgaagttgatgatagaggcttgtacaaagaagg

SEQ ID NO: 577891 - DNA, 99 bp, Homo sapiens
cgacaagccgctggcagccgcggatctcaccgccgctcaggaacatggtccaagacaattcctgggaaagttcagttcttctcaagtgagggttctgac

SEQ ID NO: 577892 - DNA, 96 bp, Homo sapiens
cgctagaactcagttgtgcgttgcggccagtcgccactgctagcataaccttcggtggcaggacaaatcaggccagcacgcagtctgccaagtcct

SEQ ID NO: 577893 - DNA, 100 bp, Homo sapiens
actagtaagcctatgtcatttcatccaccacattacttaggtgtgtgcggattttaggcaaacaagaaaatattagagtgatgcaattggctttgttcca

SEQ ID NO: 577894 - DNA, 100 bp, Homo sapiens
agaagactctagatgtttttaacataattttagcaaggcaacaagcacaagttgaggaatgctgtctctgcaatttgagaggaggtgctcttaagcaaac

SEQ ID NO: 577895 - DNA, 87 bp, Homo sapiens
ggaagaccgcgcgcagggcctgcagcgggagctggacggcgagcgcgagcggcgcgagaaactgtttgcagacaaggtcccaaagac

SEQ ID NO: 577896 - DNA, 90 bp, Homo sapiens
gaaacttcagcaggcgatagcaatgcacagccaatttcatgctccactataggtaaggggcctggataccaagaagtgactgctcatcta

SEQ ID NO: 577897 - DNA, 82 bp, Homo sapiens
agcaaaaagaggttgattacagcggcctcagggttcaggcaatgcaaataaggtttcccaacagtgatgtcacaagattgac

SEQ ID NO: 577898 - DNA, 98 bp, Homo sapiens
atggttccaagtattccctatctaggcccatggagagactgcctgcaggccctggaggatggccacgacaccagctccatctacctggtgaagccgga

SEQ ID NO: 577899 - DNA, 83 bp, Homo sapiens
gtcgtctttgcttcagccgcagtcgccactggctgcctgagcagcctcccgcgacgatgcccctcaacgttagcttcaccaac

SEQ ID NO: 577900 - DNA, 98 bp, Homo sapiens
gccgcgcgccgtggccgcgtcccactcctcaggccggggcgcacgtcggctcccacgcttagccagctcccggtttgatctgtggatgaaatgaatca

SEQ ID NO: 577901 - DNA, 82 bp, Homo sapiens
ccgcctcttggtttgcgtcctgcactgaaaggaaatgacggattttgccagaggcattgatgtgcagcaggtttctttagtc

SEQ ID NO: 577902 - DNA, 83 bp, Homo sapiens
ccttcgaccttggacttctcagcctccagaatggttttactgcaatcacagcaaccaaccccatttggcttataaagactcgg

SEQ ID NO: 577903 - DNA, 126 bp, Homo sapiens
gaaggatataccagtcactatccacaatttagaggagtatctaagaatttctcgaatgctggcagccaaaaccgttttggctatccgttatgatgcttttggtgaggattcaagttctgcaatggg

SEQ ID NO: 577904 - DNA, 115 bp, Homo sapiens
catcaacctgcgtgaggtcaacctgcgcccccagatgtcccagggcctctgaaaaatggaaccaaattctctgaggactaaagtcccagctttcttatctgatttggggaaggcc

SEQ ID NO: 577905 - DNA, 101 bp, Homo sapiens
ctgaaaagtcgcagcgagctggagccgccggaggttaggcaactagattcagcattggaaatttgtaaggaagaacttgtcttgcatttgaatcaattgga

SEQ ID NO: 577906 - DNA, 89 bp, Homo sapiens
ctgtacttctatatctacaagggggtccgcaaggacaactacacctttgcccaacctgggattcaaatgaaagtgaaaatgttagaaga

SEQ ID NO: 577907 - DNA, 98 bp, Homo sapiens
cagggaggatgacggagctgcagtcggcactgctactgcgaagacagctggcaggtactaggttttgacaagcttgcatcatgcgtgagtataagcta

SEQ ID NO: 577908 - DNA, 51 bp, Homo sapiens
cccctgccccttggctcaaagggatggcaatggttatatcagtgcagcaga

SEQ ID NO: 577909 - DNA, 90 bp, Homo sapiens
ctccagcctgcagtgccagaattcctcggtgatggaggagttgcaggccgcctccgtgcacagtgatgagagggagctgctccagctgct

SEQ ID NO: 577910 - DNA, 97 bp, Homo sapiens
ttgactactcgcatcgcgcactttttggatcggcatctagtctttccgcttcttgaatttctctctgtaaaggaggtggaacctaacttcttgtgga

SEQ ID NO: 577911 - DNA, 100 bp, Homo sapiens
gctggagcctcaggcggcagcgcttctaggctgtggaaaatctctgttctcacaaagtctccccaatgctctacaagcaactgcgtcaggcctgtgaaga

SEQ ID NO: 577912 - DNA, 100 bp, Homo sapiens
ccccctgttgctgctcctgctgccgccgctgctgctgggggccttcccgccggccgccgccgcccgagactctaaaatagagctcaagcttgagaagaga

SEQ ID NO: 577913 - DNA, 75 bp, Homo sapiens
cagaggactgcagaaaatcaacctatcctccttcaggaccaacgtttgtgaatttcccagaccagccggtggtgt

SEQ ID NO: 577914 - DNA, 90 bp, Homo sapiens
aaatgcatttgcacagaagcatctccggtctataatcctgaataattgaagatgttcctgctccttctacatctgcagataaagtggaga

SEQ ID NO: 577915 - DNA, 100 bp, Homo sapiens
gagtagtttcaaatacaagattgattgctgctgctacttctgtatgaactgaagaggagtttggaggtcttgtatcagctaatcttatacttttgaggaa

SEQ ID NO: 577916 - DNA, 100 bp, Homo sapiens
gcacgtggatcctgagaacttcaggacttaattcagtgcacaaatgagatgaatgtgaacatcccacagttggcagacagtttatttgaaagaactacta

SEQ ID NO: 577917 - DNA, 74 bp, Homo sapiens
ctgaagccgcctctgcaggctcctgcaaagctgtagagggcttactagatgccacaagtggtgctgatgctgac

SEQ ID NO: 577918 - DNA, 83 bp, Homo sapiens
gaagaaatagaagctgaatatgctgcattagacaaacgagagtttcaccagtgatcattaaagaatgggcagcttacaaagga

SEQ ID NO: 577919 - DNA, 51 bp, Homo sapiens
cttgaacaaggcaaatatggttttggacttggcctttaccctggaagagag

SEQ ID NO: 577920 - DNA, 50 bp, Homo sapiens
gagttctctgtgtctgtgaaaaaagctattccgaagtttggaatgatgac

SEQ ID NO: 577921 - DNA, 75 bp, Homo sapiens
ttccctggctcatgttgctcacagctgatgaccaaacacccaggcaaacgtctgggttgtggacctgaaggcgaa

SEQ ID NO: 577922 - DNA, 50 bp, Homo sapiens
actgagaacatcagcaccagcacaggttcctaggagaatgttaacagtcc

SEQ ID NO: 577923 - DNA, 100 bp, Homo sapiens
actggtcgaatgaggcacctaaaaattgtataccgcagattcagatatttgttcagtcgaatcaaggtgaagaggaaacaacaagaatttcatattttac

SEQ ID NO: 577924 - DNA, 100 bp, Homo sapiens
tgctgcccggacgtggaagcagcaagaggcgcttggtcaagacacactgacggagggtgtgaagacagagaatgaccacatcaacctgaaggtggccggg

SEQ ID NO: 577925 - DNA, 96 bp, Homo sapiens
cccacatcaatgcactgccaatggattcatgcttaacaagtctagcatcatcatcacttaaacaaattcttggagattctttttcaccaggatctg

SEQ ID NO: 577926 - DNA, 116 bp, Homo sapiens
gttcgcggtgcagatgacctgtcagagctgtgtggacgcggtgcgcaaatccctgcaaggggtggcaggcacacagaggagtactttctgcctcggatgatacaggacctgacaaa

SEQ ID NO: 577927 - DNA, 50 bp, Homo sapiens
gctgtgcagctccttatcatgctagtgtcagcagtgggatacctgcgctt

SEQ ID NO: 577928 - DNA, 87 bp, Homo sapiens
ctccaggccaagagggatccttcacccgtgtctgagctgagctcaatgtgcagcaatggatgacgacagcctggatgagcttgtggc

SEQ ID NO: 577929 - DNA, 98 bp, Homo sapiens
agccctgcacgaccagctgaaccgcctcaaggcgggagacactatattcaatcgtgctaagctcctcaatgttggctttcaagaagccttgaaggact

SEQ ID NO: 577930 - DNA, 100 bp, Homo sapiens
ttaaatgaacttccaaatcattcttctggagaagctcaactttcagataagtttttgtaggatctgggcacgaaagcttctctctgtcccttggcttctg

SEQ ID NO: 577931 - DNA, 51 bp, Homo sapiens
gcacacagccaaagtctgcaaagggtgatcagcccatgacctaaacctcca

SEQ ID NO: 577932 - DNA, 100 bp, Homo sapiens
gtacaagaactgcaacggggtggtcatgatgttcgacattaccaagcagtggtatctcaggagattacatttcagcttgaaaaagggtcggtggaattta

SEQ ID NO: 577933 - DNA, 83 bp, Homo sapiens
ccgctgcagcgcgggccccgcagaggaaggaagccggcgggcggggctatgactttgcagccgtcctggagtggttcgcggag

SEQ ID NO: 577934 - DNA, 76 bp, Homo sapiens
ctccagccgaaggagaagggggtgcaccaattccagctggacatcactgtgaaaatgggacgggataaagtccgag

SEQ ID NO: 577935 - DNA, 100 bp, Homo sapiens
attgttggaagaggccacaacagacgtggaaccggccatgcaagtaattggtgtcatggagaaactccagctgggcccagagattctgcagcgggaaaat

SEQ ID NO: 577936 - DNA, 100 bp, Homo sapiens
gctgaggaagtctgcatccacattgcacataaagttgcctgctcctgcaaccagcacgcccgacgctgccggttcaactctgagctgttcagactgtcgg

SEQ ID NO: 577937 - DNA, 82 bp, Homo sapiens
gagcacgttcttccaagaaaccaacattcccaacagccaccaccaccaccagatgtgattccgtataggtcagtgatcatcc

SEQ ID NO: 577938 - DNA, 83 bp, Homo sapiens
actgctgcctctgtcactcctggtgaccagcattcaagtcatccgtccttggctcaggatttggagagcttgcaccaccaaaa

SEQ ID NO: 577939 - DNA, 75 bp, Homo sapiens
ggccgaagggtccccgggacccgcctgctgagtggacccgggtgccgccatggcatcagatgaaggcaaactttt

SEQ ID NO: 577940 - DNA, 100 bp, Homo sapiens
gatgaccaatttgcagatcaaggaagagaaagtcaaagcagataccaatggttggcaggtttgactgttcctctgcaccagacatctgtagtaatctgta

SEQ ID NO: 577941 - DNA, 82 bp, Homo sapiens
gcggatgtcggcgaagagttcaaccagattgtagaaggcatgaaacaaaaaatgtggagtattgaaaatattgccttcggtt

SEQ ID NO: 577942 - DNA, 82 bp, Homo sapiens
ggcgaaaattggatgtgaaaatgaagccagaccgagtgtaaacaggaacatcgataagtagtgtaaaaacttgcacaatgaa

SEQ ID NO: 577943 - DNA, 82 bp, Homo sapiens
tgtctcgactgcactttgagaagacactttataaaacccaggtaaaggaacttaaagaagaaattgaagaaaaaaacagaga

SEQ ID NO: 577944 - DNA, 100 bp, Homo sapiens
cattgccgtcgacggcgagcccttgggccgcgtctcctttgaggtgggtcttcaaacaactctatgataaaggccttgtttatagaggtgtgaaagtcat

SEQ ID NO: 577945 - DNA, 100 bp, Homo sapiens
cttacttgctacgcactgatgttttctttctgccactattactattttcttccactaaaaaagcgtaatttggaaaaggggaagatagtgatgtactcag

SEQ ID NO: 577946 - DNA, 100 bp, Homo sapiens
tcctcggttctccatacccgtgacctggggatcgctacggaccttaaaatacccgcaacagccccttcgtcccaaacgcaagatggctgtcctctctaag

SEQ ID NO: 577947 - DNA, 83 bp, Homo sapiens
cactccagaagagaggtatcagaagcttaaaaagaagatgcaagtggaccaggaggaaccacatgttgaagagcaacagcagc

SEQ ID NO: 577948 - DNA, 100 bp, Homo sapiens
acagacacatttaaaagggcaagttacatccctgcatctgatggtgtccaggtcttggctatatgccatgtgccgagggattgaacatgatccagttaaa

SEQ ID NO: 577949 - DNA, 99 bp, Homo sapiens
cttctggcggccatggtgttgctgctgtactccttctccgagttacactgttagaccttatgatagccaagataacgagtgatgagccactcaccaagg

SEQ ID NO: 577950 - DNA, 100 bp, Homo sapiens
ttttaatcctgttttggaaacttacattaagaaacactttagtgcaacgttagcctacacgcaaaatttggtttctctaatattactggaattgattact

SEQ ID NO: 577951 - DNA, 75 bp, Homo sapiens
ctcgcagcacttggagcgcagaaccggccgcgcccgcttccccgggcgctgcctggacaggcctgcctgcgtgct

SEQ ID NO: 577952 - DNA, 85 bp, Homo sapiens
aaagaagccaaagagaaaggtacctgggttcaactaaagcgccaggtggaagttgatgggtcgaaactaaatgtgaccagcacgt

SEQ ID NO: 577953 - DNA, 74 bp, Homo sapiens
gctgcggccggagcgggcggctgagacaaaggcgacgcattttgaaagcgaagcagaagccgtagaatcagcgg

SEQ ID NO: 577954 - DNA, 50 bp, Homo sapiens
gccaggtttgctgtcctcctaacagattgctcgctgtaagcagctcatct

SEQ ID NO: 577955 - DNA, 90 bp, Homo sapiens
gccgctcctggcgctgctggccgcgctgctgctggccgcacgcggggctgctgcccaagggacagtatgatttggtgaaatgcctggctc

SEQ ID NO: 577956 - DNA, 51 bp, Homo sapiens
ggcggctcgggctcctgtgtgcgggagaacccatacgtcatgcgccggccc

SEQ ID NO: 577957 - DNA, 75 bp, Homo sapiens
tttctttgtggagtatcatctcaaaagttaggattgaagcctgcatgtggtttttcagaagaagtgaagtcaaga

SEQ ID NO: 577958 - DNA, 75 bp, Homo sapiens
tctaccaggtcaactgcaatgcctggcttctgcccgacctcacccgttacatccactaccagcctgcccaggacc

SEQ ID NO: 577959 - DNA, 82 bp, Homo sapiens
atctgtggaaatcgatgatgcattgtatagccatgaagactttgaatttatttcaggaacacgaatgcgcaaacttgctcga

SEQ ID NO: 577960 - DNA, 83 bp, Homo sapiens
gctggctacagcttcagaagaccgaagcgttcgtatctggaagtaagactttgaccccgacgcaggcttcagtgattgccgcg

SEQ ID NO: 577961 - DNA, 96 bp, Homo sapiens
caaggagaccaggaaggggtgagacaaggaagaggaatacggggtgctttgcattcaggaatacagaaaaaacagcaaagtggagtcaagtacacg

SEQ ID NO: 577962 - DNA, 100 bp, Homo sapiens
tctggacacagaagtatttgtgacagcatcctgaggttagcattacacttctcccagtggagcccatgacttctgatcaggacgctaaggttgtggctga

SEQ ID NO: 577963 - DNA, 96 bp, Homo sapiens
gtgacacagttcacatcctggagatgtacgaggaacacagatatgtagaactcttcttgaattctacagcaggagcaagcggtggtgcttatggta

SEQ ID NO: 577964 - DNA, 100 bp, Homo sapiens
actaagacttcttgctcatttctgagtattgtctttatatcctgacactatgaatgctacttggatgcctcttaagatccttcatgatgagagatttggg

SEQ ID NO: 577965 - DNA, 101 bp, Homo sapiens
ctcatggcctgggccctctacctttcccttggtgtgctctgggtggcccagatgctactgggatgccttccgtgccttccatcaagatctcaattttgtgc

SEQ ID NO: 577966 - DNA, 100 bp, Homo sapiens
ctcctgcttccagacgacaagtcgacaatgcagatcttcgtgaagactctgactggtaagaccatcaccctcgaggttgagcccagtgacaccatcgaga

SEQ ID NO: 577967 - DNA, 100 bp, Homo sapiens
gggccggttgccgggcgcgggcgagaaagatttgtcaaagatgaaagtgaccttatcagctttggatacttctgagagttctttcacacctttggtggtc

SEQ ID NO: 577968 - DNA, 100 bp, Homo sapiens
cacttggtggcgtctgatgctgaactggatgctaaacttgaggccacggaaaggtatgatatatttgatccaagacagtccattccagtccgggaatcta

SEQ ID NO: 577969 - DNA, 95 bp, Homo sapiens
gggatccacacagctcagaacagttggatcttgctcagtctctgtcagaggaagatcccttgcatgcatatgcgctagaacttctatttgatcag

SEQ ID NO: 577970 - DNA, 89 bp, Homo sapiens
aggagttcgtctcttacgtctgcggaagtgcagctgcctcagttcttagcgcagattagaagcccaggacccaggaaggagacacagga

SEQ ID NO: 577971 - DNA, 51 bp, Homo sapiens
catgatacagttgataaaattgttggaactggtgaaacagaaggtgaaacg

SEQ ID NO: 577972 - DNA, 90 bp, Homo sapiens
cgccaacttcccggtgcggcccagcgacgtgtggatcgtcacctaccccaagtccggggaacgcccttttgcttgtgactggcagggctg

SEQ ID NO: 577973 - DNA, 75 bp, Homo sapiens
ctgaactaaaggctgactttccagacaacactattcagactatgaagacagttccctcgaatttttggaaaggtg

SEQ ID NO: 577974 - DNA, 75 bp, Homo sapiens
ctgctatggaagctgaaatactgaaagaaattcgagaagctgcaaatgccattgttgacctcctgtactggagag

SEQ ID NO: 577975 - DNA, 100 bp, Homo sapiens
tgatgatgatgaaattgatgatgatgatacaatttctgactggaatctaagttggtcaaagaaaaagtgatgtatgaaaaagaggcaaaacaacaagaag

SEQ ID NO: 577976 - DNA, 80 bp, Homo sapiens
ccagtctccgccggggtcgtcggacaagaaggagccaggcagggcccactgatgatggtgaagaagagatggaagaagac

SEQ ID NO: 577977 - DNA, 75 bp, Homo sapiens
tgaagacgttatttaccatatccagtatgatgagagacggtggctcagggagtaaaggaaggccagttgagcaaa

SEQ ID NO: 577978 - DNA, 98 bp, Homo sapiens
cctggcatccaagcgtttccgtgccgagcggcaggacaacaaggagaactggctgcagatgatctgtctgctgtgcgtccggaccgcgtcctctgtgg

SEQ ID NO: 577979 - DNA, 100 bp, Homo sapiens
atgagaaagtggggtttcgtggagttgaagaaaagaaatcattagaaattctcctaaaagatgaccgtctgggcacggaatgttaacactggtgaattag

SEQ ID NO: 577980 - DNA, 75 bp, Homo sapiens
ttcaagcgctatgccaagaagcgaaatgtgctcattggccattcctacggggagtgcatccgccccaaccctttt

SEQ ID NO: 577981 - DNA, 98 bp, Homo sapiens
tgcaggcagcaccggaggcccaggtctccgtgcagcccaacttccagcaggacaagtgtattgaaaatgtgtcccgacagaattgtccaatatgtttg

SEQ ID NO: 577982 - DNA, 100 bp, Homo sapiens
gaaatatttcaggcaccagaagttttgcagatgagaacaatgttttccatgaccctgttgatgacttaattcagtgcacaaatgagatgaatgtgaacat

SEQ ID NO: 577983 - DNA, 90 bp, Homo sapiens
ttttgatccagaagaggatgaacccacgcttgaggcctcttggcctcacatacaggtgctgttacactaccaaactgtcagtgaacccgc

SEQ ID NO: 577984 - DNA, 100 bp, Homo sapiens
gcaggtggtcagacatgtcatcaactcagctggggttgtgtccactgtggtccccgactctgcccacaagctgttcatcgggggcttacccaactacctg

SEQ ID NO: 577985 - DNA, 80 bp, Homo sapiens
acgtgaggatcaagaagccggactacaaggtcgcctacgtgcagctggattatatctgtccaagatgcgagtctggtttt

SEQ ID NO: 577986 - DNA, 75 bp, Homo sapiens
ctacaacaggaaaatcatattatagatggagtaaaggaccctgatgctcccataagacagaaaatgccccttgat

SEQ ID NO: 577987 - DNA, 75 bp, Homo sapiens
cccacacccaccaaatgcccctttgggtccgtcaggccaaagaagcccaggatgacctggtgaagaccaaggagg

SEQ ID NO: 577988 - DNA, 100 bp, Homo sapiens
tcggaagaggaccggaggctctggatggaagccatggatggccgggaaccttgacaaccatgagtggaaaaaactaattatggttcagcactggcctgag

SEQ ID NO: 577989 - DNA, 100 bp, Homo sapiens
ccgagcaggtcacgaggacggagggccatgtgttgggtcagcaccatcagaataccctctaccatctgctttggtcagggtgccgctcgaggatttaaaa

SEQ ID NO: 577990 - DNA, 83 bp, Homo sapiens
gcagagaacttgccggtgccagctgagggcgtgatggtgggcatgggtcagaaggattcctatgtgggcgacgaggcccagag

SEQ ID NO: 577991 - DNA, 100 bp, Homo sapiens
aatggtaaaaaattggagacagcggttgccaacttggcctgttccatctcaaataatgaagaaggtgtaaagcttgttcgaatgtctgcaagccagttag

SEQ ID NO: 577992 - DNA, 93 bp, Homo sapiens
gggaaatcgggctgaagcgactgagtccgcgatggagtgaaggagaacgacctgctcagaatgagaagaggaaggagaaaaacataaaaagag

SEQ ID NO: 577993 - DNA, 97 bp, Homo sapiens
ttaatgatgatgtcaggagggcagcagtagaatcacttgggttcattctattcaggcaagaaataatggcggcagctacgggggatcctggactctc

SEQ ID NO: 577994 - DNA, 96 bp, Homo sapiens
gccccgtgtcctgcaggtattgggagatccacagctaagacaccgggacctcctggaagccaaaaatgggttggattagtagaatctaaaatccgt

SEQ ID NO: 577995 - DNA, 74 bp, Homo sapiens
ctcgctcgacgtgttgcagcacatcctcatccgagcctttgatttgagtgggttggtcctgcactttggtggtg

SEQ ID NO: 577996 - DNA, 90 bp, Homo sapiens
ggtcccgccggatcccgaagacgagggcctggaggaaacagacttaattcagtgcacaaatgagatgaatgtgaacatcccacagttggc

SEQ ID NO: 577997 - DNA, 74 bp, Homo sapiens
ctggcagcagaaggtcaggtttgccaaaggaatcgcctccggaatgctgctttgctccccctgtggatgtaacc

SEQ ID NO: 577998 - DNA, 51 bp, Homo sapiens
cagaagaggaggttgcccagaagaaaaaggagttgatccctgaattttatt

SEQ ID NO: 577999 - DNA, 74 bp, Homo sapiens
agtaggagctgaaatctgtgccaggatcatggaagggttatgtggtccgaatcagtggtgggaacgacaaacaa

SEQ ID NO: 578000 - DNA, 80 bp, Homo sapiens
gtcaccccgactcaacgtgagacgcaccgcccggactcaccatgtaatagctcttcaagtctgcaataaaaaatggcctc

SEQ ID NO: 578001 - DNA, 75 bp, Homo sapiens
taaccacgaccatcaaatccgtgtcggagtccttacagtccgaggatcagaaggactgtacatggtgaatggacc

SEQ ID NO: 578002 - DNA, 100 bp, Homo sapiens
agaaagcagcagagagctcttcagacagctcagcaaaccagtccagctacgggggcccagccagccagcagctgagtgggggttacggaggcggctacgg

SEQ ID NO: 578003 - DNA, 100 bp, Homo sapiens
cagctctgaatgagcttctggtgtactatttaaaggggactttcccatgcctttcatatctgccaaatcgagtcctgtgattcccttggatggatctgtg

SEQ ID NO: 578004 - DNA, 90 bp, Homo sapiens
gagtacttcgccacttactttaatgagaagatctccattcctgaggaggagatccagctccaggtcccacaggggctcttcttccccacg

SEQ ID NO: 578005 - DNA, 50 bp, Homo sapiens
cacaaatgcacgcgacaggaaccagtggatggaactgaggttcaacactc

SEQ ID NO: 578006 - DNA, 99 bp, Homo sapiens
gacttatgtttcaggcatgttgagatttggaaatgtggtgagtgtcttcttccttccccaaattcagcagaggagatacaagggtatttgatgagggct

SEQ ID NO: 578007 - DNA, 74 bp, Homo sapiens
gacagatgaagagtgacttgtttctggatgattctaagagtttcactgttacatgccttgaagtgatgaggagg

SEQ ID NO: 578008 - DNA, 102 bp, Homo sapiens
agaagaggagtcggagccataataaaagcagggatagaaagcgcagatggccgccctgctcccccaatgaaaggccagcttcgaagaaaagctgaaagggag

SEQ ID NO: 578009 - DNA, 101 bp, Homo sapiens
aaaaagattccatttatagacacccttcattgcaagttcttatttgtaagagatgcccgagtggtaaaagacatggcaacaggaaagtctaagggatatgg

SEQ ID NO: 578010 - DNA, 100 bp, Homo sapiens
atggagttcctcctggggaacccgttcagcacaccagtggggcagtgcctcggcagaaactccgctgagcagaacttgccgccagaatgctcctcctgtt

SEQ ID NO: 578011 - DNA, 51 bp, Homo sapiens
cttcaatgcagattctagccaacataaaggatttttgtccctgagtcatgg

SEQ ID NO: 578012 - DNA, 89 bp, Homo sapiens
gaagcccagcttttccatcctggagatctacaggatttatcaaatcgagtcactgtcaaatattctctaagccgctttcatcatgggag

SEQ ID NO: 578013 - DNA, 100 bp, Homo sapiens
ccgccaccgctccgaccacaagatcaaccacctgggctgcctggtcttcagcaggtactccaaagattcaggtttactcacgtcatccagcagagaatgg

SEQ ID NO: 578014 - DNA, 100 bp, Homo sapiens
ggagtccaacatcaccatgcagaaatatgagattacggagcagcgcaagattgatcagaaagctgtggactcacaaattttaccaaaaatcaaagctatt

SEQ ID NO: 578015 - DNA, 51 bp, Homo sapiens
tggtcttctgatagcaactttaatgtgcgggacgaccctgggacagtctcc

SEQ ID NO: 578016 - DNA, 115 bp, Homo sapiens
tgagacttgtgaatatattaataggtgccttgcaaactgaaacggaccccaacaacacccaaatgatattagggagggcaatgagccaggggagaccactcagatcacataccat

SEQ ID NO: 578017 - DNA, 50 bp, Homo sapiens
cctgcctggacccctactattgcaacaagccggtggctgctggcagcgga

SEQ ID NO: 578018 - DNA, 74 bp, Homo sapiens
ggcgagcgcgagcggcgcgagaaagacactgcccatctctaagataagaacctggaaaggggactctgttggcc

SEQ ID NO: 578019 - DNA, 90 bp, Homo sapiens
cgctgcccgccggctccctcccccgcgtccctgcgaccgccgcggcgaagatgcagaatggggaaatggagagagaacctgaaagagccc

SEQ ID NO: 578020 - DNA, 75 bp, Homo sapiens
ccagcctgcggagcctgtggggcagcactgatgcaggtgacagccctgttggcactaccactgcaacgaacctgg

SEQ ID NO: 578021 - DNA, 82 bp, Homo sapiens
taccactattccaaccaagaagagccaggttatggaaacaaaggacatgctttacatcgtcactgaatttgctaaaaatgga

SEQ ID NO: 578022 - DNA, 75 bp, Homo sapiens
acaaactcgaagaacagctgtggaaagaagttgcaaaacactggtgtatgtggtagaagaccaaagaagagatga

SEQ ID NO: 578023 - DNA, 51 bp, Homo sapiens
tcagagctgcacaaagggaaaggagcagcccgacggccatggaggctgaag

SEQ ID NO: 578024 - DNA, 82 bp, Homo sapiens
cgcggtgggtcctcgcttgcagttcagcgaccacggctcttgtcaggatggtgaagctgttcatcggaaacctgccccggga

SEQ ID NO: 578025 - DNA, 75 bp, Homo sapiens
tctcatttaaaagctcacctgaggactcacactgcaagcagagatgaactccagtccagaaaagttaaattagac

SEQ ID NO: 578026 - DNA, 101 bp, Homo sapiens
ctgctcttcccgctgctgctcttctccaggctctgtggttgcacgttttcaaaaaatacctaatggtgaaaatgagacaatgattcctgtattgacatcaa

SEQ ID NO: 578027 - DNA, 99 bp, Homo sapiens
gaacctcgagaccaacgtggaggagctgtgggtggaaggtcctgcagacattcgctttgtctgggagaagaatgggcgagctctggagacctgtgtccc

SEQ ID NO: 578028 - DNA, 102 bp, Homo sapiens
aaaggctgttacttgaaagaacacactgcttggttaatgttggagaagattgtccagtgtttgatggactctttgagttttgtcagctctcaactggcggtt

SEQ ID NO: 578029 - DNA, 83 bp, Homo sapiens
cgcctcccggctctcgtcagcctcccgccggccgtctccttaacaccgaacaccgagtcagagtcagaagcaaaggtagatgg

SEQ ID NO: 578030 - DNA, 75 bp, Homo sapiens
tggctaactcctgccaggcagtgcccttcccggagcgtgccctcgccgctggctactgcagcactggggtgtcag

SEQ ID NO: 578031 - DNA, 75 bp, Homo sapiens
gcctggagctctaccgggctgcccagatcatcctgaactgcctggtgcaatggctcacacctataatcccagcac

SEQ ID NO: 578032 - DNA, 97 bp, Homo sapiens
agaatgtgacaagaagtcgaagcaagacttaccctaagcgaatagcacaaacacagccagctgtaagctgtgctagaacaaaaatgcaatgaaagaa

SEQ ID NO: 578033 - DNA, 96 bp, Homo sapiens
aggcaggaacagcacccggacggactacgagtaccagcactccaatttgtatgccatatcaggtatcaaggttacattggtgcagccctagtttta

SEQ ID NO: 578034 - DNA, 75 bp, Homo sapiens
gatatgtgttgctaatacccatctttactggcatcctaaagtgttgctaacaaccacaagcagaatttgatgacg

SEQ ID NO: 578035 - DNA, 87 bp, Homo sapiens
gcaccagcaggagcaagagaaactccaggggcagataagggagtccaagaggaattcccgcttgaaaactttagaaactgttccttt

SEQ ID NO: 578036 - DNA, 100 bp, Homo sapiens
tcaccctcagaaggtgaccaagttcatgctgtgtgctggacgctggacagggggcaaaagcacctgctcgtgtttctacacctgtgggttatgacaaaga

SEQ ID NO: 578037 - DNA, 127 bp, Homo sapiens
ctgggggctgcggcctagaggtccgggcttggagttcgcctcagacgcggtggagccgccggagtctgagaagttttaacttctagtcatggcgaatgatcgcaggagagcacagactggaccctgc

SEQ ID NO: 578038 - DNA, 98 bp, Homo sapiens
ctgtgcttgagaccaacctgacgggtaccttctacatgtgcaaagcaggcttcagggatgacttcttagggggcaggggaggtagtcgcccaggcgac

SEQ ID NO: 578039 - DNA, 90 bp, Homo sapiens
atcatgatacagttgataaaattgttgtcacattgcttccatgctgtcaagccaagacctgaagatagtagtgggagcacttcagatggc

SEQ ID NO: 578040 - DNA, 75 bp, Homo sapiens
cagagcagattctgaaacttcttgacaatttgcttgcgcttataagtgagggtcgctgtctgcccattgatagag

SEQ ID NO: 578041 - DNA, 100 bp, Homo sapiens
cggagatgaagaagaagagccagcctttggaaaataaagagactctgaagcatttggcatctctttatgcaaataatcatccatccatgcacatgggtca

SEQ ID NO: 578042 - DNA, 51 bp, Homo sapiens
cagccatttactaactgtgtgaccttagtatgtgccaagagttgtaacctc

SEQ ID NO: 578043 - DNA, 109 bp, Homo sapiens
ggagacgcggcctcggaccagccatttcggtgtagaagtggcagcacggcaggtcgtccttggtggaaggaaccatgaactggcatctccccctcttcctcttggcctc

SEQ ID NO: 578044 - DNA, 75 bp, Homo sapiens
ggaagatggcggcgccgctcatccccctctcccagcagcggaaggagagttttacatggaagtggcttacagaaa

SEQ ID NO: 578045 - DNA, 100 bp, Homo sapiens
ggtggctgggatccgcagggctcccctccttcaggaactggaaggaggcaaaaccggaagaccttatggattcaaaacttagatgtgtgtttgaattgcc

SEQ ID NO: 578046 - DNA, 115 bp, Homo sapiens
ggcgcggcggcggcacgatggtcatggcgtatttcgtcgagaatttttggggaactgctcgcagaaagaagaaggtggttcatagaacagccacagcagatgacaaaaaacttca

SEQ ID NO: 578047 - DNA, 49 bp, Homo sapiens
cctgccgccgcggcggcatctgggctcaacaccacatggaagctgccaa

SEQ ID NO: 578048 - DNA, 90 bp, Homo sapiens
ggctttctgctgccgcccgcaagcagagtgattcgcctttgccagtctcatctcgtgtctgctttgttaagttccatgatccagactcag

SEQ ID NO: 578049 - DNA, 100 bp, Homo sapiens
cgtccaggacagtatgtggatgtcacagccaaaacgagctgggaatcccaagtgcaaaattgcaattgttttgggaagaactcaaaatacttctctctcc

SEQ ID NO: 578050 - DNA, 83 bp, Homo sapiens
tgcctgccgatgtgcatcggtacatgaagatttggaatcgaagcctcttaaaatggcagatgacttggacttcgagacaggag

SEQ ID NO: 578051 - DNA, 100 bp, Homo sapiens
gagagtgttaccattgaagcccaggaactgtctttatctgctgtcaaggatcttgtgtgctccatagtttatcaaaaggaagatgttggatccagggttg

SEQ ID NO: 578052 - DNA, 85 bp, Homo sapiens
gaaattggactaaattaccagaatgcaggggctcccctgcaaactttgctgtgtacactgccctggtggaaccccatgggcgcat

SEQ ID NO: 578053 - DNA, 88 bp, Homo sapiens
ctggatattgatgcgccagtcactgatggtagtgaaaacctttatggatatggatcaggactcagaagatgaaaaacagcagtatctc

SEQ ID NO: 578054 - DNA, 100 bp, Homo sapiens
gcatgccaagcagggaactggcatccatgaaccttgatatagttgacctgcttaaaaaggccaagagccctctccccagaagtagagtggtgaaaaatga

SEQ ID NO: 578055 - DNA, 97 bp, Homo sapiens
gaagacatcaagggaaaatggggtgaggaagattttgaagacaatcgtcacttatacaggtttttcttgttagaaagaagaccggtcctgatgctgg

SEQ ID NO: 578056 - DNA, 100 bp, Homo sapiens
tgtgaaagtcaacccggagcgtgaggacagtgagactcgaacactatatgttctcctttcagccaagacctttcaccagtgcaggggatagaagattcat

SEQ ID NO: 578057 - DNA, 75 bp, Homo sapiens
catggctgagatcaccaatatccgacctagctttgacctagaggatcaagacataatgggagcatttttagacaa

SEQ ID NO: 578058 - DNA, 73 bp, Homo sapiens
agggccaagaaggcgcgggctgagagcactgcagtttcctcctgaaggctggctccggctctccctcaataat

SEQ ID NO: 578059 - DNA, 83 bp, Homo sapiens
atttaagagagctctggacaagctggaatgcatccaagagaatccctcaacatgctggtgtctcttttgacaagacttcagct

SEQ ID NO: 578060 - DNA, 90 bp, Homo sapiens
gattcctgtcaatgaccatctggccatcagaaagtgataagaactttcagccccccaaacggcctttcaaacggatgaactattcagatg

SEQ ID NO: 578061 - DNA, 90 bp, Homo sapiens
tgttaaaggccattggtctgaatactttatcaaccttaaaatcagtcaaaccctaaaggtcacggaacagcaaatttctgagaagttgaa

SEQ ID NO: 578062 - DNA, 75 bp, Homo sapiens
ctgtgctcgctggcaccccgaacgggttgcttcccccgctgcgaggacctgaaggagaagaaggagaaggtggag

SEQ ID NO: 578063 - DNA, 100 bp, Homo sapiens
tgatggggcgttctatgcagtgaagattctacgggaaaatgtgggccccctccacctattgacaatggggacattacttcattcccgttgtcagtatatg

SEQ ID NO: 578064 - DNA, 100 bp, Homo sapiens
ggcgcgtcaggtgaagactgggggctgcaggcgcgctaggtactccaaagattcaggtttactcacgtcatccagcagagaatggaaagtcaaatttcct

SEQ ID NO: 578065 - DNA, 98 bp, Homo sapiens
gaaggcgctgctggagttccgcgacaccatcttcgacaacatcctcaagaacaagcactgcctgctggaggctgggatcggctgcacaagagacttga

SEQ ID NO: 578066 - DNA, 75 bp, Homo sapiens
gccggaggccatcgaggaagtgaagaaatccaaaatacggagctggcatatacttcaccaagaacctcaaaaacc

SEQ ID NO: 578067 - DNA, 75 bp, Homo sapiens
caccgtttccagtcattttaaaaattcaggtgctggagaatctggtaaaagcaccattgtgaagcagatgaggat

SEQ ID NO: 578068 - DNA, 90 bp, Homo sapiens
ctgggggaaccactatgatcattcctgggcttcccgatggactcgagtttttactatgtgagcatcccggtgcctgcacagcaaggactc

SEQ ID NO: 578069 - DNA, 100 bp, Homo sapiens
accatgcccacaaagaagagattcattcagtggtgttaaggattccaacaacaattccgatggcaaagccgttgccaagataaagaactatatgcttgga

SEQ ID NO: 578070 - DNA, 100 bp, Homo sapiens
acgaccttcctgcccttcacgctccaggagctaggacagtcattttgtttactcattcagccctgttgcaggtcccaataaactcttcataaggttgaca

SEQ ID NO: 578071 - DNA, 82 bp, Homo sapiens
atttgtcaaaaacctgctgccaaagtctataggacgttcccaattagaggctttcagatttatgatgggcccattcatctca

SEQ ID NO: 578072 - DNA, 50 bp, Homo sapiens
cggcaccggatcaccaagacggagagctcaggccccggggcctccagcgg

SEQ ID NO: 578073 - DNA, 127 bp, Homo sapiens
cctgcctccctccttgtggccctgggaggaagccatggactctaccaagtctgaacccctgaagggatcaccagagttccagggtctccctccactgctgtagtaacccgggtccggggcctcggtg

SEQ ID NO: 578074 - DNA, 100 bp, Homo sapiens
cgggcccaacagcaacaggtctcaattctttaccactcctgaaggccctaaaccccgttccagatgctctgactgggcaagtgcagttgaagaagatgaa

SEQ ID NO: 578075 - DNA, 96 bp, Homo sapiens
gagcgggcggcttcctggcctgggcgctccggtggcggcggagaatagcctaacatggcagaccagagacagcgctcactgtctacctctggggag

SEQ ID NO: 578076 - DNA, 80 bp, Homo sapiens
ggagatatggcgcaactgcggcgcgtctgggatctgccgatatgggggatatgaagacccctgattttgatgacctcctt

SEQ ID NO: 578077 - DNA, 100 bp, Homo sapiens
cgacaggaacgtggagatctggaagatcaagaagctcattaagagcttggaggcggcccgcgggtccgggcccaccagctggtcttgccaccttgcgacg

SEQ ID NO: 578078 - DNA, 50 bp, Homo sapiens
gctgtactaggactgggaacgggaaatctggcattttttaaagtttgcgc

SEQ ID NO: 578079 - DNA, 100 bp, Homo sapiens
tcctctgccaaaacccagggctggaagatgtggcagccggccacggagcgcctgcagattgggaaaatgaggtacgttagtgttcgcgattttaaaggca

SEQ ID NO: 578080 - DNA, 100 bp, Homo sapiens
gagcggctgcggaccatttataaccgcgacttcaagatcagagttcctgagttggaggtagaagaagaaacccaagttcaagagatgactttagatgagt

SEQ ID NO: 578081 - DNA, 118 bp, Homo sapiens
gcgctggtggcgggcccgggctgcggcgtgtgcgcgcccgccagctgctccggagatacgattgcagcaattctccggaaacggaaattagactattatttacacaaactactccctg

SEQ ID NO: 578082 - DNA, 87 bp, Homo sapiens
agaagctgcagccgcacctggccaaggcctggcatcctcgctacaacctcattgttgtgggccgatacccagatcctaatttcaaaa

SEQ ID NO: 578083 - DNA, 98 bp, Homo sapiens
ccgcgacacctcctggccatgggggacgtgctgtccacgcacctggacgacgcccggcgccagcacatcgcagacaatgcctgtggaagacaagtcag

SEQ ID NO: 578084 - DNA, 100 bp, Homo sapiens
gcagccagtactctatatgaacaatccgtctggatcacggatgtaggaagtgctatgctgggactcatgtatgtctactggactcagctcaacatgttcc

SEQ ID NO: 578085 - DNA, 75 bp, Homo sapiens
ctcttcttgaaaaatgcaaagatgtagatgagagaaatgagctgtgagttctttggaattgtgaacattcttttg

SEQ ID NO: 578086 - DNA, 75 bp, Homo sapiens
aagctgagaattatccttggacttacataaagcattttggactttatcttcataaacaagcagatatgcaagaag

SEQ ID NO: 578087 - DNA, 100 bp, Homo sapiens
ttgcagaaataggaattgctgtgggaaataatgatgtaaaggtgcccctgggcgctgggattgctctagcctgtaagtataatggaaaagatgaggtctg

SEQ ID NO: 578088 - DNA, 75 bp, Homo sapiens
ccgtcgggaacagccatgcaaaggcaggggaggaagccacctcgaggaaaaccagtagattcccagacatcgcga

SEQ ID NO: 578089 - DNA, 98 bp, Homo sapiens
cagcgacccgcccgccatgggggacgaggacgacgatgagagctgcgccgtggagctgcggatcacagaaggtggaacaggaggattttgtaatggaa

SEQ ID NO: 578090 - DNA, 90 bp, Homo sapiens
atgagtacaactaccgctgctggaccacaaaccgctgccagaaaaatctcaggatggacccaagctctgccggacatggtggtgtcccac

SEQ ID NO: 578091 - DNA, 75 bp, Homo sapiens
acttgggagaaagtttcatctgtggatggagtattggtgttggagcgggccggagagaagtagagtgggctgcga

SEQ ID NO: 578092 - DNA, 82 bp, Homo sapiens
ccgaagaagaaaggattcgttacagccagagattggcaaaagaatgcatgtgcagttgtccacaagccggcttcggactgcc

SEQ ID NO: 578093 - DNA, 90 bp, Homo sapiens
cggagtcggggacccaggagtttcctgtgtccagcgctgccggagccgcctgagatgaagccaaggaggagttcctggatctgcttgatg

SEQ ID NO: 578094 - DNA, 100 bp, Homo sapiens
tctccgaatggagccatcccccttcggcgacgtctcctcccgcctcaccacagcggatactctgttttcaaggaagctgaatgggaaatacagacttgag

SEQ ID NO: 578095 - DNA, 75 bp, Homo sapiens
cgcttctagaccctactgcggtctcggatattgccggagctggaagtcgagtgtgctactcaactcaggagattt

SEQ ID NO: 578096 - DNA, 75 bp, Homo sapiens
agaacagcagctataaaagccatgggatccagtgaggggactggtttgtctgccttgcttccccaacctaaaaac

SEQ ID NO: 578097 - DNA, 80 bp, Homo sapiens
gccgaggccgccgccgcctctccttgctgcagccatggatctttcccagggaactccgatgaagtgttccaacaaaatga

SEQ ID NO: 578098 - DNA, 83 bp, Homo sapiens
cccgcggtcggcagcatgggtcgggagtcacgaccattgccctcttgaacatttaccgtaaccctcaaaactcttcccagtct

SEQ ID NO: 578099 - DNA, 100 bp, Homo sapiens
ggcagccattctatgctgtggaaaagaaagcatactgcgagccctgctacattgtgaatgaaaactttgccattgatttgatagcagagcagcccgtgag

SEQ ID NO: 578100 - DNA, 100 bp, Homo sapiens
ggagtcctgcgtacggcggcgctacagtgactttgagtggctgaaaaatgagctggagagagatagcaagaacccagactcccatggttatgacaaggac

SEQ ID NO: 578101 - DNA, 89 bp, Homo sapiens
ataaacagggtatagcagatacatggcaagttgttggaacagtgacttgcaagagctgtaggtaaaacttgcctactgatcagttacac

SEQ ID NO: 578102 - DNA, 100 bp, Homo sapiens
tcgcgcctctcgatgggcagctcgcacttgctcaacaagggcctgccgcttggaagcgcaacaggaaaggagagaagaatggcaagggcctacggcattt

SEQ ID NO: 578103 - DNA, 100 bp, Homo sapiens
tttccctcagcacacagaggatgatgctgactttgatgaagggtgcacttgatctatctgatgtacattctccaccaaagtcaccagagggaaaaacaag

SEQ ID NO: 578104 - DNA, 98 bp, Homo sapiens
tcagaagatactgaagattactacacattactgggatgtgatgaactatcttcgtaattcctgaatttgtaacacaagtgaatgttgccttggaagcc

SEQ ID NO: 578105 - DNA, 100 bp, Homo sapiens
gggacagaatttcgttgttttcaccgacgagactggaggaactccaggatggcattgggcagcggcaaactgttgtcagaacattgaatgcaactgggga

SEQ ID NO: 578106 - DNA, 75 bp, Homo sapiens
catgtatcagccgaggtggagctgcggggccctggcatgaaaggcccactgctcagtggagcgtggaggacgagg

SEQ ID NO: 578107 - DNA, 75 bp, Homo sapiens
cggaagtccttccagaaggagcttgtgatggatttggagttccatggagtgatgagattttattttcaagataaa

SEQ ID NO: 578108 - DNA, 100 bp, Homo sapiens
agcagatcgattttaccttggataccctgctttggattcgatgggaactttaataccaatgtgtctagaacaattagttgtgatcgactttctactactg

SEQ ID NO: 578109 - DNA, 75 bp, Homo sapiens
acgggatcccagcctcaggcctgcacggacggtgttggttgggatttcttgataaccggctgtttgctacctgct

SEQ ID NO: 578110 - DNA, 50 bp, Homo sapiens
aaacttgacactcaccctgaccggttatgaagacagtatggagtttccag

SEQ ID NO: 578111 - DNA, 95 bp, Homo sapiens
ggaggaggagtgcagccgtcaaatgcaaaccgagaagaagaggctgcagcagcacatacagggtcctgggcccagtctgtgctgacgcagccgcc

SEQ ID NO: 578112 - DNA, 90 bp, Homo sapiens
ggaatgcagccaaatgtctcctttgtgaggataaacagctcgttggcagtagcagcttatgaggatgactgctgtgtccactgcatcctg

SEQ ID NO: 578113 - DNA, 83 bp, Homo sapiens
ttccactggccagcattctcctctattagactagaactgtggataaacctcagtccagaacacatattacataatggagccgg

SEQ ID NO: 578114 - DNA, 82 bp, Homo sapiens
tcggatcgaatccctcacgcgggcgcggatcgaccggagcagagagctggcgagcaagggagtgcatccgccccaacccttt

SEQ ID NO: 578115 - DNA, 100 bp, Homo sapiens
gagttggcaactgggggagcgagccagcaccgctctttgaccttgccatgcttgccttagatagtccagagagtggctggacagaggaagatggtcccaa

SEQ ID NO: 578116 - DNA, 74 bp, Homo sapiens
gggtcctcagcgtggtctgcctgctgcactgctttgggaagaggaagaacgtctgagaaataaaattcgagctg

SEQ ID NO: 578117 - DNA, 74 bp, Homo sapiens
tcaaagcatggggctaactccagaatcccccattggttgatctcctatcaagagtttttggcatttgaatctgt

SEQ ID NO: 578118 - DNA, 74 bp, Homo sapiens
ggagacgcagatgtggacttgaaagaagctgcagcggaggaaggcgagttgtattccctgaatgactataaacc

SEQ ID NO: 578119 - DNA, 75 bp, Homo sapiens
agccatcaaaatcacagtggatgggccccgagaacctcgaagaagggaaaaggccgaggcatcagcgtgtgaaga

SEQ ID NO: 578120 - DNA, 100 bp, Homo sapiens
cggcggccgaacgatgtgcgagaactgcgcagacctggtggaggtgttaaatgaaagaccatggccaacctggagcgcaccttcatcgccatcaagccgg

SEQ ID NO: 578121 - DNA, 83 bp, Homo sapiens
agatgaagtttgcagcctcaggcggctttctccaccacatggatctggtgaagaatcatctgatgtatgctgtgagagaggag

SEQ ID NO: 578122 - DNA, 101 bp, Homo sapiens
aaaaagagaaagaaacactttccagagttccctgcaacccgtgcttatgcagatagttactattatgaagatggagtggatgaggatcgcagtacggaacc

SEQ ID NO: 578123 - DNA, 98 bp, Homo sapiens
aggagccacaatggagacgccgccgctgcctcccgcgtcttgagagctgatgacaataacatgggcaatggctgctctcagaagctggcgactgctaa

SEQ ID NO: 578124 - DNA, 90 bp, Homo sapiens
gggatcaggaagtggagaagtcaagaggacactgaagatcacagactgagggggtccgcatggaagaaatagttgaaggttgtaccggag

SEQ ID NO: 578125 - DNA, 100 bp, Homo sapiens
tgagtggagtgttaacagtgtagggaaaatagagtgtgtatcagcagagaccaccgaagactgcatcgccaagatcatgaaaggagaagctgatgccatg

SEQ ID NO: 578126 - DNA, 74 bp, Homo sapiens
tccgtgaaattcagcccgaatggagagtggctggcaagttcatattgtgttcagtgtggacccctccgagggca

SEQ ID NO: 578127 - DNA, 100 bp, Homo sapiens
atgttgctttttgatggccatggcataaggaactctatcccaggaatacagctttgcattagcgacatctcgaatcagcgatgcacacttggcagacaca

SEQ ID NO: 578128 - DNA, 149 bp, Homo sapiens
acaatctctacatgtaaaaggccactgactcctacttcctctgtatagagcaactgttgaactcagctgcctgtagaatttcgctaaggagtttgtgatcagtgatcggaaggagctggaggaagatttcatcaagagcgagctgaaga

SEQ ID NO: 578129 - DNA, 100 bp, Homo sapiens
agtctgtgacctgccccttctctttacttttgtcaaagcaacaggcttcacaagtcctggttaggaagcgtcgtgcaaattctttacttgaagaaaccaa

SEQ ID NO: 578130 - DNA, 100 bp, Homo sapiens
ccgagcgctgctgacattgagacctggtgtcagccttacaggattgacatgtacgtggaggggacactggatctgctggaactgcttatcatgcatcctt

SEQ ID NO: 578131 - DNA, 75 bp, Homo sapiens
gagttgaaggagctgcaggtccagcttcttccccatgccagcaagaacattctagtatgccagtagaaaaaaata

SEQ ID NO: 578132 - DNA, 131 bp, Homo sapiens
caatgtcacgctcccaccagcagcgcctatgagtttgtcacctggctcgatggcattaaagacgagttgtactgctgtcacaggaaatggacgctggattacaagcatggcagctcaggcagcagaagttg

SEQ ID NO: 578133 - DNA, 75 bp, Homo sapiens
ctccttttccctctccctttccctaagaacctaaaggcagacccagaagagctttttacaaaactagagaaaatt

SEQ ID NO: 578134 - DNA, 99 bp, Homo sapiens
gcaactttaaagtcatgatctaccagcaagggggccaggccaaccaccccacagcagccgtggtgacggagaagcagcagatgctggagcagcaccttc

SEQ ID NO: 578135 - DNA, 100 bp, Homo sapiens
gaggagacaacttactaccaaacagcacttcctggcaatgatagatacatcagtgtgggaagccaagcagatacaagctgtattcatcaccaaagaaaaa

SEQ ID NO: 578136 - DNA, 100 bp, Homo sapiens
tgtcagccttcccagtagctgggaccacaggagagcgacttgcagttgtggaggtacagtgtgaacggctgaggatgctctaccgggactgtgctcggcc

SEQ ID NO: 578137 - DNA, 141 bp, Homo sapiens
gttctagggttctaagtgatgtccaggaaggaggaggaataatatttatggagcatatattatggaacacagccattgcaaaccaaccctgggctcagaaacttatgtttaacagtccaggttttgtagaatatgtggtgg

SEQ ID NO: 578138 - DNA, 100 bp, Homo sapiens
gttttataccagagagctctctaacttttatttcagtataatcaaagatagaggcctagaaaaggatggcagcttcggtgagggcctcaccatgaagaag

SEQ ID NO: 578139 - DNA, 100 bp, Homo sapiens
agccagcctaatccaaagactgtggaacttttaagtggagtggtggatcagaccaaagatggggatcatagacggtatttctatgtaaacgaacagtcgg

SEQ ID NO: 578140 - DNA, 100 bp, Homo sapiens
ccggataagccgggcgggagcccctcggccagcttctaccctcctcatctttggaagttgtcccagaagcagcccagaacaatccaggggaggaagtcac

SEQ ID NO: 578141 - DNA, 100 bp, Homo sapiens
ccttccgagaggaacctctatgccgacatcgacgccgcctggcaggccctgcgcaccagtttgactacgaggcagttgctaacagactgtttgaaatggc

SEQ ID NO: 578142 - DNA, 100 bp, Homo sapiens
gaagctgatgcaaattaccagtctgcattcactgaatgccttcttgctgccaattaaaactgtaggtgtgcaggtccaagacaagctgctgctatctgcg

SEQ ID NO: 578143 - DNA, 75 bp, Homo sapiens
agctgtttggtcactctcatcttgcaaaccagtgagtctgccaaaaaagaggtggttgctgaagtggtaaaagcc

SEQ ID NO: 578144 - DNA, 101 bp, Homo sapiens
tggtttggtgcctggagggtgaatggaagtctgtcggtttccagagctattgatgtgttcagagcaacattgttttgttgacacaagcatttagaagaaag

SEQ ID NO: 578145 - DNA, 100 bp, Homo sapiens
gtcaccgccggaacctggcgcagtcgcccatgtttgatggaaaagtcccacactggtaccacttctcctgcttctggaaggtgggccactccatccggca

SEQ ID NO: 578146 - DNA, 90 bp, Homo sapiens
ctgtactgctccccaagaagactgagagtcaccacaaggccaaggagaatgtaactggtcactacatttccccctttcatgatattcctc

SEQ ID NO: 578147 - DNA, 100 bp, Homo sapiens
aggttatgaaagaccctttgcacaaatcaaggcgatctccggagatgtgaagaaggggggcgagcggacaggaagatgaagggagcaaagctgcccgccg

SEQ ID NO: 578148 - DNA, 83 bp, Homo sapiens
ctccggagtagctgggactacaggagtttgtcttgggatgcaactagcagtgatagagtttgcaagaaactgccttaacttga

SEQ ID NO: 578149 - DNA, 75 bp, Homo sapiens
ataagaggaaaagtcaggggagtgttgaagactctgcctcctacaaatatgaaatgggtcctgatgaatatgaag

SEQ ID NO: 578150 - DNA, 75 bp, Homo sapiens
ctcccgattagctgggactacaggtggagggagcaaagtcctgcacactggagtggtgtactagcggatcaagta

SEQ ID NO: 578151 - DNA, 75 bp, Homo sapiens
cggcgctggagagggggcgctgagctgttggggttatgaagacagtatggagtttccagaccatagtagacattt

SEQ ID NO: 578152 - DNA, 75 bp, Homo sapiens
gaattctgaatttgaaggtggaaaatcaacagtgaattgtagggatcgatttgcttagtggtataatacctgaac

SEQ ID NO: 578153 - DNA, 80 bp, Homo sapiens
gaaattacctccgagggaaacaagaaaacatcaaagaggtctagcaaagagccctcatcctgcaagtctctcggaaacac

SEQ ID NO: 578154 - DNA, 75 bp, Homo sapiens
tgcgtcaggtcacccagcagagatcagcaatccttggctcactgaggaggtttgagaccatgctgcagatgcgag

SEQ ID NO: 578155 - DNA, 75 bp, Homo sapiens
acatgcccgctcacctgcgctgtgatgcctgcagagctgtggcttaccaggaggagttggaaactctggagagca

SEQ ID NO: 578156 - DNA, 124 bp, Homo sapiens
cgcctcttcctttttcgacgcctccgccgccgcctgaggaggcgagctagccgggagttacaccgccaccgccaggtgccatcatggaagaacaggcagcagaactccttggagtgaagatgtg

SEQ ID NO: 578157 - DNA, 100 bp, Homo sapiens
tctagtataagacagagcacgaaaggcatttttactgctggtttaagaattgtttaagctgcatcaatggagcacatacagggagcttggaagacgatca

SEQ ID NO: 578158 - DNA, 89 bp, Homo sapiens
atttcccaagagcagccaaaaatcaccaagtcctgggtgaaatgacaatggatgctctgttggctcgattgaaacttctgaatccagat

SEQ ID NO: 578159 - DNA, 74 bp, Homo sapiens
caagcaaggctacaaatgcaggcggcccaggagacaccagcgggggctgccgctgcagggtaaatgggattcct

SEQ ID NO: 578160 - DNA, 50 bp, Homo sapiens
cttcacttggcaaactcaacaagaacattaaccaggtggtatttgttgga

SEQ ID NO: 578161 - DNA, 90 bp, Homo sapiens
tcttccaattcttttggtcgaaacctaccaccaaagaggcgatgcagagattatgatgagaggacatgtactcccaggattccatagatc

SEQ ID NO: 578162 - DNA, 109 bp, Homo sapiens
atgagatctggcatcgacggcatgactactggctgctagccggcattataaaatatatcagctacttcagtgggctgctatctggctccatcagaatgaacagcagccc

SEQ ID NO: 578163 - DNA, 106 bp, Homo sapiens
gagacattccctggcactctcttccatggcagcacctaaatggggcactgaatgtcaaagtgaaggaattcaatgaagcccggatcaagggcaggagcaaccgtga

SEQ ID NO: 578164 - DNA, 83 bp, Homo sapiens
gctactaaccagagccggctctttctcgggggggctgtcggggggctgttaggtgcctggatgacaagtggacagtttaagcc

SEQ ID NO: 578165 - DNA, 76 bp, Homo sapiens
cttctccctgcctggacccctactattgcaacaaggcatttattaatacagcaaaagaaatttatgaaaaaattca

SEQ ID NO: 578166 - DNA, 83 bp, Homo sapiens
tcacactggcccacatcttccatcactttgcaccgcttctggtggcagtgctccttttggacttttctctaggtttggcgcta

SEQ ID NO: 578167 - DNA, 100 bp, Homo sapiens
cggagatgcagctcaaggggaagaaaggaattgcgaaagcccagctacgcagagatttgtcagagaacgagtaaagagcctccttcttccccattgcaac

SEQ ID NO: 578168 - DNA, 97 bp, Homo sapiens
ttgctgcttcctcctcctcggcctcaccgagagtagttatcttgatggaattagaagttttgaagtcagctgaagcagttggagtgaagattggcaa

SEQ ID NO: 578169 - DNA, 75 bp, Homo sapiens
tgaagaagaagatgcctttaccgaccatgctgtgagagaagtaaggaaatattcctcagttcataccattgagaa

SEQ ID NO: 578170 - DNA, 75 bp, Homo sapiens
gctcctccaggaggagggactacacggacaggaaggagatggataaagcagatgtttattggggcattccttatc

SEQ ID NO: 578171 - DNA, 75 bp, Homo sapiens
gttcagcccagaggagaaactcgctcgccttcagaagacaggtgccgtgagcgatgtggagatgcaggaacacta

SEQ ID NO: 578172 - DNA, 96 bp, Homo sapiens
tgcgctgtcccaaatccgctgttactatgagaaatgaagagctgcttttaaggcctcttctcggttattagtccgccccaccagctccgaaacacc

SEQ ID NO: 578173 - DNA, 75 bp, Homo sapiens
ctaccaaggacagagtcagtgatttccataaattgaagcaaattcttcaggagagaataccatgggtaccacctg

SEQ ID NO: 578174 - DNA, 75 bp, Homo sapiens
caggtgtccatccccgtgctgagtactatactggcaattgctggagaagattttgcaattgttgcttctgatact

SEQ ID NO: 578175 - DNA, 98 bp, Homo sapiens
tggggggggtcagccccccgcccggccagccgccccgtccgggaggcagtggttgcaggaatccagcaggctcacgcggaacagttggccaacatgag

SEQ ID NO: 578176 - DNA, 100 bp, Homo sapiens
tgattctgctgttcagcaggagaaaatttcagagctgcaaaattatcaggataagaaactctttaagcctccagtgttagtatttgtggactgcaaacta

SEQ ID NO: 578177 - DNA, 103 bp, Homo sapiens
gttgaagatgtccttaccagctttgacaatacaggaaatgtttgatctgcaactggaatatggacaaggacaccaaggtggttactttttaggtgcaaacaag

SEQ ID NO: 578178 - DNA, 100 bp, Homo sapiens
gaactctatttttaagggtatatttgttcatagataccgaccccaagactgcttctgagacagaaacagatatctgtgctgaatgggagataaagaccat

SEQ ID NO: 578179 - DNA, 83 bp, Homo sapiens
cttcgcattttggcattgacatttaattttagggtcctttatatagaagggagagtaggtcatgcagaccatggaacccaagc

SEQ ID NO: 578180 - DNA, 103 bp, Homo sapiens
ggaaaatggcggtgtctacagtgttctcgacttcgtcgctgagaccaaatgagagggttgacactgtatcagaaaaaccaagggaagaaccagtactaaaaga

SEQ ID NO: 578181 - DNA, 96 bp, Homo sapiens
gtccgtggggcaccgatgtctgggattactgcacggggtcgcgccgtggcggagcagattttactatgagcagcgattactacggaaggtcttcga

SEQ ID NO: 578182 - DNA, 98 bp, Homo sapiens
caccgctctacagcggcgtgcacaactggaccagttctgaccggattcgcatgtgtggcatcaacgaggagaggtgaccttgcaacttcatggatgac

SEQ ID NO: 578183 - DNA, 74 bp, Homo sapiens
gaacttgtgccacagaactacatacgaggatgtcgtccaggaaagattgtgcagatgactgaagcagaagttcg

SEQ ID NO: 578184 - DNA, 97 bp, Homo sapiens
ccacggtcatccgctcagggctgaaagctcttttggtacaccagaaggccagaatggaacgacttcaaagagaacttgagattcaaaagaaaaagct

SEQ ID NO: 578185 - DNA, 100 bp, Homo sapiens
cctcggcggccccggcgccggcaaggggacccagtgcgcccgcatcgtcgaggaattgaatgatctggcacgggaccctccagcacagtgttcagcaggt

SEQ ID NO: 578186 - DNA, 83 bp, Homo sapiens
cttagaagtggtgatgcaagaagtttctaggaaaggccggacaccagagcctgtcatagggaactgcatggatagaagttctc

SEQ ID NO: 578187 - DNA, 129 bp, Homo sapiens
caggcccagccaggcgtggaggaagaggcattgaggactttccttacctgtttttccagctcacccactgccagcagagccaaggccacctttgatgccatttctaagacctacagctacctgaccccc

SEQ ID NO: 578188 - DNA, 98 bp, Homo sapiens
tcgcccgccaccctgcgctgccgccgctctgaggagttaaagtactgtaagattgatgttaaaggcatggtgttcaccccacttcatcagcgtacata

SEQ ID NO: 578189 - DNA, 100 bp, Homo sapiens
ctcgtcattctgatgcccgccaagccggcccaggcctttgtggtgaagcggggcgtccacgtgtcaggagcgtctcccgagagcatcagcagcctgctct

SEQ ID NO: 578190 - DNA, 100 bp, Homo sapiens
ccttgaggaatctggcctccatagtgccgcagaatggaattcggcattgttcctacacagcttctcggcaacatctctatgttgataaaaatacaaagat

SEQ ID NO: 578191 - DNA, 80 bp, Homo sapiens
ggaaccatggagggtgtagagagccagcaccgctctttgaccttgccatgcttgccttagatagtccagagagtggctgg

SEQ ID NO: 578192 - DNA, 49 bp, Homo sapiens
ggccttccagctgtttgaccgaacaggaatgtctgatcacagatacggg

SEQ ID NO: 578193 - DNA, 75 bp, Homo sapiens
aggtcgtcacaggctccggctcatggcatcaagtggcatccatcataagatattgatgatgctcaaatacttccc

SEQ ID NO: 578194 - DNA, 100 bp, Homo sapiens
agagctcacggctggatctacctggcacgcagatggacaaccggaaattttctacacattttggaattcagttactcaggcactttcttctcaatttcat

SEQ ID NO: 578195 - DNA, 100 bp, Homo sapiens
gtctggtccacgacctatcctaggcgccatgagcaaggcttagatcacatagcagaaaacattctttcgtacctggatgccaggtctctgtgtgcagcag

SEQ ID NO: 578196 - DNA, 100 bp, Homo sapiens
cccaaaatgaggagagtagcagaaactgattatgaaatggcttcttggacacttaatgattgttggcaagaaatgtgctgctgatctgggcctgaataag

SEQ ID NO: 578197 - DNA, 83 bp, Homo sapiens
ttcagcttgagccccatcactaggttcctgccatctccctggcttatgagcaggctgagagtgacatcatgaagagacagccc

SEQ ID NO: 578198 - DNA, 85 bp, Homo sapiens
tggtcagcaacgcacagctatcttgacccacccttgatgaagggcgccctaatggagatcatccagctcgccagcctcgactcgg

SEQ ID NO: 578199 - DNA, 75 bp, Homo sapiens
aagaaagcctcctaccttgattgcatcagggccattgcgattggaccagtatcatcttcaagatttggtcactat

SEQ ID NO: 578200 - DNA, 75 bp, Homo sapiens
agagtttgttgctcgagtaagagccagttccagagtgtctgattaataagaaaattccccggggaccaccttctc

SEQ ID NO: 578201 - DNA, 90 bp, Homo sapiens
gcgcgaacgagcgacggcggaacccgtgggcctgtggactgcagcctcggcggtcagcaggtactggtgaccccggccggggcaggcccc

SEQ ID NO: 578202 - DNA, 75 bp, Homo sapiens
cgtggcccggatgcaggacagacccctcagttcaactagagagaaattgagaagaagcatccactgaagtatcac

SEQ ID NO: 578203 - DNA, 98 bp, Homo sapiens
acaagcagcaagtgcgcggttggggccactgcgaggccgttttagggtggtgacttcacacgccataatggcactggtggcaagtccatctatgggga

SEQ ID NO: 578204 - DNA, 100 bp, Homo sapiens
aattgcagatcttcagcggggagatcgacttatcgccattggagaactgataaatttcaaacggaagagagtggcagcatttagaaagaatctaattgaa

SEQ ID NO: 578205 - DNA, 82 bp, Homo sapiens
gatcatcctggggacctggtacatgctattgtacacatgtgacaacctatgaagaatcaaattattctctgagttatcagtt

SEQ ID NO: 578206 - DNA, 100 bp, Homo sapiens
cctggagcctcagttggaagcagccgatccagcctgcggagcctgtggggcagatgagattgtggggaacctgggtgaaggcacctttggcaaggtggtg

SEQ ID NO: 578207 - DNA, 100 bp, Homo sapiens
ctgaagttcccatgatgtcacccaatggatccattcctcccattcatgtgcctccaggttatatctcacaggagtggagtcaacatatcaatggagcaag

SEQ ID NO: 578208 - DNA, 75 bp, Homo sapiens
tcttggcaagagagctctgcatcaatgcgccggccataggtgctggagaatctggtaaaagcaccattgtgaagc

SEQ ID NO: 578209 - DNA, 51 bp, Homo sapiens
gaaatccggaaggtgacgggcaagagctttttagatgaggaatttcctcac

SEQ ID NO: 578210 - DNA, 90 bp, Homo sapiens
ggttattgaggaacatggcgttgctggtgcgagtccttatcctggtgtatagcctggaagcaggacgccgcctcttgaagctgggtaacg

SEQ ID NO: 578211 - DNA, 75 bp, Homo sapiens
gaggcctacgcagagctcatcgtccttgagagagtctacagggagattgaacaggtgattggcccacatcgccct

SEQ ID NO: 578212 - DNA, 73 bp, Homo sapiens
ggcggtacccgggtggttaaacttcgcaaaatgatccatcttcggttgtgaatccggcccggaatgcagccac

SEQ ID NO: 578213 - DNA, 100 bp, Homo sapiens
tgaatctatcccattgatcttaggaggaggtgatgtacttatgaactctagaggaaagcgtctacagcattgctatttctctggcacaacgttacagtgt

SEQ ID NO: 578214 - DNA, 75 bp, Homo sapiens
gtccgagccccggccccaagtaacgccgccgccccggagccgccgtcaccatcgtggtccttggcaacaagtgtg

SEQ ID NO: 578215 - DNA, 75 bp, Homo sapiens
acgagatcaaggacagtgtggtggccggcttccagtgggccaccaaggagcggccagtttgcgatcgtgcggaag

SEQ ID NO: 578216 - DNA, 82 bp, Homo sapiens
caaaaacaagcaggctttgtgtcaagacgtggcacgtgtcagagaatttgacggttgatgataattagaagcatgctttcca

SEQ ID NO: 578217 - DNA, 83 bp, Homo sapiens
ctcccggcagcagcccgacgcaaaccaaggatctggggatcttcgcactatcccaaggccagaagcggactcctagaagaggg

SEQ ID NO: 578218 - DNA, 90 bp, Homo sapiens
tcatcgtctgccatggcatggtgtacaacttcgagagctgtgcccaggagtgaacaaccagccctacctctgtgagagtggtcactgctg

SEQ ID NO: 578219 - DNA, 127 bp, Homo sapiens
cacccccggagcccccctcaacacggaccgcgcccgccgggcacacaagaatggtcactgcatgtaatgaatttactacacatgtgatgaaccttctccgagaacagagtagaacacgtcccatttc

SEQ ID NO: 578220 - DNA, 115 bp, Homo sapiens
tcgacatccaggcgaactcggcctatcgctaccctccgaagtccgctcccggagccctgcctgttccctgtccatccaggccagcagctgaaggagcctcacctgcctcccttct

SEQ ID NO: 578221 - DNA, 90 bp, Homo sapiens
caagaatgtttttgaccagaaaaccgacaaccttcccagaaagtccaagctcgtggtgagtgatttcacgtggagccatgatggaactca

SEQ ID NO: 578222 - DNA, 100 bp, Homo sapiens
gacgggtgggctggactgagaggctcacatgattcattcagctactgggtggatgaaaagtccccagtggggcctgaccaaacccaagctatcaaacgcc

SEQ ID NO: 578223 - DNA, 98 bp, Homo sapiens
ccaagccccacgctggccggacagggccgcctgtcgccggggggatatgagactttctactcggaatatcctgagtgttgcgtggatgtaaaacccat

SEQ ID NO: 578224 - DNA, 100 bp, Homo sapiens
cgccagggaatttctggctcatgcaccaactaaaggactttggatgccactggggaaagaagtcaaagttatgcagtagatggggtttcgccatgttgcc

SEQ ID NO: 578225 - DNA, 100 bp, Homo sapiens
cccttcaccgcgggcgccaatggggagcagaaggactcggacacagatgcctgtgaggagccaccaacatttgaagctatggagctcattggtaaaccaa

SEQ ID NO: 578226 - DNA, 101 bp, Homo sapiens
gcaagtcagattctgatattgaaagatgttctgactaataagaagacgaccttctttggtggcaattctatctctatgattgattacctcatctggccctg

SEQ ID NO: 578227 - DNA, 100 bp, Homo sapiens
gtatgcatggtgtggggttggtgtgattagcttcgcagtctggaaagctttaggagttcacagtggtgtcggttggtggaaatatgaattctgctatggc

SEQ ID NO: 578228 - DNA, 117 bp, Homo sapiens
aaaaattcaagaagttgaaaaacgcttttcacgtcacctggagagatgcacaggtgttggagcgggccggagagaagtagagtgggctgcgaggagaaggaaacaggcctttcggag

SEQ ID NO: 578229 - DNA, 91 bp, Homo sapiens
tgcgcgcgggaagatggcggaacaggctaccaagtccgtgctgtttgtgtgtctggattagtctgctgaactcaattcatgagaacttctc

SEQ ID NO: 578230 - DNA, 98 bp, Homo sapiens
cccccagcagagcccgcctgcccggctgtatctccagtatacattcccctagtctaagggaaaggagtttcccaccaacccagccctcacaggaattt

SEQ ID NO: 578231 - DNA, 100 bp, Homo sapiens
cgacgcggacagcgggctggagcctgacgagctggcgggtttttagaacttcagccataaaaatgggcagaattttccttgatcatatcggtggtacccg

SEQ ID NO: 578232 - DNA, 90 bp, Homo sapiens
agcactctctcagaagatcagatgagccgtcttgccaaggatgaatgctatcaagtaagacaagtgtttgcccagaaacttcacaaaggc

SEQ ID NO: 578233 - DNA, 75 bp, Homo sapiens
ttagccaatattttgatgctgtcaaggatgtctccccgttcaatgttgtggcctggcacgggaattatacaccct

SEQ ID NO: 578234 - DNA, 82 bp, Homo sapiens
cggcaccttcggcaaagtgaagggtgacagagctgaatgaacctctctccaatgaagatcgaaatctcctctctgtggccta

SEQ ID NO: 578235 - DNA, 75 bp, Homo sapiens
gccatgagcggcggcgtgtacgggggagcatcccatatcaagatggattgcccgtaatttctatgatagtcctga

SEQ ID NO: 578236 - DNA, 82 bp, Homo sapiens
gcccccgagagccgccgacatgaagaaagacgtgcggatcctgctggtgggagaacgtgaaatgacaatggatgctctgttg

SEQ ID NO: 578237 - DNA, 75 bp, Homo sapiens
aagaactgtggtgtaaagcgcctgtaaaaccagggctggtgaattaccatatctccgtcaagtgcagtaaccagt

SEQ ID NO: 578238 - DNA, 75 bp, Homo sapiens
gcggccgggagcccttagggaggcagctatcatggtgaacttacttcagattgtgcgggaccactgggttcatgt

SEQ ID NO: 578239 - DNA, 75 bp, Homo sapiens
ccccgagcggaactggagaaagctgagggtactccaaagattcaggtttactcacgtcatccagcagagaatgga

SEQ ID NO: 578240 - DNA, 51 bp, Homo sapiens
gtggctctcctgttccagcaattggaagatttgtctacaagtatctctgta

SEQ ID NO: 578241 - DNA, 90 bp, Homo sapiens
ggagggaccttctgcagagactccgggagacaaggagaaggccttaggatctactgggggagtccggaggagcagtctcttctgtcccgc

SEQ ID NO: 578242 - DNA, 75 bp, Homo sapiens
accgagccgatcgccgcggggcagttcgggccggctgtcctggcgcgatagtcgtgcaagcactgcagtgttccc

SEQ ID NO: 578243 - DNA, 100 bp, Homo sapiens
gtgagaagcaagaaggccctggacacagcaatatctctgggctttcacagcatctgacagatacgtctcatggtgtaagaaataagtgcctgcagttact

SEQ ID NO: 578244 - DNA, 75 bp, Homo sapiens
gcctgtgctgctgttcctcagggatccatatgtcttgcctgcagccagcgaatctccctggggtgccctccccag

SEQ ID NO: 578245 - DNA, 74 bp, Homo sapiens
cgggaactagaccggagtggaaccaggaaaggacacattgtgatcaaggtttctagaccaactggggagattcc

SEQ ID NO: 578246 - DNA, 96 bp, Homo sapiens
cgcggaaggagctggagacggtcgtagctgcggtcgcgccgagaaagtacgtaggaagcctggacgtgccaaggcccaacagcagggtggagatcg

SEQ ID NO: 578247 - DNA, 82 bp, Homo sapiens
cctggcgtgcactccgcacctcggggacattattgcgcgtggaacggctgcttttggaagttcccagtgacctgacagcaga

SEQ ID NO: 578248 - DNA, 50 bp, Homo sapiens
gccggaccgaccccaggcggcggtctggaaatctctccaggcaccctgct

SEQ ID NO: 578249 - DNA, 100 bp, Homo sapiens
ggttgccagcaaggccagggagctcctgtgtcctaccgacctctccactgtatctgggaattgccaaggagaagagtaccaaggctgctagtgaacagcg

SEQ ID NO: 578250 - DNA, 99 bp, Homo sapiens
ttctcctaaatgagacgtctcgcatttgagcaggtaacactcggacctagaagaatcccttaggatgaagctgagtcttaccaaggtagttaatggctg

SEQ ID NO: 578251 - DNA, 100 bp, Homo sapiens
aaggatcagtatattggccgtggggatatgtggcgactaaagaaaagtttgtacgctggggaggaggaggaggaagggagcggcagcagtgaaggatttg

SEQ ID NO: 578252 - DNA, 100 bp, Homo sapiens
gggggaagcagcgtgagcagccggaggatcgcggagtcccaatgaaacgggcagccatggccctccacagcccgcaggtggtcactaactgccaagagag

SEQ ID NO: 578253 - DNA, 100 bp, Homo sapiens
ctttgctggctggatctgagtacctcaagcttgggtggtgtggaccctgcaagatcctggggccgaggttagagaagatggtggccaagcagcacgggaa

SEQ ID NO: 578254 - DNA, 144 bp, Homo sapiens
ctgagtcggactggctggcacagggaggatggaaaccttgaatggcctggcgcaggagtccctggcttgcagaaagcaaggagatggccaccaaggagaagctgcagtgtctgaaagatttccacaaggacatcctgaagccct

SEQ ID NO: 578255 - DNA, 75 bp, Homo sapiens
tggaagccgtggctgcgctctcttccctctgctgggcgtcctgttcttccaggcttttcctccgcaaccatgtct

SEQ ID NO: 578256 - DNA, 78 bp, Homo sapiens
tcccgggtggcttacagacgctgccagcatcgccgccgccaggctccccacaggtgcaggaagccgccgcccagccat

SEQ ID NO: 578257 - DNA, 100 bp, Homo sapiens
agaggtctgcccacctatcagagaagcagaaggcacagtgcctctgaccagcatcgtctgtaaagccttgaaaagatcttttgaggtcgaggaggtcgag

SEQ ID NO: 578258 - DNA, 100 bp, Homo sapiens
ctgttgctgccgccatacgcgctctccctgtttaggtgacacgcagagctgaagccatggttcatcaggtgctctaccgggcgctggtctccaccaagtg

SEQ ID NO: 578259 - DNA, 75 bp, Homo sapiens
gatttgttaaggattccaagtaactcttatttgagtaagagggaccatctcctcatgaacgtcaaatggtactac

SEQ ID NO: 578260 - DNA, 105 bp, Homo sapiens
aagctctactccaggaagtgaaaatgtgctgcctcgagagccgctggcactctacgcttccaagatcatctcttacgctcaaggctttatgctgctaaggcaggc

SEQ ID NO: 578261 - DNA, 75 bp, Homo sapiens
agatttaatgacctcaggtttgtcggtcgaagtggaagagttcaaaagaatgctgaaccgggagctgacacacct

SEQ ID NO: 578262 - DNA, 100 bp, Homo sapiens
gtgggccctgcacgagctcaaaggacactatgcaatcacccgaaagggattagaaaatgagtatcaggaagaagggcagcttctgggacagttcacgtat

SEQ ID NO: 578263 - DNA, 51 bp, Homo sapiens
cgtacaccaaagtgtcagagaccgtgatcaagtcttccataccagggacca

SEQ ID NO: 578264 - DNA, 100 bp, Homo sapiens
cttcgattagctaataaccaactgcaattcctacctccaggtggagctcatgaaggacttcagcatttgggtccttttggcaacatccccaacatcgtgg

SEQ ID NO: 578265 - DNA, 98 bp, Homo sapiens
ggaagaaaggcaaagaaataaagaggcattagtatccgctgcaaaggcacttttaaatcaacttagagctgtgtttgatcaaattattgaacttcaga

SEQ ID NO: 578266 - DNA, 100 bp, Homo sapiens
ctacagaaacacatcagaactcatacagggtaaaatccagtacaaggaatatatcattgaaggatttgaaaacatgccagctgcatttatgggaatgctg

SEQ ID NO: 578267 - DNA, 100 bp, Homo sapiens
tgtgctgccagcaagaaatgatcagtagcaccagtgtttatggacatggatttgattgacatactttggaggcaagatatagatcttggagtaagtcgag

SEQ ID NO: 578268 - DNA, 99 bp, Homo sapiens
ggcgacgctgacacctcccaccatggacagcttcgacttagccctgctccaggaatgggacctcgagtcactgtgctgatggtgagaccattctaaaag

SEQ ID NO: 578269 - DNA, 75 bp, Homo sapiens
gaagattagcaaaggtgctaatccagtggaaatcaggagaggctttcatgagaaggacaagaagccatattgccg

SEQ ID NO: 578270 - DNA, 50 bp, Homo sapiens
gaggattgtcactccaacctcttttcgctgatccagtccttctgtggaac

SEQ ID NO: 578271 - DNA, 82 bp, Homo sapiens
agacttaactttcaccgagatccaggttttttctccaataaacacggatgagaacaagttgagcagtgccaacggccatgaa

SEQ ID NO: 578272 - DNA, 90 bp, Homo sapiens
cttacgtctgcggaagtgcagctgcctcagttcttagcgcagctcctattaaggaaccaaaaaagttgatgcccaaaacatccctcccca

SEQ ID NO: 578273 - DNA, 96 bp, Homo sapiens
actgcctgggaggaagagaatttgtccaaatacaaagacagtgactacctgtttaagctgcttttgattggcgactcaggcgtgggcaagtcatgc

SEQ ID NO: 578274 - DNA, 99 bp, Homo sapiens
atgacaatttaatttgtgcagtaaaattgttaaagtttaattgcctacacggaacaatatgtggaatatgaccctttgataacaccagctgagccatcc

SEQ ID NO: 578275 - DNA, 83 bp, Homo sapiens
gaagcgggcgagcggtggtttggacgccggcggagacgcgggcgaggttttaaaatcaaagatgggaaaatcggagaaaattg

SEQ ID NO: 578276 - DNA, 139 bp, Homo sapiens
tggtgagcagcgctctggggctcgccttgtatctcaacaccctgagtgcggatttctgctatgatgacagattgaaaaggaagatcaggccaaccccaaagaagaagtgaccaaggaggagtttaaactgaatgaacaa

SEQ ID NO: 578277 - DNA, 100 bp, Homo sapiens
tgcgatagattatccaaaggtggccgtctctgcctaagtaccgatgcagcagccccacagaccatggtcatgccaggtttaccaaagatgcaggtcatta

SEQ ID NO: 578278 - DNA, 59 bp, Homo sapiens
ccgaaaggactgaggaacggtgcctggaaaagggcaaagcccaacaccttcccccactg

SEQ ID NO: 578279 - DNA, 75 bp, Homo sapiens
atagcaatctggttttcttgggttgttattgatgccttcagattgatcaatgctaatatgatggtcttaggacat

SEQ ID NO: 578280 - DNA, 100 bp, Homo sapiens
ggggtggtgaccatcgaaaggagcaagagcaagatcaccgtgacatccgaggtgcctttctccaaaagattcttcaaagtgacgcctcccccaggaagcg

SEQ ID NO: 578281 - DNA, 80 bp, Homo sapiens
cccgaccccaccggccatacggtggatccataaagaacccagccaacccgcagagggaggggaggggctgagctgtgagg

SEQ ID NO: 578282 - DNA, 100 bp, Homo sapiens
cactggaagatgattttcttaaggctaaatcctggaataaaaagttctatgattatgaagcaaacatgccagacagaatgtctactagagtccttttagc

SEQ ID NO: 578283 - DNA, 78 bp, Homo sapiens
tcggttggagaatgtagcaataactggaccaaaacagtatctcacctccctaaactggttaatagtggcatggaagat

SEQ ID NO: 578284 - DNA, 100 bp, Homo sapiens
gtccggctgagccccgggatccgcctccctccgccaggacccgcacagcaccagtggcagttcgcagcctccaggacttggctcgcatcgccatccgggg

SEQ ID NO: 578285 - DNA, 82 bp, Homo sapiens
ccgacacacgccggaggagccggatgagcagcaccagcagtaagagggctccgaccacggcaacccagaggctgaagcagga

SEQ ID NO: 578286 - DNA, 100 bp, Homo sapiens
caccactgcggacgcagggcacggcacgggggcgagaaggcgaaggctgcaggcgtgaggtgtggcggggcaccctggcccgcatgcggtacaaaagaac

SEQ ID NO: 578287 - DNA, 98 bp, Homo sapiens
ttggaaatagttccctttcgagttgcagcttacaacaagaaaaagaagcgtatggactactatgactctgaacatttgcagctcaccttgtgaagatg

SEQ ID NO: 578288 - DNA, 100 bp, Homo sapiens
gccggttaccaacagaaccaccttccccggtagcaggtctctaattaacagaagatggcaaagcccagccacagcagctatgtccttcagcagctaaaca

SEQ ID NO: 578289 - DNA, 98 bp, Homo sapiens
ttctcagaagagaattccacaagcacttaaatatagatccggtggtatggatgagaaaacaattgctttacttgttgctggactagtgatcactgtca

SEQ ID NO: 578290 - DNA, 83 bp, Homo sapiens
gactcactctgctccacctctgactccttgaagggttttggtgcctttgaacgctcaatcttgactcagatcgaccatattct

SEQ ID NO: 578291 - DNA, 96 bp, Homo sapiens
gcccctgtcaagaaggtgccggtggtgcgagtcttcggagcgaccccggcaggacccagatgatgtggtaccagttggccaaagaagagcctggtg

SEQ ID NO: 578292 - DNA, 100 bp, Homo sapiens
aggaagcaagcagttcagaagagccaaggaataaacatgcaatgaacccaaaaggggaacagatatggagcccagcttgtatcgttgcagtaacatcgat

SEQ ID NO: 578293 - DNA, 80 bp, Homo sapiens
gtcggaatcagatttgaaaatgaaagtggtgtgggccgaagatatgctcatgtggtgttgaggaaagcagacattgacct

SEQ ID NO: 578294 - DNA, 50 bp, Homo sapiens
tgacagtctgcatgtgcagttttcagggatttgtcttggctgttactatg

SEQ ID NO: 578295 - DNA, 82 bp, Homo sapiens
gagcgggagttcgaagagttggatactcagcgtcgctggcagccgctgtacttggtcaaaatgcagatcttcgtgaaaaccc

SEQ ID NO: 578296 - DNA, 82 bp, Homo sapiens
aacgcctggctcggagcagcagcctctgagtgaagatagtgatccggggagacaggaacacgggcaagacagcgctgtggca

SEQ ID NO: 578297 - DNA, 83 bp, Homo sapiens
tggtggaagacttgcagaaagaacctggaagacagaggctggagaaaaatgtaaggggtgaattcacttattatgaaatacaa

SEQ ID NO: 578298 - DNA, 75 bp, Homo sapiens
gtggattatatacattcaaaaaaattaattcatagagatcttaaggagaatggccaccagtccttactgagcagc

SEQ ID NO: 578299 - DNA, 100 bp, Homo sapiens
gaaaactgcaattttggagcagctcctttatggaaatcatactattgcactgtcacagaatagagcaatgagaagcacagctcctgtcctgggaacccac

SEQ ID NO: 578300 - DNA, 75 bp, Homo sapiens
tccaaacaaggacatggagggaaggcttcctaagtaatgtatcctgcatatgcaaaatgggtacagtcacacaga

SEQ ID NO: 578301 - DNA, 50 bp, Homo sapiens
gcaccatggaggaggacgacagctacgctgtttgcagacaaggtcccaaa

SEQ ID NO: 578302 - DNA, 74 bp, Homo sapiens
ttaaggattccaagtaactcttatttggtgcggcggcagcacatggagcgttgtaccagcttcctggtggatga

SEQ ID NO: 578303 - DNA, 80 bp, Homo sapiens
ctgctcgcagccacctgcctccgcggactcaagtcggttcagcaaacaaacggggattcagcgtccgatcctttggaaca

SEQ ID NO: 578304 - DNA, 75 bp, Homo sapiens
gtcctccacagggcgacggcggcaggagctcgggaaccgggactgcgagcggattacctaaaacctcgggcagaa

SEQ ID NO: 578305 - DNA, 100 bp, Homo sapiens
ctgaaattcgagaggagtttgagcggctgcagagagagagagaagagaggagattgcagcagcgaaccaatcccaagatggaattttgctcgtatcgccc

SEQ ID NO: 578306 - DNA, 100 bp, Homo sapiens
attctcgatgtcgtgctaaatcagggtatagaacaggctatgcttacaggcatcctctcattcgagagaagcctaggcacaagagtgatgtggaaatccc

SEQ ID NO: 578307 - DNA, 73 bp, Homo sapiens
gaggcctccccagccacgtgaaactaatcatggtgtcatggaaagggatttactttatactgactctgttttg

SEQ ID NO: 578308 - DNA, 50 bp, Homo sapiens
cggcaatcttgctgcgttagccaggtggtgaaaactattggcttgaggga

SEQ ID NO: 578309 - DNA, 82 bp, Homo sapiens
cagcctttagaaactccccttgaacgtgctgggctgaccttcctctgatcacaggcaagacagagtttctctcttgttgccc

SEQ ID NO: 578310 - DNA, 100 bp, Homo sapiens
agccgactggagcaggcagcagcccaggatccgtggcctcctatgagctgactcagccaccctcagtgtccgtgtccccaggacagacagccagcatcac

SEQ ID NO: 578311 - DNA, 100 bp, Homo sapiens
cccgagtccagcagctgcgcaccatccgcgaatggctggtgtcctggggaccgcatgggtctcctctgagcctccggcctccataagacccaaaacagat

SEQ ID NO: 578312 - DNA, 74 bp, Homo sapiens
ccctggcctcgcgggccgtgtctccggcatcatgtgtgatattaacctggctgcagagccaaaagtgaaccgag

SEQ ID NO: 578313 - DNA, 82 bp, Homo sapiens
agattcgcagtggtcgcttcttctccttgcccctgaatcctatgaggaactgagatctctgttgttaggaagatcgatggaa

SEQ ID NO: 578314 - DNA, 49 bp, Homo sapiens
tccgcagggttcggatgagaccaggttttctgatgcttgggaaatgtgc

SEQ ID NO: 578315 - DNA, 51 bp, Homo sapiens
ctaagactgcttccaatgtagaagagaatgaattttctatctgtgaaattg

SEQ ID NO: 578316 - DNA, 100 bp, Homo sapiens
gaagaaagtaacagtgagatagagcaggtttcattgtttgcggaacttttcaacgaaatgcttcaaagagattttggtgtccgtatatacaaatcattac

SEQ ID NO: 578317 - DNA, 75 bp, Homo sapiens
agaggatcctggaggcctgggaagccaacgaccacacgcaaggtggggctggtgtccgagcacttctcgcaggcc

SEQ ID NO: 578318 - DNA, 75 bp, Homo sapiens
agccatctaacagagctgcaagagttctgggaagtaccaccaagaacagggaaggacaagccagaggctggagga

SEQ ID NO: 578319 - DNA, 74 bp, Homo sapiens
ttccgtgaacatgccaacaaattgattgagtctgtggtccgaagacaaccctatgaggcatcagtagggtttta

SEQ ID NO: 578320 - DNA, 90 bp, Homo sapiens
ggatgggggtcaccgtccagagccaaggtccagggggcaaggtcgtggttggatggcaagcatgtggtgtttggcaaagtgaaagaaggc

SEQ ID NO: 578321 - DNA, 100 bp, Homo sapiens
ctacctcaaccaatcggacacctaccaggtggacggcacggacgacagaagcgactttggtgagactctggtactgcacaaaaccgaggactatttgagg

SEQ ID NO: 578322 - DNA, 75 bp, Homo sapiens
ttgtccgagaaataacatttgaaaatggagagctatcagttgagggatttgcagttgataaaatggctggagagg

SEQ ID NO: 578323 - DNA, 73 bp, Homo sapiens
aacaatccaaaagtgaaattttcaagtcaacagattgcccccgaggaattagcacttgttcacaacttgagga

SEQ ID NO: 578324 - DNA, 100 bp, Homo sapiens
tcagagatgcctgtaccgtgatgtgacgctggagaacctggcacttatgtcctccctggggcaagttaaagtcttcagagccctgtatacgtttgaaccc

SEQ ID NO: 578325 - DNA, 75 bp, Homo sapiens
aaatgatctcgtcactcctttctttgtggtcttcatttgtgaatacataggttatcaatactctggctgaccatc

SEQ ID NO: 578326 - DNA, 90 bp, Homo sapiens
ctgatcccaaaattattgaaaacactcgaaggatgccttcaattaagttgcagagttctgatggagagatatttgaagttgatgtggaaa

SEQ ID NO: 578327 - DNA, 87 bp, Homo sapiens
tgtcaagacatttcttcggcattctgcaacagagcaacattttgcagatgttgtacttagtgaagaatttctcaatcttggcatcga

SEQ ID NO: 578328 - DNA, 82 bp, Homo sapiens
caagatccttaagttcgtcgtcttcatcgtcgcggttctgctgccggtgacagagctgaatgaacctctctccaatgaagat

SEQ ID NO: 578329 - DNA, 83 bp, Homo sapiens
gtggccgcccgggcggcgggatccactgtccggcagagttgttctaccatctccagagggaacgctgcttcctggaaccacgg

SEQ ID NO: 578330 - DNA, 109 bp, Homo sapiens
ggcaggacggccaagaccagcgcgagggccctgggcaaggcccgacagctgcaagctttcttcctggtggcagatgacatcatggattcatcccttacccgccggggac

SEQ ID NO: 578331 - DNA, 83 bp, Homo sapiens
tacgcctcctacgtttacctgtccatgacttctgcgctgacccaggggctggagcgaatcccagaccagctcggctacctggt

SEQ ID NO: 578332 - DNA, 108 bp, Homo sapiens
cccggcagcagcccgacgcaaaccaaggatctggggatcttcgcactatcccaagacctcctgccccccgaggtctgcagtctcctgaacccagcagccatctacgcc

SEQ ID NO: 578333 - DNA, 145 bp, Homo sapiens
ggaagtggcagaggcagaaggagccccagagctcaatgggggaccacagcatgcacttccttccagcagctacacagcttcgttgtgtggaagatcttcagacaattcaagtgatcaagattttaaaatatgaaaagaaactggc

SEQ ID NO: 578334 - DNA, 76 bp, Homo sapiens
taacggagcaacttgctaatggcaggcattttacaagcatgttggcagataaattgaacatgactccagaagaagc

SEQ ID NO: 578335 - DNA, 100 bp, Homo sapiens
ctcaaaaggtgatctggacaaaggaacaggtatctcagagtataaatggcattcgcacagaggaggtggctgtcgtgacaaaggggccatctactaaccc

SEQ ID NO: 578336 - DNA, 80 bp, Homo sapiens
ctcatgttctgcacctcaggagggaattcagcctcagtgatgtccatgagaagccccatgtgccactcccctgatctgca

SEQ ID NO: 578337 - DNA, 50 bp, Homo sapiens
tttgcagtctcgacataagtttgccaaaacaaaggggatttggtgatgga

SEQ ID NO: 578338 - DNA, 101 bp, Homo sapiens
aatgttctcgatgccaatctctgcttgaaaggagaagacttggattctcagatctttaatctcatgaagtacgacagctacagccgcttcttaaagtctga

SEQ ID NO: 578339 - DNA, 100 bp, Homo sapiens
cgagctgtaaaacatgaacggaagagtggattatttggtcactgaggaagagatcaatcttaccagagggccctcaggactatctcaagcaggtgctgga

SEQ ID NO: 578340 - DNA, 118 bp, Homo sapiens
gggacactcggtgtgcgacgtggagatccgaaggaatgaaatccgggataaggaagcctgtgtgggtaccaacaatcaaagctacatctgtgacacaggacactgctgtggacagtct

SEQ ID NO: 578341 - DNA, 100 bp, Homo sapiens
cagcaatgaggtgaacccaggggccgaagcccacccagggagttgatgaacacttcagttatggaagatcaaaatgaagatgagtccccaaagaaaaata

SEQ ID NO: 578342 - DNA, 100 bp, Homo sapiens
cagttcttggacttggccatgtgagatacaaggctacacagagacagatcaaagcagctcaggccgagacggtgctctgcgtgtggccgggacgcctgac

SEQ ID NO: 578343 - DNA, 50 bp, Homo sapiens
aagaaaaaataagaagtggctccaaacatacgctgttggaagctctgact

SEQ ID NO: 578344 - DNA, 74 bp, Homo sapiens
aaggccaatgttggtgctggcaaaaagggagagaagtcttttttcctccagccaggagagcagctggaacaagg

SEQ ID NO: 578345 - DNA, 98 bp, Homo sapiens
cgagctcgatccgctgctcgcacgggagccagctgggtggttacctgtcctgctgccgattcctggatgacaatcagatcgtcaccagctctggagac

SEQ ID NO: 578346 - DNA, 100 bp, Homo sapiens
cagccgcgaggaggcgcgggaggtgttcgagaacgaccccgagacggtgaagccaaaaaccttccctcttacccggggccgagcaagatgagggattgct

SEQ ID NO: 578347 - DNA, 100 bp, Homo sapiens
ctgactttggtgtctgggaaagaggaagcaaatataataatggcagcacagagctacattcgagaaaaatggctacaaacttcctagcacatgagaagat

SEQ ID NO: 578348 - DNA, 108 bp, Homo sapiens
aacatccacaaactgatggacgatgatgccaatggtgatgtggatgtggaagaaagtgatgaggagtcctaagcagacttaaagccaagaaaataagaagaggaaaga

SEQ ID NO: 578349 - DNA, 96 bp, Homo sapiens
caacgtgggctccaacaccaacgagaccatcaccatgccccacgcggagtcagtggcctttcccccttcatgggagacaacgataacgaaaccttg

SEQ ID NO: 578350 - DNA, 75 bp, Homo sapiens
ccaatctctaccaggtcttcatcaaatacaaggagagctgctacaggagctgagagaccctaccctcactttccg

SEQ ID NO: 578351 - DNA, 82 bp, Homo sapiens
aaacagtggataattttgtggccttagctacaggagaggaaggcactgatcctgaaactgaagaccccaaccacctccctcc

SEQ ID NO: 578352 - DNA, 100 bp, Homo sapiens
ccctggagctggagcatgccctcagcgccatcggtgtcatggagaaactccagctgggcccagagattctgcagcgggaaaatccaaggcttatttatgc

SEQ ID NO: 578353 - DNA, 100 bp, Homo sapiens
ctcgaatgggcacacctgtgtagggaatgtagtttcacaaagcagcttaaccccattgatggtgaacgggattctgggggagtcagtaactcttcccctg

SEQ ID NO: 578354 - DNA, 75 bp, Homo sapiens
catgatcgacttcctcacccgcgcctgcgacctcggtatggacctgtctgccaatcaggacgaggagaccgacca

SEQ ID NO: 578355 - DNA, 100 bp, Homo sapiens
gactttcttttggccctaggccccttcctgcccctgtcgtcagcaggaactttatattgctgttggaatatctggagccatccaacatttagctgggatg

SEQ ID NO: 578356 - DNA, 51 bp, Homo sapiens
cgatggaaagaaaatagttagttaccagaccatggcaaaagttataaccac

SEQ ID NO: 578357 - DNA, 75 bp, Homo sapiens
ctgctggcagatgcccagcagggacgacaggcaatccagggcgacataccttctgttgaataccttttacaaaat

SEQ ID NO: 578358 - DNA, 74 bp, Homo sapiens
agaaaacctgcacaaactgctcgaaggtgcaacaccggaggatttcagcaacctcccacctgaacaaagaagga

SEQ ID NO: 578359 - DNA, 49 bp, Homo sapiens
agagcaccaggcccaccgtgaaaggcacatccatctggaaggccttttt

SEQ ID NO: 578360 - DNA, 97 bp, Homo sapiens
aggggctcctggagctgtgagctctgctacttcaagtaccaggtcctggcgatcagcaccaagaacccactgcagggagagcccgggccacccggac

SEQ ID NO: 578361 - DNA, 80 bp, Homo sapiens
ggaggcagccaagctcgtggcctgcctctgcgtgcgaactgcttcacaagattaaaggagaaacagaaaatgtatctagc

SEQ ID NO: 578362 - DNA, 101 bp, Homo sapiens
aaaagcctctgggagcagaagggaggctccaagacctcatcaacaattaaggtgtgtgcagtggcctcagggatccggaaagtctaggactgaacttctcc

SEQ ID NO: 578363 - DNA, 73 bp, Homo sapiens
tttgagccatcggatctaagatccaaaagggagcttctgataattggaggtgttgcagcccgggatcagctct

SEQ ID NO: 578364 - DNA, 75 bp, Homo sapiens
cgtgctggagggaaggctgctgttggaggtgaatgaaaactttgccattgatttgatagcagagcagcccgtgag

SEQ ID NO: 578365 - DNA, 99 bp, Homo sapiens
ggactcccggggccatggccggaatgcagtaccctcagcagcagaatttaagaagaggattacctcaggttccttacttcagtctctatggagaccaag

SEQ ID NO: 578366 - DNA, 100 bp, Homo sapiens
cccagcttgcccacgcaccccactcggcgtcgcgcggcgtgccctgcttgtcacagccactgttccatccctgacccatctttgtcgtttggaaattcgg

SEQ ID NO: 578367 - DNA, 97 bp, Homo sapiens
ctgttttgtcaagggctgaaattgcatcttgtagttatgaggccagaatgaaattccacaattagttggtgaaatttatcagaatttctttgtggag

SEQ ID NO: 578368 - DNA, 83 bp, Homo sapiens
ttcgtggcctgttaccacgagctagtgttggagtgcaccaagaaatgacaatgcagatcttcgtgaagactctgactggtaag

SEQ ID NO: 578369 - DNA, 100 bp, Homo sapiens
aaaatcagctgaaagatgagttttttaaacttctgcaggttacagaatcagagtgtgcaccaatcccaaccacgggtattggaggtagagactactccag

SEQ ID NO: 578370 - DNA, 149 bp, Homo sapiens
tggggggcaaggaagggggggcggaaccagcctgcacgcgctggctccgggtgacagccgcgcgcctcggccaggtgttccacactgattctcgtgactttaaggaccagggatttgaagaggtattagctcttcccaggaagggagga

SEQ ID NO: 578371 - DNA, 100 bp, Homo sapiens
gggcacccagtggggctgtgctggactacgaggtcaaataccatgagaagctgagcctgtccggcagtgcggcggatgtacggatgattcagtggctggc

SEQ ID NO: 578372 - DNA, 75 bp, Homo sapiens
agcatccccaccatcaacatggagaacaagaccacgtgggtgtatactcttgatgtaccagatgcattctattac

SEQ ID NO: 578373 - DNA, 83 bp, Homo sapiens
ggagcctccgtgcggagaccactgttcaaggccacaggaatcccttggcaccatgtcctgtgtgcattataaattttcctcta

SEQ ID NO: 578374 - DNA, 75 bp, Homo sapiens
ccagaagtccagagctgaggactgcctgtttgcagaaataaggatctggcatgtcaacacaaacataggaagttg

SEQ ID NO: 578375 - DNA, 74 bp, Homo sapiens
tgcacatcccttaatagtcatctacatagacgtcttgctgccctccaaaaaagaagagaacttcgagcagctgg

SEQ ID NO: 578376 - DNA, 75 bp, Homo sapiens
gtttaatcagacctgctcacacttcagaatagagaaggtttcccttgggggctttgaaataacaccaccagtggt

SEQ ID NO: 578377 - DNA, 100 bp, Homo sapiens
atgggaattctcttcactagaatatggagactgttcaatcaccagggcagtggagctactgctgtggttcaggcagccctatgcaaacccaggcaagaac

SEQ ID NO: 578378 - DNA, 100 bp, Homo sapiens
tacagaatccgtgtctgggagaaacctcgtggcctggtctccattatttgagatgagttacatcttggagaatgccacccagaggatgtttgaaattgac

SEQ ID NO: 578379 - DNA, 82 bp, Homo sapiens
gagcactggaggaagcacaccctgtcctatgtggacgttggcactgggaaggcagcaatgaatgtggatcacgaggttaacc

SEQ ID NO: 578380 - DNA, 100 bp, Homo sapiens
caggtgcccagaggactttcttccagcttctgctgtccttctttgtggagagcaagaccctggtgggcagcagtgggaccattctgaccacaatgcctgt

SEQ ID NO: 578381 - DNA, 97 bp, Homo sapiens
cacctgtagtcaatcacacgcagggttgtgagtcccggcccagcccctccacccccctgcccccccgatgcgaccatgggctctggcagtgactagg

SEQ ID NO: 578382 - DNA, 83 bp, Homo sapiens
ctgaaccgcgcggccgaaccctccgaacaatcccgaagagatgacttggagtctctgggctacgtgctaatgtacttcaacct

SEQ ID NO: 578383 - DNA, 83 bp, Homo sapiens
cagcgtgcgttcagccctgggatcttgatgtggaagaaatggaggactcagaaccaaggatttccaagtgatttcttccaaag

SEQ ID NO: 578384 - DNA, 74 bp, Homo sapiens
ctggagcagaaaaagagtctttaacattcctagcaaacctccttggagcaagaatggtgaggttctggagaatt

SEQ ID NO: 578385 - DNA, 100 bp, Homo sapiens
gcctcgagccgcagcacgagctcaaattccgagtgagcaagaagaacccatcaggtgattgtcaggcctctgagcccaagctaagccatcatatgccctg

SEQ ID NO: 578386 - DNA, 100 bp, Homo sapiens
tcaggaggaagcgatggcttcagacagcatatttgagtcatttccttcgtacccacagtgcttcatgagagaatgttgtaccatctttgggtaggcagac

SEQ ID NO: 578387 - DNA, 100 bp, Homo sapiens
tgctctgtgtggattctactgatgatctcctcttcactggatcaaaagagtcgttcaccagacaggtgttatggaagctgctgaaggttgtgaaattcgg

SEQ ID NO: 578388 - DNA, 100 bp, Homo sapiens
cgccggaagcgccaggacaatggggacccgggacgacgagtacgactacctattcaaagtaagactttgaccccgacgcaggcttcagtgattgccgcgg

SEQ ID NO: 578389 - DNA, 74 bp, Homo sapiens
ttgctggagcacctaaaagtcagattggccatcatctctcagcaaggtgacatatttgtttttgacctggagac

SEQ ID NO: 578390 - DNA, 51 bp, Homo sapiens
gtacacttgctctttctgtggcaaattcctctctgggcaggagtggtaccg

SEQ ID NO: 578391 - DNA, 90 bp, Homo sapiens
attccccagctcttcttcctgaaaaacttctacgcggaagccttcttcccagacatggagtgggaatagctttgcgaaaaatgggcgcaa

SEQ ID NO: 578392 - DNA, 97 bp, Homo sapiens
ctggaaagctcgggacaggatgattaaagtatggacagccaacccccaacaatttgtagaagatgaagatgatgatacattctcctatactgttaga

SEQ ID NO: 578393 - DNA, 98 bp, Homo sapiens
tgcctgtaccatgatgtgatgctggagaccttgacacttatatcctccctgggagaactacgatgacccgcacaaaacccctgcctccccagttgtcc

SEQ ID NO: 578394 - DNA, 75 bp, Homo sapiens
aatgaagccgtggaccctcacggggttcagctgttgcaaaaataattggtaataatgtcaagaaacttcagaaat

SEQ ID NO: 578395 - DNA, 100 bp, Homo sapiens
caatgaaacttcctcctccttataaagctctgactgatgacagtgatgaaaatgaagaagaagatgcctttaccgaccatgaagagttatcttaaggatc

SEQ ID NO: 578396 - DNA, 100 bp, Homo sapiens
cgagatgtctcgctccgtggccttagctgtgctcgcgctactctctctttctggcctggaggctatccagcgaatacaaacagaagcttgcacgagtaac

SEQ ID NO: 578397 - DNA, 100 bp, Homo sapiens
gaaaaaacaaaacaaatatgaactatgataagctgagcagagccctgcgatactattatgacaaggctctgtgtgctccgggatggagcaggtgtgcaga

SEQ ID NO: 578398 - DNA, 101 bp, Homo sapiens
tagacccggcgtctggcgtccccggtgcccagcattctgcggggcaggcgacccttcttcagcatcttccctgggcattgctgtgagtttaggccggcccg

SEQ ID NO: 578399 - DNA, 118 bp, Homo sapiens
cacggaggtagtcatgatctatgacgccgagaagcagaggccccgaggttctgactcagaagatcttttggaagaattgctgtgctgtttgatgcagttgatcactgatattccactc

SEQ ID NO: 578400 - DNA, 90 bp, Homo sapiens
ggcggatctggaggagcagttgtctgatgaagagaaggtcattttttccaggacactttctgtcttcatgacaggaacatcgagaagcca

SEQ ID NO: 578401 - DNA, 98 bp, Homo sapiens
ccaaactcctcattcctgatgatttcaagaataaaacatgtgtgcagacactggaaggacatgcccaaaatgtgtcttgtgccagctttcatcctgag

SEQ ID NO: 578402 - DNA, 96 bp, Homo sapiens
gaaaattctcttcattctcttggactgaacttaaatactgatagctgggagtgtccactcgccttccaccagcatggcaacgtcttcacagtaccg

SEQ ID NO: 578403 - DNA, 100 bp, Homo sapiens
caaatctggaacgggtggccgattactgcgagaacaactacatacagtaaaataaaacagggtctgttacctagcttggaagatttgctgttctatacaa

SEQ ID NO: 578404 - DNA, 81 bp, Homo sapiens
gaagtgctttcacatcttgtggaaggaccagtgtgatccctcacatccacaaatctctgattggaaagaagggacagcaga

SEQ ID NO: 578405 - DNA, 101 bp, Homo sapiens
catgaggcgccagcctgcgaaggtggcggcgctgctgctcgggctgctcttggagaaataagcgggttttgaaaacaaaaaaaagaaggagtggaagaggg

SEQ ID NO: 578406 - DNA, 121 bp, Homo sapiens
ttgaggactttccttacctgtttttccagctcacccactgccagcagaggtcacacagcggcagtgataaagagcacagggatgtggagagatctcaagaacaagaatctgaagcacaaag

SEQ ID NO: 578407 - DNA, 111 bp, Homo sapiens
ccgacctctcgaagtcccgtgagaacctgtctgcagtcatgttgtataaccccgggaatgggctatgtgaatgaaaaaaggtatccgttatgaaacttccagaaaaacgag

SEQ ID NO: 578408 - DNA, 100 bp, Homo sapiens
tgaggaggcggggttggcctaggcgaagatccggactctgggtgttttgctaccgtgaccgtttagagctcttcagaaaccaggctgctttcaggaacat

SEQ ID NO: 578409 - DNA, 98 bp, Homo sapiens
ctgggagccgcaccacctaacgctggccgacaacagcctggcgtccgccacgaaactgaggcttcttgaagagcttgaagacacttggctcccttatc

SEQ ID NO: 578410 - DNA, 100 bp, Homo sapiens
ataaactcaagcagcgagtcatccagatgttgcccatttaatgtggttcgaaagactctatgtttggcttcagtgttttgaaaaatacatcttgtaccca

SEQ ID NO: 578411 - DNA, 83 bp, Homo sapiens
cggggccttccacaccccctccgtgggtgtgtggtcagcccaaggccaaccccactgtcactctgttcccgccctcctctgag

SEQ ID NO: 578412 - DNA, 87 bp, Homo sapiens
tgcgcccgcgccaccatcttcggctgaagatgccatggacaatattaccaggcagaaccaattctacgatacccaagtcatcaaaca

SEQ ID NO: 578413 - DNA, 101 bp, Homo sapiens
gcttcctcaacttcacgctggcgcgagccccgtcctccttcgccgccgcgcacaaccgcacgtgcagacttcacagagaatgcagttgtcttgacttcagg

SEQ ID NO: 578414 - DNA, 82 bp, Homo sapiens
atgcctcaccctcatctatatcctttggcagctcacagaaaactacccctgagtgtggtcccacaggatatgtagagaaaat

SEQ ID NO: 578415 - DNA, 90 bp, Homo sapiens
gattactacgacaccggcgaggaacttggcagagtaaccagagagcacagagaaatgctggtgaaactggccaaacagaacaccaacaag

SEQ ID NO: 578416 - DNA, 100 bp, Homo sapiens
ccatattcctattaataacatcattgtggtaatggcagatgagttaaccaactcaagagcagctttacagcgtcaaaaccgtgatgcacacggggctata

SEQ ID NO: 578417 - DNA, 50 bp, Homo sapiens
tttttggggcctctttagaaaagattgagtctgtttctcagccattggaa

SEQ ID NO: 578418 - DNA, 82 bp, Homo sapiens
ccttcggcagtccacccaccgccgccgcctcccaggcaacatgagtgagaatgaggaagaggaaatttctcagcaagaaggc

SEQ ID NO: 578419 - DNA, 90 bp, Homo sapiens
aatcacccaccccaccgagttcgacttctacctgtgtagtcacgctggcatccaggctggagcggctcaggcggcctcggtgcgaaggag

SEQ ID NO: 578420 - DNA, 100 bp, Homo sapiens
aatgtttccatctcttcagagatgaaccaggtaaagatgagccttccagctacatttgcacaacatgcaagcagcccttcaacagcgcgtggttcctgct

SEQ ID NO: 578421 - DNA, 74 bp, Homo sapiens
tactattgtactatggacttcatcgctttataggaagttaagatatgccaacaacagcaattacaagaatgatg

SEQ ID NO: 578422 - DNA, 75 bp, Homo sapiens
caggctagaagagctcgatgagagattatagatgcccagttcatttttactgggtgcgtggtgaagaaattattc

SEQ ID NO: 578423 - DNA, 75 bp, Homo sapiens
cttaaagcctggaatgatatcaaaaagttctttattggtgaaaacatgaatccagatggcatggttgctctattg

SEQ ID NO: 578424 - DNA, 90 bp, Homo sapiens
tcctacaaatatgtatgaagtgtactgcagtgctctgctgtcggatggcaccattacagaaagcccagagtcgacttcaatgttcctatg

SEQ ID NO: 578425 - DNA, 90 bp, Homo sapiens
tccccacatcaatgcactgccaatggttaatgttcgtgaagaaattgaagagttttttccaagaatgtggaagataaatcaagataaaag

SEQ ID NO: 578426 - DNA, 100 bp, Homo sapiens
gctctactctatttctcgagacagtgacattttatttacccttcctaacctctccaaaaaagatcttgcttctgaaatatctacctgggatggagtgata

SEQ ID NO: 578427 - DNA, 74 bp, Homo sapiens
accgagtcgtgctctcgccccaacccgcgcgccagtcatccctttcaagccctgatatcttcgactccccaagt

SEQ ID NO: 578428 - DNA, 88 bp, Homo sapiens
agaaaaggagcacagagagttcagagcaaaaactaacagggatcttgaaattaaagatcaggaggaggtgcgccagtctgtaactcct

SEQ ID NO: 578429 - DNA, 88 bp, Homo sapiens
agcattttcggcaaccgctgctggcagttttgccaggtgtttgttaccttggtgatgtgtccaatctagatcccaacttctcatttga

SEQ ID NO: 578430 - DNA, 75 bp, Homo sapiens
ggaaaatggatgtagaaaatgagcagatactgaatgtaaaccctgcaggtgatttggatattgaagatgacatga

SEQ ID NO: 578431 - DNA, 90 bp, Homo sapiens
cccagaccagctcggctacctggtactgagtgaaggtgcagtgctggcgatgttgtgactgtgacagactcactggggtttgtacatgct

SEQ ID NO: 578432 - DNA, 49 bp, Homo sapiens
cctgtacagcctgcagaactcttgtacaataactgcatctgcgacgtgg

SEQ ID NO: 578433 - DNA, 100 bp, Homo sapiens
aggagaatgagaccctggtggagtttgctattgttgtaatttagattcgagaagtggtttatcctttgactggaaaagaaaagtagctgcagtattcccc

SEQ ID NO: 578434 - DNA, 82 bp, Homo sapiens
cgcggcccccagcagagcccgcctgcccggctcttttccttccctccatgagaaagaagccagctctgtctgacggcagcaa

SEQ ID NO: 578435 - DNA, 75 bp, Homo sapiens
gccaggagtcatgagcgacagcggcgagcagaactacggcgagcgggtaaggcacctatatatctgtgattttca

SEQ ID NO: 578436 - DNA, 101 bp, Homo sapiens
tccccggggagcactactccgagaaggcttggccggtacaggtgtgagaaagggactactgcagtcctcactgagaaaatcactcctctggagattgaggt

SEQ ID NO: 578437 - DNA, 101 bp, Homo sapiens
ttaatcatggtttcaactgtgcagaatctacaaattttgctactgtcagatggattgactatggaaaagttgccaaattgtcaattgaccctggccagcag

SEQ ID NO: 578438 - DNA, 83 bp, Homo sapiens
gcgcagtcgttcgcccaggctttggcccggcttccggagttttcggctttgtgagaaaccttaccatcaaacacgatggccag

SEQ ID NO: 578439 - DNA, 74 bp, Homo sapiens
tttccttgctgatctatttaccaagtggaagttccagttatactccgtgtacttcctgatcctgtccatcatct

SEQ ID NO: 578440 - DNA, 74 bp, Homo sapiens
tgacgacagggacagtggcggccccgttctccaggatgaccggaaagaagggatgaccgcgtttgtggaaaaga

SEQ ID NO: 578441 - DNA, 90 bp, Homo sapiens
ccgagttctcggtactcttcagggatgagtcatgtggcagtggaaaatgcgctcgggctggaccagcagtgacctgaccaacggtgcaga

SEQ ID NO: 578442 - DNA, 100 bp, Homo sapiens
gccgcccgggccccgcggctgccgcagcattcccgggaaggtgctggagaatctggtaaaagcaccattgtgaagcagatgaggatcctgcatgttaatg

SEQ ID NO: 578443 - DNA, 100 bp, Homo sapiens
gtggggccgcggccggaccgagcgcctcgacctcggtctgaggtatgaaattgaaggctgtgaagtgatttgggccattaaagataaagctatagggaat

SEQ ID NO: 578444 - DNA, 100 bp, Homo sapiens
cacctcatagccatgaaactgaacagaaaagactgggacttcttgctggatttgcattccttacagagaatggcatcatttcctggtggtcaacatgaag

SEQ ID NO: 578445 - DNA, 74 bp, Homo sapiens
ttgacccaccttgggattttctctatgaacttatgaaaaccttcagttacagagtttcactcttattgcccagg

SEQ ID NO: 578446 - DNA, 88 bp, Homo sapiens
gcgaccgccatggcgttcctcaaactccgtgaccagaaactatgttccaacttcctgtcaacaatcttggcagtttaagaaaagcccg

SEQ ID NO: 578447 - DNA, 97 bp, Homo sapiens
gaagtacacccagcgagttgactacatcatgcagctgcctgtgcccatggatgcagcccttaacaaagagcagcactctgtcctgcacctggttccc

SEQ ID NO: 578448 - DNA, 51 bp, Homo sapiens
attggattggcatctttagagcctgggcaatatttaagggaaagtataagg

SEQ ID NO: 578449 - DNA, 100 bp, Homo sapiens
gacctctgtggcagcattttttccagaacacaaaagggaaagcaggcaggatgggagagtcgccgatagaaccacctcttccctgcctcctgggcttggg

SEQ ID NO: 578450 - DNA, 75 bp, Homo sapiens
ttcctattccactggattgggaaagaccatggcagctccatggtgcaatgtatggaagtggaatctatcttagtc

SEQ ID NO: 578451 - DNA, 74 bp, Homo sapiens
tgctgacacccatcacccacatctcacaacctcctgccccccgaggtctgcagtctcctgaacccagcagccat

SEQ ID NO: 578452 - DNA, 90 bp, Homo sapiens
gtggtgacagtagcccagcccgccggccagaaattgcaggtgctgcagtgtctgaaatttccgggcctttctcaacagaggatgtagcca

SEQ ID NO: 578453 - DNA, 100 bp, Homo sapiens
gctttttgagcggtcccgcatcaaggctctggcaggatgaatttcatcctttcatcgaagcacttctgccccacgtccgagcctttgcctacacatggtt

SEQ ID NO: 578454 - DNA, 75 bp, Homo sapiens
gaagcgcttcaaaggaccggacccagagaagaggaaaactctaccggtgcagttacagcaattggaacttgcaca

SEQ ID NO: 578455 - DNA, 82 bp, Homo sapiens
ttataagctacaaagactttagagatatgaaccagcaattttccagattattcaaagtatcaggatgggcatgtgaagtgac

SEQ ID NO: 578456 - DNA, 97 bp, Homo sapiens
gttttatagaatctgcatatgatatcataaaactgtgtgggcatctggctattcttggtgcagggctgatgggagcaggcatcgcccaagtctccgt

SEQ ID NO: 578457 - DNA, 50 bp, Homo sapiens
gaaacctggatctttgctagaaagagaggaacgggaggatgaaattgcta

SEQ ID NO: 578458 - DNA, 74 bp, Homo sapiens
gtggagtgacggtgccaccgcggcgcattacaacagcagtgaattgaaaacagcctgcaggaagcatgagctgt

SEQ ID NO: 578459 - DNA, 101 bp, Homo sapiens
ccctgccttccttgcagaggccatggaggacgaggagagacagaagaagctggaggccggcaaagccaaggtataccaagcttggctacgcaggcaacact

SEQ ID NO: 578460 - DNA, 50 bp, Homo sapiens
cccctttgaattaattatggctgtgggtcatgataactgggtacgtggag

SEQ ID NO: 578461 - DNA, 100 bp, Homo sapiens
cctgcaacgaggtcaccccgcggatctacgtgggcaacgcgtgtgctggaggaagcggagttttacaacatcgcgtcccttgtgcggctggttaaggaaa

SEQ ID NO: 578462 - DNA, 97 bp, Homo sapiens
ggcacgatgccgaggaaacagtgaccctgagcgaagccaagccgggcggcaggtgaccattgtgaggtagatattttgttctaattttccagatgag

SEQ ID NO: 578463 - DNA, 83 bp, Homo sapiens
cgccgaggcaccgaggcactcagaggagctgaagaaacacttaaattctggaaatagcgactcagtatcatggccagcagcct

SEQ ID NO: 578464 - DNA, 75 bp, Homo sapiens
gcagtggagcccaaagacccctggagacatgacaatccatgtcctgccacagctctgaccaccacaaagaggagt

SEQ ID NO: 578465 - DNA, 101 bp, Homo sapiens
cagcagggcgttggctatgtgcccatcacagggcttgtcaatgaggcagatcagattcaggttcgacgggcagccaatcaatgaaactgacactccagcac

SEQ ID NO: 578466 - DNA, 98 bp, Homo sapiens
cccagacccgccaaggatcatcctgcctacgacaactcctaaaagacccgcaagtgctatttgctggctacaaagtcccccaccccttggagcacaag

SEQ ID NO: 578467 - DNA, 128 bp, Homo sapiens
ctcacaggttgaaaaaccaaagctccctgctgcataagaccttgtcagaggtgattcgcaaggggtggctcaccatcagcaacattggcatcatgaaaggcggctcgaagggatactggttcgtcctt

SEQ ID NO: 578468 - DNA, 100 bp, Homo sapiens
ccgagcggaaaatgaagctagaggacttcatcaagaacctccgaggtttgctgagaattaaatgcaaaatgaaatgaatcgtgtcactctcccagacaag

SEQ ID NO: 578469 - DNA, 75 bp, Homo sapiens
tggcggcccagctgggcgagtatctggaggaggagccaaggcaaagagggaccactgtgctcatggacccatcgc

SEQ ID NO: 578470 - DNA, 100 bp, Homo sapiens
tgagtataaaggatgggttttaactacagacccagtctctgccaagtagctacagcaagctgggtagcaggcagatccaaaggatatcatgaagtttcca

SEQ ID NO: 578471 - DNA, 74 bp, Homo sapiens
gacatttaattttagggtcctttatatagaagggagagtagacagggtcagatgtgttactgggctggagtgtg

SEQ ID NO: 578472 - DNA, 90 bp, Homo sapiens
tttaattttgcaaagaatccaggacaaaaaggattaggattgcctacagcgctcctttaaggcacaggttttctcctgccctgcttgccg

SEQ ID NO: 578473 - DNA, 127 bp, Homo sapiens
agttacatgtatggagaatggctggtctcctactcccagatgcatccgtgtcaatatgcctcttcatgttcgacgcagtagtgacccagctctaattggcctctccacttctgtcagtgatagtaat

SEQ ID NO: 578474 - DNA, 100 bp, Homo sapiens
tcagcctcctgagtagcagggattacaggcccaggatgttttggtgcaggagatggaagtggttaaacaaggaatgagccatggagagctctcaagtgaa

SEQ ID NO: 578475 - DNA, 100 bp, Homo sapiens
tgagcttctaactcattgtattcctcctgagataataatgaagcttggtgatccagctatttttcctgccgtaattgtggaacatgttcctggtgctgat

SEQ ID NO: 578476 - DNA, 82 bp, Homo sapiens
gcaccaggagacgcaactcatcgggagcatgtggacaaagccattgctctccagccagaaaaccccatggctcactttcttc

SEQ ID NO: 578477 - DNA, 76 bp, Homo sapiens
cagacagctcccacaggagtcatgcccagtgtgtgaagtctaccctgacatttgcactatcagccttgtagcagtg

SEQ ID NO: 578478 - DNA, 100 bp, Homo sapiens
gttggatcttgctcagtctctgtcagaggaagatcccttggacatttcatatatatggatttcacagctacactcgatccacgccccacaccacatacag

SEQ ID NO: 578479 - DNA, 49 bp, Homo sapiens
ccgtgacttcccggacgctgggaaatggagggagccatggatttgctgc

SEQ ID NO: 578480 - DNA, 80 bp, Homo sapiens
agatcgggagcgggtccttcggagatatctacctgggtcaaaatgcagatcttcgtgaaaacccttaccggcaagaccat

SEQ ID NO: 578481 - DNA, 75 bp, Homo sapiens
tgagatcgtcaagtctcccagcgaccccaagcaataccgggaatgtggtgagcaacttgggacattccttcttca

SEQ ID NO: 578482 - DNA, 100 bp, Homo sapiens
ctgagggtggcggcggtcgacatgttccaggtcccggatagcgagggcggccgcgccggctccagacccttggcttctgcgttcgaagagtcctgtaggt

SEQ ID NO: 578483 - DNA, 96 bp, Homo sapiens
caacaagggcccctcgtacgggctgtcggccgaggtcaagaaccgggccctgtttgtgctcttcgtcctggcctacatccacatcgtcttctcccg

SEQ ID NO: 578484 - DNA, 82 bp, Homo sapiens
gaagtgcctgcagttcagacccttctctcccctccactttctcccggtgggagagcccatcaactgtgaggcctgggagtgg

SEQ ID NO: 578485 - DNA, 100 bp, Homo sapiens
tttagccaccaaagacatgaggaaatcacagggaccctgatgcttggtgtgacctgagtaaatttgacctccctgaggaaccatctgcagaggacagtat

SEQ ID NO: 578486 - DNA, 100 bp, Homo sapiens
gggtcatctttaactgcttggccgtgcttgccctgtcatcccacctgagaaccatgctcaccgaccctgacacaggttgaacatcacggcggagaacgac

SEQ ID NO: 578487 - DNA, 75 bp, Homo sapiens
aatggaaaaaacattgaagacgtcattgcccaggcgtctgaccaaacacaccaagttcgtgcgggacatgattcg

SEQ ID NO: 578488 - DNA, 90 bp, Homo sapiens
ccccgcgcgccgcggctcctgttgacccggtccgcccgtcggtctgcagcgcggctgaggagatccaggctacctggtatgagaaactgc

SEQ ID NO: 578489 - DNA, 75 bp, Homo sapiens
tggtctttggaacaacgttcttcaactttgacagctggaaactgacaaactagctctcccgatgagccccagccc

SEQ ID NO: 578490 - DNA, 96 bp, Homo sapiens
agaagttagcttcagagttctttgtggatggacttgattctgatgagagggtgtcaaattgagaaccaggtagatccccaccacctacagtaaaaa

SEQ ID NO: 578491 - DNA, 82 bp, Homo sapiens
tctgctgtgggcgctgctggcgctctggctgtgctgcgcgacccccgcgcatgtggccggctcacctcattcctgccaagac

SEQ ID NO: 578492 - DNA, 75 bp, Homo sapiens
aagagattcagccagcacactcctcgcgagcaaggtggaaaatgaggttgatcgcagcattcagaaagtgtataa

SEQ ID NO: 578493 - DNA, 49 bp, Homo sapiens
ataatggcgtgttccagtccacgggaaagcttcctgtggagtcgatcca

SEQ ID NO: 578494 - DNA, 100 bp, Homo sapiens
tggggcccgaggctagcatctctcgggagccgcaaggcgagagctgcaaagggatttgtcttggctgttactatgacacgggaagcaattgatgaatttc

SEQ ID NO: 578495 - DNA, 71 bp, Homo sapiens
agctgactactccatccgagaagagattttaagtgggcagaccaacatccacctcagcaaaaacttcttcc

SEQ ID NO: 578496 - DNA, 101 bp, Homo sapiens
tttataccatgaaatgattgaatctggtgttatcaacttaaaagatgccacctctaaggaagaagaaaggtggggcgaagccagcaatgacgaggacgatc

SEQ ID NO: 578497 - DNA, 97 bp, Homo sapiens
gccgaagctgtcaagtccaactacagccccaccatcgtgaaagagtagccggcttcagtgcctgccttgggatggagatgtaacagttaactttgaa

SEQ ID NO: 578498 - DNA, 100 bp, Homo sapiens
ccagcaggcgctggctcctgctcagatgccttcaattaagttgcagagttctgatggagagatatttgaagttgatgtggaaattgccaaacaatctgtg

SEQ ID NO: 578499 - DNA, 100 bp, Homo sapiens
cctttccgtctggcggcagccatcaggactcatctgatgatgtgagaagagttcagaggagggagaaaaatcgtattgccgcccagaagagccgacagag

SEQ ID NO: 578500 - DNA, 100 bp, Homo sapiens
caggatccgtcattggattggctgcggggcccacctctctaagcctatggaaaagcttctggaattacggatccagatcaggagatttgaggagctgctg

SEQ ID NO: 578501 - DNA, 82 bp, Homo sapiens
tacattctgcaggtattggttggaagagaatctgagtacaaacaggtttctgctttgggacaaccatacatctaattcctta

SEQ ID NO: 578502 - DNA, 100 bp, Homo sapiens
ccgacggggcgcgcgcgaagcgagcgagaaggcacggagtcgccgcggagcgcaggctcacagaacatttcctgcctgttgctcacactctgttgtccac

SEQ ID NO: 578503 - DNA, 73 bp, Homo sapiens
tgccttctgccgccggccggcgcgtcgtccccacagatgaagcgccctcagttcagcaagccgccaggaggcc

SEQ ID NO: 578504 - DNA, 100 bp, Homo sapiens
cggctctcggcgcgtccagcgcagcccgacgttccgctgctgggccccactcaaaggcatcccgaagcaggcgcccttcagaagccccacggcgcccagc

SEQ ID NO: 578505 - DNA, 75 bp, Homo sapiens
ctcatcctggtcactagcggactcttcttcgccttcgacaaaaaagaaattcctgtgtttaactttaccatccat

SEQ ID NO: 578506 - DNA, 90 bp, Homo sapiens
cgtggagtgacggtcacaccgcggcggtcatttgaaccaattctccgcctccttccccagggaatctctcctgtcagccagcactgggca

SEQ ID NO: 578507 - DNA, 50 bp, Homo sapiens
ctgcttggagacggacttgcttccggtgatttgatgaaggctgctgcagg

SEQ ID NO: 578508 - DNA, 105 bp, Homo sapiens
tcacttgcatgtatttggaacaaaaaaaggagatgcctggcagccccgctctctgcatcagaacagtccggccgaagacttccaggagccgtgccagtattccca

SEQ ID NO: 578509 - DNA, 75 bp, Homo sapiens
cctctcgccgcacatgtttggagcggacaaggcaaaatctcagcaagttcggacctctagtacaataaggcgaac

SEQ ID NO: 578510 - DNA, 99 bp, Homo sapiens
ccaccatcgcctgtcacctggacccgcgcgtgttcgtggacggcctgtgccgggtaccagcaacttcaaggtttctgccagcccactgttgtatacgct

SEQ ID NO: 578511 - DNA, 83 bp, Homo sapiens
cttggactgagtcctgcaggacacaggtagttgatgtcacttggcgatattcctgcaaacatgaagaggtgattgccagaaga

SEQ ID NO: 578512 - DNA, 90 bp, Homo sapiens
gtgtataagctggtgcctggcttgcaagacatcttacacagtgtgggccatgtggtgaatgtgtacctgttctccatcagccccctcagc

SEQ ID NO: 578513 - DNA, 83 bp, Homo sapiens
tacacagcacaaagaatgtcagacagcagccgagaccgacccgcccgcccgcggccccgcagcagctccaagaaggaaccaag

SEQ ID NO: 578514 - DNA, 90 bp, Homo sapiens
ctcctccacaccccccgccgcagcagcaccggcgacagggtttcatcaccttaaatggttttgaaccaatgaaggtgtattcccttaaaa

SEQ ID NO: 578515 - DNA, 116 bp, Homo sapiens
tcccaagatgtcgcagacggccatgtccgaaacctacggtactccaaagattcaggtttactcacgtcatccagcagagaatggaaagtcaaatttcctgaattgctatgtgtctg

SEQ ID NO: 578516 - DNA, 87 bp, Homo sapiens
ttaagggatgagacttggccctcaagatctgggtttccattacccctgccatcgtcaggtactatactggcaattgctggagaagat

SEQ ID NO: 578517 - DNA, 88 bp, Homo sapiens
aagggagacgacgctgctgggtccgctgagcggggcgacccgaggtttactgggaaactggtgctcagatcacatctcctcatgataa

SEQ ID NO: 578518 - DNA, 75 bp, Homo sapiens
ctcagttggaagcagccgatccagcctgcggagcctgtggggcaggctaattcacctaaataagattgatcctca

SEQ ID NO: 578519 - DNA, 90 bp, Homo sapiens
acagaaattctggaacacctatatgggtgtccgcaatgttgccagtgtctgtctgcagattggctacccaactgttgcatcagtacccca

SEQ ID NO: 578520 - DNA, 100 bp, Homo sapiens
gaccggctggaggcgagtttggatatgacaaagacacatcgttgctgaaagagattaggaacaggtccccttcccctgagcccatctacaatagcgaggg

SEQ ID NO: 578521 - DNA, 90 bp, Homo sapiens
ggcaacaagcactgtcaccaacaggcatcaacacttatttcagattggatttccagcaacaggaacagagtctcgctctgtagccaggct

SEQ ID NO: 578522 - DNA, 101 bp, Homo sapiens
gagcaggagcatcaggcggccggcgcatggcgtgtctggccaaatcttcccgacagggcttgctttcagaaatcctccgaaaggaagaggaccccaagact

SEQ ID NO: 578523 - DNA, 100 bp, Homo sapiens
tgggcggcggcaacggggcactgacctgggtgaattcctagaggacctgtgcaacaacctcttgaggatcgaatcttcactcccgctgtctcagcagtct

SEQ ID NO: 578524 - DNA, 75 bp, Homo sapiens
gctatattcccaaagcttggattagcactgctatgaaccttcacatagatgagatctgcctacaaactggtttgc

SEQ ID NO: 578525 - DNA, 75 bp, Homo sapiens
ggtccccgaagcaagcctcctgatttaaaggccaagtcctgtatctgccatgtctgtggcgtccacctcaacagg

SEQ ID NO: 578526 - DNA, 100 bp, Homo sapiens
catcattttctgtgtcgcgctcagcggctatgaccaggtgctccacgaagacgaaaccacgtcggaggcctgcaggactttggcacccgagaaggacaag

SEQ ID NO: 578527 - DNA, 100 bp, Homo sapiens
ctggcacctgctgcacgagtcattgtttggatctgttgctgatgatcagaaacttatgatgcctactgaacttgacgcactggtatttggccatctatac

SEQ ID NO: 578528 - DNA, 75 bp, Homo sapiens
tactatgactcttcctggaatacacccacctaccttgaaccagtctgaagatgatgagaaactgaaaaagaggaa

SEQ ID NO: 578529 - DNA, 100 bp, Homo sapiens
ttgggtcgacacgaggctccctggacaaacctgactccttcatgggccagcggaagcctgccacctcctatgtgcggaccaccatcaacaagaatgctcg

SEQ ID NO: 578530 - DNA, 82 bp, Homo sapiens
tgcttttcaagtatgccaccaacagtgaagaggttatcaatactctggctgaccatcatcatcgtgggactgactttggtgg

SEQ ID NO: 578531 - DNA, 97 bp, Homo sapiens
catgccgcagtaggacagcaggcccaagtctgcacatcccaggtactgggcctaatcgctacgtgcctctttggctatgatgcctatgtcaccttcc

SEQ ID NO: 578532 - DNA, 86 bp, Homo sapiens
cagcgctcccacccccggcggcggcacgatgccctttgacttcaggagttctgaaggctgagaagttcaagagcaagtgctggcat

SEQ ID NO: 578533 - DNA, 100 bp, Homo sapiens
attgacttggcaagggcttattgttccttagcataatggcagaacctgtttctccactgaagcactttgtgctggctaagaaggcgattactgcaatctt

SEQ ID NO: 578534 - DNA, 101 bp, Homo sapiens
ccatcaggtaggctgcgttgaggatctttgctcttccatccgcctttgatcgtcttcctcttcagccatccaggttcagcagctccacagaacagagcagt

SEQ ID NO: 578535 - DNA, 75 bp, Homo sapiens
cggctcatcaaggttgtgattgaggacgctggtgccgacaagaaagccgaggctggggctgggtcagcaaccgaa

SEQ ID NO: 578536 - DNA, 80 bp, Homo sapiens
gcagaaagcaggcgaacccgcggcgcaataacggcctcatgcattgtgcgtcagcagcaatgtttatggtgaaaaatggc

SEQ ID NO: 578537 - DNA, 100 bp, Homo sapiens
gggggattctcgacctgctaacagaactggaccttttcgaggaggaagaaggtgggaaaggtgaaaagaggaagagagaaacagatgatgaaggagaaga

SEQ ID NO: 578538 - DNA, 83 bp, Homo sapiens
aggaggagtgcggcgcggcggccccgggaccaaggagaaacaggtggcatctgcatcgcaccacggccctcggaagaaggggc

SEQ ID NO: 578539 - DNA, 74 bp, Homo sapiens
tagataaaccacagttacaaggaattccagtgtgggtacgccacgctgcatcacgtcattgacaagtccacaga

SEQ ID NO: 578540 - DNA, 116 bp, Homo sapiens
gcgcgcggggcccgccatggctgcgtcggagctctacacaaaggtactaggttttgacaagcttgcatcatgcgtgagtataagctagtcgttcttggctcaggaggcgttggaaa

SEQ ID NO: 578541 - DNA, 75 bp, Homo sapiens
aggactttgagccagtccagaccctgctgctgtcttcaaagaagaaactaattctgaagcaagcccttatagttg

SEQ ID NO: 578542 - DNA, 78 bp, Homo sapiens
ctgaagtcacccggaattgggaagtgctcagaagcttacaaagctgcctcgagaagaatcccagacttcttagagaac

SEQ ID NO: 578543 - DNA, 90 bp, Homo sapiens
ctaacatccagaagatcacacagtgttttgtattccctgaatgactataaaccacccatttcgaaagcgaaaatgacccaaattactaag

SEQ ID NO: 578544 - DNA, 100 bp, Homo sapiens
cagcagagggtgtgtaataaaatacaggttcgccaagcagcttttcagtctctgggacctttcatatctacttttgctaatccatctagctcaggccagt

SEQ ID NO: 578545 - DNA, 80 bp, Homo sapiens
gtctataagctttgcaacagaattacagagtatgatgacagttaatgattggacgtcatccaatgagaaagcagtgatgt

SEQ ID NO: 578546 - DNA, 75 bp, Homo sapiens
cggctccggggcagctccggcgggcggtgtacgaagccatcgacagcagagatggagcatcttgtgcagagttgg

SEQ ID NO: 578547 - DNA, 75 bp, Homo sapiens
ctttgtagcgtggtgcttctgttgctcacagggtcccttcctcttgccttcgtggacctggaacagtgatctggc

SEQ ID NO: 578548 - DNA, 89 bp, Homo sapiens
ttgcttcatctacagtcaggatgctggatgttcatggagtgagaggtctgcggggtttccgagaggctcgccgggatttctggcggggg

SEQ ID NO: 578549 - DNA, 100 bp, Homo sapiens
aggatccccagtatgcatctcaagatgtgaatgacagcccatatcaaggcggtgtattctttttgacaattcattttcctacagactaccccttcaaacc

SEQ ID NO: 578550 - DNA, 100 bp, Homo sapiens
ctggtgcatgagaaggcccggcagcttcgccgttctatggaaaacattgagctcgggctgagtgaggcccaggtacggttcctggagcagcagaacaaga

SEQ ID NO: 578551 - DNA, 75 bp, Homo sapiens
tgctcttggctctcaacttattcccttcaattcaagtaacagatgccttcaattaagttgcagagttctgatgga

SEQ ID NO: 578552 - DNA, 50 bp, Homo sapiens
gcttttatgaagcgggccatggtacggttcctggagcagcagaacaagat

SEQ ID NO: 578553 - DNA, 76 bp, Homo sapiens
tgagattgatggacgtaagaacaagctattgcagtacaaggcagacatcaatgcagtgaatgaacacgggaatgtg

SEQ ID NO: 578554 - DNA, 83 bp, Homo sapiens
catgcgtggagtggctccacaaatacctggagaaggggaaggagacgctgcttcacctgggtgcaccagggacctgtccctct

SEQ ID NO: 578555 - DNA, 98 bp, Homo sapiens
cctacgccatcaacctggccgctgtgggcaccgtggccttcggctgcacagaattcagaagatcccgcggttgttggtgggtgccgccgacgggtacc

SEQ ID NO: 578556 - DNA, 75 bp, Homo sapiens
caaacttagatgccactcagtggaagactcagagaagagaatgtactactcatcacctcccacctgtgaaagccc

SEQ ID NO: 578557 - DNA, 89 bp, Homo sapiens
ttcagaacctcaagcttttcaggcatcctcatataattaaactatatgtcttgtcgttcaagacttgcaacactaaacgagaaattgac

SEQ ID NO: 578558 - DNA, 82 bp, Homo sapiens
ctggtcttgaaatcggcatcttaggtgctggagaatctggtaaaagcaccattgtgaagcagatgaggatcctgcatgttaa

SEQ ID NO: 578559 - DNA, 80 bp, Homo sapiens
tgcaagggccacctgttcctcagttccaaccacagataaacaatcagattctgtatggaagaagtcaccaaaatgcatct

SEQ ID NO: 578560 - DNA, 75 bp, Homo sapiens
agacagcagaagcaggccaagctcacagaagtggtccatgctgtggacggcaccgccgagaacgggatccacccc

SEQ ID NO: 578561 - DNA, 75 bp, Homo sapiens
aaagaagtcctttcaagtctctaggactggactcttcctaagcaagtccgggaaatcctcattgacgattcaatt

SEQ ID NO: 578562 - DNA, 75 bp, Homo sapiens
tcgggcgccccgccggtcacctccgcgcggacaccaggaaacaagagctacagtggatctattcaaagcttaact

SEQ ID NO: 578563 - DNA, 98 bp, Homo sapiens
ttttccagacactgaaagagcagaatggctaaataagctctagaggacaaaatcccagtccttggcacaaactcaggaaatggaagccggagtctgtt

SEQ ID NO: 578564 - DNA, 98 bp, Homo sapiens
ggtgctacaggatttcctggttctgcgggcagagttggacctccaggccctgctggtgcccctgggttccgaggacctgctggaccaaatggcatccc

SEQ ID NO: 578565 - DNA, 100 bp, Homo sapiens
gccgggagaaattgctgaagaactcgcaagctcctacgaaagaaagctcatcgagggaacccatattgaaatgtctattggaattattttgggaatttca

SEQ ID NO: 578566 - DNA, 51 bp, Homo sapiens
ccttgatcctcctcctaattgcagaaccatccgggtatggctgaaaagaga

SEQ ID NO: 578567 - DNA, 75 bp, Homo sapiens
agagcctgcaggaggagctggacttccggaagagtgtgttcgaggaggtgacttaagagattaaaattaatttgg

SEQ ID NO: 578568 - DNA, 80 bp, Homo sapiens
aagagttggagagagtgccccacaacacccctgtggaaccacatccctgtgtttagtcccgcacttacagacggctcgct

SEQ ID NO: 578569 - DNA, 82 bp, Homo sapiens
cgaggactcggagttcacctgcaggctactgcagcactggggtgtcagttgttggtccgacccagaacgcttcagttctgct

SEQ ID NO: 578570 - DNA, 95 bp, Homo sapiens
tgatcatgggcattggtcaccgagtgaagtcggcaaccatcggcttgatcaggaatctggccctgtgcccagccaaccatgccccgctgcaggag

SEQ ID NO: 578571 - DNA, 100 bp, Homo sapiens
cgtgctcatcttcatcgccctggctctgaatggctttggtgggatgtgtatgaccttcacctcattaacagttactcactataaacaatatccacccaac

SEQ ID NO: 578572 - DNA, 82 bp, Homo sapiens
aaactagagactaaagctggacacccgcccgccggtgagaagccctaccactgcaactgggacggctgcggctggaagtttg

SEQ ID NO: 578573 - DNA, 75 bp, Homo sapiens
ctgcctcatcgcccgcgtgctggatgtggatgaggcttccaagaaggagatcaaagacatcctcatccagtatga

SEQ ID NO: 578574 - DNA, 90 bp, Homo sapiens
caaacatcttccaccacagcttagaggaccctgatgctcccataagacagaaaatgccccttgatgatctggatagagaagatgaagtta

SEQ ID NO: 578575 - DNA, 75 bp, Homo sapiens
ctcgatccgcccacagacctcaaattcaaagaaactggcgatggaatatgagaggagccctctggaaagaaaagg

SEQ ID NO: 578576 - DNA, 96 bp, Homo sapiens
accctcgaagtgcgcaaacttgacactcaccctgaccggtgtcatggagaaactccagctgggcccagagattctgcagcgggaaaatccaaggct

SEQ ID NO: 578577 - DNA, 75 bp, Homo sapiens
aggatgtgtacatggctctccaggtcagagttgctccaagcaagatgatgcagtttgcttggcagagctataagc

SEQ ID NO: 578578 - DNA, 82 bp, Homo sapiens
gactccttcggcagtccacccaccgccgccgcctcccagatttggtgttgtactgcgaggcattcctgaccacctacaggac

SEQ ID NO: 578579 - DNA, 73 bp, Homo sapiens
gggctgtgtcatagacgtccgacgtgtctggctaagcttctatcaccatcagagaaagaaatacccgagcaaa

SEQ ID NO: 578580 - DNA, 133 bp, Homo sapiens
acactctgggacagtgggagatttggaacagctttgagaagagcaagacctaacactgccttgttggatccaagctcccctgaattctctgctgtggtatcagtgggcgattggctccaggccattaaaatgg

SEQ ID NO: 578581 - DNA, 100 bp, Homo sapiens
gcttaaagtaggacaaccatggagccttcctgtggcaggagagacaacaaagcgctattatcctaagagccgcagagcacacaacattgacctgaagggg

SEQ ID NO: 578582 - DNA, 90 bp, Homo sapiens
tgaccctgcccttgccagaatttcctgcgctgttccacctcattcaacttcaggtctcaccaacggctttgggggtgcgaggagcgagca

SEQ ID NO: 578583 - DNA, 100 bp, Homo sapiens
gacttcctccccgcgccccctccccctcgccatgaaggttcgagaacttgtcttggacaattgcaaatcaaatgatggaaaaattgagggcttaacagct

SEQ ID NO: 578584 - DNA, 100 bp, Homo sapiens
ctcagacgctggcgggcgcagtttctcacgacgggccgagcctgccactatatcagttttagagaatgtggcgtggagaaattctcaaggaaagagtaaa

SEQ ID NO: 578585 - DNA, 119 bp, Homo sapiens
atgcaacaagctctttgaatcattctgttgggatcaagattgttgtgttccctctgtttggaaagagaccaaggactgttgtgagaatcaaacgagataatgtatgctgaggcatgctg

SEQ ID NO: 578586 - DNA, 50 bp, Homo sapiens
gcagagtcggcacctgaaggacatggaggcttctccagggaaagtgaccg

SEQ ID NO: 578587 - DNA, 100 bp, Homo sapiens
ggaaaagtggcactgaggctctggaacttctgcccagctctccttggtactaggttttgacaagcttgcatcatgcgtgagtataagctagtcgttcttg

SEQ ID NO: 578588 - DNA, 75 bp, Homo sapiens
tggaccatgggcgcccgcggtctggacaagcgaggaagtttctttaagctctgcttatgataatgtcaacaaagt

SEQ ID NO: 578589 - DNA, 100 bp, Homo sapiens
aaacaatggcatttacagaaagagtcaacagcagtggcaacagggaagccatcagccgcgtctgtgaagctgtgcctggtgcgaagggagccttcaagaa

SEQ ID NO: 578590 - DNA, 83 bp, Homo sapiens
ggatccccaagcccgccacgccgcccagcccggccccgcccgcgccggaagagccacgccgggtttcgtggctgtcccaacaa

SEQ ID NO: 578591 - DNA, 51 bp, Homo sapiens
ataagttgccttatgtcaccatgggtggagttggcatgaacttaacagcag

SEQ ID NO: 578592 - DNA, 100 bp, Homo sapiens
gcgtgcgcagcgccggcccgagtgggcctttggagtgacgctgtgggaactcatgactctgggccagactccctacgtggacattgaccccttcgagatg

SEQ ID NO: 578593 - DNA, 87 bp, Homo sapiens
cgccgcccgccgggcgctctcgcttcagtcagtcgggccgcgccgcgcctcagctctgacaatgcagatcttcgtgaagactctgac

SEQ ID NO: 578594 - DNA, 74 bp, Homo sapiens
cagatctggatcatcaaagacagtttttcccaggtcatgagtctcgggctacagaagctttgtgctgggcagaa

SEQ ID NO: 578595 - DNA, 100 bp, Homo sapiens
aaggctaatggcacaactgtccacgtaggcattcaccccagcaagggaagtgttcgccagttactacatgaaaagataagagatgcttatactcacccac

SEQ ID NO: 578596 - DNA, 100 bp, Homo sapiens
ctacgtgtgcttcttgggcgtcgttgtcaccatcgtctccgccttccagttcggagaggcaatggacctcatcatgaccgttgctgtacttacaatgaaa

SEQ ID NO: 578597 - DNA, 82 bp, Homo sapiens
gagaaagcagacatcccggccaagtatgcggagggatgctgagaacttgctggagtcacagccactgggatcctttctcatc

SEQ ID NO: 578598 - DNA, 95 bp, Homo sapiens
ccaggtgtaagcgcagaaagcaggcgaacccgcggcgcaataacgagatcctgaaggagctagacgagtgctacgagcgcttcagtcgcgagaca

SEQ ID NO: 578599 - DNA, 75 bp, Homo sapiens
gggcgagcggctgtgtggatgtcggcgaagccgcgggcgaggtgctggaggtggtgagagccaactatgacacgc

SEQ ID NO: 578600 - DNA, 100 bp, Homo sapiens
aactgaagataggcaacaagatgatgagggcgcggcagtatccttggggcactgtgcaggagtcaagggtccagagaaggaggagaagttgagacaggcg

SEQ ID NO: 578601 - DNA, 100 bp, Homo sapiens
cagcggagtgactgggacctgggaacctactgtggggccgcggccggaccgagcgcctcgacctcggtctgaggatgaagtggcacacactctaactgaa

SEQ ID NO: 578602 - DNA, 98 bp, Homo sapiens
attcctcctccttggtcgccgcgtccttggctggcgtttccagaaacgccgctggactgcgaggtctccctgtggtcgtcctggggactgtgcggagg

SEQ ID NO: 578603 - DNA, 95 bp, Homo sapiens
aactgctctccatggagagagtaactctgtccttattatcggaccccgaggatcaggaaaaactatggtgacttaagagattaaaattaatttgg

SEQ ID NO: 578604 - DNA, 100 bp, Homo sapiens
aggctgagtgctaaactgtgtggggcgcggatgggatccagctgttagtcgggtaggcataggtttggaaggtttgcagttgctgctcttcagtccaaag

SEQ ID NO: 578605 - DNA, 90 bp, Homo sapiens
tctctgaagtcctcccaactaggcagagaaatcggtcctactgctctgttggctcatgaaataggttttggaagtaaagttacaacacac

SEQ ID NO: 578606 - DNA, 112 bp, Homo sapiens
cgagcacagagcctcgcctttgccgatccgccgcccgtccacacccgccgccagggaaatcctcattgacgattcaatttgttgaaggccaatttgtggactcctacgatcc

SEQ ID NO: 578607 - DNA, 75 bp, Homo sapiens
cgcgatgctggaccagttgatgggcacctcccgggacgctcctgcttcaggtgcagaaatacagcgatttccagt

SEQ ID NO: 578608 - DNA, 98 bp, Homo sapiens
ttgcaggccgggcagtgcggcaaccaaatcggcgccaagatgaaaccagcttgtataaaagcccttactcgtatatttaaaatatctgatcaagataa

SEQ ID NO: 578609 - DNA, 75 bp, Homo sapiens
agcactctgtgctagtgatgtgagcaaatgcctcattcagggcgatgccagtccctccactccagaggagaacga

SEQ ID NO: 578610 - DNA, 90 bp, Homo sapiens
ggaggagtctcagagctgtcagaaaggaactcaacagaggcaattattatcccgactgcaaatcgacccagtaatggcagaaactctgca

SEQ ID NO: 578611 - DNA, 100 bp, Homo sapiens
ctgttcttttggattatcacctgaactatttaaaggcccccacagaacacctgaactcaaatgagatgccggaggacagcagcactcccgaagagatgcc

SEQ ID NO: 578612 - DNA, 82 bp, Homo sapiens
tggagcttggtttcgggatctcggtgctgcagacggcgagacctcctgcacagggagtgcatccgccccaacccttttcccc

SEQ ID NO: 578613 - DNA, 117 bp, Homo sapiens
ctgcattttgggaaactcgactttggagaaaccaccgtgctggaccgcttttacaatgcaggtgatcagactctgagaatatgggatgtgaaggcagcaggagtaagaatcgtgatt

SEQ ID NO: 578614 - DNA, 100 bp, Homo sapiens
ctccaagcctgggaccatccgtggagacttctgcatacaagttggcaggttgactttggcagaatatcatgaacaggaagaaattttcaaacttagacta

SEQ ID NO: 578615 - DNA, 82 bp, Homo sapiens
aagattacaactatcctgttgagtggcaaagcaagaatcctcgggagatacagatgacccaccaagaattactcagaaccct

SEQ ID NO: 578616 - DNA, 90 bp, Homo sapiens
gaaatagaattttctacagaagtcaaggcagtcaagctgcggcgagataggatgagaacaagttgagcagtgccaacggccatgaagaac

SEQ ID NO: 578617 - DNA, 100 bp, Homo sapiens
ttaccatctttacgagaattcttgacagacttctggatggttacgataatcggcttagaccaggactgggagaccattcctcaagaattttgtatccaag

SEQ ID NO: 578618 - DNA, 100 bp, Homo sapiens
aatggcatcaatggtatccttgcagatgaaatgtaacaaatgtggcaattattttggatctatcacctgtcatcataactggcttctgcttgtcatccac

SEQ ID NO: 578619 - DNA, 98 bp, Homo sapiens
tggggatggcgcatcacacaccaaagggtgtgtccgcagccggccaggtggtatccctgaaggtgtggctgattgacgacattctagaaaagatcaac

SEQ ID NO: 578620 - DNA, 50 bp, Homo sapiens
catcaatgagcaagatgtttgtgaaggatctcgaggacctggaagaagca

SEQ ID NO: 578621 - DNA, 88 bp, Homo sapiens
cgctgctgggagatgggcctactcgcccgccaccctgcgctgccgccgctctgaggagttaaagattggagctggagggagcatcact

SEQ ID NO: 578622 - DNA, 98 bp, Homo sapiens
gcgatgtgtgattaccatggcgaggagtctctgtccgggggcctggctaaggaaaccctattacctccaggaactgtggaaggtgcatcagtgaagaa

SEQ ID NO: 578623 - DNA, 75 bp, Homo sapiens
agctaacaaagcgaagtggccatactcagcatgcagcagattggaataaatatgatgaccgattgatgaaagcag

SEQ ID NO: 578624 - DNA, 75 bp, Homo sapiens
ggtgtcaagaagctcagaatggttatgggagaagatatcccagaaaaaataaaagatgaagttcacccagaggtg

SEQ ID NO: 578625 - DNA, 100 bp, Homo sapiens
gcagcatcaagaaaatcgcagactttctcaactcgttcggctacagatgcacatgttgaatggagctcttctggcattgctgtttcctgtggtaaacact

SEQ ID NO: 578626 - DNA, 75 bp, Homo sapiens
cagtcttcaagagcccacggacaccacctcaacggccacgtgctgtacgccgacatcaagatggagaatgggaag

SEQ ID NO: 578627 - DNA, 99 bp, Homo sapiens
ggatcacggtgagggaaagatgagcgaggagacggcgacttctgacaacgagagccagcattcgaacgttcactccattttattttctggtggagccgg

SEQ ID NO: 578628 - DNA, 99 bp, Homo sapiens
gcggcgacggagggggcggccgggtccgcatcgagaagatgagctcagaggtggtggattcgaatccctacaggtttcgtctaaggaaaaaaacatgga

SEQ ID NO: 578629 - DNA, 76 bp, Homo sapiens
tagaaacatgtgcaacgagttactgccgataatgaaacctcatggcatgttggagacttgggcaatgtgactgctg

SEQ ID NO: 578630 - DNA, 95 bp, Homo sapiens
gaaatgattgaatctggtgttatcaacttaaaagatgccacctctaagacaggtgcagttcaggagcagatgagatccaagggaaaccgagatag

SEQ ID NO: 578631 - DNA, 140 bp, Homo sapiens
gtttgaagccttggtgatatacatggagagtctggccttagcacatgcagatgagaagtccttagcagctgaagttcatgcacacctcacaccagttcctcctgctgagcagccctcctgccaaggaggctcggttccgg

SEQ ID NO: 578632 - DNA, 75 bp, Homo sapiens
gctgtcatcaagccctttgccaccattccttcaaatgagttgggagctgaaagtgccgacagcattggtgccgtg

SEQ ID NO: 578633 - DNA, 50 bp, Homo sapiens
ttacagaaacaaactacatctcaggctggactgtgctgctgccatctcgg

SEQ ID NO: 578634 - DNA, 75 bp, Homo sapiens
gtggacaccgcctgcaggcgaggagaaggggtggcggagagggtacctgggtatgcaatgaaatgcttagataag

SEQ ID NO: 578635 - DNA, 82 bp, Homo sapiens
gaggaggcgcgggaggtgttcgagaacgaccccgagacggtgcttttgtgcgcgtccagccagaccagcagcatcgtggagt

SEQ ID NO: 578636 - DNA, 75 bp, Homo sapiens
gccctgggaagagaagtcccgagtccagtgcagcagtaccgcgtcgccatgactgccaaggactgctccatcatg

SEQ ID NO: 578637 - DNA, 75 bp, Homo sapiens
ccgaaaccctgagggtgatgaaaactgtagttgtcctgggaacccctgcagaagaagatggtggtggcaaaattg

SEQ ID NO: 578638 - DNA, 50 bp, Homo sapiens
ctcggtttcctggacccattccgactcagacattcacggcatggtgtaac

SEQ ID NO: 578639 - DNA, 100 bp, Homo sapiens
ggaaacatacagaagaagcaaggaaattacagttagaggtcatcgtattgaggaagttcctgaacttcctttggtagttgaagataaagttgaaggctac

SEQ ID NO: 578640 - DNA, 98 bp, Homo sapiens
gaccagtctcttctcatcccaaaacaatgcctttgcacaaaataaaccaactggctttggcacaaagtggaagatgctttctacaaaggtgaactcag

SEQ ID NO: 578641 - DNA, 100 bp, Homo sapiens
gtgcagtggcacctgcgcgaagctggccaaagcctgcccagacggctcacctgtgcgggatggaacaaaagagttgatctctctaatgtattagatcttc

SEQ ID NO: 578642 - DNA, 96 bp, Homo sapiens
ctgccgggcgctggtcgtcagcgccgaggctgggctgaggcgccgcggtaccatgaggcgccgatgtgactggagtgatttgcacccggatgccta

SEQ ID NO: 578643 - DNA, 74 bp, Homo sapiens
cgacagcaaggctatgcaagtggagagctgctcctcagccgtgggggtattgtgattgctttgcaaatggtgaa

SEQ ID NO: 578644 - DNA, 102 bp, Homo sapiens
cggcgtgctactgtgcgctcgatccagcaccatggggaagcgggacaatcgggtggtgatctgggctcttgggatctgctcatttgcctgtcttctaagaaa

SEQ ID NO: 578645 - DNA, 100 bp, Homo sapiens
gaagtccttgaacttccgaattaatctgcccactcccctggcatatgtggagacgctcctagaggttttagatcctcctggccaacttcttggcccagac

SEQ ID NO: 578646 - DNA, 75 bp, Homo sapiens
tacaccaagatctgtgctgaccacaggaattggatctactagtgcaggtggcacttactcaaaagcatctactcc

SEQ ID NO: 578647 - DNA, 82 bp, Homo sapiens
aagttcgtcttcccctccaacatgggtgtcgtgaaaactacccctaaaagccaaaatgggaaaggaaaagactcatatcaac

SEQ ID NO: 578648 - DNA, 90 bp, Homo sapiens
acgccaaaggcggcggcagcagcacggtgcagcgctccaagctttaactgagactccgaccagctcagactggcagtcgaccgatgccac

SEQ ID NO: 578649 - DNA, 50 bp, Homo sapiens
atcctggtcatcttctatttccaaacaaaacaagctatcgatcagggaag

SEQ ID NO: 578650 - DNA, 90 bp, Homo sapiens
gtatcctcctcagtatccaccgacagcattccaagaaccgtattgctgttaataagaattatccttgaatattgccagtgtgtggataac

SEQ ID NO: 578651 - DNA, 74 bp, Homo sapiens
cgttgccggtgccggcctagcgtcctggaattacttcaatcaattgaggagctcaagcttgggaaaatggtgtg

SEQ ID NO: 578652 - DNA, 75 bp, Homo sapiens
cgtcaccctgcctcccctgcgtcccgccaccggccgcttctgtcctcgggtccaggtcggggatcaacttgagac

SEQ ID NO: 578653 - DNA, 90 bp, Homo sapiens
aactcttggcatttggctttgcctttctggacacagaagtatttgtgacaggaatttagataatgggctgtgtgcaatgtaaggataaag

SEQ ID NO: 578654 - DNA, 100 bp, Homo sapiens
attccactggattgggaaagaccatggcagcttgctaagtactgtgacaacttactgaagaagtcagcgaaagggatgacagagaatgaagtggaagaca

SEQ ID NO: 578655 - DNA, 75 bp, Homo sapiens
ttgtgccctagcaccccgagaaccgtcagtttgagccagatgaaagttcaggagccctggaaaggagaaggaata

SEQ ID NO: 578656 - DNA, 50 bp, Homo sapiens
tgaggatgaagaagatgactaccaggtctgaaggggcgtctcgattacct

SEQ ID NO: 578657 - DNA, 101 bp, Homo sapiens
tgaggagccagacgacaagcacacactatggcgctgaaacggattaataagggtgttttgaatgctgtatcaaatgcctggggggcattccctatgcctct

SEQ ID NO: 578658 - DNA, 75 bp, Homo sapiens
ccgctctgcacgcttgccagcgcggtggtggaggagatgtcaagattgaaagtcagaagttgaacttcaaggaga

SEQ ID NO: 578659 - DNA, 100 bp, Homo sapiens
gctttggatagaattgttgaatatttggttggtgatggtccacaaaacagggcggcgactggcggcgcgatggacctgaccgggctcctgctggacgaag

SEQ ID NO: 578660 - DNA, 95 bp, Homo sapiens
cgcagaagacaggtgatttctgcatttccgactgagtatctcggaaaaggaaagccaagaactgggaagatgaagacttttatgatagtgatgat

SEQ ID NO: 578661 - DNA, 82 bp, Homo sapiens
ccagcagcaggccaatcaagctcctgcagcagcccggcacagacaccccccaggtgtccaccctgaagagtgaagacataaa

SEQ ID NO: 578662 - DNA, 82 bp, Homo sapiens
acgctttggagtcaacactgaaaatgaagatcacctggccaaggcttctattctgctgcttgaagtcagaactgctgatgga

SEQ ID NO: 578663 - DNA, 74 bp, Homo sapiens
cgagcgcctcgacctcggtctgaggttattcagcttctcaaggctggaaaagcgaaggaagtttcctacaatgc

SEQ ID NO: 578664 - DNA, 90 bp, Homo sapiens
cggagtttgacgaagaggtggtttttgaggcatgtactggcattgaaaacattgacgaagctattacattgcttgaacaaaataattggg

SEQ ID NO: 578665 - DNA, 101 bp, Homo sapiens
ctgctctgtgcgcgcctccatctgggccatggatggctacctcctgccccatctccttccatctaaacctggcctggacacccacggtatgcggcacccca

SEQ ID NO: 578666 - DNA, 133 bp, Homo sapiens
cagaggcagcacctgcacctcatggtacagctgctgaggccgcaggatgacatccgcctggcgttggagaccagggccagccctggccacaccccaggctgtgtcaccttcgtcctgaatgaccacagcatgg

SEQ ID NO: 578667 - DNA, 75 bp, Homo sapiens
gctaaacttaaaagcaagctggttctctgggatataaataagagcatctgctgcacccaagcctgagccggttcc

SEQ ID NO: 578668 - DNA, 101 bp, Homo sapiens
caagagccggagggtctcagaggacagacagtgccaggttgggtatctacagccattggttgctgttcaggtcagctttgctcctaacaacactgggaaag

SEQ ID NO: 578669 - DNA, 75 bp, Homo sapiens
cgctacacagcaatgcatcgaggttcacagcagatgaggctcgggacctgattcaacgttacctgacagagcacc

SEQ ID NO: 578670 - DNA, 75 bp, Homo sapiens
ctagcagccgtgtggctagaactacctctgatcatctttggcattgaacctggccacatcccaggtaccgtgaac

SEQ ID NO: 578671 - DNA, 75 bp, Homo sapiens
gaaacagatctcagccccgggctcccagctgcccacctcataggtaatgtgaggctacaggagatgatggcaaca

SEQ ID NO: 578672 - DNA, 50 bp, Homo sapiens
tggggtgagaccctcacttcatccgtgccctgtgggacatcgagaccggc

SEQ ID NO: 578673 - DNA, 75 bp, Homo sapiens
gtcgcatctgctcaacgacgaggacctgacgcagtgaaaatgcctcgtgtaaaagcagctcaagctggaagacag

SEQ ID NO: 578674 - DNA, 90 bp, Homo sapiens
ccagaggccacccagcctcctagacaggctgtgggtgagcgtggaggatgctcagatgcacaccgtcaccatctggctcacagtgcgccc

SEQ ID NO: 578675 - DNA, 83 bp, Homo sapiens
cttgtgaacattcaagtgaagcaaaagcctttcatgattatatgtgaagttcatttccaatccgccctccatggtggcagcgg

SEQ ID NO: 578676 - DNA, 83 bp, Homo sapiens
cgcgacaggaacccctccgagacccagtccaaaaggtcaccgaggaggagcccagctccaaccacacggtcatgatccaggag

SEQ ID NO: 578677 - DNA, 73 bp, Homo sapiens
gcatgaggtgcagctggacatggaaccccagggctgcctggtggctgaggtctctgagcggcccctgatgttc

SEQ ID NO: 578678 - DNA, 100 bp, Homo sapiens
actaccgaggccctcagcttcgcgaagacgcccagctccaaggatgaccggaaagaagggatgaccgcgtttgtggaaaagagaaaggccaacttcaaag

SEQ ID NO: 578679 - DNA, 73 bp, Homo sapiens
agcagcacaatcaacgcaaccacagaaacaagtggtacaggctgctctttggcgtaaattgcaatcgattagg

SEQ ID NO: 578680 - DNA, 50 bp, Homo sapiens
ggaagataatgattatgacagatcagaaggaactgaaaggctttaaaact

SEQ ID NO: 578681 - DNA, 82 bp, Homo sapiens
tttgcatttcgttagctttctggattatatcaatgactgcaagcacctattatggggcttcataaaagtcagagttcatgtt

SEQ ID NO: 578682 - DNA, 96 bp, Homo sapiens
caatttcttcgagacactcatataaagctgcagtattgaagtatgagaacaatgttatgaatatcaggcaattcaactgttctcctcatccatact

SEQ ID NO: 578683 - DNA, 100 bp, Homo sapiens
agttgagcttggggactgcagctgtggggagatttcagtgcattgcctcccctgggtgctcttcatcttggctcttcagtgggtcatctgtgtgtcacag

SEQ ID NO: 578684 - DNA, 100 bp, Homo sapiens
tcataggtggccatgtctcagacagggctgcaccagggaaaccggatcctggttaaaagtttgtcccttgaccctggccaaagcctagagcctcatccag

SEQ ID NO: 578685 - DNA, 75 bp, Homo sapiens
cagcggcatagagacatattgcagggcggcgactggcggcgcgatggacctgaccgggctcctgctggacgaaga

SEQ ID NO: 578686 - DNA, 75 bp, Homo sapiens
ctcagtactgatgcccagtggggcattcgtcttggtaaacttggtggccaaacagcctttgatgtagcagatgaa

SEQ ID NO: 578687 - DNA, 100 bp, Homo sapiens
tgtgaaaggatcggttaaaaactggcagctcacggaggaggattttgggaacacatcaggccgtctctgtttgaacaatatttgtgtggaagtaatcgaa

SEQ ID NO: 578688 - DNA, 100 bp, Homo sapiens
cagctgcttggtcaggctggacgccatgttccctgctggagccagttctgcttctcggcaaggagcgatttgctggtgtagacatccgtgtccgtgtaaa

SEQ ID NO: 578689 - DNA, 98 bp, Homo sapiens
gttgaggcccttcttgtgtatctggagaaaatagagaacgacaccgtaactatccgcactagaaagttcatgaccaaccgactacttcagaggaaaca

SEQ ID NO: 578690 - DNA, 98 bp, Homo sapiens
ctcccgtagggagccgtgggcgctcggtgcccgggccgggcaggttcaagatgttgttcctataactagttatgacactgctggatcattccttctgc

SEQ ID NO: 578691 - DNA, 97 bp, Homo sapiens
gagccgccttggcctcggggtctccctacaccaacgttgcagaggaaagtggtcgcttatggtcagaggagcagcctgctcaccctctccaggtggg

SEQ ID NO: 578692 - DNA, 75 bp, Homo sapiens
tctcgaccccctctcttggggtttaagattactttctatgaagacaaaaattttcaaggccgtcgctatgactgt

SEQ ID NO: 578693 - DNA, 100 bp, Homo sapiens
cgcaggggccaactgtgcccaccagctccccatcgcagaggccatgctgacctacaagcagaagagcgtttgtgaggcatatcctgtcggggtgacgggc

SEQ ID NO: 578694 - DNA, 76 bp, Homo sapiens
cgcttcaccacttacgaaatcagggtcaaggttacttcctcagaatgttggcctcctgtatgttggaggttatgaa

SEQ ID NO: 578695 - DNA, 100 bp, Homo sapiens
ttgctcctggtggctgctgtggtttggaagatcaaacaaagttgttgggcctccagacgtagagaggcttcagcaaccaggagggattgactgagatctt

SEQ ID NO: 578696 - DNA, 98 bp, Homo sapiens
ccctgtcctcatagagctgacagccccagatagcaatgatgatgtgaaaacagaagctgtggctggtggtgattccactgaagcaactgccaaaccaa

SEQ ID NO: 578697 - DNA, 75 bp, Homo sapiens
aaggtgatgcccaagatggaccaggctggagcattggatttgctaaaggagcttaagaatattcctatgaccctg

SEQ ID NO: 578698 - DNA, 97 bp, Homo sapiens
accggatggcaagaatcagctggggcagaagcgcgtggtcaaggtacaggtttgcagattccgccagcagcacagcaagctctacagatgagtggct

SEQ ID NO: 578699 - DNA, 75 bp, Homo sapiens
ttgttaaggattccaagtaactcttatttgagtgatcagcagctggactgtgccttggacctaatgaggcgcctg

SEQ ID NO: 578700 - DNA, 75 bp, Homo sapiens
acttaaaagatgccacctctaaggtgctggacgtcattgctcctccttatacctctgacttcgtgcaacttttcc

SEQ ID NO: 578701 - DNA, 82 bp, Homo sapiens
agcggccgccggctcccccacgagacctgcctagagctggaacgttacctccagagcgagccctgctatgtttcagcctcag

SEQ ID NO: 578702 - DNA, 90 bp, Homo sapiens
cttcactgggtaacccattttcctcaagccacccgaggggactgcctggccttccagatgcgagctgggttgcttccctgagggcccccg

SEQ ID NO: 578703 - DNA, 100 bp, Homo sapiens
gctggcgtccctcttcagttctctggagccccagattcaacccgtgtacgtgcctgtgcctaaactcatgatggagcagtccaagaagtcctccctcatg

SEQ ID NO: 578704 - DNA, 75 bp, Homo sapiens
atgaacgagattaagacccaattcaccacccgggaagaatttcgctaaggagtttgtgatcagtgatcggaagga

SEQ ID NO: 578705 - DNA, 100 bp, Homo sapiens
gtcaccgaggagatcgccacctccatcgaacccatccgcgacttcctggccatcgttttcttcgcctccatagcctggagatttgaaaaagagaattgaa

SEQ ID NO: 578706 - DNA, 126 bp, Homo sapiens
ctaaaagaccgaacaataaagcgaaccgacgaggaagggaaggatgtcccagatcatgcggtcttagaaatgaaagctcaatgaacagaacctcatccaggaagtccccaacatctggcaacgtga

SEQ ID NO: 578707 - DNA, 90 bp, Homo sapiens
cccagaaccgctttgggctggtggtcagccggaaggctcgcatccaagctgcaaatcagaccccaacaccaacaagattcttgaaaaact

SEQ ID NO: 578708 - DNA, 82 bp, Homo sapiens
gggatttggatgtgggatccggttccttggtgtcatccagccttagcaaaccagagatggagttttaacattgaatgcggag

SEQ ID NO: 578709 - DNA, 82 bp, Homo sapiens
ctcggctccaggaaccagacgggttaaacactttaagatgagaaaaattgatctctgtctgagctctgaagggtccgaagtg

SEQ ID NO: 578710 - DNA, 50 bp, Homo sapiens
caatgatgtaattctggagagagtgcaggtgcagttaataaccaaagcag

SEQ ID NO: 578711 - DNA, 100 bp, Homo sapiens
tcaacaagagttcgaagacaactggacaggaatctcacctttcataaaatggtggcatggatgattgcacttcactctgtggtgaactatgacaatgtag

SEQ ID NO: 578712 - DNA, 75 bp, Homo sapiens
gatatatacagagacagtagggatgttgacaatgcgtctctggcacgtcttgaccttgaacgcaaagtggaatct

SEQ ID NO: 578713 - DNA, 82 bp, Homo sapiens
gacatggcccggaggcagcagaagaaaacagcaagtctcgaagtaatgcatttgctgaaaaaaatggacttcagaaatatga

SEQ ID NO: 578714 - DNA, 51 bp, Homo sapiens
cctggaggtggcaagaaggatgacaagtcaaggaaataatgctgcagctga

SEQ ID NO: 578715 - DNA, 83 bp, Homo sapiens
cgagcagcctctcgccatttcccgggttgtgaccgagattcccgacgagagagactgaggggaagagaggaaggaggggcggg

SEQ ID NO: 578716 - DNA, 97 bp, Homo sapiens
tagaactcagttgtgcgttgcggccagtcgccactgctctgagatctgtatctgtggacctgaatgttgatccctcgcttcagattgacatacctga

SEQ ID NO: 578717 - DNA, 100 bp, Homo sapiens
actagttgagaagcagaacccagctgaaggactgtgttatccaagataaattctgtgggattataaacatttcagtagaaggcctgcatgatgtcatgac

SEQ ID NO: 578718 - DNA, 98 bp, Homo sapiens
agaactaccggcacgcctatgacctcatccagaagtttggcctggacaatgctggaaagacaaccatcctgaagaagttcaatggggaggacatcgac

SEQ ID NO: 578719 - DNA, 100 bp, Homo sapiens
gcgagatcctggcgagcctgcaggatggcgcggccgagtccccgtacggccacccggcggggctgtgtctggctgtccctgataaaactgtgagatggtg

SEQ ID NO: 578720 - DNA, 82 bp, Homo sapiens
ttgcgagaagttggaagtgtgaaagcattgatggaatgtgctttagaagttaaaaagaatatactgatgataatgctctgat

SEQ ID NO: 578721 - DNA, 75 bp, Homo sapiens
tgttggattacatagtcaacgaggtctctaattaacagaagatggcaaagcccagccacagcagctatgtccttc

SEQ ID NO: 578722 - DNA, 50 bp, Homo sapiens
gtgatttctgcatttccatctgagagtcttgctctattgcccaggctgga

SEQ ID NO: 578723 - DNA, 90 bp, Homo sapiens
actgacttctctaggcttaatgacaaagggcgagaggtcaatgatcttaaaagaaaatctccttcagatctttggaaagaggatttagcg

SEQ ID NO: 578724 - DNA, 75 bp, Homo sapiens
cttcaggacctggtacctgatgatcgaaaggtttttagaacttcagccataaaaatgggcagaattttccttgat

SEQ ID NO: 578725 - DNA, 100 bp, Homo sapiens
ccgcaggccccggccagcgccgcctggaggagcgtcctcagggtctccccgcgcccagctggcaaaactcaaggctcagaaactgcagggcccccaaaaa

SEQ ID NO: 578726 - DNA, 100 bp, Homo sapiens
tcgaccccttctgcccggcgcttcggcccgggccgctcaggtgcaggccccaggcatggaagagctgatatgggaacagtacactgtgaccctacaaaag

SEQ ID NO: 578727 - DNA, 75 bp, Homo sapiens
aacgctgtgctcacctggaataatgagatcttacctaactgggaaacaatctcatgggcctcctgagtgacccag

SEQ ID NO: 578728 - DNA, 71 bp, Homo sapiens
cctacctgcggcgtcggcagctgctgctccgagcctccctgcccttcgctatcctgacgctggtgaacgcc

SEQ ID NO: 578729 - DNA, 113 bp, Homo sapiens
gaaaaaagagatctagtatagtcaatgaattaaagacaagaaggtttccaatcaggccctgggaggagcggggacactgaggacctctctccaaattggcctctcaactcaca

SEQ ID NO: 578730 - DNA, 97 bp, Homo sapiens
aaacaatccaggtggcagggagtgcatcaaaggtgtgaacgcagcaacaaggagtgaggatcttcataatgctctacaaagaggtggaactcgctct

SEQ ID NO: 578731 - DNA, 98 bp, Homo sapiens
ccagggccccccagcgtgcgagcgcctaggggatgccgagatgagcagcagctgctcagggctgagcagggtcctggtggccgtggctacagccctgg

SEQ ID NO: 578732 - DNA, 80 bp, Homo sapiens
gtccggcccgcagggcggtcgaggcaaatgaagaggattcttccagttctctagtgaaggatcacctttttcagcaagag

SEQ ID NO: 578733 - DNA, 96 bp, Homo sapiens
cgcaagacacaggacttacaattctccaagtaaacaactgaaacttattggagaagtgtttaatattgtgagccaacagtctactgctcgacctgg

SEQ ID NO: 578734 - DNA, 90 bp, Homo sapiens
tgactgcctatgaatttgctaaacttaaaagcaagctggttctctgggatataaataaggttcacaggaagttgcaaaggtggcactgag

SEQ ID NO: 578735 - DNA, 82 bp, Homo sapiens
ctccttttcgtttccggaaacatgggcttctttcgccgaagcatccagaagaacatggtgtacacgtgtcaccgcgacaaaa

SEQ ID NO: 578736 - DNA, 51 bp, Homo sapiens
gcttatttgacaagctgttatctaaggaaataatgcaaaaggtgtcccaag

SEQ ID NO: 578737 - DNA, 90 bp, Homo sapiens
gttaaagaggattgcactgcctccatggaaccttcagcaattgaactcccagattatttgatccccatggctgggggttatggagtgatg

SEQ ID NO: 578738 - DNA, 90 bp, Homo sapiens
tgaagatcgagctggataagagcgatgatgactttgagttcactggcagccacctgacagtaaggaatggctactcgtgtgtgcctgtgg

SEQ ID NO: 578739 - DNA, 82 bp, Homo sapiens
ttcggggtgccagaaggaaagcatagagttgtctgctggttctcagcttgaagaagattctgcagtccttattgatcctttt

SEQ ID NO: 578740 - DNA, 82 bp, Homo sapiens
ttcctcaacgacgcggacatggtcatgagctttgtgaacctggatcatgtatcagttggaggacttggagacagcttctatg

SEQ ID NO: 578741 - DNA, 100 bp, Homo sapiens
tcaatcaagaaaggagaaagagagctcaaaatcggagacagagtattgccagagactgctgctactttgaaacgtacgatagaggccctgatggacagag

SEQ ID NO: 578742 - DNA, 94 bp, Homo sapiens
gggagttcgaagagttggatactcagcgtcgctggcagccgctgtacttgacctgcctagagctggaacgttacctccagagcgagccctgcta

SEQ ID NO: 578743 - DNA, 80 bp, Homo sapiens
cagctcacccactgccagcagaggtggcattggtagggtggtcaacggagccttcatggtgctgaaagggcatcgatcta

SEQ ID NO: 578744 - DNA, 100 bp, Homo sapiens
ggacggacaagcacagtcttcggaagaggattccacagatgttggtgaggaggacagcttccttggtcagacttctattcacacatctgccccacagaca

SEQ ID NO: 578745 - DNA, 50 bp, Homo sapiens
gtttctaggaaaggccggacaccagaatgagcccttcctgagaacccctc

SEQ ID NO: 578746 - DNA, 98 bp, Homo sapiens
tggctgcatcatgggagaagagggctggttgatatgtgaagagccaacctgtcgcaatcgaactcgtcaccttccccttcaattctcccgaactgggc

SEQ ID NO: 578747 - DNA, 90 bp, Homo sapiens
gcacagagcagattctgaaacttcttgacaatttgcttgcgcttataagtgccggtggtggtgtgcacattgagccccggtatagacagt

SEQ ID NO: 578748 - DNA, 90 bp, Homo sapiens
accgctcatcacgaacatcatcgtctgatgaagaagaggatgatgatgatgatgattttgatgatgaggaagctgaagaaaaagcgccag

SEQ ID NO: 578749 - DNA, 83 bp, Homo sapiens
ggctcctgcagacccctggcttcctgctttatcctgtggataaacgcagagtgaacgagtttggggagtcctacgaggagaag

SEQ ID NO: 578750 - DNA, 100 bp, Homo sapiens
agagacccgttcagagtcctacagtggcaggatgaaaactttcggaagagaaagttgcctgtggtaagttcagttgttaaagtaaaaaaattcaatcatg

SEQ ID NO: 578751 - DNA, 100 bp, Homo sapiens
catggtggtcatcgaggtgttcacccccgtggtgcagcgaatcctcaagcataacatgagatgcccgagtggtaaaagacatggcaacaggaaagtctaa

SEQ ID NO: 578752 - DNA, 100 bp, Homo sapiens
gatgagctgtcctttcaggaaggagccattatttatgtcatcaagaagaatgacgatggttggatggcaagcatgtggtgtttggcaaagtgaaagaagg

SEQ ID NO: 578753 - DNA, 82 bp, Homo sapiens
ttcgaccttggacttctcagcctccagaatgatggacttcagcagaaatctttatgatattggggaacaactggacagtgaa

SEQ ID NO: 578754 - DNA, 82 bp, Homo sapiens
cgcgggtctgctctgtgtgccatggacgggttagctttatacgtctacgaatatttactgcacgtaggagcacagaaatctg

SEQ ID NO: 578755 - DNA, 73 bp, Homo sapiens
gcagccgccacctacccagtgaccatgatagcttttaacctggagacttgccggcttatggtttcaatgctgg

SEQ ID NO: 578756 - DNA, 76 bp, Homo sapiens
cactggtcctgcctcaagtgatggacataaccctctcctaggacatacattcccagtcggtacctccttttccacc

SEQ ID NO: 578757 - DNA, 83 bp, Homo sapiens
aggattccggcgggaactcgactcttggcgccaccgcctcatgcactgtgagtccaaaactacttacctggaagaccttccac

SEQ ID NO: 578758 - DNA, 51 bp, Homo sapiens
cggaagagcgctcccaggagaaacaagtgactcgaaaagccctgtttcctg

SEQ ID NO: 578759 - DNA, 83 bp, Homo sapiens
ccgggctggctgcggccgccctgggccgggccccaccggacggtttccgagagagcgcttttgcctacgccatcgcagcagct

SEQ ID NO: 578760 - DNA, 100 bp, Homo sapiens
gtgggaaaagatggcggctgccgcacaatcccgggttgtccgggtcctgtcaatgtcacgatgagagggccttaccaaaaggagatttcttccctcctga

SEQ ID NO: 578761 - DNA, 100 bp, Homo sapiens
ggtacacgagggtcactgccatggagtatctgaacggccaggactgctcgcttctgctgacggccacaggagacgttctcttccagatggctgaagtcca

SEQ ID NO: 578762 - DNA, 75 bp, Homo sapiens
gcctgggactgtcctgggccggcatgcttctggactatttccaggctggagtgcaatggcgtgatctcagctcac

SEQ ID NO: 578763 - DNA, 130 bp, Homo sapiens
ctgtattcaggaaggcacatgaactgaagcttctgtcagaatgccaatacaagcagttggtgcaagaattgtttatccgtgattatggagagatttttaatgtccagttaccggataaagaagaacggac

SEQ ID NO: 578764 - DNA, 88 bp, Homo sapiens
agcgcgccacagcccgcgaagccaacgagtgcgtggctgtcaataccagcaaatatgcagaaagctatcggatccaaacctatgctga

SEQ ID NO: 578765 - DNA, 117 bp, Homo sapiens
agtgagggtgtacaaatacccctttgaattaattatggctgaatcatattgacaggtcatgaaaatgagaccaaaagatctctggaagcgattaatgataaaatttcatggagaaga

SEQ ID NO: 578766 - DNA, 83 bp, Homo sapiens
ccgacctcgacgtcttgcctgtgtcccacttgttcgcggcctatagctgctgatgcaaggaatcccctgggctcccgtccact

SEQ ID NO: 578767 - DNA, 148 bp, Homo sapiens
caaagacaaaggaaagaccagtagaagagaaagaaaccaaaaacagcaagcgcagagccaaacagccaggcaggagccaaaaacctgtatatcatctccgtgaaggggatcaagggacggctgaacagacttcccgctgctggtgtgg

SEQ ID NO: 578768 - DNA, 75 bp, Homo sapiens
caatctaaaaagaattaggaaggtccttcagattcgaagcttcttgagcctgggactgtatcttgatcattgcag

SEQ ID NO: 578769 - DNA, 96 bp, Homo sapiens
ttatactcctcccagtgacgggtctggagtgcgtgggggaccggctgttggcgggaagttaaatgaagttcgaaagagattgaatgagctaagaga

SEQ ID NO: 578770 - DNA, 90 bp, Homo sapiens
tgaagctcacgcacatctcagccacagccagcatggccgtcccactgctggagttcctgtccagcccgcaccgccgccatgatgtgcgag

SEQ ID NO: 578771 - DNA, 90 bp, Homo sapiens
gaagaactggaaaatgagcgatgggcccgccctcctgcagtgaccagtaatggcactttacactcggtttttcgttggaatatacgttgc

SEQ ID NO: 578772 - DNA, 124 bp, Homo sapiens
aaatttgatttccggagtcagtcattttactgtcaagacatttcttcggcattctgcaacaggtacaccaggggttggaaaaaccacactaggcaaagaacttgcgtcaaaatcaggactgaaa

SEQ ID NO: 578773 - DNA, 100 bp, Homo sapiens
cggcaagagcgggctgctcaccagccacacgacagattcactgcaggaagatgcccaggatatggatgcctataccctggccaaggcctactttgacgtt

SEQ ID NO: 578774 - DNA, 98 bp, Homo sapiens
gcctgattgacggaatgtgcaaagtagcaattaactggtctggagggtggcatcatgcaaagaatgaaagcaagttgaatacattggtgcagaagctt

SEQ ID NO: 578775 - DNA, 100 bp, Homo sapiens
tgctccacaaatatttacagtcggaggagtactcggtgaaatcctgtcctgaagactgtaaggtggatcggatcattttctgtgtcttcttagaagttga

SEQ ID NO: 578776 - DNA, 74 bp, Homo sapiens
gtggatatggtggcagtggggatggctataatggatttggtaatgatgggctttttggtggtgctggagttggc

SEQ ID NO: 578777 - DNA, 50 bp, Homo sapiens
gtgcgtgggggaccggctgttggcggtgggtaattccagaattgattggc

SEQ ID NO: 578778 - DNA, 74 bp, Homo sapiens
ctgggtagcctctaggaagcgctagacacatgttccagcaacagatagaaatgctttaagttcactctggggaa

SEQ ID NO: 578779 - DNA, 75 bp, Homo sapiens
tggcagcccctgacctggcccacggataaagataaagtttctctaaccaagaccccaaaactggagcgtggcgat

SEQ ID NO: 578780 - DNA, 50 bp, Homo sapiens
atgtggaggaggaagagctcagcatataggttgctgtagatgaatgttct

SEQ ID NO: 578781 - DNA, 99 bp, Homo sapiens
tatgccaagaggaacagcagtgtaaatgactcagaaaaatggctacaaacttcctagcacatgagaagatctggttcgacaagttcaaatatgacgacg

SEQ ID NO: 578782 - DNA, 75 bp, Homo sapiens
cggccactgggacggcggcgcggagaaggcaggtcttcggggacgaggaagccacagccccatgagaactccaga

SEQ ID NO: 578783 - DNA, 80 bp, Homo sapiens
caccccgagaaccgtcagtttgagccagatgagtgaagatagtccaagtcctaagagacagcgcctctctcattcagtct

SEQ ID NO: 578784 - DNA, 83 bp, Homo sapiens
atgccttctggggtgcaccttgtgaacagcccctggagcgcaggctgtaccttcacagtcctggtgcacacgagagaagccgc

SEQ ID NO: 578785 - DNA, 100 bp, Homo sapiens
cgcctattgtctttctccgcggcgaaggtgaagagttgtcccagctcggcccgcgggggagccccgggagccgcacgctgaactagatgcagagcacgcc

SEQ ID NO: 578786 - DNA, 100 bp, Homo sapiens
caagcttttactgcaacttgtgcctctcattcctgccagaggtggcatctgtgaactcccgtctggtaaacttgtccagattgaatatgctttggctgct

SEQ ID NO: 578787 - DNA, 99 bp, Homo sapiens
tggacagggatgataattgggcctccaagaatcaggagtgatacttcacagatcctggaggaaaacatcccagtccttaaggccaaactgacagaaatg

SEQ ID NO: 578788 - DNA, 96 bp, Homo sapiens
atggaagaatatcctttgaagaattctgtgctaccggccaggcctcatgaacgttccacgggtggaggctatccaggacaccatcctgcgtgccct

SEQ ID NO: 578789 - DNA, 98 bp, Homo sapiens
tgggcagagaagttgcaaaccgagtttccaaggtttctggaaaagaacaagcagccaaaaatgccatatggattgactgtggaatccatgccagagaa

SEQ ID NO: 578790 - DNA, 100 bp, Homo sapiens
tttaattaatctcctgctgacgggacatgctgtttctaatgtatgggatggtgatagagagtgctcaggaatgacttagaccatgctcagcctccaagca

SEQ ID NO: 578791 - DNA, 108 bp, Homo sapiens
cagtgctgcaaccgctacagcagccgcaggaagcagctcaccttccaccgatcatggaagggaagtggttgctgtgtatgttactggtgcttggaactgctattgttg

SEQ ID NO: 578792 - DNA, 100 bp, Homo sapiens
ggaggccgtaggaacgggcctgtcgaagtgcgcctgacagatcgtcagtatttaaacagatcacatcatgcgtgagtacaagctagtggtccttggttca

SEQ ID NO: 578793 - DNA, 98 bp, Homo sapiens
atcctggtcccctgctttaaccatcgaaaatgaggacataagcagctctatgaccaatagcacagctgccagtagacccccggtcaccctgaggctgg

SEQ ID NO: 578794 - DNA, 121 bp, Homo sapiens
gatggaagattcgatggacatggacatgagccccctgaggccccagaactatcttttcgacaatgcagatcttcgtgaagactctgactggtaagaccatcaccctcgaggttgagcccag

SEQ ID NO: 578795 - DNA, 100 bp, Homo sapiens
tcggaacccgtggtcctccgcttcattgatcaccagcagcttgcaaaacttatccaggagtcgccaaccgttgaactgaaagacaagttggagtgtgaat

SEQ ID NO: 578796 - DNA, 87 bp, Homo sapiens
ctgaaggccgccagcccagccccagccccagccctacagaggctgaaaactgttctggccaagcgaactgggcggtctgaagtagag

SEQ ID NO: 578797 - DNA, 74 bp, Homo sapiens
gtgcgcttccccacgtcgcttgggggccacggcgcggacgccatggttgctccgactgtgtgttccaggagtgg

SEQ ID NO: 578798 - DNA, 100 bp, Homo sapiens
agagcagcaactcacccagcacacaaaatggatctcttacggcatttatgtttgaatcatctttaagtctggcggtcacaaagtggggactcaaggcctc

SEQ ID NO: 578799 - DNA, 100 bp, Homo sapiens
tttccagtgactggaataaaaacagagtccgatgaaaggaatgggtctgggaccttaacagggagccatgctgtgccactgcatatgttctactggctga

SEQ ID NO: 578800 - DNA, 82 bp, Homo sapiens
gaaaaaccacagcatcattctttctgcaccaaacccggaaggaaaaacgggtatgcaggagattagaagccagtgggcatga

SEQ ID NO: 578801 - DNA, 73 bp, Homo sapiens
actgacagatgttaacattcctcctagaagatagcagaagactgctgcctgacgattgtgggcagcctggtaa

SEQ ID NO: 578802 - DNA, 98 bp, Homo sapiens
tggcaataaagtttttggtgccctgaagggagctgtggatggaggcttgtctatccctcacagtgctgccgtggtcaacgccattggcctgtacatgc

SEQ ID NO: 578803 - DNA, 90 bp, Homo sapiens
caataaccaggtgcttggcaaaatcgagcgggccattggtatgacaacgaatttggctacagcaacagggtggtggacctcatggcccac

SEQ ID NO: 578804 - DNA, 51 bp, Homo sapiens
gcctccaccagacaccaaaccaggccctcgggaccaaggatcacgtcatga

SEQ ID NO: 578805 - DNA, 100 bp, Homo sapiens
gggggacgagggcaaaggcaaggtggtggacctgctggccacggacgccgacatcatcagccgctgccagggcgtctctggccgagcctctttttgtgga

SEQ ID NO: 578806 - DNA, 90 bp, Homo sapiens
ccgcctggctccccatactagtcgccggaaaaggcattaatagctgctcagctggacaatgccattgagaaggaattactggagagactg

SEQ ID NO: 578807 - DNA, 82 bp, Homo sapiens
tcctggatttcctggttctgtgggctccgtggcaatgaattcttctgtgaaaatccacattcatctcaatggaaggatcctg

SEQ ID NO: 578808 - DNA, 83 bp, Homo sapiens
ggagaggcctggaggacaccaacatgattctttcttgtggagaagttattcatgtgaagatccttggaattttggctcttatt

SEQ ID NO: 578809 - DNA, 88 bp, Homo sapiens
gcgggagcagcaacaccagcactgccaacagcactattcctgatcagagaactccagttgcttcaacacacagtatcagtagtgcagc

SEQ ID NO: 578810 - DNA, 75 bp, Homo sapiens
ggaattgctactgctgcctctgtcactcctggtgaccagcattcaaggcttctcggaggatgctggatgatgaaa

SEQ ID NO: 578811 - DNA, 73 bp, Homo sapiens
tgcatcatccacggggtgctgcagatcctgttccaggccagcactccttgcccgaggacagagatggcgagcg

SEQ ID NO: 578812 - DNA, 76 bp, Homo sapiens
taagatgccaggaccccctgaaagcctagacatgtggtatgtgtgcaacagagagaaattatgcgaatcactccag

SEQ ID NO: 578813 - DNA, 89 bp, Homo sapiens
tctggccttagcacatgcagatgagaagtccttaggaagttattccaacttttgacatggctgtcaatgaaatcttctttgaccgttac

SEQ ID NO: 578814 - DNA, 75 bp, Homo sapiens
ctctggtatggacacagcttctagtgttgctttggatcttgtggaaagtcagaccagaagatacctgaaattcct

SEQ ID NO: 578815 - DNA, 75 bp, Homo sapiens
gcttcccgctcatgaccatcgaggagttcgctgcagggagcgcatgaacctgaaggtgcccatctacttctccac

SEQ ID NO: 578816 - DNA, 93 bp, Homo sapiens
gcgcagctccggccgcctggctccccatactagtcgccggtaaagtcagtgataaatcttttgtttgctgcatatactggagatgtgtctgca

SEQ ID NO: 578817 - DNA, 88 bp, Homo sapiens
tgcagcgccaggtccggtgttggggtgtccgagttgccgccggagaggagtggcctcgcccgcttggagatgttaaacatgtctaaga

SEQ ID NO: 578818 - DNA, 80 bp, Homo sapiens
cgcccacagacctcaaattcaaaggtctatgctccatcagcaagcactgccgactacaatagggactcgccaggctatcc

SEQ ID NO: 578819 - DNA, 100 bp, Homo sapiens
caccctcccaggtggaagttcctgaagatgaggaagattacacagccaagaccgaggataggtgtggccattggcgaccagatcctggacctcagcatca

SEQ ID NO: 578820 - DNA, 101 bp, Homo sapiens
ccgcgcccggccggacccgggcccgagctgggagtgtccactcgccttccaccagcatggcaacgtcttcacagtaccgccagctgctcagtgactacggg

SEQ ID NO: 578821 - DNA, 50 bp, Homo sapiens
cacattcttacgacagggagcccagaagatgattcaacgagaagccgatg

SEQ ID NO: 578822 - DNA, 100 bp, Homo sapiens
ctagactgtagcagccgagaacctcggcatcaccagtggcttcgtgaagcccaagctggtcttgtttctggcgctggagacatcaagcttactaaagaca

SEQ ID NO: 578823 - DNA, 100 bp, Homo sapiens
ggagtctccgcgtcccgctcgctgggagagaggtacctctccttttccctctccctttccctaaggttacaagaggacccacctgtgggtgtcagtggcg

SEQ ID NO: 578824 - DNA, 90 bp, Homo sapiens
gctggctcggatgctgatggggctggacctgctggtgttcgcccacgaccatgttctggacatggcaagacatgtgccactctatcgggc

SEQ ID NO: 578825 - DNA, 75 bp, Homo sapiens
gtgctgcgcggcccccgcgcatggtactccaaagattcaggtttactcacgtcatccagcagagaatggaaagtc

SEQ ID NO: 578826 - DNA, 75 bp, Homo sapiens
gatctctcgagattttgccaagctgtcaataccagcaaatatgcagaaagctatcggatccaaacctatgctgaa

SEQ ID NO: 578827 - DNA, 100 bp, Homo sapiens
ctgccgtccttctccactttcgccagcccgtgccgcgagcgcggcctgcaggagtagagacggggtttcaccatgttagccaggatggtctcaatctcct

SEQ ID NO: 578828 - DNA, 100 bp, Homo sapiens
cttggcgaggcctttcaccaagtccatgcactggaagaagtacgacatctatgagaagcaaaccaaggaggaaaccgactctgtagtgctgatagaaaac

SEQ ID NO: 578829 - DNA, 75 bp, Homo sapiens
gccgctgcagccctagtgactgcggcctgcatcccggagagcacaagcttcattttatccctgccctgattggcc

SEQ ID NO: 578830 - DNA, 100 bp, Homo sapiens
acaagatcatgggcaaaggacagatccagatgaagatctccttcaacgacaaaagcctgcagaccacatttgagtacccttccgagagctccctagagca

SEQ ID NO: 578831 - DNA, 100 bp, Homo sapiens
ataaaacggatcaacttggaaaaatgccagaccagtatggatgaactattaaacaacaagctcaccctcttccgccagctgcagcagatgacgtacagcc

SEQ ID NO: 578832 - DNA, 74 bp, Homo sapiens
tcgccaccaattatgggagggctggccaacttctgctacagacgactcagcaagaagtagtcctgaactactgc

SEQ ID NO: 578833 - DNA, 80 bp, Homo sapiens
gaagtcggtgtctgctgcgttcacggcaggattcggttagagccccccaagatgaacccagtggtggagccactgtcctg

SEQ ID NO: 578834 - DNA, 132 bp, Homo sapiens
cgaccttgagctccaggagttcgtctcttacgtctgcggaagtgcagctgcctcagttcttagcgcagactgacgacaacagtggagacttggacccaggagtcttgctgacagctcaaactatcacatctg

SEQ ID NO: 578835 - DNA, 94 bp, Homo sapiens
aaggagaacaagccaggaaaaccccgaaaacgcaagaagcgtggtgtccgcaatgttgccagtgtctgtctgcagattggctacccaactgttg

SEQ ID NO: 578836 - DNA, 100 bp, Homo sapiens
cagcactcagacacagagaagcatgagggggagaaacgacaggcctgggaattttcataaattttccaaaattttcccagacccaccacaccagctcagc

SEQ ID NO: 578837 - DNA, 80 bp, Homo sapiens
cgatcggcggcgttgaggcgggatccgggcgagccgagtgaagccggcacagtcttcactaccgtagaagaccttggctc

SEQ ID NO: 578838 - DNA, 100 bp, Homo sapiens
ctagaattgatactcagcagctggaccggcaaattaaagcaattatgaaagaagtcattccttttttgaaggtagacgttacatccaagaggaaataatc

SEQ ID NO: 578839 - DNA, 88 bp, Homo sapiens
ccaatcattacattgctacccaagccctggactttgtctcacaagatgaaatgttgacgcccctggggagattggacaagtatgctgc

SEQ ID NO: 578840 - DNA, 100 bp, Homo sapiens
gaagccatccactctcccagagtgctccaacgggactgaaccacatgggctggccagagcacacaccaggcactggataaaagaatcagagtgtctcaac

SEQ ID NO: 578841 - DNA, 90 bp, Homo sapiens
gacctcgataagaagaaacatgaaccccagagccacaggtttgtggtaaatatgccagctctagaacacatgaatcagattttacacatc

SEQ ID NO: 578842 - DNA, 100 bp, Homo sapiens
ggctagaagcagagacaccaggacagaaaagacagtgttctgctttcatggagttcacagaagagtcgaggagtattattttggcgacttcaatttgcca

SEQ ID NO: 578843 - DNA, 82 bp, Homo sapiens
acaaagcagcgcccgtctgcttcgggcctctggaatttagcgctcgcccagctagccgcagcccttcagatatttcaacact

SEQ ID NO: 578844 - DNA, 83 bp, Homo sapiens
gggatgaaggcgggtttgctcccaacatcctggagaataaagaagggagctgctgttgacggaggcaagttggatgtcgggaa

SEQ ID NO: 578845 - DNA, 82 bp, Homo sapiens
atgtgtctcttctaagctgaataaagctgttttggaactgtcaggtacctcaaagcgcgtggtgaccaagatgaagatgcag

SEQ ID NO: 578846 - DNA, 49 bp, Homo sapiens
cttcatctcctcaacatggaaactaagttcctattttgacgagaaaggc

SEQ ID NO: 578847 - DNA, 100 bp, Homo sapiens
ccaacggcaagctgccactgtgggcaaagcggctgggtcccagtcctatgaggatatgagaggaatcctgtatgcagccccccagctccgctccattcgg

SEQ ID NO: 578848 - DNA, 100 bp, Homo sapiens
aaagaagaaaatgaaagttccatatttaagtagtctgcttcagcctttttcagtgcacgatctgattttctggagagatgtgaagaagactgggtttgtc

SEQ ID NO: 578849 - DNA, 50 bp, Homo sapiens
gtgaaatttgaaaactgtacattcgctatgttagatactaaagaaggctt

SEQ ID NO: 578850 - DNA, 100 bp, Homo sapiens
cgcgaatatcgtcatcgttagaagatggaccacacatccccgacctacatgcttgctaacttaacccacttgcattctgaacaacttctgcagggcttga

SEQ ID NO: 578851 - DNA, 100 bp, Homo sapiens
agtcccctggggactcagaggagtacttcgccacttactttaatgagaagatctccattcctgaggaggaggtctgggaggggctgaacgtggtgaagac

SEQ ID NO: 578852 - DNA, 101 bp, Homo sapiens
tctggaacactgtgagccgctcacagtgtctaaggtgcagattcactttataggaacagcttcagcttcagtgatgaaaaactgaattctccaacagactc

SEQ ID NO: 578853 - DNA, 90 bp, Homo sapiens
gtggggcctccgcgccgcggccgttagtcatgtcggatgtttctttctcagcaaaatagaggagaagcttacccctcttccagaagataa

SEQ ID NO: 578854 - DNA, 87 bp, Homo sapiens
acaagaagctgggctgtcagctcttcagaggccccagccgcggccagggctcaggagagcaaagggagaaagctctaggctaaaggc

SEQ ID NO: 578855 - DNA, 96 bp, Homo sapiens
gccgagcggatcctaataaggggaaaatggtttccaatacttatctacaggaatcgccatgaccccagctctgagggaggcaacagcaaagggtat

SEQ ID NO: 578856 - DNA, 50 bp, Homo sapiens
cgcacacaagctggctgacccggacacttggagaccagaaagcttctttg

SEQ ID NO: 578857 - DNA, 75 bp, Homo sapiens
ttctcgacctgctaacagaactggaccttttcgggacgagtgatccatatgtgaagtttaaaatcggaggaaaag

SEQ ID NO: 578858 - DNA, 75 bp, Homo sapiens
tcaaccccttctcttccaaaagggcacagactccatcaagatggagaacgggcagagcacagccgccaagctggg

SEQ ID NO: 578859 - DNA, 100 bp, Homo sapiens
tacttcctctgtatagagcaactgttgaactcagctgcctgtaggtgtgttctactccctcttctgggaatgaagcctccccagcaaagcctatacctgc

SEQ ID NO: 578860 - DNA, 145 bp, Homo sapiens
gtgcaatgctactctgccatggatcccttcagcacactttccagcagcatcacctgcacagaccagagttacactgttagaccttatgatagccaagataacgagtgatgagccactcaccaaggatgacatccctgtgtttttg

SEQ ID NO: 578861 - DNA, 75 bp, Homo sapiens
cgtttgggtcctctgaggccccttgaccaggaagaagaccagctacaaggaaatacttctgaaaaatcactctga

SEQ ID NO: 578862 - DNA, 75 bp, Homo sapiens
agtcaaaggaattctgtcttcacaagcagaagccttatgccagcctggaccatcttggaggcagtgtaggatcat

SEQ ID NO: 578863 - DNA, 75 bp, Homo sapiens
atgaatctcatcgccaccatctttgtctttgcagtggtcatctatttccaggtaatatttgaagctgaagtctca

SEQ ID NO: 578864 - DNA, 100 bp, Homo sapiens
aggaggtgcagaaggtggacagggtaaaagaaagagacttttttctaaagaattgcatctagtgagagtgaagctgaaaatcttgaagcacaaccccagt

SEQ ID NO: 578865 - DNA, 75 bp, Homo sapiens
ccggcctcgcctcctcgcagcagcgccatgactagacgcttgaagcaaagctgccatcccagaagacgacatgct

SEQ ID NO: 578866 - DNA, 98 bp, Homo sapiens
cagtacccaagcacgtggtgaagggaaagcagtacttacaactacgattcaacaaaccagttcgctatgctgccacggtcatctacattgtacagacg

SEQ ID NO: 578867 - DNA, 50 bp, Homo sapiens
gtcccaggagtcctgaccagagagcaggcctttgaactggccacaggtga

SEQ ID NO: 578868 - DNA, 82 bp, Homo sapiens
cgacagcggcgagcagaactacggcgagcgggaggctactcacagtcgaactacaactccccggggtccggccagaactaca

SEQ ID NO: 578869 - DNA, 50 bp, Homo sapiens
tcatgaaggacgtgcccgactggaaggccatcatctatgaggggcaggac

SEQ ID NO: 578870 - DNA, 100 bp, Homo sapiens
tggagagtgttggagaaggggtgactacagtcaaaccagttacctggctacagaaagaagatgccagatgacacttaagacctacttgtgatatttaaat

SEQ ID NO: 578871 - DNA, 101 bp, Homo sapiens
ccgattctctcgggcagcagccgacggacactccctacgagtgggacctggacaaaaaggcttggttccccaaggagtccaggcatgataaagaaaagata

SEQ ID NO: 578872 - DNA, 95 bp, Homo sapiens
ctacctcctccactttgctggttcctgtgcctaacctcgacagcaagtgcagccgcggagccctgtacacaggcttttccatcctggtgactctg

SEQ ID NO: 578873 - DNA, 110 bp, Homo sapiens
ctggaaaccacttggatgactgcagttggtctttcagagatggcagcagaagctgcatatcaaactggctatttagcagacatgacccacaagcagaagaagcattagca

SEQ ID NO: 578874 - DNA, 142 bp, Homo sapiens
cttcaagggctccaggcaccacaccaccctcatcacctgccaccgtgctgggctcacagagccagattccaggtcatccatctccagccccacctgaccagctcaacaccagcagtgcagagagtgagctctgggagccagg

SEQ ID NO: 578875 - DNA, 90 bp, Homo sapiens
gaccgggatcctacacagtttgaagagagacatttgaaatttctacagcaacttggcaagtacaagccagctgccatgttgtgagcacat

SEQ ID NO: 578876 - DNA, 100 bp, Homo sapiens
cagatccgtagggaggacaccgtgacttcccggacgctgggaaatgggactcttgacgtttaggtatgtggccatagaattctctctggaggagtagcag

SEQ ID NO: 578877 - DNA, 100 bp, Homo sapiens
ctggaagcgattaatgataaaatttcatggagaagaaggccttgactacggaggggttgccaggtttctgatcagaaacccttggggagctggtcagtga

SEQ ID NO: 578878 - DNA, 50 bp, Homo sapiens
tacttgaacagagggaggagatcagagattggagcatatgatcaacaaat

SEQ ID NO: 578879 - DNA, 97 bp, Homo sapiens
gacgagagagtcccaagtacgtccacggtcagccttgcgctgggtgtacgaccaagccagggaggagaggcaccacgagaagtgacttcagactcag

SEQ ID NO: 578880 - DNA, 120 bp, Homo sapiens
tcgcgcccgggaggaaggaacgaggcaaggagctaaagcagcgtgcgttcagccctggggccaccagcccctcgggttccaagatgcagctactggagacagagttctcacacaccgtgg

SEQ ID NO: 578881 - DNA, 100 bp, Homo sapiens
gttctccaacgacgccctgaaggatctggtgaagaatcatctgatgtatgctgtgagagaggaggtggagatcctgaaggagcagatccgagagctggtg

SEQ ID NO: 578882 - DNA, 75 bp, Homo sapiens
ctctctctcctctggcaggatgaggcgtgcaggcctggataacgaaggaggcccaacttcattcaataaggagcc

SEQ ID NO: 578883 - DNA, 96 bp, Homo sapiens
tgtacgtgggcagcggcggctggcgcttcctgcgcatcgtctgcaagaccgcgaggcgagacctcttcttgccttgcgccatggactggcagccag

SEQ ID NO: 578884 - DNA, 114 bp, Homo sapiens
cttataacagtacatgtgttggctctttatggattccactgaataggacatacagtggccaagcaagtatattacaagaataaaaggaaggacccctcgaagtggttacctgct

SEQ ID NO: 578885 - DNA, 100 bp, Homo sapiens
gcaacctacggggtgtacttgggaacgaggggtgaagcggcccaggtgagggtctggcgtgctcctgatcagagttactctgatctgaagattttggcgt

SEQ ID NO: 578886 - DNA, 100 bp, Homo sapiens
gcatccattgcaaaccttattaatctcagggaactggatgtcagcaagaatggagattacctggggcaattgatgttatcggtcagactataactatcag

SEQ ID NO: 578887 - DNA, 97 bp, Homo sapiens
cacactcgtgcagtcaattatttcagcaagcactctacacccccaagtgcatatgggtctgtcaaagcctatactaactttgatgctgagcgggatg

SEQ ID NO: 578888 - DNA, 98 bp, Homo sapiens
gcactaatgcttacatgttagtctacatcagggaatcaaaactgagtatgagcagcagcgggacaatcttgcccaacagtcattcaacatggaacaag

SEQ ID NO: 578889 - DNA, 134 bp, Homo sapiens
ccgccgtcctccttcccgcggccgtgagggagaccgcggctcggccgtagcggagctgcgagggagtgcctgcagggcaccatccgcaacagccaggaggcggaggtctcctgccccttcattgacaacaccta

SEQ ID NO: 578890 - DNA, 90 bp, Homo sapiens
caggaatctggaattttattaaacatggtgttacgggtatgggatccaagaacatgtgcaaaactaatgaagcttaaagggcacacggat

SEQ ID NO: 578891 - DNA, 85 bp, Homo sapiens
tccttccagacaaaagaccgtttgtgttttgtgatggaatatgttaatgggggcgagaggtcctgctgtactagccaccaaagca

SEQ ID NO: 578892 - DNA, 100 bp, Homo sapiens
ccaggtcgaggttctgcagaaggttgtgactttagtatacagaccgtataatagacgctggccccaaaggaaactactctcgatttatgaatcacagctg

SEQ ID NO: 578893 - DNA, 83 bp, Homo sapiens
ccggtggcagtttaacaccagagcagatgtccctggtagatttgggaaagaagcttttagaagcggcacgagcaggtcaagat

SEQ ID NO: 578894 - DNA, 90 bp, Homo sapiens
cgctgagaggaactgcttttgagtgagatggtcccagaggcctggaggagcggactgagcagcccgacggccatggaggctgaagagacg

SEQ ID NO: 578895 - DNA, 98 bp, Homo sapiens
ggccgagccatggggaatatgaggaagacctactggagcagtcgcagtgagtttaaaaatgtttgaagaacctgaagatcccagtaacaggtcatttt

SEQ ID NO: 578896 - DNA, 100 bp, Homo sapiens
ttgcaactgaagcaaactcagacagatggttcccacagaactagtagaaaaggaattttggcggctggtaagcagcattgaagaagatgttattgtggaa

SEQ ID NO: 578897 - DNA, 83 bp, Homo sapiens
gatgccgcaaagaatcaagttgcaatgaaccccaccaacacagtttttggaacgaatgcaggaatttgggaactgagctgtgc

SEQ ID NO: 578898 - DNA, 75 bp, Homo sapiens
agtgaggccaacgccgtgttcgacatcctggccgtgctgcaggtgagaagccctaccactgcaactgggacggct

SEQ ID NO: 578899 - DNA, 80 bp, Homo sapiens
tttcctaactcagaagtggtgcatgggcaagcatgaggtttctggtcctcataccgtgtggttgagtgaaatcaaaactt

SEQ ID NO: 578900 - DNA, 51 bp, Homo sapiens
aaattctcctaaaagatgaccgtctggttccatgccattgcagtgtcaact

SEQ ID NO: 578901 - DNA, 76 bp, Homo sapiens
aggtgcctggtggatttttaagtgacctgaacctgggccttcatcctagaataatcactgaaggatttgaagctgc

SEQ ID NO: 578902 - DNA, 75 bp, Homo sapiens
aatgtgttactccattgctgaggagtgctgtcaccactgactaaagaagagaaaactgcggcagagcaattcaaa

SEQ ID NO: 578903 - DNA, 99 bp, Homo sapiens
cgcgcgaaggagcggaagaatggcagtgctcaaactcaccgaccagatggagttttaacattgaatgcggagaacactaattatgcctatcaagttcca

SEQ ID NO: 578904 - DNA, 50 bp, Homo sapiens
tcagatcgttctgattcagagcgagaagttctgagggtacccctcactca

SEQ ID NO: 578905 - DNA, 50 bp, Homo sapiens
cgcgagcaaggccgccagatgtgcagatgccatggacaatattaccaggc

SEQ ID NO: 578906 - DNA, 101 bp, Homo sapiens
aatgaatgccaaatgggacacggtccactgcaacaacatgtttgctaaaggtgtgaagatctttaaggaggtacagtgctacttccgctctgaagccagtg

SEQ ID NO: 578907 - DNA, 88 bp, Homo sapiens
cagcttcaagcttaggaccacccaccatgcctatccagttgttgaatgttgggtcacgaagatctcaacctggccaaagaagagaacc

SEQ ID NO: 578908 - DNA, 75 bp, Homo sapiens
atccattcatcatggtgtggtggaggtttgaagatgccgcatttggattggatgaattccaaattctgcttgctt

SEQ ID NO: 578909 - DNA, 74 bp, Homo sapiens
gtgcgccccacagtagacgtgcagacgtccctgagaggtattcccagacaggcaactatgaactagctgtggcc

SEQ ID NO: 578910 - DNA, 100 bp, Homo sapiens
tgaagatggctcaaaatatggattaaaaagtgaacttttctctggacttccccagaagaagattgtggttgaattcagggaacttaggctgcggaactat

SEQ ID NO: 578911 - DNA, 85 bp, Homo sapiens
tcaaggtcatagaaagtgaagattatggccaacagttagaaatcggagtatattaccaaattggtgatgttgtttctgtgattga

SEQ ID NO: 578912 - DNA, 100 bp, Homo sapiens
catccgggaagtgcttggggatggagtgcctccaaaggttgctgagggtatcggtacagcaatcggagagctgcctccatatttcatggccagagcagct

SEQ ID NO: 578913 - DNA, 50 bp, Homo sapiens
caggaagctgcggctgagtcggttcctgggggaagccaaggtcccactcc

SEQ ID NO: 578914 - DNA, 98 bp, Homo sapiens
gggacaccggggtcctgctgtgcgcgctgctcagctgtctgcttctcacaggtgaaatgacaatggatgctctgttggctcgattgaaacttctgaat

SEQ ID NO: 578915 - DNA, 50 bp, Homo sapiens
tcttttcaagatattctgcctagtggaggccatagtggagtttgactacc

SEQ ID NO: 578916 - DNA, 80 bp, Homo sapiens
agccggggaatgggcccgcacttgcccagatgagagtccctacactaaatccgccagccagacaaagccgcctgatggag

SEQ ID NO: 578917 - DNA, 83 bp, Homo sapiens
ctcgctcggctgcgggaaatcgggctgaagcgactgagtccgcgatggagccgaggtgctcggtggagtcatggcagtgccct

SEQ ID NO: 578918 - DNA, 83 bp, Homo sapiens
atctgatcctccacttcagagaacaggggtgacttaagagattaaaattaatttggttgctgttggttctgaacaaataatga

SEQ ID NO: 578919 - DNA, 90 bp, Homo sapiens
ccatctgtgagtgactctttgacatggagagaatttcactatattcaggagtccttcaataatgttaaacagtggctgcaggaaatagat

SEQ ID NO: 578920 - DNA, 100 bp, Homo sapiens
ccgggcgattcctgtctaagaaaaggaggatttcatgattccacctttccactgatagactcaagttcccagaaccagattagaaaacgcatcgtacttg

SEQ ID NO: 578921 - DNA, 98 bp, Homo sapiens
cggccgggcttggcttcggctccttgaggagttggcggcggcgcgacccggggaaccggcattggtgtccctggctgggcagtgtatgcagaacgccc

SEQ ID NO: 578922 - DNA, 75 bp, Homo sapiens
gccggcaaccgagggacccgcgtccaggaggagacatcacagctttcccagatcgggaggaaaaatatggaatgt

SEQ ID NO: 578923 - DNA, 75 bp, Homo sapiens
ccgtggggaaactaaaaacgcatctatctaacgtttaccctagcaaaccagtggtgtttcataagatgtcaccca

SEQ ID NO: 578924 - DNA, 74 bp, Homo sapiens
ggagatgtcccgctcctgtagccccatcatgggtgtctgatttgacttaattcagtgcacaaatgagatgaatg

SEQ ID NO: 578925 - DNA, 100 bp, Homo sapiens
cgacagcgacggctacgccgaagcactcgttccgggggtgaagcctcctgcgccggccttgcctcggaccccaactgtaaacttgaagacaagactgaag

SEQ ID NO: 578926 - DNA, 100 bp, Homo sapiens
agtgttaagaattgcctttgggactctgaaggctgaagtgctttctcctgctcaagacagccacacgaacacggatctccccccagtgtcagagcagatc

SEQ ID NO: 578927 - DNA, 100 bp, Homo sapiens
cactccccagggcagaaatagcgaccatggcgagggcttatttcaaaacctttgtccctcagttccaggaggcagcatttgccaatggaaagctctagga

SEQ ID NO: 578928 - DNA, 51 bp, Homo sapiens
ctctgcacctcgcgccccagcagggctgtgtgcaggaaacatgaacttatg

SEQ ID NO: 578929 - DNA, 100 bp, Homo sapiens
ccacatcgagaccgccaacctggatggagagaccaacctgaagcggcggcaggtggtccgcggcttctcggagcttgattataccttaaccatgtatttt

SEQ ID NO: 578930 - DNA, 83 bp, Homo sapiens
cccggagcgcccccgaggcgagcgcgagcgagacaatgcagatcttcgtgaagactctgactggtaagaccatcaccctcgag

SEQ ID NO: 578931 - DNA, 104 bp, Homo sapiens
atagactgctttggggagtatgtggaaccgcaggactgcagggtctctccaggtggcgacagacaaagttgcagaaaagctgagctctactctctcatgggtga

SEQ ID NO: 578932 - DNA, 96 bp, Homo sapiens
ctaaaacacctacagaatctttttgtaccaagattctgccgttcctgtattgctaccagtctaaagaacaacaagtggacctgtccttattgccgg

SEQ ID NO: 578933 - DNA, 51 bp, Homo sapiens
cggaaaccggtagcgcttgcagcatggcatgttatgttacccagagaactt

SEQ ID NO: 578934 - DNA, 98 bp, Homo sapiens
accaaataagctatatactttggttacctatgtacctgttaccactttcaaaaatgttgtgaacacaaagatgtttgaggagctcaagagccgtctgg

SEQ ID NO: 578935 - DNA, 100 bp, Homo sapiens
gaagaaattgagggttcttgccatgacgtagctgggtgcgaagaatcaaattggaaattatggaatttgtgaatttcctgaagaatcccaagcagtatca

SEQ ID NO: 578936 - DNA, 87 bp, Homo sapiens
aaagtgttgacactggaagaacgttgcagcaaattagaaggcggctgagccagaggccaactgcagaggaactggaacagaggaaca

SEQ ID NO: 578937 - DNA, 83 bp, Homo sapiens
cgaattcccagagttcgaggtggtgggactcaccgctctggccagggtgcttttggaaacattactggcttagcaatggatat

SEQ ID NO: 578938 - DNA, 75 bp, Homo sapiens
gtgtgcccacacagagagaaatcctcctggccaacttcttggcccagacagaggccctgatgaggggaaaatcga

SEQ ID NO: 578939 - DNA, 74 bp, Homo sapiens
gggatatttactactgggccacagccacaatggtgcgcatgaatgtcctggcagatgctctcaagagtatcaac

SEQ ID NO: 578940 - DNA, 100 bp, Homo sapiens
ggaacagaggaagctgagtgaccaagccaacactctggtggacctttccaagtattctaccttgtaaatactgttatttgtatatactgtaaatgatgac

SEQ ID NO: 578941 - DNA, 76 bp, Homo sapiens
ttcatacagagcttgtttttcttttcactcctcctacagtgagggtgaatcgaaacgcatcaccctggtcctccag

SEQ ID NO: 578942 - DNA, 51 bp, Homo sapiens
ctgcctgcttatccagatccccgaggaatgaaccctaaggactctgcaata

SEQ ID NO: 578943 - DNA, 98 bp, Homo sapiens
cccagttacgtgaaaaaccatggtatcctcagtggacgggacctgcagttccttcttcgagaaaccaagctgatgaacttattagtcctaaagacatt

SEQ ID NO: 578944 - DNA, 90 bp, Homo sapiens
gtggacctgaggcccccatggagaagggacgggcaggatggctctctttacctatgaaggcaacagcaatgacatccgcgtggctggcac

SEQ ID NO: 578945 - DNA, 74 bp, Homo sapiens
gaccgtgaccgagagcgtgaccgagagcgcgaatatcgtcatcgttagaagaactcttccctcctgggtcaccc

SEQ ID NO: 578946 - DNA, 83 bp, Homo sapiens
ggaaaatatcccaaggactaatctgatcgggtcttccttcataatgacagaagccacattcgatactctgcgactctggttaa

SEQ ID NO: 578947 - DNA, 109 bp, Homo sapiens
gccttcgcgcttttcttgatcactgtggctggggacccgcttcgcgttatcatcctggtcgcagggcaggcagctatctctctagcagatgactgaagccttattgtct

SEQ ID NO: 578948 - DNA, 75 bp, Homo sapiens
agcccatcgtgtgaactatagagtttgtggacagatttatattggtcaccgacgatgagggcgcacctgctgtcc

SEQ ID NO: 578949 - DNA, 83 bp, Homo sapiens
cccacccagcactgatgatattataaagctgcctctaagaatcaaacttcactcttgggagaaccaccaaaagaaattcggct

SEQ ID NO: 578950 - DNA, 75 bp, Homo sapiens
gtggtggccttgaccttccggaaccaggtgaacatcatccccatcattgccaaagcagatgccatttcgaagagt

SEQ ID NO: 578951 - DNA, 98 bp, Homo sapiens
ttggatcattcattacagactattttcagaaagctgatgtcctgaccactggagctggtaacccagtaggagacaaacttaatgttattacagtaggg

SEQ ID NO: 578952 - DNA, 80 bp, Homo sapiens
ggatgggacgctgcaggccctggtgatgtgtccaatctagatcccaacttctcatttgaaggcaccaaactggatgtggg

SEQ ID NO: 578953 - DNA, 88 bp, Homo sapiens
caccaacttcctcttcttcgggcccctgggattcagcttcttcttcaacatgctcttcgtgcactgggggccacagtgctgatctcag

SEQ ID NO: 578954 - DNA, 88 bp, Homo sapiens
gggagattactaccagggccggaggattaccatcaccggaaactggcacagcctccaggttggcgggctcatctgcgctggggttctg

SEQ ID NO: 578955 - DNA, 73 bp, Homo sapiens
tgatgaatacaaagacaacctgcaccagggagagcttatggatggagaccaaacatccagatctggagtgccg

SEQ ID NO: 578956 - DNA, 50 bp, Homo sapiens
ggcgagagggagccgcagctgatgtcaggcatcgttggcttcacagtatg

SEQ ID NO: 578957 - DNA, 83 bp, Homo sapiens
ccctggagcctcagttggaagcagccgatccagcctgcggagcctgtggggcagctccaaaaggaattcttcatttgtctcct

SEQ ID NO: 578958 - DNA, 112 bp, Homo sapiens
tttgggttcgtgagatttcatgaagatggcgccaggacgaaggccctactgggcaagggatcgtgggactttaccagatcggtttgtaataacacctcgaagacgctatccg

SEQ ID NO: 578959 - DNA, 82 bp, Homo sapiens
cctggtttgatactgacctgtaaatcatcctttagcttagcagtgtctgcaaaaacgaatcttttcctacaacctgttaact

SEQ ID NO: 578960 - DNA, 105 bp, Homo sapiens
ttttggcattgacatttaattttagggtcctttatatagaagggagagtagggtaagatgatcatgcaggataaactggagaaggagcggaatgatgctaagaac

SEQ ID NO: 578961 - DNA, 100 bp, Homo sapiens
cggagacggcggaagcggagagcaacagcgcgccgtggcagaatgagaaatttagaaaagaacatgtttacaaaagaagctttagctttggcttggcgat

SEQ ID NO: 578962 - DNA, 74 bp, Homo sapiens
aaatagtggcaggtgacagtctgcatgtgcagttttcaggatatgggccctcacattttccaaacctgtccatc

SEQ ID NO: 578963 - DNA, 100 bp, Homo sapiens
tgggaggtcatcgaaggctaccgggcccagcacagccagcaccgcacgccctgcaagggaggtgtcctggggaagtgtcgctacgtttactatgggaaaa

SEQ ID NO: 578964 - DNA, 90 bp, Homo sapiens
aaacggagctgatgatggagcaggtaaaggagcattaccaagacctcaggacccagctggagaccaaggcacagaaaactgaatctgtag

SEQ ID NO: 578965 - DNA, 96 bp, Homo sapiens
ggcaaccgctgctggcagttttgccaggtgtttgttaccttggctcagccgcccagtgggctcaggcccagagcccagagcaaccagcacaatagc

SEQ ID NO: 578966 - DNA, 90 bp, Homo sapiens
acttaggcaggaggatcactcgagcccagaagatcaagactagtgtgagcaacaaacaaatacttccctggacaagaaagccagatgaaa

SEQ ID NO: 578967 - DNA, 75 bp, Homo sapiens
cccctgcaggaactctacaacccaatccaggtggttattaacttggtgatgcttttggctgaaatgaaaatacag

SEQ ID NO: 578968 - DNA, 82 bp, Homo sapiens
gacaggccacgctgtccgtccgcagtaccgacgcctgcagcccgtggaccgggagcccgtggaccgggagccggtggtgtgc

SEQ ID NO: 578969 - DNA, 88 bp, Homo sapiens
aggagcagttgtctgatgaagagaagcttttcggatgatcccttatcccttggaaaaggggcacctattttatccttacccaatctgt

SEQ ID NO: 578970 - DNA, 100 bp, Homo sapiens
agctatggtgaaacaccactgaagcattgccaaggtgcacagatgtattcataaaggaagacattagatccagccattgtggccaccaggctctgtggac

SEQ ID NO: 578971 - DNA, 50 bp, Homo sapiens
ctcgctcgccttcagaagacagcttaagagttggacagtggaggaccttc

SEQ ID NO: 578972 - DNA, 75 bp, Homo sapiens
cccggatggtacggcgccaacccagacccgcgcttccccgccactgggctttttccctccttcccaatcgagtct

SEQ ID NO: 578973 - DNA, 75 bp, Homo sapiens
tgacgaggcacagcgtttcttgcaagaatgggagggcagcttttggcaaggagtctgaagttcttattgggaacc

SEQ ID NO: 578974 - DNA, 75 bp, Homo sapiens
ctgtgaactgtgaacagaagcaaggttatctacttttggaaatgcaggaagttcccaccttgactatcccaaaga

SEQ ID NO: 578975 - DNA, 80 bp, Homo sapiens
aaagatgtgaagaccaagaaggatgattctcactcagcaggacttgtttacactgggcatgtaaacgaaaccatggtcag

SEQ ID NO: 578976 - DNA, 83 bp, Homo sapiens
tcgtgaacagcatcgtaggggtcagtgtcctcaccatgcccttctgcttcaaacaggaagccatcttcgacaagagcacaggg

SEQ ID NO: 578977 - DNA, 100 bp, Homo sapiens
tcagtggagagagtggtgctggaaaggagtgtccatcaggacagcttcacctccttgaggattaaagcctaacagtactgagctatttgtctgtcaaaat

SEQ ID NO: 578978 - DNA, 96 bp, Homo sapiens
ttccctcattgatacctttcctgagtgtagtacggaagaaaaatgtgatgagccacttgtctctggactcccccatgtggctttcagcagctcctc

SEQ ID NO: 578979 - DNA, 50 bp, Homo sapiens
gtcgccggccgcccgcacgtccgtccggactttttttatgaagacatgga

SEQ ID NO: 578980 - DNA, 98 bp, Homo sapiens
tgacatggaggatgatttcatgtgcgatgatgaggaggactacgacctgggacttgccatgaggtgttgaagccttgtttcactgagttggagagact

SEQ ID NO: 578981 - DNA, 87 bp, Homo sapiens
gtgacttgcagtcatcatccattaccacaaaattagatgtcctgtgaagtcaacgagtgccgaaaaattgagagtcttgaaaacttg

SEQ ID NO: 578982 - DNA, 75 bp, Homo sapiens
cccagtgacgggtctggagtgcgtgggggaccggctgttggcggatgccatggacaatattaccaggcagaacca

SEQ ID NO: 578983 - DNA, 83 bp, Homo sapiens
ctcggggggcggctctgcgctggccgggggcgcgggcggcggcgccggcaggaaggtcaaaatgcagatcttcgtgaaaaccc

SEQ ID NO: 578984 - DNA, 98 bp, Homo sapiens
aaaagagtctccgcggtggaggtctgcgttgctcttgcttttcctcgctggggtgtacgcctgcctagggtagttaaaagacgagtgaatgctctcaa

SEQ ID NO: 578985 - DNA, 82 bp, Homo sapiens
ccgcggcggccggcgatagcccggcgctcatgacaggacccagatgatgtggtaccagttggccaaagaagagcctggtgtt

SEQ ID NO: 578986 - DNA, 50 bp, Homo sapiens
tgcatcaaaggtgtgaacacaggccagaagcggactcctagaagagggga

SEQ ID NO: 578987 - DNA, 83 bp, Homo sapiens
tttgaggacctcctggtgcgcatcctgctgctggctgcccttgtctccttttgtgaaatggcctttccccgggtcaagccagc

SEQ ID NO: 578988 - DNA, 97 bp, Homo sapiens
tcgtcgcggcggcggtggagatcgcaggtcgctcaggaactctccggagtcctttctgtattgttgtgattttgcttctggagctgtggagctcgta

SEQ ID NO: 578989 - DNA, 75 bp, Homo sapiens
cactgaagaagggacggggatttctcctcctaatctgggcctcttgtcatgggtccacacccagcaccactgagc

SEQ ID NO: 578990 - DNA, 100 bp, Homo sapiens
gccatggtggtggccgtaattccgcggcccgagccgatgctcagaggatcgacgagaacgtgctaggagcccagctggacgttgaggccgcccattcaga

SEQ ID NO: 578991 - DNA, 98 bp, Homo sapiens
acattttaaaaaaagttgcagctactttgcaagtgccagtaaatgatttaaatgcagatgctggcccgcgagagacattgatgcattttgctgtgcgg

SEQ ID NO: 578992 - DNA, 75 bp, Homo sapiens
gcaccatcgggctgctctatgtgtttggacagcatttgacattgtgcagcaaagaaatggttatggagaagccca

SEQ ID NO: 578993 - DNA, 98 bp, Homo sapiens
cgaccccttctgcccggcgcttcggcccgggccgctcaggtgcaggctcatgcacaattagttcgagaagttgatgtggagaaggtgtctgcttttga

SEQ ID NO: 578994 - DNA, 75 bp, Homo sapiens
aataccagctcgacaaagatggggttgtcctctttaagaagctcatgatggagcagtccaagaagtcctccctca

SEQ ID NO: 578995 - DNA, 82 bp, Homo sapiens
ctccgtggccttagctgtgctcgcgctactctctctttctggcctggaggctatccagcatttggatcatacagcagatgtc

SEQ ID NO: 578996 - DNA, 100 bp, Homo sapiens
aaagcaaagcgcagaaatgttggatttgaagatccaaggagctggttctgctggttggaccaaacctcgtgagccagccacccctgacccaaatgaggag

SEQ ID NO: 578997 - DNA, 75 bp, Homo sapiens
agacggtggcccggaaccggagtggggtcacaaatagggcaaaagcagatggctacaccgagaactcacgccagc

SEQ ID NO: 578998 - DNA, 100 bp, Homo sapiens
gagaggaaaataaacagattgccctgggaacctccaaactcaattatctggaccctaggatcacagtggcttggaatcgtgcgggagctgaaaagtcgag

SEQ ID NO: 578999 - DNA, 101 bp, Homo sapiens
cccgcttcctggaatggcaagcgcagcaacaacagagagcacgtggaccaagaatcgccttcagccctgtctggtgcatccttggcagaaagtgaggagga

SEQ ID NO: 579000 - DNA, 100 bp, Homo sapiens
tgtgattataaagccttctgaactgagtgaaaatacagccaagatcttggcaaagcttctccctcagtatttagaccagacaatgcagatcttcgtgaag

SEQ ID NO: 579001 - DNA, 100 bp, Homo sapiens
gagcattatgggcagacagcggcatacagaatgcctatgaccggcgtcgagaatttcaactgattgactatccaccatttgaaaaaaacttttacaatga

SEQ ID NO: 579002 - DNA, 75 bp, Homo sapiens
ggattccaagtaactcttatttgcacttgctctgaaatttggggactgagtacaccaaatacgatagatcagtgg

SEQ ID NO: 579003 - DNA, 82 bp, Homo sapiens
agaagacatccttcacccctgtaggtccagaacacatattacataatggagccgggagacagactagggctggcttgatccg

SEQ ID NO: 579004 - DNA, 89 bp, Homo sapiens
cttaggggccacgtgagccacggccacggccgcatagctgcaagctttcttcctggtggcagatgacatcatggattcatcccttaccc

SEQ ID NO: 579005 - DNA, 75 bp, Homo sapiens
gaaacctgggggctccctggacaactccgagcaggtggatggagagctagaagctctgatggaaaatggtgaggg

SEQ ID NO: 579006 - DNA, 100 bp, Homo sapiens
gatggtgatggagattttgatgtggatgatgccaaagttttattaggtgccagcgagatttcagattcctgtaaacctctaaagaaaaggagtcgcgcct

SEQ ID NO: 579007 - DNA, 101 bp, Homo sapiens
gctaactttcctgagttctcctttgacttcactagggaacagcttctgacaggtccttcaggaagtactccagaagaaggcattgttatcatagaaggtga

SEQ ID NO: 579008 - DNA, 100 bp, Homo sapiens
aggagttcaaaacccacacatagataattgacgaccttgccaacctagtggagaacacagatgaaaaacttcgcaatgaaaccaggcgggtaaacatggt

SEQ ID NO: 579009 - DNA, 87 bp, Homo sapiens
aattcgaaagtggattttgtgcaatttgacagatgtgggaagaatatcctgatgtttatggggtcaggcggtcaaaccgaagcagac

SEQ ID NO: 579010 - DNA, 87 bp, Homo sapiens
tgaaggcatcttaatgatgaaaacgactttggttggcatcatcaaggaagaaatgcagagtaacgtggaagtggtccacacctaccg

SEQ ID NO: 579011 - DNA, 100 bp, Homo sapiens
ggaggacctgcaggaggacgcagacggatgtggatgatgctgaagaacctgacaaaacaggggagaataaagcacccagtaagttccagtccgtgggagt

SEQ ID NO: 579012 - DNA, 107 bp, Homo sapiens
tcttcggtggactccttcggcagtccacccaccgccgccgcctcccaggttgaaatcacaaagattagacacctttttagataggtgttcttcagcaccactgacaa

SEQ ID NO: 579013 - DNA, 75 bp, Homo sapiens
gttaaaaaaaagcatcttaaagcaggctgcagatcttacacaggtggctgagaacaacctgtgcagccagtatga

SEQ ID NO: 579014 - DNA, 129 bp, Homo sapiens
cgccgtcggcagcaagaacagagagagaggtggacagatctgagagatactgagaattatatccagatcgagagacagaagattctgaaagggttcaatgaaatgagagtcatcttggacaatgaggag

SEQ ID NO: 579015 - DNA, 100 bp, Homo sapiens
ggaggaagcgcagtgcgttcggctccgcgcccgccgcgccgggagcagcaccgcggggccagagcctgccttctggtacaagatgcctgtggaatgttcg

SEQ ID NO: 579016 - DNA, 100 bp, Homo sapiens
ctggaggcaaggaaagagccctggaacgtgaacacagagaagacagccagacactcaggcaggcaatccatggaccttgtggaacttgtgtctctttttc

SEQ ID NO: 579017 - DNA, 74 bp, Homo sapiens
actgcattgagtttttaccatatggctggagcatctcttgataaagctaggtcagtggaaagtccaatcatgtg

SEQ ID NO: 579018 - DNA, 101 bp, Homo sapiens
ctttgccgatccgccgcccgtccacacccgccgccagggtctcccttgatctgagaatggctacctctcgatatgagccagtggctgaaattggtgtcggt

SEQ ID NO: 579019 - DNA, 100 bp, Homo sapiens
tttggaactagcagatgctggcgacctatccagaatgatcaaggatcttcaagatgaagttcaaagggagaatactaatctgcaaaaactacaggcccag

SEQ ID NO: 579020 - DNA, 99 bp, Homo sapiens
ctgttcctggaggaatccgagaagagcagagcggagggagccccagacacgtttgatgaaggccggaacaactttgaaggggaggtcaccaaggagaac

SEQ ID NO: 579021 - DNA, 75 bp, Homo sapiens
ctggccctggccctgatcatcctgctgggcttcgtccagatcgggaaggatgtgaagttcatttccaatccgccc

SEQ ID NO: 579022 - DNA, 50 bp, Homo sapiens
aatccatcaagctcatcaaaaggagaagtacagcatcggggagcccacag

SEQ ID NO: 579023 - DNA, 98 bp, Homo sapiens
caaaagaaaagaatctcaaagtgaaaggaccagttcgaatgcctaccaaggcccgatgagagaaagggaaagttaaggatgctggagcagaacaatgg

SEQ ID NO: 579024 - DNA, 97 bp, Homo sapiens
tgagaaaggtgcccccgaagtgaaagagatggcctggtggaaagcctggctcaacgggacccaggtggagtctgtacagctcaaagtcaacatagcc

SEQ ID NO: 579025 - DNA, 100 bp, Homo sapiens
gatcaagcacaaaggcatcaggaaagtgtacgcctgctcggctgctccctgaggccaagaagcctcggctcctgcacggcaccctgatcatgaaggacag

SEQ ID NO: 579026 - DNA, 100 bp, Homo sapiens
aagagtgtgcagcggattaaagctaaagacatagttcctggtgatattgtagaaattgctggcttcaacggaccacaccaaaatgccatctcaaatggaa

SEQ ID NO: 579027 - DNA, 75 bp, Homo sapiens
gatggctagtgcttcatccagccaaagagcatttaaatcaaacggtattgagatggattgggttatgaaacataa

SEQ ID NO: 579028 - DNA, 75 bp, Homo sapiens
tgtggtccttgcgccgctgacttctccactggttcctgggcaccgaaagatctcacattcttgaaggtggcattg

SEQ ID NO: 579029 - DNA, 99 bp, Homo sapiens
ccgcgagcgctgggcgggtccgcggcgcggtcggtcggcgcctgttctcgggctgtttggcggggtatatttacttctggcacatgggaagagaaatca

SEQ ID NO: 579030 - DNA, 83 bp, Homo sapiens
cactgatgagatggttgaattacgcattctgcttcagagcaagcagtacttctggaatagaaattctaaacattagcctgccg

SEQ ID NO: 579031 - DNA, 100 bp, Homo sapiens
ctcagggtgccggcaccatgaagatctggacttcggagcacgtctttgagatggatagaatgacagaagatgctcttcgcttgaatctgttgaagcggag

SEQ ID NO: 579032 - DNA, 83 bp, Homo sapiens
gcgacagccctagcagcgaggccaaaacaggtgctttgcaagatatcaccttgtcacagcagaccccctccacttggaaggac

SEQ ID NO: 579033 - DNA, 75 bp, Homo sapiens
cgagggcaaagtgctgaggaaactctagagcaacatcggaatgcatggtgggctgacgcgccactatgtagcggg

SEQ ID NO: 579034 - DNA, 100 bp, Homo sapiens
cagagagcctaggcttagtcctagccctgcactgaagggcgatcaggaatctccagatgcttgtctgcctcctacagtacctgaagccccagccccaccc

SEQ ID NO: 579035 - DNA, 80 bp, Homo sapiens
catcaagcaggtccggacccactggctgctggagcttgtcaccaccaggtcttgccccagaagctgcgggcacatccacg

SEQ ID NO: 579036 - DNA, 87 bp, Homo sapiens
gggcttcaccatggacaagctggtgcagaacattgcgcggcaggataaagataaagtttctctaaccaagaccccaaaactggagcg

SEQ ID NO: 579037 - DNA, 75 bp, Homo sapiens
aggcacctggagaccttcgagcaccccaacgtggtcaggttgggagccacgtgtaccagtgtgtgttgatcttgg

SEQ ID NO: 579038 - DNA, 100 bp, Homo sapiens
ctcggctcagctaatggaaatggagaccttgattctggccatttcataattctgaatcatgtctgataacggagaactggaagataagcctccagcacct

SEQ ID NO: 579039 - DNA, 75 bp, Homo sapiens
cgagaagtgaccccagcaaaagaaaaatattgctgtacctaaattcaacattgatctggtagccttgctccagaa

SEQ ID NO: 579040 - DNA, 82 bp, Homo sapiens
tatttgtgtgacttgactcttcaaacacaaaggttccagcaacagatagaaatgctttaagttcactctggggaaagctggc

SEQ ID NO: 579041 - DNA, 100 bp, Homo sapiens
ttaaactatggacgactccgaggaacattgagcggatctgaaaagaacaattgctgtccttctggatgacattttgcaacgattggtgaagctggagaac

SEQ ID NO: 579042 - DNA, 50 bp, Homo sapiens
cccattcaaacagaggcatgggaaacctatgagaatatcccaggccagtc

SEQ ID NO: 579043 - DNA, 75 bp, Homo sapiens
ggagaattctggtcactcagtgacacacacaactcgggcctccccagcgacagtggagccttacaaagtaaacct

SEQ ID NO: 579044 - DNA, 83 bp, Homo sapiens
gaggaaagctgatgccacttcttcccaagacagtgaattagaacattaataataagctacagcagccggaggcagcggccgga

SEQ ID NO: 579045 - DNA, 76 bp, Homo sapiens
atttcttctgacttgagcctgcagtgtgctgtgagagatctaccactaggaactgaaattaccattcactttttta

SEQ ID NO: 579046 - DNA, 82 bp, Homo sapiens
agcctgtacctgttttatacttgcttttgcttcagcgttctgtggttgtcaacagaattatagaccaatccagcaatgtgga

SEQ ID NO: 579047 - DNA, 89 bp, Homo sapiens
gacgactttgatgatgtggaggaggatgaagggctagatgacttggagaatgccgaagaggttctcaacaggaggtgtgtagaagcggc

SEQ ID NO: 579048 - DNA, 98 bp, Homo sapiens
ccattatttgacacaaagaagactgcaggagggacaggtttgagtagaaatatgaagagctcacccaagtggatgtgatgatgatgtgcctgcagata

SEQ ID NO: 579049 - DNA, 100 bp, Homo sapiens
cacacgaacaagcgcgtgtgcgaggagatcgccattatccccagcaaaaagctccgcaacaagatagcaggacccgctacgacttcacctcatgcatggg

SEQ ID NO: 579050 - DNA, 83 bp, Homo sapiens
ggccacttgcttgggatcctttatcctggtcatcttctatttccaaaaacccagtgacttgattgtaaaaatttacagagcgg

SEQ ID NO: 579051 - DNA, 75 bp, Homo sapiens
ggcgccgcggggcagccgccgctcctccgggaggcggggtttcaccatgttgcccagactggtcttgaactcctg

SEQ ID NO: 579052 - DNA, 74 bp, Homo sapiens
ccggcccacagtgggggtgtgcaaacccgagagaactggagccaggctgcggcccactacaaaggcacgaaaca

SEQ ID NO: 579053 - DNA, 51 bp, Homo sapiens
tacgtgcgccagctctcccagggcccttctgcgatgttttacctggctgcg

SEQ ID NO: 579054 - DNA, 100 bp, Homo sapiens
gtttgagcccggaagcgcagaagctggtgtcgtgaaaactacccctaaaagccaaaatgggaaaggaaaagactcatatcaacattgtcgtcattggaca

SEQ ID NO: 579055 - DNA, 90 bp, Homo sapiens
gttcaccatcctggccccggaagtttgaaggaggagtttcctgcctggtatgagaagcttgttctggaaatggttcaccataacacagcc

SEQ ID NO: 579056 - DNA, 75 bp, Homo sapiens
cacaagctggccttggcagtttcggtgcatagaaaatcagagttatggtgaatggttgcatggatttgaaaaaaa

SEQ ID NO: 579057 - DNA, 100 bp, Homo sapiens
gatgctgaaaacctttgggcttcatggagtcgtcttagatgttgattcagcatttccggagagttcttttgaagtcacttcagaaggatctacatgagga

SEQ ID NO: 579058 - DNA, 75 bp, Homo sapiens
atcccatccccatcatcctcttcacagggttctgcatcttagcctgctgctagtgtcagcagtgggatacctgcg

SEQ ID NO: 579059 - DNA, 75 bp, Homo sapiens
ggagaaacatgcagattatatcgcatcctatggctcaaagaaagatgattatgatcctgttcccagtgggttttc

SEQ ID NO: 579060 - DNA, 82 bp, Homo sapiens
tagaaagtttcttctagaaaagaaaggctcacggaaaatgtaaggtttttctatatgagtggagaagacagctgttaccagg

SEQ ID NO: 579061 - DNA, 74 bp, Homo sapiens
gcttccacaccctcaccctacccctacatcggacacccccaagagctgaggcttcgaagacctcagaggacttc

SEQ ID NO: 579062 - DNA, 90 bp, Homo sapiens
gaggaagaggaggagaggccggggacgagcccgcctccagctccaggccggtccgctgccagtgtcgagttatagcagtgctggattggg

SEQ ID NO: 579063 - DNA, 100 bp, Homo sapiens
tctgtgtctcagccaaaaatgcgttcatgctactcatgcgaaacattgtcagcaggttcccagtgcccccgacaagcccctgctggtgtctccatctcct

SEQ ID NO: 579064 - DNA, 98 bp, Homo sapiens
cccacagtggttcgtcctcccaaacaactgcttcctgaatctacccctgcaggaaaccaagaaatggaccaaactcttacccaggatctactggagca

SEQ ID NO: 579065 - DNA, 82 bp, Homo sapiens
tcaaggccgattttctttgaaccttcagcaaaggaaaaccagtagattcccagacatcgcgaagtgaatctgaaattgtgcc

SEQ ID NO: 579066 - DNA, 71 bp, Homo sapiens
ggccgcgcagctgccgaacgacgtggtcctacaggtgtcagctgtgatgcatgtttaaaaggaaattttcg

SEQ ID NO: 579067 - DNA, 75 bp, Homo sapiens
agaaatatttcaaatacagtaatgaaagtaaagcagatcctgggcagaagacagcccacctgaggatattgacca

SEQ ID NO: 579068 - DNA, 98 bp, Homo sapiens
gaagaaggatctttccctggaggaaattcagaagaaattagaagctgcagaagaaagacgcaagaactttacagactagcatggcaaagcttctctcc

SEQ ID NO: 579069 - DNA, 101 bp, Homo sapiens
ctgagcagctggcgcacctggtgcgggccctctggaccctggagtacaccccgcagcacagccgcgacttcaagaaagtgaagtcactgcttttgctgtct

SEQ ID NO: 579070 - DNA, 82 bp, Homo sapiens
ttccggcctggagctcccagggccgagcttccccgggcgctgcctggacaggcctgcctgcgtgctgggacatgtctggcct

SEQ ID NO: 579071 - DNA, 100 bp, Homo sapiens
cgcacgcggagcccggcggctactcggggccggacggacattgtgtcatggagaaactccagctgggcccagagattctgcagcgggaaaatccaaggct

SEQ ID NO: 579072 - DNA, 82 bp, Homo sapiens
gctgcctcagttcttagcgcagctggtctgatcagcccctggaatttgccactctacttgctgacctggaagatagctccag

SEQ ID NO: 579073 - DNA, 74 bp, Homo sapiens
gttagaactcgcgtttccacttcagagatctgtgtgaagcctcagtttaggtcatctggtggttcagaacactc

SEQ ID NO: 579074 - DNA, 75 bp, Homo sapiens
ggaaggcggcctcagaggagagggaaggttgtggttcaccttgaaactattctaggagcctcagttcaacatgtt

SEQ ID NO: 579075 - DNA, 75 bp, Homo sapiens
ctcccgccggccccaaagacgctaaacgtgccctactctgccccgggggagagaccgagtgtgtcagcagccagg

SEQ ID NO: 579076 - DNA, 114 bp, Homo sapiens
cttgataatgctcatcatgtacctggaggtggtaatgtcaagtcctttgagcgagtgttggtagaaaacaagctgcatggcctctctccagctctctctgaagccatccagagc

SEQ ID NO: 579077 - DNA, 75 bp, Homo sapiens
aagaaactagagcaaataaccgttttgaaattcttatgtccctgatgccaaaaatgcacctactctttcctctaa

SEQ ID NO: 579078 - DNA, 82 bp, Homo sapiens
cagactccatgctcttggcattgcagctttctatggcggagaacaacaaacaggtttatgaaggcgagcgtgccatgacaaa

SEQ ID NO: 579079 - DNA, 100 bp, Homo sapiens
tccatgagaagtgacatcctcctcgaatcaaaaggtcagcaagtcctgggcttggtggagaaccagagtgactggtaccttggaaacctgtggaaaaatc

SEQ ID NO: 579080 - DNA, 98 bp, Homo sapiens
cagctacatggaggagaagcacatgccacccccaaacatgaccacgaacgagcgcagagttatcgtgccagcagagtaccaagttcgatccatagcaa

SEQ ID NO: 579081 - DNA, 82 bp, Homo sapiens
cttcaaaggcacttcgtggggtcacaggatagcagtgagattcacttcaaagtgaaaatgacaacacatctcaagaaactca

SEQ ID NO: 579082 - DNA, 100 bp, Homo sapiens
cgcagcgccgggccgccccgactccgagcggctgctgagatgagtgcaggtgctggagaatctggtaaaagcaccattgtgaagcagatgaggatcctgc

SEQ ID NO: 579083 - DNA, 98 bp, Homo sapiens
taacaacagaaaatggcattggaacagtgggaatcagcaattttgcacaggaagcagatgaagccaccctggcccgtctggatctggagaggaagatt

SEQ ID NO: 579084 - DNA, 95 bp, Homo sapiens
agtactcatcgactgatgtggcagactttgctccctggcaaaattggtcctgagaaaagggtgccagcgatgcctggatcgcctgtggaagtgaa

SEQ ID NO: 579085 - DNA, 100 bp, Homo sapiens
actggaagccgtttgtgtacggggggctggcctccatcactgctgagtgcggccatcaccatcgaggctgagccaagagctgatggcagccgccggacca

SEQ ID NO: 579086 - DNA, 75 bp, Homo sapiens
atacggcgagtggaatcgggctgcatggctggcaaaagttgggggaaatttgcattgcatcatagcattccagag

SEQ ID NO: 579087 - DNA, 90 bp, Homo sapiens
acgagatgccccctcacatctatgccatcacagacaccgcctacaggagtatgatgcaaggccactccccacctgtcctgcctttgtgtg

SEQ ID NO: 579088 - DNA, 100 bp, Homo sapiens
ggagtactcggtgaaatcctgtcctgaagactgtaagcatactggagcatagtgaaagagtctattttgaagcttcaaacttagtgctgctgcagaccag

SEQ ID NO: 579089 - DNA, 100 bp, Homo sapiens
gtgatctagaagacaggagaagatgaacacatctggagacccagcccagacgggccctgaaggctgtagagggagttgtaagacgttcatcgccgtgtta

SEQ ID NO: 579090 - DNA, 97 bp, Homo sapiens
gttggtacagggctccagaaattatgttgaattccaagggttattttggagctgttggagcactccttgagctgttgaagatcccgtgatcattacc

SEQ ID NO: 579091 - DNA, 51 bp, Homo sapiens
cgcggtgcacgcgctcagcaagggtgcttcaaggatgaccgcatcgtcttc

SEQ ID NO: 579092 - DNA, 114 bp, Homo sapiens
acaaagactttaccaccaaacgtgagatggttgtccagtatatttctgccactgccaaatctgcaacagatgccctttatgaggtgtttttgggaaacaggcttcgagcagcta

SEQ ID NO: 579093 - DNA, 89 bp, Homo sapiens
atcctttgtacgaagccattgccctgcagacagcgatgaggaggacgaggagcgccctgcccgcaagcgccgccaggtggagcgggcca

SEQ ID NO: 579094 - DNA, 97 bp, Homo sapiens
tacagcaacagatgtccaaaatgcaatatagtagtacatcagacacaacctctttataacataagatgttttactgtgcctggctaactatagtcga

SEQ ID NO: 579095 - DNA, 95 bp, Homo sapiens
gtcatctactgacagctacagctcaggagagcgacttgcagttgtggaggtacagtgtgaacggctgaggatgctctaccgggactgtgctcggc

SEQ ID NO: 579096 - DNA, 90 bp, Homo sapiens
atttgtagcattgatttcccggatctggtaacatggcaaaagatgtgaaatgacaatggatgctctgttggctcgattgaaacttctgaa

SEQ ID NO: 579097 - DNA, 98 bp, Homo sapiens
cagactgacaccccacatcgacaatttggaggtggcaaacagcttcgcagtcactaatgctttgcggatttgcgaggcgcgccctggagctgctagag

SEQ ID NO: 579098 - DNA, 96 bp, Homo sapiens
cattgaacttgctgtcatgaggcgagatcaatccctcaagtattgacttgaagctgaaagaaaagccttagttggccatgctggaagaagaggatg

SEQ ID NO: 579099 - DNA, 100 bp, Homo sapiens
atcttgtaactcgagagagactacttctggcatcctttaagaatgagggtgccgaaccagatctaatcaggtggttatcactaggctaaaactggacaaa

SEQ ID NO: 579100 - DNA, 90 bp, Homo sapiens
gtttctgggatgctgacactgacaactatactcatgatgttttcatgaatagtgacaaaaagagtagtccccagaaagaagttaagtatg

SEQ ID NO: 579101 - DNA, 83 bp, Homo sapiens
ctcagggattgatcgcctcttcaggttcagcagctggacatggagaaccaacgctcatcacctctgtcgttccccagtgttcc

SEQ ID NO: 579102 - DNA, 100 bp, Homo sapiens
tccgctgccagcgacatgttcaaggacagctactaaagcttatccacagtctccaaagacaacgaaacctccctacccagggtctcctgtgaagtaccgc

SEQ ID NO: 579103 - DNA, 82 bp, Homo sapiens
ataaggagatcatagcagagtacgatactcaggtcaaagggttacattccgaaaagcaaatgggagatggacacatctgagg

SEQ ID NO: 579104 - DNA, 76 bp, Homo sapiens
cacaaaacagcagatttcccaagagcagcggaaaatgatccagtcacaggccaaatttgagtttcatcatggtgac

SEQ ID NO: 579105 - DNA, 100 bp, Homo sapiens
ggataaaccaaagacagcatctgagcacagaaagaatgcagagccagagccccggagcctctccctgggcggccatgtgggtttcgacagcctccccgac

SEQ ID NO: 579106 - DNA, 82 bp, Homo sapiens
tcctggatcgacgccgccaaattacactgctccgacactgtccctttccccccaacacatcgcttgacatctgaagaagtat

SEQ ID NO: 579107 - DNA, 83 bp, Homo sapiens
cgctggccgagacccaggaggacagggcttcaggaggaggagggggccagtgggggagcagtccattcagacattgggagcag

SEQ ID NO: 579108 - DNA, 90 bp, Homo sapiens
ccaatggatgcaggaaaactgcataagctgtggccatgactactgaagtaggctctgtgtctgaagtgaagaaggactctagccagttag

SEQ ID NO: 579109 - DNA, 88 bp, Homo sapiens
tgccgacgtcgctgaacttctggtggttgaaaaggacactcgatttattcctggattacagaacgatgccaacgggactgcaaagccg

SEQ ID NO: 579110 - DNA, 100 bp, Homo sapiens
ttaattgaagtaactgaagaagaacttaagaaacacaacaaaaaagatgattgttggatatgcataagagctctgagaaagtggccgaaagaaaagaaac

SEQ ID NO: 579111 - DNA, 75 bp, Homo sapiens
cggcgctcctgcccccggggtgacgcgcagctcccagccgttcaacgtggacaaggaagcaggggagaggcagat

SEQ ID NO: 579112 - DNA, 95 bp, Homo sapiens
cccctgaagatgtgcacctagggggcggctaccccgtgggagcctcagcttaagggtatagttaccaagctatacagccgacaaggctaccactt

SEQ ID NO: 579113 - DNA, 100 bp, Homo sapiens
ccgggctttctgctgtacagacttctcgtgggcagcctcccctcggaactcgggcatcatggcctcaggtgattggcgaggacaacgtggcagtcccctc

SEQ ID NO: 579114 - DNA, 73 bp, Homo sapiens
gtctggaaagcgtcacttggggaaaacaaggtggacccgggaagagttccaggaatggatggaggtgctttaa

SEQ ID NO: 579115 - DNA, 50 bp, Homo sapiens
cgggacaagaaaattcatgcgaaaacccctttggtgaaacatttggaaaa

SEQ ID NO: 579116 - DNA, 100 bp, Homo sapiens
tttaatgaccttgttatcagtgatggctcttctctggaagatcttgtggtttttcgttggaatatacgttgcacatttatggcgattctgagtgtgaggg

SEQ ID NO: 579117 - DNA, 83 bp, Homo sapiens
ctaccatgccaatgcagctgtgaacgatcagagttcccagtgacctgacagcagaggagcgtcaagaactggagaacatccga

SEQ ID NO: 579118 - DNA, 91 bp, Homo sapiens
ccgacaaacaccacgagaattccgcagcccacacggtgtttcccattaaacactaccaggacaaaatcaggccttacatccagctgccatc

SEQ ID NO: 579119 - DNA, 75 bp, Homo sapiens
ctagcgtcctggaattacttcaatcaattacagctcttttgaggaagcttaagcagcaatccagggaaagtgttg

SEQ ID NO: 579120 - DNA, 100 bp, Homo sapiens
acggagtacaaaaacggcccttggatgatggaggctgtagctgcaaagctggatcttccagatgacttgattggatactttagtctattcttagttcgag

SEQ ID NO: 579121 - DNA, 100 bp, Homo sapiens
aagttggagataaagttcttctcccagaatatggaggcaccaaagtagttctagatgacaagacgcaaacatgcagatctttgtgaagaccctcactggc

SEQ ID NO: 579122 - DNA, 100 bp, Homo sapiens
aatctaaacatttgtgggaagttgtattcatcaataatgaaatgctgactaaggaacaagccgagaccgacccgcccgcccgcggccccgcagcagctcc

SEQ ID NO: 579123 - DNA, 74 bp, Homo sapiens
taagcatgccctgaaaaagtatcgtcgagaagcctatcatcgcccgaggcgctgacctcaccaccgaagccgac

SEQ ID NO: 579124 - DNA, 101 bp, Homo sapiens
tggaagccctggcagccctggtcctgatggcaaaactggcccccctggtatgactggtttccctggtgctgctggacggactggtcccccaggaccctctg

SEQ ID NO: 579125 - DNA, 147 bp, Homo sapiens
ttatcactcacatcaatggagaaccagtgcatggacttgtccacacagaagttatagaactcctactgaaggttctcctgaaaagaaagctgaacattcatctataaatcaagaaaatggcactgcaaaccctatcaagaacggtaa

SEQ ID NO: 579126 - DNA, 51 bp, Homo sapiens
tcctgaatgtggcttggttgtaggaggtgaatcaactctgggctggcctgg

SEQ ID NO: 579127 - DNA, 90 bp, Homo sapiens
aagaagatgagcagtttctgggagccgttatgccaaggcttgattgataggttatatgattggaaaaagagtcctgactctgatgtggct

SEQ ID NO: 579128 - DNA, 90 bp, Homo sapiens
gcgactcatgagagcgcggccggaggacaggtaccttaacatggggaatcttcttaaagttttgacatgcacagaccttgagcaggggcc

SEQ ID NO: 579129 - DNA, 138 bp, Homo sapiens
gggaaacaagcccttccgtgtactcgggaatccggcacaaggcactgggctacgtgctggacagctgcatcttcctcccgtgaggctggccgagctccacgctgatctgaagatacaggagagggacgaactcgcctg

SEQ ID NO: 579130 - DNA, 100 bp, Homo sapiens
ctgcacagtttctctggaatgcactttatcgctaccgaggtatttaggaatccttacaactacggctgcttggacaactggaaggtattcctgggtgtgg

SEQ ID NO: 579131 - DNA, 98 bp, Homo sapiens
ctcccgagtcagggtgaggtccacatccaggtaggggacgagatcgtccggatcaatggatattccatctcctcctgtacccatgaggaggtcatcaa

SEQ ID NO: 579132 - DNA, 115 bp, Homo sapiens
gggccaagagaagaggcggtggaggacacgacgcgcttaaagggaacatgcttgccaactcagccagcgtgaggatcctcatcaagggaggcaaggtggtgaacgatgactgcac

SEQ ID NO: 579133 - DNA, 96 bp, Homo sapiens
gggagtgtccagaccagagcctcatcccccaggcaggcggagccggctctcggtgcccgccggcttcctgctggccaccatccttgggaccgcctg

SEQ ID NO: 579134 - DNA, 75 bp, Homo sapiens
gagatcgtggacaagatcatgggcaaaggacagatccagcctgtgggccaaagctgaccaactcccccaccgtca

SEQ ID NO: 579135 - DNA, 101 bp, Homo sapiens
agaggacgaggtggaccacctgatcctgctggccctcatgacagtggtcatggccgtgtgctccctgcctctcacgggatagctgggagtatggccaccct

SEQ ID NO: 579136 - DNA, 85 bp, Homo sapiens
aagggcttcacgaccaaaggtgtcacctcagtctctcagatcttccacagcccaggcaggatgacgcaaaacacggtgattgtga

SEQ ID NO: 579137 - DNA, 100 bp, Homo sapiens
ggagagaagacgatctgcacttcgcattttggcattgacatttaattttagggtcctttatatagaagggagacattagtgaccagaaggatcccaagga

SEQ ID NO: 579138 - DNA, 75 bp, Homo sapiens
ctccagcatctccagggcagaaagcttagatctcctgggaggcccccgtggagaagaagactgagtgtatccaga

SEQ ID NO: 579139 - DNA, 83 bp, Homo sapiens
atttatgcaggatattttgattggaaggactgcctgcctccaacagacaatgcagatcttcgtgaagactctgactggtaaga

SEQ ID NO: 579140 - DNA, 82 bp, Homo sapiens
tttccctgcactacgaggaagaacggtctggaaaatcccgaagcagaagcccgtattcatctaggcattcaagatctcgtag

SEQ ID NO: 579141 - DNA, 83 bp, Homo sapiens
cgaagattgacgccagtaagaacgaggaggatgaaggggtccgccttagtaagcgccgggccaaggctggggttcagtcaggc

SEQ ID NO: 579142 - DNA, 80 bp, Homo sapiens
aaatattatggatcctatctgaagggggatatgagactttctactcggaatatcctgagtgttgcgtggatgtaaaaccc

SEQ ID NO: 579143 - DNA, 103 bp, Homo sapiens
agaagatgagagagggtcctgcaaagaacagtccacaggaagaggttgaactaaagaagttgaaacatttggagaagtctgtggagaagatagctgaccagct

SEQ ID NO: 579144 - DNA, 75 bp, Homo sapiens
caggagtgaagctgcagaccttcgtggagtcgctcaggagcaagctgtggcaagctggagggagggacacatccc

SEQ ID NO: 579145 - DNA, 50 bp, Homo sapiens
cctcacccagctccccggatgaaacagcaagtaactggcagaagttttgg

SEQ ID NO: 579146 - DNA, 75 bp, Homo sapiens
gacatttaattttagggtcctttatatagaagggagagtaggacaccatgaagcaactgccagtcttggaacctg

SEQ ID NO: 579147 - DNA, 97 bp, Homo sapiens
gggcttgacagctgcaaggagttactgaaggaataactcaagtcacctgtactggaaatcagtttgctgaaattaatcaacgattcttgaagttgaa

SEQ ID NO: 579148 - DNA, 75 bp, Homo sapiens
ctgtccgggaggaatgacggggtcaagtttttcagaagaagtgaagtcaagatgaagaaccatttgcttttctgg

SEQ ID NO: 579149 - DNA, 82 bp, Homo sapiens
cggaggatgagcctgcagagcgcgcagtacctccggctggctacagcaaacatcattcaagatgtccagcaaagggagcagc

SEQ ID NO: 579150 - DNA, 75 bp, Homo sapiens
gtaggaaagcggaagcggcctggcaggggaaggatcgagtctctgctttctatccgtcaagatgataaagtcgtg

SEQ ID NO: 579151 - DNA, 75 bp, Homo sapiens
gggagaccgtaatgagcgtcaaaattatccgaaaccgcctcactggagaacggagaccaacctgggctgaagaaa

SEQ ID NO: 579152 - DNA, 100 bp, Homo sapiens
cttcactcgggggactcagcggcttatacctcaaggataccggaaaaacacccgtggagccggaggtggcaattcaccgaattcgaatcaccctaacaag

SEQ ID NO: 579153 - DNA, 100 bp, Homo sapiens
tccctgtgttctgcttttttcattgttccactggacgctcatcagagggaagatctttttcctcaattggatctcactctgttgcctaggctggaatgtg

SEQ ID NO: 579154 - DNA, 75 bp, Homo sapiens
caagatctggactactgttgaaaaaatttccagtgagctctaagcgaaagacatgaggcctcagcctgaaatgag

SEQ ID NO: 579155 - DNA, 50 bp, Homo sapiens
ctttagaaaactgatcttaatacagtatcctagaaggaaaacatcaccat

SEQ ID NO: 579156 - DNA, 75 bp, Homo sapiens
cagtggccggccctgggcactggaatgaccctgacatggtggtccagctgctcacctgtgacctgctactgtcgc

SEQ ID NO: 579157 - DNA, 100 bp, Homo sapiens
tctcgctgtgagacatgtctgagactcctgctcagtgtagcattaaggatcagattttattaagacctctactggaaaagaaacagtaaatgccaccttc

SEQ ID NO: 579158 - DNA, 75 bp, Homo sapiens
tgcggacagtgaaccggacagtcatcaccatgggccgggatcacattctgattatatggaatgtgcagatgtccc

SEQ ID NO: 579159 - DNA, 75 bp, Homo sapiens
gtggacatgtcaacagtggacgctgacaccgtcactgagctggcccaggtgacccggaggcgtggggcccggcag

SEQ ID NO: 579160 - DNA, 100 bp, Homo sapiens
tccaccactgctgctgctacccttgctgctgctgctgcctctgctgaatgtggagcctgctggggccacactgatccgatgaggtttatataactttcca

SEQ ID NO: 579161 - DNA, 96 bp, Homo sapiens
cggacgggcgccacattctcaacaccacggaattccatcactagagagcatggaaggatattattacagagacaatgtttctgtggaagaatttca

SEQ ID NO: 579162 - DNA, 90 bp, Homo sapiens
gaggcacttcagggagtgcttttatattcccaaaatacaggatctgcctccaggcaaacctgtatgtgggactggtggtcatgtgtggct

SEQ ID NO: 579163 - DNA, 75 bp, Homo sapiens
aatattcggaagtcatatggaaatttttacaagctgagatgagtgaactgagtgtggcacagaaaccagaaaaac

SEQ ID NO: 579164 - DNA, 83 bp, Homo sapiens
ttctgaaccatccacacatcataaagctttaccaggactttgtgttttatgccccacgtctgagaatcaacaagcggatcctg

SEQ ID NO: 579165 - DNA, 100 bp, Homo sapiens
cgctgctgctgccgctgccgccctgagtcactgcctgcgcagctccggccgcctggctccccatactagtcgccggttgctccttgagggcaggacagtt

SEQ ID NO: 579166 - DNA, 83 bp, Homo sapiens
agcatcgttaaagtctctcttcaccctgccgtcatgtctaagtcagagcagcccctgtcaaagggaacaggaagcagtccacg

SEQ ID NO: 579167 - DNA, 123 bp, Homo sapiens
accatttcggcaacttccagtgcaaggacgtcctgctgcatcctcactgggtgctcactactgctcactgcatcacccgttggccaggaatactttgccctgaccgttttaaagggaaatatg

SEQ ID NO: 579168 - DNA, 98 bp, Homo sapiens
tcgctctacctgatgctggaccggggtcacttagactaccccaggaacccgcgccgcgagggctccttccctcagcctatttgatggctttgcagatg

SEQ ID NO: 579169 - DNA, 75 bp, Homo sapiens
ggccgggggcaaggggcggccgggcgcggccgtgtgtgttttaatagaaaagttgtcactttccaaaatgccctt

SEQ ID NO: 579170 - DNA, 82 bp, Homo sapiens
tcattgaagctatcactgtcagtgctggctgtggaaaatctctgttctcacaaagtctccccaatgctctacaagcaactgc

SEQ ID NO: 579171 - DNA, 100 bp, Homo sapiens
atcgggagtacacagacatcatccggctgaaggtgatgtggccgccctcaaccgacgcatccagctcgttgaggaggagttggacagggctcaggaacga

SEQ ID NO: 579172 - DNA, 96 bp, Homo sapiens
aaatgtctgtcacatatgatgattccgttggagtagaagtgtccagcgacagcttctgggaggcacacaagtctctgaattttgtctcaacactgc

SEQ ID NO: 579173 - DNA, 100 bp, Homo sapiens
tcttcgcctcgcctcgggacccgcggtccccgctcttgctgatatcgtagtaaagtgttatcccgttggctggctggcttaccattgcaacttgctcatc

SEQ ID NO: 579174 - DNA, 75 bp, Homo sapiens
tgaaaccataatgctacaaactctagatgatagtatttctgctgcaagtacttctgatgttcaagatcgcctgtc

SEQ ID NO: 579175 - DNA, 82 bp, Homo sapiens
ttatgacacgctggacatcaccggcagcgccgagatccgagcccatgccacagccaagctccataatgggagaagtaaagaa

SEQ ID NO: 579176 - DNA, 51 bp, Homo sapiens
tggcgctccgccggtcccgttctgcagtcaattcagatttggaaaactaaa

SEQ ID NO: 579177 - DNA, 82 bp, Homo sapiens
tgaagagcgacaagccgctggcagccgcggatctcaccgccgctcagggatggactccaacactgctccgctgggcccctcc

SEQ ID NO: 579178 - DNA, 73 bp, Homo sapiens
cgaagactgcatttcaacttcaagaatggtcatcgagctggttaagaagtatggcacaaagcagtggacactg

SEQ ID NO: 579179 - DNA, 50 bp, Homo sapiens
aacatagccatcgacttcggggagcagcggttcctggctcagagtttgag

SEQ ID NO: 579180 - DNA, 97 bp, Homo sapiens
ctggctattgtgaataatgctgcagtgaacatgggagtacatacatctgtttgaggacatcaaaggccagttctggaatgatgacgactcggaggga

SEQ ID NO: 579181 - DNA, 98 bp, Homo sapiens
agcctttcccacgacttggctgaggaactgctgttgtgaaccttttgccctggtgggattattccatggtctgaaaaagttcttttcttgtcgtggaa

SEQ ID NO: 579182 - DNA, 82 bp, Homo sapiens
gagcccggacggcgcctctcgaacgagtgtgggcgcgagaaactatgttccaacttcctgtcaacaatcttggcagtttaag

SEQ ID NO: 579183 - DNA, 100 bp, Homo sapiens
gaggcgcggcgtgggaagaaggctgttactgcaacaaggaggtatacaataaggagaatcttttcaacagcctgaactatgatgttgcagccaagaagag

SEQ ID NO: 579184 - DNA, 101 bp, Homo sapiens
agaaccaaggagctgcgctgctacagatgttaccacttctgtggctgctaccccactcctgggccgtccctgaagaatgagtccctggaacgccagatgcg

SEQ ID NO: 579185 - DNA, 74 bp, Homo sapiens
ctactggggccacgtcttctgggaccagaattcagaaggagctggcggacatcactttagaccctccacctaat

SEQ ID NO: 579186 - DNA, 76 bp, Homo sapiens
gcagatttcttttggatagtgatgggaaaaggtggacaacgcgtactggctgtggactttccagggacgcctcctg

SEQ ID NO: 579187 - DNA, 50 bp, Homo sapiens
gagcatcccaggacctaccagaatctggatattggtgctggaaaaggcaa

SEQ ID NO: 579188 - DNA, 100 bp, Homo sapiens
gagacatcagcatatatgtcaactctaccatgtgctagagacagccaacaaaatattcatggttcttgagctccatcaaggaacagtccctgtttcttac

SEQ ID NO: 579189 - DNA, 122 bp, Homo sapiens
gtttggatgttggatctacactttctcaagcactgtgatcttcaaatgcctcggcaagacgcgcaggaagaccagcgcgcgggatgcgtcccccacgcccagcacggacgccgagtaccccg

SEQ ID NO: 579190 - DNA, 82 bp, Homo sapiens
tggctgcttccagtgttcgccgagagcaaacggggattcagcgtccgatcctttggaacagggactcacgtgaagcttccag

SEQ ID NO: 579191 - DNA, 99 bp, Homo sapiens
aagcttctacacactggaaattctattaaggtggtggaggtggatacagcagtcggagaacatctggcagagacaaatacggaccacctgttcgtacag

SEQ ID NO: 579192 - DNA, 100 bp, Homo sapiens
gtccactaagaaaagtccatgtgctggcagcacttccctgagccactctccaggctgctccagtactcaagggaacggtattggtaaaggttttcaaggt

SEQ ID NO: 579193 - DNA, 100 bp, Homo sapiens
ttctttgtcaccataggagacatggacgaagccttcaaatccatcaagctcatcaaaagttttcctcacgggagaaaaagccaattccatattaaaacgc

SEQ ID NO: 579194 - DNA, 98 bp, Homo sapiens
gaaaagctgagaaagtttcgttttcgcaaagaaacgaacaacgctgctattataactaaatttcaacagtgccacttctgcattctctgttctcaagg

SEQ ID NO: 579195 - DNA, 83 bp, Homo sapiens
gcagaccgctggggactgcgggcggcgctgtgtccgtcgccatgacaggtattactcagcacagaaattcaggagacacagac

SEQ ID NO: 579196 - DNA, 112 bp, Homo sapiens
cggactgtagtaatggataaatccaaaggggtgcctgtgattagtgtaaaaacgtccgggtccaaagagagagcatcatgacggtgatgtcagctctgtcggtggccccctc

SEQ ID NO: 579197 - DNA, 101 bp, Homo sapiens
ccgggaacggcggcgggtacggcggccccgcgcagcccccggccgcagcgcaggcagcccagcagctcgagagctagccttgcagcaggaggaagggaaga

SEQ ID NO: 579198 - DNA, 99 bp, Homo sapiens
ggcgaaccgtggcaccgagagcaagaaaatgaagtgtatgctgacttgtaaagtgaagaagccagtggtgctgcgggtgttcttttggggtagtgtctg

SEQ ID NO: 579199 - DNA, 75 bp, Homo sapiens
ctttcgcgcaggcggcggcggcggcggcggcgggtccctgagctggaagccgaatgaacacttgcacatgagtgt

SEQ ID NO: 579200 - DNA, 75 bp, Homo sapiens
tacattacagaaatggagatgctgctgaatgagaaagggccgttaattaaggaaaagttgagccagggcgtgacc

SEQ ID NO: 579201 - DNA, 100 bp, Homo sapiens
aagctgctaagcagaattgcaagggacaagtggccacactccctcaggaacacatgattctgtgcagatttgcagaccagacagctgtccagctcccacc

SEQ ID NO: 579202 - DNA, 83 bp, Homo sapiens
tggttcattcaagcaaatatggaatattttactgggatgtttaatattggaggatttcaaggatttggatttggagatggtgg

SEQ ID NO: 579203 - DNA, 51 bp, Homo sapiens
gcccccagcgcagcggccgcggtcatgcttcaccccttcctccatctgctg

SEQ ID NO: 579204 - DNA, 100 bp, Homo sapiens
cgtgcagacatctacaaccttcgatctcctgacgaattttctccaaaggaacatccggtgcttgccctgccaggagccccagcccagttccccgtcctag

SEQ ID NO: 579205 - DNA, 100 bp, Homo sapiens
ggagcctcagagagggatgggttacatgcccaagaggggacttgatgttaacaaatgtgagattgccaggagaatgaagtttctagattagaagacataa

SEQ ID NO: 579206 - DNA, 83 bp, Homo sapiens
atggagtcctacgatgtgatcgccaaccagcctgtcgtgatcgacaacatctcaggaaacaggctcgacagctggaaaatgaa

SEQ ID NO: 579207 - DNA, 50 bp, Homo sapiens
gtgagaggcccttcagggccgcggcgggatgattgccgccgtggacacag

SEQ ID NO: 579208 - DNA, 100 bp, Homo sapiens
atgaagaccccattcggaaagacacctggccagcggtccagagctgatgcagggtaacgccatcctctgaaaatcctaatggtgctacttctagtgtcag

SEQ ID NO: 579209 - DNA, 75 bp, Homo sapiens
cctggactaggctgctcttgttaatcacatggatgttgtgctttgtaacagagccagactggtttcctatctccc

SEQ ID NO: 579210 - DNA, 100 bp, Homo sapiens
aatctccacaaagtgacagtgaatgatggagggggagttctcagagtcattacaggggtgagtggtgcactgacagtgcttatgaaggacgcaatcaagc

SEQ ID NO: 579211 - DNA, 50 bp, Homo sapiens
aggaattgccccatagccttcacagtctacccatggtgttggaatgaatg

SEQ ID NO: 579212 - DNA, 98 bp, Homo sapiens
atatccgagggtgtcctgttacttccaagtcatcaccagaaagtttgaaagctgaatggctctatagtcaaggcaaggggagagcatatcggcctggc

SEQ ID NO: 579213 - DNA, 80 bp, Homo sapiens
tcggcactaggcagcggaggagcccgaccgacccggtgtggacactgccagcggctgcagccgacttggaatgacctggg

SEQ ID NO: 579214 - DNA, 73 bp, Homo sapiens
atgaagatgttgatcggaaacactgggatagtaatgatgacactgaagatgtttcactgtttgatgcggaaga

SEQ ID NO: 579215 - DNA, 100 bp, Homo sapiens
ggtagacatgaaaagcggcttcaatctggaagaactggaaaagaacaatgcacagagcataagagccaaggccacctttgatgccatttctaagacctac

SEQ ID NO: 579216 - DNA, 75 bp, Homo sapiens
ctggaataacattggcataattgatttgatcatggaagggaagtggttgctgtgtatgttactggtgcttggaac

SEQ ID NO: 579217 - DNA, 97 bp, Homo sapiens
atactctactggacaaacatttcctccaaggtctgctgagaacagacccagtccctgaggaaggagaagatgttgctgccacgatcagtgccacaga

SEQ ID NO: 579218 - DNA, 100 bp, Homo sapiens
gataagcgctttcgcttggcgctgggcagcttcgtggaggagtacaacaacaagagtggagcctttcaggctggcatggagagcttaaggggcaactgaa

SEQ ID NO: 579219 - DNA, 75 bp, Homo sapiens
gtcagcatccactcctcaagaggagcagaccaaagaggcaatcaaagccttagatgggagatctcaagtttcaac

SEQ ID NO: 579220 - DNA, 60 bp, Homo sapiens
ccggagccgaaacaccggtaggagcggggaggaggtgtcattaacttgtcagtacctata

SEQ ID NO: 579221 - DNA, 100 bp, Homo sapiens
ccggaggccaggcacgcgcagaggaggcttttctctgggatccaccttgatgttcagtgaagagtaccagaaaagtctgctagagcagtaccatctgggt

SEQ ID NO: 579222 - DNA, 50 bp, Homo sapiens
agatgctgagtttgaacaattacagtgatgcctaccttaatgcctctgaa

SEQ ID NO: 579223 - DNA, 80 bp, Homo sapiens
agatgggatctttccggatcaatccagatggcagccagtcagtggtggagaacagcacatcccattataatgctggaact

SEQ ID NO: 579224 - DNA, 74 bp, Homo sapiens
cagctgcgatctctgtggtaggcccagaagtgacacagccctagaggaggcagtagcagaggtgctagaccatc

SEQ ID NO: 579225 - DNA, 100 bp, Homo sapiens
cacggtcctatggcggagctaacggactccgcgcggcaagaagtctatgtgccccaggatcctggattacctgaggaagaagagatcaaggaaaaaaaac

SEQ ID NO: 579226 - DNA, 80 bp, Homo sapiens
ctggcccccttgagcctgtcccaagccctggtgccaggtgtccatccccgtgctgagttttactttgaactcagaaggct

SEQ ID NO: 579227 - DNA, 100 bp, Homo sapiens
ccaacttcgccaccctgcggtggattgactacggcaaagtggccactcagcatttagcagagtgcttgcttcactctattctctcagaactaaaaattca

SEQ ID NO: 579228 - DNA, 75 bp, Homo sapiens
cgaacaagtgaaaagaggtccttgtatgtcaggtgcaaatagtctacaaaccagttgacctgagcaaggtgacct

SEQ ID NO: 579229 - DNA, 82 bp, Homo sapiens
ccactttttctctgctgatccaggtaaaacttccttttcctgtagatcaaatcacagatcttccaaggaacgatttccagat

SEQ ID NO: 579230 - DNA, 100 bp, Homo sapiens
acgggaagtccgtggacgacgtgctttcccattttgctcagcgactgtttgatgacgtcccgcaggtgtacgtgaacggagagtgggtgaccaacatcag

SEQ ID NO: 579231 - DNA, 101 bp, Homo sapiens
atgtggcaaaattactgtatatgcacatgctgggctaccctgctcactttggacagcagcccactcacccagtgtacaacattggaccagacaaggtgatc

SEQ ID NO: 579232 - DNA, 101 bp, Homo sapiens
catttctatggtcctcctcacctatggccgctggcaggcttttaaaaccaaggatggctatattgtagttggagcaggaaataaccagcagtttgccaccg

SEQ ID NO: 579233 - DNA, 75 bp, Homo sapiens
aaagacgcttattatcggcgagtgaagagactgtacagcaattggcggccaggaaatgtgaagaattcacctgga

SEQ ID NO: 579234 - DNA, 96 bp, Homo sapiens
gacagtagcccagcccgccggccaggtggataggcatgtagacctgctagaagttgcccaggaaactgatgggttttcaggaagtgacctaaaaga

SEQ ID NO: 579235 - DNA, 75 bp, Homo sapiens
ctattccgacccattgaaaacaaggacgatgcatttacagattctctacagttatttctcaaactctgaggctgc

SEQ ID NO: 579236 - DNA, 86 bp, Homo sapiens
cctgcaactccccagcagcacgtgttggaatggacttcggaccctggcctcttgggatgcaaagctctacgaactcgacggggacc

SEQ ID NO: 579237 - DNA, 82 bp, Homo sapiens
tggtgaagtggaaaggatggcccccaaacattggcatcaacaaaagtcagaattcccgggaacttgaacagaggctgctaaa

SEQ ID NO: 579238 - DNA, 100 bp, Homo sapiens
ccaggagctgccagcatgtaccagcctgccctgccacacagtgtgcctgcaacctgtccggggatcccagggaggattttttatcaagcagaaatgcatc

SEQ ID NO: 579239 - DNA, 75 bp, Homo sapiens
aatctgagcaatatggaatattttgtgccacacacaaaaaggtctaagagtgtaaccagttccagtagcagtagc

SEQ ID NO: 579240 - DNA, 100 bp, Homo sapiens
tggataagatgaccttcagtgtgctgctcaaaaacaggcaccgaccgtcacgagctaacttcctggaagagctttccgtctattttcaaattctttaccg

SEQ ID NO: 579241 - DNA, 100 bp, Homo sapiens
catgcttccacatcgtggtattggagacagtcttctgataggtttcctcggcatcagaagtccttcaaccctgcaggtaatagcctgcagctggtgtttt

SEQ ID NO: 579242 - DNA, 50 bp, Homo sapiens
agggagaataagctgtaccatcgcaagaagttctccctggacgacctgct

SEQ ID NO: 579243 - DNA, 90 bp, Homo sapiens
aaccagcatgaaattacttgaccaagttgtccctccagctggtggtaaagggagaagatgaggaagagaacaatttggaagtacgtgaaa

SEQ ID NO: 579244 - DNA, 82 bp, Homo sapiens
aggatcgcccctcctgacagaagattttcacgttctgcgatagcagcttgacaagatggtgacagaaaaggcaggatttaag

SEQ ID NO: 579245 - DNA, 75 bp, Homo sapiens
ggagtcatgagcgacagcggcgagcagaactacggcgagcgggtcaatgtgacggtggactacattagaccagcc

SEQ ID NO: 579246 - DNA, 83 bp, Homo sapiens
cccaggccctggagtgcatgcgcaggaaaccatcttcatcggtactccaaggttctggaggcccatttgggagacccaaaacc

SEQ ID NO: 579247 - DNA, 99 bp, Homo sapiens
ccttgggccgcgtctcctttgagacaatgcctgtggaagacaagtcagaccccccagaggggtctgaggaagccgcagagccccggatggacacaccag

SEQ ID NO: 579248 - DNA, 83 bp, Homo sapiens
caccagctccgaaatcaccaccaagggctcttccgtgggcggcggcttcgcgggcttggagttcgcgcggccgcaggagtcgg

SEQ ID NO: 579249 - DNA, 75 bp, Homo sapiens
cctggttctggaatcctcagttcaaggctgcttctgatgcttggaagatatcctctcagccacaaagatggtaat

SEQ ID NO: 579250 - DNA, 75 bp, Homo sapiens
catccgtcttcaaagccagcagtggccagatgtggacgaatgccgaacccacaacggtggctgccagcaccggtg

SEQ ID NO: 579251 - DNA, 98 bp, Homo sapiens
tgccgtgctggagggaaggctgctgttggaggcccgggtcctttttgtgctgattgtgctgagccagctcaccattctcattatttttagatatcgag

SEQ ID NO: 579252 - DNA, 75 bp, Homo sapiens
gccgccggaagtattgacggaaagcttgaattacctacatggtctcctctgagcctccggcctccataagaccca

SEQ ID NO: 579253 - DNA, 100 bp, Homo sapiens
caaagaaacataagaagaaaaaggagcggaagtcattgccagaagaagatgtagccaccccagagtcagaaggagtgagaaccctgacccctaatcccac

SEQ ID NO: 579254 - DNA, 88 bp, Homo sapiens
attcctcccattcatgtgcctccaggttatatctcacagaaacttgaggagaggctggagttctggatggagaaatacgataaggaca

SEQ ID NO: 579255 - DNA, 100 bp, Homo sapiens
tttcttcaatgataagagctgtcagttttctgtggatgaaggtgaatcttggaagcaaccagtaccttttctctgtcatagtggatcctaaagaaatgcc

SEQ ID NO: 579256 - DNA, 100 bp, Homo sapiens
ggagcactacctttgtgagcagtgtgacccaaggcctgtggacagggaaattacctgatgttccaaaccccctccagatcctgtatatccgcagcatctc

SEQ ID NO: 579257 - DNA, 82 bp, Homo sapiens
aaatttgctctgctaaaaggctccttcagtgagcaaggcatcaacgagtttctcagactttgagaatcactacaagaaaaac

SEQ ID NO: 579258 - DNA, 83 bp, Homo sapiens
aacagcaaaccagtgaacctgtacacattttaaagaggtcttttgcaagaactgtctcagtgtgacagacatcacacctccag

SEQ ID NO: 579259 - DNA, 82 bp, Homo sapiens
aaaaccaacgcctggctcggagcagcagcctctgagactgaaccggccgctgacactctcggagaagattgtgtatggacac

SEQ ID NO: 579260 - DNA, 98 bp, Homo sapiens
cgaggtgtgcgaagccaccaattccaatgacaggatttacacagagagcaactattgatccagaactgaatgaaatacacgtcttatctggactcagc

SEQ ID NO: 579261 - DNA, 50 bp, Homo sapiens
cttagccagcccgagcaagtaaagattgcttttctgcaattagataaaaa

SEQ ID NO: 579262 - DNA, 101 bp, Homo sapiens
aaggatgtgcaggatcttgatggtggcaaggagaatactcccccagttgcaagaggcgcaggaccgtggaagacttcaacaaattctgcacctttgtcttg

SEQ ID NO: 579263 - DNA, 100 bp, Homo sapiens
aagcatcctagcagccttctccaaagccacatgtgtgatccctcacatccacaaatctctgattggaaagaagggacagcagaaaactgcttagagggat

SEQ ID NO: 579264 - DNA, 82 bp, Homo sapiens
ctcgccgggagcggcggcgcccggacgccgagtgaaatgacaatggatgctctgttggctcgattgaaacttctgaatccag

SEQ ID NO: 579265 - DNA, 97 bp, Homo sapiens
gccatctgtgtgtctgggcagtgcaaggccatcttggcagcaggcagcatgatgcagacccacggggactttgatgttgccctcaccaaatacagag

SEQ ID NO: 579266 - DNA, 50 bp, Homo sapiens
cctcaatgactgccctctaaaggaagaggcttacagcttcgccatgggct

SEQ ID NO: 579267 - DNA, 75 bp, Homo sapiens
cacgtcctcaagcagctggagcgggtcaaggcttctcacggcattcagcagcagcgttgctgtaaccgacaaaga

SEQ ID NO: 579268 - DNA, 100 bp, Homo sapiens
acagggtcaaaggagagcacaaccatcgcagttggaagcccatggggcaggtgtcagttgtacccgaggcgttctcagcagcagcaagtacctgtggtgg

SEQ ID NO: 579269 - DNA, 75 bp, Homo sapiens
acggccagatctgccctccaatatctcccggggccaattcagcatctctacctggccatcctaacaaggtgattt

SEQ ID NO: 579270 - DNA, 82 bp, Homo sapiens
cactgggtgagttcatgcaaagcgctgagaacaggaccccccgcccccacgcaggaggagggagacgcactgatgacatcgg

SEQ ID NO: 579271 - DNA, 100 bp, Homo sapiens
gatgctgatggagaaggagggagtgctcaccagggaggaccggcctgggggccacatgatcatgcggccagatgatgccaacgtggccggcaatgtccac

SEQ ID NO: 579272 - DNA, 121 bp, Homo sapiens
cgcaaagcggggacccagaccctggagcctcagttggaagcagccgatccagcctgcggagcctgtggggcagggccgcgatgggcctcttggaacattggtgtgttcatctgcattcgat

SEQ ID NO: 579273 - DNA, 100 bp, Homo sapiens
taactcctcaggtccctgcctgcacagggtggaatgaatggctgaattatgatatatacattcctgatcttcctcgtgctgctcgactttgcctttccat

SEQ ID NO: 579274 - DNA, 75 bp, Homo sapiens
gttctagtcaaagaacgctttctgttcaagaggcagctgcgtatttaaaaatgctggttgccaacattgacttgg

SEQ ID NO: 579275 - DNA, 150 bp, Homo sapiens
gagacggaggtgctggcacatgagatcgagcggctgcagatggagatgaaggaggacgacgtttcttttctcatggtggcttcccacacttctgactcggacgttccttccggtgtcactgaggtggtcgtgaagctctttgactctgat

SEQ ID NO: 579276 - DNA, 100 bp, Homo sapiens
tgccagggagccaagcgtcctgcccggccaaagtgaatggcttggaggaaggcgtggagttcctgccagtcaacaacgtcaagaaggtggaaaagcatgg

SEQ ID NO: 579277 - DNA, 75 bp, Homo sapiens
tacgagtactaacaaagaatatccagttcgcacatgccaataagcccaaagccaaccccgagagcttcggcctct

SEQ ID NO: 579278 - DNA, 90 bp, Homo sapiens
tgggctgtgttgacatcaaggatctaccagcagagtcacctgatatgaaaaaggagcaagacccccctgccaagtgccacaccaaaaagc

SEQ ID NO: 579279 - DNA, 75 bp, Homo sapiens
aacagttctctcaatacataaagaacagcgtaactccagacatgatgatgataattccgaagaaggcttccacac

SEQ ID NO: 579280 - DNA, 50 bp, Homo sapiens
cttcaagggggaggagtgtccagcagacacttgtgtaacaacaaggaata

SEQ ID NO: 579281 - DNA, 82 bp, Homo sapiens
ctgccgctcgccctctgcctgctggctgcacccgcctccgcgctcgtcagggtgaagtcctgcagcttcacagccgcctgct

SEQ ID NO: 579282 - DNA, 75 bp, Homo sapiens
caagttaacccttaccacccagcagcagggcatcaagcattttgaaagcgaagcagaagccgtagaatcagcggc

SEQ ID NO: 579283 - DNA, 82 bp, Homo sapiens
ttctaccgttatgtttcccaagataatgggaggagcatctacctgcctagagctggaacgttacctccagagcgagccctgc

SEQ ID NO: 579284 - DNA, 50 bp, Homo sapiens
cagaacccatagaactcgtggaaactgacaatgcagatcttcgtgaagac

SEQ ID NO: 579285 - DNA, 75 bp, Homo sapiens
ccacccttcgtcatctgcgtgaagctgagaggaggttcagatgagcccctgctgacttgagagagacagagagac

SEQ ID NO: 579286 - DNA, 82 bp, Homo sapiens
cgggacgcggagcccggagctggggcgacgaggcgattgcgggggcctgggctagagtctcactgtcgcccaggctgcagtg

SEQ ID NO: 579287 - DNA, 75 bp, Homo sapiens
cgcagtccggaggtgaggcggaactctgagattttctggcatccttaaatcttgtgtcaaggattggttataata

SEQ ID NO: 579288 - DNA, 75 bp, Homo sapiens
ctggcccagaaggagcaggagctagccagagccaaagaagccttgcaggagatcatgatgcagccgtccttttgg

SEQ ID NO: 579289 - DNA, 51 bp, Homo sapiens
attgcaagcattctatccaaatggccaagatcaaggctcgagatcttcgcg

SEQ ID NO: 579290 - DNA, 99 bp, Homo sapiens
tatggaaacgactcctcggccgagctgagtgagtgtggcttcctgttgtggtgcatggccccgagcccttctaatggggctgaactgctctacaagcgc

SEQ ID NO: 579291 - DNA, 100 bp, Homo sapiens
ctccagttcgctctagcagacaagatcagatccacagagcatcctggccagaacaagccaaggagccaagacgagagggacacacggacaaacaacagac

SEQ ID NO: 579292 - DNA, 51 bp, Homo sapiens
ggcgacgtctacactgagtcggaggcgaagagtggagactgctgcacggac

SEQ ID NO: 579293 - DNA, 97 bp, Homo sapiens
cgtaatagagccttaaatggggatctggtggtcgtgaaactgcttcccgaggagcattggaagtcccggacatgatggcacatggaatgacaatcag

SEQ ID NO: 579294 - DNA, 99 bp, Homo sapiens
tttctttctgaacgcgaagtcctgcatctacaaggtggacccccaaaagtacaagggcatatttaacggattctcagttacacttaaagaggatggtgt

SEQ ID NO: 579295 - DNA, 76 bp, Homo sapiens
tctctctgccgtgaatcattcctgcagatgaaaaagtgtgacttggcagctggatttttacctcctataactccac

SEQ ID NO: 579296 - DNA, 90 bp, Homo sapiens
gaaaaattcaagaagttgaaaaacgcttttcacgtcacctggagagatgcacagaggctgaggggatctggcggtggagcgctaggatca

SEQ ID NO: 579297 - DNA, 100 bp, Homo sapiens
ctgagccgacgagaaatggaagtgagatctgaatccacaaacggagacggcagacagtcacaggcaggtgtcatggagaaactccagctgggcccagaga

SEQ ID NO: 579298 - DNA, 100 bp, Homo sapiens
tcgcctccttcaccgccgcagaccccttcaagttctagtcatgttttcagaagagcagcgctttaacaacttcctgaaagcccttcaagagaaagtggaa

SEQ ID NO: 579299 - DNA, 90 bp, Homo sapiens
gctggtggccgcctgcctctgcctggcggaggtgggcatcaccttctgggtcattcacagggtggcatcaacacagtcactcctggcggc

SEQ ID NO: 579300 - DNA, 75 bp, Homo sapiens
gaggagttcagccgcgctgccgagaagctttacctcgctgaccctatgaaggagatctattgggaaactgattat

SEQ ID NO: 579301 - DNA, 96 bp, Homo sapiens
tacagaaagcacagtgtttccaagcaattttccagattattcaaagtatcaggatgggcatgtgaagtgactgaccttaagatgtttccattctcc

SEQ ID NO: 579302 - DNA, 100 bp, Homo sapiens
gtggaggtagaaggctatggcagcaagaagatcgatgctgagcggcaggctgcagctgcagcctgccagctgttcaagagcatcctggccagaacaagcc

SEQ ID NO: 579303 - DNA, 98 bp, Homo sapiens
cccaggtcaccgccagcacgcgcctgcttcccgtctgcgcgagtccacgcagctccccagcatgtgatagtgatggaagatatgctgaaagactttct

SEQ ID NO: 579304 - DNA, 51 bp, Homo sapiens
ggctgatgtcaacagtgaaaactgacttcttgggaagtgttcccctcagtg

SEQ ID NO: 579305 - DNA, 98 bp, Homo sapiens
gaactgcagggctgcagcgtccgggagaccaagagtcgaagctttgacctgctcacaccccatcgctgcttcagctttccagttctcagggaacaata

SEQ ID NO: 579306 - DNA, 74 bp, Homo sapiens
caggctgaggctgagtctcagtgttgccctgttcagtctgaggtgctggagaatctggtaaaagcaccattgtg

SEQ ID NO: 579307 - DNA, 138 bp, Homo sapiens
ctgctgcaccgtgcctaccacctgcaggaggagttcggctccaccttccccgcagacagcatgctgctagacctcgtggatcgcagctccaagaggaggcaggtgaagcctttggcagcttctctgctggaagctctt

SEQ ID NO: 579308 - DNA, 74 bp, Homo sapiens
tgtgatgctggagaactgcaggaacctggcctcactaggatttccagatgtgacttgcactcagaagatcagtg

SEQ ID NO: 579309 - DNA, 73 bp, Homo sapiens
ttccagatccttcgggccattgggaagggcagctttggcaagagtactattaatcccgtagatgcaatatatc

SEQ ID NO: 579310 - DNA, 82 bp, Homo sapiens
ccggaagcggatcgggtggagtgaaggtcacgtcgccatgagctgaggcttcgaagacctcagaggacttctctcagcactc

SEQ ID NO: 579311 - DNA, 75 bp, Homo sapiens
caggccttgtgcctccaaggaaaatccacctcgcagcttgtaaatctacaggtcaaaatgcagatcttcgtgaaa

SEQ ID NO: 579312 - DNA, 99 bp, Homo sapiens
gacacccctggtggatggcgaggatgagagggtgtactctgtgtgaccgcgcctatccctcggactgtcccgaacatggaccagtgacttttgttcctg

SEQ ID NO: 579313 - DNA, 90 bp, Homo sapiens
cttcaagcagtggattaatctgaaaaaggtttaaacggaacctgcagcgtttccagtgttcccacgtccacgtcggagacgcctgactac

SEQ ID NO: 579314 - DNA, 82 bp, Homo sapiens
gctgacatcagcggctctttgtatgatgacgatgaatttcatcctttcatcgaagcacttctgccccacgtccgagcctttg

SEQ ID NO: 579315 - DNA, 100 bp, Homo sapiens
atgaacgtgtcctacttcaccgtgatgactgccaccgaactcctgcagtcccaggcggtggctgtgtctattatcctcccagtccacaacgctgaaccgt

SEQ ID NO: 579316 - DNA, 100 bp, Homo sapiens
acttagaatatacagatggaggaatcctggatccagatgatgtcttggcagatgttgttgaagataaagacaagaactctaagaaggagctgatgtggag

SEQ ID NO: 579317 - DNA, 90 bp, Homo sapiens
agacagggggtgtgcccatcagaacagtcaagagctttctctccaaaatccccagtgtcgtcacagaatcctagggaatcgggtggctga

SEQ ID NO: 579318 - DNA, 100 bp, Homo sapiens
ctctggggcttcagttcttgacgctacctacatggctacatctccagccaaggatgagagctggctctgaagcaccgacaaggcaagaatcacaagatgc

SEQ ID NO: 579319 - DNA, 82 bp, Homo sapiens
caaacccagtgatctcttattctaaggccacctgatctgggaggaccacctccaagaaaagcagtcctgtcgatgaacggtc

SEQ ID NO: 579320 - DNA, 98 bp, Homo sapiens
agcagattcagcggtactggtgtataataggaggagcatattatttaatatctagaagtctagggccagaatttggtggtgcaattggtctaatcttc

SEQ ID NO: 579321 - DNA, 95 bp, Homo sapiens
cgagagattctggatggattagcttatatccatgagaaagaaatgaatgttccattgaacagatggaacatgttcggggaatgcaggagaaatta

SEQ ID NO: 579322 - DNA, 132 bp, Homo sapiens
taagtcccgatttcttcaatgattaccaccttcaaaatggagatgttgttgggcagcattcatttcctggcaggtactccaaagattcaggtttactcacgtcatccagcagagaatggaaagtcaaatttc

SEQ ID NO: 579323 - DNA, 95 bp, Homo sapiens
cgggaggtcaacgaggtcatccaggacaaagcaggacctcataaggaaatctacccctatgtcatccaggaacttagaccaactttaaatgaact

SEQ ID NO: 579324 - DNA, 100 bp, Homo sapiens
tattctgatgcagtggagagagtgtagaactctggagtgaagagatctgcctggaaccctgactctatcactagcactgccagtgaaagatgtagaagat

SEQ ID NO: 579325 - DNA, 94 bp, Homo sapiens
gctctttagctgaaatacttctgaagtgctccaggaaagtacctgattgacaagatctacatccaatgcccagaaaacacatcctacacaggca

SEQ ID NO: 579326 - DNA, 100 bp, Homo sapiens
agaattacctggaacttcatcatcatctacttcacaggaattgccattttcaagtccatcatctccagaaccagctagtcttcctgcagaagatattagt

SEQ ID NO: 579327 - DNA, 98 bp, Homo sapiens
attactgggagagctgcagccaggagcaggaggtcaagcaggacatggtctgctatacagctcagactctcgtccgaatcctctcacatggtggcttt

SEQ ID NO: 579328 - DNA, 97 bp, Homo sapiens
gagcaagtggtcgtctagtcaaggccgcacaggaacaggagggtctgatgtcctccagaactctcttgatagagcccaagcagccaagaataaaggc

SEQ ID NO: 579329 - DNA, 82 bp, Homo sapiens
gctgtgaaaaactctttggatgattctgccaaaaaggaatatgatgaagaatgggctaagaaaattcagagtgaaaagtttc

SEQ ID NO: 579330 - DNA, 75 bp, Homo sapiens
tgccttgagagcttcaggggaaatggcttcagcgcagtatattactgcaggagtacaagcgcaagctagccagag

SEQ ID NO: 579331 - DNA, 100 bp, Homo sapiens
aacagaacctccttgttcagcagccgctggggaggaagaggggcctgaggcagtagagacaaggtttcaccatattggccagactgttctctgaactcga

SEQ ID NO: 579332 - DNA, 100 bp, Homo sapiens
ggggctgctggaggcggagaggcacggaggagccgctggggctgccgccacggccgcccggagggcgtctctggccgagcctctttttgtggaaaacgac

SEQ ID NO: 579333 - DNA, 100 bp, Homo sapiens
gttactgaagaatttcagcctgtttacaaggctgccgcgggcggacacgccagaggaggaggccggggaatggccgcggtgtggcagcaagtcttagcag

SEQ ID NO: 579334 - DNA, 50 bp, Homo sapiens
ttaatttttaaacttggtttgaaaggtttctgagtcccttcaacatgatc

SEQ ID NO: 579335 - DNA, 98 bp, Homo sapiens
tttggaatatggtgcttgtggcctttctgaggagaaagctgtggagaagtttggggaagaaaatattgagcctctcattttgaaaagacatgtttttc

SEQ ID NO: 579336 - DNA, 49 bp, Homo sapiens
ctctgttccaaatgctttgctgggtcatctagtagcaggcacccaaatc

SEQ ID NO: 579337 - DNA, 100 bp, Homo sapiens
tgccttcctgacactctacaacctcacacaggacatgaagtacctgtatagggcctgtaagaaagttactgtggcccatgtcctaaaaactggatatgtt

SEQ ID NO: 579338 - DNA, 75 bp, Homo sapiens
tgctgaactgggtgctttatataggggctggcagacatgacggcagagctacagaagaagctggagaagaggcgg

SEQ ID NO: 579339 - DNA, 75 bp, Homo sapiens
gggatctttccggatcaatccagatggcagccagtcagtggtggaggaggacaaagacactgattctaccaaaga

SEQ ID NO: 579340 - DNA, 98 bp, Homo sapiens
ttgaattgggaggggggcagctggagcctcaggcggcagcgcttctagtaactctgcagatgctgtacaagctaaaaacttcaaaagtgtttgaaaaa

SEQ ID NO: 579341 - DNA, 83 bp, Homo sapiens
cagcagcccccggggcaagagcaggagcccggcaccccccgccgacaaggagggaagctcttcgtgggcggtcttgactggag

SEQ ID NO: 579342 - DNA, 108 bp, Homo sapiens
ggtacctgttccgatgctgctactgctgtttctggtgtcttgacaaatacctgctccatctcaaccagtataccaaatactacattcaccgaattccaagaagccggg

SEQ ID NO: 579343 - DNA, 97 bp, Homo sapiens
ggagcggcaggaaggccactcacagggcttcaacaagctagctgagctgcaattctcattgcaagatcatcgcctccctggtttatagtagacagac

SEQ ID NO: 579344 - DNA, 100 bp, Homo sapiens
acgccttgcgtccccaggaaaagggccactcgcccgaagacatctaccagatggctctcaaccagttcatggaatgtctgatgattggtcgggatctcgt

SEQ ID NO: 579345 - DNA, 82 bp, Homo sapiens
tcagttggaagcagccgatccagcctgcggagcctgtggggcaggttttaacgtggaaactgtagaatataaaaatctaaaa

SEQ ID NO: 579346 - DNA, 90 bp, Homo sapiens
gagaggggtccctaggcccccttccaggctcttctgcccagcctcacaaaggtggtgttcccactgatgaagagcaggcgactgggttgg

SEQ ID NO: 579347 - DNA, 100 bp, Homo sapiens
acacagttgagttgcctctgattggaaaagcaggtgccgacgccaccgccgagcccatgatcctggaacagtacgtggtggtgtccaactataagaagca

SEQ ID NO: 579348 - DNA, 97 bp, Homo sapiens
aattcacatatgttctggatgtactggaattaaaaggatttaagagatcatggtgtgcatgttctaggaacccagtgacttgattgtaaaaatttac

SEQ ID NO: 579349 - DNA, 100 bp, Homo sapiens
acttcaagaatgaagccacggacccttgcgataacgaaggaggcccaacttcattcaataaggagcctgacggatttatcccagacggtagaacaaaagg

SEQ ID NO: 579350 - DNA, 75 bp, Homo sapiens
ggctgccctgtggcctcgctcctcggagggaatgctttgtgtggaaagcttcagtgtgagaatgtacaagagata

SEQ ID NO: 579351 - DNA, 76 bp, Homo sapiens
agaagaagctgaggatgaagaagatgctttccgcttggccctcatccagcttcagatttcttccatcaaatcagat

SEQ ID NO: 579352 - DNA, 82 bp, Homo sapiens
ccaaattgtcgccattaagaaagtcagaagacatgtcttcatctacatggcatctttccttacctctatgtgccatacgatg

SEQ ID NO: 579353 - DNA, 100 bp, Homo sapiens
gcaatggccgctcctatgtgtctgctccagtggctgttggataattatgaaacagcggaaggtgtgagtctccccagaagttctctttacaaccactacc

SEQ ID NO: 579354 - DNA, 82 bp, Homo sapiens
tatttcaaacgtttttatcttaataactcagtaatggaatatcaccccaggataataatatgtccagaaggcttcttggggg

SEQ ID NO: 579355 - DNA, 88 bp, Homo sapiens
gcctcgggtcggtgcaccgtccgggattttatccaccggcactgccaagatcagatgtgaaaggaccacccacccaccgtctgtcttg

SEQ ID NO: 579356 - DNA, 100 bp, Homo sapiens
ctggaggtgggcaaggtgatccagcaaggtcggcagagcaaggggcttacgcagaaggacctggccacgtaaaggcatgacttcctggcaccacagggaa

SEQ ID NO: 579357 - DNA, 100 bp, Homo sapiens
aaaccaagcactctagatgccctcaactatgctctccgctgtgtccacagcgttcaagattaaggtcaccgttgcaggcctggctggaaaagacccagta

SEQ ID NO: 579358 - DNA, 90 bp, Homo sapiens
cacctggaaatgtgaacaacactattgtcgtgccgcttttggaggatgggagaggccatggcaaagttgctctatatgcaatcagtgctg

SEQ ID NO: 579359 - DNA, 83 bp, Homo sapiens
ccgacctcgacgtcttgcctgtgtcccacttgttcgcggcctataggggatttgggagcagcttgtcttacacaaggacgaag

SEQ ID NO: 579360 - DNA, 100 bp, Homo sapiens
cacgtgcttccccttctccactggctgggatcccccgggctcggggcgcaggagatacaactcgtcaacgaatcaaattcagtgatgacagagtatgcaa

SEQ ID NO: 579361 - DNA, 90 bp, Homo sapiens
gctgctcatctcgctggccttcgcgcaggagatctcgattggttttgcactgattgcaaaaataaagtcctccgagcatacaatatcctt

SEQ ID NO: 579362 - DNA, 90 bp, Homo sapiens
cggaccagccatttcggtgtagaagtggcagcacggcaggtcggtgatgatgaacagtctacacagatggctgcaagttgggaagatgat

SEQ ID NO: 579363 - DNA, 90 bp, Homo sapiens
gggcaacaccccggcgtccctggaagctgggggagcggtgtgttttatggaccatgtgctgctatgtatgcctgaagaagtacttgaaat

SEQ ID NO: 579364 - DNA, 49 bp, Homo sapiens
cgtctggatcacggatgtaggaagtggtctcagcggcggtggcagccga

SEQ ID NO: 579365 - DNA, 90 bp, Homo sapiens
ggaaactaggtcgatggtcggcggcgcccggatgggcagctgaggacgctgtgcagagctgcaagtccgtatcactgaggctgtggccac

SEQ ID NO: 579366 - DNA, 100 bp, Homo sapiens
cccctgggagccgccagtgcgcctgtgctgaggaccaggtgttggacgcagacggcgtcacttgcttggacactacaacaacaggagtgcaaacttctct

SEQ ID NO: 579367 - DNA, 79 bp, Homo sapiens
ctcctccttcttcctcaactatctcgctgacacgcagaaatgactgctgtccatgcaggcaacataaacttcaagtggg

SEQ ID NO: 579368 - DNA, 110 bp, Homo sapiens
cgccgctcgaatacgatgactcggtgcagaggctgcaagtgctggagaacatcatggaaaacaacactcagtggctaatgaagcagcagttgcaagctcagcatctttct

SEQ ID NO: 579369 - DNA, 75 bp, Homo sapiens
gaggtggtacgaggggtcgtggccgagattgaagcactgaagtcattctcaaaatcagacctggtcaactggttc

SEQ ID NO: 579370 - DNA, 98 bp, Homo sapiens
tcgtggaagcgctggaaaaatttgggacaatatggggccacctacagatgctcctgcagtggacacagcagaacaagtctatatctcttccctggcac

SEQ ID NO: 579371 - DNA, 73 bp, Homo sapiens
gtggcgctgggaggtgacaacgtgactggcgtggactgcgtgaagggcatagctcaacgggacccaggtggag

SEQ ID NO: 579372 - DNA, 96 bp, Homo sapiens
ctcggcccgcgggggagccccgggagccgcacgctccagggcccacaacggcagtgtcctacatgtcggtgaaatgtgtggatgcccgtaagaacc

SEQ ID NO: 579373 - DNA, 100 bp, Homo sapiens
tgatggttttgcactatttacaaagatttaagtgccctgtatgctcaaaatttgtatcctcagatgaaatggatttgcatcttgtaatgtgtttaacaaa

SEQ ID NO: 579374 - DNA, 75 bp, Homo sapiens
ttatctcatattagtgcctgtgatggcatctttcatctaacacgtgcccttcgctttatgaggcggataattgga

SEQ ID NO: 579375 - DNA, 75 bp, Homo sapiens
gggcatcattaccctggacctggaaaccatttttatttggtacacacagaggggcagcttcaaaatgaagaaatt

SEQ ID NO: 579376 - DNA, 100 bp, Homo sapiens
gggagagcctggctgagctggagctggagctgtcggaagttgcacctggacttgatatgaaagtaaccatcagaaaatcaacagagatcttaaacttgcc

SEQ ID NO: 579377 - DNA, 50 bp, Homo sapiens
tgcagcgaagcacctctttacgtatgatctcgtgaaaccttgagagaaac

SEQ ID NO: 579378 - DNA, 82 bp, Homo sapiens
atgtctgcgagccaggattcccggcaacatgagtgagaatgaggaagaggaaatttctcagcaagaaggcagtggggactat

SEQ ID NO: 579379 - DNA, 83 bp, Homo sapiens
tggccgtgccctggggctgagccctcagctatgtttccagtgtcctctgggtgtttccaagagcaacaagaaacgaataaatc

SEQ ID NO: 579380 - DNA, 96 bp, Homo sapiens
ccgggacgcgcgtacgccctgctgcttctcctgcagagagagatcatcattgcctgaatttagctttgtgactgcaagagcaagaccagttcctgt

SEQ ID NO: 579381 - DNA, 74 bp, Homo sapiens
ctatgaacccagaggtcgtggaggtggccgtggaggcagaggtggcatgggggtgctggaaatgtaaacaagaa

SEQ ID NO: 579382 - DNA, 106 bp, Homo sapiens
ccacatcgctgacttggctggcaactctgaagtcatcctgccagtcccggttaaagccgagccagccaaaatagaagctttccgagcttcactttccaagctaggg

SEQ ID NO: 579383 - DNA, 98 bp, Homo sapiens
tgggctcgcggcgtctccggggaaagccgtggccccgagggcggatccgagttttagaaagagcgttttcgctacgtaaagcacattcgataaaggat

SEQ ID NO: 579384 - DNA, 90 bp, Homo sapiens
cctggatgggggaccacaagatcctcatcgacagatgaggacggggacttggttgccttttccagtgacgaggaattgacaatggccatg

SEQ ID NO: 579385 - DNA, 129 bp, Homo sapiens
tgcagatttgtttgtcatccttgtacagcaatctcctcctccactgccactacagggaagtgcatcacatgtcagattcgcttcaagctcagcttatcaatatgggtgttattcctaccttagtgaaat

SEQ ID NO: 579386 - DNA, 100 bp, Homo sapiens
cgtgggaagggacctcgaatgtgggaccccagcccctctccagctcgaaatcagaagagaaggtgttcttagatcagaagatgccattgtattaggtgac

SEQ ID NO: 579387 - DNA, 100 bp, Homo sapiens
ggacgtccaagctgctgcttccggatgactttaagatttggagtccaggaatgagactaagcatttatctgtaggaaaagatattattcaaaacactggt

SEQ ID NO: 579388 - DNA, 83 bp, Homo sapiens
accaggatagctgttgtttcagagaaagcattttgaaagcgaagcagaagccgtagaatcagcggcgagcctgttgaaagaac

SEQ ID NO: 579389 - DNA, 101 bp, Homo sapiens
atattcaagaagtgtaaaaaggggcgcctccttggcattataacaaaaaaagatatcctccggcatatggcccagacggcaaaccaagaccccgcttcaat

SEQ ID NO: 579390 - DNA, 74 bp, Homo sapiens
cagtaaactgcagaaggaatttaaacgtcataccctgtatgatgagattcgtcagtttcgcaaggcctgtgggg

SEQ ID NO: 579391 - DNA, 82 bp, Homo sapiens
gcgacaagccgctggcagccgcggatctcaccgccgctcaggccgtgttgccgcccgctgtgctatgagcagtcagagcgcc

SEQ ID NO: 579392 - DNA, 82 bp, Homo sapiens
aagcatgtgcgactgcaggagagggagcgctgacccagctgatccagctctatcatcgcttccaccgggtgctgtcccagcc

SEQ ID NO: 579393 - DNA, 75 bp, Homo sapiens
cgggatctcggctgtccttcctcccgaatgattacggacctgaagccaaagaacaagatgcgctagtggacagat

SEQ ID NO: 579394 - DNA, 100 bp, Homo sapiens
gctgcagcaaggagaggcggcggcggcctcggctgaagaaagaaggtgggagcggagagcgcaggcgtggtgggctcggtggtggccgtgggctggatcc

SEQ ID NO: 579395 - DNA, 99 bp, Homo sapiens
ctcctttaccttgtggaaatgatttcctcaggactccagattatctacaacactgatgagctaaagtctccagtgaatattgaattgctgaggattttg

SEQ ID NO: 579396 - DNA, 100 bp, Homo sapiens
aatgcgaacagacagacttgagtacaagttgtgcaaagtgaggaagattactgtgggagtgaagggaatccctcacctggtgactcatgatgctcgaacc

SEQ ID NO: 579397 - DNA, 112 bp, Homo sapiens
ctgccgtccttctccactttcgccagcccgtgccgcgagcgcggcctgcaggaggtgtggacactgccagcggctgcagccgacttggaatgacctgggagacaaatacaac

SEQ ID NO: 579398 - DNA, 100 bp, Homo sapiens
atatttttggcaggcgctggttggacagacaaaaaatgatttggtggtcagcttgcctgaggagctttttttctcaaggtgcaatgaaagccttccacac

SEQ ID NO: 579399 - DNA, 101 bp, Homo sapiens
gaaaattgcccttcgggaaatccgaatgctcaagccggaaatcactgtggaaaatcttcccagttatttcagacttcagaaaccattattgattttgttca

SEQ ID NO: 579400 - DNA, 85 bp, Homo sapiens
aaagggtcctggaaggaaagaatgaagaggccctgcaagggtgccaagtaccggggctccatccatgacttcccaggctttgacc

SEQ ID NO: 579401 - DNA, 90 bp, Homo sapiens
cgcgcggagcgccccttcgcgtcccctgcaccatgagctggggcaccgagctctggatgcctgggaaccactcacctccttctgtgccat

SEQ ID NO: 579402 - DNA, 100 bp, Homo sapiens
gggaccccgagcaccgggccctctgcgacctggggccctgggtgaagtgctccgccgcccttgcctccagattttgatgcatacgaaagagatggtacaa

SEQ ID NO: 579403 - DNA, 100 bp, Homo sapiens
tacttggtccagaacatccactagcctcactaaaggaccggaagctcaccaagctggagcggcagcggttcaaggaagaggctgagatgctgaaaggcct

SEQ ID NO: 579404 - DNA, 100 bp, Homo sapiens
tgtcgctcttgtgccctagcaccccgagaaccgtcagtttgagccagatgccaagacagacacggctttcaaggcattcttggatgcccagaacccgaag

SEQ ID NO: 579405 - DNA, 100 bp, Homo sapiens
catggtgtcactgaatccaggaggagacccttctacgcctggttacccaagtgtcgaaatgagccgtcagactgctacagcattacctaccggtacctcg

SEQ ID NO: 579406 - DNA, 90 bp, Homo sapiens
ccgaaaggaagtctttttgcactgggaagtcagattcccgatctgaatcaccagagccaggatggctgcggctctgcattcaatccaagt

SEQ ID NO: 579407 - DNA, 100 bp, Homo sapiens
ctctcctgggaccctccaagagcactagtgtctagaaggcactaaggtaagactttgaccccgacgcaggcttcagtgattgccgcggatcagaagcctg

SEQ ID NO: 579408 - DNA, 82 bp, Homo sapiens
aaaaactgcatcaagctacatggggagctctttagtcaagagacggtgatgaagtttgtgccgcggtacagcctcgtcctag

SEQ ID NO: 579409 - DNA, 75 bp, Homo sapiens
atgaagttgttcattgtttgtcaccacaaaaaggacaggcaagccaaattagagctgagagttgctgtagcaaaa

SEQ ID NO: 579410 - DNA, 83 bp, Homo sapiens
agtaccagagacagaagcagatggattcgtccttttagataaggaaattgagatttggagaagttaaataaccaagacttcac

SEQ ID NO: 579411 - DNA, 98 bp, Homo sapiens
ggcgaacgcggagagcacgccatgaaggcctcgggcacggtttttgtctgatgaaaatagtctggagtataaatattacaagctgaagttggcagaaa

SEQ ID NO: 579412 - DNA, 100 bp, Homo sapiens
tgaaaaggaactccctgacatccttggcatctggctattcttggtgcagggctgatgggagcaggcatcgcccaagtctccgtggataaggggctaaaga

SEQ ID NO: 579413 - DNA, 82 bp, Homo sapiens
caggcgacaagaggaggagtgcgcgtgttgggggcccccggagaggatttttagactctgaggagcagttggagctaatcca

SEQ ID NO: 579414 - DNA, 90 bp, Homo sapiens
cagtaattcgaagcagactgccatatcacagcctgcttcagggaacacattttctcatcacagtatggcacgtgtggttctcaaatatag

SEQ ID NO: 579415 - DNA, 75 bp, Homo sapiens
cggatggcttgtgctccctttacgaggcagcattatgtctctttgaagagaccaagggggaagagtaagacctac

SEQ ID NO: 579416 - DNA, 100 bp, Homo sapiens
tgggaaagaagttatgcttgttggaattggtgacaaaatcagaggcatactttataggagccaggtgagaatttcaaggattatcgacttcatattgcac

SEQ ID NO: 579417 - DNA, 75 bp, Homo sapiens
acttcttttttgagaaaggaaggaatatatcctgactgattctcccctttgaattggagatttactacattcagc

SEQ ID NO: 579418 - DNA, 97 bp, Homo sapiens
tcagcattggcggcggccccagcgcgtggcagccgtgcgccgccaagatgccatggacaatattaccaggcagaaccaattctacgatacccaagtc

SEQ ID NO: 579419 - DNA, 97 bp, Homo sapiens
cccggctcctccagggtcgtccccctctagacttctaccctcctggtgtgcatccctctgaaaccagcctggacaccaagtctgtgtcagaaggcca

SEQ ID NO: 579420 - DNA, 80 bp, Homo sapiens
ccagatcgtgcagatggccagtcagctgttcttgcaggaccaggataacaaagccattgacctttgccgattgtgttggg

SEQ ID NO: 579421 - DNA, 87 bp, Homo sapiens
ggcctgtccggcactgctgaaggggatgccaacagacagatcagcgacctcaaatttaaacttgcaaaatctgagcaagagataact

SEQ ID NO: 579422 - DNA, 86 bp, Homo sapiens
aatatcctcttataattaatgcaataaaacgcttccatctttatccagaggttttgcacactagggaccaagaagccctcggggac

SEQ ID NO: 579423 - DNA, 97 bp, Homo sapiens
aatggtctgcaccctcagccattgggatagctggccttggtggaggatttgaaataggaattgagaaaatgatgcatcctgttgccagcagtaatcc

SEQ ID NO: 579424 - DNA, 58 bp, Homo sapiens
ggaaggcgcctgaagaggacgaagattttgatccaaacaatatcttcaaggcattctt

SEQ ID NO: 579425 - DNA, 74 bp, Homo sapiens
gaccagacaaatcaaattagtggttttggtgcgctacaaggaggagtttgagaagaacaagggcaaaggtttca

SEQ ID NO: 579426 - DNA, 82 bp, Homo sapiens
aacggagataaattcccggaaccgcgattcggcgtgtcaggagtccaaaactacttacctggaagaccttccaccaccccct

SEQ ID NO: 579427 - DNA, 51 bp, Homo sapiens
acgcataccccaacggcctgcaggctaatctagacgaaatccagatgagtt

SEQ ID NO: 579428 - DNA, 100 bp, Homo sapiens
cggagccggagtcgcggacgccgcggggtctccgggacaggtcaaaatgcagatcttcgtgaaaacccttaccggcaagaccatcacccttgaggtggag

SEQ ID NO: 579429 - DNA, 110 bp, Homo sapiens
cccacctacctcaacagcctcaacaacgccatcctgcgtgccaacctgcccaagagcaagggcaacccggcggcttacgctgttccacattgattttggccactttctgg

SEQ ID NO: 579430 - DNA, 82 bp, Homo sapiens
agccctggaggacggctgggacagcgagcccttcaccctggtggagcgagacgcaagagtgagccatggagctacgtgtggg

SEQ ID NO: 579431 - DNA, 100 bp, Homo sapiens
atgactcccagagaggatggcatctagaaggtattggcaagcttgccagtgtacctgctggtggggctgtagccgtctctgctgccccaggctctgcagc

SEQ ID NO: 579432 - DNA, 100 bp, Homo sapiens
ccggtgcccagccggtgggtagagaggaaggctcagggtttggagcggccaccaaggccatgtgcatcggcctgcggtactggaagcctgagcggctgga

SEQ ID NO: 579433 - DNA, 75 bp, Homo sapiens
agttgggtttctgcgtccatgtgaagcatcctcataaggtgagcatctgcctggagtgtaacagcagcaaactgc

SEQ ID NO: 579434 - DNA, 80 bp, Homo sapiens
cacgggcctcgccgccagaacgggttccccactgaaggacttggtccagctgtctggcagggaggagagacagaagctct

SEQ ID NO: 579435 - DNA, 75 bp, Homo sapiens
caccgccatgcccaagaataaaggtatattgaagcaagtcaaagattacattaaacagtgtagcaaatgccagga

SEQ ID NO: 579436 - DNA, 96 bp, Homo sapiens
ggccgcagtgccacttcgacatcgagatcaaccgggagccggtggctcaagcatgttgatgatcaaggtagacaatattactacagtgcagacgga

SEQ ID NO: 579437 - DNA, 100 bp, Homo sapiens
atgatgaatttgatgaagaaagtgaggaagggaaagcagcaatttcacaactcaggattagaaatgatatttgccaaatttgatgaagtgcaaagttcag

SEQ ID NO: 579438 - DNA, 82 bp, Homo sapiens
atcctgctgggcttcgtccagatcgggaagggctttgtccagggatctgaaaccactttgcagtcgacatactcggatacca

SEQ ID NO: 579439 - DNA, 95 bp, Homo sapiens
gtctgatgtggcatctagactttggtttacatacaggaaaaactttccagccattggcgggtggtcctgggctccaggaaccactgcaacttggg

SEQ ID NO: 579440 - DNA, 75 bp, Homo sapiens
cttcgctgtggcatggcggacgaggggaagtcgtacagcgtacttggaccatgagactgtttcagccactttcat

SEQ ID NO: 579441 - DNA, 75 bp, Homo sapiens
ctagcccagaggatcggaatgacagatgccgtggacttccccttgtggatgatggtggctggaacacagttccca

SEQ ID NO: 579442 - DNA, 102 bp, Homo sapiens
agaaatagcaagaactgaggagcaccaggagacgcaactcatcggcaaaagactgttgaagtagagagcattttgcccagctcactcggattctttgctggc

SEQ ID NO: 579443 - DNA, 100 bp, Homo sapiens
ttctccagcgaagaagtagacatggcgagcgactccccggctcgaagcctggatgaaatagatctctcggctctgaggacaggggcaagtgtccgagtgg

SEQ ID NO: 579444 - DNA, 75 bp, Homo sapiens
tgatcaggatttttggcctaccctccaaagaaaaggctcagcacaaacactgggaactggcggggaccaaactgg

SEQ ID NO: 579445 - DNA, 100 bp, Homo sapiens
ctggaaacagtcagagccaccagccaatgatcttttcaatgctgcgaaagctgccaaaagtgacatgcagagctaccaatccatcctttaaggaagtatt

SEQ ID NO: 579446 - DNA, 100 bp, Homo sapiens
ttaatgaaccttgacccacaccaagtggccacagatgtctttaattccaaaaacctggccgttcaggcacaaaagaagatcttgggtaaaatggtgtcca

SEQ ID NO: 579447 - DNA, 75 bp, Homo sapiens
agaaaatggtgcctgctgaccttctggagttattggctagtaagaaaggtgaccccaaaggagccatgataaccc

SEQ ID NO: 579448 - DNA, 100 bp, Homo sapiens
aagggctacctcatgaaacggctggtgggctccaggacgcttcccgtggatttccacatcaaggcgtccgagctgggccacagcctgaacgagaacgtcc

SEQ ID NO: 579449 - DNA, 80 bp, Homo sapiens
ggtgccttgagagcttcaggggaaatggcttcagcgcagtatattactgcagacttaattcagtgcacaaatgagatgaa

SEQ ID NO: 579450 - DNA, 75 bp, Homo sapiens
atgaaccttgttcatgcaccccaggtacctggcaaagaattctgcaactttgttcagtgccagcgattatgaagt

SEQ ID NO: 579451 - DNA, 82 bp, Homo sapiens
caaccccaccacggagttccggtacaagctcctgcgggccggcggggttgggcccgaaggcatcctgcagaacggggctgtg

SEQ ID NO: 579452 - DNA, 75 bp, Homo sapiens
gaatgccacattcacctgggccaggagcgaccctcccacactgaatggagacgtctcccacaacctgctccgggc

SEQ ID NO: 579453 - DNA, 96 bp, Homo sapiens
gcgggaccggaagtgacgcagagaagtttccgggactggtactccaaagattcaggtttactcacgtcatccagcagagaatggaaagtcaaattt

SEQ ID NO: 579454 - DNA, 100 bp, Homo sapiens
cgccctaggatgcactgagatggtacatcaggataactgctcgtatcaggacttcagggccacaggtgctgccaagatgctccagggcacctgctccgtg

SEQ ID NO: 579455 - DNA, 83 bp, Homo sapiens
ctgatctacaagaaaatccacaagaacgcactttcctcccagacctcctgccccccgaggtctgcagtctcctgaacccagca

SEQ ID NO: 579456 - DNA, 74 bp, Homo sapiens
aacaatttgaacaacttgaacaatcacgacaggaaacatgcagttgaatgcagtaatagtggccttgtcttcaa

SEQ ID NO: 579457 - DNA, 98 bp, Homo sapiens
agactgtccgcctggagcgttacaaggccttctacattaccggtgaccaagaatatggcccaggtgaccaaagccctggacaaggccctgagcaccat

SEQ ID NO: 579458 - DNA, 83 bp, Homo sapiens
atccgctggtcgctgccggaaatggccagctcctgcttcaggtgcagaaatacagcgatttccagtgccagctgttgagccag

SEQ ID NO: 579459 - DNA, 98 bp, Homo sapiens
aattaccaactgctttcctttccctcagcacacagaggatgatgctgactttgatgaaggtggtcttcaagctgacagagaagctgacggaacagaag

SEQ ID NO: 579460 - DNA, 100 bp, Homo sapiens
ggaaagtcccaggatgactactgtgtcaagtcaaagagttagtggaagcagagttatttgcccgttatgaccgccttctcctccagtcctccttggacct

SEQ ID NO: 579461 - DNA, 91 bp, Homo sapiens
gacataactgaagacctgaccaataaggctcggggcagtaacaaatcctttctggcggcagctaatggcagcaggtatattgtgatgggcc

SEQ ID NO: 579462 - DNA, 50 bp, Homo sapiens
gtcatggggctctgtcgggaaggtgctaagtgtggtggctcacacctgta

SEQ ID NO: 579463 - DNA, 74 bp, Homo sapiens
aaaaggaagtattagaaatgagctgaagaccattcacaggtgctgctgttggaattccactcagtgaagatgag

SEQ ID NO: 579464 - DNA, 98 bp, Homo sapiens
ctaagagacccaggggaagacccaaaggcagcaaaaacaagagtccctctaaagcagctcaaaaggttgcagtattttacagagctagcccaaggcac

SEQ ID NO: 579465 - DNA, 100 bp, Homo sapiens
ccggtttctcccacatcgacctggcctccgtttctggaatccaagcagaattgctcacatttcccaactcctctcctggcctcagaagacagaagagaga

SEQ ID NO: 579466 - DNA, 75 bp, Homo sapiens
gttgctactgccccgaacccgcgctgcagggaacagcggggcaaacaggagaccaaattttgaggaaggtggacc

SEQ ID NO: 579467 - DNA, 90 bp, Homo sapiens
tgtgggtttaatccaacagaagaagttgaccagatataccatctggcatctccagcctcccctccaaactacatgtataatcctatcaag

SEQ ID NO: 579468 - DNA, 116 bp, Homo sapiens
cgacgatcctctagagcactgtgtgtctccccggacgcgagcccgctcccctgaacaatgcagatcttcgtgaagactctgactggtaagaccatcaccctcgaggttgagcccag

SEQ ID NO: 579469 - DNA, 100 bp, Homo sapiens
ctggtgcaaacagactcaagaggctcggagaaccagcttgggtcgtttatacgcaatgcagactggaatgaagatcgatagtaaaactcctgaatgtcgc

SEQ ID NO: 579470 - DNA, 83 bp, Homo sapiens
ctgacacctcagggacaaagagatctggacagaatcgccggacagtctatatcggcacaggatgaaaacctctcaaaaacaat

SEQ ID NO: 579471 - DNA, 50 bp, Homo sapiens
tggaccacaggccctcgttgcccagatggtgaaggccatgccgcctcctg

SEQ ID NO: 579472 - DNA, 100 bp, Homo sapiens
aggacaccgattatggattggcaacctggaccccaaaattaccgagtgcaggtggtaccattataacgaattttgagaggttggtaaaaggagattggaa

SEQ ID NO: 579473 - DNA, 75 bp, Homo sapiens
atcacttccttcagacagagtcggaatgtatcctgtcaggtataatgtcagtgaatggcaagaaagttcttcata

SEQ ID NO: 579474 - DNA, 83 bp, Homo sapiens
gccagagcgccggcaagagctcggtgctggagaacttcgtgggccggtatcatgatattagctggtttgacatcaagtcattt

SEQ ID NO: 579475 - DNA, 100 bp, Homo sapiens
agtacgacagcctcaaacaggagctggagcagctcaaagagatgacatagacactaggtttttacagcaattctctgatgaccttgatatggtagaacgc

SEQ ID NO: 579476 - DNA, 99 bp, Homo sapiens
gagctggtggcagagatggagcactacggccagtggtcaggcggccggcatgaggtgtcacgtcttgaaattttaaatgtcctcagtgactctctacct

SEQ ID NO: 579477 - DNA, 50 bp, Homo sapiens
cggcactctcgccaccaccgcgtgggtactccaaagattcaggtttactc

SEQ ID NO: 579478 - DNA, 100 bp, Homo sapiens
ttgagcatgacttccgttggactgatggcagcacactggtatatgttgtcggtggctatgatgggcaaaacagacttagcagcgtagaatgttatgattc

SEQ ID NO: 579479 - DNA, 96 bp, Homo sapiens
ccgggaccgggaccgccgccgccgccgccaccatggctgaagccgacgtagcttctctgaacagacgcatccagctggttgaggaagagttggatc

SEQ ID NO: 579480 - DNA, 90 bp, Homo sapiens
aagactcgatgaagatgcagcttttgaaaaggctttctgtgaagaattggaatcaatgatacaggagcaatttaagaaggggaagaaccc

SEQ ID NO: 579481 - DNA, 100 bp, Homo sapiens
ctcctcattgaagctatgcagtatttctttggcatcactgcagctagtaatttgccttctggattacctgagaagatggctaagctcccagtgattttag

SEQ ID NO: 579482 - DNA, 100 bp, Homo sapiens
cagatgttcctgtggaccccagtccaggtgtcatggagaaactccagctgggcccagagattctgcagcgggaaaatccaaggcttatttatgccaggct

SEQ ID NO: 579483 - DNA, 89 bp, Homo sapiens
agattgagctgctgatgtcagttaactctgagaagtcgtcctcttcagaaagtttaatgagtggtgttaagaataatgttggaagaggg

SEQ ID NO: 579484 - DNA, 82 bp, Homo sapiens
gacaagccgctggcagccgcggatctcaccgccgctcagggattctgtttcactgaggccatctatccgatttcaaggaagc

SEQ ID NO: 579485 - DNA, 100 bp, Homo sapiens
tcctcccggcgcggcggcgccagcccgcgcggggaccgccaccgagcgaggtgttggtaaatcatgcttattgctacagtttacagacaagaggtttcag

SEQ ID NO: 579486 - DNA, 80 bp, Homo sapiens
gtgggcccggacggcacaccctacgttaccgtgctcaagcttgaaggatgccaatgatgtaccaatccaatgtgaaatct

SEQ ID NO: 579487 - DNA, 100 bp, Homo sapiens
aaacagtagagatggcagcccacccctcccactggggactctgtcccatcacaggcttcccagctggcgtgtatgttgtaaagagagttcttcagcttca

SEQ ID NO: 579488 - DNA, 100 bp, Homo sapiens
tggacccggccgaggcggtgctgcaagagaaggcactcaagtttatgactcaccccacacagaccgcgtttctctccagtgtcgacctacacactcactg

SEQ ID NO: 579489 - DNA, 97 bp, Homo sapiens
agaagcatcaaacctggttcgaatgagaaaccagtcccttggacagtctgcaccttctcttactgctggcctgggagatgcacttatttacatggaa

SEQ ID NO: 579490 - DNA, 100 bp, Homo sapiens
gaggccgaggagaagctggaggagcggctgaagcgcgtgcgcatgtacaagattctgctgtactcattggatggccggttgttgtccacgtacagcgctt

SEQ ID NO: 579491 - DNA, 83 bp, Homo sapiens
agacagagtaagaagactcccgagcggagctggagtttgttcagatcatcatcatcgtggtggtgatgatggtgatggtggtg

SEQ ID NO: 579492 - DNA, 90 bp, Homo sapiens
gtgccaggtgtcccgttaacgtctctgttagttcagagctacctctgacttttgaggatgttgctatttatttctccgagcaagaatggc

SEQ ID NO: 579493 - DNA, 100 bp, Homo sapiens
tgggggtgtgcaaacccgagagaactggatgaacaagagaactgggcaacccatgatccacatctacctggacaaggaaacaggaaagcccaaaggcgat

SEQ ID NO: 579494 - DNA, 74 bp, Homo sapiens
cgcacgtgtaccctgggcgcagggctcttcagtgggtcatctgtgtgtcacagcctcagaagaccagcgagatg

SEQ ID NO: 579495 - DNA, 75 bp, Homo sapiens
cagatttacaaactggccaagaagggccttactccttcacagatcgggccttgctggaccaagtagagcactggc

SEQ ID NO: 579496 - DNA, 100 bp, Homo sapiens
ttggggagtacccagtggagcagatgacaaccatagcccagtgccaatgcatcttctgtactctgatctcccttgagtttagaaatctggctgagaaata

SEQ ID NO: 579497 - DNA, 75 bp, Homo sapiens
ccgagcccggctggacgccgctgcctcagtgatttgccttcaaggaaactggggagtcagaaaattgggaactca

SEQ ID NO: 579498 - DNA, 100 bp, Homo sapiens
ctgcagaacgtcccaattcttcaggccaagaacatctgctcaaattaatgaccatgggggatatgaagaccccagactttgatgacctcctggcagcatt

SEQ ID NO: 579499 - DNA, 100 bp, Homo sapiens
tggtggtctactctgatgtcaatcttgagggctagctctggcaggctgccctgagcacgctcaaccccaaccccacggacagctgtcccctctacctgaa

SEQ ID NO: 579500 - DNA, 83 bp, Homo sapiens
cagagaaggaaggatggcctctggacatccgagtggaatgtgtgaatgacaactactggtttgggagggacaaaagctgtgaa

SEQ ID NO: 579501 - DNA, 101 bp, Homo sapiens
tgggcctactcgcccgccaccctgcgctgccgccgctctgaggagttaaaggtctaaagacattgccctcacagagtgaaatgatggcagaaatatctaaa

SEQ ID NO: 579502 - DNA, 85 bp, Homo sapiens
ggaccgagcccccacggagcaggtttgttcggacagtgttaccattttctcaggaatttcaaagagataagcagcctaatgcaca

SEQ ID NO: 579503 - DNA, 82 bp, Homo sapiens
ccgcgcccggccggacccgggcccgaggccctgggctgcatcttgtacctgctgtgcttccggcagcacccttttgaggatg

SEQ ID NO: 579504 - DNA, 88 bp, Homo sapiens
tttattcaagatgacggaagcagatttaaggtgctgggcgtcctcttctttgccatagcctgcttcttatacaagcccctgtcggagt

SEQ ID NO: 579505 - DNA, 140 bp, Homo sapiens
ctgtctgggtgtcgcgggccggccccgcggggagcgcccccggcgcgatgcccttcaggaaaggtactccaaagattcaggtttactcacgtcatccagcagagaatggaaagtcaaatttcctgaattgctatgtgtct

SEQ ID NO: 579506 - DNA, 75 bp, Homo sapiens
accggcacccagacaggtggcgacggcagaggaagttatagatagtagtatgaaaaacttcaaagcattttttcg

SEQ ID NO: 579507 - DNA, 100 bp, Homo sapiens
cagcttcatatggacagatggacttcaaatgctgtttgtattccagagactagtgtccttgaatccgacccctactttgggtttgaagaagcaaagagga

SEQ ID NO: 579508 - DNA, 82 bp, Homo sapiens
ggcttacgcagaaggacctggccacgagagcgcctgctcgctgtgcccccgggttatgacgacccccaataaaggaaacaag

SEQ ID NO: 579509 - DNA, 90 bp, Homo sapiens
cccggtagttgctccaaaacctaagtacaacccatacaaacaacctggaggtgagggttagaggatgcattgggctcagtgaaaattcat

SEQ ID NO: 579510 - DNA, 75 bp, Homo sapiens
tctaacagaatcctgtcggagttgtagccatgccctaggtttaactatagatcaacacatcatcttgcatctcat

SEQ ID NO: 579511 - DNA, 100 bp, Homo sapiens
cccagcagaatttgtatagagatgtgatgttggagaactacagaaacctggtctccctaggctgcagccacaggtccgcacggaaaaccaggagctccaa

SEQ ID NO: 579512 - DNA, 100 bp, Homo sapiens
cccatatgggggttctggagagcggggtgtgggaactgaagcgctgcggcatggcgcgcgcctgcctccaggccgtcaagtacctcatgttcgccttcaa

SEQ ID NO: 579513 - DNA, 75 bp, Homo sapiens
aggattccaagtaactcttatttgtctgagggaaaaggccataccaatgctggagatgcaatatatgaggtggtg

SEQ ID NO: 579514 - DNA, 74 bp, Homo sapiens
gcagagccgcctggtggccacatctcctggcagctccctcccagccatgtttcctgagagactgggagttgcag

SEQ ID NO: 579515 - DNA, 82 bp, Homo sapiens
gcagccactcaggactgtcaaagcattttgaaagcgaagcagaagccgtagaatcagcggcgagcctgttgaaagaacccac

SEQ ID NO: 579516 - DNA, 100 bp, Homo sapiens
ctcggcctggccgtcctcagcctggtcatcagccagggggctgacgcccgagggcaacatccttcgagaccggttcaagagcttccagaggaggaatatg

SEQ ID NO: 579517 - DNA, 101 bp, Homo sapiens
ggctttgaggtgcttgtcggtctggactgatgaaaatccatatgaatggtgaggttctggagaattgatgaggattatccagtgcaagttgcacctttgag

SEQ ID NO: 579518 - DNA, 51 bp, Homo sapiens
gacaaacagagatatcatttgtcaggttgcaacagatttgaagtgacacta

SEQ ID NO: 579519 - DNA, 100 bp, Homo sapiens
gaggtggaggccgtcaaagtgcacagcttccccacactcaagttctttcctgccagtgccgacaggacggtgatggcccgctccctctccccacccccgg

SEQ ID NO: 579520 - DNA, 83 bp, Homo sapiens
tcgcttctttcggttctacctgggagaatccaccgccatccgccaccatgtttcactgttacatgccttgaagtgatgaggag

SEQ ID NO: 579521 - DNA, 101 bp, Homo sapiens
cttgaaaccggcactgggacttctcgatctctggaggcacctgttgcaagtgacagcttagaccatgctcagcctccaagcagccttgtcatcgacaaaga

SEQ ID NO: 579522 - DNA, 75 bp, Homo sapiens
gctccaaccatgggaggccgcgtctttctcggaacttggaaaatcgtgggaagaagttcagttggaagatgatcg

SEQ ID NO: 579523 - DNA, 100 bp, Homo sapiens
tttggaggaggggtgtttctggccacgtgcttcaacgctctgctgcccgctgtgagggaaaagatcttcagtcgtgctggtgaagcctgcaaaaaggtga

SEQ ID NO: 579524 - DNA, 100 bp, Homo sapiens
agtcttcggagcgaccccggcaggtcagttcctggcatggtgccctgactgcttggtgagcaagacgaaagaaagtcaagaaatttccattccgcccatt

SEQ ID NO: 579525 - DNA, 98 bp, Homo sapiens
gaagcaactgccagtcttggaacctggagacaagcccaggaaagcaacatgacgcccactattgcttggttctacttcctttatcccgattggccgtc

SEQ ID NO: 579526 - DNA, 100 bp, Homo sapiens
agctttgcaaaggcagtttgaatatgaagatcctattgtgaggggtggcaaacagctgctccacagcccattctttaagttgatccttcctgagtgcatg

SEQ ID NO: 579527 - DNA, 100 bp, Homo sapiens
caggtctctgtcgagcagcggacgccggtctctgttccgcaggatgtacctgatggagggcagctacaacaaagtgttcctggccaagggtaacatcccc

SEQ ID NO: 579528 - DNA, 100 bp, Homo sapiens
gccgggcagacgctgatgccacggggagaggccttagaaggagcacaggaaagtcccaggtaagaaccaggaggcacgcggacctccagtggccggctcc

SEQ ID NO: 579529 - DNA, 82 bp, Homo sapiens
ccacagtgggattaaaaagaccactgaggagcaggtgcaggtgagcatgggtttatgcgtcttaggcattattgtgatggcg

SEQ ID NO: 579530 - DNA, 98 bp, Homo sapiens
agggggcagccgcctcatcggccaccacggcgctgaggacgccacgacctgcctagagctggaacgttacctccagagcgagccctgctatgtttcag

SEQ ID NO: 579531 - DNA, 98 bp, Homo sapiens
cgtcgacatgagtgatgtggaggaaaacaacttcgagggcagagtgtggacactgccagcggctgcagccgacttggaatgacctgggagacaaatac

SEQ ID NO: 579532 - DNA, 100 bp, Homo sapiens
gtcctgggcaggggccctgcaccacagctctccaggacataagaccagtgtccctggccagtgtccttccacctgtccacaagcatggggaacatcttcg

SEQ ID NO: 579533 - DNA, 100 bp, Homo sapiens
tggccatgctcatgattggggtctttggctgcaccctccaggctttaccctctgaacttctgatcgaaggtcatccctctccagcttgagtggatcaaag

SEQ ID NO: 579534 - DNA, 100 bp, Homo sapiens
tcacatacgtcaaggaaattgaggttgcctgtggctggagaaaggaatgtgctcatcaccagtgccctcccttacgtcaacaatgtcccccaccttggga

SEQ ID NO: 579535 - DNA, 75 bp, Homo sapiens
agtttgctgagagaaaggagacgacagcgaaaaaatagggaatctttccagatcccagattacaggaatgcagta

SEQ ID NO: 579536 - DNA, 100 bp, Homo sapiens
cggggccgggacttgggcgcttacctgcgacagcgggtagcacaggcctttcgggagggagagaatacccagtagagacaagttttcaccgtgttagcca

SEQ ID NO: 579537 - DNA, 87 bp, Homo sapiens
gcgagcaaggagcgcggaatcggggagcgtccggagctagctggatcctctaggcagccccgtgctgatcccattccaatatgtagc

SEQ ID NO: 579538 - DNA, 88 bp, Homo sapiens
gccgcgcctggtgatcggctccttaccagctcacctctcaccgcgcatgtttggagttgagggagaagacttgcaacaagaagatgga

SEQ ID NO: 579539 - DNA, 100 bp, Homo sapiens
gtctggagcaaggcaaagagccctggaatatggagagacatgagatggtggccaaacccccaggcttcctgtttgatgaagatagcaacggaaaactcaa

SEQ ID NO: 579540 - DNA, 75 bp, Homo sapiens
atgtccgcaccggcaccatcctgctcggcgtctggtatctggccttccggagcagtactacagcctcacctggtt

SEQ ID NO: 579541 - DNA, 100 bp, Homo sapiens
gaaaaggtgtacttgcaagaaacctcaggacttgagtaacagcaacatgcggtcttgcgagtggctggttccctgcagaagagcacagaagtgatgaagg

SEQ ID NO: 579542 - DNA, 100 bp, Homo sapiens
aatgatttttatcctgaagaggatgggaagacaaaagggtcttgggcgtctttggtactggcttttttaggggtctgcctggggattacccttgctgtgg

SEQ ID NO: 579543 - DNA, 80 bp, Homo sapiens
tgcccccccttccccacgcaaccccagatccatttacactttacaaaacctgtttccctccaatcttgtggttgcagctt

SEQ ID NO: 579544 - DNA, 75 bp, Homo sapiens
ttcagccgcctccttgacagtcttcggcaggaagctgtctgtgatcctggaaacatacgtgtgactgaagctccc

SEQ ID NO: 579545 - DNA, 98 bp, Homo sapiens
tcaaccagctgacgccggagcagctcctaacccaggaatatatgcagaacatgtcctgcggcccaagaatcttggacttgcacatcagaggcaacagc

SEQ ID NO: 579546 - DNA, 100 bp, Homo sapiens
tatgaggaaaagtgtgaaattgaggaatcccaattgaagtttttgagcagccgctcttctaaaacattcaaaccaaagaagaatatccctgaaggatctc

SEQ ID NO: 579547 - DNA, 75 bp, Homo sapiens
ccatgtcggtgggcgagctctacagccagggagagtcccgtattctcagagtaaaagttgtttctggaattgatc

SEQ ID NO: 579548 - DNA, 82 bp, Homo sapiens
ggtttttaatgaccacaacaagcaagcatgcagcttactgcttgaaaggccaatttaacctttgacccagctgctctactgc

SEQ ID NO: 579549 - DNA, 90 bp, Homo sapiens
ccctgtatgagctgctgacgcactgtgactccagccagagcccccccacggtccagtggctcctggacaactatgagacggctgagggcg

SEQ ID NO: 579550 - DNA, 75 bp, Homo sapiens
agagcgccggcaagagctcggtgctggagaacttcgtgggccgagacacctatggctgccgatgaaggctcagca

SEQ ID NO: 579551 - DNA, 75 bp, Homo sapiens
aagatgaagcaaggcccaatgacccaggcgtcctctttgatacgcaacctacggctctctgagtccttgaaaaag

SEQ ID NO: 579552 - DNA, 100 bp, Homo sapiens
caggcgcttaagtatttccacaagcgtttcccggagcacagggcagcggagatccgccaaatgatttctcagtatcactaaaagcacaagggaaaaacaa

SEQ ID NO: 579553 - DNA, 100 bp, Homo sapiens
ggggcaggctgtagactacgagggctccagaacccaggaaggaccagcattagcagtacagggcccagccatgtttacagagccagcaaatgataccagt

SEQ ID NO: 579554 - DNA, 151 bp, Homo sapiens
ggggcgtgaacgctctggggctcagccaggcctgcgcgggcccgaggccggaggaacccggactccggcgtagcgacctttttggcatctaacatggtgaagaaaggagtaaagaagagaacaaagtaactcctgggggagcgaagagcgc

SEQ ID NO: 579555 - DNA, 90 bp, Homo sapiens
tggcgtcccgcggccggcgtccggagcatggcggacccccagagctgagttttgccgaattgacaagcccctgtgtcacagtgaggatga

SEQ ID NO: 579556 - DNA, 99 bp, Homo sapiens
ccatgcaggtctttgctaaacttggcacagttaagtgggcagaccaacatccacctcagcaaaaacttcttcctgacgaatcgcgccagggagcgctca

SEQ ID NO: 579557 - DNA, 134 bp, Homo sapiens
gctgtaattgctgaacttaaaaagcagtctaaacctgtgaccacccctgaagaaattgcacaggttcaaaccttgtactactcagctgatcacaagctgcttgatgggaacctactagatggacaggctgaggt

SEQ ID NO: 579558 - DNA, 97 bp, Homo sapiens
ggatgacaaaaaagccttcataggcctcccagaagttcctgccgaatcgtcttcgtcacccccggggtccgaggtagcctcccttacacagcctgag

SEQ ID NO: 579559 - DNA, 100 bp, Homo sapiens
ttcgacatcacggaagggaacctgcgggactcttttgacatcatcaagcgttacatggacggcatgaccgtggtaagactttgaccccgacgcaggcttc

SEQ ID NO: 579560 - DNA, 80 bp, Homo sapiens
ggacgaccaggatgtggagctgggcattacagcagaagttctggtggtgacctctttcgatgaactgcagagaagggcct

SEQ ID NO: 579561 - DNA, 96 bp, Homo sapiens
gtggacaatttgtcgtcaccacaaatccagtgaacaacgatggcattttgaaaacagcaaaggccataggaaaaggatacagagtagagtttcatg

SEQ ID NO: 579562 - DNA, 100 bp, Homo sapiens
attcagagcctgggagacagcaagaccattcccggaagcagacaatgatccaacaggggaagcagcagctaatacccagcagacacttactttctatgag

SEQ ID NO: 579563 - DNA, 100 bp, Homo sapiens
gcctagaggctggccagtcactagtcatttctgcttccatcattgtcttcaacctggtagagttggaagggaggaaagattcccatccgatggactgccc

SEQ ID NO: 579564 - DNA, 95 bp, Homo sapiens
ccccctggagggggcagtcccgggagaacctgcggcggccggagcggtgaagctttgttctaagaatatttgtttcatctagtttatgagtccaa

SEQ ID NO: 579565 - DNA, 74 bp, Homo sapiens
ccgagatgccgggggagcggggccttccacaccccctccgtgggtgtgtggtcaatgtgacggtggactacatt

SEQ ID NO: 579566 - DNA, 76 bp, Homo sapiens
cagggtgaaccacagcaagttcatggtcacggagaaggcagcctacataggctgcctgctgtttcccggggagatc

SEQ ID NO: 579567 - DNA, 100 bp, Homo sapiens
agctagccgggagttacaccgccaccgccaggtgtcagttgtacccgaggcgttctcagcagcagcaagtacctgtggtggatttccaggctgaactgag

SEQ ID NO: 579568 - DNA, 90 bp, Homo sapiens
ataatatgctttctgatgatgcccgtctcttcacagaggggctgggaaccgacgaggactctctcattgagatcatctgctccagaacca

SEQ ID NO: 579569 - DNA, 90 bp, Homo sapiens
cagcaaccaccacactgatcagtcagcagctgtcaacattgagatgggacacgagtgggtttggctggattctgaacaagatcatcccaa

SEQ ID NO: 579570 - DNA, 98 bp, Homo sapiens
atccgccacttccgcgagcccatccgtctcaagactgtgaaaccagggcccacatgccttggccccacataccaacccaggctgctgtgacagcccat

SEQ ID NO: 579571 - DNA, 82 bp, Homo sapiens
gtcatcggcttccgcatgaaggacctgagggatgcataccaggtgacagacaacctggatggcttcccagttacgactcttc

SEQ ID NO: 579572 - DNA, 83 bp, Homo sapiens
cggaaaccggtagcgcttgcagcatggtgtgaacccacatccctgcccccagggccacctgcaggacgccgacacctacccct

SEQ ID NO: 579573 - DNA, 96 bp, Homo sapiens
tggccctataacactcttctccaaaaggacctgccagagactgggagtgttgactgctgcaaggaccaaggaaagaggttggcctcagcagcaatg

SEQ ID NO: 579574 - DNA, 88 bp, Homo sapiens
aggccttccagtatttcatgtacccatcagccacaccccgtcttactgtgatgagtcgctgtttggctcccgatctgaaggcgccagc

SEQ ID NO: 579575 - DNA, 100 bp, Homo sapiens
ccgcctttgatcgtcttcctcttcagccatccaggtaaactgaaggaccctgcgaactttcagtatcctgccgagtctgttctggcttataaagaaggcc

SEQ ID NO: 579576 - DNA, 83 bp, Homo sapiens
cacgcggcgccagttctccggcgggaaggaaaaccgcgcagagagacggttgatgatgaagcgccggccgtgtaaatgaagat

SEQ ID NO: 579577 - DNA, 75 bp, Homo sapiens
tcctgctgccctcaaggtcgtgcgtctgaagcctacaagaaaggtgttccaggtgcgaaaggtgcaaggcaccaa

SEQ ID NO: 579578 - DNA, 98 bp, Homo sapiens
ttgttcggagatcacagtggatgctcgagcagcttcgccaggttaatggtatcgatcctaatgggacttcctagcatgggctgttgtgctggagagaa

SEQ ID NO: 579579 - DNA, 100 bp, Homo sapiens
tttctccagtgctcatcttgttctcgagttttctctgccatgttgctattgcaggacggatctgcagatctccaggggagcccaccagcctagtcaacat

SEQ ID NO: 579580 - DNA, 83 bp, Homo sapiens
cccagcccccagaaaggattgtgacatatcgttggacccagaattgaggtcaacgaagtgacggtggaacagctggtgcagca

SEQ ID NO: 579581 - DNA, 75 bp, Homo sapiens
ggagtcggaggagccgcgggcggcgcggcccagctcgttccagaccacaccaccccagagccaagtgcaccgagg

SEQ ID NO: 579582 - DNA, 95 bp, Homo sapiens
atcacccaaaaccaaggggcagaaagcagaagatgtccctgtgaggattaaccttctgataacttaagagagattctccaaaatgtggccagatt

SEQ ID NO: 579583 - DNA, 98 bp, Homo sapiens
tggctgtcatcggcttcttcaagaagtttgcctgcaatggtactgtaattgagcatccggaatatggagaagtaattcagctacagggtgaccaacgc

SEQ ID NO: 579584 - DNA, 90 bp, Homo sapiens
gaagaggaagaaggtggggaggaagaggaggaggaagaagaaggtgatgggcgaggaggcttccgaggaggcagaggaggaggaggtgac

SEQ ID NO: 579585 - DNA, 75 bp, Homo sapiens
ctgagctgggttttccttgttgctattataaaagcgtgagtgcatctccatccacgttggccaggctggtgtcca

SEQ ID NO: 579586 - DNA, 100 bp, Homo sapiens
gaggagaacgtcccgctggatctgacccgaggaactgcaagcacatgttgaccagataactgaaatggcagcagtaatgaggaaagccattgaaattgac

SEQ ID NO: 579587 - DNA, 90 bp, Homo sapiens
gtaaaccacagactacgagggagtttgacagctattaaaaccagggctccacagttaggagggttccccactgaaggacttggtccagct

SEQ ID NO: 579588 - DNA, 75 bp, Homo sapiens
gggatggctataatgggtatggaggaggacctggagctatcatggtgaacttacttcagattgtgcgggaccact

SEQ ID NO: 579589 - DNA, 90 bp, Homo sapiens
tccatgcgcagtcatgagtcgcttcaagtttatcgatgccatggacaatattaccaggcagaaccaattctacgatacccaagtcatcaa

SEQ ID NO: 579590 - DNA, 75 bp, Homo sapiens
taatgttgacctcaagttgaaggctgatggtgagaccattctaaaaggcctccagtccattttccaggagcaggg

SEQ ID NO: 579591 - DNA, 100 bp, Homo sapiens
tttcaagctgccaaggtggagagagggattacagaaaggagaacaccttatttcaggcacaacgtgtttgattgctctgctatcagataaagacctcact

SEQ ID NO: 579592 - DNA, 74 bp, Homo sapiens
cagccgcgctgcgccttccacactgtgcgctgaaagcaaaatgaactctctgacacagcaggaagggaaattaa

SEQ ID NO: 579593 - DNA, 100 bp, Homo sapiens
ctgccgcgacacatccgcacccacacgggcgagaagccctacgagtgcaacatctgcaaggtccgcttcaccagatagcctgggctggaagctcttctac

SEQ ID NO: 579594 - DNA, 75 bp, Homo sapiens
tgcttcctgctgctggcactggtccttgtcccctcagggatgcttgaagatggaaagaaatttgattcctcccgg

SEQ ID NO: 579595 - DNA, 100 bp, Homo sapiens
ctgggggtcatcgacagctgcaaggaggccgtcaccttcaaggccgtcagacaaggtgtcatggagaaactccagctgggcccagagattctgcagcggg

SEQ ID NO: 579596 - DNA, 90 bp, Homo sapiens
atagggaaacctgggggctccctggacaactccgagcaggttcgtgctggccgtgggcagcgccgtctttgatgccatgttcaacggggg

SEQ ID NO: 579597 - DNA, 88 bp, Homo sapiens
atgttggccatcagtggtcacctagacagcgacgatgatagactccgtgggaaggaggcttgtttaaactacggatgcttttcaaaga

SEQ ID NO: 579598 - DNA, 82 bp, Homo sapiens
gggacgagttcgtcatccgtgctgaggacatcccttccctcaagggtttccaggcctgaggtgcccgccctggccccaggag

SEQ ID NO: 579599 - DNA, 83 bp, Homo sapiens
cagatggcggatgccctgcagtacctgcagaaggtctctggagacatcttcagcagagtccagtgtcgtgctgctgcaggagc

SEQ ID NO: 579600 - DNA, 83 bp, Homo sapiens
tgcaagtacctgccagagaacgacctgaagaaactatgttccaacttcctgtcaacaatcttggcagtttaagaaaagcccgg

SEQ ID NO: 579601 - DNA, 74 bp, Homo sapiens
ctgagcggcacggctacatcaagggcatcgtcaaggacatcaaccaggaagtttataatttcctggcaactgca

SEQ ID NO: 579602 - DNA, 51 bp, Homo sapiens
gaggaggacagcagcaactcggaggattctgaaagtcaagaagacatcatc

SEQ ID NO: 579603 - DNA, 74 bp, Homo sapiens
cggcagggagtgcatcaaaggtgtgaacacaggcataaaccttccactcttgaacaaagcagctgctttttaaa

SEQ ID NO: 579604 - DNA, 100 bp, Homo sapiens
ggacactctgaagattattgagcggctggaccacctggagaatgtcatcaagcagcacattcaagagacacctatggctgccgatgaaggctcagcagag

SEQ ID NO: 579605 - DNA, 75 bp, Homo sapiens
cgggagtgatgtctgtggggccgccggcggcccggcttcaggttaacacagaaatctgcctcctgggccatgccg

SEQ ID NO: 579606 - DNA, 75 bp, Homo sapiens
gattgtatatacatacttcttttctgcctcagaagaagtggttcctgagtcctacaagattatcaattttgcccc

SEQ ID NO: 579607 - DNA, 83 bp, Homo sapiens
gaaaaaatgcccagcgcggcgcggggctgcggagtcgtccggagccgctgcgcggtttttagaacttcagccataaaaatggg

SEQ ID NO: 579608 - DNA, 76 bp, Homo sapiens
ggccaggccgtgcgccggcctttggtcgcctccgtgggcctcaatgtcttcccacacaggttgagagaggagggga

SEQ ID NO: 579609 - DNA, 87 bp, Homo sapiens
ccaggacaacaaagttgttattggatttgttcccttagcagaaattatgattgagtctgtttctcagccattggaaaaccatggtgc

SEQ ID NO: 579610 - DNA, 82 bp, Homo sapiens
gtggggaaggtagatgtcattcaagaaccagagaacgtttgtctgcctgatgagagccacttgggttaagaaactacctgtg

SEQ ID NO: 579611 - DNA, 90 bp, Homo sapiens
agatcagagtcacgcccttggctctggattaatcgaattacagctgctagccaggaacatggactgaagtatccagcgctcattgggaat

SEQ ID NO: 579612 - DNA, 100 bp, Homo sapiens
ccatgggacgtggggtccaccggtacaggtgtcatggagaaactccagctgggcccagagattctgcagcgggaaaatccaaggcttatttatgccaggc

SEQ ID NO: 579613 - DNA, 83 bp, Homo sapiens
gtaccaaggattggagcacagaggctcagaagcaagtccaggaagacctggaagcgctcatagcccatttccagacactcgat

SEQ ID NO: 579614 - DNA, 76 bp, Homo sapiens
gtccccagggaatgccacagcatcctccagcacctcagacctacctggtggttctgtgccttcccctactctcttc

SEQ ID NO: 579615 - DNA, 100 bp, Homo sapiens
gctgcaggagatgctggctaacaccgtggagaaatcagaagggaccccagttattaaagcttttggcatcttgaagcgagcggccgctgaagtaaaccag

SEQ ID NO: 579616 - DNA, 83 bp, Homo sapiens
gctggggcggcaccggatcaccaagacggaggatgggaaggccattgtgactatgtggtgattacagttgtcttactactgag

SEQ ID NO: 579617 - DNA, 73 bp, Homo sapiens
tgagtgccgtagccgagccggggctggagcgcgcggacagtggtgattatcctcttaccatgcctggacctca

SEQ ID NO: 579618 - DNA, 100 bp, Homo sapiens
cgaggacgctccccagccaggggaacatggcagtgcctgtgagcccccaggctccgctcttgccagagggacaggagccatggctcagaaaatggactgt

SEQ ID NO: 579619 - DNA, 98 bp, Homo sapiens
aacactgcagaaaggctatctgaagaaaagtagaaggaaaaacagaacgttgcaaactctggaaaaaaacttggagcctgtgtggtgcccctatctcc

SEQ ID NO: 579620 - DNA, 100 bp, Homo sapiens
catcggggtcggggatctgcacagcgggacggcaagggaagaagcattgcatgcatttattcagccagagattctggatggcccaaatcagtatttttgt

SEQ ID NO: 579621 - DNA, 97 bp, Homo sapiens
gtttgtggcagacagacttatgctggaactgggttttagcaaggggcatggtctagtggcccagtcaggacgcggaaacactccctggaggttctga

SEQ ID NO: 579622 - DNA, 90 bp, Homo sapiens
taggcagtatgaaacaattggcttggacttcacaactcaggaatttcaagtgtgctatccctatgtgtattgattatatcttcatcctgc

SEQ ID NO: 579623 - DNA, 75 bp, Homo sapiens
tgtatatgatcatgcgcaccttggccatgcttgtgctacaaatgggaagtcagagaccatcacagctgatgtcaa

SEQ ID NO: 579624 - DNA, 98 bp, Homo sapiens
gaaatttggagtgtgcgtgcgcgccgagcgtgtcaacagcatctccaccctggagcctgtgagccggtgccagcgcctgagtgagctgtacctgcgga

SEQ ID NO: 579625 - DNA, 75 bp, Homo sapiens
cagaaacccctcctcccctagcttcactcaatgttagtaaggtctatgttaacaatgaatgggcaaccagtgttg

SEQ ID NO: 579626 - DNA, 98 bp, Homo sapiens
tagcctacaggatggcttggccttgcacataaggtggaaaaggattattcatacctgaaggagatatgtgatcaccaagccgaacagctgagcagaac

SEQ ID NO: 579627 - DNA, 100 bp, Homo sapiens
tggtgcctcgctcttctctgctctggccacggtgctgtgtgaggccgggggtcctcgatgggcttcctggaatattggtgtgtttatttgcatcagatgt

SEQ ID NO: 579628 - DNA, 100 bp, Homo sapiens
cgcgtggagctgagtgacgtacagaactggcctatgatctggatgtggatgatgcgcctggaaacagtcagcaggcaactccgaaggacaacgagataag

SEQ ID NO: 579629 - DNA, 80 bp, Homo sapiens
ctggactcgatcatcgggcgcctgctggaagatacttgccagaactaatacagctgatgaaatacctgaccttttctgct

SEQ ID NO: 579630 - DNA, 75 bp, Homo sapiens
attttggctgctgcaggagccattttaggatattagaaatggctactccccagtcaattttcatctttgcaatct

SEQ ID NO: 579631 - DNA, 100 bp, Homo sapiens
cattgacctgaagcgaggtggctcctcagatgaccggcaaattgtggacactccaccgcatgtagcagctgggctgaagtgctaaagaagctgcgcggga

SEQ ID NO: 579632 - DNA, 100 bp, Homo sapiens
gaagagaagctttactggtgttccagccctaagatattgatgatgttaagaagttcaaaccgggttacctggaagctactcttaattggtttagattata

SEQ ID NO: 579633 - DNA, 75 bp, Homo sapiens
aaaccagagtggctcatggcaccaactctcacgagttcctccgtgtcacaaagcagtacctgccccacgtggcgc

SEQ ID NO: 579634 - DNA, 96 bp, Homo sapiens
caagaagatctgctcccattcggccccggaacagcaggcgcgcacgcgggaagtgacacagccctagaggaggcagtagcagaggtgctagaccat

SEQ ID NO: 579635 - DNA, 75 bp, Homo sapiens
tgtctgggaccttctccctgcctggacccctactattgcaacaagtgccctctggtggtcagaagatgctgtgct

SEQ ID NO: 579636 - DNA, 90 bp, Homo sapiens
gcccttgccagtgcctgggccgctgggagccgttattggctgccgttaaggaccgttacgtttcccgggatccggatcacctgtttgaaa

SEQ ID NO: 579637 - DNA, 101 bp, Homo sapiens
agcaggccgcttggttctgacccagctgaggtactccaaagattcaggtttactcacgtcatccagcagagaatggaaagtcaaatttcctgaattgctat

SEQ ID NO: 579638 - DNA, 90 bp, Homo sapiens
gcttgaccatctcacaactgctcgcgtgacgaccgcattcgtggcaggtgccagctattcaacagaaaagaacggtggcttttctaaacc

SEQ ID NO: 579639 - DNA, 89 bp, Homo sapiens
aacttatgcaagaaactgttgaattagacccgtttcctatagatgagaaaccatacaagctgtggacgaaaatgatgatgacgatgact

SEQ ID NO: 579640 - DNA, 130 bp, Homo sapiens
ccatgaaggtctccgcggcagccctcgctgtcatcctcattgctactgccctctgcgctcctgcatctgcctccccatagcaagctataccagagaatcagatagcaagccctccctcagaggccaaggg

SEQ ID NO: 579641 - DNA, 100 bp, Homo sapiens
ctggcatggagtttcatttcacgacaatgacatattctccggtcaagtgaacaagtttccaggaccataattatggtgctcgtcctcctccgacacctcc

SEQ ID NO: 579642 - DNA, 75 bp, Homo sapiens
atattcaccaagcgcttcgctacaagtatcgtcagtgaagcaggagcatcaatctacagtgtcagccctgaagct

SEQ ID NO: 579643 - DNA, 90 bp, Homo sapiens
aagctttttccttgaagaccataagcactagtgatccagccgaagtactcgtcaaaaatagccagacagtactacgcttacctcaccgac

SEQ ID NO: 579644 - DNA, 100 bp, Homo sapiens
aagacggtggatggtcagaaagatgaaaactaagaagtaaatcaatgctaaatgaagaatctgtactttgtggagccgccaccaaaatgcagattttcgt

SEQ ID NO: 579645 - DNA, 83 bp, Homo sapiens
catctggtgacttccgcaagctgatggttgccctggcaaaggaggcaagtgaggcctatctggttggcctttttgaagacacc

SEQ ID NO: 579646 - DNA, 80 bp, Homo sapiens
accccgcgggatacgcctcagcgcggggaaggtgtggctcattgactttaatccatttggtgaagtcacagattcactgc

SEQ ID NO: 579647 - DNA, 74 bp, Homo sapiens
tttgctccgcccagacacctacattggttctgtggaattagtgacccaggcatcctctggtatcacgattccaa

SEQ ID NO: 579648 - DNA, 50 bp, Homo sapiens
gcgaaggaggaggcgttgccggaattttgattctgacattagcagtgtgg

SEQ ID NO: 579649 - DNA, 89 bp, Homo sapiens
actcactccacgtccaaactttcttccacaggttccgccagtgttgtgaggatgcatatctgattttacgacggcatgggaatctcttc

SEQ ID NO: 579650 - DNA, 97 bp, Homo sapiens
cagaagaaacaaaagtgccaccgaagagcaacatgaaccgtgaagaccggaatgtgctgcgtatgaaagaacgggaaaggcggaatcaggaaattca

SEQ ID NO: 579651 - DNA, 82 bp, Homo sapiens
ggaccatgtcccagctgcagctgtggctgcagtttgaggctctgaacaaggttcgtgctggccgtgggcagcgccgtctttg

SEQ ID NO: 579652 - DNA, 75 bp, Homo sapiens
cggcggctactgggccgggagtcgggacgtgaagaagcggtgtctcagggcagcagcgactctcagatcctggat

SEQ ID NO: 579653 - DNA, 100 bp, Homo sapiens
cctgcgcccggggcgcgcccaccgcgccgcatccatgttcgagaaactggaggcgaccagtgcccagaatatcgagttcctacaggtgattgccaagagg

SEQ ID NO: 579654 - DNA, 100 bp, Homo sapiens
gcttcttgcccgacctcaacgccaacgccgcggcctggatatccccctagtggacgaaccccctccccccggggctcaggccacagggtcaccacataca

SEQ ID NO: 579655 - DNA, 98 bp, Homo sapiens
tctaccttccctgttaacttgaataaactgttccatctgcatcagggatagctgggagtatggccaccctgctccacgatgcggtaatgaatccagca

SEQ ID NO: 579656 - DNA, 100 bp, Homo sapiens
gctctgagagattcctctgcgaatctgtttttagctatcaagtggcatccacgcttaaacaggtgaaacatgtacgtagagaaatcgacactcttaatga

SEQ ID NO: 579657 - DNA, 75 bp, Homo sapiens
ttataatgatccacttccacttgatgaataggtcctgacttgtcctgggcaagccaagtccattgcttctgctcc

SEQ ID NO: 579658 - DNA, 135 bp, Homo sapiens
cagcatccaggagctctacgcccagatcgcgggcgcgtttgaaatctcgccgtcggaggttggacgtgataagtatgagcctgcagctgtttcagaacaaggtgataaaaagggcaaaaagggcaaaaaagacag

SEQ ID NO: 579659 - DNA, 75 bp, Homo sapiens
cagcgccgctccccagggagggagtccgcagcctgagctcctgccctccactgactccagagagggagatcccca

SEQ ID NO: 579660 - DNA, 90 bp, Homo sapiens
gggctgcagcccaggagcctcaaggcggcccggcgggcgactggacggccggacagcgtctgcttctgcgctttgcctgggagaggccct

SEQ ID NO: 579661 - DNA, 100 bp, Homo sapiens
gttttgcaggaaatgtgaatctcaggagagagcagccagagtgtgtctcatagttgggggaggaccctgtggcttgcgcactgccattgaacttgcctac

SEQ ID NO: 579662 - DNA, 50 bp, Homo sapiens
atctatcgccacaattaccgcaagggacagtcattttgtttactcattca

SEQ ID NO: 579663 - DNA, 82 bp, Homo sapiens
gcttcaccgagctggtgtgcagcctcagggaattcttcgtactccagacactatccgtcggttccagagtgtcccagcccag

SEQ ID NO: 579664 - DNA, 98 bp, Homo sapiens
tacaagacgctggccgcgggctccatcagcatggctgagcacatggattaattgatgtatgttgagtttatggagctgccttttggtggcttgcttta

SEQ ID NO: 579665 - DNA, 82 bp, Homo sapiens
cgcggggaagaggaggcggaaaaggacgcaaagttctccggcgagaacactctgctccagccaaggtggtgagggcagctgt

SEQ ID NO: 579666 - DNA, 50 bp, Homo sapiens
acaatggaggccagtggctggtctcaggaagccatcttcgacaagagcac

SEQ ID NO: 579667 - DNA, 76 bp, Homo sapiens
tactggttccatcgtatggctcatggtgctggagaatctggtaaaagcaccattgtgaagcagatgaggatcctgc

SEQ ID NO: 579668 - DNA, 103 bp, Homo sapiens
ccgggacccggtgtctgctcctgtcgccttcgcctcctaatccctagccactatggtctaacttcaaacttgtggctgttaattcaaaactctatgccatcgg

SEQ ID NO: 579669 - DNA, 75 bp, Homo sapiens
catggaccgggagatgatcctggcggattttcaggtgagccctattcccagaggcaggtggtgctgaccctgtaa

SEQ ID NO: 579670 - DNA, 75 bp, Homo sapiens
cgcaaggaccctttggaaggccgggtgggccgagatgcttgctctgtcaaggcacagcctattgtctcctttgct

SEQ ID NO: 579671 - DNA, 100 bp, Homo sapiens
tgccttgaagatccagaaaaactaggatccctttttgttaaacacgaattgaatgatctggcacgggaccctccagcacagtgttcagcaggtcctgttg

SEQ ID NO: 579672 - DNA, 100 bp, Homo sapiens
tgacaggcaaggtgtaccagctggaggtgatgctgaaacagctgcacactgacctgcagaaggctttctctgctcagagctccaagccacccgcctcctg

SEQ ID NO: 579673 - DNA, 75 bp, Homo sapiens
cagcctcccgaggagctgggactacagatcttccatggtggcttattctaattcggcagaaagcattggtgggca

SEQ ID NO: 579674 - DNA, 100 bp, Homo sapiens
agaagaaacacttcctataaatctcgcccaaacaggaaagatatgagatcctgactccaaactccattcccaagggtttcatggacgggaagcaggcgtg

SEQ ID NO: 579675 - DNA, 100 bp, Homo sapiens
ttgacatctcgggcgtgctgtacgacagcggcgcgggcggcggcacggccatcgccggctcggtggaggcggtggccagcaccagaaagtttgatgcagg

SEQ ID NO: 579676 - DNA, 75 bp, Homo sapiens
tcatagttgtgtatgatgtgacagatcagaccccatatcatgtgaacctcctcctggctggctatgatgagcatg

SEQ ID NO: 579677 - DNA, 82 bp, Homo sapiens
cgcagagggatccaagatcaacgcgagcaagaatcagcaggatgacgggttcggactaaggatcaccgctttgaaagtgtca

SEQ ID NO: 579678 - DNA, 89 bp, Homo sapiens
caggagcagttgctggtgctgctgaagtccctagggaaccaccaattcttcccagtgggttacccagaccaaactttggccatttaacg

SEQ ID NO: 579679 - DNA, 75 bp, Homo sapiens
cagtgagccctgtttttgccaccacactccagcttggctggtgctgggccccagtggtgtgctgcaagggatccg

SEQ ID NO: 579680 - DNA, 88 bp, Homo sapiens
aaagaaatgagatcgtgtttcatttcaggaagatatatgcgtcagtactatactggcaattgctggagaagattttgcaattgttgct

SEQ ID NO: 579681 - DNA, 75 bp, Homo sapiens
agattcgcagtggtcgcttcttctccttggtgtgtggagaaatgcgctatcagctgaataaaaccaacatggaga

SEQ ID NO: 579682 - DNA, 95 bp, Homo sapiens
agtgtccgagtgctgtcagcatctgtgcggttcctggaacagcagaacaaggtcctggagaccaagtgggaactgctccagcagcagaccacagg

SEQ ID NO: 579683 - DNA, 99 bp, Homo sapiens
ccgaaacctagccccggacgagaagcgcagcaacgtgcggtgggaccacgagagcgcttcaaggccgaatggctggcagtgaaggacgagcgtctgtac

SEQ ID NO: 579684 - DNA, 90 bp, Homo sapiens
catgattctcctggcagttgtcatatgtactgtgtcagccatcatgtgtgtcagcatgagagcagctaccaagggggtgccagctggaaa

SEQ ID NO: 579685 - DNA, 75 bp, Homo sapiens
gtctgggccagccacctggtgtccgtaatcagttcaagaagttccctcagatgacctcatatcaccggatgctat

SEQ ID NO: 579686 - DNA, 75 bp, Homo sapiens
tctggactgtggatgattatcgattacgggattgtcttacctttctccaaccctctaacacctgaccaacacccc

SEQ ID NO: 579687 - DNA, 83 bp, Homo sapiens
cggctcgtcgccgttcgccacccaagccaaaccaaacaggaagcttacttttctctacctagccaatgatgtcatacagaaca

SEQ ID NO: 579688 - DNA, 50 bp, Homo sapiens
ccggagccggcgcccccggcgcgggtactccaaagattcaggtttactca

SEQ ID NO: 579689 - DNA, 75 bp, Homo sapiens
tcaaagccgggagatcgactgtttgagcccggaagcgcagaagctgagttgttgcctgcaatctctatccctttg

SEQ ID NO: 579690 - DNA, 120 bp, Homo sapiens
cccagttctgcgcccagcacaagcagttttgaaaatttaagtgcaaaaagcatgacaaagcaatatgaggttgccgtgttttcggctttgtgagaaaccttaccatcaaacacgatggcc

SEQ ID NO: 579691 - DNA, 75 bp, Homo sapiens
gtgtgtgcgcgcgaaggagcggaagaatggcagtgctcaaactcaccgaccagggccgcgatgggcctcttggaa

SEQ ID NO: 579692 - DNA, 50 bp, Homo sapiens
agtcaacaggactttcatccaaagtgggcgctacatcgaggtgttcaggg

SEQ ID NO: 579693 - DNA, 148 bp, Homo sapiens
gacctggcgcgggcacaggcagtgctggaggaagaccactacggcatggaggacgtcaagaaacgcatcctgaatgtttctccagcccaagctacttgagaatatttttcatcattttcatagttacattcttgattgggttgcttaa

SEQ ID NO: 579694 - DNA, 101 bp, Homo sapiens
ctctactggacaaacatttcctccaagtcctcacacaggtattcaggaataccaggatggcgtgcccaagattccaacagcctgtattacggtggaagatg

SEQ ID NO: 579695 - DNA, 95 bp, Homo sapiens
attccctgacaattcatcctggcacctccacaactatgatttctgcctgtgtctcaagatgcgtgcaaaagagacggagtcttgctatgttgccc

SEQ ID NO: 579696 - DNA, 82 bp, Homo sapiens
ccctactctcgcagaaggagaacatcaatgtgctgaatatggaaagtctcaattccacacgatctcatgagagaactggacc

SEQ ID NO: 579697 - DNA, 51 bp, Homo sapiens
cgctagctcgcaggccgcgccgggaccagagatggggtcttgctatgttgc

SEQ ID NO: 579698 - DNA, 100 bp, Homo sapiens
aggcccgccgcctagcaaagactattaccagttactggtcacccggtctcaggatttcagtttcccaaacctgagatgatctgtcagctggagaactggg

SEQ ID NO: 579699 - DNA, 100 bp, Homo sapiens
atggcgctgaggcggccaccgcgactccggctctgcgctcggctgcctgacttcttcctgctgctgcttttcaggggttacttacagcaagaaaacctca

SEQ ID NO: 579700 - DNA, 136 bp, Homo sapiens
ttcctgctgaccaaagtcctgccggatctggcgcctacgaggacgtggcgggtggagctcagaccggtgggctagtgtgtaaatatgttgctgtggagctgaagtcagcctttgaggaaaccggcaagaccaagga

SEQ ID NO: 579701 - DNA, 97 bp, Homo sapiens
cagactagccactttgcattgactggaaacaatggcatttacagaaagagtcaacagcagtggcaacagattccagaatgactatcttgacttaccc

SEQ ID NO: 579702 - DNA, 98 bp, Homo sapiens
ccacacaggcacaggccggtgagggacctgcccagacctggagagtttatgtggccgaggcagacaagtggaattaggccttgctgcaggggacttca

SEQ ID NO: 579703 - DNA, 90 bp, Homo sapiens
gaaataagagaatccatttgataaaatgagcccaggacaaggcagctatgcagttgagtgagttggaagaggaaatggatcagaggattc

SEQ ID NO: 579704 - DNA, 75 bp, Homo sapiens
cgcagtggtcgcttcttctccttgttggtctcttcccatggcgatgtccatctgccaccgtggcactggtattgc

SEQ ID NO: 579705 - DNA, 100 bp, Homo sapiens
cgaaggagctggaaaccgagccagggctgagccggctgacaacaggtaagccaagatgggtgcatacaagtacatccaggagctatggagaaagaagcag

SEQ ID NO: 579706 - DNA, 97 bp, Homo sapiens
ggaggacgaagagcgggacccgagccctggaagttggctggaatgtgatgacttaaaaggcccatgttctgaaaggcacaagaaatttgaagttcct

SEQ ID NO: 579707 - DNA, 100 bp, Homo sapiens
aggactggggcctcattttggatatctgtgataaagttggtcagtctcgcactgggtatgggcactaggaaaagacttcttccatcaagcttaattgttt

SEQ ID NO: 579708 - DNA, 90 bp, Homo sapiens
gttcggtgcagctgccagatccgctgatctagtgcttctcgaaaaaaaccttcaggcggcccatggatttccttcctgtgaagagctaga

SEQ ID NO: 579709 - DNA, 100 bp, Homo sapiens
ccagatctggtgagtcagaggaaatcatttctgctctgcacttggcaccaaggctgtcaccctgttacctccgggtgctcctgacctctgataaagctgc

SEQ ID NO: 579710 - DNA, 100 bp, Homo sapiens
ggatggcccccggtgcaagaggcgcaaacaagccaatcccaggaggaaaaacgggccgttgctccagggagaactgcaaatatcttcatccacccccaca

SEQ ID NO: 579711 - DNA, 108 bp, Homo sapiens
cgggccgcgaaccgcagtatcatgctggccaagaagatcatcattaaggacggaggcacggagcgagaacccgagcagcgccatgagcaacactaccgtcgtccccag

SEQ ID NO: 579712 - DNA, 83 bp, Homo sapiens
ggcttctggcaaaggtttatagcacggatgctgatcagcctggcggagatggacctgcagagagctagcaatctagagaatag

SEQ ID NO: 579713 - DNA, 96 bp, Homo sapiens
tggaaggtggcggtggtgaaggtgcaggccgttggggcggctcagaggcagggtgtaccagtgatggcaataagaaacaaaatgatatcagaagga

SEQ ID NO: 579714 - DNA, 75 bp, Homo sapiens
cgctgggttcctgcgtcccgccaaagaggtacatcaggaacgtctctatcaagaatacaatttcagcaaggctga

SEQ ID NO: 579715 - DNA, 97 bp, Homo sapiens
cgcctcgggtctcgggggccgctctgggatcccggccaccagcaattgtccgcagtctctggtcccagcccaccccatggcccctcccagtcccagc

SEQ ID NO: 579716 - DNA, 100 bp, Homo sapiens
gcctcatgttttcaccagtcacatctcttactactgctagtcgctgcaacactcctctacagtttgaggaaaaatatctccctggacggggcgtttctac

SEQ ID NO: 579717 - DNA, 49 bp, Homo sapiens
gcatctttggcttcagcgtgtcccggagaccctgcagcgtcatggtgct

SEQ ID NO: 579718 - DNA, 100 bp, Homo sapiens
actgtttcccctctcagcatcgcttttgctgggccgtgatcgtccccctttgtgggctggaaaagcaggtgagggtcgtctacagctgcaagcagatcgc

SEQ ID NO: 579719 - DNA, 75 bp, Homo sapiens
caacggcatagcaatcgcacagctgaggagatgctaatcctgaggtgacgatgacaatgcttcgctggatctata

SEQ ID NO: 579720 - DNA, 50 bp, Homo sapiens
tctgaacggaaactccagtaccacagagctcttgtccctggcaaagcgaa

SEQ ID NO: 579721 - DNA, 74 bp, Homo sapiens
gcagtggtcgcttcttctccttgtggaaagaggcaaaacctgatgaattaatggattccaaattgagatgcgta

SEQ ID NO: 579722 - DNA, 98 bp, Homo sapiens
cgcgaggtcaagctgctgctgctcggtgaatctggattgggaaagtcgacattaatcaactcattattcctcacagatttgtattctccagagtatcc

SEQ ID NO: 579723 - DNA, 100 bp, Homo sapiens
gggaaagagccccagcaccgcccctcctggaagaaggaagagccagagactgctgctactttgaaacgtacgatagaggccctgatggacagaggagcaa

SEQ ID NO: 579724 - DNA, 78 bp, Homo sapiens
gcgagtctgttgggccttggtggctgtgctcttggcagacctgttggcactgagtgggtttttaatgaccacaacaag

SEQ ID NO: 579725 - DNA, 75 bp, Homo sapiens
ctgggtttgagtccagcagtgctttagttgtgtaaaaaacagtttcagtacagtgcctctttgcgagcacatctt

SEQ ID NO: 579726 - DNA, 75 bp, Homo sapiens
agagatatgccagggtatttattgccctagctccccctctgccagaccacagaatatggtcaagcagaaagcctt

SEQ ID NO: 579727 - DNA, 98 bp, Homo sapiens
caatcccgggcatgggcggcaactctttgatgtactactataatgggaaagcggtaagaatgattgatgttggctgatattggagtgctcattcacat

SEQ ID NO: 579728 - DNA, 88 bp, Homo sapiens
cagagtcactcaggacaagcttgaagctgtttcagatagagagccttgcccgggaggcctccactggagtactaaaagacctaatgca

SEQ ID NO: 579729 - DNA, 100 bp, Homo sapiens
aactttctactatctggaacagttaattctgaaatatggaatgcatcagaatacacttcgtatcaaagagattcatgaatatactgatgataatgctctg

SEQ ID NO: 579730 - DNA, 90 bp, Homo sapiens
caagaaatgaaaatgaagggcgccctggaataggttcgccgaagagagaggaagaaatgttggctatttggcgatgagaggtggtgaaca

SEQ ID NO: 579731 - DNA, 75 bp, Homo sapiens
ccaggacgagacgggcaagaaccggacaatcctccaaacacagactgtttgacttagaatcttcccttttttact

SEQ ID NO: 579732 - DNA, 100 bp, Homo sapiens
gcagtacgccacggggccgctgctcaagttccagatttggcagttatacttaagcatgaacattgacgacaaactggaaggattgtttcttaaatgtggc

SEQ ID NO: 579733 - DNA, 75 bp, Homo sapiens
ccacgccgtcaaggaccggcacaaggacgttctcaagtggggcgatgagaccctgtattcagtggatcagctggc

SEQ ID NO: 579734 - DNA, 75 bp, Homo sapiens
tggaccaagctatcagccgctttgagagtgaggacctgacctccattgtgggcaaactctttgattctacaatag

SEQ ID NO: 579735 - DNA, 75 bp, Homo sapiens
gcaaagccggctgttaccctgcacagccgtcaccctcaactttcccttcagggtcttgctctgttgcccacgctg

SEQ ID NO: 579736 - DNA, 82 bp, Homo sapiens
ctctgaggcccggggcttccggaggtcgcggagatggaattggagcagagagaagggttaatttggagtggcccctggagtc

SEQ ID NO: 579737 - DNA, 100 bp, Homo sapiens
gatctttccggatcaatccagatggcagccagtcagtggtggagatcctcctggccaacttcttggcccagacagaggccctgatgaggggaaaatcgac

SEQ ID NO: 579738 - DNA, 80 bp, Homo sapiens
tccagcatcacccacggagctggtggcactaaagcccctcgggggactctgagcaggtcactgcagccagaggggtccag

SEQ ID NO: 579739 - DNA, 82 bp, Homo sapiens
acgccttcaactccacttttatctccaccatagggcgaactttctgaccaagtatacaactacccagagggcctaggagaag

SEQ ID NO: 579740 - DNA, 100 bp, Homo sapiens
ttgtagcagaatgttgctatggagattcatgccaggtcacgcatgaagggagcaccgtggagaagacagtggcccctacagaatgttcataggttctcaa

SEQ ID NO: 579741 - DNA, 106 bp, Homo sapiens
aagaatgggcattacatcatcccacagatggctgacaggctgtaggttccatgaggacaggccttgagtctgtcctggtctctggaatcacggtgtctagtagagg

SEQ ID NO: 579742 - DNA, 89 bp, Homo sapiens
ggccggcgggtgcagcggaggcggcggcggcggcggcagtgacgtcgccggatcgggagcggtgccgagaaaaatttccttactagatg

SEQ ID NO: 579743 - DNA, 74 bp, Homo sapiens
ttaaacttgtggcctcagaacagttggtaactcagcagttgaaggcgcgattcttaccaagtccagttgttatt

SEQ ID NO: 579744 - DNA, 121 bp, Homo sapiens
tgcggagtcgccgatcccgccggaagcgccaggacaatggggacccgggacgacgagtacgactacctattcaaaggaccaagaatcgccttcagccctgtctggtgcatccttggcagaa

SEQ ID NO: 579745 - DNA, 51 bp, Homo sapiens
ctgggcccgcgtggatctctaaggagtgcctgaaacctgtactgaatgggg

SEQ ID NO: 579746 - DNA, 100 bp, Homo sapiens
gggacaacgtgtatcacctcgactgcttcgcctgccagctctgcaaccagaggttaccccacagcctatccagcagctgcccctgcctacaatcccagcc

SEQ ID NO: 579747 - DNA, 75 bp, Homo sapiens
cctaagcaagtgtctgcagtgccaaatgtgtgacccaggtctataagaaggagaaagctcgagtcatcactgagg

SEQ ID NO: 579748 - DNA, 50 bp, Homo sapiens
tttcctggacccattccgactcaggtgttcagtgtgaggtggagctgata

SEQ ID NO: 579749 - DNA, 75 bp, Homo sapiens
tttgctgcccgagagatggctccaaatatggcagagtgggaccagaaggactcagaattcatgattgaagaaatg

SEQ ID NO: 579750 - DNA, 101 bp, Homo sapiens
cagagctctcatgttctgcacctcaggagggaattcagcctcagtgatgtccatgagcctaaaatgaccaatgtgtgatttcagtggaataaatggcgtcc

SEQ ID NO: 579751 - DNA, 83 bp, Homo sapiens
tcgggggccgctctgggatcccggccaccagcaattgtccgtgcagggagactgaccctagacaaagctcttgacatgactta

SEQ ID NO: 579752 - DNA, 75 bp, Homo sapiens
tctacatgcgctctttgaaagcgccccggaatgacctgtcgcctgccagctctgatgtccagaaggcttcttggg

SEQ ID NO: 579753 - DNA, 100 bp, Homo sapiens
ttttatgatgtccttgatgttctcatcaagcccacgagtttaggtgaaaggtgtagcagtcactcggcctacacccacagcatcgaccttgtgaacccag

SEQ ID NO: 579754 - DNA, 98 bp, Homo sapiens
gctccctgggcttcctgaccccattcagctttgagaactttcagtcccaagttactcaggtgatagaggattccaactccacagagtgaccagagaga

SEQ ID NO: 579755 - DNA, 108 bp, Homo sapiens
tgagcagtcagcattggaaggaatgaaggcttgtatgacctatttccctcgggcttgtggttctctcaaagttttcggtattctggagaaagccaaggaaaagtacgg

SEQ ID NO: 579756 - DNA, 82 bp, Homo sapiens
gagaaggcctccaagacctttctcaagaagaattcttgctacacactgcttgagggtagtccatgatggtaagtcatagaac

SEQ ID NO: 579757 - DNA, 88 bp, Homo sapiens
cagtggcgcctaaagtctgagagagggaagtcgcctctgtgctcatgtccagctcgccgctgtccaagaaacgtcgcgtgtccgggcc

SEQ ID NO: 579758 - DNA, 83 bp, Homo sapiens
cgcctgaaaggcgactctccttaagactttgaccccgacgcaggcttcagtgattgccgcggatcagaagcctgagcactttg

SEQ ID NO: 579759 - DNA, 82 bp, Homo sapiens
cggcaaactccctggtctctgttggtgtagaagccaaaatcagcaataggagtgaaacatccacatctgataacacagaaac

SEQ ID NO: 579760 - DNA, 75 bp, Homo sapiens
aaaaatcccatctaccgcaactctcagttcgagagtaaaggcgaaggaggtggaggagaccatcgagggcatgct

SEQ ID NO: 579761 - DNA, 100 bp, Homo sapiens
gtctcgcatgcagctgagtgctgagttgcagtcagatacggaggaaatccttagtaaggcaactttggctttggggattcacgtggtggcggtggaaatt

SEQ ID NO: 579762 - DNA, 100 bp, Homo sapiens
ggttggaggtctcaggcaggccacacactgaatctgtcaaggcgggcacatgaacgccccccaccccatccacataggatgcacccaaactatggtcatg

SEQ ID NO: 579763 - DNA, 80 bp, Homo sapiens
caactacccagtcctgaccccaaatttgaaaggcttcgaggcagcggccccccggacagaccacccagccctgtacaggg

SEQ ID NO: 579764 - DNA, 82 bp, Homo sapiens
gtctgtttgggatcccgctgtggtacttctcgcagtccccgcgcgtggtcatccaggcttgggcactgtttaaaggaaagtt

SEQ ID NO: 579765 - DNA, 82 bp, Homo sapiens
aatcttccaagtccaaggatgtaatacagacttttcctatcagcctggagatgccttcagcgtgatctgccctaacagtgat

SEQ ID NO: 579766 - DNA, 75 bp, Homo sapiens
ctaaatttgaaaaggagaaaatgaatgccaaatgggacacggagcctttaacgatagtgaagctctggaaagctt

SEQ ID NO: 579767 - DNA, 96 bp, Homo sapiens
ggcactgttgcctatcagaagtcaattcaaaggacctgcccccagagagaggacaccatgtggcggatctttactggatcgctgctggtagaggag

SEQ ID NO: 579768 - DNA, 75 bp, Homo sapiens
ataagctatatactttggttacctatgtacctgttaccactttcaaaagtgttggagcgggccggagagaagtag

SEQ ID NO: 579769 - DNA, 100 bp, Homo sapiens
tgatcaggattcccaggtgtgactttgcaggaacattttagtggacaaaccaaatgaccaatcttcaagatggtcttcagagagcaactatcctccccag

SEQ ID NO: 579770 - DNA, 100 bp, Homo sapiens
gatgactcaggctgtgctttggaagagtatgcctgggtcccgccgggtctgaagcctgaacagggtatttgaagtataccatacaactgttttgaaaatc

SEQ ID NO: 579771 - DNA, 49 bp, Homo sapiens
ggagaggcctggaggacaccaacatgcactattcctgatcagagaactc

SEQ ID NO: 579772 - DNA, 100 bp, Homo sapiens
aaaaacaggagaggaaggcgatgtggcgcttctgccgggccctcagactggggagtgtgaggcacgcacagaggctgggctgcggtccagatgcgtttgc

SEQ ID NO: 579773 - DNA, 83 bp, Homo sapiens
ccgctccgggcccggggccaccggctgtcacttgcacctcctgcgccgccgccccccatccaaggatatgccttcaagcctcc

SEQ ID NO: 579774 - DNA, 90 bp, Homo sapiens
tgaggcgcctgcctccccagcaaatcgagaaaaacctcagcgacctgatcgacctggactggatctgccatttatgatgatgcctcatcc

SEQ ID NO: 579775 - DNA, 100 bp, Homo sapiens
ttttcctcttctcctatgctgtgctgagatctgtatctgtggacctgaatgttgatccctcgcttcagattgacatacctgatgcgctcagtgagagaga

SEQ ID NO: 579776 - DNA, 100 bp, Homo sapiens
cagcccgctactttatggagacaggagagactgtcagacagttcctgctgctgcccaggtgcatctgacccgagcgggaagaagttccgcagcaagccgc

SEQ ID NO: 579777 - DNA, 75 bp, Homo sapiens
ggaagtccccgaggcagcctccgcggaggagcagaaggtacaatgtcagtcaactggaagaatggctgcgtgaca

SEQ ID NO: 579778 - DNA, 82 bp, Homo sapiens
cgggacagagctggagctcgtgggtggagcgggccgacctgcccgcggctgacggttattaacacggggatcaaagtctggt

SEQ ID NO: 579779 - DNA, 50 bp, Homo sapiens
atgactatgccattgtgctattcaagatacatactgccatgaaagaaagc

SEQ ID NO: 579780 - DNA, 98 bp, Homo sapiens
ggagggatatcgggctgtcggtgacgcacagactggtgtcgttcagtatttctacattgaagactggcaattcgttaatgattatcgacatcctgtca

SEQ ID NO: 579781 - DNA, 75 bp, Homo sapiens
accacttctgtggctgctaccccactcctgggccgtccctgaaggtggccggcattcacaagaaggtggcccgga

SEQ ID NO: 579782 - DNA, 82 bp, Homo sapiens
cggatggccccaggtgtaagcgcagaaagcaggcgaacccgcggcgcaataacggttgtgaccgagattcccgacgagagag

SEQ ID NO: 579783 - DNA, 74 bp, Homo sapiens
ctcctgggttgctgataaaactaaaggcaaggcactgacgtttcttctgctacagcctccaagccccaaacttc

SEQ ID NO: 579784 - DNA, 106 bp, Homo sapiens
gtggacggggccggggccgaggccgcggagctcgcggaggcaaggccgaggataaggagaagcgaggaaaagccacagccccgtgaagcgtccgcggaaagcacag

SEQ ID NO: 579785 - DNA, 49 bp, Homo sapiens
ttacaaggcttccaccagcaaggtaccagcaactaaggtttcagagctg

SEQ ID NO: 579786 - DNA, 83 bp, Homo sapiens
cccagatgatgcggtggtgggggacctgccggcacgcgactccccccgggcccaaagttttttgccctgacatctcttcgtct

SEQ ID NO: 579787 - DNA, 80 bp, Homo sapiens
cagtgtttgaaagaaaatcctcaagaaaggcctacttctgcccaggttatgtcgcttaaaaaagaaagcacaggcagaag

SEQ ID NO: 579788 - DNA, 82 bp, Homo sapiens
ggtttcgggatctcggtgctgcagacggcgagacctcctgcacagggactggtgattgcagctggaagtgcccatgaccgag

SEQ ID NO: 579789 - DNA, 83 bp, Homo sapiens
cgtcagtcctttcagcttcagcctgctcaagaactgcagcattgcagccgccaagacggttatggaaacaaaggacatgcttt

SEQ ID NO: 579790 - DNA, 75 bp, Homo sapiens
agggcagaccccttcaaagaactaagaaaacatcggagcagtgtgggtccgagcaaacctgtttcccagccccgg

SEQ ID NO: 579791 - DNA, 120 bp, Homo sapiens
atcacgggagtcggggtggtggcttctcggaaccgagccccgacaggctatgacgtagaggaggaagccaagaatctggtgagcgaagccatcgcagctggcatcttcaacgacctgggc

SEQ ID NO: 579792 - DNA, 100 bp, Homo sapiens
ttaaacagccaaaacagttcattcatattcagcgcctcttatgtgaggagctgaagaggaattaaaatatacaggatgaaaagatggcaatgttgcctcc

SEQ ID NO: 579793 - DNA, 113 bp, Homo sapiens
ctggagcgcccagaggcgagccctggtggaggaagagttgcatttgctggtctggcctttgcgtccttctacctggcagggaagttacactgcttcacaccacaaggccgtgg

SEQ ID NO: 579794 - DNA, 90 bp, Homo sapiens
ctggggagcgcctcgtcgacatgagtgatgtggaggaaaacaacttcgagggcagagcacccagattggctgaaaacttctgtgtctgcc

SEQ ID NO: 579795 - DNA, 51 bp, Homo sapiens
tcgcccaatccacatgcttttccaggatttgattgccttatgtgacaagcc

SEQ ID NO: 579796 - DNA, 90 bp, Homo sapiens
gtcctggagcaccctgaagactcaagaccaaaagactgtcaggaaggcagagtgcagagactccgccgtggtcatggaggagggaagtcc

SEQ ID NO: 579797 - DNA, 100 bp, Homo sapiens
gcggcggctcctccgggggacccgcggtccccaccgtgcagcggggcatcatcaagatgctttctgttcaaaatcaggagtttgagataaataaagatgg

SEQ ID NO: 579798 - DNA, 128 bp, Homo sapiens
ctggaacctcctgctggactttggaaacatgattgcggatgatatgtctaactacgatgaagaaggtaattggtacgcctcagagaccggcagcgtcaaacaccctggtggtaggaagcccacacacc

SEQ ID NO: 579799 - DNA, 50 bp, Homo sapiens
tggagagggggcgctgagctgttgggaaccgggctgtgggtcggcccaag

SEQ ID NO: 579800 - DNA, 83 bp, Homo sapiens
ctgaggaccagcagatggccagtcacgagaacccaggctgccctgaggatctgtgtttggtgaaaaggagccaaattcacctg

SEQ ID NO: 579801 - DNA, 75 bp, Homo sapiens
gactggccagctcaaccgcttcgtgcaactctccgggcggccgcacctgccagattgggctaatggatactacag

SEQ ID NO: 579802 - DNA, 75 bp, Homo sapiens
acaacaggctatattctgcatcgtgggactctacagtgaaggaccgtataattgatgccggcccaaaaggaaatt

SEQ ID NO: 579803 - DNA, 50 bp, Homo sapiens
gctggactcggattcgttgcctgaggtgaccagcgccatgtccagccagg

SEQ ID NO: 579804 - DNA, 82 bp, Homo sapiens
ccgcgcttctgctctcagtgtcccggacttcagcacaggaagtcctggagaacctgaaggaccgctggtaccaggcggacag

SEQ ID NO: 579805 - DNA, 100 bp, Homo sapiens
aagctatatactttggttacctatgtacctgttaccactttcaaaagtctgaaggggcgtctcgattacctgagctctctgaaggtgaagggccttgtgc

SEQ ID NO: 579806 - DNA, 98 bp, Homo sapiens
tgaagccgaggtagaagaagatgaacccacagatttgaacaagttgaaatcatcgcagaaggataaagttcgtcagtttatgatcttcacacaatcta

SEQ ID NO: 579807 - DNA, 96 bp, Homo sapiens
agggcttcctggcccgaaaggagagcctgtgatgctatgagtgaagaagacatgcttcaggcagctgtgaccatgtctttagaaactgtcagaaat

SEQ ID NO: 579808 - DNA, 75 bp, Homo sapiens
agtgcggtttactcctcatgccgagatggaccttgggcagctcagttcacaagacccaacatgagtgaagtttcc

SEQ ID NO: 579809 - DNA, 83 bp, Homo sapiens
tgctgctgctcaaagctgctgccgccccttgggctaaaaggcgccatgtcagaaccggctggggatgtccgtcagaacccatg

SEQ ID NO: 579810 - DNA, 100 bp, Homo sapiens
gcaaatgacacggccaaggaaacatgcctaaattggtttttcaagattgcctccatcagggaactcattccaagattatatttgtcaggatacgaatcag

SEQ ID NO: 579811 - DNA, 75 bp, Homo sapiens
tgaagactttattgtgaaacctcccgtgagaaagacatgatcccagagaacgctctagaggagatcaccaaaaac

SEQ ID NO: 579812 - DNA, 100 bp, Homo sapiens
gatatatttgggaaatatggacctattcgtcaaatcagagtgcgtcctgcctctgcggctctgccccctgcatcctgtgcagctgctgccccgccagccg

SEQ ID NO: 579813 - DNA, 95 bp, Homo sapiens
gttctcccaaggaatttccacgaagatgctcatgaagcagcaggaccggctggaggagcgagagcaggacattgaggaccagctgtacaaactcg

SEQ ID NO: 579814 - DNA, 96 bp, Homo sapiens
cccgggaaggagcgccctggcggagaagactcgaacggctcccacagccgggcgttgggggaaagacacctggatttcattagcatcatgacctac

SEQ ID NO: 579815 - DNA, 48 bp, Homo sapiens
ctgcctctgccccacccccaaaataattgtatggaagagatacagtga

SEQ ID NO: 579816 - DNA, 98 bp, Homo sapiens
aggcaggcaggggatcccggactgatggaatggggagaagatattaaagcagtttcaaaagatgaagcagtgatgttggtgaatcatcaggcaacagg

SEQ ID NO: 579817 - DNA, 75 bp, Homo sapiens
cacaccaagaacagcgagcaggcgcgcagccacctggagaaggcggaagctcttcgtgggcggtcttgactggag

SEQ ID NO: 579818 - DNA, 101 bp, Homo sapiens
aaggaaaatgcctatgatctggaagccaacctggctgtcctgaagctgcctgtagtggtggagacacgcccagtggatgatcctactgctcccagcaacct

SEQ ID NO: 579819 - DNA, 73 bp, Homo sapiens
ctgcctggttctgggaaaacaacattgtctcgaactcctgtagcctgtaataccagctgtgggtactactctc

SEQ ID NO: 579820 - DNA, 110 bp, Homo sapiens
ctgggtttcccgggagatcccaggcggtgacagagtggagccatggctagagctgataggaagatgtcttcaggaaatgctaaaattgggcaccctgcccccaacttcaa

SEQ ID NO: 579821 - DNA, 98 bp, Homo sapiens
tggcaggtcatcaaaggtgtgctgtttaggtttcggtctaagtaccacccagatgaggtggggaagcgtcggcaggaggcccggggggccctgcaaaa

SEQ ID NO: 579822 - DNA, 49 bp, Homo sapiens
gcatcatccgctatgcaattgggaggatgaagtttttgctgctgcagca

SEQ ID NO: 579823 - DNA, 100 bp, Homo sapiens
tgtttaacgatgatggtgactgcctggatccacgtcttctacaagaggataacttcaaactaatgtgtactaatgccatgatttacaataaaccagagac

SEQ ID NO: 579824 - DNA, 100 bp, Homo sapiens
acgcggtcccgccggatcccgaagacgagggcctggaggaaacaggtcttgagtcaccacgtccgaatataattcttgggttagtaatctgccaaaaaat

SEQ ID NO: 579825 - DNA, 100 bp, Homo sapiens
ccagccgggaactccccatcgcgttttgccagcgataatacgcctcaggttgatgataattagaagcatgctttccactgaacttcccgacaacatttgt

SEQ ID NO: 579826 - DNA, 74 bp, Homo sapiens
acgtactttgtctgactacaatattcaaaagggaccgtttggagggagccattcacctacaggagcaggacatg

SEQ ID NO: 579827 - DNA, 98 bp, Homo sapiens
atcaagatttaacattccaacacataaaaattatttatccaacagctcctcccaggaagacaactgttagttttgtggcttactgctgctccacccag

SEQ ID NO: 579828 - DNA, 96 bp, Homo sapiens
tgtgcagtggcacctgcgcgaagctggccaaagcctgcccagacggctcacctgtgcgggatggaacaaaaggtgctgagcgccgtcctcaaggat

SEQ ID NO: 579829 - DNA, 101 bp, Homo sapiens
gatgttttgtccagggcagcatctctggtgcatgctgatgacgaaaaacgctcatccatggaataccaattctttttcttagtgttcacattggatttttc

SEQ ID NO: 579830 - DNA, 100 bp, Homo sapiens
ataagctcattttaattgccagaaacaaaggctttcatccgacccttccgggagcaccacattgacccgacagctatcacacggcacgacttcatcgaga

SEQ ID NO: 579831 - DNA, 99 bp, Homo sapiens
ccaagctcgcgccggatgcggagcgcggtgctgccggtggagcttcagcttccatgcctatggctgttctaaaattgggccaaatatatccatttcaga

SEQ ID NO: 579832 - DNA, 50 bp, Homo sapiens
gtgcaaacccgagagaactgggaaccaaccggtgagccctctcctaagag

SEQ ID NO: 579833 - DNA, 48 bp, Homo sapiens
tgctcaattcccatacatgcactagagaacgagatgctggaggagggc

SEQ ID NO: 579834 - DNA, 133 bp, Homo sapiens
aaaagatgatgagaaataaggacaaaagccaagaggaggacagttcgctacacagcaatgcatcgagtatcaccttttgccatgatagcatttctttcattggacagttccttacaagggctccactcagtgt

SEQ ID NO: 579835 - DNA, 85 bp, Homo sapiens
caatcaagaaaggagaaagagagctcaaaatcggagacagagtattgttcctctgtgacgagggtgcaggtatctctggggacta

SEQ ID NO: 579836 - DNA, 48 bp, Homo sapiens
tcaggacttgagtaacagcaacatgtttcctcgctgatctcttcatgc

SEQ ID NO: 579837 - DNA, 75 bp, Homo sapiens
cccgcagcctgcctttccttccccctcggaaaatggttcccactgccgggcgagaaatgcactcggtgatggaaa

SEQ ID NO: 579838 - DNA, 99 bp, Homo sapiens
cagccctcaagcatcacttacaggaccagagatacagtctcgctgtgatgcccaggctggagtgcaatggcgtgattttggctcactgcaacctctccc

SEQ ID NO: 579839 - DNA, 75 bp, Homo sapiens
gtacaaagttcatgggcgtcttcctgttaacccttaggagaaatcttgagagtggacagcaattgtgaagatcgc

SEQ ID NO: 579840 - DNA, 98 bp, Homo sapiens
cccacgacccatccttgaagaaggttttagacgtactctgggaactggctcaccttccaaccctgcccagtagccttattcagcaggccttggaggag

SEQ ID NO: 579841 - DNA, 90 bp, Homo sapiens
ccactgtgcatatggatgcagccacacctgaactaccaaaagacttccattctttatcgactctgggagaaaactggttgtcctggatgt

SEQ ID NO: 579842 - DNA, 82 bp, Homo sapiens
gatcatgtctgcgagccaggattcccggtcttaaccatgaacttctctggaggagggaggcaggaagcagcagggtccaggg

SEQ ID NO: 579843 - DNA, 100 bp, Homo sapiens
cgacgccgcggtccgccggatctccagcgctcagtccgcgccgcaggtggtgcttgtctgcagagtcatgaccttaccgccaggcatatacgggaaacaa

SEQ ID NO: 579844 - DNA, 100 bp, Homo sapiens
gacacaccggaggcgacggccatggccacaggttgcacgttttcaaaaaatacctaatggtgaaaatgagacaatgattcctgtattgacatcaaaaaaa

SEQ ID NO: 579845 - DNA, 75 bp, Homo sapiens
gcgcgcccaccgcgccgcatccatgttcgacttcggaaccaaaaagaagcttcccagagccggggccaggagccc

SEQ ID NO: 579846 - DNA, 50 bp, Homo sapiens
gcgtctgcgagaccatggagaacgggaatactcccccagttgcaagaggc

SEQ ID NO: 579847 - DNA, 75 bp, Homo sapiens
cacctctcatggctaagagaactaaacagaagctgcacacatacatgtaagagaagcaaaaatgtcagatgatat

SEQ ID NO: 579848 - DNA, 100 bp, Homo sapiens
ccacccctgcgttcagagccgggcacactgggctctgcagcctcatcctacagccccctaggctgaaggggatgctaagggagataaagcaaaggtgaag

SEQ ID NO: 579849 - DNA, 100 bp, Homo sapiens
acaataatcagtctgttctagtatctgcacatacctcagcgggaaaaacagtatgcgccgacaaccccaaggtccaggtggaggccatcgaagggggagc

SEQ ID NO: 579850 - DNA, 100 bp, Homo sapiens
aaaaatggtgaagaaaacaaagatgatgataatgttttcagcagcaatttgccctcagaggctggagcacagtggcgcgttctcggctcattgcaacctc

SEQ ID NO: 579851 - DNA, 100 bp, Homo sapiens
gtcagcaaaataattgctgacatgctcttcaaccttttgctgcaggctcttttcctcattcagtttgtcccgctggctggaagcctggcagtgacacgat

SEQ ID NO: 579852 - DNA, 60 bp, Homo sapiens
gtcatattcttgggttcaaattcaagttttaccaggggaagttggttaaccacccgtgtc

SEQ ID NO: 579853 - DNA, 96 bp, Homo sapiens
acaacatggcctcctccgcctcctcctctcccgcgggcaccgaggactccgctcctgcccaggagaaccagcagaaatccaccaatgtagtctatc

SEQ ID NO: 579854 - DNA, 98 bp, Homo sapiens
gacaaggatgcgctggggcctatgatgcttgagcaaatggttatgagccttagagtttctgaactccaagtactgttgggctacgccgggagaaacaa

SEQ ID NO: 579855 - DNA, 100 bp, Homo sapiens
gatgactttgaccagtttgataagcctggcgcggaacggtcgtggagaagaagagctgctgatgaggactgggacagccctttctaaggcacaaaatgat

SEQ ID NO: 579856 - DNA, 82 bp, Homo sapiens
atcgagagaagactcctcaacaagttgctgcaatgtctgtgtctaatctatcatgggcaactgtactcctgatgatattggt

SEQ ID NO: 579857 - DNA, 73 bp, Homo sapiens
ttcccgcttgcgtcagggacctgcccgactcagtggatactgaggaagatgaggaggaagatgagaaggacaa

SEQ ID NO: 579858 - DNA, 75 bp, Homo sapiens
ccgcgacctgcgcaaagccagcgtgaccatcattgacaagtatctctatgccatgcggctctccgatgaaactct

SEQ ID NO: 579859 - DNA, 87 bp, Homo sapiens
gcaagcagttcagaagagccaaggaataaacatgcaatgaacccaaaagggaatggaggatctttggttccataccaatgcaggcat

SEQ ID NO: 579860 - DNA, 75 bp, Homo sapiens
ggactgctctcctactacacgctctcgtggcattatccttcagtggggctattggactgacttttcttatgctgg

SEQ ID NO: 579861 - DNA, 90 bp, Homo sapiens
agaaggctgctattgaaagagagtatgcacaggctatctatgtgcctgctgatgacttgactgaccctgcccctgctactacgtttgccc

SEQ ID NO: 579862 - DNA, 75 bp, Homo sapiens
ctgtcttgggcagcatgcagtgctttctggggacatcgcggtggaggaagatctcagcagcactcccctattgaa

SEQ ID NO: 579863 - DNA, 98 bp, Homo sapiens
agtctgcgaaggccgggacccggttccccggcccacagtgggggtgtgcaaacccgagagaactgggcgaccatggccttgctgggtaagcgctgtga

SEQ ID NO: 579864 - DNA, 83 bp, Homo sapiens
ctggggactgcgggcggcgctgtgtccgtcgccatgacaggtgtgggaaccgctgagcagaacaccctcccccagcgggaaat

SEQ ID NO: 579865 - DNA, 74 bp, Homo sapiens
tgacctaaagaccattgcacttcgtgcccgaaacgccgaatataatcccaagcctggagtactcgggtactttg

SEQ ID NO: 579866 - DNA, 90 bp, Homo sapiens
tggcatcatcatagctcactatggccttgatcctcctgccttagcctcccaagcagctggtattacagctattgttaaccgtgatggcac

SEQ ID NO: 579867 - DNA, 96 bp, Homo sapiens
gcttggcctacatctggatgccaacaccagatatgagcaccgaaggcagcaacatcacagatgctttcctaagccagaggaagtgtgagcccaaag

SEQ ID NO: 579868 - DNA, 98 bp, Homo sapiens
caacttctgcttcttgcagtgtaccagcgcatacccgctccagcctgaggacgtcaacctgcgggtcatctcgaatgtgacagtgatgataacatggg

SEQ ID NO: 579869 - DNA, 96 bp, Homo sapiens
aaaagaatctcgctgggccaaacctaaagaacttgaggatcttgaagggcaacagatgtgtgttcagcctgtgccgcggctgctgcaagaagcgag

SEQ ID NO: 579870 - DNA, 101 bp, Homo sapiens
atcagtctttgacaagtgatgagaagctgtcggagcttcccaagggtcatcgagcagctcggtgggaagcagctggtcatgaaccacatgcatcatgaaga

SEQ ID NO: 579871 - DNA, 100 bp, Homo sapiens
ggcaggaacaacctcattctaaagaatggtagctgagtggaggttgtctcgaggtgttgaagaacagacacaagctttctttgaaggctttaatgaaatt

SEQ ID NO: 579872 - DNA, 96 bp, Homo sapiens
gaagcagcgacggcacagcgggaagaatgtactaaggctcgtacgtctgcatcgattatcttacgtggggcaaatgatttcatgtgtgatgagatg

SEQ ID NO: 579873 - DNA, 100 bp, Homo sapiens
gtaaatgggaaggacaggcagagctaaacaaggaaataatgaagatgtttcattttcaagaccagcagatcttgaccttattcagtcaactccctttaaa

SEQ ID NO: 579874 - DNA, 73 bp, Homo sapiens
cgctttggaggcagcacccggctctttatcctgcagcctgtcaagttggctgttgtttgcagagatggtcaag

SEQ ID NO: 579875 - DNA, 99 bp, Homo sapiens
aacaacctggcccatgagatgatagctgtggaagataacaacgaacttgatgcaagtgataggtttgccaaggtcagacctctcatcatccggatgaac

SEQ ID NO: 579876 - DNA, 83 bp, Homo sapiens
gtgaagaaaacctcatgaatagcaatcacagagactcggagagcatcactgtccacagcaggagcatcattattggctaatgc

SEQ ID NO: 579877 - DNA, 101 bp, Homo sapiens
tctccacctcatcaggaaacagctgagacaggaatgatgagaagacagcagctgattacaagattttaggtggttcagtccttcacctggtgttggctctg

SEQ ID NO: 579878 - DNA, 78 bp, Homo sapiens
agcctcccgagtagttgggactacagacatcaatcgcctgggccagagtgacccggccccactgcagcaccagatgga

SEQ ID NO: 579879 - DNA, 74 bp, Homo sapiens
aactccctccggaggcagcacctcaggaaaggtgcctttcctgaagactatcttctggtctcgaaatggacatg

SEQ ID NO: 579880 - DNA, 100 bp, Homo sapiens
aaagaatatgatcaactcctgaaagaacactctgaacttcaggatcggaatgcggggtcgagagctgatgggcggcattgggaaaaccatgatgcagagt

SEQ ID NO: 579881 - DNA, 75 bp, Homo sapiens
gaagcccggcgacggaggaacgcaggtctgctgccagatacttctcaccactgcatgaatggacatttgaaagtg

SEQ ID NO: 579882 - DNA, 98 bp, Homo sapiens
gagcaccttttccaagctggcttcatggtttgctcagaattctcggggcggcacagttccagggtaaagaaactgcggcaatgaaagctgatctcctg

SEQ ID NO: 579883 - DNA, 99 bp, Homo sapiens
gccgagagggacaggcttctccggaaggaacagattttagctgtggccaggactccctggaggaaaagcggaagcggcagcggtctgaacgcctggaac

SEQ ID NO: 579884 - DNA, 101 bp, Homo sapiens
ccacggtgatgagccgggcctggcggacgcggcgccatcgcagtcaggcctccggtgtggctgtctctgatggtgtcatcaaggtgttcaacgacatgaag

SEQ ID NO: 579885 - DNA, 74 bp, Homo sapiens
tcccccaaagatgagatttacctgtgagatgtttcatcccaacagctgcccccaagtgtaactccagcactgtg

SEQ ID NO: 579886 - DNA, 100 bp, Homo sapiens
gtgcttcttcgggcggaggaggaagtaggggtgcacctcagcactatcccaagactgctggcaacagaaactaatctggattcactccctctggttgata

SEQ ID NO: 579887 - DNA, 95 bp, Homo sapiens
gttggaccttccggagcttctcagaagacagagggttttcttttgagatccggcactccacccagagcctctttgagtacatgaagggcattcag

SEQ ID NO: 579888 - DNA, 93 bp, Homo sapiens
tggaaaaggagttcgagcagatcgacaagtccgggagctgggcggccatttaccaggacatggatttgattgacatactttggaggcaagata

SEQ ID NO: 579889 - DNA, 50 bp, Homo sapiens
ggtccgcggcttctcggagcttagtggagagatctacagaccaagtaatc

SEQ ID NO: 579890 - DNA, 74 bp, Homo sapiens
aaagcttcggcacaagggcccaactggaattccacttacgggtacggttcctggagcagcagaacaagatgctg

SEQ ID NO: 579891 - DNA, 98 bp, Homo sapiens
gacgtggccgaaatgcacaacatcctgaagaaataccaccaggaagttggtgaaccatctaaagaagagaaggctgtggccaagtatcttcgattcaa

SEQ ID NO: 579892 - DNA, 75 bp, Homo sapiens
ccgaggtggagctgcggggccctggcatgaaaggccaggtcagagcagcccaccatgggatggggagggggtgga

SEQ ID NO: 579893 - DNA, 83 bp, Homo sapiens
cggcctcagggttcaggcaatgcaaataaggttctctacttaaaagacaatgactactgatgaaggtgccaagaacaatgaag

SEQ ID NO: 579894 - DNA, 75 bp, Homo sapiens
ggtgagactttcacaataagagcagaggatggaacacttcagtgcattcaagaattcagtagctttgttgtccgg

SEQ ID NO: 579895 - DNA, 50 bp, Homo sapiens
gacaccagctccgaaatcaccaccaagggtgcaacaccggaggatttcag

SEQ ID NO: 579896 - DNA, 101 bp, Homo sapiens
aagtacaaccgcttcgagaagcgccacaagaacatgtctgtacacctgtccccctgcttcagaagctatggagatattttgcatagaatgaaggatctctg

SEQ ID NO: 579897 - DNA, 89 bp, Homo sapiens
ggaacatgtacacctcatccctgtacgggtgcctggcctcgcttctgtcccactggaccaagctgactgaaagattcttcaagaataca

SEQ ID NO: 579898 - DNA, 101 bp, Homo sapiens
ctttaccatcacctcatccagttcgctattttgataactcaagtttaggcctttgtccagatattgatgatgttaagaagttcaaaccgggttacctggaa

SEQ ID NO: 579899 - DNA, 50 bp, Homo sapiens
gaattactttgttatgcagaaagtgccaggtgtggtgtcttacacctgta

SEQ ID NO: 579900 - DNA, 98 bp, Homo sapiens
ctgccgcctcccgggagtgccgtgcgccgcagcccgggcccaggccccggcagcgcctgggacaaggcagctatcaatggtgtaataccacaggaaaa

SEQ ID NO: 579901 - DNA, 90 bp, Homo sapiens
tatctgaataaagcgaagtggctggaaatgtatggggtagacatgcacgttgtcagggtcagatttaatgtactacaatatgttgtccca

SEQ ID NO: 579902 - DNA, 100 bp, Homo sapiens
atatccatggactcagtattatcaagctgggagtgtccactcgccttccaccagcatggcaacgtcttcacagtaccgccagctgctcagtgactacggg

SEQ ID NO: 579903 - DNA, 100 bp, Homo sapiens
tctgtgctcagtggtgcaggaatgcattttccttggcttcaaacatacgtagaaactgtgggagccatgtggctagaaatcctcctcacttcagtgctgg

SEQ ID NO: 579904 - DNA, 82 bp, Homo sapiens
ctgcagaaccagatccgggagcacgtcatctccatcgaggctacgagttccagggagctctgtcctggtgaccgtgcccggg

SEQ ID NO: 579905 - DNA, 100 bp, Homo sapiens
ccagctcttcagatcaatatgaatctgtctatgatcttctcccaaaggagttacagttacctccatctagagaaacatctgtagcatcaatgagtcagac

SEQ ID NO: 579906 - DNA, 100 bp, Homo sapiens
tctgaaagctggcaacgtgctgatgaccctcgagggagacatcaggctgggtctcctgactcagaagctaacttatgaaaatggcttgttaaaaatgaac

SEQ ID NO: 579907 - DNA, 99 bp, Homo sapiens
gtgaaagtaacctggttgtcacatacccccagcttagaggtgcttcaccctgccccaagttaattggccttggtcctcacagctccaaaaagaaacagg

SEQ ID NO: 579908 - DNA, 74 bp, Homo sapiens
aagtggtgaaggagtgtgtgcagcgcccatagatgagagcagccagatgagtgacctccctgtcaaagtgactc

SEQ ID NO: 579909 - DNA, 100 bp, Homo sapiens
ccgagtatggtttccgcaaagagagggcggcgctggaacagttgcagggtcacagaaacatcgcttgaaggatgccaatgatgtaccaatccaatgtgaa

SEQ ID NO: 579910 - DNA, 50 bp, Homo sapiens
ctgcccggccacgaccccgtctgggagacagggtctcactctgtcaccca

SEQ ID NO: 579911 - DNA, 100 bp, Homo sapiens
aaccatgacccggcagtgggtgaccgcctccgtgtcatcttcctggagaactaccgagtctcactggccgagaaagaacacagatgacctgctggtggcc

SEQ ID NO: 579912 - DNA, 82 bp, Homo sapiens
tctccttttccctctccctttccctaaggtccaggggcaagttcatcctactctcgagtctaatgatgatgctcttcagtat

SEQ ID NO: 579913 - DNA, 74 bp, Homo sapiens
gtaacacatcccgttatgccgctgcactctacaggcaagggtgtcaaattgagaaccaggtagatccccaccac

SEQ ID NO: 579914 - DNA, 100 bp, Homo sapiens
cgcgtcggctgagagcccacaggcccccacaggtctgaatttcctgctgctgttcacaaagatgctttttatctttaactttttgttttccccacttccg

SEQ ID NO: 579915 - DNA, 100 bp, Homo sapiens
ttgagccccatcgtggattccaagacatccctgctgagagagccaaggacctgaaggagaagaaggagaaggtggaggagaaggcaagccggaaagagcg

SEQ ID NO: 579916 - DNA, 89 bp, Homo sapiens
gacagactcatggggaagggccaggtccagttacagaatgtctgaaggggacagtgtgggagaatccgtccatgggaaaccttcggtgg

SEQ ID NO: 579917 - DNA, 100 bp, Homo sapiens
aagatatgacctatgcagttcgaaaactggataacactaagtttagatctcatgagagacaatatggtttagataattctggaggatacaaacaacaaca

SEQ ID NO: 579918 - DNA, 100 bp, Homo sapiens
gagcaatggccgctgagaacagcaagcagttttggaagaggagcgctaagctgccggggagatcaatgtccgagttaccaccatggatgcagagctggag

SEQ ID NO: 579919 - DNA, 76 bp, Homo sapiens
agtcggtgctccggggaggtcacctgacgaggaggtaggcgaaaaccaagagtacatcggcctcgttctcctatat

SEQ ID NO: 579920 - DNA, 75 bp, Homo sapiens
attttgacctccttccatgaatcacaaatgttcttaatggcatctagaatgtccttcagtgaatctacagaccta

SEQ ID NO: 579921 - DNA, 75 bp, Homo sapiens
gccttttccgttgccggtgccggcctagcgtcctggaattacttcaatcaagtgagcacctgcggatctgtcccc

SEQ ID NO: 579922 - DNA, 101 bp, Homo sapiens
ggccgacccttcctgtcgctgacggcgactgcgggaggccagtattctaccttgtaaatactgttatttgtatatactgtaaatgatgacatcggtgggca

SEQ ID NO: 579923 - DNA, 96 bp, Homo sapiens
tggtggaatatgccaaggaaaaactggagagcttcatcaaaaatagtgatagctttgataagattgcaagtcaagtagctgctttggaccttggct

SEQ ID NO: 579924 - DNA, 95 bp, Homo sapiens
tggaccagcctcttctgaaacactggggaataagacgagttggaagaagacctgatcaacaacttcagggtgaagggaaaataattgatagaaga

SEQ ID NO: 579925 - DNA, 100 bp, Homo sapiens
aagcttcttctaaaacagcagcagcttcaccagtctcgactggattacaattggtttagatcctgataagcatcttgggaaaaccctggatcaaatggag

SEQ ID NO: 579926 - DNA, 51 bp, Homo sapiens
gtgaagtggcccagacagcagacgccagggaatcaaccctgcctaccggac

SEQ ID NO: 579927 - DNA, 87 bp, Homo sapiens
agaaagaccacttaagcaaacttaatataccagacactgcaactgatgatgataattccgaagaaggcttccacactattcattcag

SEQ ID NO: 579928 - DNA, 100 bp, Homo sapiens
gggcgaggtcagccccaaactaccgaactcccccactggaaaggattctgaaagaaatgaagtcagccctcagaaatgaagttgactgcctgctggcttt

SEQ ID NO: 579929 - DNA, 98 bp, Homo sapiens
cctggccagctgccgcgactgggaggagcgccggaacgccgaggcccagtgggaatgtaagacggacttagatattgcatacaaatttggaaaaactg

SEQ ID NO: 579930 - DNA, 90 bp, Homo sapiens
ctccttctcctggagacgcaactcaagacaaggcgcctctgtcgaagagccttctgctggtccccagtgccctctccctcctgctcgccc

SEQ ID NO: 579931 - DNA, 100 bp, Homo sapiens
cgagatcatggggcccaagaaaaagcacctggactctgcggttggatttctcacgatgtccagtgttatctccatgtctgcccctttcttcctggggaag

SEQ ID NO: 579932 - DNA, 80 bp, Homo sapiens
ttttatccactcattggcagagaagctccatccagtccaatggatcagatgggcaagatgagacctcagccatatggcgg

SEQ ID NO: 579933 - DNA, 101 bp, Homo sapiens
tcccttgtccgggaagcccgcccagggaaagcaggcaggatgggagagtcgccgatagaaccacctcttccctgcctcctgggcttgggggaagcttgaat

SEQ ID NO: 579934 - DNA, 75 bp, Homo sapiens
actggcaaacgtatgtttctggaacattgcgatttggaataaatgcaatggcacatcgtgattctgagatgaaag

SEQ ID NO: 579935 - DNA, 51 bp, Homo sapiens
acttacgaggagcagtttaagcagaagatgctcatgaagcagcaggaccgg

SEQ ID NO: 579936 - DNA, 107 bp, Homo sapiens
tctctcggcagtcaccggagtgcccgagggggaagcacgatttacggaagcataagcagtactataatggatgtagacagcacaatttccagtgggcgttcaactcc

SEQ ID NO: 579937 - DNA, 50 bp, Homo sapiens
ccgcggatctcaccgccgctcagggacttctgccatgggcaagtgatgtg

SEQ ID NO: 579938 - DNA, 100 bp, Homo sapiens
cgctttcctgggttgcttctggcggccatggtgttgctgctgtactccttctccgatccttccgctgaggaattgagaaaactaatgatgttgcatggag

SEQ ID NO: 579939 - DNA, 90 bp, Homo sapiens
tggaagaactcacagctagtctatttgaggtactaggttttgacaagcttgcatcatgcgtgagtataagctagtcgttcttggctcagg

SEQ ID NO: 579940 - DNA, 100 bp, Homo sapiens
ctgggcacagcaggcatcggagatatggctcgtggacagcagaaaattcagtctcagcagaaaaatgccaaaaagcaagctggacaaaagaagaaacaag

SEQ ID NO: 579941 - DNA, 71 bp, Homo sapiens
atcttgtgtgggcactgaagggggactacaggttcgagaggtcgggaccctgagttaggcctgaagtctgt

SEQ ID NO: 579942 - DNA, 100 bp, Homo sapiens
cacgtctcgcggatcatgctgggctttgttatgcacctaaagccatattggaagctccagaagaaagagcaccccccggaagtcagcagggaaacgcaga

SEQ ID NO: 579943 - DNA, 100 bp, Homo sapiens
gtgaagatcggacactacgtgctgggcgacacgctgggcgtcggcaccttcggcaaagtgaagaattgttgtgtccactgtatcctggcttgcttgttct

SEQ ID NO: 579944 - DNA, 100 bp, Homo sapiens
cgaattcagaaggatatcgacgtcgtgatccagaagtccagagctgaggactgcctgtttgcagattcatgatgttgctatcaaaagttgagaaattgtc

SEQ ID NO: 579945 - DNA, 100 bp, Homo sapiens
tcgcagccgtgacctgcagctggcggttgatgccggcccaggatggatcagacctgtgaactacccagaagaaattgtctgctgcccttttccaatccag

SEQ ID NO: 579946 - DNA, 90 bp, Homo sapiens
gaggaaaggagacggatagaagaagaaaggcttcggttggagcagcaaaaggttgatgagtattatattgaagacacaccaatttatggt

SEQ ID NO: 579947 - DNA, 74 bp, Homo sapiens
actgtttgtagccctcgtccagacgccccaaacaaacagacagtcattttgtttactcattcagccctgttgca

SEQ ID NO: 579948 - DNA, 100 bp, Homo sapiens
atttattggatcattgggaacacttcacctgtcacacattcagacgcctcctaatttccaaattacaagatgaatttgaaaaccgaactagaaatgttga

SEQ ID NO: 579949 - DNA, 75 bp, Homo sapiens
gcctggactccaaagccttcttattgactcctaggaatcaaggtacttttaggttgaaatacgcccctccagcag

SEQ ID NO: 579950 - DNA, 101 bp, Homo sapiens
ggaggagcagctcctgcccctgtccgggggatgactgattctcctccgccaggggttcggtccgagcccggtgggaggctcccggagcgcagcctgggccc

SEQ ID NO: 579951 - DNA, 100 bp, Homo sapiens
cctgtggagatgcggaggctcaactaccagaccccagatctgtgacttcctccgcggagccacagtccatagaatcctcggccagcaggtcccctatgcc

SEQ ID NO: 579952 - DNA, 101 bp, Homo sapiens
gaaaaagcagagcgactcggttaagggaaagcgccgagatgacgggctttctgctgccgcccgcaagcagaggacatggatttgattgacatactttggag

SEQ ID NO: 579953 - DNA, 75 bp, Homo sapiens
tcagcgccccggactgcaccagagccatggtcgctcattcttggaatcccagaacaggccttaagtcttctccac

SEQ ID NO: 579954 - DNA, 50 bp, Homo sapiens
agagtggagaaggtctttcgagcaacctcccgacttctagtaaattaccc

SEQ ID NO: 579955 - DNA, 100 bp, Homo sapiens
cttccaaagaatgccacagaatcaggggaggcatgcttcagtaccttggccatgtagaagttgatgaatcaagaggaatgcacatctgtgaagatgctgt

SEQ ID NO: 579956 - DNA, 95 bp, Homo sapiens
gaacttcgttgcttgcttgcctgtgcgcgcgtgcgcggacatggcctcaaacgggatgcccgctgtctgtagccccggcatggtgcccgtggccc

SEQ ID NO: 579957 - DNA, 74 bp, Homo sapiens
gctggggctgggctcgccagtcttggggacagtgtcagctccaatatcagatggaaatgatgcggagccttcgc

SEQ ID NO: 579958 - DNA, 101 bp, Homo sapiens
gaagcggccaatggcacggaggcctgcgtatcgtcttattaggcatagagcctgtgctttaagagatactgcctatgccataattaaagaagaacttgatg

SEQ ID NO: 579959 - DNA, 50 bp, Homo sapiens
ggaaagctggaaacatagtccgatctggtgctccctctccattaagtaag

SEQ ID NO: 579960 - DNA, 100 bp, Homo sapiens
ttcatggacacctttgagcctttccaggctgctgaatgccatggtggcaaaactggggaaccgggaggacccactcccccaggactcctttgaaggcgtg

SEQ ID NO: 579961 - DNA, 74 bp, Homo sapiens
gcatcctgtgctgtgggggctacgaggaaagcggagggcattaagaacagcctcggaaaaactcagaaaccgct

SEQ ID NO: 579962 - DNA, 90 bp, Homo sapiens
accgctgcatcttcctcttctgctgccgcgagcagccgtgctgtgccggcctgcgaggtgaatccctgactccagaacgcactcagctcc

SEQ ID NO: 579963 - DNA, 49 bp, Homo sapiens
atccggagcagccggggtcggagcgggatccagtttatggaaaaggaaa

SEQ ID NO: 579964 - DNA, 100 bp, Homo sapiens
ggctgacatcagcggctctttgtatgatgacgtattgttgcagcatctggcagtgagactgaggatgaggacagcatggacattcccttggacctttctt

SEQ ID NO: 579965 - DNA, 83 bp, Homo sapiens
cccgcggccgcaccttcccgccttctcaggtggtcaagtaccccctgcacgccatcatggagatcaaggagtacctgattgac

SEQ ID NO: 579966 - DNA, 100 bp, Homo sapiens
gggacgggaagtggccaaggaattcgaccaactcaccccagaggaaagccaggcccgtctgggatataaagatgaagcgcagctgtataaagaagagcac

SEQ ID NO: 579967 - DNA, 98 bp, Homo sapiens
tcccagctgcgcaaagcttgcgaggtggcgttaggtattggtttgccttaaaaaggggttaccatgcagcttttaaatatgacagcaatactagtaac

SEQ ID NO: 579968 - DNA, 98 bp, Homo sapiens
agaggcctgggtgaggaggacattcgcagggcacgggaggcccgtcccaggaagacaccccggccccagggacttctgcctggggtgagccctccgtg

SEQ ID NO: 579969 - DNA, 75 bp, Homo sapiens
gcaccgatgatgtgcagatcaatgacatttccctgcaggccaacgtgcagcggctgaaggagtaccgctccaaac

SEQ ID NO: 579970 - DNA, 83 bp, Homo sapiens
ctcgggagtcggcgtccaggctcggagcgcgacacggagactaggtggcagcagcctcccgcgacgatgcccctcaacgttag

SEQ ID NO: 579971 - DNA, 90 bp, Homo sapiens
cagctgggggctccttgccaccagtgctgtgtcttaagagctgccatcccggctggatgattcttttattaggccagtaactttttggat

SEQ ID NO: 579972 - DNA, 140 bp, Homo sapiens
tctccgagctcgcctgcatctactcggccctcattctgcacgacgatgaggtgacagtcacgacaatgcagatcttcgtgaagactctgactggtaagaccatcaccctcgaggttgagcccagtgacaccatcgagaat

SEQ ID NO: 579973 - DNA, 88 bp, Homo sapiens
cttcagacagcatatttgagtcatttccttcgtacccacagtgcttcatgagagatacctgaaaaaagcggcagtctgcaacccagaa

SEQ ID NO: 579974 - DNA, 100 bp, Homo sapiens
tacagaaaggctgtacctggaggaaggaagtgcggagccagcctgagttgggagaagagctccagagagtcctgcacctcagctgcggagagggatggca

SEQ ID NO: 579975 - DNA, 98 bp, Homo sapiens
ccgggacccggttccccggcccacagtgggggtgtgcaaacccgagagaactgggctgtaccagtgcaggtcctcactttaatcctctatccagaaaa

SEQ ID NO: 579976 - DNA, 75 bp, Homo sapiens
aaagttgtttcctccaacattgatgttcctccagcaagttctggagaccagaaggccaaaatcaaaagtatgggc

SEQ ID NO: 579977 - DNA, 75 bp, Homo sapiens
tgctcagaagcttacaaagctgcctcgaggatgttcttgagtcgaagaacagcaccatcaaggacctgcagtatg

SEQ ID NO: 579978 - DNA, 101 bp, Homo sapiens
agagagataacaaaagctgctcagagtctcaatgaacttggtgtatgcaacagcgttattgcaacaggctaacgaaaacagacaaaattcaactggaaaag

SEQ ID NO: 579979 - DNA, 90 bp, Homo sapiens
ctttctacacatgcgcctgccccacgggtgtgcagctgcaggacaacggcaggacgtgtaaggcagcatgttggcagataaattgaacat

SEQ ID NO: 579980 - DNA, 100 bp, Homo sapiens
cccggatccccaagaccctaaagttcgtcgtcgtcatcgtcgcggtcctgctgccatggacagaggactgcagaaaatcaacctatcctccttcaggacc

SEQ ID NO: 579981 - DNA, 75 bp, Homo sapiens
aaatctatcaatgctatcaaatgacagcattattcatgaagttttcatagattctttgtgggaaagagattcctc

SEQ ID NO: 579982 - DNA, 90 bp, Homo sapiens
gatccgcaagaacaagtaccgccccgacctgcgcatggctgttttggagtcagcggaagatcaccaaggccagggagtggttccaccgca

SEQ ID NO: 579983 - DNA, 90 bp, Homo sapiens
caagaaatgggaaaactcgaaacagatttttatctccagatgaaatggccactgcttgatgtccaggcagggagcctccagagtagacaa

SEQ ID NO: 579984 - DNA, 100 bp, Homo sapiens
ggccgccgcctctttagccaccgccgccggcagcgaagacgcggagaaaaaagttctcggtgtcatggagaaactccagctgggcccagagattctgcag

SEQ ID NO: 579985 - DNA, 100 bp, Homo sapiens
gttgcaggactctttctgttcaggccagaccctctgggagcttctcagccattttccacagatcagttttgacaactactctgccaacgtgatggtggac

SEQ ID NO: 579986 - DNA, 83 bp, Homo sapiens
tcttcagttcgtgtgtggagacaggggcttttatttcaccttatgccagcctggaccatcttggaggcagtgtaggatcatgg

SEQ ID NO: 579987 - DNA, 82 bp, Homo sapiens
gacgaggaacgaatgggacaagatcccgtccatgaatcaggttaagagagaagagagtcagcaacagcaagttttactcata

SEQ ID NO: 579988 - DNA, 98 bp, Homo sapiens
ttaatacaattactttgccagacttcagcgatcccgagacagactctaaaatagagctcaagcttgagaagagagaaccactaaagggcagagcaaag

SEQ ID NO: 579989 - DNA, 82 bp, Homo sapiens
ccatagatggccagctttcccccgagggtcaacgagaaagagatcgaaacatccctttattttgatgtatgaagaacgtgcc

SEQ ID NO: 579990 - DNA, 76 bp, Homo sapiens
agacggacttcgggggagacgcccagatgggggaaccccgggctggggccgccctggacgatggcagcggctggac

SEQ ID NO: 579991 - DNA, 73 bp, Homo sapiens
aaaacttcgaggcactcaagtcctggctcagcaagactctcgagcccatggcaacgggcatgaggaggtagtt

SEQ ID NO: 579992 - DNA, 96 bp, Homo sapiens
ctcggggcgcgctgctgctggcactgctgctctgctgggacccgaggctgagccaagcagcagttggaattgatcacaccttttcagttgtacttc

SEQ ID NO: 579993 - DNA, 90 bp, Homo sapiens
tagcacagatgaagacgaagttgatggcctggagaagaaagatgttttgcctactgttgatccggacggcatcagaattaatgtaactac

SEQ ID NO: 579994 - DNA, 100 bp, Homo sapiens
agtgaaggaattaattaagaatggagctaactgcaatctggaagatttggtgagacctggaaccccttcaaattacagtaccagctgagaaatgtacgag

SEQ ID NO: 579995 - DNA, 82 bp, Homo sapiens
agaacacaagaagtgctttaagagtggacagtttgcggttgtgaagaaatgccgtgagaaaagcaccggcctccagtatgcc

SEQ ID NO: 579996 - DNA, 88 bp, Homo sapiens
atagtaaccctgccaaatacatcagcttgtaggagacagagacacatcaccttcactttgggatatggaatttgataagcagttagcc

SEQ ID NO: 579997 - DNA, 82 bp, Homo sapiens
ggatcctgtctggagagaagcagcggatcagcagaggacaagaagctgatcaaggccctcttcgacgtgctggcgcatcccc

SEQ ID NO: 579998 - DNA, 74 bp, Homo sapiens
cgcaatgtggaaatgtttatgaccattgagaagtccttggtgcaggccagaggcattgatgtgcagcaggtttc

SEQ ID NO: 579999 - DNA, 75 bp, Homo sapiens
aaaggaagctgcccaaacccgaggttatgatgtgattgctcaagcccaatctgggactgggaaaacggccacatt

SEQ ID NO: 580000 - DNA, 82 bp, Homo sapiens
acctcttgtcctttggctttgtcacgagagttgtgaggagaatggtggcttgtttgagcaagaagtctatgtgccccaggat

SEQ ID NO: 580001 - DNA, 100 bp, Homo sapiens
ctatgccatttttcttaaatggcccacatcaggacagctgttccttggccatcccaaagctattctgggggcaacagagcagtatcctggtgtgaaccag

SEQ ID NO: 580002 - DNA, 122 bp, Homo sapiens
ggaagaccgcgcgcagggcctgcagcgggagctggacggcgagcgcgagcggcgcgagaaaagacgtctcccacaacctgctccgggcgctggacgttgggctcctggcgaacctctcggcg

SEQ ID NO: 580003 - DNA, 98 bp, Homo sapiens
ggcgctgaagcacatggatggagggtataaagacgctggctgtgtgtcccaacaacgatatgaaagagcttgttggatgaagtcttctttagaagaag

SEQ ID NO: 580004 - DNA, 101 bp, Homo sapiens
acacaatggaagtagtagttgttgagcagagggaaagggataggagaaggatgtggactgcagtgctgcagtgccaggtgtctgtgacctttgaggatgtg

SEQ ID NO: 580005 - DNA, 51 bp, Homo sapiens
gggactgctaagaagataccaccagatctgaagaagacacttgaatcatgg

SEQ ID NO: 580006 - DNA, 75 bp, Homo sapiens
cacgagtgccgccagcatgtctgacaaactgccctacaaagtcggtgagccctattcccagaggcaggtggtgct

SEQ ID NO: 580007 - DNA, 100 bp, Homo sapiens
tggaatcgctgaaccgtgcagtgctcgctgccatggatgccaccaagctggcgtcgaccagaagattatgatattcataacagcagaaagaaaccaagga

SEQ ID NO: 580008 - DNA, 100 bp, Homo sapiens
ctctaatgaagcaatacattgagtttgtggcagacagacttatgctggaactgggttttagcaagctgccactgcagagccccgccatggaagacacgcc

SEQ ID NO: 580009 - DNA, 90 bp, Homo sapiens
gagaactgaacaagataatacatgaaggtgcatatcaaagagtctcacatgctctgctgggacttgattattcttagaaatgcacttgac

SEQ ID NO: 580010 - DNA, 74 bp, Homo sapiens
cggcttcatcagcaccttgggacactgccctaaccatcatggaggtggccgaggtggaaagtcctctgaacccc

SEQ ID NO: 580011 - DNA, 88 bp, Homo sapiens
ttgagtcagtgcgccgctctccagcccgcttgaacgatccgagctggatccagagttgcatacagaccaatttctgcatcagtgttat

SEQ ID NO: 580012 - DNA, 118 bp, Homo sapiens
aagtgtggctgatcttattgaatccatgttgaaaaatctatccaggattcatcccgtgtcaacaatggtaaaggtgcattttggaagatggctgatagaaggaagtccttatgtggta

SEQ ID NO: 580013 - DNA, 96 bp, Homo sapiens
ctggtctcggccgcagaagcgagatgacgaggcatctaaccttgttggtgaagagaagctgatcccacctgaggagacgcctgcccctgaaacaga

SEQ ID NO: 580014 - DNA, 100 bp, Homo sapiens
cgtcaacaacgagtacctcaaccctgagctgcgtgagaacccgcccatgaagccagatttctcccagcttggtgtaaaaattgccaaagcagttgcctgc

SEQ ID NO: 580015 - DNA, 100 bp, Homo sapiens
gcacagccaggacatcctggaacctgggaaagggtctgccagcttacatttacccaaactgtccattactggaacctatgatctgaagagcgtcctgggt

SEQ ID NO: 580016 - DNA, 145 bp, Homo sapiens
gctgctctgccgttgggtgaggcgcggagcgaagtgaagggtggcccaggtggggccaggctgactgaagcagcctgcttctgcaaagtggtacgatcgaagggactatgtcttcattgaattttgtgttgaagacagtaaggat

SEQ ID NO: 580017 - DNA, 83 bp, Homo sapiens
ctcgctcgggagcggaaacagcggcagccagagctttatgctgaaaaggtggccactagaggtctgtgtgccattgcccaggc

SEQ ID NO: 580018 - DNA, 50 bp, Homo sapiens
gtgctggagaacttcgtgggccgatcccgactgggcctcctacactctgg

SEQ ID NO: 580019 - DNA, 51 bp, Homo sapiens
tgctgcatgagacccagggtcctgaacccccagaggacatgactactgaag

SEQ ID NO: 580020 - DNA, 75 bp, Homo sapiens
caacaaccccccgtatttgccccccgaggcaacaggacctgtaccgaatcctgaaggcctacaccatctaccggc

SEQ ID NO: 580021 - DNA, 100 bp, Homo sapiens
cacgaggctgtcatcaccgccatgcccaagaataaagaataatccagaatggctactctgatctatgttgataaggaaaatggagaaccaggcacccgtg

SEQ ID NO: 580022 - DNA, 88 bp, Homo sapiens
gtggggccgcgcaggcaaggacaaggccacagagtcggggtcttcacgcatcatcggctggttcgtgcgaagcttcaagtacttttac

SEQ ID NO: 580023 - DNA, 89 bp, Homo sapiens
tcgggtggaagaagtggggccatacacctacaggtacttcggccttcaaggggctcctttattgagaatcaatgtcttctcctaggtaa

SEQ ID NO: 580024 - DNA, 76 bp, Homo sapiens
ggggagcaaattttactttctgacaatgcagcttctcttgcagtgcagtttcagaagctatctcctgagcagtgtg

SEQ ID NO: 580025 - DNA, 83 bp, Homo sapiens
ccgggcgcaccgaccatggcctccaaatgccccaagtgcgacaagaccgtgtacttcgaaaaggagaacaacttcccgccact

SEQ ID NO: 580026 - DNA, 119 bp, Homo sapiens
aagaaaccggcttcggcttctttaaaatccccgacgactcacctgattaacctgctgcagttctgaccctgccaagattccaggaatatacaattcacccttcagaaaagagcctgatc

SEQ ID NO: 580027 - DNA, 100 bp, Homo sapiens
accttcacaggacaccgggatgcagtgtcggccctggccaacgtcaacattgggagcctcatctgcaatgtaggggccggtggacctgctccagcagctg

SEQ ID NO: 580028 - DNA, 98 bp, Homo sapiens
agcgggaagggatcccctggaaacatcactgccctgggaagaactaggatgaggtattgacttgctgttgccacataacaaaccctgccagaactccc

SEQ ID NO: 580029 - DNA, 82 bp, Homo sapiens
aaatttggagtgtgcgtgcgcgccgagcgttactccacaggatccgctgaacataggatgttgccacaaaatctacctcgtg

SEQ ID NO: 580030 - DNA, 96 bp, Homo sapiens
ttgggcatcactggctatttcctgatgaatcgccgcagctggagccccacaggagaaaggctgcatgcagcagattggaataaatatgatgaccga

SEQ ID NO: 580031 - DNA, 100 bp, Homo sapiens
actatgaagggttttgaatatatcttggctaagctgcaagcgggctacattgagagacctcagctgattcgagcaaaagtgccaattgtgaagttcaggg

SEQ ID NO: 580032 - DNA, 101 bp, Homo sapiens
tctctctggactgtgcatagcagtagctgttgtttgggctgtgtttcgaaatgaagacagatactggactaagcatgcccagtgatacttcactctctcca

SEQ ID NO: 580033 - DNA, 100 bp, Homo sapiens
cggagggaagacgccctggtgctcaccaagcaaggcgacattgactacagcaccgtgctcctcggcatgctggtgacgcaggacgtgcagctcgggctct

SEQ ID NO: 580034 - DNA, 100 bp, Homo sapiens
taacaggactagatgtttccacagcagaggaattacaggatctggtgaagaatcatctgatgtatgctgtgagagaggaggtggagatcctgaaggagca

SEQ ID NO: 580035 - DNA, 110 bp, Homo sapiens
attaagtttaagacttcgcgagaacagaatttcttttggcacctcctctccgcgcgttcttgggccattggatttaatgtagagacggtgacgtacaaaaaccttaaatt

SEQ ID NO: 580036 - DNA, 75 bp, Homo sapiens
ggccggaggagtctcagagctgtcagaaaggttttgggatttgagattgacgcggtgaactctgtccagttttca

SEQ ID NO: 580037 - DNA, 75 bp, Homo sapiens
ctgtggagagcgacccgtggccttgtgtttcaggcccccgacagctgctctcgggagccgcctcccgacacccga

SEQ ID NO: 580038 - DNA, 82 bp, Homo sapiens
gggagcacacggagcactgcaggcgccgggaacagattatcagtctggtcaatcagatctgcggcaaagtgtctggtaaaaa

SEQ ID NO: 580039 - DNA, 75 bp, Homo sapiens
cttgctggtgcatgcgtcgtcggcctctgggcagcagaatggagatgtatgcatttcgattcttcatccgcctgt

SEQ ID NO: 580040 - DNA, 88 bp, Homo sapiens
cgcgtctcggaaaccggtagcgcttgcagcatggtcatgttggcagcttcctattggtctcttctggccccagcagttgagatggcca

SEQ ID NO: 580041 - DNA, 100 bp, Homo sapiens
ccgtatcttcgtctatttcatcacaaaactgtcccgggtgggaagaggaacagcctatgtgggcttccacggagtaatgttgcaggtcagtggaatccag

SEQ ID NO: 580042 - DNA, 82 bp, Homo sapiens
ccggacggtacttctgccactgctgctccgtggagatcgtcccgcgcctgccggttcttctgtgtggcagttcagaatgatg

SEQ ID NO: 580043 - DNA, 98 bp, Homo sapiens
gaccgagttcatgaagacctcaaccattcagtgaagcagagtggccagcctcctctgaaggtgaccatgctttgggattttcatagtttgagtaattc

SEQ ID NO: 580044 - DNA, 75 bp, Homo sapiens
ccagaagctgctaagcagaattgcaagggacaagtggccacactccctcagtggactgctgggacgggcccgatg

SEQ ID NO: 580045 - DNA, 97 bp, Homo sapiens
agatgcagatgagaaggttcagttggcaaaccagatatatgacttgttgacgaaggatcagagattggtgtattcgggcagactgcttcccgatcat

SEQ ID NO: 580046 - DNA, 105 bp, Homo sapiens
tgagctcagacctgccaatttaccagagataattgataacaccctgtaacagctgaccatcactggtgcaagctatatttaacggagatcctgatgaagttcgag

SEQ ID NO: 580047 - DNA, 75 bp, Homo sapiens
acttgctgctgatgaagatgatgacgatgatgatgaagaggatgatgatgaagaatggggcattctcttctccca

SEQ ID NO: 580048 - DNA, 90 bp, Homo sapiens
cgaggaggaagatggcgggacggctgccggcctgtgtggtggactgtggcacgggatcaacagtacaaattctgaagtttgtaaacttgc

SEQ ID NO: 580049 - DNA, 87 bp, Homo sapiens
ttggcaagtggacattttactggctcaagattgttaaaatgagtcttcggaagcaaacccctagtgacttcttaaagcaaatcatcg

SEQ ID NO: 580050 - DNA, 75 bp, Homo sapiens
cgcgcgcgaccgccgaatcgctcctgcagcagaggaagctcttcgtgggcggtcttgactggagcacgacccaag

SEQ ID NO: 580051 - DNA, 48 bp, Homo sapiens
gagatggtagccaacccctcaggatcagttccatgacaagacccctta

SEQ ID NO: 580052 - DNA, 51 bp, Homo sapiens
gggcacattcattctcatctctgtggtgatctttgtgaagtctgtgcagcg

SEQ ID NO: 580053 - DNA, 75 bp, Homo sapiens
cagaagaggaggttgcccagaagaaaaaggtgaggacaccagtgatgaattctgaagcaaaagttctggtgcctg

SEQ ID NO: 580054 - DNA, 100 bp, Homo sapiens
gaagctctttctcctggctgatgaggataacttcaaactaatgtgtactaatgccatgatttacaataaaccagagaccatttattataaagctgcaaag

SEQ ID NO: 580055 - DNA, 80 bp, Homo sapiens
ataatatagttggatcaaacaaaaacaacacaatttgtcccgcttgccaattctgtaactccttgggatatcttgctgag

SEQ ID NO: 580056 - DNA, 119 bp, Homo sapiens
cggattttgcggggttcgtcgggcctgtggaagaagcgccgcgcacggacttcggcagagacaatgcagatcttcgtgaagactctgactggtaagaccatcaccctcgaggttgagcc

SEQ ID NO: 580057 - DNA, 100 bp, Homo sapiens
gggaaactaaaaacgcatctatctaacgtttaccctagcaaaccaagagaacatatgatgagctgttactgggagcagcccaggcccatggcctcacgcc

SEQ ID NO: 580058 - DNA, 90 bp, Homo sapiens
aagatatagagacaacgactatgtccaattttcatgctcagtgcccaccaaatcttcataagcaagacggatatgcatgcaatcaaaatc

SEQ ID NO: 580059 - DNA, 88 bp, Homo sapiens
aacatcgacagagagaaggcaatgagccgacccatcttgtacagcaactggctgtcaaaggttgctccttgagggcaggacagttctt

SEQ ID NO: 580060 - DNA, 50 bp, Homo sapiens
cctgcgtaagggggcagagacagaaaaaggtgcactgcctcaacatggac

SEQ ID NO: 580061 - DNA, 75 bp, Homo sapiens
gaagatgatggaagaatttgtaccccatagcaaggtcaccaggcagcagggattggaaaccaggcaacaggaatt

SEQ ID NO: 580062 - DNA, 100 bp, Homo sapiens
gaaggtcttcattgttgggggagcaaatccaaacagaagcttctcagacgtgcacaccatggatctggatggtctcctgatcctggctgataagctccag

SEQ ID NO: 580063 - DNA, 75 bp, Homo sapiens
cggaattcgggaccgactgacggccggccggcttcccggaactggaagttgaggaaacgtgtgaagcttgaaggg

SEQ ID NO: 580064 - DNA, 100 bp, Homo sapiens
gcgaccaagatcaggaacctgccctgaccatgctcgacagctgaccaaggccatgatgcgaaaggccacggccagccgcctggtcacgcagcgcgatgcg

SEQ ID NO: 580065 - DNA, 100 bp, Homo sapiens
gtttctgcttcaacaccaagagaaaccgactgcgggaaaaactgactcttttgcattatgatccagttgagactctccaacatgtgccttctgaccatac

SEQ ID NO: 580066 - DNA, 100 bp, Homo sapiens
acaacatcatggagtattacaacgacggtaacgggcatggtgctgatgtgaaatgtgtagactggcatccaaccaaagggttagttgtttcaggaagtaa

SEQ ID NO: 580067 - DNA, 130 bp, Homo sapiens
ctgctgttgcacactgggttgcagcctatggcctgttatttgtctcaacaaaagaactattgggaagaagttacctgcaactacagcaactccagactcatcaaaaacagaaatggacagcaggacaaag

SEQ ID NO: 580068 - DNA, 96 bp, Homo sapiens
acgcccggcacctggacttggcttccctcaagtctatccgagagtttgcagcaaagatcattgaaggcggtggaagaagatatccccatagcgaaa

SEQ ID NO: 580069 - DNA, 100 bp, Homo sapiens
accatagctcttgagaaggaacagaagttacagaatgactttgcagaaaaggagaggtgacaggccgctgcggctctgtgctggtacgcctcatccctgc

SEQ ID NO: 580070 - DNA, 75 bp, Homo sapiens
gtccaacctggtcactgtgtttgagaatagcaggtgaaaggtgtagcagtcactcggcctacacccacagcatcg

SEQ ID NO: 580071 - DNA, 75 bp, Homo sapiens
agcgcttctttaagggctacgggaagatcctggaggtggatctgaagaacggctgcagaaccttggcctgaaaat

SEQ ID NO: 580072 - DNA, 83 bp, Homo sapiens
ctggcgtcggacgcgggcatcttcttcacccgggcggtgcagaaacaggtggcatctgcatcgcaccacggccctcggaagaa

SEQ ID NO: 580073 - DNA, 90 bp, Homo sapiens
gaggaggaagaataatgggaggagacaggacctttttcaacttgacaaatagtgataacaatccatattcctcatttggagcaactctgg

SEQ ID NO: 580074 - DNA, 100 bp, Homo sapiens
aggagattgcctcggattccgacagcagattccgaagaggctcaatctgtaaatccttctagtgttgatgaaaatattgactctgaaacagagaaagact

SEQ ID NO: 580075 - DNA, 100 bp, Homo sapiens
agacctgctcatacgaagaggcccgcgaggtctttgaggacagcgacaagacggatacctgggatgaactcctaattggtagtgtagaagtgaaaaaggt

SEQ ID NO: 580076 - DNA, 100 bp, Homo sapiens
cgcggacctccctgcgaccgtcgcggaccatgggcgacaaagggacccggaggttccagccttggcaagaggagtgtggcccttcctggaatccctctgg

SEQ ID NO: 580077 - DNA, 75 bp, Homo sapiens
ggagtcccaatgaaacgggcagccatggccctccacagcccgcaggcaaagtgtttcatggatttcaaagctgga

SEQ ID NO: 580078 - DNA, 82 bp, Homo sapiens
gacgccatgtcgggttattcgagtgaccgagaccgcggccgggaccgaggcagcctcccgcgacgatgcccctcaacgttag

SEQ ID NO: 580079 - DNA, 82 bp, Homo sapiens
ttggacttcttacccgagggggtgaacaaagagaagatcacaccactcacgctcaagatgatcaagcggtgctgattcacga

SEQ ID NO: 580080 - DNA, 82 bp, Homo sapiens
tcgccccccggggaagcggtggatgattttatcatgtgggcaacctgctgcaactggttctgcctggatggacagcctgagg

SEQ ID NO: 580081 - DNA, 88 bp, Homo sapiens
cgggctggactacttcagcagcctgtgggaaacccagcgtttgctggcagaaccagttcctggcatcaaagccgaaccagatgagagc

SEQ ID NO: 580082 - DNA, 83 bp, Homo sapiens
tgcgctgctcaaggacacggtctacaccgacttcgacgggaagcccgtcagcctgagctacagatgcccatgccgattcttcg

SEQ ID NO: 580083 - DNA, 90 bp, Homo sapiens
gaggacgcgccgcggccaggcagggaggagaccggcacccagacaggtggcgaaggcagaggatgctaacaactttgcaatgaaaggaaa

SEQ ID NO: 580084 - DNA, 101 bp, Homo sapiens
tactcacagagttagagagagggatggtggtcttagtggtgcaatggctagtataagcgtgcgttcgagtaccccaggctctcctacacatgtaagcagtg

SEQ ID NO: 580085 - DNA, 91 bp, Homo sapiens
tggactatctacattccggaaagattgtgtaccgtgatctcaagagatctcggctcaccaaattccacaacctgaaggcagtcgtctgcaa

SEQ ID NO: 580086 - DNA, 101 bp, Homo sapiens
ctcggcggagcagaggaaccacacgctgatcatgattcacaatgacatcctttcaagaagtcccattgcagacttccaactttgcccatgtcatctttcaa

SEQ ID NO: 580087 - DNA, 100 bp, Homo sapiens
ccacctgacctctacttccaggactcggggctctcacgctttctgctcaagtcctgtcctcttctgaccaaagagtcacttttacaaagagaaagtttgg

SEQ ID NO: 580088 - DNA, 75 bp, Homo sapiens
ctgtggatttcgaggagtgtctgaaggactcgccccgcttcaggggttgtagaaggtgatttagctgccatagaa

SEQ ID NO: 580089 - DNA, 75 bp, Homo sapiens
ttcccacctttacagaagcaggagtcagaaccagaagctggattatatcacatacctgtccatctttgaccaatt

SEQ ID NO: 580090 - DNA, 75 bp, Homo sapiens
gtgttagtcatggatgatccattcagcccctgcaggctcccaggccagtgccagtacttgggcttgccagtggcg

SEQ ID NO: 580091 - DNA, 83 bp, Homo sapiens
ctcagaagccatgcccctcaggctggaacttgccctgtctcctcgcagatgaggaacctggcttctgtatttaccatgtacct

SEQ ID NO: 580092 - DNA, 88 bp, Homo sapiens
agaagaacaagaagttgagaccgagaatgtggaaacagacttaattcagtgcacaaatgagatgaatgtgaacatcccacagttggca

SEQ ID NO: 580093 - DNA, 75 bp, Homo sapiens
tcaagatgagagttgttttttattctccacagtaaaagctgctgaaatgggttgcggattgaacaagttagagaa

SEQ ID NO: 580094 - DNA, 83 bp, Homo sapiens
cgggagatcccaggcggtgacagagtggagccatggctagaggctccatctatgagatctctgggaatgagtgctgcctctcc

SEQ ID NO: 580095 - DNA, 100 bp, Homo sapiens
ctccaaggggaggctcctcagagtgcactgagatcccaggaggatggccacatccccccgggctacatctcacaggtacaggaagaaggaatggaatcgg

SEQ ID NO: 580096 - DNA, 106 bp, Homo sapiens
gaaaacaaccttgaggaaccttgacgagtgtccggagtttagaaaacttagggatgggtgacttaagagattaaaattaatttggttgctgttggttctgaacaaa

SEQ ID NO: 580097 - DNA, 98 bp, Homo sapiens
gattatgggatgttcgagataataagatagttcgtcacactgtgtatctcctggtaacgcctcgtgttgttggtctcactctatcacccaggctggag

SEQ ID NO: 580098 - DNA, 98 bp, Homo sapiens
tagcactttgaaagaaaaaggctacaaagctgctttcattggaatagggatgcttcctttggaaattgcacttacaatctcaccattctcgactgttt

SEQ ID NO: 580099 - DNA, 100 bp, Homo sapiens
gagagtgcaagcaggacccttgtcggtgggtgaacattttgctccaaaagggatccttggccctgcgcagcaatcccacagagtattgatgaggaaactg

SEQ ID NO: 580100 - DNA, 75 bp, Homo sapiens
gcctggtgcccgttggagacaagctccaggccggagaccgcgtcttgtacagaagccgccacaagggtgacatct

SEQ ID NO: 580101 - DNA, 96 bp, Homo sapiens
gccgctatggatgatcgagaggatctggtgtaccaggcgaagctggccgagcaggctgagcgatacgacggacttgaaagaggagattgatattcg

SEQ ID NO: 580102 - DNA, 153 bp, Homo sapiens
aggaaacggaggcttcacctggtgtttgaatattgtgaccacacagttctccatgagttggacagataccaaagagggatctagtgaaaagccatttgatgtatgcggtcagagaagaagtggaggtcctcaaagagcaaatcaaagaactaa

SEQ ID NO: 580103 - DNA, 82 bp, Homo sapiens
aggcctcccgggctccgggaaaactacactggccagctcaccatggatgatgatatcgccgcgctcgtcgtcgacaacggct

SEQ ID NO: 580104 - DNA, 99 bp, Homo sapiens
cccatctatcagcaggctccgggctgaagattgcttctcttctctcctccaagatcatggaggagttggcagatgctctaatgtactgccatgggaaga

SEQ ID NO: 580105 - DNA, 75 bp, Homo sapiens
ttcagtcactgcaatcttcatgcccatcagtttcttgtgagaagaaaacaacagtcagtggaagagcatctgcaa

SEQ ID NO: 580106 - DNA, 83 bp, Homo sapiens
aactggaactatacacctctgcatgaagctgctattaaagggaagatcgatgtgtgcattggaatcccagtcagaagttccag

SEQ ID NO: 580107 - DNA, 83 bp, Homo sapiens
ttcagctcccggaaaaactacaccaagcacatgttcatccactcggtaatggaggggaaagttccagtcgcagcgctgagaag

SEQ ID NO: 580108 - DNA, 74 bp, Homo sapiens
tctggaagacgcgctcctgcgccggtttggtgcacctcgatttggaggaagtagggcagggcccttatctggaa

SEQ ID NO: 580109 - DNA, 100 bp, Homo sapiens
agcccctccatgtttactactgtttgtgcggccagatggtcctagtgctgggcccacctgccgtttgctgtcattggcagcacagaagaactgaagatag

SEQ ID NO: 580110 - DNA, 75 bp, Homo sapiens
cactcctccaagaaccaacccccaaattggctgggacaggatcgaatcatcaatttagttgttggcagcttaaca

SEQ ID NO: 580111 - DNA, 100 bp, Homo sapiens
ccctatcctatccgcaaacaggttggggtgctggaggactgcttcaccttcctgggcatcttcctggccatcatcctcttcccctttgggttcatttgct

SEQ ID NO: 580112 - DNA, 100 bp, Homo sapiens
tgacgtgaacatccagtttcctgataaggacgatgggaaccagtctttctctaatacacagaattctaggaaggaggctgttcttttagccaaaatgaaa

SEQ ID NO: 580113 - DNA, 75 bp, Homo sapiens
caagcctttctgctccaggtcaagaccgaagccaggacagcacagccgtagcactctcagactctagctcaacgc

SEQ ID NO: 580114 - DNA, 100 bp, Homo sapiens
ctgcctgagctgaagggctgcctgggtgttagcaaagaaggtcagcccaaggccaaccccactgtcactctgttcccgccctcctctgaggagctccaag

SEQ ID NO: 580115 - DNA, 82 bp, Homo sapiens
gcagtatacaagccctgaggagatcgacgcgcagctgcaggctgagaagcagaaggccaggagggcaacctgcacaaccccg

SEQ ID NO: 580116 - DNA, 74 bp, Homo sapiens
attctaatttgaaccatgtttggattgaagccgcctctgtattacttaccagacttcattatcctggcagtatg

SEQ ID NO: 580117 - DNA, 90 bp, Homo sapiens
ccgggggcgggccggggtcaccacgcctgccccagggaaccgcacagtgtaaacaggaacatcgataagtagtgtaaaaacttgcacaat

SEQ ID NO: 580118 - DNA, 100 bp, Homo sapiens
gaggttcatttaaccccaaaatcagtgattctacatctcaagctcatattttgaagtgtttacgggtgacaaggagccctgtgcacatcccaactctcga

SEQ ID NO: 580119 - DNA, 98 bp, Homo sapiens
cgacagcgacgggcagcccgggcccggcgaggcagaccactgccgccgcatactggtgcgaggttcgggtctggcggtacttgaagggcaaagacctg

SEQ ID NO: 580120 - DNA, 82 bp, Homo sapiens
ccatgccggagaagcgcgcgggcgcgcaggccgcggggagcacctgggtgcatgaatacctcagaagtaaactctgttcact

SEQ ID NO: 580121 - DNA, 102 bp, Homo sapiens
tcgagcgggagttcgaagagttggatactcagcgtcgctggcagccgctgtacttggattttttatcaagcagaaatgcatcgaacaacgagaatcaagatc

SEQ ID NO: 580122 - DNA, 75 bp, Homo sapiens
gtgccctcggaggcggcgtgggcggcagagagcggggcggcggcagcaagagtgagccatggagctacgtgtggg

SEQ ID NO: 580123 - DNA, 95 bp, Homo sapiens
cctcccaagtatctgggactacagactgcgccatggggctcagcgacggggaatggcagttggtgctgaacgtctgggggaaggtggaggctgac

SEQ ID NO: 580124 - DNA, 96 bp, Homo sapiens
aaaagctgatgcgatgctctcagtgccgcgtcgccaaatactgtagtgctaagtgtcagatcgataaagaattggctagtggtgaatactttttga

SEQ ID NO: 580125 - DNA, 154 bp, Homo sapiens
atctaccttcccctatatctccagacattaaggattataaactttatgatgtagaaaccaaatatggtttgcttcagcagccagactgccttccgggtcactgccatggaggagccgcagtcagatcctagcgtcgagccccctctgagtcagg

SEQ ID NO: 580126 - DNA, 50 bp, Homo sapiens
cagtatccgggcctcccgagagagtggagactgctgcacggactctggaa

SEQ ID NO: 580127 - DNA, 98 bp, Homo sapiens
tggaaactcaaggccaatctcaggttgagacatgggaggagtggatgcgggccatccagatggtcgccaacagcctcaagcagcgggccccaggcgag

SEQ ID NO: 580128 - DNA, 100 bp, Homo sapiens
ctcggctcatgttctgggacttaggagggcaggaagagctgcagtctttgtgggacaaggacctgcaagcgcaggaccgagcccaccgcatcgggcagca

SEQ ID NO: 580129 - DNA, 106 bp, Homo sapiens
ccgcactggcagcgggaggcagagggaggaccctggaacatcccggaagccgggaaatggtttcgagttctttgaagccagtgccaaggagaacatcaatgtgaag

SEQ ID NO: 580130 - DNA, 100 bp, Homo sapiens
ctccactcgccacccggctgctggcccacaagatccagtccccacaggagtgggaggcgatccaggccttgacgaggccatgtggaagtgttacatcacc

SEQ ID NO: 580131 - DNA, 83 bp, Homo sapiens
cttcaagccaaacatcaagcagaatgtgatttgcttgaagatatgaggaaatggtcaacaagaggctcagagtcccatgagct

SEQ ID NO: 580132 - DNA, 100 bp, Homo sapiens
gatgacttaaaatgcttgagactaagtgattcgcctttgccagtctcatctcgtgtctgctttgttaagttccatgatccagactcagcagttgtggcac

SEQ ID NO: 580133 - DNA, 100 bp, Homo sapiens
cgcagaatctcctttcagatgcctggatgaatttgatgtctacatggaaaagatgagtgaggatctccgcgttggaggaagagggagtcgaaagaggctt

SEQ ID NO: 580134 - DNA, 98 bp, Homo sapiens
caagggcgagatcctggagagcctgcaggacggcgcggcagagtccccgtacgcctacagtaacggttgtggcagcactgcctgaaggtatgagacca

SEQ ID NO: 580135 - DNA, 75 bp, Homo sapiens
ggattcctttcagaaaacaaagaatttgccagatgtttggaatgtcgttgtctgctgggtcttcccctcttcatt

SEQ ID NO: 580136 - DNA, 50 bp, Homo sapiens
gtccaccgtggccgcggtggtgctagcctagtgtgttaattgtaacctac

SEQ ID NO: 580137 - DNA, 75 bp, Homo sapiens
ttaaagaatgccagcctttttaaagggttattttggagctgttggagcactccttgagctgttgaagatcccgtg

SEQ ID NO: 580138 - DNA, 75 bp, Homo sapiens
aaaggaattttgaagtcaccactgaggaggaattcaccctgttcgtctatggtaagcagaattttgtacagtttc

SEQ ID NO: 580139 - DNA, 96 bp, Homo sapiens
cttcaagatgaggaactattttttggacttcaatcaggaattaaacatgggccagcgatgttcagatactagaggaattgtcttcgaagatgtgaa

SEQ ID NO: 580140 - DNA, 100 bp, Homo sapiens
aggatctgtaaaagcataattgaatttgtttcacccccgtggattccagtgggcccgacagcgcaacaggtgtgatgaatgcagactctgctaccatttt

SEQ ID NO: 580141 - DNA, 75 bp, Homo sapiens
cgatggcctagcacgtggaattcgcgaagctgccaaagccttagacaagccttcccttcttcttggtggtgttct

SEQ ID NO: 580142 - DNA, 99 bp, Homo sapiens
cttgagctccaggagttcgtctcttacgtctgcggaagtgcagctgcctcagttcttagcgcaggtctccgaattcaatcctttgacgttcaccagcgt

SEQ ID NO: 580143 - DNA, 100 bp, Homo sapiens
gacactgcgactccggagacagcccaaatatcctcggaagagcgctcccaggagaaacaactctacaagtttcacgctgtttaagtcatgaacctacaaa

SEQ ID NO: 580144 - DNA, 100 bp, Homo sapiens
ccaacatggcggaacgcaggagacacaagaagcggatccagagaccacctgggaacgtcccagcagttctcctgggattccagccagccctggctctcac

SEQ ID NO: 580145 - DNA, 82 bp, Homo sapiens
gcagccctggtgtcacctatcagtaaaagactacagtggtagtggaggccgaagcggcgggaacagctacggctcaggcggg

SEQ ID NO: 580146 - DNA, 75 bp, Homo sapiens
ttagcgtgagtgatcactctcaatcccggggcaaacactgtatccttgatgtgtctggaaatgccataaagagat

SEQ ID NO: 580147 - DNA, 100 bp, Homo sapiens
agatgatcgaccgcaacctccgtgaggacggcgagaaggcggcgcgcgaggtcaagctgctgctgctcggttcattttccagacactgaaagagcagaat

SEQ ID NO: 580148 - DNA, 99 bp, Homo sapiens
gtgcctctttagatgtagagcctatctacacatttagggcccacataaagccgaagtgaattcttagagaagttacaaagagctcgaggccaagtaaag

SEQ ID NO: 580149 - DNA, 88 bp, Homo sapiens
gtcagactgaccaccatcatcacggatgctgtgaaccagggagaagatgtcaaccggacactagaaggtggaaggaaacctcttcatt

SEQ ID NO: 580150 - DNA, 100 bp, Homo sapiens
gtggatccgggccaagtacgagcgacaggagttcatctacccggagaagcaggagccctactcggcaggctcagctgtcgcaggccctggaggagctggg

SEQ ID NO: 580151 - DNA, 82 bp, Homo sapiens
cagacattagaactggatgcctcaacctctgctgttcttgatcataggctgttataatggattagtttatgttctgaaaagt

SEQ ID NO: 580152 - DNA, 100 bp, Homo sapiens
gtgagggatcgctgcaacctttagactaatgactgtccgaaacatcgcctccatctgtaatatgaaagtgactgagaccgaagatgatagtgatagtgac

SEQ ID NO: 580153 - DNA, 82 bp, Homo sapiens
ccagaacccccaccccgagtcaaagcgctgaaatgagccccgcggcaggattttttatcaagcagaaatgcatcgaacaacg

SEQ ID NO: 580154 - DNA, 101 bp, Homo sapiens
tcgaacgcgaggccaacagccccgcaggaacgaatttcatatacacctccagagagcccagtgccgagttacgcttcctcgacgccacttcatgttccagt

SEQ ID NO: 580155 - DNA, 83 bp, Homo sapiens
cggggagtgtcgcagccctgaagttgcctcttctggtgtcaaagcttttggacattcctgggagaaaatgctgctgtgaagac

SEQ ID NO: 580156 - DNA, 100 bp, Homo sapiens
gtagaccttccacactgccacctgattaaaggaattgagagaaatagcccggaaacttgcaaatcctaagcaaccaacaaatccttttctagagatggtc

SEQ ID NO: 580157 - DNA, 94 bp, Homo sapiens
tcgccttgtatctcaacaccctgagtgcggatttctgctatgatgacagtgatcggcatgttggtaaaatttattccaaatgttcttcttttct

SEQ ID NO: 580158 - DNA, 75 bp, Homo sapiens
gcttccccatggtctactacatggagggctctgtggacaaggcgaccattgacgaggtggagacggacgtggtgg

SEQ ID NO: 580159 - DNA, 112 bp, Homo sapiens
cgctccgtggccttagctgtgctcgcgctactctctctttctggcctggaggctatccagcaatatgaacatcgacatttctgccttctcctgcattgctgccctggctatg

SEQ ID NO: 580160 - DNA, 99 bp, Homo sapiens
gaattgtgctgatattgatattattacagcttcatatgcaccagaaggagatgaaggttgggggccgtcccgctcctaaggcaggaagatggtggccgc

SEQ ID NO: 580161 - DNA, 143 bp, Homo sapiens
aagtttcacatccttgtctgtgaagctaaactcaatgctgctgtgtgggaagaagatttgtaaagaaaactcttagacatccacgacagcgatggcagttccagcagcagccaccagagcctcaagagcacagccaaatgggc

SEQ ID NO: 580162 - DNA, 98 bp, Homo sapiens
ggaaatcacaaggcagttaaatctggaaaatgtagttggagataaagtttttattctggattttggactggctcggcacacagatgatgaaatgacag

SEQ ID NO: 580163 - DNA, 100 bp, Homo sapiens
gtggccaccctgtgggcctggcgctggaggcagcggtgcacgtgcaggtaatctttagatggtggaagatctctctaaggagtgagtatcgatcaacaaa

SEQ ID NO: 580164 - DNA, 100 bp, Homo sapiens
tggcaggcctggaagaagctgatgctgagaacctgtctccagagaagattttccacgtcattgtggccccttgttatgacaagaagctggaggctcttca

SEQ ID NO: 580165 - DNA, 135 bp, Homo sapiens
cgggtggcatggcggagaaggatgacaccggagtttgacgaagaggtggtttttgaggaggcctggaggctgacgaggcactgccctcagggctgccgcccaccttcatccgcttcagccaccactcctacgccc

SEQ ID NO: 580166 - DNA, 83 bp, Homo sapiens
gcccgcccgaccccgtcccgaccctggccgccccgagcggagcctggaggttgtggcagcactgcctgaaggtatgagaccag

SEQ ID NO: 580167 - DNA, 88 bp, Homo sapiens
cagcgtctagtccctggccatagctccgccgctgcccgggtcggaccgatacctggagagccgcgatgcctctcgactgagtggccgg

SEQ ID NO: 580168 - DNA, 97 bp, Homo sapiens
tactgacgaagcttggaagttgcagaagggctcatcgttggggtgatcctgaggtatggtacccctgctaccagtggccgtgacaaatcactcagct

SEQ ID NO: 580169 - DNA, 90 bp, Homo sapiens
ctgccgtcacccgtcaccaatggaaccagccctgcccagccaaggccacctttgatgccatttctaagacctacagctacctgacccccg

SEQ ID NO: 580170 - DNA, 100 bp, Homo sapiens
ggggaccttaacaatccacctaagaaattcagagatggagtcccctgtttccacaccagcagtgctgccaatacaccttttggtgccagtggtcaacaat

SEQ ID NO: 580171 - DNA, 75 bp, Homo sapiens
cgcgcgcctttgtgcgcgcgccgaggtgaaatgacaatggatgctctgttggctcgattgaaacttctgaatcca

SEQ ID NO: 580172 - DNA, 75 bp, Homo sapiens
cgtccccctctccgccccccaggaggggcgagagggagccgcagctgatgtcagctcaggtacctgacaatgatg

SEQ ID NO: 580173 - DNA, 99 bp, Homo sapiens
cagattcgcagtggtcgcttcttctccttggacactctgattgtgtggtctgaagcagaaaattatgacttggcccttagctttcaagaaaaagctgga

SEQ ID NO: 580174 - DNA, 100 bp, Homo sapiens
tttcctaagccatcccctggcggaaccgcccccagtctgtgatcaaaacagggcgactgctaatcagtcacgaggctcccttgacaggcggctttgcatc

SEQ ID NO: 580175 - DNA, 83 bp, Homo sapiens
aagaaattcgacttcagtaatttgagtagtaggtgtatagaaaggatccatatcccgaggaaatgatgaggcagaaccatgtt

SEQ ID NO: 580176 - DNA, 100 bp, Homo sapiens
tgaagaaggcagtagtttgggtgtgatggagggaaggcagcatggcacgctgcatggagccaaaatcgggtctgaggaatcagagatcattgatttcttc

SEQ ID NO: 580177 - DNA, 100 bp, Homo sapiens
cttcatcatctgacttcactatattacaggctcatgctgaagattcggttatggaccatcatttccggaagccagcaaatgatataacgtctcagctgga

SEQ ID NO: 580178 - DNA, 75 bp, Homo sapiens
tttcttcagaagctggtcgccgccggcagagtcgacttcaatgttcctatgaagaacaaccagataacaaacaac

SEQ ID NO: 580179 - DNA, 98 bp, Homo sapiens
ttgagttaagcagtagtgtttgggaagaaaaacagaggagttctattaagacggccagccctccagatctctatattgaaagatttaatatagctctt

SEQ ID NO: 580180 - DNA, 90 bp, Homo sapiens
tggttttaacacattcaggtgcctctgccttccaagttatgttggtgcactttgtgagcaagcagaaaaatatggctcaggagactaacc

SEQ ID NO: 580181 - DNA, 75 bp, Homo sapiens
cagaaggttctctggtggaggcgctcttcctggtgtcccgcccagtagctctacgaactcgacggggaccccaag

SEQ ID NO: 580182 - DNA, 75 bp, Homo sapiens
ggaaaatgaattggagggactgaaggatatgtcagctcaaggatcatcttcgcagcttcctaaaccttttgatcc

SEQ ID NO: 580183 - DNA, 82 bp, Homo sapiens
gatggatgccctggttgctgaagaggaggcggaagccaagacttaattcagtgcacaaatgagatgaatgtgaacatcccac

SEQ ID NO: 580184 - DNA, 50 bp, Homo sapiens
gctgagcggagggcgcggcgcgagaacagtctcgctctgtcgcccaggct

SEQ ID NO: 580185 - DNA, 100 bp, Homo sapiens
tgggacaaggagccagtgctggtcgtgtccttcgtcgtcgggggcctcggagaggcaagagaaagctctgggcatcctgacatacctgggccagagtgca

SEQ ID NO: 580186 - DNA, 75 bp, Homo sapiens
aagctggaggccggcaaagccaaggaatacatgcaccacctgctcgccctggagcatcgcgctgaggagcagttc

SEQ ID NO: 580187 - DNA, 101 bp, Homo sapiens
ccttcttcctcaactatctcgctgacacgcagaacgacaaatcctccacccctgggctcaagtccaacacaccaaccccaaggaacgacgccccaactcca

SEQ ID NO: 580188 - DNA, 100 bp, Homo sapiens
cgtcgcgggcggcctcgcgcctgttccgctgcaggtatcctgtggtctgaggccatcttcctcgaggcaaggccccagaggaggaccaagagcgtggatg

SEQ ID NO: 580189 - DNA, 82 bp, Homo sapiens
cagctggcggacccgtggcagaagatggctgtggagagcccgtccgacagcgctgagactagacgcttgaagcaaagctgcc

SEQ ID NO: 580190 - DNA, 100 bp, Homo sapiens
ggaacatgtccggcagcagtaccagcgagacacagagcagctccgcaggagcatgcaagatgcaacccaggtacccaagatattgtatttggagaagtag

SEQ ID NO: 580191 - DNA, 80 bp, Homo sapiens
ccggatctcttcgtctttgcagcgtagcccgagtcggtcagcgccggaggtttggtgcacctcgatttggaggaagtagg

SEQ ID NO: 580192 - DNA, 82 bp, Homo sapiens
ttaaaaggaccatacgagtcctagatgtcaataaccagtccttcagagaacaagaggtcaaaatgcagatcttcgtgaaaac

SEQ ID NO: 580193 - DNA, 129 bp, Homo sapiens
tccggctgcttatttgaatccttgctctgcgatggactattccctggctgcagccctcactcttcatggtcactggtagtaagcattaataatgtctttcatctttgagtggatctacaatggcttcag

SEQ ID NO: 580194 - DNA, 89 bp, Homo sapiens
atggcctacagtctgaactcttctgctcaggagcgcctaataccacttgtcatgcttcggatgtcttggagacctctgggtggaagtca

SEQ ID NO: 580195 - DNA, 100 bp, Homo sapiens
cagaaacagagcggctggaaggctggtgctgccagatggacaaggagaccaaagagaacaacctctctgaagaagattttatcatgtgggcaacctgctg

SEQ ID NO: 580196 - DNA, 100 bp, Homo sapiens
aaggctccagcctgaagcgtgggtgaggtgtccagctgcccaaaggcgacagggtgtcaaattgagaaccaggtagatccccaccacctacagtaaaaag

SEQ ID NO: 580197 - DNA, 100 bp, Homo sapiens
cccgaactgcaagttgcttattgtttcaaatccaggcttacctatttctactccatgtaccaccataaacaaagtttgtgcttcaggaatgaaagccatc

SEQ ID NO: 580198 - DNA, 75 bp, Homo sapiens
caagtgatgatggaatcttggccaaaatcgtgcctgtcctgggagctggagaggatgtcagcgagcctgacattg

SEQ ID NO: 580199 - DNA, 118 bp, Homo sapiens
gcaaggccttggtgccttattaccgtcaaatcctccctgtcctgaacatctttaagaatatgaatggtgagccctattcccagaggcaggtggtgctgaccctgtaacccaaaggagg

SEQ ID NO: 580200 - DNA, 100 bp, Homo sapiens
cgtgagggtggagattatacatctctcatcatttcagcaacaaggaaataaattagtggcagagtaagggtgacttgggtcttactctgtcgcccaggct

SEQ ID NO: 580201 - DNA, 101 bp, Homo sapiens
gcagcaccaaatccaagatggcggccagcaggaggctgatgaagtgatcagggccaaagcggtcagtgagaaggaagtggactctggaaacgacatttatg

SEQ ID NO: 580202 - DNA, 100 bp, Homo sapiens
gccgtctctgagactactttcagagaagatccttgggctccaggtccagcaggcggagcactgttcagtgccccacgcccggctgtgacggctctggcca

SEQ ID NO: 580203 - DNA, 90 bp, Homo sapiens
gtgaagaggttcagctgtcctaatcctcactgccgaaagaaactccacttggagatgttggcagaccagccacgaacaactaaataccac

SEQ ID NO: 580204 - DNA, 82 bp, Homo sapiens
gccttccatcatgctaacttcccaccaaaccagtccagctacgggggcccagccagccagcagctgagtgggggttacggag

SEQ ID NO: 580205 - DNA, 82 bp, Homo sapiens
ggctcatcgtgatcccggcgacatactacctctggccccgagatcagaatgccggggttgcagatggtgtaggaggctggag

SEQ ID NO: 580206 - DNA, 75 bp, Homo sapiens
cgcgctgctgggcacccacggagcctccggggctgaaacgcttcgttaagggactcaggcagtacgggaagaact

SEQ ID NO: 580207 - DNA, 51 bp, Homo sapiens
caaagatctcgtacaagatccttctttgaaacaaaccatcaggcctcccag

SEQ ID NO: 580208 - DNA, 97 bp, Homo sapiens
agaaatcctgataagaactgctttgctctcaaaattagagagatgtgtaattgtccaccactgtctaatccagaccctcgattactattcaaactca

SEQ ID NO: 580209 - DNA, 96 bp, Homo sapiens
tgaggatcatcttctgcagaatactttgtggcctgaagttcaaaaactgtgttgagatctgcatagccactcctggacgtctgatagatttcctgg

SEQ ID NO: 580210 - DNA, 100 bp, Homo sapiens
atttgtgaaaggggtggcttgtttactgagcccgcagcactcaatcccttacgggatggggaacatgcagaatcagcatgattcttcagaggctcttcag

SEQ ID NO: 580211 - DNA, 102 bp, Homo sapiens
tcacagtacattggtatctacaagacattatagagcacctgaagttattttaggtacaggtttgcagattccgccagcagcacagcaagctctacagatgag

SEQ ID NO: 580212 - DNA, 76 bp, Homo sapiens
ctcccgagtacctgggactacaggtcgccactgggacactgtgaaccaggagtgagtcggagctgccgcgctgccc

SEQ ID NO: 580213 - DNA, 51 bp, Homo sapiens
ggtctccagggttctttggggcccgagctatgagggcactggccggtcact

SEQ ID NO: 580214 - DNA, 85 bp, Homo sapiens
cttgtcaagtccatcgagatcccccggcctgtggacggcgtcgaggtgcccggctgcggaaagcaagagtgagccatggagctac

SEQ ID NO: 580215 - DNA, 100 bp, Homo sapiens
cacggtgccgctgacagcagccatcgaggcgagccagagcctgcagtcccacacgggtatttgaagtataccatacaactgttttgaaaatccagcgtgg

SEQ ID NO: 580216 - DNA, 97 bp, Homo sapiens
acgactgcgagccgtcggaccctgagcaggagacgcgaaccaacatgctgctggagctcgcaaggggctggtgagggtcagcactagtggtgagaat

SEQ ID NO: 580217 - DNA, 74 bp, Homo sapiens
gaagacctcagatgtgaagtccattaaagatgggtttgtggaggctacagaaggtttgggggatgatgctcttg

SEQ ID NO: 580218 - DNA, 100 bp, Homo sapiens
agcgctccaggggctttgggtttgtcacatatgccactgtggaggaggtggatgcagctatgaatgcaaggaaggcactgatcctgaaactgaagacccc

SEQ ID NO: 580219 - DNA, 75 bp, Homo sapiens
gttcctggaggaatccgagaagagcagagcggagggagccccagacacggccataaaattttgagtagaaaaatc

SEQ ID NO: 580220 - DNA, 90 bp, Homo sapiens
ggaactttgggtcctgaatcttctgggagctgaggaaccagatatcttgaaaagctgccagaaaggtggagccagggcgtgtgatgggag

SEQ ID NO: 580221 - DNA, 75 bp, Homo sapiens
cgcggtcgcagccctcagcccacttaggataatggcgacagctgaggatctttgccgccgttcattatcagaaga

SEQ ID NO: 580222 - DNA, 83 bp, Homo sapiens
ttcggggatgcagctggccaagctgatccgacagagaaaggcatttgggcagtccttctccatccaccggaaggttgctgaag

SEQ ID NO: 580223 - DNA, 99 bp, Homo sapiens
tcagatgggatctttccggatcaatccagatggcagccagtcagtggtggaggccattctcaagcacaacctgggtgaggctctgtcattgcttaatgg

SEQ ID NO: 580224 - DNA, 90 bp, Homo sapiens
ttacagttctcgggatccttctgtcatagaaactcacatgagacaaatgcgctcagcttcaattgagttcattgtcgaaatgctggacct

SEQ ID NO: 580225 - DNA, 90 bp, Homo sapiens
gctatgcatgctgcttttgatgtctgacaacgtggatcgttgttttgaaacctgagatgagtgaactgagtgtggcacagaaaccagaaa

SEQ ID NO: 580226 - DNA, 98 bp, Homo sapiens
caccgccgcccatcgagtcgaagcaccgcagcctggtgcagatcatctacgacgagaaccggggcttcctgaagaatgagaaggacaatgccctgctg

SEQ ID NO: 580227 - DNA, 100 bp, Homo sapiens
gaagatgcaagcggtttgggaccttgaacaaggcaaatatggttttggtggagccttacaaagtaaacctctctcaagatttagagcatcagctgcaaaa

SEQ ID NO: 580228 - DNA, 90 bp, Homo sapiens
cgggcacgctgactggaggctggcggacaggcgacagcgacctgcggcaggtaattcagtaccaaactgttcgatatgatatcctcccct

SEQ ID NO: 580229 - DNA, 75 bp, Homo sapiens
acgacttggacacatcaggggggctgatggagcgtccggggtgccgcagctggtggagccggtgctctgggacta

SEQ ID NO: 580230 - DNA, 75 bp, Homo sapiens
actcatcagagtgtgggggttgtgaaaggtactccaaagattcaggtttactcacgtcatccagcagagaatgga

SEQ ID NO: 580231 - DNA, 100 bp, Homo sapiens
ctgcagctcttcaccaagctggatgtggccctgaaggagatgaagcaatatgtcacccagatcaacaggctgctggtggtctacccttggacccagaggt

SEQ ID NO: 580232 - DNA, 74 bp, Homo sapiens
tttcagttcagtatgaagaaaaatttcagaaccatcacaaactggtggatagatacttctcaagacatcacaca

SEQ ID NO: 580233 - DNA, 75 bp, Homo sapiens
gacagcctggactctgcaacacctgtcaactccatctgcagtgttcaagcattacagacatctttagttttttcc

SEQ ID NO: 580234 - DNA, 75 bp, Homo sapiens
acttcttcctgctgctgcttttcagggggtgtgataggtatacagctggttgttaccatggtgatggccagtgtc

SEQ ID NO: 580235 - DNA, 100 bp, Homo sapiens
tttgcccgggctcatgtgcctattgcggctgcatgggtcggtgggcggggcccaggtctcgaaggccacattgcaggagatcctgccggaggtcctcaaa

SEQ ID NO: 580236 - DNA, 98 bp, Homo sapiens
gcatattatgctacatgaaaaggaagagagtttcactctatcacccaggctgtagtgcagtggtgccatctcagctcactgcaacctctgcttcctgg

SEQ ID NO: 580237 - DNA, 82 bp, Homo sapiens
tggcgtgcagcgcaaccacgagacggccttccaaggtggagaacgaccaggagcggttcctgagtgacctgcgtcgtgatgt

SEQ ID NO: 580238 - DNA, 83 bp, Homo sapiens
ttttattactggcagcatgtatatcttttctatcactgaggcaagggaagaagccaagccttacccgctattcccgggacctt

SEQ ID NO: 580239 - DNA, 75 bp, Homo sapiens
caggagaggccctcagcttgtctgcactggcagtgacgatggcacagttaaggtaactttcgaccgactttcccc

SEQ ID NO: 580240 - DNA, 100 bp, Homo sapiens
gacaagagaaagctcgggcgacggccatcttcatccgctgtgaaaccaacagaagcccctacagagccacccacacctcctccccctcccaccattccac

SEQ ID NO: 580241 - DNA, 80 bp, Homo sapiens
catgagcatcattcgcatgtggctagatggtaaggttgaagttacaaaagaaggtgtgaagttgtgtaccatgggtccag

SEQ ID NO: 580242 - DNA, 98 bp, Homo sapiens
acgaagttcctgatggagctgtaaagccacccacaaacaaactacccattttcttttttggaactcatgagactgagaaagatcagtctaaagaaaag

SEQ ID NO: 580243 - DNA, 82 bp, Homo sapiens
cctccccgcgccccctccccctcgccatgaagattggctcacagtggttgattgatcaaccccattggacgttggttctgtg

SEQ ID NO: 580244 - DNA, 100 bp, Homo sapiens
ctctgcgtcctcatcgggcttatgttcgaggtgctggagaatctggtaaaagcaccattgtgaagcagatgaggatcctgcatgttaatgggtttaatgg

SEQ ID NO: 580245 - DNA, 98 bp, Homo sapiens
aatatcttggtggaggctccgcactagatctaacgtttgatgcaaatgatttgtatcaggggcagaattttaacaaggtcctcagttccttagtgact

SEQ ID NO: 580246 - DNA, 75 bp, Homo sapiens
agggaaccctggtcaccgtctcctcagtctttcccagggaactccgatgaagtgttccaacaaaatgagcgagtg

SEQ ID NO: 580247 - DNA, 100 bp, Homo sapiens
ggccgcctggtcatggcgcagccgggcccggcttcccagcctgacggctccataaaaatacagactcaccagttcctgctttgatgtgacatgtgactcc

SEQ ID NO: 580248 - DNA, 110 bp, Homo sapiens
cagaaatcagaaaaacatttgggaggtgtctagcccagtggaccttctgaagtcctcctgcatatgcccaagaggattgggagtggaatggacaccagcagaagcaccac

SEQ ID NO: 580249 - DNA, 99 bp, Homo sapiens
cagttatgtggacgagctgttaaaccagatgaagataaaacgttacctgcagagtcgggatgtacaatagaggatcacgtaattgcaggaaatgtagaa

SEQ ID NO: 580250 - DNA, 90 bp, Homo sapiens
cattcgctttgcagaggacaacttcaacaacacttacatctccaccatcgatcctgactgctgtcatggcgtgccctctggagaaggccc

SEQ ID NO: 580251 - DNA, 82 bp, Homo sapiens
ggaagttcccgccccggagagcggcgaggcggcagccacagctccccgcagccaccgccacccattggaatggccaacaggg

SEQ ID NO: 580252 - DNA, 75 bp, Homo sapiens
gctgcctgctgcgacgacatgaccttaggctgaaagaatcaggattcctgaaccttggatcacacctccagattt

SEQ ID NO: 580253 - DNA, 101 bp, Homo sapiens
gcagaaaaagaggctcttcctcctcctcccgcgacgcatcgagagtaaacatgaggttacgatcctgggaggacttaatgaatttgtagtgaagttttatg

SEQ ID NO: 580254 - DNA, 82 bp, Homo sapiens
atgccccagattcctgttgcttcagtcactcctacagcatcactatcaggaactgtggctgcaccatctgtcttcatcttcc

SEQ ID NO: 580255 - DNA, 88 bp, Homo sapiens
tcgccggggaggcagcgcgggatcccagcctcaggcgtgcgcggacggtgtgcgggttcagggcttctggaaatcttgtaatcacccg

SEQ ID NO: 580256 - DNA, 100 bp, Homo sapiens
ttctccgtgggcagcattggcgaccagcgcttcacggctcgggttatgtatgattttgctgctgaacctggaaataatgaactgacggttaatgaaggag

SEQ ID NO: 580257 - DNA, 87 bp, Homo sapiens
cggtttccctcggcgtgctactgtgcgctcgatccagcaccatggggaagcgggacaatcgggtgttacagaatgtctgaaggggac

SEQ ID NO: 580258 - DNA, 100 bp, Homo sapiens
cgctcgtcagactccagcagccaagatggtgaagcagatcgagagcaagccaaagggaaaggacagtcccaaaccagagtgaatattaatgctgccttgg

SEQ ID NO: 580259 - DNA, 101 bp, Homo sapiens
tcctactcttgttcgtctgagaaaactgaagtttgccataaaagttgatggagattacctttggtgcctttactttcccgaattctgccttccgatgcatg

SEQ ID NO: 580260 - DNA, 108 bp, Homo sapiens
tgagaaggaggggtatgagccacacatccccgaccacttgcggcctgagtatggtcgcgtggggcaggcagtggcgctgcgggccaaggccttcggcttcaacgtgct

SEQ ID NO: 580261 - DNA, 75 bp, Homo sapiens
tggggatggcgcatcacacaccaaagactgaggctgatgtgaatccaaaggcctatccccttgccgatgcccacc

SEQ ID NO: 580262 - DNA, 82 bp, Homo sapiens
cggcgaacgcggagagcacgccatgaaggcctcgggcacgttactccacaggatccgctgaacataggatgttgccacaaaa

SEQ ID NO: 580263 - DNA, 99 bp, Homo sapiens
gcgtccccgtgcctttccagctgcccccaggtggccttggataagggctgctcccaattccgcctggccgtcctggactggaaccagagggccatggac

SEQ ID NO: 580264 - DNA, 75 bp, Homo sapiens
ccagactgtgaacctgctggccgagtggctcattcagacagagtccctgcaggaagcatcacccaggctggcaga

SEQ ID NO: 580265 - DNA, 106 bp, Homo sapiens
agtgttaaaggaacctctacaacgaaggtgaagccacggaagataagccctccagaatacccatcatatagcccctgaggtggcatggtgatgtctccatgaggga

SEQ ID NO: 580266 - DNA, 100 bp, Homo sapiens
tcaaaagcactgagatggaagttcatgaattgagtagacacttaacaagcttcccatcgacggtcagtgcgcacgttgtaatcagctgaggccatgtcag

SEQ ID NO: 580267 - DNA, 74 bp, Homo sapiens
cccggttggcccgggacgagtggaatggggttgtagaaggtgatttagctgccatagaagcatacaagtcatca

SEQ ID NO: 580268 - DNA, 80 bp, Homo sapiens
tgcattttgttaagaagcacctcatgcaagcgagggacctgggactgctcacagccagattgcattcatggcttctctgg

SEQ ID NO: 580269 - DNA, 96 bp, Homo sapiens
cattccctcataaagctgtacgtaaatcagcttgatcacggtgcacggtttttgccaatccagaagactgtgtagcatttggcaaaggagaaaatg

SEQ ID NO: 580270 - DNA, 83 bp, Homo sapiens
aaagaaccgcgcgggaagccccagcccgcagccctcgggggctcacagaacatttcctgcctgttgctcacactctgttgtcc

SEQ ID NO: 580271 - DNA, 100 bp, Homo sapiens
gaaacctgggaaggtggtgcttgtcctggctggacgctactccggacgcaaagctgtcatcgtgaaggttatggaaacaaaggacatgctttacatcgtc

SEQ ID NO: 580272 - DNA, 83 bp, Homo sapiens
cgacagtggcggcggcgccatggcagggcttgcagagtatcctgagctccagctggaccctaaattggatcctcttcctgctg

SEQ ID NO: 580273 - DNA, 100 bp, Homo sapiens
gaggagtctctctcatcctcccggattgctctgaggccaggagatgaaatcagacatcactgaaggagttgatattccaaagaaacctagattggagaaa

SEQ ID NO: 580274 - DNA, 51 bp, Homo sapiens
gagactgcagatgccatcactaaagaagttgattacagacatagtgaaacc

SEQ ID NO: 580275 - DNA, 75 bp, Homo sapiens
gagactgctccagaagtggagaccagcagaactccaccaggacttctccagacaggttatgttacctgcagaggc

SEQ ID NO: 580276 - DNA, 99 bp, Homo sapiens
ttcgggtcgtcatggctggctacgaatacgtgagcccggagcagctggctggctttgataagtacaagttgtcgccgtgatcctgaaggcgctgaccta

SEQ ID NO: 580277 - DNA, 83 bp, Homo sapiens
gctgctccggcctagcctggcggagctccacgacgagctggaaaagacaatgcagatcttcgtgaagactctgactggtaaga

SEQ ID NO: 580278 - DNA, 97 bp, Homo sapiens
ggggtgagggtggaagctgggaaacccacaggaggcaaccacactagtttaggagatctataaggacaggcagaaattctcagaacaggttttcaaa

SEQ ID NO: 580279 - DNA, 75 bp, Homo sapiens
attaatcagtatgtcatatggatgggggaaatttgcagtggtgagaaaatgtataaagaaagattctgggaaaga

SEQ ID NO: 580280 - DNA, 96 bp, Homo sapiens
cactggctacacatttccagcaggctgcagatacgagtggacaaggactgctgagatgtcctctattcttgaagagcgtattcttggagctgatac

SEQ ID NO: 580281 - DNA, 75 bp, Homo sapiens
ctccaaatggttgaaaacagatatacaggttgagcaatgtttaaagcgtttgaaaaacatgaatttggagggctc

SEQ ID NO: 580282 - DNA, 90 bp, Homo sapiens
aaggcatggggctgtccatgggcaccatgatctgtggctgggataagagaggccctgatcatcatggcaaaaccagctggtgggcccaag

SEQ ID NO: 580283 - DNA, 98 bp, Homo sapiens
aaacatagagaattctgggcttccacacaactccagtgctaactcaacaggtgccgtgagcgatgtggagatgcaggaacactatgatgagttttttg

SEQ ID NO: 580284 - DNA, 100 bp, Homo sapiens
ggcgagaagctgccgccgaacgacaggacgttggggcggcctggctccctcagaaggtagaagatagcaccatgccgattcgtcgaactgtgaattctac

SEQ ID NO: 580285 - DNA, 82 bp, Homo sapiens
acagaaaaatgcaacaacacaaacagtcccaagtggaagcaaccccttacagtttcactgagacttttttgacggagaggga

SEQ ID NO: 580286 - DNA, 95 bp, Homo sapiens
tcgatctccgccctggggtcattgtcagaaaccagggtggttatgaccgctactcaggaggaaattacagagacaattatgacaactgaaatgag

SEQ ID NO: 580287 - DNA, 100 bp, Homo sapiens
cacccgcatcatcttctaccgcgacggtgtctctgaaggccagttccagcagaaacctgatgtgagactctctcgaggcagtattgacagggaggatgga

SEQ ID NO: 580288 - DNA, 95 bp, Homo sapiens
aagtattgcaggacaagagatttaaggcaatggacctcatcatgaccgttgctgtacttacaatgaaaacaacttggtggatggtgtgtattgtc

SEQ ID NO: 580289 - DNA, 102 bp, Homo sapiens
cgcttcccatcatcgggaacctcttccagttggaattgaagaatattcccaagtccttcacccgggaagcaatgaggctccccaagaacacacctgaggaaa

SEQ ID NO: 580290 - DNA, 100 bp, Homo sapiens
cctctccatctggttcgaagtctcagcggtattctggtgcttatggtgcctcaggaatctgtcttgaactatcgtttcgatcctctcggcattgttgatg

SEQ ID NO: 580291 - DNA, 96 bp, Homo sapiens
gtccccactccacaccgtggcagtgaagagctgctgaagtacatgcttcatagtccttgcgtctctctctctggacaaagccctgccagtcaggcc

SEQ ID NO: 580292 - DNA, 99 bp, Homo sapiens
ggcgcaggcccacggtagcgcagccgctctgagctggacggactcatccaccgcttcatcacgctccttgcggacaccagcgactcccgggcgttggag

SEQ ID NO: 580293 - DNA, 98 bp, Homo sapiens
agctgtatggccgccgtcgcaagaagaagacagagatgtcaatgaccccatgcccaaccgaggcggcaatggactagctcctggggaggacagattca

SEQ ID NO: 580294 - DNA, 75 bp, Homo sapiens
caaccaatggaaaagacaagacatctggtgaaaatgcattactctactgactggcagagacaggagaggtagatg

SEQ ID NO: 580295 - DNA, 98 bp, Homo sapiens
ccagaggaaatgttctcttcacggtggaaaacacagatccagagtgttactggcttacaaattggattgagctttcccatggtttggcatggacattg

SEQ ID NO: 580296 - DNA, 100 bp, Homo sapiens
ttcaattcatggtttcttataaccctactccacgtctggcagcttggatcttaaaagcaagagcgctaacagaaatggtatacatagatgaaattgatgt

SEQ ID NO: 580297 - DNA, 98 bp, Homo sapiens
acggagctgggcgacgagctgaccctgggagacatcgacgatacactctgtgcagttttagagagagacacactcagtattcgagaaagtcgactttt

SEQ ID NO: 580298 - DNA, 100 bp, Homo sapiens
aattattgatggaaatcaggtcagcggagaagatgctggaaacaatgaacgagataattgggagagacatgtcccagatttctgtttcccaaggagcagg

SEQ ID NO: 580299 - DNA, 83 bp, Homo sapiens
gctggacggcgagcgcgagcggcgcgagaaacaaacatgtcttgacggaagacatagtacaccgggaggtgacccctgaccag

SEQ ID NO: 580300 - DNA, 98 bp, Homo sapiens
gcgtgcttctgcccccagagaaggtgcaggcaggcgccgtgaggaacacgcagcatctctgggaggtgtttaagatagaagtgctaatgaatggaaga

SEQ ID NO: 580301 - DNA, 100 bp, Homo sapiens
gccttcaatactacctttatttccaccatagaataactgaagtgaagtgatggactccgatttggagagtagtaagacgtgaaaggaatacacttgtgtt

SEQ ID NO: 580302 - DNA, 100 bp, Homo sapiens
tattcctcgctcaacctgtttgatacgtataagggcaagtccttagagatccagaaacccgctgagcttggggcttccttggtcgcacccaccacctgcc

SEQ ID NO: 580303 - DNA, 82 bp, Homo sapiens
gttgaaagactcagatggttattaatacgttttagcgcttttagtttggatgctgaacagcctgattatgatttggattctg

SEQ ID NO: 580304 - DNA, 100 bp, Homo sapiens
ccctccccaccttccctcgccctaatcccccaacgaggaaggaaggagcagttggttcaatctctgggtttggtgcacctcgatttggaggaagtagggc

SEQ ID NO: 580305 - DNA, 95 bp, Homo sapiens
agcaaattgtcctgataggatcaaagacaaatggaaagttccttgaagaaaatgtgagtgggaaacatgaagagtgatgaaatgaacaagttgag

SEQ ID NO: 580306 - DNA, 76 bp, Homo sapiens
ctcagagctaagctttcagaattcaagcttgaaactagttggctggatctattattggcaaaggtggtcagcggat

SEQ ID NO: 580307 - DNA, 98 bp, Homo sapiens
cttccggagcttctcagaagacagagggttttcttttgaggttgtctgcattcaaaagagcattctattaaagctaccttaatttggcgcttattttt

SEQ ID NO: 580308 - DNA, 100 bp, Homo sapiens
gatctgcagaacctgaactcgagaaagtctgtgattgctgtgagcttcatagcagcgttccttttcctgctggttgtgcgtcttgtaaatgaagtgaatt

SEQ ID NO: 580309 - DNA, 75 bp, Homo sapiens
acacttcttggcagtcatggacaagagctattgatagaagacatatctgaagagatggattaagaatgctttgga

SEQ ID NO: 580310 - DNA, 75 bp, Homo sapiens
gtcgccccctacccgcttctcgtagtcctgggagcacagcagaagtgcaaatgttctgaaaaagactctgcatgg

SEQ ID NO: 580311 - DNA, 74 bp, Homo sapiens
tgtcaaaatccatagatggaaaagatgattctgtgaggagaccaggaggaattttgaagccaccttaggttggc

SEQ ID NO: 580312 - DNA, 90 bp, Homo sapiens
cagtgttctacccatggtttacagagcactagaagctccttccattcagatccaggaggagatcgacgtgtggaccgaggagcggaaggg

SEQ ID NO: 580313 - DNA, 83 bp, Homo sapiens
gagaaggataagtcgaaggggaaggcgcctgaagaggacgaaggtatgatctcgtgaaatcttgagagaaactgaatgacgaa

SEQ ID NO: 580314 - DNA, 98 bp, Homo sapiens
gtgcggatgagctcgatgcagctggccccccaggagctggcccgctggcgggaccaggaggagaaaaggaaaaagcttgtggtgaaggggggcaaaaa

SEQ ID NO: 580315 - DNA, 98 bp, Homo sapiens
gggacttgatgttaacaaatgtgagattgccaggggtgggaaccgccaaacctctcccttctttttgacttcacccttggataccatcaaggccagag

SEQ ID NO: 580316 - DNA, 100 bp, Homo sapiens
catttagagtacagattttataaacagcttggcagtgcaggtctctttccccccaccagtggacgggcatacatcagcgggtatgaaatttcccaggaca

SEQ ID NO: 580317 - DNA, 100 bp, Homo sapiens
caaagaaattctgtgattactgcaagtgctggatagcagacaataggcctgagtcaaattgactttatcagctttaatcgatgggaagaacttcagtgca

SEQ ID NO: 580318 - DNA, 78 bp, Homo sapiens
tcgtcgacatgagtgatgtggaggaaaacaacttcgagggcagagaattcatgatttgttcctgtagctgaaacatac

SEQ ID NO: 580319 - DNA, 87 bp, Homo sapiens
ggcggcagcggcctgcacaccaagggcgcccttcccctggatacggtcactttctacaagccacatgaaatgaagatcacctctgcc

SEQ ID NO: 580320 - DNA, 82 bp, Homo sapiens
aacagatgttctgggtgcgagcccggggctatattgaattccatacgacataatctgtcattgaacaaatgtttccttaaag

SEQ ID NO: 580321 - DNA, 82 bp, Homo sapiens
acaaaacttcaagccaaacatcaagcagaatgtgatttgcttgaagatatgaggcagtgtgtgaagaaaccctgaaggtcgg

SEQ ID NO: 580322 - DNA, 74 bp, Homo sapiens
gcctcctccaccagcagaattcagaaacctttcaacgaagtctaaaaataggaagcttccagaaccaccagaca

SEQ ID NO: 580323 - DNA, 98 bp, Homo sapiens
caatgatttataccatgaaatgattgaatctggtgttatcaacttaaaagatgccacctctaaggctggacgtaaagaaagaagtgatgcactcaatt

SEQ ID NO: 580324 - DNA, 75 bp, Homo sapiens
ccttcggcagtccacccaccgccgccgcctcccaggtctctgagcggcccctgatgttcctgttggacactcctg

SEQ ID NO: 580325 - DNA, 100 bp, Homo sapiens
caggtcacccagcagagatcagcaatccttggctcactgaggaggtttggtgcctatggttcatgcttgaagttttaatgacaaagaatgaaaacaatag

SEQ ID NO: 580326 - DNA, 100 bp, Homo sapiens
catgactgcgctggccaaggccatctccaagaacgtgctcttcgctcacctggatgacaacgagaggagacgcagccgtagacaccagctccgaaatcac

SEQ ID NO: 580327 - DNA, 75 bp, Homo sapiens
ggcaaatttctgttccatcagcgtttgtttggaaacccttttccaaagagaaatgaagaagaaaactgtatgtac

SEQ ID NO: 580328 - DNA, 100 bp, Homo sapiens
gtttgctgtttcacctgtatcgactttccaaaagacggtcctaaaatctctacacttgccaaaaaacaacagtctttatgtccttacaccagatttgcca

SEQ ID NO: 580329 - DNA, 100 bp, Homo sapiens
agaccggcggcggcggcaatgctggagacccttcgcgagcggctgctgagcgtgcagcaggatttcacctccgggtttctagagaggaaggatctcccca

SEQ ID NO: 580330 - DNA, 83 bp, Homo sapiens
ccagcctgcgccaccacgtcacgcacacgctcggcgctgcgatccgcgcatataacggtgacagtggatagtggaaacaggag

SEQ ID NO: 580331 - DNA, 75 bp, Homo sapiens
agtatttatcactcatcacagtaacttacgctggtcctatagtacccctcctcaggaatgtctccccagtgcaag

SEQ ID NO: 580332 - DNA, 100 bp, Homo sapiens
ggatgacttctctaatcagttacggtgtgttctactccctcttctgggaatgaagcctccccagcaaagcctatacctgcttgttgattctgttgatgaa

SEQ ID NO: 580333 - DNA, 100 bp, Homo sapiens
attctgtttcatattatcagttgtccgaggaactagcaagggcgtatcctgagctaactctcgccatattctcaggtcattcaagacacagatatgcact

SEQ ID NO: 580334 - DNA, 101 bp, Homo sapiens
ctctacatctaccctttctccccagccaagagcatggctatgggagaaggaaggcaggcagcaggcagtgggatgaagctctcttgactatgagtaaagga

SEQ ID NO: 580335 - DNA, 75 bp, Homo sapiens
ttgcagtgaccattttgttgcagttgactcacgattatagtcataggcctaatgggattgtttgaaaaacgtcgc

SEQ ID NO: 580336 - DNA, 100 bp, Homo sapiens
gtgagatctgaatccacaaacggagacggcagacagtcacaggcagagcactgcagcctgtggtgttgaggctcacagcgatgccatccagccctgccac

SEQ ID NO: 580337 - DNA, 82 bp, Homo sapiens
ctgctgctgcttcaatgtccgcatcgcaaccaccgccctggccatctaccatgtgtatgaagtgtaacagaacagactttac

SEQ ID NO: 580338 - DNA, 51 bp, Homo sapiens
aagagctgctgatgaggactgggacagtttaaaattggtggtgaatggtgg

SEQ ID NO: 580339 - DNA, 83 bp, Homo sapiens
acccaacctagtgggtgtaatacatcatgaactgcagggtgacttaagagattaaaattaatttggttgctgttggttctgaa

SEQ ID NO: 580340 - DNA, 103 bp, Homo sapiens
cagaggtcatcttcagaatgctaaaagaaaaggagccgcgtgtggaggaggctgaagtctcacatcagaggtgtcaagatggagtctcgctctgtcgcccagg

SEQ ID NO: 580341 - DNA, 101 bp, Homo sapiens
aaggacacggccaaccgcctacgtatcagctccatccaggccaccactgcggcgggctctggaagtccattggaatattaagcccaggagttgctttgggg

SEQ ID NO: 580342 - DNA, 75 bp, Homo sapiens
gtggaggagctggtggagattcgcgtcattgattacaacggggaacgcacgctggatggttttaagaaattcctg

SEQ ID NO: 580343 - DNA, 60 bp, Homo sapiens
cccaggctttaagtctgagttcacagcactggtgaccccggcagccctgaggcctctggt

SEQ ID NO: 580344 - DNA, 96 bp, Homo sapiens
aagaccaaaaaacacaataccaggcatacatttggcagaataaatgaaccagtggccctcagattctcagcttgattctaaggaactttcagctgg

SEQ ID NO: 580345 - DNA, 100 bp, Homo sapiens
cagccagcccctgaaactggacacgagtttcaagatcctggaccgtgtcaccatccaggaactcacaggtccaggttcacactagaaggccaaaacttcc

SEQ ID NO: 580346 - DNA, 98 bp, Homo sapiens
gaaggggatataatcctggtgttatcaaagggccggagcctcaacagaaagctcctttagttcctcctcctccaccgccaccaccaccaccaccgcca

SEQ ID NO: 580347 - DNA, 100 bp, Homo sapiens
ctcatgtctgcttatgcggtggctcgctgctcagaacaggagaaactcttgctactcagttggatctagcagaaacaaaagctgagtctgagcagttggc

SEQ ID NO: 580348 - DNA, 100 bp, Homo sapiens
ctggacgctggcagcagtgacagcagcagccgccagcaccgtcctggccacgggaggctccgcactctccccggccgccgtcatcagccatgagagggct

SEQ ID NO: 580349 - DNA, 100 bp, Homo sapiens
ccaagacctgcttctcattatggaacttcttactaacctgctgtcaaaagaattcatagatttcagtgatacaggacccagatgatgtggtaccagttgg

SEQ ID NO: 580350 - DNA, 98 bp, Homo sapiens
gacaagatgaccacactccaggaatgccagtgcatcttttgcacagctacaccattcgcttttcacccaagatgatttgatgtcttataaaactctga

SEQ ID NO: 580351 - DNA, 100 bp, Homo sapiens
agtttgggaacctgactccggagcagctggcggcgccgatcccgactgtagaggagatcatgaatcagacagataaaaatcaacaagaaatcccatcata

SEQ ID NO: 580352 - DNA, 87 bp, Homo sapiens
gcggcgtgtgcgcgcccgccagctgctccggagatacggtataagcagtttagccaaattttgaagaacattggagaaaatgaaggt

SEQ ID NO: 580353 - DNA, 50 bp, Homo sapiens
cggagaggagcctcggccccgtacccagatagaaaatgctgctgaagaac

SEQ ID NO: 580354 - DNA, 101 bp, Homo sapiens
gaagaaactaaagaagacggtcaccaatgacagaagtgcaccaatactggacagaggctatggtggtggaggtggtggcagcagaggtagttatggaggag

SEQ ID NO: 580355 - DNA, 83 bp, Homo sapiens
cttcagacatgcttataagacaactcttagctgttatcaatactctggctgaccatcatcatcgtgggactgactttggtgga

SEQ ID NO: 580356 - DNA, 83 bp, Homo sapiens
aaatatctcagcaggacattaaagtgtcaatgtgtgcggataagaccacacctgtgacaatgcaggttggagaaggtcagcag

SEQ ID NO: 580357 - DNA, 145 bp, Homo sapiens
tgggttgatgagaacaatttgacagctcatgtagaggctggcataacaggacaagagttggaaagacaggacatggatttgattgacatactttggaggcaagatatagatcttggagtaagtcgagaagtatttgacttcagtc

SEQ ID NO: 580358 - DNA, 75 bp, Homo sapiens
ctgccatctggagtggatggacacacctggttgctcagacagatattcttactgattctccgggctctgcagctc

SEQ ID NO: 580359 - DNA, 100 bp, Homo sapiens
cttcagggtcacgagatgagcgctatcggtcagggcaggaagatcccaacagtttgcgccataaatataactttatcgcggacgtggtggagaagatcgc

SEQ ID NO: 580360 - DNA, 75 bp, Homo sapiens
gtgggatccggttccttggtgtcatccagccttagcaaaccagaggattcctaccggaagcaggtggtcattgat

SEQ ID NO: 580361 - DNA, 98 bp, Homo sapiens
accgtgaccgagagcgtgaccgagagcgcgaatatcgtcatcgttagaagggtgcagcccggaatcccgaggatgtggaccgggagcggcgagaacac

SEQ ID NO: 580362 - DNA, 90 bp, Homo sapiens
cgggagaggcatcgggcgtcagctcgcccgcgagttcgcggagcgcggcgccagaaaggaaatagacagacggttggaaaaaaaactgaa

SEQ ID NO: 580363 - DNA, 50 bp, Homo sapiens
ggaggcagaggtggaggcgctttgaaagatggcggcagctatgccatcca

SEQ ID NO: 580364 - DNA, 82 bp, Homo sapiens
atgtcctcaactttctgggcgttcatgatcctggccagcctgctcatcgcctactgcagttttgggatttgagattgacgcg

SEQ ID NO: 580365 - DNA, 100 bp, Homo sapiens
cgaggccaagcggagggtgcgcgagctctaccgcgcctggtatcgggaggtgccgaacactgtgtcttccatgaagaaatgatgaagatgcgacaggcta

SEQ ID NO: 580366 - DNA, 100 bp, Homo sapiens
cgctccgcagccccgggcacggcggaggcagcggagccctgggccatcgatccagacatttaatgtggatgcaccatgccagaccgtggaagatttaacg

SEQ ID NO: 580367 - DNA, 99 bp, Homo sapiens
tttttgattggcgcctttctcattattataggctccctcctgctgtcaggctacatcagcaaagggctgagatctgtatctgtggacctgaatgttgat

SEQ ID NO: 580368 - DNA, 83 bp, Homo sapiens
caagaaaccaacattcccaacagccaccaccaccaccagatgatgtggcaaaatctggcaaaggcagagaccaaacttcatac

SEQ ID NO: 580369 - DNA, 75 bp, Homo sapiens
gcgcggcaggctgaggagaaagcggcgcgcggagggtgtcttttatgaataatcaaaagcagcaaaagccaacgc

SEQ ID NO: 580370 - DNA, 90 bp, Homo sapiens
gtggccttcggtctttcctcgcagctccggggcaagctaggagtgggatggaagtcgagccgccgccgcgccgccgtcgctctccaacgc

SEQ ID NO: 580371 - DNA, 83 bp, Homo sapiens
gacacttctcgcaaacgagccgatccacaacccctgcaaacttggattcagattgttttacaaggacatgctacaagagtaac

SEQ ID NO: 580372 - DNA, 95 bp, Homo sapiens
aaagcccactagcctaaagccgggcggactgcggagcctcacagtctactcagagaaaaataaaagaaggcaaaatgagtcctccccatttccat

SEQ ID NO: 580373 - DNA, 88 bp, Homo sapiens
aaaaacatgaagcagatgagttgagtggagatgcttctgtggaagatgatgcttttatcaagaacagcacatcccattataatgctgg

SEQ ID NO: 580374 - DNA, 100 bp, Homo sapiens
cttaaaccagcttggtgcggatagtctgactagtttaaggagactggccgaagctctgcccaaacaatataaagtcagacctaaagccaaaaggaaagaa

SEQ ID NO: 580375 - DNA, 97 bp, Homo sapiens
ttcgagaggaagattcttacctctttgatctcgacaataagcatctctaacaaggagctctcggagctgatcgagcagctgcagaagaatgccgacc

SEQ ID NO: 580376 - DNA, 100 bp, Homo sapiens
aggatggattgccagggcttcctggcccgaaaggagagcctggttgaaaaataccggccacagaccctgaatgatctcatttctcatcaggacattctga

SEQ ID NO: 580377 - DNA, 75 bp, Homo sapiens
ggaggttttcaggaccaaaattgtggaaaagtcactctggttatcaatactctggctgaccatcatcatcgtggg

SEQ ID NO: 580378 - DNA, 74 bp, Homo sapiens
ctaagattcaacaaactatttttgaatgaagatgatactcctgggcatggaagtggatgggctgagactcctcg

SEQ ID NO: 580379 - DNA, 118 bp, Homo sapiens
agaaggaggggtatgagccacacatccccgaccacttgcggcctgagtatggcgtccgacctccgatcatgaacgggcccctgcacccgcggcccctggtggcattgctggatggccg

SEQ ID NO: 580380 - DNA, 75 bp, Homo sapiens
gccgccccccggactcacaccacagccgccggggaccgccaccccgcaggtttgaccccaggactcccctaccca

SEQ ID NO: 580381 - DNA, 90 bp, Homo sapiens
tgagcatccagtggaaaacacgccagcttcaaagcaagagtaacagttacccctcaatgagcgacccctacctgtccagctattacccgc

SEQ ID NO: 580382 - DNA, 90 bp, Homo sapiens
tggcctcctaccaggagctcatggttgagtgtacgaagaaatgcactattcctgatcagagaactccagttgcttcaacacacagtatca

SEQ ID NO: 580383 - DNA, 75 bp, Homo sapiens
cactgaggttgcagttggcgtgaaggttatttggaaatagcggtgcttgcagcgcttgcggacagtcgattcctg

SEQ ID NO: 580384 - DNA, 75 bp, Homo sapiens
aagaggatagggagacaggagttcctgctggcgggccccggagggctggacaatggcgatgaccactcagaagga

SEQ ID NO: 580385 - DNA, 96 bp, Homo sapiens
gcggagaagatgctggaaacaagactgaaccatcaagacacctgaaaccttatcatgagcgaatgctgaggaagagattccgggaggatcccgagg

SEQ ID NO: 580386 - DNA, 75 bp, Homo sapiens
ctggcgacgcccgccgcctcactgtttctagccttcaggctggtagctcagggatgtctcgtctgtgagttacag

SEQ ID NO: 580387 - DNA, 80 bp, Homo sapiens
ggccgcctgagcccttgagttggtcacttgaaccttgggaatattgaggcttaaatgataatcccagcccctggatctat

SEQ ID NO: 580388 - DNA, 95 bp, Homo sapiens
ggtggcatgagggtcggaccccagtaccaggcggtggtgcccgacttcgaccccgaattcagcttagagaactatcaacacaggacaatgcaagc

SEQ ID NO: 580389 - DNA, 74 bp, Homo sapiens
ggcatgtaaggtgcgcggagggactgcaccttctccatcaggtgcagaagctacagcagcacctgcggagtcac

SEQ ID NO: 580390 - DNA, 100 bp, Homo sapiens
tactgcctatacacagaattacactgaagaagtagagtatttcaaccataaagacatcttaattgggcacgaaagaggagtctatattctgatcggagcc

SEQ ID NO: 580391 - DNA, 100 bp, Homo sapiens
cccaggcctgcgtccgagtctccgccgctgcgggcccgctccgacgcggaaggtaagaatgattgatgttggctgatattggagtgctcattcacatgaa

SEQ ID NO: 580392 - DNA, 97 bp, Homo sapiens
cggagtgcgcagggcgacggccccacctccggccactgggacggcggcgcggagaaggcaggagcaaatggaatgatgactttgaaaaccactggct

SEQ ID NO: 580393 - DNA, 51 bp, Homo sapiens
tttaaacaagagatttccacagaagagccgtctgcacttcctgtagcataa

SEQ ID NO: 580394 - DNA, 76 bp, Homo sapiens
ccagcctgcggagcctgtggggcagcgcttctctgaagtagctttggaaagtagagaagaaaatccagtttgcttc

SEQ ID NO: 580395 - DNA, 100 bp, Homo sapiens
gtcgactgcccagagtccgcgaatcctccgctccgagcccgtccggactcccccgatcccaggttatcaatactctggctgaccatcatcatcgtgggac

SEQ ID NO: 580396 - DNA, 74 bp, Homo sapiens
cctcgtctttgttgtaggtttatctcagcgcctagcagacccagagagggagcactatgtctgcggaagtcccc

SEQ ID NO: 580397 - DNA, 83 bp, Homo sapiens
caccgctgccctcagctccgagtccagggcgagggcagctggtggaatttttgaagaaaatggaatctcgaggccccctttcg

SEQ ID NO: 580398 - DNA, 134 bp, Homo sapiens
agaacctaatggctttccttctgatgcctcagccaattcctctctccttcttgaattccaggtgaaatactcgggatacctggaacacatggacagacccttcgattctaattactttaggaaaactcctcggc

SEQ ID NO: 580399 - DNA, 90 bp, Homo sapiens
taaagatccaagtgctgttcacacagtgagatgcattctgaacattgagctcaaggtggaagtagaaagtctgaagcgggaactccagga

SEQ ID NO: 580400 - DNA, 90 bp, Homo sapiens
gacgctgggaacactgaatcaacatgggcaatgagaacagcacctcggacaaccagttggagctgatcacaacccaggccacaaaggcag

SEQ ID NO: 580401 - DNA, 87 bp, Homo sapiens
agcatcatgtttggcagctgagtattggagccaggagcctgccatgagtttcactgttacatgccttgaagtgatgaggaggtttct

SEQ ID NO: 580402 - DNA, 50 bp, Homo sapiens
caagagactcaacagatgcagatgaagacctagaggatcaagacataatg

SEQ ID NO: 580403 - DNA, 75 bp, Homo sapiens
ggcatttccagctcttcactttttggcactggatgcatctcagcacagcaggtggagtcttgctctgtcacccag

SEQ ID NO: 580404 - DNA, 75 bp, Homo sapiens
tggcgctgtgcggctgcccggcccccgccgcgggttggaagtactccatgacacacactcggagaaagtcccttc

SEQ ID NO: 580405 - DNA, 118 bp, Homo sapiens
ttcggtttcagttggagttggaatttgtgcaatgtttagccaacccaaattaccttaattgtgaccaagaatatggcccaggtgaccaaagccctggacaaggccctgagcaccatgg

SEQ ID NO: 580406 - DNA, 100 bp, Homo sapiens
gcgcatatcctgggtagcctctaggaagcgctagacacatgaaagaccggcagagaccaatgccaatgtggacaactcggcgtccccctcggtggcccag

SEQ ID NO: 580407 - DNA, 100 bp, Homo sapiens
agtgaacagagcctgaaggatggggaggagcggggggaggaggacccagaaggtccttgaatgggcaagagggcacatgaagtacggcgtcctccacatt

SEQ ID NO: 580408 - DNA, 98 bp, Homo sapiens
accctagcgcctattatagtgatataatcaggacacccggagcaacctggacataactgtcggctctcggcaacaagccacccaaggctggatcaaca

SEQ ID NO: 580409 - DNA, 82 bp, Homo sapiens
tggcagcagcaaggtgcgacagctctggtcagaagactcctgcgaatctggaagatgaagtcctcagtacattctgaagaag

SEQ ID NO: 580410 - DNA, 82 bp, Homo sapiens
acttcctgcagtgggcattagccacgtccagttttcggctttgtgagaaaccttaccatcaaacacgatggccagcaacgtt

SEQ ID NO: 580411 - DNA, 49 bp, Homo sapiens
tgcctttgccgccaccatgcccaaaacgaatttcgctaaggagtttgtg

SEQ ID NO: 580412 - DNA, 75 bp, Homo sapiens
ccgggagcagccagcccgtgggcgagccgcccgcccgccgagcagccatgaggatgccggctccaggagcagcag

SEQ ID NO: 580413 - DNA, 83 bp, Homo sapiens
gaaaacggggatttccaccatctgtcccaggtcggattgtttgtgctgaacgaactgtcctcttgcttcagaagccccttttg

SEQ ID NO: 580414 - DNA, 83 bp, Homo sapiens
tggtgtttctccaggaaaaggaccagaagtacatctttcctaccctggtcaattctttgtgatgatgtcaccacaagaagtac

SEQ ID NO: 580415 - DNA, 85 bp, Homo sapiens
ttcaatgattaccaccttcaaaatggagatgttgttgggcagcattcatttcctggcagggatttgtcttggctgttactatgac

SEQ ID NO: 580416 - DNA, 100 bp, Homo sapiens
acatgcaactaatagcccttgaacagctatgcatgctgcttttgatgtctgacaacgtggatcgttgttttgaaacgtcctcagaatggttggaatgacc

SEQ ID NO: 580417 - DNA, 51 bp, Homo sapiens
cagaaacaaaatgtcaacaaattgatggacacccatcatactgactccaag

SEQ ID NO: 580418 - DNA, 98 bp, Homo sapiens
tcgggctctggttagagacagtcaacgacgcctctctctggaacgcctacccaactccatcgcctcccgcttccgcctgacagagagggaggaggaag

SEQ ID NO: 580419 - DNA, 90 bp, Homo sapiens
ctacaacaggaaaatcatattatagatggagtaaagaaaatagaagcacgagtgtctgctgatgaagacctcaaactttctgatctttta

SEQ ID NO: 580420 - DNA, 137 bp, Homo sapiens
actagactctgaaatgaattagatggagatttaaaatagggcaatttagtgggaagagatacttaatttgaagtttcattcattggctcccatgtactatcgaggctcagctgcagctgttatcgtgtatgatatta

SEQ ID NO: 580421 - DNA, 112 bp, Homo sapiens
cacaaatatttacagtcggaggagtactcggtgaaatcctgtcctgaagactgtaagggtgaaagaggcctcccggggttacaaggtgtcattgggtttcctggaatgcaag

SEQ ID NO: 580422 - DNA, 96 bp, Homo sapiens
tttatctcatattagtgcctgtgatggcatctttcatctaacacatgttcctcctgctgatcaagagaagctttttatccagaagttacgtcagtg

SEQ ID NO: 580423 - DNA, 98 bp, Homo sapiens
atggaggggctggttcagcacagagtggggacccagcaggtggctgaggtgtaagctgttcagatgaagatgaaaaacccagaaaacgaaggcgaaca

SEQ ID NO: 580424 - DNA, 100 bp, Homo sapiens
gccggagctgccgcctccatgagaggcttcctcctacaccccaggccgcttacaaacacgcagatggcaagaagattgatggcaggagggtccttgtgga

SEQ ID NO: 580425 - DNA, 83 bp, Homo sapiens
ccggaagctggtggaacagctacgcatagaagccgggattgagcgcatcaagggagtgcatccgccccaacccttttccccct

SEQ ID NO: 580426 - DNA, 75 bp, Homo sapiens
ggaacatacgggcaagtttataaggtcattcctgtcccaatcagctgctctactactgatgacattaaagatgcc

SEQ ID NO: 580427 - DNA, 97 bp, Homo sapiens
ttacaaaaccttatctggtcgtccagcccaccccggtgccttgctctggaagctgctgataaagatgatagttcagaagacatttcagtgccgagta

SEQ ID NO: 580428 - DNA, 100 bp, Homo sapiens
aaagccagagcgccaggagtcagcaaaacacactaaagattgggcagtcactggggagaacatgcttgctctgtcaaggcacagcctattgtctcctttg

SEQ ID NO: 580429 - DNA, 75 bp, Homo sapiens
cagaggacacgaggcggcgggctggagacatggaccgcggcgagcaaggttcaaaatgagcctgtttggaacaac

SEQ ID NO: 580430 - DNA, 96 bp, Homo sapiens
ctggtgctttcaccccggctggaccacacctggacagtcagtttcttttcaaaggacagtgaggaggaatttggttctgagcgagatgagtaccgg

SEQ ID NO: 580431 - DNA, 75 bp, Homo sapiens
aagaggacgagggggccaaggcttcctccggggtgtcagctgtgatgcatgtttaaaaggaaattttcgaggtcg

SEQ ID NO: 580432 - DNA, 80 bp, Homo sapiens
ctatcagcaggctccgggctgaagattgcttctcttctctcctccaaggaataatgtatttgtggccttggacatgaggc

SEQ ID NO: 580433 - DNA, 51 bp, Homo sapiens
gttgtggatcttgaagctttggaaagggtggaattgcgtttgttgccataa

SEQ ID NO: 580434 - DNA, 74 bp, Homo sapiens
accaggatccacccgatgaatgtgggaagactgagctcgaattacatctttacaagaggaggtgaagcatctca

SEQ ID NO: 580435 - DNA, 98 bp, Homo sapiens
agaagtgccgaaagagcactggactccggaaggtagctacagcaagctgggtagcaggcagatccaaaggatatcatgaagtttccagggcctttgga

SEQ ID NO: 580436 - DNA, 74 bp, Homo sapiens
gcggacatctaaccatggtcatgccaggaaaagagccaaggaagctgaatatggtgggcatgatcagatagatt

SEQ ID NO: 580437 - DNA, 75 bp, Homo sapiens
taatcctcaatttaagcctgatctaacccctagaaacaggagcttcgtggcaattcccgcctccatgcggataga

SEQ ID NO: 580438 - DNA, 100 bp, Homo sapiens
accatcatggtcgtcagcgtcaccgcctccaccacccaggggtgcttgcggaggagccggaggcagtgctgaagggggccaaacccaagctgatgtcggc

SEQ ID NO: 580439 - DNA, 96 bp, Homo sapiens
ggttggctggttactgggaaaagatatcctggaaatgtttactattagtgtaagaaatgactgctgagtacgcctgcacaaggaaacagtttaaca

SEQ ID NO: 580440 - DNA, 76 bp, Homo sapiens
agctggaggcgctggggagcaagactatgaggatctcaaagatttcatgagacaagctggggaagtaacgtttgcg

SEQ ID NO: 580441 - DNA, 100 bp, Homo sapiens
atttgtctgccaaacaactgcagctttcaggatgccaacccgcccctgaaggttattccccaacacttcaatggcaacagcaacaagtggcacagttttc

SEQ ID NO: 580442 - DNA, 99 bp, Homo sapiens
gaagaggaaatgaagggtattgccgctgttactgatatacctttaggaggagatgttaaagtaacccatcttgcaggacgacattgaagattggtcttc

SEQ ID NO: 580443 - DNA, 100 bp, Homo sapiens
catgccgtcgcctcagtccagctctgtcatcactcaggcaccttccaccaaccgccagatcgggtcctccatgtgaatcaatcccatgatgcaacatgcc

SEQ ID NO: 580444 - DNA, 83 bp, Homo sapiens
aagtcgtcttccacttgcacgaaagctttcctaggccaaaaagaggtactccaaagattcaggtttactcacgtcatccagca

SEQ ID NO: 580445 - DNA, 82 bp, Homo sapiens
ggaggagaagccggaggaggacaacgactaccaccgcagcgacgagcaggtgtcccgacccaggctaagcttgagcatggct

SEQ ID NO: 580446 - DNA, 101 bp, Homo sapiens
gggagcttctgtcccgaggaccaggggatgcgaagggtaaaataccatgaagattttgaaaaaacaaaggggagaggctttactcccgtcgtggacgatcc

SEQ ID NO: 580447 - DNA, 50 bp, Homo sapiens
cagagaccatcccaggcccacagatgagttttgatcatcctgagaaaaat

SEQ ID NO: 580448 - DNA, 100 bp, Homo sapiens
cgggtgggagtgacccgattttccagatcagtgtgcgtgtgaccaccatggatgcagagctggagtttgccatccagcccaacaccaccgggaagcagct

SEQ ID NO: 580449 - DNA, 83 bp, Homo sapiens
ggagtgtgggccacctcaaggcccacctgagccgcgtctaccccgagcgtccgggactggtgattgcagctggaagtgcccat

SEQ ID NO: 580450 - DNA, 100 bp, Homo sapiens
gccaagagggatccttcacccgtgtctggattggcagccaccatttgcatgtgatgttgataaacttcattttacgccacgtatccagagactgaatgaa

SEQ ID NO: 580451 - DNA, 100 bp, Homo sapiens
gcactgtgacctacactagtcgcgggagccacgcagaggacgccggaacaccctggaagccgagaaatgagctgcggtgcaaccctgggcagtttgcgtg

SEQ ID NO: 580452 - DNA, 83 bp, Homo sapiens
gctcggccaaatcctccttcagcctcctggcgcccatccgcagcaaggacgtccgcagcagttgggccggtgcacaaacagcg

SEQ ID NO: 580453 - DNA, 75 bp, Homo sapiens
atcattggtgaggtgctatctcggagacacatgaaggtggcattttttggcaggaacttagtgatttggcccgtg

SEQ ID NO: 580454 - DNA, 107 bp, Homo sapiens
ccaacgtcgccccggtttgacgcacacggcaccaaactgcactggtgaggtggattgatgatgaatcttctggcacacctggagcaactccagaacacagtcgtgag

SEQ ID NO: 580455 - DNA, 100 bp, Homo sapiens
ctcaccatgccggtcaaaggaggcaccaagtgcatcaaatacctgctgttcggatttaacttcatcttctgggtgacagagctgaatgaacctctctcca

SEQ ID NO: 580456 - DNA, 83 bp, Homo sapiens
ctgatgccgcccgcggcgaggtggcccggaccgcagtgccccaagagagatatgagatcctgactccaaactccattcccaag

SEQ ID NO: 580457 - DNA, 98 bp, Homo sapiens
agaaaagcgaaggattgtggtcccgcctcacctggggtatggagaggaaggaagagttatccaagcattaggtgaacatcttaaattaagacaacaag

SEQ ID NO: 580458 - DNA, 75 bp, Homo sapiens
gcatggctgagagctacacggcatccagcatcgcccagagaccctgatgcttggtgtgacctgagtaaatttgac

SEQ ID NO: 580459 - DNA, 99 bp, Homo sapiens
tcttgatacacaatctaaaaagaattaggaaggtccttcaggtgagaagccttataagtgctcatgggagggatgtgagtggcgttttgcacgaagcga

SEQ ID NO: 580460 - DNA, 99 bp, Homo sapiens
tcattaccttagaggaagaagcactccagagacgactaaatgagctttcagcagaggccaaggcagcattgcttgaatttgaagaaagggagcgacagc

SEQ ID NO: 580461 - DNA, 74 bp, Homo sapiens
tgctgaccctggccttcaaccccgagccgctggtgctacagggagtaactattcccagtcagaggcgctatgtg

SEQ ID NO: 580462 - DNA, 75 bp, Homo sapiens
ccggggctcctctggaagcggctccgatgatcaagcggtgctgattcacgagagtggaagcctccagagcttggg

SEQ ID NO: 580463 - DNA, 100 bp, Homo sapiens
ccggtgtgtgggccagcggagctccggagacccgtgtacagtatcatctcagttggagttagaagaagcctttagactttatgagctaaacaaggattct

SEQ ID NO: 580464 - DNA, 100 bp, Homo sapiens
cgttcatgcagacttttttaacgatttggtcgtattgggcgcctggtcaccagggctgcttttaactctggtaaagtggatattgttgccatcaatgacc

SEQ ID NO: 580465 - DNA, 82 bp, Homo sapiens
ttcttccaagaaaccaacattcccaacagccaccaccaccaccagatggtttgagaagatgatcagtgggatgtacatgggg

SEQ ID NO: 580466 - DNA, 100 bp, Homo sapiens
cgcggagtcttcggcgagacctaccgggccctgtctgtgccggccgtgagctgcggcaggacggctggaggaacctacaagcagcaattggcgcctatta

SEQ ID NO: 580467 - DNA, 100 bp, Homo sapiens
ctgactgagaggtcaaatgcacagcggcagctgattgttaaggaatatcaagcagcatatggaaagcacttttcaggattagaagaggctgtgtatagaa

SEQ ID NO: 580468 - DNA, 100 bp, Homo sapiens
cagtttggggcatctccgcggtccggcccggggccccgggatctcggctgtccttcctcccgttgctctaggtcgtaaccagcctttgaaaaaggagaaa

SEQ ID NO: 580469 - DNA, 101 bp, Homo sapiens
ggagaatggaaaagaaccattgaagcttgagagaaaagcccccaaaagcagctattcaggtgcttttgaagatgatgatatcacgcacgttgaaggaagtg

SEQ ID NO: 580470 - DNA, 74 bp, Homo sapiens
ttcagacatagacaagaatgattacccaggaaacttggatttaactggccagaagcaggtattcaaagcagaga

SEQ ID NO: 580471 - DNA, 110 bp, Homo sapiens
ccgcttcatgatcgagtgcgacgcctgcaaggactggttccacggcaggttgcacagagcattgaggatcaccatcaggaagtgattggtttctgcagagagaatggttt

SEQ ID NO: 580472 - DNA, 75 bp, Homo sapiens
ctcttggcagccttcctgatttctgcagctctgtgtgaagccaactgggtacatggaaaactcagtctcctacag

SEQ ID NO: 580473 - DNA, 80 bp, Homo sapiens
tggagacggtcgtagctgcggtcgcgccgagaaagttttccaagagataacttcaccaagatgtccagtgataggcaaag

SEQ ID NO: 580474 - DNA, 83 bp, Homo sapiens
cttcgaggtgctctttgcctgcactggtatcgccttggtgtatcagttcctatccctgtgattggactgagggacgaagaaaa

SEQ ID NO: 580475 - DNA, 73 bp, Homo sapiens
aaaaaagcttattgggaagaagaagttcaccatgtctattctcaagatccatgccagggagatctttgactct

SEQ ID NO: 580476 - DNA, 98 bp, Homo sapiens
tcagcaagcctggcacggcggctgagctccggcagagcgtgtctgaggccgtgcggggctccgtggtgctgaaactcagccacctgtgacaaatttga

SEQ ID NO: 580477 - DNA, 88 bp, Homo sapiens
tggccgtgctcgtcgggcccccttcgggagagctgccatcagtcatgctcttaaacggggactgcccagagagcctgaagaaggaggc

SEQ ID NO: 580478 - DNA, 100 bp, Homo sapiens
gaaggagtgtggactttttgaatttcaagaacagtaaagttggaacacagcagagggtgtgtaataaaatacagtgccgtggaggtcccagcccccgctg

SEQ ID NO: 580479 - DNA, 101 bp, Homo sapiens
cagctcctgaaaggagagacacttgtgaacattcaagtgaagcaaaagcctttcatgattatgccttagaaaatttacgtgtatacctgtgtgagaaaatc

SEQ ID NO: 580480 - DNA, 50 bp, Homo sapiens
cgcagtggtcgcttcttctccttgccccatctgtgacttcctagaactcc

SEQ ID NO: 580481 - DNA, 74 bp, Homo sapiens
cgggtgcgtctgccgcagagtcggcacctgaaggacatggaggtgaacatgattaaagatgatgggacagttat

SEQ ID NO: 580482 - DNA, 82 bp, Homo sapiens
tggggtcccttttgcctcagatactattttgaagcatgctacaagtgaaaactgatgagaaactgaatgtgtctgatgagaa

SEQ ID NO: 580483 - DNA, 73 bp, Homo sapiens
gaatacagagatatggaatcaggatattggtatggtatagagcttgaaaaaccccatggcaagaatgatggtt

SEQ ID NO: 580484 - DNA, 100 bp, Homo sapiens
gaattccagagttctggtttaccatcttcagaaatgtggacatgctgagtgaattagtccagctttttgacagattgagagatgaaaatccagattttag

SEQ ID NO: 580485 - DNA, 100 bp, Homo sapiens
agccacgtgcagacatctacaaccttcgatctcctgacgagtggagattcccaacatccagaagcagaggaagcagcttgcaagattggtgttagactgg

SEQ ID NO: 580486 - DNA, 104 bp, Homo sapiens
ggatgaccaccaccctcgtgtctgccaccatcttcgacttgagcgaagttttatgcaagatgggaaactcttgtctagtgatgtgactcattacgtgatcccag

SEQ ID NO: 580487 - DNA, 88 bp, Homo sapiens
cacaggacctggaaaaattacatgcacagttggtggatctgaaatctgaactgacagaaacccaagcagagaaagttgttttggagaa

SEQ ID NO: 580488 - DNA, 83 bp, Homo sapiens
agagattcatctttcatgcagtgacatgttgataaaaaatgatgggcgtgatggtgggcatgggtcagaaggattcctatgtg

SEQ ID NO: 580489 - DNA, 99 bp, Homo sapiens
cgctgccgggccgtcagcttcggtcagagacgctgtgggacagcccccgagggaggcggtggaagaagatatccccatagcgaaagaacggacacattt

SEQ ID NO: 580490 - DNA, 82 bp, Homo sapiens
aggcgaggacggtctctgccagtataaatgcagtgacgcatgctacaagtgaaaactgatgagaaactgaatgtgtctgatg

SEQ ID NO: 580491 - DNA, 78 bp, Homo sapiens
tggaggttcgagcgctgttctcgctccggagccgctgcacatttcgaccccaagactgcttctgagacagaaacagat

SEQ ID NO: 580492 - DNA, 99 bp, Homo sapiens
tcttgctcctctctccttggcctctcctgggatcggcccaaggccagttctccgcagcatctactacaagccttagtgggtctgatagtgagaccgagg

SEQ ID NO: 580493 - DNA, 100 bp, Homo sapiens
cccaagcttccaggtgtcccagaaacccaggaaatcgagactcatgactcccagagaggatggcatctagaaggcttgcttccggcgtcatggctcaaag

SEQ ID NO: 580494 - DNA, 82 bp, Homo sapiens
tcagaaactgttggagtttatatacacaggaactttaaatcttgacaggaagctgtgctgaatggtttggtggccactgagg

SEQ ID NO: 580495 - DNA, 75 bp, Homo sapiens
acacgcttcttctggaagaccagccaacagacactttttcaaaaatggcaatggtatcagaattcctcaagcagg

SEQ ID NO: 580496 - DNA, 99 bp, Homo sapiens
aagaggaaggaagagtctacctgtttactatcaaagaggaccaagaactatatttctttcatgaactcagccctggaagttgcttttttctgccaaaag

SEQ ID NO: 580497 - DNA, 82 bp, Homo sapiens
aaaatcgagagatcatgaaacacctgaaggcaatttgttttcttcgacctacaaagaacaaaggccgagttagatcaagaag

SEQ ID NO: 580498 - DNA, 100 bp, Homo sapiens
agccaagggagctctcactggaggaacagacttttgcagatcagatatttggaatatttaactggataattccactgtcagttgcattatcctgttttgg

SEQ ID NO: 580499 - DNA, 100 bp, Homo sapiens
gctggcctctgcgcctttctctcatcccggcacacaagccatgccccctcttttctctttgggataccaccagtgccgctggaactatgaagatgagcag

SEQ ID NO: 580500 - DNA, 98 bp, Homo sapiens
cggagagcggcctgcgggcgatcgggccgaggacagagcgggatgccaccagcttgtccaaagggaagttccaggagctcctggtgggcatcgttgtg

SEQ ID NO: 580501 - DNA, 82 bp, Homo sapiens
ttagctgtgctcgcgctactctctctttctggcctggaggctatccagcggtttgaaattcctgatatagatgctgaaaagt

SEQ ID NO: 580502 - DNA, 100 bp, Homo sapiens
ggacaaatttcccatggaaggaggacagaaggaccccaagcagcggatcatcccctttctgccagagaacctgtggagtacgtacgcgcacgcgggggcg

SEQ ID NO: 580503 - DNA, 75 bp, Homo sapiens
cgagtggccaggcttctggggctgactcaactgacacctagctgttgggcagaagagggtgcagaaaagaggtca

SEQ ID NO: 580504 - DNA, 102 bp, Homo sapiens
ctctttctgttcaggccagaccctctgggagcttctcagccattttccacagatcaggctctgacgcccgctctgcggcttcggtgtttgaacaggccacag

SEQ ID NO: 580505 - DNA, 89 bp, Homo sapiens
gagggccaagggcaaaggccgagtacctccctgcacttggctattcaaaacgggtccatctgatgaatcctatggttccaggattaaca

SEQ ID NO: 580506 - DNA, 82 bp, Homo sapiens
ctgagcttggcgcacgggccgaccagaaatgcgtgtactgccggaagcggatgaagaaggtgtcaggtgcctgtatccagtg

SEQ ID NO: 580507 - DNA, 50 bp, Homo sapiens
ctgctgagtgaccaggccaacgtgacagacgaaggggaggaccaggctgg

SEQ ID NO: 580508 - DNA, 100 bp, Homo sapiens
atgacgtgcaggtctctagcgcgtttggtgcacctcgatttggaggaagtagggcagggcccttatctggaaagaagtttggaaaccctggggagaaatt

SEQ ID NO: 580509 - DNA, 75 bp, Homo sapiens
ctggtgcagaacattgcgcggcagatgcctgaggaagtgcaccatggagaggaggaggtggagacttttgccttt

SEQ ID NO: 580510 - DNA, 100 bp, Homo sapiens
tgcacttcgcattttggcattgacatttaattttagggtcctttatatagaagggagagtaggtggaaaggagactatggaaccaggatccagcagtact

SEQ ID NO: 580511 - DNA, 83 bp, Homo sapiens
ttttgcacttgtgcagaccgggcgagcagagtaagaagcaggatcaatatggaaattatgtaatccaacatgtactggagcac

SEQ ID NO: 580512 - DNA, 100 bp, Homo sapiens
ggtgctagacacctgccgagtccgaagcgggagtcaggctgagccttcggcccccaatgccggtggtggtgtgcacattgagccccggtatagacagttc

SEQ ID NO: 580513 - DNA, 100 bp, Homo sapiens
tttcaaaatggccctatgcttaggttgagtcagcagatactggagttatttgaaacatgtcagcagcaaataagtgatttaaagaagaaagaactctgtc

SEQ ID NO: 580514 - DNA, 100 bp, Homo sapiens
ggtgctaatagtagctggccatcacaactggattgtagctgcatatgcccattttgctgtgtgttacagtgattcgcctttgccagtctcatctcgtgtc

SEQ ID NO: 580515 - DNA, 100 bp, Homo sapiens
aggcgaagcggcacaacctggctttccagttctcagggaacaatagaaaccagtcttcaggatatcgacagcagattatctccaggtggatcactggcag

SEQ ID NO: 580516 - DNA, 100 bp, Homo sapiens
tgaccgcgcgactcggcgcccgcccgcggtcctgttctcgaacatcgaagacatcctggaagttcataaggatttcttggccgccttggagtattgttta

SEQ ID NO: 580517 - DNA, 82 bp, Homo sapiens
gaagctgtcctggctcagatggctcggtcatcacgggtcttccacccttggccacctccccaggtgatgcctgaagctcaag

SEQ ID NO: 580518 - DNA, 98 bp, Homo sapiens
ctgaatccagtaccaaaaacgtcaacaacagttttacgtgtccacaggatgaaatgtccgagtcaggccagtcctcggcggccgccacacccagcacc

SEQ ID NO: 580519 - DNA, 82 bp, Homo sapiens
ctcaacttattcccttcaattcaagtaacaggaaaatatatgcagatgatgaacattcttaagccaattgcctttgatgtta

SEQ ID NO: 580520 - DNA, 113 bp, Homo sapiens
tcaatatctgtcttcggtggactccttcggcagtccacccaccgccgccgcctcccagggcgaccattgacgaggtggagacggacgtggtggagattgaggccaaactggac

SEQ ID NO: 580521 - DNA, 83 bp, Homo sapiens
aggcattcttcatgagcatagacagtctgtgtaagaagtactccagggaaacctcccagacaatgcagatcttcgtgaagact

SEQ ID NO: 580522 - DNA, 100 bp, Homo sapiens
cagaaaatcattctgccttattacgccgtctccaagatgtagctaatgaccgtggttcccactgagaaatctcctgcaaagaagctgagccatgcaatta

SEQ ID NO: 580523 - DNA, 103 bp, Homo sapiens
cgcaaggacagcgcgaggtccgcgcagcccagcgcagccatcaattctgtggtgttcttggtcacacatttatggagtttctgaagggcagtggagattactg

SEQ ID NO: 580524 - DNA, 100 bp, Homo sapiens
agcagcagcaagttagtggattaaaatctcccaagaggaatgacaaacaaccagctcttcagaattcagaaggaacttgcagaaatcacattggaccctc

SEQ ID NO: 580525 - DNA, 88 bp, Homo sapiens
ttctggggagcgcctcgtcgacatgagtgatgtggaggaaaacaacttcgagggcagaatcgctccttcgatatcctaaaaaaatcca

SEQ ID NO: 580526 - DNA, 100 bp, Homo sapiens
aacctcctctggcccccggaaaacctaaccatgaagacttgaacttaatacagcaagaaagaccatcaagtttaccatgcccttgctaccagttccgagc

SEQ ID NO: 580527 - DNA, 97 bp, Homo sapiens
gtcaccggcttgaggggctgcgtgaggcgcggaggcaggtatcagatacacaccggacttcaacattctatcataagacctacccaacccaactgtt

SEQ ID NO: 580528 - DNA, 78 bp, Homo sapiens
gccacctacagaaacaaaatgtcaacaaattgatgggaaattgaacttgaatgtggaacccagctttgtcttctgttt

SEQ ID NO: 580529 - DNA, 98 bp, Homo sapiens
gcggggccccggaggagcaggacgcggaggccggggacgcggaggccgaggacgcggaggacgcggctctgccaggttcctcatgagagtgctggact

SEQ ID NO: 580530 - DNA, 82 bp, Homo sapiens
tctcaaagcctcctggccccagagacaggtagtaaacctattgatggcaattttgctgactgtggaagtgactcatccaaac

SEQ ID NO: 580531 - DNA, 100 bp, Homo sapiens
tcttccactgatatctcaaaaggtgatctggacaaaggaacaggtatctcaggttcatctgcagaagccagcggacgcctctgttcaacttgtgggttac

SEQ ID NO: 580532 - DNA, 80 bp, Homo sapiens
tcattaaaaattaagcgtggcttttgaggaagatgtgacaactaccggagacttgcagacctactggaagagaaccaaga

SEQ ID NO: 580533 - DNA, 100 bp, Homo sapiens
ggccagagataagaacaccaaccaaattgtcgccattaagaaaatctttgtagaatttgatggctgtaactggaagcaacactcctgggtaaaagttcat

SEQ ID NO: 580534 - DNA, 100 bp, Homo sapiens
gttctaccgaagagactgacaagtacacctgcagtgacaacacgtagaagatagcaccatgccgattcgtcgaactgtgaattctacccgggaaactcct

SEQ ID NO: 580535 - DNA, 80 bp, Homo sapiens
gcggccggcttggagaggccgagggtttgatgaaggtggaggcagcgcggctctcagctcctgcttcaggtgcagaaata

SEQ ID NO: 580536 - DNA, 51 bp, Homo sapiens
gtcactggagctaattcaggaatagccctggtacctgacagtgtaaagaag

SEQ ID NO: 580537 - DNA, 51 bp, Homo sapiens
catcgagacctcggccaagacccggcagccatgggcctgcgcgcgagccgg

SEQ ID NO: 580538 - DNA, 100 bp, Homo sapiens
gccaaggacccttgtcatccattagagcggtaatcaagagatgttttacacatccataagtagacctttttggagcctcaccagccaattcaatggcgtc

SEQ ID NO: 580539 - DNA, 100 bp, Homo sapiens
ttcaggctgccctcaaactcctggactgaaacgatcctctcatctcagcctccaaaagtgctggcattacaggatgccgaggaatgtgacagggctggga

SEQ ID NO: 580540 - DNA, 100 bp, Homo sapiens
agagaggcaccgggatcgtgaccgagaccgtgaccgagagcgtgaccgagagcgcgaatatcgtcatcgttagaagctaatggcactgactcagccttcc

SEQ ID NO: 580541 - DNA, 96 bp, Homo sapiens
gaacttcagaggaacttccagctgatgcgagagctggaccagaggacggaagggtgagaactctgtctcagtcgacgggaagtgcagtgactccac

SEQ ID NO: 580542 - DNA, 50 bp, Homo sapiens
cagcagcatctcagcccaagagaaggctacattggcgtggtgaaccgcag

SEQ ID NO: 580543 - DNA, 101 bp, Homo sapiens
ggcctccgggccgcgaagtcgcagcgccagacccaaggcccccgagtgagcgcgggcgccgaggtactccaaagattcaggtttactcacgtcatccagca

SEQ ID NO: 580544 - DNA, 82 bp, Homo sapiens
aagaaatactcgtttgcaaagaaaaagatgttaatttcaaaactggagaaaaacaaaacaatgaagtctgaagataaagcag

SEQ ID NO: 580545 - DNA, 83 bp, Homo sapiens
tacagagagaaaattgagacggagctaagagatatctgcaatgatgtactgcatttcttgagacttaaagtggcattctaaag

SEQ ID NO: 580546 - DNA, 95 bp, Homo sapiens
tggatcttgtggaaagtcagagagttaaagttcctcgtaattttcgcttgttggaagaacttgaagaaggacaaaaaggagtaggcgacggtaca

SEQ ID NO: 580547 - DNA, 100 bp, Homo sapiens
gcttcattgacaaggaggacctgcacgacatgctggcctcgctggaaccaaatctgtttcttccatgtctgagtttgaaagtttgctcgactgttcccct

SEQ ID NO: 580548 - DNA, 90 bp, Homo sapiens
gaccccgcgccggaccctgaggcagcgacatcgtcatcagacagtgaggaggacccagaagccttggagaagcagaagaaagtgcggccc

SEQ ID NO: 580549 - DNA, 98 bp, Homo sapiens
gcacgctgaggccgaggcggagaaggggcttcctgagcgtcccagtacactgacagagcaaggagcaaggaccaaccccagtggagaaaaagaagaaa

SEQ ID NO: 580550 - DNA, 100 bp, Homo sapiens
ggtgatgccaccccagcccgtggtcctgatgccaacagtgtaccagcagggcgttggctatgtgcccatcacagattttgcaagaacgaggctcaaggat

SEQ ID NO: 580551 - DNA, 80 bp, Homo sapiens
gagatggttttgaaagtcatcgcatttaagcctaagaatgaaccaacattttatacatctgatggtgttcctttcactgc

SEQ ID NO: 580552 - DNA, 75 bp, Homo sapiens
ctcatacggctgcttctggagaagaatgcagtaatagtggccttgtcttcaaaatcatgggatgtagagactgca

SEQ ID NO: 580553 - DNA, 75 bp, Homo sapiens
cagtgttccaagttctaaagaggggagtaggttgcatctttgttgaaatgatccaaggagttgctgcttttccag

SEQ ID NO: 580554 - DNA, 74 bp, Homo sapiens
ggaaccctggtcaccgtctcctcaggagccatgtgttcacatgtcatgtggaccagtatttaactgtggaaacc

SEQ ID NO: 580555 - DNA, 75 bp, Homo sapiens
taatatgtatgccaaagcagcagccttctcgacagccttttactgtgaacagtggaatgcagtagccctctgggc

SEQ ID NO: 580556 - DNA, 100 bp, Homo sapiens
cagtggcaatgacccagacccggacgacccccattgctgagccagcggagctgcttgacctcaggatatcattgtgtttgtaattggaggagccacctat

SEQ ID NO: 580557 - DNA, 100 bp, Homo sapiens
ggagatctctctcatctcgctcggctgcgggaaatcgggctgaagcgactgagtccgcgatggagcttctgaaagttctgctgaagacagtgagcaggaa

SEQ ID NO: 580558 - DNA, 100 bp, Homo sapiens
gtcgactcttctcatcccccaaagatcattctgcctgggaaagaaatgaaagtctttccaatgcagggtttttcaggaaatgcaaatgcagacagtgttg

SEQ ID NO: 580559 - DNA, 90 bp, Homo sapiens
aaatggacaaggctggttattagaacaaagatttcgcaggtggtgagtctcaaaggcgaagctgaatggagcagctgcagctctactggg

SEQ ID NO: 580560 - DNA, 83 bp, Homo sapiens
gacagtcctcgtcagcactgactttcagctatggaatcgataagaccatcatcatgtggaaactgaccagggatgagaccaac

SEQ ID NO: 580561 - DNA, 96 bp, Homo sapiens
ggaggttcaaagtgtccgacgagatgcagtgcaagctgtttgtctttgacaagacctcacagtcctgggtggagagaggccgggggctgctcagac

SEQ ID NO: 580562 - DNA, 100 bp, Homo sapiens
cactgtacagggatgtgatgctggagaactgcaggaacctggcctcactagtgcagagtggacctccagcaaactccagcagacctgcagcagaggggcc

SEQ ID NO: 580563 - DNA, 75 bp, Homo sapiens
gtccggggtgtgtcactgtttcccaggatttctaggagcagactgtgctaaaggaggagatgttaaagtaaccca

SEQ ID NO: 580564 - DNA, 90 bp, Homo sapiens
tcttgttcaactgagaacttggagcttcggaagaaggtagaggttctagagaacactaataggtactccaaagattcaggtttactcacg

SEQ ID NO: 580565 - DNA, 100 bp, Homo sapiens
aataaagctcctgggcaaggggacgtctgcagctgaggaatgcagagagcaaccaatgtcacctaccaagcccatcatgtcagcaggaacaagagaggtc

SEQ ID NO: 580566 - DNA, 75 bp, Homo sapiens
aaggttgggcattgggtggaggagcagaatttactacagcatgtgatttcagaacccttaggagaaatcttgaga

SEQ ID NO: 580567 - DNA, 100 bp, Homo sapiens
gctcgagccgaaggacatatgctgagatctgtatctgtggacctgaatgttgatccctcgcttcagattgacatacctgatgcgctcagtgagagagaca

SEQ ID NO: 580568 - DNA, 75 bp, Homo sapiens
agaatcagccacagacggaacaagcatgcagctgttcatcaaagaaaaagggttcttttggtcacccaccactgg

SEQ ID NO: 580569 - DNA, 100 bp, Homo sapiens
tgctaccagttacgatggcaaaacagcagtgaccgagatcgtcaacagctctatgttctatgatgaggatggggatctggctcacgagttctatgaggag

SEQ ID NO: 580570 - DNA, 75 bp, Homo sapiens
ccggagcaagcggagctcccccaagagccggaaaggacactttacttcggccgaagacttaaacctgttgattgc

SEQ ID NO: 580571 - DNA, 73 bp, Homo sapiens
aagtagcggaggcatatgaagtgctgtcggatggagcgagaacccgagcagcgccatgagcaacactaccgtc

SEQ ID NO: 580572 - DNA, 90 bp, Homo sapiens
gcggagcgcaggcgccgagactgacaacgcggtcccacagagcatttccgacatgtggaccatggtaaaacaaatgacagacgtgttgtt

SEQ ID NO: 580573 - DNA, 91 bp, Homo sapiens
gggactccaggaaaagccgttgagaggaccatcacaacctgagcagcacaggagacagtgtttcacaaaatgattttccttctgaagctcc

SEQ ID NO: 580574 - DNA, 98 bp, Homo sapiens
gctgaagacagtggctgcttggcgagcctggatctccaagtgaccccctcagcaactcctgatgaacagtcaagctacaacttcaagcagaagagaga

SEQ ID NO: 580575 - DNA, 90 bp, Homo sapiens
ggagttgctgcccttccggagtccgccccgtgaggagaatggacgggctctacgagtgcattctctgtgcctgctgtagcaccagctgcc

SEQ ID NO: 580576 - DNA, 73 bp, Homo sapiens
ttctctccgccgcgctctcgctctggccgacgagtggagaaaggtgaaggttgccgaactgtccccctggctg

SEQ ID NO: 580577 - DNA, 101 bp, Homo sapiens
agcaactaactgatgctgacaccaaagaaagacgagaatccaggacttgaatcgtatcttcccactttctgaggactactctggatcaggcttcggctccg

SEQ ID NO: 580578 - DNA, 121 bp, Homo sapiens
agcccccggcccggcccggcccggcccgccgagggccccagcgcaggagccgcgcccggacccaggtgttctcaggcgctgtggtctcaccttccactggggcaacaatgggccatttcca

SEQ ID NO: 580579 - DNA, 74 bp, Homo sapiens
gattctgaagagggtctggaggagccttctcaagaacagaggagctcgaggccatgagcagatataccagccca

SEQ ID NO: 580580 - DNA, 83 bp, Homo sapiens
ggaagaccgcgcgcagggcctgcagcgggagctggacggcgagcgcgagcggcgcgagaaatgcccctctcagctgaggagga

SEQ ID NO: 580581 - DNA, 75 bp, Homo sapiens
ctctgctctccgggctcaagcaattctcccacctcagcctgagtgcgcccccacccctgtgtccaagtggccgca

SEQ ID NO: 580582 - DNA, 100 bp, Homo sapiens
tggatcctcatttgagaagtacccactctatgttttaaagggtcctgtattaataggaagttcacatggtggtgtcaacattgaagatgttgctgctgag

SEQ ID NO: 580583 - DNA, 80 bp, Homo sapiens
acaccagccaatctgaaaggatattttcagtacagagcaactgattttgttgttcctgggcctggaaaagtagagataac

SEQ ID NO: 580584 - DNA, 97 bp, Homo sapiens
agagagaaccagtgcgtcattatcagtactatactggcaattgctggagaagattttgcaattgttgcttctgatactcgattgagtgaagggtttt

SEQ ID NO: 580585 - DNA, 90 bp, Homo sapiens
ctctgaccaaggccaaaaggaaggtctacatgtactactggccaggtcattgagactgcctcttctcaaagggacactgtcctcagcact

SEQ ID NO: 580586 - DNA, 127 bp, Homo sapiens
tagctgattttctcaatagtgatgaggaagaagacagagtttctttgcagaatttaaagaatttaggcctgaccacttaagctgtcatgtaaaacatgtccattcaacagaaagacccttcaaatgc

SEQ ID NO: 580587 - DNA, 75 bp, Homo sapiens
cctgccagaatggaagcatacagatctgggaccgaaatttgacttgtttgggaaatgggaagtaatgacagctgg

SEQ ID NO: 580588 - DNA, 74 bp, Homo sapiens
gaagaagcaacacgcaaacgagagctgaggctaatgaaaaacagttcttttagaactcatcaaattgaagctgt

SEQ ID NO: 580589 - DNA, 75 bp, Homo sapiens
gcaagttcatgtgtctggacccagccacggagaccgcccagcagttgaagcggagcgccggggtgcccttccacg

SEQ ID NO: 580590 - DNA, 75 bp, Homo sapiens
cagagctcttcccttacgcaaatatctccggagcatttggataatgtgacagttggaatgcagtgatgtcgactc

SEQ ID NO: 580591 - DNA, 100 bp, Homo sapiens
tctggacttggatgcctgcaaagcgaggctgaagaaggccaaggctgcagaagccaaagccacgggaagacaccctctctggacccccatcagaccaaag

SEQ ID NO: 580592 - DNA, 76 bp, Homo sapiens
ggtccctgaagagggaagacacgcggaaacagattccaaaagatgagcatattcttcggttcctccgtgcacggga

SEQ ID NO: 580593 - DNA, 100 bp, Homo sapiens
gtatttggtgcaaactacatcaagggaacagtgaaggcggaagcgggaggtggccaggagatggggaaagaggaaaaacaaacctaagatgaattatgag

SEQ ID NO: 580594 - DNA, 86 bp, Homo sapiens
tcactgaaaattggtattgttggattgccaaatgttggtgggcaagttacggaagcaatggctaaaggaaagtatctctgatgtcg

SEQ ID NO: 580595 - DNA, 100 bp, Homo sapiens
aaagccgagaaggagaacaccccgagcgaggccaaccttcaggaggaggagagactgacttgcataccaaatgtgtggtggatgtggatgcaaacaaggt

SEQ ID NO: 580596 - DNA, 75 bp, Homo sapiens
gtcgcagacctcgaaatgatagacgaaacctgctcctccaaagccagagcccaagcctaaaaaggcccctgcaaa

SEQ ID NO: 580597 - DNA, 75 bp, Homo sapiens
atctgagtcaacaacggatgaaaatgaagacgacattcagtttgtcagttctgctccatctggacacaagcatct

SEQ ID NO: 580598 - DNA, 71 bp, Homo sapiens
agaggagtccatgatggaggcagaggtaaacttggagagattttggaggcaacatcaacgtggagaccatc

SEQ ID NO: 580599 - DNA, 76 bp, Homo sapiens
attcccggcttctcgagaagacactacagcctcaaggaggccagattacctgtccctaatactgagcagaagctgg

SEQ ID NO: 580600 - DNA, 100 bp, Homo sapiens
gagaagctggatgcagaatttgatcactttgtggttgatatgaagccctttgttctaaaattacctcataggacagaaagccaaacttggccctgctggc

SEQ ID NO: 580601 - DNA, 75 bp, Homo sapiens
agacagatgagacctccaggatttctcagcagtacctcaggatgagtggggagggtaccccaccggtggcaaaga

SEQ ID NO: 580602 - DNA, 82 bp, Homo sapiens
acatctgctccggcttagccagtgatggaggcggagcgcgtggccaagaaaccaaggtgtatgttggtaacctgggaactgg

SEQ ID NO: 580603 - DNA, 88 bp, Homo sapiens
gatgtaacagagcagaggaccagcagatgaatggacaccttgaagcagaggagcagcaggaccaggatatcaatgcttacaattgtga

SEQ ID NO: 580604 - DNA, 100 bp, Homo sapiens
cttggccagggaactcaaacagcagatgcagtaaatctgtaggtgtgtctaaccggcagaataagaaagtagaagaagaagaaaagttgctgaagctctt

SEQ ID NO: 580605 - DNA, 100 bp, Homo sapiens
ccttttggtgaaactgaggatgaatcatttccagaagcagaaggaggtagaagaggatgatccagtgcctgagatccgtcgagatcactttgaagaagcc

SEQ ID NO: 580606 - DNA, 100 bp, Homo sapiens
caaaatggcgaccggcaactactttggattcacccacagcggggcggcggcggcggcggctgcggcccaatatagaacatacatatgatagttgagaaag

SEQ ID NO: 580607 - DNA, 80 bp, Homo sapiens
agcttcgcagtctggaaagctttaggagttcacagtgacttggatgttgtgggtgatggtatgcagtgtcctccttcacc

SEQ ID NO: 580608 - DNA, 108 bp, Homo sapiens
aggtccatctctaggggcagacacgctcggacccacccgcagacggcccttctgggttaaagactcagtctctgagaaaacaattggactgatgcgaatgcagttttg

SEQ ID NO: 580609 - DNA, 71 bp, Homo sapiens
acaagtgcagcctccagctagcactggacagtcccaggtaaaccaccacagtgctgctagtaatgaaacct

SEQ ID NO: 580610 - DNA, 75 bp, Homo sapiens
cagataccagcaactcccccatcgtatgaatctaatgtccgtctgtctgcccaggctggagtggcacgatctcag

SEQ ID NO: 580611 - DNA, 100 bp, Homo sapiens
ggcgagcgcgagcggcgcgagaaagaaccttttgaggatggctttgcaaatggggaagaaagtactccaaccagagatgctgtggtcacgtatactgcag

SEQ ID NO: 580612 - DNA, 98 bp, Homo sapiens
cgagacctcgatgatgccctctcctgcaagccactcgctgacgcttggctgaagaggaaataaaaacagaacaggaggtggtagagggcatggatatc

SEQ ID NO: 580613 - DNA, 98 bp, Homo sapiens
ctatcgtttggctaaaagaacatgatgtaaagaaagaagatggaactttctatgaatttggagaagcatctgcagccctggctagaaagaaggggaaa

SEQ ID NO: 580614 - DNA, 76 bp, Homo sapiens
gatgtctgacaacgtggatcgttgttttgaaacggagcgttctccatcaccactgaccgggaaagtcaatcagctg

SEQ ID NO: 580615 - DNA, 90 bp, Homo sapiens
ccaatccagaggcaagcacaatattccagaggaactctcaaacagatggtgttggtggaaataacccagatgaagaaaagaatagcacag

SEQ ID NO: 580616 - DNA, 90 bp, Homo sapiens
aagaattccgagagaacgagcacctcctcgaagtcatcccagtgcccgtcaccaagaattgctgtcccagcagcaaaatttcattctggc

SEQ ID NO: 580617 - DNA, 83 bp, Homo sapiens
caaacatcgatggcctactggggataacattcatgcagaacatcaggtcatcatcagatttgaaatatttaaagtggatacaa

SEQ ID NO: 580618 - DNA, 75 bp, Homo sapiens
tttgcctttgttgattaactggacaaattcagggcccccagatgccgacggccctctctacctcccctacaagac

SEQ ID NO: 580619 - DNA, 82 bp, Homo sapiens
cggggccccgggatctcggctgtccttcctcccggttgcttataaaaagggagtcaaacatctttctgctcttcttgatcca

SEQ ID NO: 580620 - DNA, 75 bp, Homo sapiens
aatggcatttacagaaagagtcaacagcagtggcaacaggattcagaatccatggctggaagaggtagtaaggcc

SEQ ID NO: 580621 - DNA, 100 bp, Homo sapiens
aaaagccagacacagaaagacaaataccacgttctaatttgtgcatgggagctaaaataactgtgccctgtccacggtgcctcctgcatgtcctgctgcc

SEQ ID NO: 580622 - DNA, 74 bp, Homo sapiens
gcggatgtcggcgaagagttcaaccaggagcacacatccaccctcctgctcaatggctaccagacactggaaga

SEQ ID NO: 580623 - DNA, 100 bp, Homo sapiens
cgccgtcgcagcccccgcgctggtgcagccaccctcgctccctctgctcttcctcccttcgctcgcaccatggccaagtcctgtatctgccatgtctgtg

SEQ ID NO: 580624 - DNA, 100 bp, Homo sapiens
tgatgttggagaactatagcaatctggttttcttgggtctctaattaacagaagatggcaaagcccagccacagcagctatgtccttcagcagctaaaca

SEQ ID NO: 580625 - DNA, 75 bp, Homo sapiens
gtcatgatgcacatgaacattcaaggcctagttccccgagagcgttcagacagtgggggctcaagctcagagcca

SEQ ID NO: 580626 - DNA, 75 bp, Homo sapiens
aaaatcttcaggttgttttaaggcagatgtctaaacataaaaccggtccttaaacaggccctgaaggaatttgga

SEQ ID NO: 580627 - DNA, 99 bp, Homo sapiens
cttctttaagggctacgggaagatcctggaggtggatctgaagaacgggtctccgtgaggccgggtgacgctccagaatgggagacaagccaatttggg

SEQ ID NO: 580628 - DNA, 75 bp, Homo sapiens
agcaggggtcagctgggccgcaggggcgcgcagcgcggggagctgccaggggcactatgaacgaagaggagcagt

SEQ ID NO: 580629 - DNA, 75 bp, Homo sapiens
cgtggtccagcttccccctgagccggtgcagaactcccccactggaaaggattctgaaagaaatgaagtcagccc

SEQ ID NO: 580630 - DNA, 82 bp, Homo sapiens
tctcagctctcggcgcacggcccaggctcctggatttggatttggaattgcaatatctggtggacgagataatcctcatttt

SEQ ID NO: 580631 - DNA, 100 bp, Homo sapiens
gtggcccgggcgtccgctcctcagcggatgtggcagccccgagccatggctctcgccgtccgagtcgtttattggtgtgatgaatgcagactctgctacc

SEQ ID NO: 580632 - DNA, 96 bp, Homo sapiens
tggccgaaggggcgtctgcggctctccgccgtccccagccctgcctctccctgggctctgatgagcccattattgaagagccaagccgcctccagg

SEQ ID NO: 580633 - DNA, 100 bp, Homo sapiens
tcggtaccaggctgtcctggccaacctgctgctggaggaggataacaagttttgtgcagattgccagtctaaaggccagaagcggactcctagaagaggg

SEQ ID NO: 580634 - DNA, 111 bp, Homo sapiens
aaacagcaagcggcgtggacgaccgttgctgagctggtgtggaacgtctgtgatcagggatcagtgtccttcagtgatgtggctgtgggcttcacccaggaggagtggcag

SEQ ID NO: 580635 - DNA, 75 bp, Homo sapiens
tcatggggctaatccacaagccccaggtgttcaaggtggccaaacaggagaagaagaagaagaagacaggtcggg

SEQ ID NO: 580636 - DNA, 82 bp, Homo sapiens
ctgaatttgaaggtggaaaatcaacagtgaattgtagatacctactggagcaggatttcccaggcatgaggattggtccgga

SEQ ID NO: 580637 - DNA, 80 bp, Homo sapiens
agaagggaggctccaagacctcatcaacaattaagaaaaaggtagcagcactgcctaaacaagaggttatacaagaagag

SEQ ID NO: 580638 - DNA, 100 bp, Homo sapiens
tggcgtattccacatagcaaacagagagcagagctgacatctgataaagacatgtaccttgacaacagctccattgaagaagcttcaggagtgtatccta

SEQ ID NO: 580639 - DNA, 100 bp, Homo sapiens
gtggcttatgagtacctttgtcatttggaagaagcgaagaggtgctggagaatctggtaaaagcaccattgtgaagcagatgaggatcctgcatgttaat

SEQ ID NO: 580640 - DNA, 75 bp, Homo sapiens
agctcttatcgccgactcgtggctgggaaagttcaactccatgttgttcactggaattcagacaaataccccagc

SEQ ID NO: 580641 - DNA, 82 bp, Homo sapiens
tgctggattactggccctcttcaccctcagacatcacaaatatgaattgccaagaagatgcttttagaagaaattaaagcca

SEQ ID NO: 580642 - DNA, 100 bp, Homo sapiens
cagttctgctacagtgtgtacgccagcctcttccacagaatccagggcctgaaaacccagaatgaacttgtgtccatcccagagatcactgcagatgtca

SEQ ID NO: 580643 - DNA, 82 bp, Homo sapiens
ccacagattgacaagaaaggacgggctgtctcatggaccttctctgagagcgcgcgctctggctgccgtgcggaggagctgg

SEQ ID NO: 580644 - DNA, 74 bp, Homo sapiens
ggagacctacctgcggcgtcggcagctgctgctccgagaaatcttcccaaggctgcagacaccgacggatttgc

SEQ ID NO: 580645 - DNA, 90 bp, Homo sapiens
ggaaccagaagcagattgccaacattgaccgtattacaaacaataatgacgatgaggacctgacaccagagcagaaggcagagcgtgaga

SEQ ID NO: 580646 - DNA, 80 bp, Homo sapiens
tctgtttatttagaagacacagactaacaattttagatgaatgaattcccagttcctgagcagttcaagaccctatggaa

SEQ ID NO: 580647 - DNA, 110 bp, Homo sapiens
cgcgggggagttctacgacctgcgctacctgtcggaggagggttattcagcgatagttatgacctcccggttacgtgcgttgggtggaagaattaataatatacgcacct

SEQ ID NO: 580648 - DNA, 75 bp, Homo sapiens
cggctggtccaggccttccagtacacagacgagcatggggaagtaacaaatgtggcaattattttggatctatca

SEQ ID NO: 580649 - DNA, 80 bp, Homo sapiens
ctccattcccgggaggggggagcggcgttggaggccaccgtttccaggaacatccaatacttgggcaacccttttttgta

SEQ ID NO: 580650 - DNA, 100 bp, Homo sapiens
cttcgaagttgatgcgactgctgagctctaatgaggacgatgccaacatcctttcgagccccaaaaatggactacttctgtgcctccactgtcatcctac

SEQ ID NO: 580651 - DNA, 50 bp, Homo sapiens
gtttctttaaaactggaagaaagtccagcaagactatgaatctctgttcc

SEQ ID NO: 580652 - DNA, 75 bp, Homo sapiens
ggagcggagccggccgtacgcggtgctgcgagggcagaacctgggttctgtggatggagttataaaggaagtgaa

SEQ ID NO: 580653 - DNA, 93 bp, Homo sapiens
cctggcaacggcggtggcgcccggagcccgagctgtccccgccctactccggaccgccccaaagactccatgggatggacctgagtcagccga

SEQ ID NO: 580654 - DNA, 100 bp, Homo sapiens
gccgcgcaggagcctcccggagctggcctcccagaagttcctgccgaatcgtcttcgtcacccccggggtccgaggtagcctcccttacacagcctgaga

SEQ ID NO: 580655 - DNA, 96 bp, Homo sapiens
atgattgcagaattcacatatttgctcaacaaaatgatcaggccctgagtataagagcatgaagagctgcctttatgtcggcatggcgagcgacaa

SEQ ID NO: 580656 - DNA, 75 bp, Homo sapiens
cagcctggagagtcgaagcagcagctctcgctccagaagcttcactttggaattgaatgatctggcacgggaccc

SEQ ID NO: 580657 - DNA, 97 bp, Homo sapiens
aagcctgcccagacggctcacctgtgcgggatggaacaaaagattttaaataaacttggagccttttcttgaaagacagctggctgtggagagcctt

SEQ ID NO: 580658 - DNA, 98 bp, Homo sapiens
aggactccaaaatggcgtcagttgagctggaagtcgagtgtgctactcaactcaggagatttggagacaaactgaacttccggcagaaacttctgaat

SEQ ID NO: 580659 - DNA, 90 bp, Homo sapiens
tgctcaacagcatcttggaagtccttagctaccaggatgcgatttggagtccagccttccacacctgatcttatacaccagcctcgcttt

SEQ ID NO: 580660 - DNA, 100 bp, Homo sapiens
gggagaaacaggggggcgagaagagaaacagacatccacgacagcgatggcagttccagcagcagccaccagagcctcaagagcacagccaaatgggcgg

SEQ ID NO: 580661 - DNA, 80 bp, Homo sapiens
ccagggaaccctggtcaccgtctcctcagattgacgtgagtgaattcagatataactcaagcttgttagagggcttttta

SEQ ID NO: 580662 - DNA, 83 bp, Homo sapiens
ccggcgtccccggcgcgaagaggctggactcggattcgttgcctgagaacctaaaggcagacccagaagagctttttacaaaa

SEQ ID NO: 580663 - DNA, 100 bp, Homo sapiens
acgaccatcaaatccgtgtcggagtccttacagtaagactttgaccccgacgcaggcttcagtgattgccgcggatcagaagcctgagcactttggctcg

SEQ ID NO: 580664 - DNA, 100 bp, Homo sapiens
gttcgcagaaaggtggggcagagctcatctgacgtggcatcaggtacatggtgcagtggccgggagcacgcatccttcggcgtcaggagctagatgcctt

SEQ ID NO: 580665 - DNA, 100 bp, Homo sapiens
gcgggggattgtgggagtctccgcgtcccgctcgctgggagagaggttggaagtactccatgacacacactcggagaaagtcccttcccatgctgagttc

SEQ ID NO: 580666 - DNA, 75 bp, Homo sapiens
cgacggcagcggcggcggctggactaaacaggtcacctgcaggaatcccttggcaccatgtcctgtgtgcattat

SEQ ID NO: 580667 - DNA, 51 bp, Homo sapiens
agaaaactggtcaaggaagctgctcgtggtcccaagaagcatctgaagcgg

SEQ ID NO: 580668 - DNA, 75 bp, Homo sapiens
acttgatatgattgttgggaaggcatggaatatgtttgcttcaaaatgccctccaaatccttggttatggaatat

SEQ ID NO: 580669 - DNA, 90 bp, Homo sapiens
atgagggtcggaccccagtaccaggcggtggtgcccgacttcgaccccgaatgtatgacaacatgtccacaatggtgtacataaaggaag

SEQ ID NO: 580670 - DNA, 75 bp, Homo sapiens
gtgaatatggtggaaaaaggaatcattgacccaacaaagctgtgctccattgaagtgacttgtgaatcagccagt

SEQ ID NO: 580671 - DNA, 90 bp, Homo sapiens
gggccccaccctgggcagtatagagacgtcggacttcacggtacgagtggctgctttacagaatctggtgaagataatgtccttatatta

SEQ ID NO: 580672 - DNA, 106 bp, Homo sapiens
cagagcctcgcctttgccgatccgccgcccgtccacacccgccgccaggtgatgtgtccaatctagatcccaacttctcatttgaaggcaccaaactggatgtggg

SEQ ID NO: 580673 - DNA, 154 bp, Homo sapiens
actaaggcaaaggagtggaagtttgagagaagtttaagagaagaaatggacatgattgcctaaatcagccaaacacaggatctttaatctcatgaagtacgacagctacagccgcttcttaaagtctgacttgtttttaaaacacaagcgaacc

SEQ ID NO: 580674 - DNA, 99 bp, Homo sapiens
cccagggaccaggcggaggcgtcgcgggagcctttggggcaccacagagatgcggtttctgatgaagaattgaaaagaagagtagctgaggagctggca

SEQ ID NO: 580675 - DNA, 100 bp, Homo sapiens
tgcaggatgcctttccttttgggtcttagacagcctgtgcacgtcgggcgtagttcggcttcacatcaacagctggctggaggtgagcttctgcctgccc

SEQ ID NO: 580676 - DNA, 80 bp, Homo sapiens
cgcattggcagcgggagccgtccggaggacctgggacaccgcggaagtcgggaaatggagtggagtcaacatatcaatgg

SEQ ID NO: 580677 - DNA, 101 bp, Homo sapiens
aggaattgctgcccggagtttctgcggaggtggagggagatcaggaaacggcttcttcctcacttcgccgcctgtggcctggtttgctttcgaccctggct

SEQ ID NO: 580678 - DNA, 75 bp, Homo sapiens
aagaggaagaggaaagcaaaggagtcagggatggctcttcctcaggagaccagtatgatgtctgtgccatttgcc

SEQ ID NO: 580679 - DNA, 82 bp, Homo sapiens
attccttgcagagacagctcaacacggcacttccacagaaagctctgggtgtgcggcagtaccatgtggcctcagtcctgtg

SEQ ID NO: 580680 - DNA, 102 bp, Homo sapiens
gagctgtcagagcccggggacggcgaggccctcatgtaccacacggtcagcccaaggccaaccccactgtcactctgttcccgccctcctctgaggagctcc

SEQ ID NO: 580681 - DNA, 83 bp, Homo sapiens
gctggagctgggtcagtccgccgctcaccccgcggccgcaccttcccgccttctcaggagattcctgtcaacgtccgattctg

SEQ ID NO: 580682 - DNA, 75 bp, Homo sapiens
aggaactgcttttgagtgagatggtcccagaggcctggaggagcggactgggcatgagccagaaggagagctcta

SEQ ID NO: 580683 - DNA, 100 bp, Homo sapiens
ccatctctggcagtgcagtgtgcctgggagctgtctggaacattccgcaaattctggacaatcaggaagtccaagccacaatgatcctgccaagaatcct

SEQ ID NO: 580684 - DNA, 100 bp, Homo sapiens
gtgcctggaagagttctatgcactctgtgaccagctggagctgtgcctggacactcatgaggaccatgatacttccactgagaatacagacgagtccaac

SEQ ID NO: 580685 - DNA, 75 bp, Homo sapiens
ctccttaccagctcacctctcaccgcgcatgtttggaggtctggagcccggcactgtggtcataacagagcaggc

SEQ ID NO: 580686 - DNA, 100 bp, Homo sapiens
gagattctccggggacccttccgtatctgcctaggcattttgctgtctcctcctaatacgatgaagtaaagaaggtcttagacaaattttacaagaggaa

SEQ ID NO: 580687 - DNA, 82 bp, Homo sapiens
cacaagttcccctaccgtatggtgcctgccctgccacccaagagaatgctgggagtgcctccggagccagcgtggtggccat

SEQ ID NO: 580688 - DNA, 82 bp, Homo sapiens
tggctataatagcagcccagccttgtcaggccagctccagttcccagagaatatggtactccaaagattcaggtttactcac

SEQ ID NO: 580689 - DNA, 89 bp, Homo sapiens
cccagacaaatggaagtgttatgatgcccttcgaaaaatgatcaactattgaccatataggttgaagaagaggatgaacttgaatctgg

SEQ ID NO: 580690 - DNA, 100 bp, Homo sapiens
aggccctttatacacagtctgtggcacacccacttatgtggctccagaaatcattgctgaaactggatctgactgcagccatgagcagcaatgagtgctt

SEQ ID NO: 580691 - DNA, 82 bp, Homo sapiens
tcgacaccatggtggacacttttcttcagaagctggtcgccgccggcagggcagctgcaatgactctccgcacggtattatt

SEQ ID NO: 580692 - DNA, 96 bp, Homo sapiens
tgtggctggagacatgagcaagaaaagcctctgggagcagaagggaggctccaagacctcatcaacaattaaggaatactcccccagttgcaagag

SEQ ID NO: 580693 - DNA, 90 bp, Homo sapiens
ggagttgggggcaaggagaagatcctgggaaagaatatggcaaagctgatgcaagatgggtttattttgatccaaccattgtgtctgtgg

SEQ ID NO: 580694 - DNA, 51 bp, Homo sapiens
gcacccacggagcctccggggctggcgtcacaatgtagcagggaccccagg

SEQ ID NO: 580695 - DNA, 82 bp, Homo sapiens
gtggctatgaacccagaggtcgtggaggtggccgtggaggcagaggtggcatggggaacgaatgcaggaatttgggaactga

SEQ ID NO: 580696 - DNA, 76 bp, Homo sapiens
gatggaaccaaggagaaaccatttaaaacaggtctaaaggacggtgatgaatcatctccaattttaacaagttttg

SEQ ID NO: 580697 - DNA, 83 bp, Homo sapiens
aaacagcccgcccgaccccgtcccgaccctggccgccccgagcggagcctggagtaacaaatgtggcaattattttggatcta

SEQ ID NO: 580698 - DNA, 87 bp, Homo sapiens
gtgagccagcttatccaccatttacttaacagattacagctcctggatctcccaggtatcattgaaggtgccaaggatgggaaaggt

SEQ ID NO: 580699 - DNA, 88 bp, Homo sapiens
gatgcaccgtggtagccgagggcggaggcgacactctcagccccatctgctttgatatgattgaagaagcatacatgacaaaatgtgg

SEQ ID NO: 580700 - DNA, 73 bp, Homo sapiens
aagtttgtggatgaaaattgggaaggttccctcaagtccaagtgcccagcagaggagcacgcagctgaacaag

SEQ ID NO: 580701 - DNA, 124 bp, Homo sapiens
caaaaagaagtttgtatcaacccataccactataagagagtggagagtccagcttttgaagaccctgatagtgccgtcgatgaccgagatagtgactatcgcagtgagaccagcaacagcttcc

SEQ ID NO: 580702 - DNA, 82 bp, Homo sapiens
gatcttaaaaaaaatagctcagttaatgaaggatcaacgtatcataaaaggatggctcttgctcacccgagcctcacaaaga

SEQ ID NO: 580703 - DNA, 100 bp, Homo sapiens
gactggactacaggcaatcctggccttggcagaaattgataaagaaggtgtgattgaaccagacactgatgctcctcaagaaatgggagatgaaaatgcg

SEQ ID NO: 580704 - DNA, 97 bp, Homo sapiens
ccaattattgtggcgctaatggcccgagcatgcaatattcatcataacaactcccggttgggggccgtcccgctcctaaggcaggaagatggtggcc

SEQ ID NO: 580705 - DNA, 101 bp, Homo sapiens
tcttgatcctgacgaagtactaccacgcagacatggggaaggttctggaaagttctctgtggcggagctcgaggccatgagcagatataccagcccagtga

SEQ ID NO: 580706 - DNA, 75 bp, Homo sapiens
ttcgcagtctggaaagctttaggagttcacagtacgaatctagaacatgatgtctatgaaagacttactaacctg

SEQ ID NO: 580707 - DNA, 74 bp, Homo sapiens
gtgctccggggaggtcacctgacgaggagctggccagctcagcgtccctggaagggaagggacaactgaagttc

SEQ ID NO: 580708 - DNA, 108 bp, Homo sapiens
ccgacgaacatttctgggtgacactcaacaggattcccggaattactctcacttccaccacccgatgtatggaaactgctatactttcaatgacaagaacaactccaa

SEQ ID NO: 580709 - DNA, 74 bp, Homo sapiens
tttaatccagtgactgtcaggtcgatcatatgtactccaaagattcaggtttactcacgtcatccagcagagaa

SEQ ID NO: 580710 - DNA, 75 bp, Homo sapiens
gccagagaagagtcaagggcacgagcatcgggagactgaatggccagatggggccaaggactgtgcctgctcctg

SEQ ID NO: 580711 - DNA, 82 bp, Homo sapiens
gccaatttaccagagataattgataacaccctgtaacagctgaggaaatcctcattgacgattcaatttgttgaaggccaat

SEQ ID NO: 580712 - DNA, 73 bp, Homo sapiens
ccaaggtcaagtttgaagagagggcccaggggaatcgctacgtggggtttgggaacacgccaccgcctcagaa

SEQ ID NO: 580713 - DNA, 75 bp, Homo sapiens
tgaagacctcgaaataattgttgatcaaaagcagatttctcactatgtgcaatagacactttggcagtgttgtgg

SEQ ID NO: 580714 - DNA, 100 bp, Homo sapiens
gtgcagatccctgtttcagcagttcagctccaccaggtggaacagaggctgaagttgttcaagttggcgtctgagaagcatcagcatatgtatcgcctcg

SEQ ID NO: 580715 - DNA, 50 bp, Homo sapiens
cccaatccacatgcttttccagatggactagaggcttttaccagatttct

SEQ ID NO: 580716 - DNA, 100 bp, Homo sapiens
acccggttgtcatgaaaggcctgtgtgctgaatgtggccaagacctcacccagagccttcacgtaaatgggtccagtcatgcctcccagtaagaagccag

SEQ ID NO: 580717 - DNA, 100 bp, Homo sapiens
gaacgagaagagccgcagtgagttgggcaggttcttggccaagcagattacacagacagaggtccagcaaggacagcagcagttcagccagttcacagat

SEQ ID NO: 580718 - DNA, 90 bp, Homo sapiens
gcagctccccctataagcctcggcctccacaggtgctcctgacctctgataaagctgcagccaatttctcagatcgttctttgctgaaga

SEQ ID NO: 580719 - DNA, 96 bp, Homo sapiens
ggataaatatatctatggagcacaggtgacaaacagcatgtttggtgcttcaagaaagaagtttgtagagggggtcgacagtgactaccatgacga

SEQ ID NO: 580720 - DNA, 75 bp, Homo sapiens
atctgtgtgaaggagcagatcccagagtgaggcagcagctccccacacagatgcaggaggtggactctcttctga

SEQ ID NO: 580721 - DNA, 101 bp, Homo sapiens
cgctcctggaggaggaggtgggaggtgagaagccttataagtgctcatgggagggatgtgagtggcgttttgcacgaagcgatgagctcacgaggcactac

SEQ ID NO: 580722 - DNA, 53 bp, Homo sapiens
ggctggcgtttgtcatcgtcttccaggcatgaattgctggaggaagcccggag

SEQ ID NO: 580723 - DNA, 74 bp, Homo sapiens
ggagacgcagctgtgcaccacaagtgacatcgatgtggcccagcagttcagcttgaatcagagtagagtggaag

SEQ ID NO: 580724 - DNA, 75 bp, Homo sapiens
gcagtggtcgcttcttctccttgatgtgctgaggaagtgaagagccctggagaagaggccagtaaagctaaagtc

SEQ ID NO: 580725 - DNA, 75 bp, Homo sapiens
ggatgtgaaaatgaagccagaccgagcacacgtcacatggagatgggcgtcaagaagttacctctcgtaccagcc

SEQ ID NO: 580726 - DNA, 90 bp, Homo sapiens
cttaatgagtcgccagttcaattaccgcctctgccaccgaggaattggccttctctagaagactcttctgataggaagatgtcttcagga

SEQ ID NO: 580727 - DNA, 75 bp, Homo sapiens
ggtgcctctctcttctttattccctgtaatagaagtttgtgaagcctggagctgagaattcaagagactaccctg

SEQ ID NO: 580728 - DNA, 88 bp, Homo sapiens
agcatccgaccaccgaggctggagggggagaacacccagggagtaaggcatgtcgaggctttggctatgtcactttttcaatgctgga

SEQ ID NO: 580729 - DNA, 90 bp, Homo sapiens
cgagagctatatgatcgtggccccccccatgccttcttcctggtcaagttctgggaatgctgaaatacttttaaagctgataaacctagg

SEQ ID NO: 580730 - DNA, 100 bp, Homo sapiens
caccagcacgtgaagatcacctaccgtgatggccgcactggcgaactgggctaccttaaccctgggattgaaaactgtaactatgcagtggaacttggga

SEQ ID NO: 580731 - DNA, 100 bp, Homo sapiens
atccggcgctgctggagttcctggtgtgcccgctctccaagaagccgctcagatgcctgaaaacttcatgcctcctgttcccatcacatcaccaatcatg

SEQ ID NO: 580732 - DNA, 101 bp, Homo sapiens
tcttttgacaagatgtcacctgaaagtggtcacagccgcatctttgaaggtactccaaagattcaggtttactcacgtcatccagcagagaatggaaagtc

SEQ ID NO: 580733 - DNA, 100 bp, Homo sapiens
aggattactgtgttttgtgagagctcgctaggcgccctaagcaacagagctccctcccatgccccagagctgcatctaaagcacattggcaagacctggg

SEQ ID NO: 580734 - DNA, 98 bp, Homo sapiens
tactatgcaggaaagaattaccactaccaagaagggatctatcacctctgtacaggcatggattccgtgaaggaacaacacctaaacccaagagggca

SEQ ID NO: 580735 - DNA, 100 bp, Homo sapiens
gcgcgggcggcgcagcagccaggagcgcccacggagctggacccccagagccgcgcggcgccgcagcagccagagactgctgctactttgaaacgtacga

SEQ ID NO: 580736 - DNA, 100 bp, Homo sapiens
cccgtgaccgtcgctagaactcagttgtgcgttgcggccagtcgccactgcttttggagactgccagggaccatgttttgcccattgactattactttcc

SEQ ID NO: 580737 - DNA, 50 bp, Homo sapiens
ctgacatggatattggaaagcgaaagaaattagactttcttgtacctaag

SEQ ID NO: 580738 - DNA, 90 bp, Homo sapiens
tcatatcgagcctgtgtggaaagaagtcattcaagaactggaagaattgggcctctactacgtggacagtgaagggaaccggatttcagg

SEQ ID NO: 580739 - DNA, 99 bp, Homo sapiens
ctgatcgggaagcctcatctagcccagaggatcggaatgacagatgatttgaagcattcattaccatctggacttggtctctcagaaacccaaattaca

SEQ ID NO: 580740 - DNA, 96 bp, Homo sapiens
actggttttggaggtggcccagcatttggggtttcttgaattcctctgagctttctggacttccagctgggcctgacagagaaggctcactcaagg

SEQ ID NO: 580741 - DNA, 101 bp, Homo sapiens
cgtgggctcccgctccgggcccggggccaccggctgtgggacaagcaggccttcgcactatcacgtcctctgggacgacaatcgtttctcctctgatgagc

SEQ ID NO: 580742 - DNA, 97 bp, Homo sapiens
taaaaatgaaatccttgatgaagttatcagtctgagccaggttacaccaaaacattgacagccgctccgaccgctggtcccagatgccagcaagcag

SEQ ID NO: 580743 - DNA, 99 bp, Homo sapiens
aggcgacaggtgtcgcttgaaaagactgggcttgtccttgctggtgcatgcgtcgtcggcctctgggcagcaggttttgggatttgagattgacgcggt

SEQ ID NO: 580744 - DNA, 75 bp, Homo sapiens
ccaccatcctgctggacgggcggcgggtgaagctgcagctctgacctgcctagagctggaacgttacctccagag

SEQ ID NO: 580745 - DNA, 82 bp, Homo sapiens
gtcttgtcatgctagcactgcattaagtgatgcatacagcttcaaaagcagtggactgtcttttggattcaaagtgggcaaa

SEQ ID NO: 580746 - DNA, 83 bp, Homo sapiens
acggatggcaagaagttcaggctggaggctccggatgcagatgagcttcccaaagggatgctcagaagagaaagagcaagtgg

SEQ ID NO: 580747 - DNA, 75 bp, Homo sapiens
catccacgtgtgtctgcaccttgcagtcttacttggactatttaagaaacaactgaggcatcagaccaactttcc

SEQ ID NO: 580748 - DNA, 75 bp, Homo sapiens
tgcttcagatactacttacagtagacacaggttaaatggaaaccacccttgggaactggatgcctgtgtagctgt

SEQ ID NO: 580749 - DNA, 73 bp, Homo sapiens
gggcggacgacagaggatgccgaaccactccagtacaagaaaattccccaggacacagagctggtttggagcc

SEQ ID NO: 580750 - DNA, 100 bp, Homo sapiens
ttaggcggtaatcctgggagcaccagcgctgccacttgtacccgcagacattatgaaaggagtcgtaagaaagcagtgggagttgaagtcattgtcaagt

SEQ ID NO: 580751 - DNA, 98 bp, Homo sapiens
tcagaggtggtggattcgaatccctacaggtacttcatagacagcagtctcagccagccaaggagagttcccctcccagagaagaagcgcctccccca

SEQ ID NO: 580752 - DNA, 83 bp, Homo sapiens
ccagaacttccagctgcccccaggccccagctgcccactggaactgccggctaatgcttgctctcccaagatctttaactcct

SEQ ID NO: 580753 - DNA, 100 bp, Homo sapiens
tggtgcactggtcgggacacaacagcagcatccagtttgctgaccagaagcaagaattcaacaaacgtcccaccaaaattggacgtcgctctttgtctcg

SEQ ID NO: 580754 - DNA, 90 bp, Homo sapiens
ggttcggtggcctctagtgagatctggagtctttcccagggaactccgatgaagtgttccaacaaaatgagcgagtgaaccaagaagagg

SEQ ID NO: 580755 - DNA, 101 bp, Homo sapiens
ccgccgctgagccgtcgcggagccgcgcagccctcggagcacggtgaaggttatgctgcggatctggcccgcacagggggcccagcgctcggccgaggcca

SEQ ID NO: 580756 - DNA, 75 bp, Homo sapiens
tgccaatgttggagccgtctgcaaagtgtccccggcaagaaggtcccgcagcccccggaagccaatagactccct

SEQ ID NO: 580757 - DNA, 133 bp, Homo sapiens
ccttgggtgagagctgatgctgaagacaccgcggtgggattccagctgtctgattaatgagaaacataatgtattttgctgaagaaaaggtgactggtctcatgagccctgaagaatgaactcagaggaggtt

SEQ ID NO: 580758 - DNA, 60 bp, Homo sapiens
cgcaaattcactccccagtacaaagtttgacaagtatgcgcccaagctggacagccccta

SEQ ID NO: 580759 - DNA, 97 bp, Homo sapiens
tgcgggcgcagctggcggagctggagctggagctctcggaggcttgaggagcgaggatggcagtcaacaaaggcctcaccttgctggatggagacct

SEQ ID NO: 580760 - DNA, 90 bp, Homo sapiens
cacgtcttcactactgtgtcccagatcaccgccatcgaggcacagcacttgctcaagaggaaaccagggctccaaggtgggcaaactgac

SEQ ID NO: 580761 - DNA, 98 bp, Homo sapiens
aggatattacctccaaaaaagacaggggagtattaaaggtgtgggtacgccacgctgcatcacgtcattgacaagtccacagaagaccggatggagag

SEQ ID NO: 580762 - DNA, 74 bp, Homo sapiens
aaacgggcaactaaaactccaatggtttgtggtaaatatgccagctctagaacacatgaatcagattttacaca

SEQ ID NO: 580763 - DNA, 100 bp, Homo sapiens
cccgccaacaagcgggaccgagcaggaatccgtatctgggaacaggaattacatgaatgacagtcttcgaaccaatgtgtttgttcgatttcaaccagag

SEQ ID NO: 580764 - DNA, 83 bp, Homo sapiens
aggagagcttcacctgtcggcttggagagatccagcaaattgtggctactaatttgccccctgaagatcaagatggctctggg

SEQ ID NO: 580765 - DNA, 83 bp, Homo sapiens
cagcccccaacgctgggccaggagatcctggaggacgcaaacatgcagatctttgtgaagaccctcactggcaaaaccatcac

SEQ ID NO: 580766 - DNA, 100 bp, Homo sapiens
gaataccagcgggaagggatcccctggaaacattgcagttccagggaccaatctatacccatggtgacagccctgccccgctgcctccacagggcatgct

SEQ ID NO: 580767 - DNA, 100 bp, Homo sapiens
cgcagatcagaggtagtcggacctttcccgctggcgcgcagcctcagctagggtacaggcatccttcacctgctattgttgcaagaacagtcagaatttt

SEQ ID NO: 580768 - DNA, 98 bp, Homo sapiens
gtattcgttgacagagctttgatagtcgtaccatatgcagaaggatagcagcatcaaggagcattgtgtacatgcagaagtgcacagtacctggagtg

SEQ ID NO: 580769 - DNA, 87 bp, Homo sapiens
cttttttataaactggctgaagcccatccagactgtttgatgctgaacttcaccgttaaggagctctgtctgatccgcttccacccc

SEQ ID NO: 580770 - DNA, 100 bp, Homo sapiens
gtctgcagcaccctccgcttcctctcctaggcgacgagacccagtggctagctacgtggtgaacatgggtctgattgacaaactgtgtgcctgcttcctc

SEQ ID NO: 580771 - DNA, 50 bp, Homo sapiens
tggaagacgcgctcctgcgccgcttgtgatgaatggaaaatactaccaaa

SEQ ID NO: 580772 - DNA, 75 bp, Homo sapiens
gccatacaaagcttctgtttggagaaggttcaaaccttgtactactcagctgatcacaagctgcttgatgggaac

SEQ ID NO: 580773 - DNA, 75 bp, Homo sapiens
caggccagccctacattatcagagcaagagccggatagaggacaagacgtcgtgtcatgccagggcccacggtca

SEQ ID NO: 580774 - DNA, 100 bp, Homo sapiens
accgactccaatacttactatgaggacgatttcagtagcacggaggaggacagcagccaaggagcatccccccggtccttcagaatccaaacacgctttc

SEQ ID NO: 580775 - DNA, 75 bp, Homo sapiens
gcctgatggagtaagaggggttggctgtgaatgtattttgaagctgtacagctgagctctcagcagcgcattcat

SEQ ID NO: 580776 - DNA, 101 bp, Homo sapiens
taatggaaaatcgcttggttaaaacctgacacttttaacaggaggatttgacagctaaggatattgaagaaattattgatgagctcaaggctggcaaaatc

SEQ ID NO: 580777 - DNA, 82 bp, Homo sapiens
agggttttgtggaattgggagcctaattgatttcattcttatttcaatgcaggtagagttggctttgtgggacacagctggg

SEQ ID NO: 580778 - DNA, 101 bp, Homo sapiens
acgttctaaaaagaggcgaaaggaagcaagcagttcagaagagccaaggaataaacatgcaatgaacccaaaagggaatgttacgttcataacttactaag

SEQ ID NO: 580779 - DNA, 49 bp, Homo sapiens
acgccaatctagaatactctgcgatcacgcgctgccccatgatcccgtg

SEQ ID NO: 580780 - DNA, 97 bp, Homo sapiens
tgagtacaacacggtggcaagcaagtttaatcagacctgctcacacttcagaatagagaaggtttaagaattgtttaagctgcatcaatggagcaca

SEQ ID NO: 580781 - DNA, 97 bp, Homo sapiens
gccgtggggccaattttttaactcagatcttgctgagaccaggagcatctgatttaacaggaagtttcagtcgtccagcatgctctgcccaccccac

SEQ ID NO: 580782 - DNA, 75 bp, Homo sapiens
gtccctgaagagggaagacacgcggaaacaggttgaggtggtggagggtgtggctggagaagaggatcatcatga

SEQ ID NO: 580783 - DNA, 74 bp, Homo sapiens
gaacgaggaggagcggccaaagcagtacagctgggatcagcgcgagaagtacacctttgggagcctcactggat

SEQ ID NO: 580784 - DNA, 83 bp, Homo sapiens
ccctggatgggggaccacaagatcctcatcgacaggagccttcacgtaaatgggtccagtcatgcctcccagtaagaagccag

SEQ ID NO: 580785 - DNA, 75 bp, Homo sapiens
tcagcctcccgagtagctaggattacaggttgttcttcgtgggctcccgggagggccacctaccggaccttctgt

SEQ ID NO: 580786 - DNA, 75 bp, Homo sapiens
gctgatcaaagaagagcagcccatggtggagccgccaccaaaatgcagattttcgtgaaaacccttacggggaag

SEQ ID NO: 580787 - DNA, 100 bp, Homo sapiens
gaggggttgttttataaactgcctggccgaatcagccttttcacgctcaaggagtggttaatgtgttgctaacaactccactctgggtggtaaacaccag

SEQ ID NO: 580788 - DNA, 110 bp, Homo sapiens
ccgtggccttagctgtgctcgcgctactctctctttctggcctggaggctatccagcgtttggacatatttgactcttttccccccaggttgaattgaccaaagcaatgg

SEQ ID NO: 580789 - DNA, 128 bp, Homo sapiens
cgcttgtccactgtccgccagacctgctgctgcttcaatgtccgcatcgcaaccaccgccctggccatctaccatgtgagtgggttcagatggctccaactctattttctaaatttattccaaacatt

SEQ ID NO: 580790 - DNA, 100 bp, Homo sapiens
ttatcaccaacagtgtcattggccccggctgccacattgatggcgtcccatgtagagtgccgtcctctgggagtgtttgagtgtgaactctgtaccttga

SEQ ID NO: 580791 - DNA, 96 bp, Homo sapiens
cctcagcagcccccaccacggccggaccgaaggtgcggcggcggaggggagccagggcgccccagcaggaacggaaaacagttcttccttcaaagc

SEQ ID NO: 580792 - DNA, 80 bp, Homo sapiens
caagcaagcatgcagcttactgcttgaaagatgaataatacggcagctagtccaatgtctactgcaacttcaagtagtgg

SEQ ID NO: 580793 - DNA, 100 bp, Homo sapiens
gaggaggagggcgagcaggaccgacctcgggcacccgggccctgggaccccctcgcgtccgcagcaggtgctggagaatctggtaaaagcaccattgtga

SEQ ID NO: 580794 - DNA, 90 bp, Homo sapiens
catctccatcacccaccaacaacaccacaataatccacagccaagtgtcacaccatgtctgaccggaaggcagtgatcaagaacgcagac

SEQ ID NO: 580795 - DNA, 96 bp, Homo sapiens
tgcatgatgtgcgatgtgcggaagggcacctccacccgaatgatatgacaactgtacgactacaatggggagatatacttatgccattgcttaaaa

SEQ ID NO: 580796 - DNA, 74 bp, Homo sapiens
ctgggacttcccgtccgcggcgtggagggagaagtgccagaaagcccggaagcaaggaaggaaagtgaccaagc

SEQ ID NO: 580797 - DNA, 100 bp, Homo sapiens
ggcttacgcagaaggacctggccacgctagtgtcagcagtgggatacctgcgcttgaaggacatcatccaccgtgacatcaaggatgagaacatcgtgat

SEQ ID NO: 580798 - DNA, 100 bp, Homo sapiens
cctttgttgattaactggacaaattcagagaaagcatgggattatggcaaccacagaatctcagtagtacaagttccattcagttttttctgaaagaaag

SEQ ID NO: 580799 - DNA, 82 bp, Homo sapiens
tccccagctggtggctggagcgaccccttgttctttggtggcgctggactcagtctcctttgaggatgtggccgtgaacttc

SEQ ID NO: 580800 - DNA, 100 bp, Homo sapiens
taagtcttatcgaactgccaagtttcacagccgggaaaacctcacagcacgggtagctctgaacggattcagctctcaggaatgtataatgtccgtaaag

SEQ ID NO: 580801 - DNA, 50 bp, Homo sapiens
gggccactcagagtcgcccgagaagttctgcaccagtattgtggctcaag

SEQ ID NO: 580802 - DNA, 101 bp, Homo sapiens
gtttgggatcccgctgtggtacttctcgcagtccccgcgcgtggtcatccaggtgagaagccctaccactgcaactgggacggctgcggctggaagtttgc

SEQ ID NO: 580803 - DNA, 75 bp, Homo sapiens
ccgcgggcggccggtcgggcggggcggcggcgctgacagcttattgcaggagtgaccaggacactacctcctaga

SEQ ID NO: 580804 - DNA, 74 bp, Homo sapiens
cggtccagacccagcaccccatacggaagggtctgcatcacaaggtgctggcccagcagggggagtacagtgag

SEQ ID NO: 580805 - DNA, 75 bp, Homo sapiens
cgagagaacgagcacctcctcgaagtcatcccagtatgctggcatcaccatctacatcaggtcagctgtctcagt

SEQ ID NO: 580806 - DNA, 50 bp, Homo sapiens
cccagtactttgggaggccaagggcggcacatggagttcaggaagctccg

SEQ ID NO: 580807 - DNA, 75 bp, Homo sapiens
aaaaactgggatacatggatctggcctcaagactggtgaattatatccagatcgagagacagaagattctgaaag

SEQ ID NO: 580808 - DNA, 100 bp, Homo sapiens
gggttcaagtgatgaaagttggcaaactgcagctacatcaaggcatgtttccccaagcaatgaagaatctgagactggtaaaaatgcatttgcaaaggga

SEQ ID NO: 580809 - DNA, 100 bp, Homo sapiens
tgtgtgtaacaagaaattctccagagtggctagtctcaaagcgcatattatgctacatgaaaaggaagagccccagcatgagaccagatgtaagctctcc

SEQ ID NO: 580810 - DNA, 74 bp, Homo sapiens
ttccttggggcaaaatgtggacaagggaatcaaagatcaactcccactgaggacaaatggacctgtaattccgg

SEQ ID NO: 580811 - DNA, 100 bp, Homo sapiens
gttttcctggggctatcgtcgtgacatggcattgtctgatgttacagaagaatctgaaatcatttcgttcaacctggtgtgtgctgactcctggaagctg

SEQ ID NO: 580812 - DNA, 90 bp, Homo sapiens
tacttaccctaattcatcatcaccagtcaccaggagactaaagtccatcaaaaacatccagaaaattaccaagtctatgaaaatggtagc

SEQ ID NO: 580813 - DNA, 75 bp, Homo sapiens
ctgaaaacaacatcatgcagtggaatgcagttatatttggggtctaaaattcccaggactccacagctttgcacc

SEQ ID NO: 580814 - DNA, 76 bp, Homo sapiens
aagagggtcatctcttctattgtacctgcagctttgtgtccctggtgatgttggaacattaatgatggaacatggc

SEQ ID NO: 580815 - DNA, 100 bp, Homo sapiens
atcatagctcactgcagcctctaactcctgggctcaagcgatcctcccacctcagtctcctgagtagctggaaccacagtttcaccagtgatcattaaag

SEQ ID NO: 580816 - DNA, 98 bp, Homo sapiens
gatcttccagaatatttcaagcgactgacatgtgagatctccacaaggggtacatcagagatcccactggcattgttggtggtaggcctgggcggggg

SEQ ID NO: 580817 - DNA, 80 bp, Homo sapiens
atctggttttatgacaagaatgactgtcaccgcatagcaaaactcatggctgaggtggagtccatgtccctggctgacag

SEQ ID NO: 580818 - DNA, 76 bp, Homo sapiens
tccagtgactggggatagtgaaggtgctacggtgcaggagctgaatgccaaagcagcttctctttttgaaacaaat

SEQ ID NO: 580819 - DNA, 117 bp, Homo sapiens
ggttaaagccatattggagtagcgaggaatctgattccaagcaaaaaccaggtactccaaagattcaggtttactcacgtcatccagcagagaatggaaagtcaaatttcctgaatt

SEQ ID NO: 580820 - DNA, 100 bp, Homo sapiens
ggggttcgggcttgtcaggttctagctgggctcaaaatgcagagaactcaaagatattcatttcggccagtgttacaagatctcagatgaaggcatgatc

SEQ ID NO: 580821 - DNA, 75 bp, Homo sapiens
taatcataacttgaaaggggtttctctggatctcagcaactgtgaggatgctgaaatttctggaaaagacaatgg

SEQ ID NO: 580822 - DNA, 51 bp, Homo sapiens
agcatggctacaatgtggaacaggtggagccttacaaagtaaacctctctc

SEQ ID NO: 580823 - DNA, 83 bp, Homo sapiens
gcgcctgcgccgccggggccgctgcaaggggaggagagaggccgcctcagacagagtttcactcctgttacccaggctggagg

SEQ ID NO: 580824 - DNA, 74 bp, Homo sapiens
agtatctggtgaagtggaaaggatggcccccaaaacctcctgccccccgaggtctgcagtctcctgaacccagc

SEQ ID NO: 580825 - DNA, 75 bp, Homo sapiens
aagggaggctccaagacctcatcaacaattaagaaatacagcccctcggaccctgcatttgcatatgcgcagctg

SEQ ID NO: 580826 - DNA, 100 bp, Homo sapiens
gtactatacacatcgtgacagtcaccattaacggagatgatgccgaaaacgcaaggccgaagccaaagccaggattattgcatcgagcttttagtgtctt

SEQ ID NO: 580827 - DNA, 136 bp, Homo sapiens
gggaaccaaaaaagacaaggaaaaggacaaggggaaatggaaggggcctccagggtctgcagacaaggcagggacactgcccatctctaagataagaacctggaaaggggactctgttggccattggaaattgcag

SEQ ID NO: 580828 - DNA, 74 bp, Homo sapiens
gacactacttgaacaagaaaaggagggggaaactgcaccacataagtgaagattgatgactcttccgcgtctat

SEQ ID NO: 580829 - DNA, 155 bp, Homo sapiens
cagctgaaccaagaaaaccttatcagcactatttgaaacttttatctcatctggcttggcgcctgaggttctcccattagaacccttaggagaaatcttgagagtggacagcaattgtgaagatcgccagagagttctgtgtttcatcaccgccg

SEQ ID NO: 580830 - DNA, 82 bp, Homo sapiens
cttcggtggactccttcggcagtccacccaccgccgccgcctcccaggaggcagtggagaaggtgacacagcacatccacgg

SEQ ID NO: 580831 - DNA, 49 bp, Homo sapiens
aagaaacgaggaccaaagccttcacactatgtaggaggaaatgcagctt

SEQ ID NO: 580832 - DNA, 100 bp, Homo sapiens
gagcagacagctgtcctcactggcagaggaggagcgctcagtaaatgctcgctggacgaataaatggctagataaggttcgtgcggtgccgcaacgcgac

SEQ ID NO: 580833 - DNA, 105 bp, Homo sapiens
agacatgagatggtagccaaacccccagcgggacgaccctgggacagtctccactggggcagatccagctgaccatccggcacagctcgcagagaaacaagctta

SEQ ID NO: 580834 - DNA, 48 bp, Homo sapiens
acttgcgttgatgatacagtcctctgagattccagacattctaaatgc

SEQ ID NO: 580835 - DNA, 87 bp, Homo sapiens
ggccaagcagccaaccatgctcaacttcggtgcctctctccagcagactgcggttgtgaccgagattcccgacgagagagactgagg

SEQ ID NO: 580836 - DNA, 100 bp, Homo sapiens
tttgaccttcatcacgaggccacccagtcccacttcaaacattcgtctcggaaaccccgcctcttacagtcacgagctaataatcacaagaagttgtcag

SEQ ID NO: 580837 - DNA, 98 bp, Homo sapiens
acctgaggttcagattaagaaatctgccccaaagtcttagaactgggcgacatggagtccaatgggaaatacatcaccaaatctggaacccgtgtgga

SEQ ID NO: 580838 - DNA, 75 bp, Homo sapiens
ccgccgattcctcctccttggtcgccgcgtccttggctggcgtgtgtgaacccacatccctgcccccagggccac

SEQ ID NO: 580839 - DNA, 98 bp, Homo sapiens
tgttagaagcgctggtaggccttggagaggcgggttaggaagcaggtagcatctaaaggaactggtttaaatcctaatgccaaagtatggcaagaaat

SEQ ID NO: 580840 - DNA, 98 bp, Homo sapiens
caggaactggagaggaccaacaaattcatcaaagacgtaatcaaagacggcaacgcgcttatcagcgctatgagaagaaggtgggagtcaatcatttt

SEQ ID NO: 580841 - DNA, 89 bp, Homo sapiens
gggggccagcgacgccggccaccaacgagagtccacctgaaggaggttacctgggcttgtatgtgttctatgtggtcactgtgattctc

SEQ ID NO: 580842 - DNA, 83 bp, Homo sapiens
cttcagcggggcgctccaggaggcactcacaggttgattcttcaccacactgaaaccattaggaaaaatccttgtggttaaca

SEQ ID NO: 580843 - DNA, 75 bp, Homo sapiens
ctgccctgagacggtgtcccgccgaaaggtgcccgaaatcaggtggtgataagagcagagccccaactctgtgcc

SEQ ID NO: 580844 - DNA, 82 bp, Homo sapiens
tgtgcagccgcgaggaggcgcgggaggtgttcgagaacgaccccgagacggcaccgtctgcgtcctgctgtccttccccttc

SEQ ID NO: 580845 - DNA, 74 bp, Homo sapiens
agtaaaacgcttccatatttatccagagtgcagtcattggagaaatcgatgaagaaacagattctgcgcttgat

SEQ ID NO: 580846 - DNA, 50 bp, Homo sapiens
aagaagcaaacggattttgaaggagaggagacgccgtgagcgggacgacc

SEQ ID NO: 580847 - DNA, 82 bp, Homo sapiens
ccttgttcccccaaatgtctgactctgactctcggactgagaaacgcaagcctacagacctggtacctggatttttgcccga

SEQ ID NO: 580848 - DNA, 112 bp, Homo sapiens
actccttgggggtcgagcacataacggggttcgggtgtctcgtgtgtgaacatcacagactgggctggcttagatgaagatgaagatgcacatgtctgggaggataattggg

SEQ ID NO: 580849 - DNA, 100 bp, Homo sapiens
cttcttggcttctcattccccagatgtgcgggtcagagaggacactcatgaggaccatgatacttccactgagaatacagacgagtccaaccatgaccct

SEQ ID NO: 580850 - DNA, 75 bp, Homo sapiens
caaatatcggaacccctccttgaagctgatggtgaatgtgtgcggacacactcttccaagtggtaagaagttcag

SEQ ID NO: 580851 - DNA, 100 bp, Homo sapiens
cataccagctgctgtatgcctacccgcgcctcctgacaaggtgatccgggcgggccccgcaggaattttatcccctcaccggcctcacactagtatcgca

SEQ ID NO: 580852 - DNA, 95 bp, Homo sapiens
cgatggaactggggtcagtagagtgacagccaccagtccgcatgaactggggtggtatggtcaggaaaaagactacaatgtactagtcatggatc

SEQ ID NO: 580853 - DNA, 100 bp, Homo sapiens
aagcgggctggcaggcgagggagcccgcgtcggctgagagcccacaggcccccacaggaggaatgggctctttccatgccatgataaactcttccgtgca

SEQ ID NO: 580854 - DNA, 100 bp, Homo sapiens
cttaaaaccatcacccatcccagactctgccagtatgtggatatttctaggggaaagcatgatgctgtctttgcatttcaactacgcaacccagtgcaca

SEQ ID NO: 580855 - DNA, 82 bp, Homo sapiens
tgctctgtgtgccatggacggggcccggcctgccccgcacctgagctgccctcgcccccctctgctggctacagccctgcag

SEQ ID NO: 580856 - DNA, 101 bp, Homo sapiens
ggaaggtcttggagcgaagagctcggaccaagcgctcaggtaatgtggaccgaactaccatgtacaaatttccatcttcttctctgttgtgctattctgga

SEQ ID NO: 580857 - DNA, 83 bp, Homo sapiens
ttcctggcctgggcgctccggtggcggcggagtgcagggctcgcggcctggcaagaatgtacagctgacagagaacgagatcc

SEQ ID NO: 580858 - DNA, 82 bp, Homo sapiens
gtcatccagccttagcaaaccagaggtgtggacactgccagcggctgcagccgacttggaatgacctgggagacaaatacaa

SEQ ID NO: 580859 - DNA, 83 bp, Homo sapiens
tctggtgttatcaacttaaaagatgccacctctaaggtcgtggagggcccccaagacccaacagagggatgccgcaaatgaac

SEQ ID NO: 580860 - DNA, 95 bp, Homo sapiens
atggccatcgtgcctctttgggcttccatgggcaactacatcaccagattgctgtgctaaggagacagcaacgtatgataaaaaatcgagaatcc

SEQ ID NO: 580861 - DNA, 82 bp, Homo sapiens
ccgatttaaagctgagctgcgaggaaaatggcggcgggaggtagctacagcaagctgggtagcaggcagatccaaaggatat

SEQ ID NO: 580862 - DNA, 74 bp, Homo sapiens
cggctgggcgttcatctaccacgctttcgtgaatggaagttggatacactttgtgacttgtacgagacactgac

SEQ ID NO: 580863 - DNA, 50 bp, Homo sapiens
tgaaaatgttgcttcatatgagacatggatttgattgacatactttggag

SEQ ID NO: 580864 - DNA, 75 bp, Homo sapiens
ctttctctcaggctttcctacaactcatgcccagcagcagcaagcagattggaggtggacacaaaggaagaggca

SEQ ID NO: 580865 - DNA, 75 bp, Homo sapiens
gccatcacagacaccgcctacaggagtatgatgcaagaccgaagccaggacagcacagccgtagcactctcagac

SEQ ID NO: 580866 - DNA, 101 bp, Homo sapiens
tgcagcggaagtgggaaacctgtagggtatggtccagctgtgccgcaccgaggcgagcaggagcagggaacagcataatgggagtgttgagtaacaagtgt

SEQ ID NO: 580867 - DNA, 75 bp, Homo sapiens
taattttagggtcctttatatagaagggagagtagcaaggaagatgtccgagcaactgaaaaagacaaggttgtt

SEQ ID NO: 580868 - DNA, 100 bp, Homo sapiens
tcctcacctatggccgctggcaggatatagaaaatcaacttgcaattaaatccaaagcactagatgagttgaaacaaagttatctgactttggagagtgg

SEQ ID NO: 580869 - DNA, 82 bp, Homo sapiens
aaagaacatcctctttaacccagttcccaccctcacagtcaggtttttagaacttcagccataaaaatgggcagaattttcc

SEQ ID NO: 580870 - DNA, 98 bp, Homo sapiens
gccctgctggctcccccggattccagggtctccacagagctgcgctatcgaaaacagccctgggggttagtgaaaacgttcatcgagaagaacttctg

SEQ ID NO: 580871 - DNA, 100 bp, Homo sapiens
aataacaatggctcaaattgatcaagcagatatgccagagttttgcggcctccaggtggtggatccaatttttcattaggttttgatgaaccaacagaac

SEQ ID NO: 580872 - DNA, 96 bp, Homo sapiens
gttgtccagagaacaaacctctggtcctttagatctgttgccacctactgtgggaactttggcacagcagtgaccaccacctcagcggctgtagtg

SEQ ID NO: 580873 - DNA, 89 bp, Homo sapiens
gcgggagcggccggaggagccatggactgcagcctcgtgcggacgctcgtgcacagatacagaagcctgtgtctcccaaatcaggaaca

SEQ ID NO: 580874 - DNA, 101 bp, Homo sapiens
agatggagaaattgtatacactggaacagaatcaacccagaacggatagctccctcctggaaaaggtatgctccagaatcactgacagagagcaagttttc

SEQ ID NO: 580875 - DNA, 90 bp, Homo sapiens
ccgggagttacaccgccaccgccaggattacagtttaaagacaatttctgtgatcaagttgtcatttggaagattaaacccatttcacga

SEQ ID NO: 580876 - DNA, 90 bp, Homo sapiens
gcacctcctcgccagcagccgtccggagccagccaacgagcggaagtgctctctggcgtggtggtcatatcgagtaaggattcagtccaa

SEQ ID NO: 580877 - DNA, 50 bp, Homo sapiens
aggacgagggggccaaggcttcctccgggcattttgaaagcgaagcagaa

SEQ ID NO: 580878 - DNA, 75 bp, Homo sapiens
gaacgattaaaagaagaactcgcaaaagctcagaggatggcccactgcgtgaccttggttcagctgtccatttcc

SEQ ID NO: 580879 - DNA, 82 bp, Homo sapiens
gtcttcatgctgctgtgggtgatattactggtcctgggctccatgaagcaacagattacccttggaggcctgctcttacccc

SEQ ID NO: 580880 - DNA, 100 bp, Homo sapiens
ggtggacgtgctggtgtctgagtggatggggacctgcctgctggaaagaaaccttgactggttccccaggatgagagccatgtcattggtcagcagtgat

SEQ ID NO: 580881 - DNA, 83 bp, Homo sapiens
ctcgggtcggtgcaccgtccgggattttatccaccggcactgccaagatcaggttggtcaaagaaaaagtgatgtatgaaaaa

SEQ ID NO: 580882 - DNA, 109 bp, Homo sapiens
aatatcaagaaatgcagtaaccagcatgtcaataaggggtcataggtggaaaagacatggatctagtgaaaagccatttgatgtatgcggtcagagaagaagtggaggt

SEQ ID NO: 580883 - DNA, 75 bp, Homo sapiens
cagcagaacaatttcttcatcagcagctaaacaggattacttccttaggatagattgccagaagtggagttactg

SEQ ID NO: 580884 - DNA, 96 bp, Homo sapiens
tttccctctccctttccctaagcttacattgacgcagttagaagaaacaaatacccagaagacacacctcctgagagtcatgacccctgtggctgc

SEQ ID NO: 580885 - DNA, 100 bp, Homo sapiens
gctgatgtctgtgctgtcctccggctctctggtccactcaaggaacagtatgctcagtacaaaattggacagctgtacatgatcagcaaacacagccatg

SEQ ID NO: 580886 - DNA, 74 bp, Homo sapiens
gagacacggccagatctgccctccaacttaattcagtgcacaaatgagatgaatgtgaacatcccacagttggc

SEQ ID NO: 580887 - DNA, 74 bp, Homo sapiens
ttcgcgagaacagaatttcttttggcacctcctctccgcgcgttcttggggttggtcaaagaaaaagtgatgta

SEQ ID NO: 580888 - DNA, 96 bp, Homo sapiens
aaagcatggagaccctccctccaggtgtcatggagaaactccagctgggcccagagattctgcagcgggaaaatccaaggcttatttatgccaggc

SEQ ID NO: 580889 - DNA, 101 bp, Homo sapiens
gcctggtgccccattacaacccgtgaaaacctttccaacctatgagagaaagagatgtgaagaaagaagacgggtcatagagatgctacattgctgatttt

SEQ ID NO: 580890 - DNA, 100 bp, Homo sapiens
catctgatgctctctctccagtccttgctgaagagactttccgttacatgaccaaaactggacaagccaaggcatctgtagccaaagtaaacaaatctac

SEQ ID NO: 580891 - DNA, 95 bp, Homo sapiens
cggaacaattgagcaagaacaaggtgacacatattctgtctgtccacgatagtgccaggcctatgttggagcccactgtttgtaacatggaagat

SEQ ID NO: 580892 - DNA, 100 bp, Homo sapiens
ccttatgggtttctagaaggaaaatcacagaggtaaagcatcatttcatcacatcctgtcaaggggccgcaagcttcttatcattgggaccactagccgc

SEQ ID NO: 580893 - DNA, 82 bp, Homo sapiens
tgtacgccacctgggaggtggaccggagctcgtccagctgcgtgcctagaataccaagctgctattttacacttgaagaggg

SEQ ID NO: 580894 - DNA, 82 bp, Homo sapiens
tcacccgcgcctgcgacctcggtcgcaatggaagaagagatcgccgcgctggtcattgacaatggctccggcatgtgcaaag

SEQ ID NO: 580895 - DNA, 100 bp, Homo sapiens
tgagcatgaccagaccatgttagataaacttgtggatggacttgctacctcttgggtgaactctagcaattacaagcacacgtcacatggagatgggcgt

SEQ ID NO: 580896 - DNA, 100 bp, Homo sapiens
aaaatgaagaggaagcccagaaagggaaaaactaccagaacggagatgtgtttggcgattacatgaagcagatgacatttgaagcccaagcctttttaga

SEQ ID NO: 580897 - DNA, 75 bp, Homo sapiens
aaaagaaattaatcagaccagggacagacttgccaaattgaagctttatgaaggcaaagaacagatggagtttga

SEQ ID NO: 580898 - DNA, 74 bp, Homo sapiens
tctcttccgtttctgtcgctgcagtcgtccgcggctctgcttatgataatgtcaacaaagttcgagtagctatc

SEQ ID NO: 580899 - DNA, 50 bp, Homo sapiens
tatcctctccccaacaaacacaggttgaaccctcggatacgatagaaaat

SEQ ID NO: 580900 - DNA, 77 bp, Homo sapiens
gccggagaaggccgccgggcccgggcatggtggtctggggcaacgcggaagtgtttcaggagccgtagagccagatc

SEQ ID NO: 580901 - DNA, 75 bp, Homo sapiens
gggcgagaggcttctggcactcaggtatcagaatggcaaagcaacttaaccttccagaaaatacagatgattgga

SEQ ID NO: 580902 - DNA, 75 bp, Homo sapiens
cgaagtgggacgcgccgagccggaggctgcaggatggccggacgcggtggttcatgcctgtaatcccagcactgt

SEQ ID NO: 580903 - DNA, 75 bp, Homo sapiens
gccgcaagtacccgtccatcatagtcaactgcgtggaagagaaggaaaacgggccttactatacatcatatcccc

SEQ ID NO: 580904 - DNA, 82 bp, Homo sapiens
cctgtcatcccacctgagaaccatgctcaccgaccctatagcctgggctggaagctcttctacgtcacaggctgcctgtttg

SEQ ID NO: 580905 - DNA, 80 bp, Homo sapiens
cagacgcccgccttcgacaagcccaaaggaccctaacctccaaaagaggtacccattggcgctcaaccgaattgctgctc

SEQ ID NO: 580906 - DNA, 123 bp, Homo sapiens
attcgttatttgccaaaaggatttctaaaccagtttactgaagataagccaactttgaatttcttctatcaacaggtacagcagggaagaactggaaactcagagaaagaaactgcccttcca

SEQ ID NO: 580907 - DNA, 101 bp, Homo sapiens
ttatcagcactatttgaaacttttatctcatctggcttggcgcctgaggttctcccattaggtatgagggtgctggttgatgctcgagagaagcttcatat

SEQ ID NO: 580908 - DNA, 113 bp, Homo sapiens
tgccggcgctgctgagtttcttcatctacaacccgcgcttctggccgcgggaaggagagagcatgaagactttttaacagttgcagagtcactgaagaaagaatttgatagtc

SEQ ID NO: 580909 - DNA, 80 bp, Homo sapiens
gcttcccctttccagagagccagaaagaagtgctcttacagcctgttccaagtgtggcttaatccgtctccaccaccaga

SEQ ID NO: 580910 - DNA, 73 bp, Homo sapiens
aaacttttgcccttatcagtaacacctgaggcaccgcatgcgtggggagaccaccctgtggaaccctggctgt

SEQ ID NO: 580911 - DNA, 126 bp, Homo sapiens
ttcgcaaacagcacaggccatcaaatgcagaattcacaagatccaatcccttgtccttaaaagagctccttaataagcatttatagtcagtttttggcagcaatagaatcactaaaggcattctgg

SEQ ID NO: 580912 - DNA, 90 bp, Homo sapiens
cggggacagcatcgcccaggcccctggacatgaaagatcagatgtcaacttcatctgtgcaggcattagctgaaagaaaaaatagacagg

SEQ ID NO: 580913 - DNA, 97 bp, Homo sapiens
ctcccatggacacagtcacagaggctgggatggccatagcaatggcggtgagggtcccgatgtcctggtgtacagcttggactttggtgggcatctg

SEQ ID NO: 580914 - DNA, 75 bp, Homo sapiens
aaagcttgcagaatatatttgttccacttcgtagatcagaagtcggttgtcggtctcactggactacaatcaagg

SEQ ID NO: 580915 - DNA, 100 bp, Homo sapiens
aatgaccacctagagccttggatccaggagaacggcggctggattttgtggaagtataatactttgtcattatgagatgtcgtctctcggtgcctccttt

SEQ ID NO: 580916 - DNA, 89 bp, Homo sapiens
gaaaattgggaaggttccctcaagtccaagacatatctgaagagatggattaagaatgctttggattaaggattgtggagcacatttca

SEQ ID NO: 580917 - DNA, 80 bp, Homo sapiens
gaggaatgtctttcctaccatctaaaatacgaaggtttctggctggatcgatgccttccagcacatgcagcattttgtcc

SEQ ID NO: 580918 - DNA, 98 bp, Homo sapiens
gtgaagtccacaatcaagttccaaatgaagaagtagtttatgccaacgtgacttcattcatacagatgaaccaaggatcgggatagcagtataaaatt

SEQ ID NO: 580919 - DNA, 75 bp, Homo sapiens
cttgtgggatgtgaaaactctgttactgaagagaccatcatgcagacatcagagactgggtcggacacaggctcg

SEQ ID NO: 580920 - DNA, 76 bp, Homo sapiens
agcccactgacgctccaccgaaagagtggggccaaaggctgcgaggttgtggtgtctgggaaactccgaggacaga

SEQ ID NO: 580921 - DNA, 100 bp, Homo sapiens
tgccaggagcggctgtgagtcttcaggcgtggatgcagcctgggggaagccatagggcgctttcacagatggacatgtggacggcgctgctcatcctgca

SEQ ID NO: 580922 - DNA, 101 bp, Homo sapiens
aaatcaccctgcttgagcaaaggaagtattgggagagttgctgctacatctttaggaaatttgactaaccatggttctgaagatttaccccttcctcctgg

SEQ ID NO: 580923 - DNA, 90 bp, Homo sapiens
ccctggaaaacttcccttccctttcggaatctaagtcctttgctgtgggaatgttcaaaggccagctcaccacagatcaggtgttcccat

SEQ ID NO: 580924 - DNA, 100 bp, Homo sapiens
gtagagaacgttgtccacgaggacttccaggtcacggaggaggtgaaaataacaatgaagatggtgccaaaactgctttctcctttggttaaagattggg

SEQ ID NO: 580925 - DNA, 89 bp, Homo sapiens
gtaatggttctcagtcagaggcagcatgaaatcattttgaaagctgcacaagaactgaaaatgcttcgagctcttcagtatccccatca

SEQ ID NO: 580926 - DNA, 110 bp, Homo sapiens
gctgccgggagggggccctgagcctcctgcaacacctgcggcctcactgggacccccaggaggtgaccctgcagctgggatgacagcagttcagtgagcagtggtctcag

SEQ ID NO: 580927 - DNA, 100 bp, Homo sapiens
cccggacccatttgctgaccttggcgacctcagctccggcctccaagcatctgtgttttgtgtgagcctggaccccaagaccaataccttggcagtgacc

SEQ ID NO: 580928 - DNA, 75 bp, Homo sapiens
ctcgcgtcggacccttgccagaactggtaaaccagacttgaatacaacattgccaattagacaaacagcatcaat

SEQ ID NO: 580929 - DNA, 100 bp, Homo sapiens
ggacatgttgacgtcgtccgagagtcttaaaatcctgctctggccggattccagactcgtgggggaaaggctgattgctcttaaacttggtgtgactgct

SEQ ID NO: 580930 - DNA, 75 bp, Homo sapiens
agtccccagtgagggtgtacaaatacccctttgaattaattatggcttcttcaggcagtgacagtggtgggagca

SEQ ID NO: 580931 - DNA, 147 bp, Homo sapiens
cagcgcggccccacctacgttaacatgacggtcggctccttcgtgtgtacctcctgctccggcagcctgtatggcatttcaaatatagatacaaccattgaaggaacgtcagatgacctgactgttgtagatgcagcttcactaaga

SEQ ID NO: 580932 - DNA, 88 bp, Homo sapiens
tcacatcatgccgcattctgtccctggtctcatgtctcctgggataattccaccaacagcactcttcaacctcataccagtgggacta

SEQ ID NO: 580933 - DNA, 82 bp, Homo sapiens
tccgccgcagagtcccaccgccacaggatattgactgggtacagacagagaagcacgtgtttgagcaggcatccagcaaccc

SEQ ID NO: 580934 - DNA, 100 bp, Homo sapiens
tccaatcctctgcttccaggacaagtcctgcgcttggggatcctctgtacgcccgttcactgaatatgatgctgtggctgagaaagctggtaaagtagaa

SEQ ID NO: 580935 - DNA, 100 bp, Homo sapiens
gagaggttaaagagacccgttcagagtcctacagtggcagcagcctcgtcttacagcgtgactgcaaagaaaaagacttttgttttgcaaaagaaaagca

SEQ ID NO: 580936 - DNA, 100 bp, Homo sapiens
gttccaagctagagagtattctggagcaccttattcccaaaggcatcctatggctctactttgagacgggtacctgggtgtatcctgtgtttgccaaact

SEQ ID NO: 580937 - DNA, 98 bp, Homo sapiens
aaaagacaaaataatctttcctaatgatgaaaattgacattttgctaaaggctgtgggagacactcctattatgaaaacaaagaagtgggcagtagag

SEQ ID NO: 580938 - DNA, 75 bp, Homo sapiens
tcagaacaggcgctgcggctgatcatctccatcttcctggggcagcagagaagaaagtggtgaaaattacatctg

SEQ ID NO: 580939 - DNA, 100 bp, Homo sapiens
tcttctggtgtactctttttatgaaaagatcaatgaactgagccatgttcaaatccctgttatgttgatgccagatgacttcaaagcctattcaaaaata

SEQ ID NO: 580940 - DNA, 94 bp, Homo sapiens
ctccgagctggggttggacgctgccagtttgcacagcagcagatgatatcatcaagttgaatcgaaaggaagggaagaagcagaattttccaag

SEQ ID NO: 580941 - DNA, 100 bp, Homo sapiens
agctcttgtacctgtatgccaggtacaaacaggacaagaccagcgctctgagcctgagcaatgtggcaggcgttttctatatacttgtcggaggtctggg

SEQ ID NO: 580942 - DNA, 101 bp, Homo sapiens
gtacgccacaagcgacacaaatgaacacgccttctcagccccgccaggactcacaccacccggcaagaactgctcactacggctccctgccccagaagtca

SEQ ID NO: 580943 - DNA, 85 bp, Homo sapiens
gggggctttcgcccgggtcctcctagaaattccccccgaagaagactcccccacatctggggttattcctaattgtcagttccgg

SEQ ID NO: 580944 - DNA, 96 bp, Homo sapiens
aaggattcacgagaagaaaattggcaagagtggagacaaagagatgagcaggactactttggtgagtgttcagaggctgcaattaaggataatgtg

SEQ ID NO: 580945 - DNA, 74 bp, Homo sapiens
caagactttgctgtagatgatccacatgatgacaagaaaaagcggatggtggttcctgctgccctcaaggtcgt

SEQ ID NO: 580946 - DNA, 90 bp, Homo sapiens
cagatgcgagagctcccgctgcggagacctggacgagggggagaagtcatcccaggattgggtcttcacctcctcctcgtcctcttcgag

SEQ ID NO: 580947 - DNA, 100 bp, Homo sapiens
ttgtatggtctccatatcacagtatcccagatgccaaatgaacaggagtacagctgtgtagtaaagatgccttctggtgaatttgcacgtatatgccgag

SEQ ID NO: 580948 - DNA, 100 bp, Homo sapiens
tggacaacatcgccctgtggatgactgagtacctgaaccggcacctgcacacctggatccaggataacggaggctggtggtgggatcagcaagttgattt

SEQ ID NO: 580949 - DNA, 75 bp, Homo sapiens
cggcggctgctgctgctgctgacgctgctgctgcccggcctcggggataaaagaatcagagtgtctcaacccttg

SEQ ID NO: 580950 - DNA, 98 bp, Homo sapiens
acacaaagcctgcgaaagtgctcgggaagagggagagcaaacttggctcagcccaacctttccaaagtgaaactgatgagatttgatgatccactgtt

SEQ ID NO: 580951 - DNA, 74 bp, Homo sapiens
cgcgaatatcgtcatcgttagaagcagttgcgattcttgcagcatcaaatggctatggcagcagcagcagcaca

SEQ ID NO: 580952 - DNA, 100 bp, Homo sapiens
cttgtacgtgttggtaatgggagtttctgccttcacccttcagcctgcggcacacacagagtacagttgaccaaaagcgtgccagccatcatgagagcaa

SEQ ID NO: 580953 - DNA, 90 bp, Homo sapiens
ggagatggaaaaggagttcgagcagatcgacaagtccgggagctgggcggccatttaccagccggatcgagctgggagatgtgacaccac

SEQ ID NO: 580954 - DNA, 95 bp, Homo sapiens
agacttgtcgcacggatgcagaaaacttaatggaggaggctgagattggtttttcagcagcagatgctgtaacaggactgaaattggtagaagag

SEQ ID NO: 580955 - DNA, 75 bp, Homo sapiens
caaggagacgctcctggcactgcaggttttaaaatcaaagatgggaaaatcggagaaaattgcccttccccatgg

SEQ ID NO: 580956 - DNA, 90 bp, Homo sapiens
gtgcttttatattcatctcaaaaacaaaattctgaactcaggacttggcaaaacatgccgagtttttgcactgcaagtccaaaaagttta

SEQ ID NO: 580957 - DNA, 111 bp, Homo sapiens
ggggccggtggcgcccgtgtcggagaccccgcgccggaccctgaggcagcgatttgcagacctgacagacgctgctgcccgcaacgcggagctgctccgccaggccaagca

SEQ ID NO: 580958 - DNA, 88 bp, Homo sapiens
aggtggaggaggcgccggaccggggggatggcagttgaattcctgcatgaactgaatgttccatttttcaaagttggatctggagaca

SEQ ID NO: 580959 - DNA, 100 bp, Homo sapiens
cggaaaattaaccacagcttcctgcgggaccacagctatgtgactgaagggggggccctcagcctcttggccttgaacgggctgttcatcttgattcaca

SEQ ID NO: 580960 - DNA, 75 bp, Homo sapiens
actcaagtgaagcaaaagccttccatgattacgttccagcaacagatagaaatgctttaagttcactctggggaa

SEQ ID NO: 580961 - DNA, 75 bp, Homo sapiens
aaggtatcatgtttcatatcatcatcaagagtataatgatgatgatggtggtgctaccccagtacaggatgaacg

SEQ ID NO: 580962 - DNA, 87 bp, Homo sapiens
gcattttggcattgacatttaattttagggtcctttatatagaagggagagtagacggccgaagccctgcagcccacgctacagccg

SEQ ID NO: 580963 - DNA, 75 bp, Homo sapiens
gtttacatggaactcagacatctgcaaatcatggcgggaggcagcaccgggctcttgatggacttggcagccaat

SEQ ID NO: 580964 - DNA, 100 bp, Homo sapiens
ccaggcgctctgaccactctccagcaccagcttccagttagtggatatagcacaccatccccagccagtttaccgctccaagatggatggcgaggccacc

SEQ ID NO: 580965 - DNA, 101 bp, Homo sapiens
ctggatccaaagcatgtctgcaacccagccattttcaggaaattatctcattcaaagctagtgcaactttatggagtctgtatacagcggaagccccttta

SEQ ID NO: 580966 - DNA, 101 bp, Homo sapiens
aaacctgagaacttcctgatctctctcgctgtgagacatgtctgagactcctgctcagtgtagcattaaggaagcgcgcccccggggccggtcccggaggg

SEQ ID NO: 580967 - DNA, 95 bp, Homo sapiens
taaggacctcaacccaggagttaaaaagagtattgggaaagggtcgttgtggtgcatagacccagagtatagacaaaatctaattcaggctttga

SEQ ID NO: 580968 - DNA, 101 bp, Homo sapiens
gtccgggattcccagccatggcagattcctccgggcagcagggggaggagccccagccccgcgacgaggaggaagcggagctggagctgctgaggcagttt

SEQ ID NO: 580969 - DNA, 75 bp, Homo sapiens
cagagcctcagtttgtgcaggacaccgacatggaacagggactcactgggggttcattttccagacactgaaaga

SEQ ID NO: 580970 - DNA, 82 bp, Homo sapiens
accgcggcttaaatgatgtattttgtgatcgcagcgatgaaaggttttaaaatcaaagatgggaaaatcggagaaaattgcc

SEQ ID NO: 580971 - DNA, 75 bp, Homo sapiens
agacctggaaaaatggcagaataatctgcttccatcccgccagtttgggtgaaaacgctagaatacatcaagaag

SEQ ID NO: 580972 - DNA, 74 bp, Homo sapiens
cagcggaaaatgatccagtcacaggcccagtctgactctgtctgtaatacctgattgcattggagaactctaga

SEQ ID NO: 580973 - DNA, 74 bp, Homo sapiens
cctgtatagagcgtacctggcgcaggaatcagagatcattgatttcttcctgggggcctctctcaaggatgagg

SEQ ID NO: 580974 - DNA, 73 bp, Homo sapiens
tgcaaacggtgaccctcatgttggacatgctttaaataaggaggtctgcaagatgctcatacacatgcgtcac

SEQ ID NO: 580975 - DNA, 98 bp, Homo sapiens
gattgttgcaacatcccttgcgaggatcgaagagtcagaccaaggcccttatgccatcatcctggctcccacccgtgagttggctcaacagattgagg

SEQ ID NO: 580976 - DNA, 101 bp, Homo sapiens
cccgccagttgcttgatcaggtggaacagattcagaaggagcaggattaccaaaggccaatggagatcttcgtggatgatgagacgaagttgacgctgcat

SEQ ID NO: 580977 - DNA, 82 bp, Homo sapiens
caggagaggagcactttgaggacatggcctccgacgaggacatgagcatcagatccatgctgctgctgactcggagccccac

SEQ ID NO: 580978 - DNA, 75 bp, Homo sapiens
gacgctctctctgaccgtgaattcaggagaccctccgctaggacggcacccacacacaaagaggatgatttccct

SEQ ID NO: 580979 - DNA, 83 bp, Homo sapiens
ttttactgtcaagacatttcttcggcattctgcaacagacccaccgtgcggaggtcgtttgaattccaaagatgctggctata

SEQ ID NO: 580980 - DNA, 98 bp, Homo sapiens
caacgatatatgtcagatctaaagcattgcagtgtcgagatggctatgaaccctgtgtaaatgaaggaatgtgtgttacctaccacaatggcacagga

SEQ ID NO: 580981 - DNA, 82 bp, Homo sapiens
ttcatagaaaactatccaagaatgtgacttcctggagtagagtcttttttcactgaggtcaagtttaaataaaggctgttca

SEQ ID NO: 580982 - DNA, 100 bp, Homo sapiens
atgtgaaaatgaagccagaccgaggttgtaaaggcatatgatcgtgtggagcaagaatgggttgccattaaaataataaagaacaagaaggcttttctga

SEQ ID NO: 580983 - DNA, 124 bp, Homo sapiens
aggcatcttcaaagaatgatatttccaaagtttgcagaaaagaatatgaggtgaccaagaatatggcccaggtgaccaaagccctggacaaggccctgagcaccatggacctgcagaaggtctc

SEQ ID NO: 580984 - DNA, 83 bp, Homo sapiens
cgctgacccttggcctgctaactgaaacaaggcaaaatacatatctcagtgcattgatgagatcaagcaggagctgaagcagg

SEQ ID NO: 580985 - DNA, 87 bp, Homo sapiens
gtctcctcctcggcgggagccctcgcgacgcgcccggcccggagcccccagcgcagcggccgcgcaagagtgagccatggagctacg

SEQ ID NO: 580986 - DNA, 90 bp, Homo sapiens
gagcattcctgcagcgagtcggagacacagctctctcagagaccgtcggttcagcatctcggagagtggaaagaggcaaaacctgatgaa

SEQ ID NO: 580987 - DNA, 83 bp, Homo sapiens
ccgacagccaggcccgggagaagctgaagctcagggccctgtctgctctgtggactcaacagtttgtggcaagacaagctcag

SEQ ID NO: 580988 - DNA, 75 bp, Homo sapiens
gggccttttgggcagcttttccggcctgacaacttcatctttggccggacagtggctgtggattgggccgtggca

SEQ ID NO: 580989 - DNA, 83 bp, Homo sapiens
ctcaatcacatcttcatccagctagctcggaacctgcccatggacacattcactgtggcaagatcctgataacttaagtgact

SEQ ID NO: 580990 - DNA, 80 bp, Homo sapiens
ggacaccccggaagctgggaaatgacttcccaagtaagaagcggaagaggagccgctggaaccaagacacaatggaacag

SEQ ID NO: 580991 - DNA, 75 bp, Homo sapiens
gcagacagcttgtcaagctgtgcagcatcaaagaggcaggaggctgcacttaccagtgggctaccatggccgtgc

SEQ ID NO: 580992 - DNA, 97 bp, Homo sapiens
ctggaagacgaggagcgcgtcgtgcgcctgggggtgcgcgcctgcgacctgcccgcctggggggatatgagactttctactcggaatatcctgagtg

SEQ ID NO: 580993 - DNA, 98 bp, Homo sapiens
cgggactcgagcctagggaggcgaggttcccgcaccggataggaagaccaacactgtcatctgaagttggaatcatcatctgtgatattgctaatcca

SEQ ID NO: 580994 - DNA, 83 bp, Homo sapiens
tcgatagggatgcagaggatcagaaccggtacctggatggcatgaattcagaaggagctggcggacatcactttagaccctcc

SEQ ID NO: 580995 - DNA, 100 bp, Homo sapiens
caggaattttactgggataattatccaaataaattgcaagcattctatccaaatggatgaggatgggacagaagaggataacagtcgtgttgaacctgtt

SEQ ID NO: 580996 - DNA, 50 bp, Homo sapiens
agtgattacagacattgccggggctctgtccagcagtgtaagctccagca

SEQ ID NO: 580997 - DNA, 82 bp, Homo sapiens
cggcgggcggcggcgcgcggacccaggcgcggatggcgaggccagcagtgtggacgaatgtggaacctcgctctgtggctgt

SEQ ID NO: 580998 - DNA, 100 bp, Homo sapiens
ctcaagatgtggaactgtggagaaattctaggacatgaacaagctatcctttcatcgaggacagcaaacattatgtttgaatagcatcagctcgtcagat

SEQ ID NO: 580999 - DNA, 101 bp, Homo sapiens
gggaaactcctcccaaaagcaagcttgctgaaggggaggaagaaaagccagagacagggcagggcattgttcatgcactgaccgacctcagcagccccggc

SEQ ID NO: 581000 - DNA, 83 bp, Homo sapiens
gtgacgaggacgaggaggcagccacggggcccctggtaagactttgaccccgacgcaggcttcagtgattgccgcggatcaga

SEQ ID NO: 581001 - DNA, 75 bp, Homo sapiens
ggaagtggccgtagcggcttgttggataagtcttccccagggtgctgctgcagaccctacgccaccccatcttcc

SEQ ID NO: 581002 - DNA, 88 bp, Homo sapiens
tcatggtgatataaaagcagcaaatctacttttgggttacaaaaatccagaccaggaacggcagagtcgaaacaaacaatgagggcga

SEQ ID NO: 581003 - DNA, 96 bp, Homo sapiens
gatggcgagccaacagtcactagttttgcggcctccaggtggtggatccaatttttcattaggttttgatgaaccaacagaacaacctgtgaggaa

SEQ ID NO: 581004 - DNA, 109 bp, Homo sapiens
gaggagctgtgcagccgcgaggaggcgcgggaggtgttcgagaacgaccccgagacgatgatatcatcaagttgaatcgaaaggaagggaagaagcagaattttccaag

SEQ ID NO: 581005 - DNA, 97 bp, Homo sapiens
ttccaggtcccggatagcgagggcggccgcgccggctccagggggggccctcagcctcttggccttgaacgggctgttcatcttgattcacaaacac

SEQ ID NO: 581006 - DNA, 100 bp, Homo sapiens
gcctcccaaagtgctgtgattacagaccctgtgtcaaggagagtggaaagcctcatttgaagagctccacgatgtggaccactttgaaattgttgagaat

SEQ ID NO: 581007 - DNA, 51 bp, Homo sapiens
ggaatacttgctacagtgtctgcaccaagaggtttgaggacatgattgcac

SEQ ID NO: 581008 - DNA, 115 bp, Homo sapiens
cggacccgcgtgcaacgaagtggagcgcgcccctgcccggggcccgggatccgtgaggttcatctatctgtagtgcttctggccagagaaaaggccgaagagagaaaaccctgag

SEQ ID NO: 581009 - DNA, 87 bp, Homo sapiens
gcagagcaaggggcttacgcagaaggacctggccacgtatgagaatgagtcggccctgaacctttatgagacttgcaaggtgcggac

SEQ ID NO: 581010 - DNA, 74 bp, Homo sapiens
ccgagcattgtgggcctcatcatcttcctcctgtgcaccctcttcatcaggctcccacatcaggacgagaagga

SEQ ID NO: 581011 - DNA, 75 bp, Homo sapiens
ttcagagcaaaacatcactgtaattcttgctgtagaaagcttaaacttccaggtgacttaagagattaaaattaa

SEQ ID NO: 581012 - DNA, 113 bp, Homo sapiens
tcctcctgctcgccggcagcggcgggtccgggccccggggggtccagggtactaggttttgacaagcttgcatcatgcgtgagtataagctagtcgttcttggctcaggaggc

SEQ ID NO: 581013 - DNA, 100 bp, Homo sapiens
gcttaaacaacataaccattattggtccacttgatatgaaacaagttggatggcaagcatgtggtgtttggcaaagtgaaagaaggcatgaatattgtgg

SEQ ID NO: 581014 - DNA, 51 bp, Homo sapiens
tgagaccgagaatgtggaaacagtttgaagaaaacaggtctgaaacaaggt

SEQ ID NO: 581015 - DNA, 90 bp, Homo sapiens
agactacgagggagtttgacagctattaaaaccagggctccacagttaggaggcgctgcgtacacctgcttggaggctgcaacggggcgg

SEQ ID NO: 581016 - DNA, 75 bp, Homo sapiens
gcagtgaagtggtgagcctttttgtcactgctccaaatgagaagatgaagcaagtgttaaagaagactatagaag

SEQ ID NO: 581017 - DNA, 103 bp, Homo sapiens
tgcccagcagaggagcacgcagctgaacaagaagagagccatccccaatcaggactcagtggcatttgaggatgtggctataaacttcacctgtgaggagtgg

SEQ ID NO: 581018 - DNA, 73 bp, Homo sapiens
gagacagaagaagctggaggccggcaaagccaagaaaccaatagagccatggcgactccctctgctgccttcg

SEQ ID NO: 581019 - DNA, 83 bp, Homo sapiens
aattgatcaagcagatatgccagcttccatgaggcaggctgaacctgcagatatgcgcccagagatatggatcgcccaagagt

SEQ ID NO: 581020 - DNA, 74 bp, Homo sapiens
gatttttggcctaccctccaaagaaaagatgtcatttgtcagagtgaaccgctgtggtccccgagttggtgtaa

SEQ ID NO: 581021 - DNA, 105 bp, Homo sapiens
ggaagatcctggaggtggatctgaagaacggtactatactggcaattgctggagaagattttgcaattgttgcttctgatactcgattgagtgaagggttttcaa

SEQ ID NO: 581022 - DNA, 75 bp, Homo sapiens
gagatgcaaggcggcgattttcccttctgtcagacaggggcaagtgtccgagtggtgaatcagctacttacagag

SEQ ID NO: 581023 - DNA, 58 bp, Homo sapiens
cccgaacgctgagttggaggcgggacttcgggtggtcgctctggccgaaggcagagag

SEQ ID NO: 581024 - DNA, 75 bp, Homo sapiens
cttacgggaggacggggaaaaagcggccaaagaagtgaagctgctgctactcgtgcctacaccaactaatgttac

SEQ ID NO: 581025 - DNA, 99 bp, Homo sapiens
ctctctttctggcctggaggctatccagcccacagagctcctgatcctggcccatcattgcttcaccctgacgtgccacatggagggcatcatccgagt

SEQ ID NO: 581026 - DNA, 75 bp, Homo sapiens
tacgtgggcaaccgggcggccacgttcccgctgcaggttggagcaaaacgtcccactcactggaggcacctgagg

SEQ ID NO: 581027 - DNA, 98 bp, Homo sapiens
cccagccaatgcccacttcattgcctggacaggtcgaggcatggagttcaagctgatagaaccggaagagggccctggaaatacaaggataaatggag

SEQ ID NO: 581028 - DNA, 100 bp, Homo sapiens
atatagcacagatgaagacgaagttgatggcctggagaagaaagatgttttgcctactgttgatccggacttgacacagcaagcaaaagacatacagaac

SEQ ID NO: 581029 - DNA, 74 bp, Homo sapiens
gatgagtccccaaagaaaaatactctttggcaggctctggaagaggatctgaaccagaagaagcgggagcagga

SEQ ID NO: 581030 - DNA, 90 bp, Homo sapiens
caggatggattgccagggcttcctggcccgaaaggagagcctgtgtaccttgaaagacttttaacatacgcagagatagatatctgtccg

SEQ ID NO: 581031 - DNA, 49 bp, Homo sapiens
tgcacctggtgattgtgggtcctgaactctacgtggccacggaggccat

SEQ ID NO: 581032 - DNA, 97 bp, Homo sapiens
caggatgcctctcagctgccacctgcctttgacctttttgaagcctttgcaaaactccgacagttagttaatatgtgcatcaacccagatccagaga

SEQ ID NO: 581033 - DNA, 74 bp, Homo sapiens
gttcctgctccttctacatctgcagataaagtggagagctttcagcttatgtggagaagtcgctgtgaagccac

SEQ ID NO: 581034 - DNA, 90 bp, Homo sapiens
tggcacgccttcaccgcactcgaccaggaccacagcggcaaggtctccaagtcccagctcaagatcaccggcgtaatcaacccagcgttg

SEQ ID NO: 581035 - DNA, 91 bp, Homo sapiens
cgcacggcagcctagcgcaatgaggcgggcagcactgcgattccctataaggagcccctgctggtgcaccagaactaccgggggccatctg

SEQ ID NO: 581036 - DNA, 100 bp, Homo sapiens
ctgactgctgggaatgaagcaggatcaatgatgggataaaaatcaagggcgtcctgcctctgcggctctgccccctgcatcctgtgcagctgctgccccg

SEQ ID NO: 581037 - DNA, 88 bp, Homo sapiens
gaagaccgcgcgcagggcctgcagcgggagctggacggcgagcgcgagcggcgcgagaaagggcagggtggacaggaagcagctcagc

SEQ ID NO: 581038 - DNA, 82 bp, Homo sapiens
ctaatagatgtactaggaataaaggacttccattcacttgcaaaatttacatagtacatgacgaagttaaggataaagcttt

SEQ ID NO: 581039 - DNA, 88 bp, Homo sapiens
aacccagcaccacgagcctcagcttcacctccatgggcatcaacatggtgacttcatggtcatgacgattttcttcaatgtgagcagg

SEQ ID NO: 581040 - DNA, 100 bp, Homo sapiens
catgtctctgtctcgctcagaggagatgcaccggctcacggaaaatgtctataagcacaggaagtcctggagaacctgaaggaccgctggtaccaggcgg

SEQ ID NO: 581041 - DNA, 100 bp, Homo sapiens
tagctttctccttctggtgtggggcccgagacaagttggatggcttgaggactggtactaaaaggaaacgtgactgggaggccattgccagcagaatgga

SEQ ID NO: 581042 - DNA, 100 bp, Homo sapiens
tccaggtgtcccagaaacccaggaaatcgagactcatgactcccagagaggatggcatctagaagattactcttgtctctgctgctcctgggaaagtgat

SEQ ID NO: 581043 - DNA, 80 bp, Homo sapiens
cgcatccctgccccggcgccgtccgtgcccgcgggacctgacagccgggtcagaggatgatcggctgaatgtaacagagg

SEQ ID NO: 581044 - DNA, 100 bp, Homo sapiens
ctctccttatgctgggtgaaaacaaagggaaatgctccaaggctggaattttctacgacttcagtgattactgaatgtctgataagttcaaggaaatgcc

SEQ ID NO: 581045 - DNA, 75 bp, Homo sapiens
gtacagtacttcttccttccaaggaccagcggtagctcccggggtggataaattagatgcttcagaatcactgag

SEQ ID NO: 581046 - DNA, 90 bp, Homo sapiens
cgggccccgggctagcagagcggaggcgctgccacgaaactcgtacctgcggctaagagcaggctagaaaatattaaccctgaagaaaat

SEQ ID NO: 581047 - DNA, 100 bp, Homo sapiens
tggaacttcttcatcctataataccagaacagagcacgtttaaagtactttcaacaaagaataatccagaatggctactctgatctatgttgataaggaa

SEQ ID NO: 581048 - DNA, 100 bp, Homo sapiens
ggaccctattcctggtttgcagggctgatgttgtagtcaccgatcttgaggaattgcaagacttgctgaagatgaatattaatatgaacaagcatcttgt

SEQ ID NO: 581049 - DNA, 97 bp, Homo sapiens
tttgcaggggtgcagtgtgtctggtcttatgagcatccagtcctggatgagccaatagctgaagctgtctgtattatcgcagacacggataaatgga

SEQ ID NO: 581050 - DNA, 82 bp, Homo sapiens
gaactaattcaagctcagcatcgaatagctgttgtgcttctggacaaattgcaaggatttttcaagccacattcaattgata

SEQ ID NO: 581051 - DNA, 75 bp, Homo sapiens
ggcaattatgtcttctaaaaatattgcacagatgggccaaggttgctcgggtgattggtttactggcttcgcaca

SEQ ID NO: 581052 - DNA, 82 bp, Homo sapiens
gtagtagcatcaaacaatgggtcagtgttctcggagcatattaatgaaaagtgccataaactgaaaaaccaaacatgagggt

SEQ ID NO: 581053 - DNA, 121 bp, Homo sapiens
ctggaactgggatctctcctggcaaagactggacaagctgcagctgatggatttacaactgagtgacagtaactttcgtcgacacatcctgttgcagtatctcattttattccaatatctc

SEQ ID NO: 581054 - DNA, 75 bp, Homo sapiens
tttcatctgtggatggagtattggtcagcccaaggccaaccccactgtcactctgttcccgccctcctctgagga

SEQ ID NO: 581055 - DNA, 98 bp, Homo sapiens
gcagagcaacaacggtgtgcctcctgtgcaggtgaagcccaacactcctgtcttaatgtgctctgtgcctggttatgatgccagtggacatgtcgagg

SEQ ID NO: 581056 - DNA, 74 bp, Homo sapiens
tccagaaggggataatgcactgtgtggattctcatgccatataacttgtgtaaacaaagctccaaccacttgtc

SEQ ID NO: 581057 - DNA, 50 bp, Homo sapiens
ctggtacagcagcttaagcagcaggttctgatctacaatggccaactgga

SEQ ID NO: 581058 - DNA, 90 bp, Homo sapiens
gcgcccgcccgcctcccgccgccgcctcggtacaccgtcccgcgggataaggagggttcctgcccccaggtgaacattaactttccccag

SEQ ID NO: 581059 - DNA, 96 bp, Homo sapiens
cccggcctatgcccccactaacggggacttcacctttgtctcctcagcagacgcggaagctccgtatactattatcacgttcccttttctatttgc

SEQ ID NO: 581060 - DNA, 101 bp, Homo sapiens
gcccggcgaggagaaccaactggtcccgaaagaggagggatttgttcgtgttgaccgagattatgtgctgaagtctgcagagctggcaaaagctggagggt

SEQ ID NO: 581061 - DNA, 100 bp, Homo sapiens
tgaggctgttgggccaggccagtcatgctagaacgttatcaatagtctggctgtctatcgtcatcgtgagactgactttggtgtaggagttcgagaccac

SEQ ID NO: 581062 - DNA, 82 bp, Homo sapiens
caaaaggcatggtgatccttcgggacaagattcgcttctatgagggtgtagtcgccgccgccagccgccatgggcaaacaga

SEQ ID NO: 581063 - DNA, 100 bp, Homo sapiens
gtggggaagaatgaaaaaaccaaaattatcgccaagattcagcaagatgataaggatgccttctatgtggcagacctgggagacattctaaagaaacatc

SEQ ID NO: 581064 - DNA, 100 bp, Homo sapiens
tcaagctgcagttcgaggagctcgaggtggactatgaggctatccgcagcgagatggagcagctcaaggaggaatcagtgtcattcaaggacgtaactgt

SEQ ID NO: 581065 - DNA, 99 bp, Homo sapiens
cagccagaatttgctactgagttagcttgggaaattgacaggaaagcgcttcatcagcacagtattggtaaaggttttcaaggtgtcatgaaaagatgg

SEQ ID NO: 581066 - DNA, 100 bp, Homo sapiens
gccctgctgagaaacccagagctactcctaggtctggaacaaaaagaatgcaaatgaaaaaggaagaagccagacttctaagcttcctccaagatttgcc

SEQ ID NO: 581067 - DNA, 100 bp, Homo sapiens
gggggccaggacctgctgggatgacgtgagttgaggaggctcagcggaaagcgacaggaaagggtgactgtcgttcctacagttacgtgtgtggaatctc

SEQ ID NO: 581068 - DNA, 50 bp, Homo sapiens
ggaaaacaacttcgagggcagaagatttacaaacgaggaccacctggcag

SEQ ID NO: 581069 - DNA, 100 bp, Homo sapiens
gttgtccagacgacactaccagctatccttaatactttgttgacactgcaagaggttcttgggtgtctctggggagtccctgggccagaccttcctccag

SEQ ID NO: 581070 - DNA, 100 bp, Homo sapiens
caccacgtccagcttcaccacgcggctgcacaactgcaggaacaccgtcacgctgctggaggagtttgttgcatattctaaggacccagacataggcttg

SEQ ID NO: 581071 - DNA, 75 bp, Homo sapiens
gagctggagctggagaggaggagccaagagatgggaggtacaggtttgcagattccgccagcagcacagcaagct

SEQ ID NO: 581072 - DNA, 75 bp, Homo sapiens
cagcaaagaagacgtcatcttcttctaaaagggccgtgactcaaggctgctctttggcgtaaattgcaatcgatt

SEQ ID NO: 581073 - DNA, 100 bp, Homo sapiens
ctgaacgagagggacacggagcaggtcagagatgtcatcatcgctgcaagcgttgcaggaatgggcttggcagccatgagccttattggagtcatgttct

SEQ ID NO: 581074 - DNA, 75 bp, Homo sapiens
ccaggaggccaggggtgtcgccatgaggttacaatcaaaagttttaaaattagttgatatatcctatggtggtga

SEQ ID NO: 581075 - DNA, 75 bp, Homo sapiens
ggagtgcaatcactgcgtccttacgggggttgcaaggcgtccgaagtgattttacaacgagatgctgctctccat

SEQ ID NO: 581076 - DNA, 100 bp, Homo sapiens
cgggacagggatgtctacctggtaatagaggacttgaagcagaaagcaagtgaatacgagtcagaagggatgaattgtaaaagcaacatcagcttgacca

SEQ ID NO: 581077 - DNA, 100 bp, Homo sapiens
caaatcgtcgtagtgggaacgcaggtgattcgcatctaggtggcggcagtcgagaaggctcgtttaaagaaacaataacattaaagtggtgtacaccaag

SEQ ID NO: 581078 - DNA, 74 bp, Homo sapiens
ctaggttcaagcgattcttccacctcagcctcccaagtagctgggatcacagaactgataaatttcaaacggaa

SEQ ID NO: 581079 - DNA, 100 bp, Homo sapiens
cagcaatatgcattagcagcagctcagcagccacatatagatattgatgatgttaagaagttcaaaccgggttacctggaagctactcttaattggttta

SEQ ID NO: 581080 - DNA, 51 bp, Homo sapiens
accgcctccgcctattacagaggttcgagaacttgtcttggacaattgcaa

SEQ ID NO: 581081 - DNA, 95 bp, Homo sapiens
cagccatgtgactgtagtccacatggagctctcagcataccgtgcaacagggtcagatgacttgtctgcaaagctgtgggatgtgagcacagggc

SEQ ID NO: 581082 - DNA, 83 bp, Homo sapiens
attctgggaagctgttgttggatcaccaatgtctcagggacttgcttccaaagaaaccagggtggttatgaccgctactcagg

SEQ ID NO: 581083 - DNA, 75 bp, Homo sapiens
aaaagagaaatggagcaaaaacattccaccattcaacaaaagttaccttccctggtttgaagtgtattacaagct

SEQ ID NO: 581084 - DNA, 100 bp, Homo sapiens
cacccagtcccacttcaaacattcgtctcggaaaccccgcctcttacagtcacgagagatcccactggcattgttggtggtaggcctgggcgggggcagc

SEQ ID NO: 581085 - DNA, 85 bp, Homo sapiens
ctggtgtaatacaagatgctttaaagaagagctattctcaagctggaataactgagactgaatggacaagtggatcttcaaaagg

SEQ ID NO: 581086 - DNA, 80 bp, Homo sapiens
atattcaatgcactgcaagaaacaagagccaacaagcatctgttatatttgtggacatcggatacccaaggagacgaagc

SEQ ID NO: 581087 - DNA, 82 bp, Homo sapiens
gacaaaagaaacgggccccgactgtaagaagacatgttggataacaagaagaggtgtagagtttgcatatatcaactgtggc

SEQ ID NO: 581088 - DNA, 100 bp, Homo sapiens
tgcctatacacagaattacactgaagaagtagagtatttcaaccataaagacatcttaattgggcacgaaagagttggaggagagcagattagtgccatt

SEQ ID NO: 581089 - DNA, 100 bp, Homo sapiens
ggagaaatttcgacctgatatgcgaatgctgtcctctcccaagtattcactctatgaagtgcatgtcagcggaggctgctttgtaccgcctcagtggaga

SEQ ID NO: 581090 - DNA, 86 bp, Homo sapiens
tcactttctgaaggcggcctcatcacagtcggagacaatgcagatcttcgtgaagactctgactggtaagaccatcaccctcgagg

SEQ ID NO: 581091 - DNA, 88 bp, Homo sapiens
ggggtgctcagccaggccgactacctcaacctggtgcagtgcgagacgctagaggtaatctatgccagcaattatgacaatgttagca

SEQ ID NO: 581092 - DNA, 74 bp, Homo sapiens
cagcgacaccgcgagctatatctgcgcgtggagctgagtgacgtacaggacctcagcagccatgtcgaagcccc

SEQ ID NO: 581093 - DNA, 90 bp, Homo sapiens
tggaagttgattactcagtctctaaaaagctaagctttaccgatttgttacaactcaagcaagggccagcagaaattctcttttgacaga

SEQ ID NO: 581094 - DNA, 74 bp, Homo sapiens
agaagaagctggaggccggcaaagccaaggtgacagatcagtcagtgaaagcatttgctgaacactgtcctgag

SEQ ID NO: 581095 - DNA, 83 bp, Homo sapiens
ctcgtggcctgcctctgcgtgcccgcggcgagtcctttgcacatgttggcaacacacgcatccgcatcggcctccctgcccac

SEQ ID NO: 581096 - DNA, 101 bp, Homo sapiens
cggaagagtcttcggcatcgggcgacagcaggtcacagtggacgaggtgttggcggaaggatctgaaggtttgaatgggccaatgagtatcctcatcattg

SEQ ID NO: 581097 - DNA, 100 bp, Homo sapiens
agttagcagagtgctgctggttccttcggcagtggttgcaggaatccagcaggctcacgcggaacagttggccaacatgagaatccaggatctgaaagtc

SEQ ID NO: 581098 - DNA, 100 bp, Homo sapiens
gcctctcagagtgctggaattacaggaaggagctcattgccaagttagatcaggcagaaaaggagaaggtggatgctgctgagctggttcgggaattcga

SEQ ID NO: 581099 - DNA, 74 bp, Homo sapiens
aggaccagtatttcccatggaggacaatgcagatcttcgtgaagactctgactggtaagaccatcaccctcgag

SEQ ID NO: 581100 - DNA, 100 bp, Homo sapiens
ctggcaggaacctcggcctcagagcagcctcgtcttacagcgtgactgcaaagaaaaagacttttgttttgcaaaagaaaagcagctcggtgactccgtc

SEQ ID NO: 581101 - DNA, 100 bp, Homo sapiens
gaaatttgccctaaatcataaaactttgtaagtggcagaacaaggatttgaagctggcagtctggttccagctcttcagtgggtcatctgtgtgtcacag

SEQ ID NO: 581102 - DNA, 96 bp, Homo sapiens
cgagggcgtcgcggactctccccgcgatgatgccgaaagatgtagcacttaagcctcaggaacgtgtggagaaacgccagacgcccctgaccaaga

SEQ ID NO: 581103 - DNA, 75 bp, Homo sapiens
caaatccctccactctcttcaactgcaactctgggcccagcgtgtgaggcggccgataccagggtcagatcagac

SEQ ID NO: 581104 - DNA, 101 bp, Homo sapiens
tggctgcctttgttgctgctgcacattaggttgcagtatgtggccagttatttgcctcagtaaaagaggaatgacagaggaagaggaagacaaacttctgg

SEQ ID NO: 581105 - DNA, 100 bp, Homo sapiens
aaaattttggtaatactacaccaagaaaccaggttatccctcgaactcctagctcatttcgacagccttgccataggaaaaggatacagagtagagtttc

SEQ ID NO: 581106 - DNA, 76 bp, Homo sapiens
accgactaccgctggtgggcagaagtgcagcagaccccgaaatttttgcagctcaagtggcagtcctcctttccag

SEQ ID NO: 581107 - DNA, 102 bp, Homo sapiens
gcagagacaccaggacagaaaagacagtgttctgctttcatggagttcacagaagagtcgaggaggccacagaaacactattcagaatgggtgtagcaagag

SEQ ID NO: 581108 - DNA, 83 bp, Homo sapiens
ggagcgcaaggtcgccctcaaggccatgatcaaaacgcagaacgcagagctggccaagcttcggcaggagctcagcaaggtca

SEQ ID NO: 581109 - DNA, 90 bp, Homo sapiens
attctggggcaaatccatggaaattgttccaattggcacaacccatgtgactctgccagtgtgtaccttcagttgaatttttagaatctc

SEQ ID NO: 581110 - DNA, 73 bp, Homo sapiens
aacacctcaggacacggcctacaacaccaagagtctgcagatctccaggggagcccaccagcctagtcaacat

SEQ ID NO: 581111 - DNA, 50 bp, Homo sapiens
cctctcgcatgtccacctcacagggaaatcctcattgacgattcaatttg

SEQ ID NO: 581112 - DNA, 98 bp, Homo sapiens
tttagagccaaactgtccaaggctttggcagctggtggatgaccgctgtgtggtggagcccgcggccggggacctggacaacccccctaagaagttcc

SEQ ID NO: 581113 - DNA, 97 bp, Homo sapiens
gcgcccttcccctggatacggtcactttctacaaggtcagcgccaacggcaatgtcctgcgcagcgagatcgtgggctccatcaagatgcgagtctt

SEQ ID NO: 581114 - DNA, 90 bp, Homo sapiens
ctggattttttccgagacttggtgttattggttttgctggccttattggactccttttggctagagggtctcactctgtcactcaggctg

SEQ ID NO: 581115 - DNA, 80 bp, Homo sapiens
cctgcttggagccatgatgctgctggaatctcctatagatccacagcctctcaggatcttttgccagaaatgagggcata

SEQ ID NO: 581116 - DNA, 100 bp, Homo sapiens
gcctttagtgcactcttctccttcacagtaaagtggctgagcacagcaagagagagagctaaacactcaggcgactactttactcttttaagacaccttc

SEQ ID NO: 581117 - DNA, 75 bp, Homo sapiens
gtccatccatcacgaccacatttgtcatgatgacagtgacaagttgtcgagatgtccacagaaggaggatttggt

SEQ ID NO: 581118 - DNA, 100 bp, Homo sapiens
ggatacaagacaagtgtacaccaaatgtgaaggtgatgaggttgaagatctctatgagcttttgaaacttgttaaggtgactgtaggacgaggatttggt

SEQ ID NO: 581119 - DNA, 75 bp, Homo sapiens
agcaggatctgaaagctgaaattgagaagctttgtgagaagggcagaagaatgtatgacaacatgtccacaatgg

SEQ ID NO: 581120 - DNA, 50 bp, Homo sapiens
aaactcctctccaccagcgccaagaggaggaagaaggcacctacgatcaa

SEQ ID NO: 581121 - DNA, 100 bp, Homo sapiens
ctcgattggttctactgtgggtctggactgatctccatgtcctgttgtggggcttttacagcctttgggtacaagaatattccacagatgtcctttgatg

SEQ ID NO: 581122 - DNA, 90 bp, Homo sapiens
gaagaatttaggtctccagtgagatgtattgcaacaactagagaggatgatgaaattccactgtatctaaagggtggggtagctgatgcc

SEQ ID NO: 581123 - DNA, 88 bp, Homo sapiens
ccagaaggtcgcgaaggcagtaccgtttcctcagcggcgggtatcccatgtataaccgattgtgtaatggctgaaattgagaaattgg

SEQ ID NO: 581124 - DNA, 82 bp, Homo sapiens
gcacctttgccgtgtacctcaatagcactggctaccggacaggtcaacaacggttccagcctcagggatgagtgcatcacaa

SEQ ID NO: 581125 - DNA, 95 bp, Homo sapiens
ttagacttgtttcttatatgtgatgccattccagcactggactcatggaggctgagcatttattcagatggagtctccctctgttgcccaggctg

SEQ ID NO: 581126 - DNA, 90 bp, Homo sapiens
attggactgacttttcttatgctgggatgtgccttagaggattatggagtgcagcagctgccccgagccccgtgcttggcaacattcccc

SEQ ID NO: 581127 - DNA, 75 bp, Homo sapiens
ctggtcttctcgtcggattgcccatgcacttgttgcagaaacagccaagctggtgctcaagaccgaatcggctgg

SEQ ID NO: 581128 - DNA, 88 bp, Homo sapiens
ggacatatcaagcattggtgcacgatgtactggttggtgttcgaggaagagacattgttgttcttggtgtggagaagaagtcagtggc

SEQ ID NO: 581129 - DNA, 83 bp, Homo sapiens
agtaggtgcgggtgaagatggcggcagccgaggccgcgaactgcatcatggagtccctgaagaggaaggagaaggaatatgag

SEQ ID NO: 581130 - DNA, 90 bp, Homo sapiens
aggaattcttgagaggttcttggagagattctgggagccaaacactccattgggatcctagctgtttttcagtactaccagctctccaat

SEQ ID NO: 581131 - DNA, 100 bp, Homo sapiens
gttgcgtgaggggtttgtactatcctcggtgctgtggtgcagagctagttcctctccagctcagccgcgtagctattgacctgaaaagtggttctggaaa

SEQ ID NO: 581132 - DNA, 74 bp, Homo sapiens
accatggaggaggacgacagctacgcttcacttaaaggacaagaagcgatttgaaaaagctaaccaggattcag

SEQ ID NO: 581133 - DNA, 100 bp, Homo sapiens
ggtgatctacgtgtgctttttcaagggagctgataaagaacttcttcccaaaatgggattttgctatggatggcttggtcaatatagttggaggatgctg

SEQ ID NO: 581134 - DNA, 100 bp, Homo sapiens
ggccactgggctcccagcagcccaggttcagtcgactggcacaggctgaggaaagacaacagctcgagtcactttataagaacctcaggataccgttatt

SEQ ID NO: 581135 - DNA, 100 bp, Homo sapiens
cgcacctctgggcagcagcggcagccgagactcacggtcaagctaaggcgaagagtgggtgaccattgtgaggtagatattttgttctaattttccagat

SEQ ID NO: 581136 - DNA, 102 bp, Homo sapiens
gtgggtactgcattcctaccggtgtgacaggtggtgtataaggaggccgagaagagcccacagctgggactgggctgcctctccttcccgccgccccgggcc

SEQ ID NO: 581137 - DNA, 82 bp, Homo sapiens
gttttcggtgggtgtgccctgcacctgcctcttcccccattctcagtcagcccaaggccaaccccactgtcactctgttccc

SEQ ID NO: 581138 - DNA, 76 bp, Homo sapiens
aggaatgtggtcgacgagaagccccaacagcacggcgtggcctctcagcctcggtcatttcttcagatagctcccc

SEQ ID NO: 581139 - DNA, 75 bp, Homo sapiens
caacagacctctgtttggggagacgtccgccaagaaactctgtgaaggcatatttaaagtccttataaaggacat

SEQ ID NO: 581140 - DNA, 74 bp, Homo sapiens
gttttattgcatgtggatgcaggacaagccactcctccaggcagctggaggccattgtgcgcatcgcggaagcc

SEQ ID NO: 581141 - DNA, 100 bp, Homo sapiens
gggtgctgctgcgcttgtcaccatcatcaccgtgcccgtggttctgctgaacaaaggcagtgcactttacaggtccccgatgaaccaagagaaccctcca

SEQ ID NO: 581142 - DNA, 75 bp, Homo sapiens
tggaaggggaccctgaaagaatacgagatcctggtggacctctcaaaccccggtggccggcctgccctggcctac

SEQ ID NO: 581143 - DNA, 90 bp, Homo sapiens
agatatcctgtctcagatgaagaggtcatcaccgagtggtcttctcacatcatccttcaggcagcaccaagagtcactggcagcagagag

SEQ ID NO: 581144 - DNA, 82 bp, Homo sapiens
cgacaaagaaaacttcctgaagaacatgccaggctgagggtaaaaagctgggattggtaggctgggtccagaacactgaccg

SEQ ID NO: 581145 - DNA, 75 bp, Homo sapiens
tggtcgtggagaggagcaggccaaaaaacgcgtgaggtctgcggggtttccgagaggctcgccgggatttctggc

SEQ ID NO: 581146 - DNA, 75 bp, Homo sapiens
gcggcgggaacgattgggctgagcagaggacgacatgttgcttttcgtggagctgtttgcagacaaggtcccaaa

SEQ ID NO: 581147 - DNA, 74 bp, Homo sapiens
tgttttggatgatcttgaccccgaggaacttgtaatagctggcatcgttgagaatgaatggaaaagaacgtgct

SEQ ID NO: 581148 - DNA, 76 bp, Homo sapiens
gcggcggcggcctcggctcttccagccaccccctctccagtctgctcagggtgccatgactcccggaatccctatc

SEQ ID NO: 581149 - DNA, 82 bp, Homo sapiens
gctgatgatatggatagaattatgacgctaggccacaaaaatcctcaaggagaaattgaagccatagtcgtgcctgtttgct

SEQ ID NO: 581150 - DNA, 100 bp, Homo sapiens
gggccgcttgcctcctgctcctcctcctcctcgccagcctgaccagtggctctgttttcccacaacagcatcctaatgtcctatgatcacgtggaactca

SEQ ID NO: 581151 - DNA, 82 bp, Homo sapiens
gcgggagcctttggggcaccacagagatgcgggcgagacttgaaatctgtgctttgagggacactgtggctgtttacctgac

SEQ ID NO: 581152 - DNA, 80 bp, Homo sapiens
ccggctgccctgtggcctcgctcctcggagggacccagatgatgtggtaccagttggccaaagaagagcctggtgttggt

SEQ ID NO: 581153 - DNA, 99 bp, Homo sapiens
ttcaaggaaagcacattgcaatgcattatagcaatcccagacctaagtttgaagattggctttgtaacaaggactcagaattcatgattgaagaaatgc

SEQ ID NO: 581154 - DNA, 100 bp, Homo sapiens
gtttaacgacaagcacatcaccactctgcagggaacacgggtctggctgagagaaaatggccagcattttccaagtactgtaaattcctgtgcagaaggc

SEQ ID NO: 581155 - DNA, 80 bp, Homo sapiens
cgaccagtactacgtgtacttcggcaccgtccgcgactgctatgagggcgccatgtcagaaccggctggggatgtccgtc

SEQ ID NO: 581156 - DNA, 75 bp, Homo sapiens
acctgcacattcttaaagatgcccaggttgtaggaatgacaaccacaggttccatcaatggtgagcaccagcctg

SEQ ID NO: 581157 - DNA, 82 bp, Homo sapiens
caggaattgagagtcacagaggaaggacagtggagtctggcatcttattgacaccattcgcttttcacccaagatgatttga

SEQ ID NO: 581158 - DNA, 95 bp, Homo sapiens
ggttgagcggcggcgaacatgcgcttttgacacattggagacaatgcagatcttcgtgaagactctgactggtaagaccatcaccctcgaggttg

SEQ ID NO: 581159 - DNA, 75 bp, Homo sapiens
cccgcaccaagctctgctccacactgccaaccggccagaggacgagtgtgggtctcattctgtcacccaggctgg

SEQ ID NO: 581160 - DNA, 100 bp, Homo sapiens
aaaagaaagctcatcaagccagagctggagtatctcaggggatggcattcctactgtatttgtggcagtggcaggcagaagtaatggtttgggaccagtg

SEQ ID NO: 581161 - DNA, 75 bp, Homo sapiens
gcagtgcgcgctgccccccgagcaggaggagcacgtgaattgcctctgcttacgttcaggccctgtcctaaaccc

SEQ ID NO: 581162 - DNA, 74 bp, Homo sapiens
cagctgcggggagccgcaagaggttcgggtcttagggggatggggaaaggggccccctccccctagtgaatcac

SEQ ID NO: 581163 - DNA, 98 bp, Homo sapiens
gcccaaaccaggagattgcgagggagcgatgcggtgcagcgcgctgtcacaagatgaaggtagaggcacattatacaaatacagacctgaagaagtag

SEQ ID NO: 581164 - DNA, 83 bp, Homo sapiens
agggagggaagatggcggaggtgtgatcagggccaaagcggtcagtgagaaggaagtggactctggaaacgacatttatggca

SEQ ID NO: 581165 - DNA, 90 bp, Homo sapiens
gaaaatgccctctttacgtctatccagtccttacaatctgagtctgaggtaattgtgggacttctcaagttttggcccaagacccacagc

SEQ ID NO: 581166 - DNA, 73 bp, Homo sapiens
cgtcgatccagctgccagcgcagccgccagcgccgggactacaggaatatgtggaagctgtctcttttcaaca

SEQ ID NO: 581167 - DNA, 49 bp, Homo sapiens
aagtgccacgagctgccgttttatgggtcgtgtcttatgcgaagttcct

SEQ ID NO: 581168 - DNA, 100 bp, Homo sapiens
accacattacctttgccatgctgctggcaagaatcaaactgaagggcaccgtgggctacctgaacgacctggagcgtattgcacagagtgactacatccc

SEQ ID NO: 581169 - DNA, 100 bp, Homo sapiens
tccaggaatgcagtcagtctgttgatgaaactatcctatggaccagctctcattgaacactgtcttttagaaaatggattctcgggtaatgtcaaagtgg

SEQ ID NO: 581170 - DNA, 48 bp, Homo sapiens
accagatatatacttgatagactggaactaccaggttgtttttcaaag

SEQ ID NO: 581171 - DNA, 95 bp, Homo sapiens
aggggtacctttccgaagcgggtgcctatcttgtggacaacaagcttcatctgagcattgtacctaaaacaaagttgtcaggagctagacttgct

SEQ ID NO: 581172 - DNA, 82 bp, Homo sapiens
gaaagagagcaaggggaaggatcgggagtacacagacatcatccggagcacgtgaattgcctctgcttacgttcaggccctg

SEQ ID NO: 581173 - DNA, 100 bp, Homo sapiens
tgaaggaaagaaaactacaaaaagcagtggagagctttacctggaatattaccatcttaaaggaacaagactgccaatggagactgccgcagagaccccc

SEQ ID NO: 581174 - DNA, 104 bp, Homo sapiens
cgaagtattacatgattttcactccttgcaaactttgccatctttgttgcagagaatcggcaacaggaacaagatcctaccaacctctacatttctaatttgcc

SEQ ID NO: 581175 - DNA, 51 bp, Homo sapiens
ccacagtcaatggagatgtgtttcagtgacaagaatggtgagattgaccac

SEQ ID NO: 581176 - DNA, 100 bp, Homo sapiens
gctcccaccagcagcgcctatgagtttgtcacctggctcgatggcattaacctcgaagcggaggatccctgtgtcccagccgggcatggccgacccccac

SEQ ID NO: 581177 - DNA, 101 bp, Homo sapiens
cgctcttgctcctctctccttggcctctcctgggatcggcccaaggccagttctccgcagggaacccgagcgtcatgttagggtgaagcagaggacctcag

SEQ ID NO: 581178 - DNA, 100 bp, Homo sapiens
agcttctagatggatcctttccaaacttggtgtcttttctacaaactctgtgcctcaacaaccatttctaagtgatttgctgaccatgaaagaatatcac

SEQ ID NO: 581179 - DNA, 98 bp, Homo sapiens
cgggccatgagcccatggagctgctgatcaacgacaagagcattagtttggatgaattcaagtcattttgccattttacaacccacttggaagacttt

SEQ ID NO: 581180 - DNA, 100 bp, Homo sapiens
gctgcacttcgccttccaggatgagaactacctgggtgcaacaccggaggatttcagcaacctcccacctgaacaaagaaggaaaaagctgcagcagaaa

SEQ ID NO: 581181 - DNA, 96 bp, Homo sapiens
ccacgagcaggcagctgctgcactaaagggggctggacagacagtgacgattatagcacaatatcaacctgaagtccacagatcctggtccctaca

SEQ ID NO: 581182 - DNA, 99 bp, Homo sapiens
cctcggacggtttctgagcgttggtgtttggcacgcgccaccctctcttgctttggttccgccatgccgatgtaccagcccgagggcaacatccttcga

SEQ ID NO: 581183 - DNA, 50 bp, Homo sapiens
cggcacgcgactccccccgggcccaaaggacctgatgcccagaaccctgg

SEQ ID NO: 581184 - DNA, 88 bp, Homo sapiens
gtgatcaccatgaacgaggagtacgagacgaggttcctgtgcaactcttcacagaccattactgggacttccacccccaccacgtgca

SEQ ID NO: 581185 - DNA, 85 bp, Homo sapiens
acaacctgtgtaggaaatgtgccagtgatattttccagatgctcccataatactctcagatagtgaagaagaagaaatgatcatt

SEQ ID NO: 581186 - DNA, 100 bp, Homo sapiens
gttcatcgccacgttccactttcctcaccccaaatatgtggacctgtacaagctctggattaatcgaattacagctgctagccaggaacatggactgaag

SEQ ID NO: 581187 - DNA, 74 bp, Homo sapiens
tcaaattgaccacatcaggcagatggcgtatcagatctgccagtcaataaatttgaccgattagcactgctcca

SEQ ID NO: 581188 - DNA, 88 bp, Homo sapiens
ttgaagactctgcctcctacaaatataaagaaagtcgtgctgtatccctactgacttctccagctgctggtataaaaacagttgatcc

SEQ ID NO: 581189 - DNA, 100 bp, Homo sapiens
cgagcagatcgacaagtccgggagctgggcggccatttaccagcagtgtttggccagcgcttggatgagactgtggcctatgaacagaaattcggccccc

SEQ ID NO: 581190 - DNA, 100 bp, Homo sapiens
cgttgatgccattgttgtatcagtgggtgttgatgaagaaattgtttatgccaaatcaactgccttacaggcccgccaagctgccccctgtgtgctattc

SEQ ID NO: 581191 - DNA, 83 bp, Homo sapiens
aaaaaaataaactcctatttgtttatggcaaggcatcaagcatgatggaaccatgtgtgatacctgccgccagcaaccaatca

SEQ ID NO: 581192 - DNA, 76 bp, Homo sapiens
aacttctggtgtttggtttggaacattttattatgcagccttgaacatctgaatccatttctttgaaaaacttaaa

SEQ ID NO: 581193 - DNA, 82 bp, Homo sapiens
catctcgcacgtgacccccctccctcttcaaggtcaaaatgcagatcttcgtgaaaacccttaccggcaagaccatcaccct

SEQ ID NO: 581194 - DNA, 100 bp, Homo sapiens
atccaggtgccttctggggactgtcatctctaaaaagattgtatatgactgatgggatgttacttcgtgaagctatgaatgatcccctcctggagcgtta

SEQ ID NO: 581195 - DNA, 82 bp, Homo sapiens
gtggccggcgcctcctcggagtccttggggacggagcagcgcgtcgtggggcgagcggcagtggagaccatcctgggcctca

SEQ ID NO: 581196 - DNA, 101 bp, Homo sapiens
gaaccatgtctccatccccgaccgccctcttctgtcttggtgtggccgacgacgatgccctcgctgaggagcgcatgcggagaggccagaacgccctgcca

SEQ ID NO: 581197 - DNA, 82 bp, Homo sapiens
ggaggattcagggaataggagctggggagcccttctgcgccacagacaatgcagatcttcgtgaagactctgactggtaaga

SEQ ID NO: 581198 - DNA, 98 bp, Homo sapiens
cgggctgcgggagtgccctgctctggcctcgcttgttgctcttcggggactccatcacccagaggagaattctgcctaagccaactcgaaaaagccgt

SEQ ID NO: 581199 - DNA, 90 bp, Homo sapiens
tatgacaaaggctttgccgcagttcatcttcctccctgtgtactttccatttgccttcctgggtgctgctacccccgtatgatgatgcca

SEQ ID NO: 581200 - DNA, 101 bp, Homo sapiens
ccaagtttcacatccttgtctgtgaagctaaactcaatgctgctgtgtgggaagaagatttgtaaagaaaactcttaggatggatagaatgacagaagatg

SEQ ID NO: 581201 - DNA, 87 bp, Homo sapiens
aggaggagcgggtggccccgcgctgcgcccgccctcgcctcacctggcgcaggccatgctggagtatctgccaacatgatgaagaag

SEQ ID NO: 581202 - DNA, 75 bp, Homo sapiens
agacggctcacctgtgcgggatggaacaaaagatcttcgcaaatactgtggacaatgcccgcatcgttctgcaga

SEQ ID NO: 581203 - DNA, 98 bp, Homo sapiens
tcggatgaagataagacactttctcagttacagagaggacgttagtgctcttcttgtccaggcttgccgactggtacctcttaatcagaatcatcttg

SEQ ID NO: 581204 - DNA, 86 bp, Homo sapiens
agtggagtgggactggaaactgctcacctatgtcatggaggaagaggtggaagatggtatcttgaagttgaggaatgctggcaatg

SEQ ID NO: 581205 - DNA, 100 bp, Homo sapiens
gtggagacacagaggcatggaaaactggccctttttgtgtaaatcatgaacctggaagagcaggtactataaaagagcacaagctccgggtggataaggc

SEQ ID NO: 581206 - DNA, 100 bp, Homo sapiens
gaaatttggagtgtgcgtgcgcgccgagcgcaagagtgagccatggagctacgtgtggggaacaagtaccgcctgggacggaagatcgggagcgggtcct

SEQ ID NO: 581207 - DNA, 90 bp, Homo sapiens
tctacccactgccctcggcccgcgttcccatgatgggcacccacatgccaatggctggagacatgaatggactcagccccacccaggcac

SEQ ID NO: 581208 - DNA, 111 bp, Homo sapiens
cggaaaggtctgccttacaagggacaccatagcctctcaccctaagggtcttgggcgtctttggtactggcttttttaggggtctgcctggggattacccttgctgtggat

SEQ ID NO: 581209 - DNA, 103 bp, Homo sapiens
cccgcgtccgccgattcctcctccttggtcgccgcgtccttggctggcgtacatgggagtcccaccgtattgtccaggctggtctcgaactcctgacctcaag

SEQ ID NO: 581210 - DNA, 90 bp, Homo sapiens
ggtgcggagcagcctcggcggcggcggccgaaccaaccgagtcggatcctgaccctaaaacctattatttacctcatactctaccatgcc

SEQ ID NO: 581211 - DNA, 75 bp, Homo sapiens
gcctggctgttcagattgggaaagccgactccaattccagggtttcagaaccgcatcgcagcatctttcctgaaa

SEQ ID NO: 581212 - DNA, 83 bp, Homo sapiens
caaaattaaaagaggagcagcatggcatttcagtcactggtttgcagagtccagggatcaagtttgtggttctagcagatcct

SEQ ID NO: 581213 - DNA, 98 bp, Homo sapiens
cacggcgtggccgcctcctgcctcgaagacctgaggagcaagggtgtggaggcacagttggtgctattttcacttgtccactagaagtcattaagaca

SEQ ID NO: 581214 - DNA, 75 bp, Homo sapiens
cggatcacggtgagggaaagatgagcgaggagacggcgacttctgacaacgagagtgtggccatctggggccgtg

SEQ ID NO: 581215 - DNA, 95 bp, Homo sapiens
agaaacaatttggggttaggcagaaatgggatcagaaatcacaggccggatcacctcaacagtcacgtcagacaagtgcactcaacagaacggcc

SEQ ID NO: 581216 - DNA, 103 bp, Homo sapiens
gaacgattgggctgagcagaggacgacatgttgcttttcgtggaggtcattagtaattatcagcactttagatgggagaattgctgccttggatcctgaaaat

SEQ ID NO: 581217 - DNA, 74 bp, Homo sapiens
ggggcggctctgcgctggccgggggcgcgggcggcggcgccggcaggaaggtcgcaatggaagaagagatcgcc

SEQ ID NO: 581218 - DNA, 100 bp, Homo sapiens
actctgcagtggaccacagcattcctgaaatacatccaggaaagacatggagattctcttaaaaagtttgtgaagaaatatgggaacctttttagcttgg

SEQ ID NO: 581219 - DNA, 75 bp, Homo sapiens
aaagcaggtggagcaccctttgctgagtggcctcttataccccggactgcagatacatactgccatgaaagaaag

SEQ ID NO: 581220 - DNA, 75 bp, Homo sapiens
ctgcctcctgctctgtcctcatccccggcttagtgtaattgcttactcggtcatcgtgggagcactgatggcaag

SEQ ID NO: 581221 - DNA, 100 bp, Homo sapiens
ttcgaagatgccttggaaaccatctcaattgttatccaagataaattctgtgggattataaacatttcagtagaaggcctgcatgatgtcatgacggaag

SEQ ID NO: 581222 - DNA, 87 bp, Homo sapiens
ctgagagaggaaccacccagggctgccatccagaacagaaactgttcatacttggtgcgctgtggactcttgtgataattaaccaag

SEQ ID NO: 581223 - DNA, 75 bp, Homo sapiens
gggactgggagtcgttagtgagctggcgttgcagacggggcgtgaacccccacccatctggcgagtccagaaggc

SEQ ID NO: 581224 - DNA, 75 bp, Homo sapiens
caataaaagagacctctacttagctcagcaattcttaccttgatcagttcttaagagcagccccggtaactggag

SEQ ID NO: 581225 - DNA, 100 bp, Homo sapiens
gggatcgtgaccgagaccgtgaccgagagcgtgaccgagagcgcgaatatcgtcatcgttagaagaacctgcacttgttgccaagtcttccatcttacta

SEQ ID NO: 581226 - DNA, 82 bp, Homo sapiens
atcgtatcgtatgtccgctatccagaacctccactctttcggtcaaaatgcagatcttcgtgaaaacccttaccggcaagac

SEQ ID NO: 581227 - DNA, 75 bp, Homo sapiens
ctggcgccgggtcccgcggggaaattgctagaacctgtctgtcaccagctctttgaattctatcgcagtggagag

SEQ ID NO: 581228 - DNA, 100 bp, Homo sapiens
cgctagcaacttctaccaacaacagccatccgcagagccatcctgtgcaaaggaaggagctaggctgtgcgccctgggcgtcatgatccttctgcgggcc

SEQ ID NO: 581229 - DNA, 80 bp, Homo sapiens
gccgagggcttccgcaagcgaggcccctcggtgacggccaaggatgtgtgaccggaatggtggtcggcggcttcgacagt

SEQ ID NO: 581230 - DNA, 100 bp, Homo sapiens
gagagcttcatcaaaaatagtgatagctttgataattctttaaggaaaaacagtagtgctctgcatagtttactgaaacgagtggtcagcacatttagta

SEQ ID NO: 581231 - DNA, 100 bp, Homo sapiens
ggctttcagccggagaagcgagtttcagctgacatatctgaagagatggattaagaatgctttggattaaggattgtggagcacatttcaatcattttag

SEQ ID NO: 581232 - DNA, 100 bp, Homo sapiens
aaaaacttatgtttgaacagcaaaaatcggctgagtcatcactagagagtgggaagggcagcagcagcagagaatccaaaccctaaagctgatatcacaa

SEQ ID NO: 581233 - DNA, 75 bp, Homo sapiens
tcttgaggatcgaatcttcactcccgctgtctcagcagtctacagcacggtctgccatcatggatgttctcgcag

SEQ ID NO: 581234 - DNA, 100 bp, Homo sapiens
tccagatcatgagaaagctagatcactgtaacatagtccgattgcgttatttcttctactccagtggtgagaagaatatactgatgataatgctctgatt

SEQ ID NO: 581235 - DNA, 100 bp, Homo sapiens
ccgcccagaggccaattcgtcgcggcggcggtggagatcgcaggtcgctcagagtgctccaagctcccgaagccgaagtctcactttgctcccacatgga

SEQ ID NO: 581236 - DNA, 75 bp, Homo sapiens
ccgagaggcccctgcccaacccggaggatcagtgtactgttacccggacatacctattccttcacaagttctggt

SEQ ID NO: 581237 - DNA, 100 bp, Homo sapiens
acatgtcataaaaagttcctcagcaaatattatctaaaagtccacaacagcttttccagaagcctgttaaaagcaaggtctccccacaagcaacttctct

SEQ ID NO: 581238 - DNA, 83 bp, Homo sapiens
ccaagatcaagacagcaaaaagacttgtcaaagtcaaggttctctacttaaaagacaatgactactgatgaaggtgccaagaa

SEQ ID NO: 581239 - DNA, 82 bp, Homo sapiens
caggccgcgcccagcacacgcaacaatgcagatcttcgtgaagactctgactggtaagaccatcaccctcgaggttgagccc

SEQ ID NO: 581240 - DNA, 100 bp, Homo sapiens
ctcccgaatagctgggactacagaaataccagagatggacagccatctggtagagaagttgggccagcacctcttaccttggatggaccggctttccctg

SEQ ID NO: 581241 - DNA, 96 bp, Homo sapiens
attgcccaaacccaaagtgtggagttcctcagtttgaaactacatgtaattacgtagaagctacactcgaagagtttctgacctggaactgtgacc

SEQ ID NO: 581242 - DNA, 75 bp, Homo sapiens
ccatcttctgaatgacagaggatcaggtaataaatctcctaatggaataagtgactatccaaagatcagagtgac

SEQ ID NO: 581243 - DNA, 80 bp, Homo sapiens
atgaacagggttcctggggcatcgacgatctccatatttcattgcaaggacaatcatatcctgattcagcccttcctcca

SEQ ID NO: 581244 - DNA, 75 bp, Homo sapiens
gcaatcacagagactcggagagcatcactgcttaaagaaagtggttattgtacaggtcatgaaccagattccctg

SEQ ID NO: 581245 - DNA, 75 bp, Homo sapiens
tgccaagaagaacgacattcccttcgagctgcgcatcgtggatctgattaaaggagggtgaggacaaaatcttct

SEQ ID NO: 581246 - DNA, 88 bp, Homo sapiens
cctcgataaacagggccgtgccgcagatgcccaccggaatggagaaggaagaggagtcgatggagtgaaggtacctgagcgcaggaac

SEQ ID NO: 581247 - DNA, 82 bp, Homo sapiens
cagatccatcaggatgattttggtgaaactatatcgagaagtttactgactttcttcggctctttgtgagtgttcacctaag

SEQ ID NO: 581248 - DNA, 101 bp, Homo sapiens
tttaaggagagattgcacctgcccatcggtgattctgcaagtaatttgctttttaagtggagaaatatggctgacagttggatccttatgactatgaaatg

SEQ ID NO: 581249 - DNA, 90 bp, Homo sapiens
cggctggaccacttctctgtcgacggctatgacagttctgagagcatcagtgatgtcacgtttggagcaggggtcagttacatcgggaca

SEQ ID NO: 581250 - DNA, 95 bp, Homo sapiens
ccgccagctgcacctacgaaagcaggtgtcttacaggaaatggcccgccagctgctggcagtgtttggcggctactacatccggcttctagtgac

SEQ ID NO: 581251 - DNA, 100 bp, Homo sapiens
ttcccgtccgcggcgtggagggtcatgattgtggttggcggccaggcacccaaggcaatccgcagtgtggagtgctatgatttcgaggaggaccggtggg

SEQ ID NO: 581252 - DNA, 101 bp, Homo sapiens
aagtttcacatccttgtctgtgaagctaaactcaatgctgctgtgtgggaagaagatttgtaaagaaaactcttaggattggatagctttagtcaaagcag

SEQ ID NO: 581253 - DNA, 100 bp, Homo sapiens
cacacacctgttgccattatagagctggaattaggcaaatatggacaggctcctgttccaaagagtgcacttattcctgtaattcccatcaccaaatcaa

SEQ ID NO: 581254 - DNA, 100 bp, Homo sapiens
ctggtcgtcagcgccgaggctgggctgaggcgccgcggtaccatgaggcgccgttcgatcctttggtacagaagacagaccgacagatcgtccaatacca

SEQ ID NO: 581255 - DNA, 75 bp, Homo sapiens
ctcctgttgggccatttccgagaactcccatcagtttctgtatagtgtaaaagaaacgatggaaagaactttcta

SEQ ID NO: 581256 - DNA, 83 bp, Homo sapiens
caggaactctacaacccaatccagctctaatggtaccaagtgacaggttggctttactgtgactcggggacgccagagctcct

SEQ ID NO: 581257 - DNA, 100 bp, Homo sapiens
ggcgccgccactgccgcagccaggagatggttcgggcctagcggagccgggactggaggaattgaatgatctggcacgggaccctccagcacagtgttca

SEQ ID NO: 581258 - DNA, 101 bp, Homo sapiens
gtccccgggaaaacgttcgtcaacatcacgataatgctcggaatatttttcaatgtccattccgctgtgttgattgaggacgttcccttcacggagaaaga

SEQ ID NO: 581259 - DNA, 100 bp, Homo sapiens
gtgggagtctccgcgtcccgctcgctgggagagaggtacctctccttttccctctccctttccctaagctgagctgactgctgcccactttggaggaggc

SEQ ID NO: 581260 - DNA, 140 bp, Homo sapiens
gcgcaggatgggatccggctcctccagctaccggcccaaggccatctacctggacatcgatggacgcattcagaaggattactacagcatcccatttcccacacccactactccgctgactgggagggatggtagcctgg

SEQ ID NO: 581261 - DNA, 75 bp, Homo sapiens
catggcccagattctgccaattcgttttcaggagcatctccagaaatcagagcctcattcccttagtagtgaagc

SEQ ID NO: 581262 - DNA, 83 bp, Homo sapiens
ctcagacctgccaatttaccagagataattgataacaccctgtaacagctgattgttgacctcctgtactggagagacattaa

SEQ ID NO: 581263 - DNA, 100 bp, Homo sapiens
cctcgcgctgcaaggatgctcctgggatttcggagaggccgcaggagtcatttcgcatgactccacagtttctgcaacaacagagccggggaaaggagga

SEQ ID NO: 581264 - DNA, 50 bp, Homo sapiens
ttcagcagcgcggcagagtcatgggggttgacctgacagttcaagaaaag

SEQ ID NO: 581265 - DNA, 100 bp, Homo sapiens
caagaggaccctgcggactactgcaaaggtggatgagaatggcaaaattagtcgccttcgtcgagagtgcccttctgatgaatgtggtgctggggtgttt

SEQ ID NO: 581266 - DNA, 75 bp, Homo sapiens
cagcaagcagcaggtcacagggaagcccaaagtgaccaaagacttgaccactcaaagtccagctccccagaacac

SEQ ID NO: 581267 - DNA, 101 bp, Homo sapiens
gattgcctcggattccgacagcaggtttacaaaagatactgcaaggttcaaggatgagttagatatcatgaagttcatttgtaaagatttttggactacgg

SEQ ID NO: 581268 - DNA, 101 bp, Homo sapiens
gtttgtcagaggaagagatccgaaaaattcctatgttttcttcatataatccaggggaaccaaacaaggtgacttaagagattaaaattaatttggttgct

SEQ ID NO: 581269 - DNA, 101 bp, Homo sapiens
gcccctgtctcccgctccgcagccccgggcacggcggaggcagcggagccctgggccatcggtgctggagaatctggtaaaagcaccattgtgaagcagat

SEQ ID NO: 581270 - DNA, 83 bp, Homo sapiens
gtacatctgaaagccgggaaatggtctcggcgcggaagatggccggcggcgtggacggccccatcgggatcccgttccccgac

SEQ ID NO: 581271 - DNA, 100 bp, Homo sapiens
aataccagcagcctgtgggatttattattttgaagtaaaaattgtcagtaagggaagagatgggtatgaggatacatgggctgcacttcacagaagagcc

SEQ ID NO: 581272 - DNA, 82 bp, Homo sapiens
gtgatcccggcgacatactacctctggccccgagatcagaatgccgcaaattgtggctactaatttgccccctgaagatcaa

SEQ ID NO: 581273 - DNA, 90 bp, Homo sapiens
ggatcatgtctgcgagccaggattcccgtgtactaatggtcacttgatgtgcgctggctgttttatccacctactagcagatgcccggct

SEQ ID NO: 581274 - DNA, 76 bp, Homo sapiens
caggactatgtgccagccagccaggatataagtatccagtatatggtgtccagtggcatccagagaaagcacctta

SEQ ID NO: 581275 - DNA, 87 bp, Homo sapiens
cctgcatggagtcttgtgaaatcgcgtggactgcaacacccagcagcgcgaaagcataacccctactgtagaactaaatgcactgtg

SEQ ID NO: 581276 - DNA, 100 bp, Homo sapiens
tgactggcatattggagcaagttgtaaactgtagggatgctttggctcaagaatatctcatggagtgtattattcagatgctggcaagtcaaccattgga

SEQ ID NO: 581277 - DNA, 82 bp, Homo sapiens
gctcgctcaagatggcggcgcagccaccccgcgggatacgcctcagcgcggctcatcggaacctgtcccagctccctaattt

SEQ ID NO: 581278 - DNA, 82 bp, Homo sapiens
gaaggaaagcttctttctgggcagccagagccgcaaagtccctgaagaggaaggagaaggaatatgagcatgaaatggagcg

SEQ ID NO: 581279 - DNA, 100 bp, Homo sapiens
tgcctgacttcttcctgctgctgcttttcaggggtatgataagtattatcagcaacataatagttctgggcatcttcattaagtacaaggaacttcggac

SEQ ID NO: 581280 - DNA, 90 bp, Homo sapiens
cgctgagtggtttttcggatcatgtctggtggctccgcggattataacagggtgaccatcgggatgaggaggaagagacccacatgaaga

SEQ ID NO: 581281 - DNA, 100 bp, Homo sapiens
catccccctcatcatcattggatccttctttgttctcaacctagtcctgggagtgctttccggacatgcgtcgggatgtccaggaaatttttcgcatgac

SEQ ID NO: 581282 - DNA, 100 bp, Homo sapiens
gccggccgtctttgacctgctcctggctgttggcattgctgcctacctcggcatggcctacgtggctgtccaggctgtgccttcctcacctactgtgcca

SEQ ID NO: 581283 - DNA, 75 bp, Homo sapiens
aactaacccaacagcagaaagcggggctctctttacctatgaaggcaacagcaatgacatccgcgtggctggcac

SEQ ID NO: 581284 - DNA, 83 bp, Homo sapiens
ccgggactccctggaaacctagaaatggatattagaaatggctactccccagtcaattttcatctttgcaatctgcattttaa

SEQ ID NO: 581285 - DNA, 82 bp, Homo sapiens
tggagtgcgtgggggaccggctgttggcgggcagctgtgcctcctgctgaatgcggagaacatcttccactcaatggcagac

SEQ ID NO: 581286 - DNA, 88 bp, Homo sapiens
gaacccggaccccctacccaggtccagggccagccgccatgacgaacggaagccagcagacctgcagaacttggctcccgggacccac

SEQ ID NO: 581287 - DNA, 76 bp, Homo sapiens
atttctttggagacaaaactatgccaattcaggtttactcacgtcatccagcagagaatggaaagtcaaatttcct

SEQ ID NO: 581288 - DNA, 74 bp, Homo sapiens
cgcctccaggccaagagggatccttcacccgtgtctggtgggagcaggtgctccgtgtcggcagttaacctgcc

SEQ ID NO: 581289 - DNA, 100 bp, Homo sapiens
tggccccgagggcggatccgaggagtctactatgcaactgcatactggatgcctgctgaaaagacagtacaagtcaaaaatgtaatggacaagaatgggg

SEQ ID NO: 581290 - DNA, 100 bp, Homo sapiens
aggcctcgggcgggggctggcccggggttccaggatgaccagtgtcccagtgaaggaacgagtgaaggtgtctcagaactggagactggggcgctgccga

SEQ ID NO: 581291 - DNA, 76 bp, Homo sapiens
ccctattcttatcaattctgcattcctaaagttagctgatgttttcagagttggttccaggaccgtctgcagccct

SEQ ID NO: 581292 - DNA, 74 bp, Homo sapiens
tatgtggacagaggctatttcagtatagaggttacaacctgccatattcattcatccagtgatgatgaaattga

SEQ ID NO: 581293 - DNA, 75 bp, Homo sapiens
gcctgccaccgagccgggcccacctccccaccaaggaaggcaccagtttgtagaaaataatttaatactaaagat

SEQ ID NO: 581294 - DNA, 83 bp, Homo sapiens
ggagcagttttcatggatgcccctgtttctggtgagtggaggtgcaacaaatgagaaattccaattggagattttgtcaaaca

SEQ ID NO: 581295 - DNA, 82 bp, Homo sapiens
cgcatgcaggccagctaccgggagcacgtgaaggaggtgcagcagctgcagggcaaggaactgtggctgcaccatctgtctt

SEQ ID NO: 581296 - DNA, 100 bp, Homo sapiens
tacagcaatgatagccattctcactcaccagtttcctgaaatcatgggtatttttgctaaagctatcatacatctgtcggtggcctgggagacagttttt

SEQ ID NO: 581297 - DNA, 100 bp, Homo sapiens
catgcctacagggtcagtcccccacagtgagggccactgccaaggcgacaagtcaatattctgtaggatggaagtcttgtcccgctattgctccatccca

SEQ ID NO: 581298 - DNA, 88 bp, Homo sapiens
gtcggggaggcaaggtggttttggaccagacaggcgtgtctaaatctgagtgggacatacttttgaaggatgtgcaatgttcaatcat

SEQ ID NO: 581299 - DNA, 74 bp, Homo sapiens
tcccaagtagctgggaccacagatgaagatgtgtgtgtctttaagtgctcagtgtcccgagagacagagtgcag

SEQ ID NO: 581300 - DNA, 90 bp, Homo sapiens
cattttactgtcaagacatttcttcggcattctgcaacagacccaacatgagtgaagtttcctgcaagaaacgggacgactatttggaat

SEQ ID NO: 581301 - DNA, 88 bp, Homo sapiens
aatggattgttggcagatatagttcatattctggaaccgaagatgtttcgctatgctcacaaattggaggttcagagaacagatggag

SEQ ID NO: 581302 - DNA, 90 bp, Homo sapiens
actcataaatgccacctcaacaattcagagacaaggagccccaaactgtctcacagtcctcaaccacccagtctgggtgacccggtcgag

SEQ ID NO: 581303 - DNA, 74 bp, Homo sapiens
ggagtccggacatctgaaacttgctgccactgcagagccccgccatggaagacacgccgttggtgatatcgaag

SEQ ID NO: 581304 - DNA, 75 bp, Homo sapiens
cttggtttcgggatctcggtgctgcagacggcgagacctcctgcacagtgcactggtgattgctgcggtgtttga

SEQ ID NO: 581305 - DNA, 90 bp, Homo sapiens
gtctctgtatagtgacaaccaaggtgaagactcgggatgaatcccgcagtgtgggccgcatcagcaagcagtgggggggcctggtccgag

SEQ ID NO: 581306 - DNA, 102 bp, Homo sapiens
tggagatggggaccgccctggacatcaagattaaaagagcgaataaagtttatcacgccggggaaatgggtcctgatgaatatgaagagatggaagaagagg

SEQ ID NO: 581307 - DNA, 75 bp, Homo sapiens
gccggagctgaggagaacgactgggttcgcctgcccagcaaatgcgaaggcctacatacagatcacttttgtgga

SEQ ID NO: 581308 - DNA, 74 bp, Homo sapiens
ttgcaacggagataaattcccggaaccgcgattcggcgtgtcaggaacttgacaagaggagtcggaagatttag

SEQ ID NO: 581309 - DNA, 51 bp, Homo sapiens
gagagaccttggagtaattcgtcgacaggatctgtggttgtggttccggag

SEQ ID NO: 581310 - DNA, 50 bp, Homo sapiens
taaaactgttcgggtttataatctggtgtttaattggttggggtcagata

SEQ ID NO: 581311 - DNA, 100 bp, Homo sapiens
ggcgtttgatgttggccagccccgggacggactgaagctggtgcgcaaggacagtattgctgacagacagaacgccttggaggctgagtggaggacggtg

SEQ ID NO: 581312 - DNA, 96 bp, Homo sapiens
gggaccctgcagaaatgggtgccggaatctgtctcctgatcatcattcagctgttcaataatatgtcttataacatgtcactaatgtatctaatca

SEQ ID NO: 581313 - DNA, 126 bp, Homo sapiens
gaagatatatatccccttaaataaaacagctccctgtgttcgcctgctcaacgccactcatcagattggctgccagtgctggctacagcaaacatcattcaagatgtccagcaaagggagcagcac

SEQ ID NO: 581314 - DNA, 100 bp, Homo sapiens
gagaagtccttaaaggtagatcactgattcacaggggagcaggcggaggcaagggtcaccttccgcaaccctgtcattgagaggattcctcggctccgac

SEQ ID NO: 581315 - DNA, 101 bp, Homo sapiens
actcactgacggagaagcagtggctcaagagatgacctgatcagagccatcaagaaactaaaggcacttggcactggcttcggcatcatccctgtgggcgg

SEQ ID NO: 581316 - DNA, 100 bp, Homo sapiens
ctgcaagtcctctgaggagaagaagcctggtgagctcaagcattagtgccagcagtagttcccaagggctgtctcagccatccacccagacgactcagta

SEQ ID NO: 581317 - DNA, 90 bp, Homo sapiens
ctccaacacctatcactcagtcggtgctatgatataatacctgaaactttactgtgccggggacacgggcggcaagccgtccacgcgggg

SEQ ID NO: 581318 - DNA, 75 bp, Homo sapiens
aagatggacggtttcgccggcagtctcggcgtcttcactcgaggacagctgggcctgatagacatcatcttccag

SEQ ID NO: 581319 - DNA, 82 bp, Homo sapiens
aaccatctggggaaaaggcaaaaatcccatctaccgcaactctcagttcgagagtaaagaagccccatgtgccactcccctg

SEQ ID NO: 581320 - DNA, 102 bp, Homo sapiens
catctggctcttcaagcaccgccgggtgcgctttctgcacgagaccgggctggccatgatctatgctggactgtgctgctgccatctcggctcactgcaacc

SEQ ID NO: 581321 - DNA, 88 bp, Homo sapiens
aaggaggaattcgccgtgcccgagaatagctccgtccagcagcagcagcagttgcaagctcagcatctttctcatggccacggacccc

SEQ ID NO: 581322 - DNA, 99 bp, Homo sapiens
agctgccttcatgatccaagaggaatatgtggaccaggtttctggcctgagcgacaaaaagggctgaaagacacacagaagtcttcatggatatagttg

SEQ ID NO: 581323 - DNA, 98 bp, Homo sapiens
cagcaaccatgagtggttccatgatgggaagtgacatggacatggatttgattgacatactttggaggcaagatatagatcttggagtaagtcgagaa

SEQ ID NO: 581324 - DNA, 100 bp, Homo sapiens
aatgcttatcatttaatgcataaaaactgcaatcatttttcttcagctttatcagaggctgagtcatcactagagagtgggaagggcagcagcagcagag

SEQ ID NO: 581325 - DNA, 80 bp, Homo sapiens
cagcagcgccgtcccgtccgacagccaggcccgggagaagtcatggcaaaaccccaaaagatgccgcgtcagttcgagcc

SEQ ID NO: 581326 - DNA, 75 bp, Homo sapiens
ctggggctgggattggaactgtgtttgggagcctcatcattggttatgccagagacggggtttcgccatgttggc

SEQ ID NO: 581327 - DNA, 100 bp, Homo sapiens
aacgccttgttgcccagttccccagttctggcagattctggaaactgtacattgaagcagagtatgacctgtcagcctctacattctctcctgacggaag

SEQ ID NO: 581328 - DNA, 75 bp, Homo sapiens
agatcgccacctaccgcagcctgctcgagggccaggacgccaaaaagcatccctggagaacagcctggaggagac

SEQ ID NO: 581329 - DNA, 50 bp, Homo sapiens
gagacacagagggcagtcatgagactcagcccacctgcacccaggtgaaa

SEQ ID NO: 581330 - DNA, 76 bp, Homo sapiens
aatacatcagcttgtaggagacagaggtttctgttgcttacaactcattagattttgaaccagagatattctttgc

SEQ ID NO: 581331 - DNA, 75 bp, Homo sapiens
gcctgtctggaagttacttgtggacatgatcagacactcctctaatttacaaagcagtgcccagctggtttgtgc

SEQ ID NO: 581332 - DNA, 100 bp, Homo sapiens
gaaactgctttctaaaacaccagaactcaacctggatggccaggccatgttatgggatctcaacgaaggcaaacacctttacacgctagatggtggggac

SEQ ID NO: 581333 - DNA, 74 bp, Homo sapiens
tttaggagagctgtgttctctgcagattctaacacaaacatttcactgaagatattcaaacaaggcaatatcgt

SEQ ID NO: 581334 - DNA, 83 bp, Homo sapiens
ttgtgagaggaaaacagcctacccggcttcaacggaccacaccaaaatgccatctcaaatggaacacgccatggaaaccatga

SEQ ID NO: 581335 - DNA, 98 bp, Homo sapiens
ggctcattgtagcctcaaactcccaggctcaagcagtcctaccatgtcagccttcccagtagctgggaccacagaaatgattctggggaccattctga

SEQ ID NO: 581336 - DNA, 104 bp, Homo sapiens
gggattggccatcgcttccggaagttgtgagctttgtttcggagcgggagctcttccgagacgcactgggggccggatgtttcactcttgttgcccaggctgga

SEQ ID NO: 581337 - DNA, 75 bp, Homo sapiens
tacagttcattttttgcttggtttggaaaaatttcattagagtacttcctcgcgtattgctaaaggaggagttga

SEQ ID NO: 581338 - DNA, 97 bp, Homo sapiens
tgtgcgcaccacttttgtgtccaggcataagaaatttgacgatgatagcaagttttcagaggctatcacagtgctgctttcctggattgaacgaggg

SEQ ID NO: 581339 - DNA, 100 bp, Homo sapiens
gatccacctggagctgaggaaccggaccccggcagctgtacggttcctggagcagcagaacaagatgctggagaccaagtggagcctcctgcagcagcag

SEQ ID NO: 581340 - DNA, 50 bp, Homo sapiens
tcctgtacagcctgcagaacttgccggtggtggtgtgcacattgagcccc

SEQ ID NO: 581341 - DNA, 82 bp, Homo sapiens
acaactttgtctttgacgggtcctccctgcctgccgatgtgcatcggtacatgaagatatgagattgtggggaacctgggtg

SEQ ID NO: 581342 - DNA, 74 bp, Homo sapiens
atttaattttagggtcctttatatagaagggagagtagaatggcaacatcacagagctcctcctgaaggaaggt

SEQ ID NO: 581343 - DNA, 100 bp, Homo sapiens
gggatggctaccttttccaattgctgcggattgctgatgcccacttggacagagtggataccggtgaatgtacagataatgcatacatcgatattcagct

SEQ ID NO: 581344 - DNA, 100 bp, Homo sapiens
cagaaaccgacaggggccaggcgcccggtggctccgaagcggggaagtgggacaagatggtttacatctcgaacgataatgagtgtgtatatggcaacta

SEQ ID NO: 581345 - DNA, 100 bp, Homo sapiens
ccagctgggtcacccgcactgagtcaacagactgagcgcgtccaggcctgacagctctgcggctcgggccctgaggctatggaaagggcaaatggaatgg

SEQ ID NO: 581346 - DNA, 101 bp, Homo sapiens
gcaattcaagactgtctttcctaccctcttcagtgcccttccttgataagctgtttaaaccagcttgtcatcatggctgggacagtgctgcttgcctacta

SEQ ID NO: 581347 - DNA, 73 bp, Homo sapiens
cctggacaacccccctaagaagttccgtgacgcaaacatgcagatctttgtgaagaccctcactggcaaaacc

SEQ ID NO: 581348 - DNA, 82 bp, Homo sapiens
aagtacaagcggcgggtgccccggtgtgccgtgcaggtgaagctggagctggggcaccgcgcccaggtgaggaaaaaaccca

SEQ ID NO: 581349 - DNA, 100 bp, Homo sapiens
cattggaagcggagaaagttcaagcagctcaccagtggagagaagattttgcagctgtgaagtctaagacaggtccaggggagcatctccggaactccct

SEQ ID NO: 581350 - DNA, 89 bp, Homo sapiens
gtaaaattcttaaaaagatgcagaaagatggatttttgcatgagatgcttctggacaggacaggcgacactaacaggtgaagatctcgg

SEQ ID NO: 581351 - DNA, 100 bp, Homo sapiens
gaagactttgaaatattaaaggtgattggtcgaggagcttttggggaggcacgtgtggttctcaaatataggcattctgatgggaacttgtgtgttaaag

SEQ ID NO: 581352 - DNA, 75 bp, Homo sapiens
atgtctgcattcctgactttaatatgctcttcaacctagagaaaaatggagtgctggcatacattgggaattttc

SEQ ID NO: 581353 - DNA, 98 bp, Homo sapiens
tgatatcttcctgtcatggttccccttctactacatgctgaaggtcagcacgagggaccattgcccaggcagcatgctggattattgccagaatctct

SEQ ID NO: 581354 - DNA, 76 bp, Homo sapiens
aaatcaaccagagggaagaaaatgcaaactgaaacctgggaaacagtgcaggaagctcttcgtgggcggtcttgac

SEQ ID NO: 581355 - DNA, 100 bp, Homo sapiens
tctgtcactggagatgcggcttcgccaacgggatgaagatttgataaagtggaaggcactgtttgaggaagtccctgagttactcactgaggcagagaag

SEQ ID NO: 581356 - DNA, 75 bp, Homo sapiens
gagtatctccgtattctggagcagtatttcatgaatactaaggctcgtacgtctgcatcgattatcttacgtggg

SEQ ID NO: 581357 - DNA, 102 bp, Homo sapiens
tctgacaaggaggaaccagtcactcctactagtggagggggtccaatgtcaccccaggatgatgaagcagaagaggtatcggttttatggagaacctgtaat

SEQ ID NO: 581358 - DNA, 50 bp, Homo sapiens
ccggaatggagaaggaagaggagtcggcagcggaggaggaaatggcaggt

SEQ ID NO: 581359 - DNA, 90 bp, Homo sapiens
ggaatccgagacagaaagaggaccttagagctgcggtgcaaccctgggcagtttgcgtgtcgcagcggcaccatccagtgcatccccctc

SEQ ID NO: 581360 - DNA, 83 bp, Homo sapiens
gtctccgacgccgccgctcttcagtttgcccgaagcgcggacgcggtttacggaggccactgtctgcagctcccgtgaagatg

SEQ ID NO: 581361 - DNA, 82 bp, Homo sapiens
agagagggcctgggagcttgctgcagcttcagttccagggtctccctccactgctgtagtaacccgggtccggggcctcggt

SEQ ID NO: 581362 - DNA, 74 bp, Homo sapiens
gaacagtatgaaatctcttttaaggtttccgccagctgtggatgcctttgacattatgaccgcagaggattcca

SEQ ID NO: 581363 - DNA, 100 bp, Homo sapiens
aagagcctggacccttcagattctggagaccagaaggccaaaatcaaaagtatgggcaggcttgatttctttagaagactccagcggagaactgtgtctc

SEQ ID NO: 581364 - DNA, 98 bp, Homo sapiens
acactgcagccatggtccagcagtacggcaaacggagaaagcagccagagtactggtttgctgttcctcgggagagagctaaagttgcagacaagatc

SEQ ID NO: 581365 - DNA, 75 bp, Homo sapiens
agaagagaaaaagagaagatgaagaaacccagcttgatatgttggttagaagtttcatgcattcaaataatggca

SEQ ID NO: 581366 - DNA, 50 bp, Homo sapiens
caaagtcaacgttctctcctgctccacgttttctcataagattcaccttg

SEQ ID NO: 581367 - DNA, 75 bp, Homo sapiens
cgcggatgtcggcgaagagttcaaccagtccactgcttttaaggccctgcactgaaaatgcaagctcaggcgccg

SEQ ID NO: 581368 - DNA, 100 bp, Homo sapiens
gcctgttcgcagcgtggattttaaccgaggcacggacaacatcaccgtgaggcagggggacacagccatcctcaggcacggtggctcacgcctgtaatcc

SEQ ID NO: 581369 - DNA, 80 bp, Homo sapiens
gtccttatgcgaatcgtcagggcattaggtatggcctcacaagtcttggtctacccaccatatgtttatcaaactcagtc

SEQ ID NO: 581370 - DNA, 75 bp, Homo sapiens
atcgcatctccccgacaaacaccacgagaattccgcagcccacacgctgtttgcagacaaggtcccaaagacagc

SEQ ID NO: 581371 - DNA, 83 bp, Homo sapiens
ctcaagagaaagtggctgatgaaatttcattcagatggagaggagaaaacctatggtggctgtgaaggacctgatgccatgta

SEQ ID NO: 581372 - DNA, 101 bp, Homo sapiens
gcactctaatgaagcaatacattgagtttgtggcagacagacttatgctggaactgggttttagcaagaaagaagatgctgatatgctacaacacggatga

SEQ ID NO: 581373 - DNA, 75 bp, Homo sapiens
aaattgaagctcaagaaggtgaagatgatacctttctaacagcccaatggaagagaaagccaatacccacctcct

SEQ ID NO: 581374 - DNA, 82 bp, Homo sapiens
cttggcgccaccgcctcatgcactgtgtagggagtgcatccgccccaacccttttccccctcgtctcctgtgagaattcccc

SEQ ID NO: 581375 - DNA, 100 bp, Homo sapiens
acccatggttctggagaaaacagcgagtcttatgctaaaggaagctgtttcctatattgaaaggtgaactgtcacccctacaactcagcttgcaaccagc

SEQ ID NO: 581376 - DNA, 90 bp, Homo sapiens
tccccctccaccttgctgaccaccctcatgttctttaataccaagaatccaggtaaaaatggcttgtctaatagctgcattttgttagat

SEQ ID NO: 581377 - DNA, 82 bp, Homo sapiens
cggcggcaggcggcagaggggagacctgcctagagctggaacgttacctccagagcgagccctgctatgtttcagcctcaga

SEQ ID NO: 581378 - DNA, 75 bp, Homo sapiens
atgattctgagatgattggagaccttcaagccaaaagaatgcaatggtgtaaagattccagttgatgccagtaaa

SEQ ID NO: 581379 - DNA, 75 bp, Homo sapiens
tggatagctgcaaactgcgatatccaaacgtctcaagtccagtaccagttttgcaaatattcaggaaaattcaaa

SEQ ID NO: 581380 - DNA, 100 bp, Homo sapiens
caaaaacagttcctccacatcaaagcagaagaagaccgaagggaagacttccagtagctccaaggaggttaaggtagatttagacgttactttacctggg

SEQ ID NO: 581381 - DNA, 75 bp, Homo sapiens
ttggcctcctgtatgttggaggttatgaaagaccctttgcacaaatcaagcctctggaattgctttggcactcgt

SEQ ID NO: 581382 - DNA, 75 bp, Homo sapiens
gacaacaccgatcacagaccaacaagtgctggagaatctggtaaaagcaccattgtgaagcagatgaggatcctg

SEQ ID NO: 581383 - DNA, 80 bp, Homo sapiens
acatgactaaaaagaagcgggagaatctgggcgtcgctctagagacaggggcaagtgtccgagtggtgaatcagctactt

SEQ ID NO: 581384 - DNA, 100 bp, Homo sapiens
tgctgagacctataaccctgatgaggaagaggaagatacagatccaaggtcccatgaagctgaggtcttgaagcagctggctgagaaacgagagcacgag

SEQ ID NO: 581385 - DNA, 82 bp, Homo sapiens
ggcgcgatggagcagcgaaaacgtggttgtagagttccgtgactcccagcttcctgcctgacacagctcacttcaagaagtg

SEQ ID NO: 581386 - DNA, 100 bp, Homo sapiens
gtcggacctttcccgctggcgcgcagcctcagctagggtgaagttgaacaaattgctatgatgaaaccaaaaggccagactgaacacgatgagggtatgc

SEQ ID NO: 581387 - DNA, 75 bp, Homo sapiens
gatcctctgtctcctggtggtgagatttgatccagataaagcatatgatggctttcattgaacaagaagccaatg

SEQ ID NO: 581388 - DNA, 80 bp, Homo sapiens
cttgctggcgttggtgggagccgtgctctacctctatccggttatcaatactctggctgaccatcatcatcgtgggactg

SEQ ID NO: 581389 - DNA, 90 bp, Homo sapiens
gcgcgctcgctccggcgccggcctcgcctcctcgcagcagcgccatggacgtggcccagtggaacatcgggagcctccggaccatcctgg

SEQ ID NO: 581390 - DNA, 51 bp, Homo sapiens
tcccttttgcctcagatactattttgaagcagaccatccgagagctgtttg

SEQ ID NO: 581391 - DNA, 100 bp, Homo sapiens
aagaggaagaaatgatggaaggagaaacaaacttcagctctgaaatagaagatcttgcaaggattgggaaaatgaggtacgttagtgttcgcgattttaa

SEQ ID NO: 581392 - DNA, 100 bp, Homo sapiens
cacggtgtctggagtgagcctccccagtgccttgccttatcatcctcatcgccctcaacgtcctgctcttctaccgcctctggtccctggaaaggacagc

SEQ ID NO: 581393 - DNA, 96 bp, Homo sapiens
actggcattggaacttcctgttctgatagcgtggaaggcattaattcatggactaaacagacattattactccattactattaactatcggaaaaa

SEQ ID NO: 581394 - DNA, 100 bp, Homo sapiens
cggaaagactgttccaaaaacagtggataattttgtggccttagctacaggagagtggtcagtatatatccgagccgctgtccgaaaagagaaaggcctg

SEQ ID NO: 581395 - DNA, 100 bp, Homo sapiens
ggggaggcagcgcgggatcccagcctcaggcgtgcgcggacggtgtgcggagtccattgatgttcacagacaaagcccagcaggatgttatcatggtcct

SEQ ID NO: 581396 - DNA, 100 bp, Homo sapiens
tataaaaaggaaaaacatcttgatctggagaaaaactggatgttggtagaaaaagcaagagtttgttatatagcacttggatttacactgggcaacgtgg

SEQ ID NO: 581397 - DNA, 75 bp, Homo sapiens
tggatttttttgtattacaaaccttcagcttttaaaaattcaacaaggacacatgacggaagtgtgtatttttgg

SEQ ID NO: 581398 - DNA, 100 bp, Homo sapiens
cattcagatgtctggaagcaccaccaggtctcgctctcacccaggctggagtgcagtgacacagttgcagctcactgcagcctcgacctcctgggctcaa

SEQ ID NO: 581399 - DNA, 100 bp, Homo sapiens
tttttgaagtgtttgacgaaaaccgattgggggacttgatctcatcttcatgccaggccttgggtttgacaaacatggcaaccgactggggaggggcaag

SEQ ID NO: 581400 - DNA, 100 bp, Homo sapiens
cagatgtcaatgcaaagcacagacttggctggacagcactcatggtggcagccatcaaccgaaacaacagggatattccaatgcctttagttagctcagg

SEQ ID NO: 581401 - DNA, 80 bp, Homo sapiens
acacagcagcttactccagagatcaagtccaaggccattggctatctcaacactggttaccagagacagctgaactacaa

SEQ ID NO: 581402 - DNA, 106 bp, Homo sapiens
ctctcttcctttctcatgttttggctttggggctagggtactccaaagattcaggtttactcacgtcatccagcagagaatggaaagtcaaatttcctgaattgct

SEQ ID NO: 581403 - DNA, 96 bp, Homo sapiens
aggtccgtgcggcagcagctccagagctttgtcaaagagatcccttggttccagtaccccattatctatgacattcgggccagacctcgaaaaatc

SEQ ID NO: 581404 - DNA, 98 bp, Homo sapiens
cagaatcacagcagccacccatgttcatgaggccagcagcagatcccacgccattttcacgatccactacacgcaggaataagtttgtggagtttgac

SEQ ID NO: 581405 - DNA, 88 bp, Homo sapiens
ggacaacagtgacgaagagaactgtctcctggtgaccgagcacccgcctccgggcatcttcaactgacactttcttcatgagcaacaa

SEQ ID NO: 581406 - DNA, 83 bp, Homo sapiens
ttcgtgcagccgccgcgggtccgtgcgcccagcgtcccagggcccaggccgagcagtttttcagaagaagtgaagtcaagatg

SEQ ID NO: 581407 - DNA, 75 bp, Homo sapiens
cttggtgaagcagtgagtcgaaatgcgtctctggaagtggcatactattgcccagaagaaaagatgtttggtttt

SEQ ID NO: 581408 - DNA, 75 bp, Homo sapiens
accctcaagagctgccggagacaggcatcatgacggtgatgtcagctctgtcggtggccccctccaaggcccgcg

SEQ ID NO: 581409 - DNA, 87 bp, Homo sapiens
catcagcttcagctccagctccgctctcttcggctgccccaatccccggcagctctctcagaagactggactttatgagtataaagt

SEQ ID NO: 581410 - DNA, 88 bp, Homo sapiens
cgtcgatgagcttcaggaatgccaggagcaggatctgcagaagacgcagggctcaagactgtgccctgtccacggtgcctcctgcatg

SEQ ID NO: 581411 - DNA, 50 bp, Homo sapiens
cacagctcctggagccccacaggacagaagtggcggttgctgacgcctgg

SEQ ID NO: 581412 - DNA, 83 bp, Homo sapiens
agcccgacctggaagaatgccagcagctgagcagcgccagttggcactagctgagaagttcaaggagctgaaacgcagcaaga

SEQ ID NO: 581413 - DNA, 100 bp, Homo sapiens
acagtatgtggtggagagttctcagcttgctggcatggttccccttgcaagagttgatctctctaatgtattagatcttcatgcctttgatagtctctct

SEQ ID NO: 581414 - DNA, 98 bp, Homo sapiens
gaaacattctttgaattggattatcccaaagtcaagatgcaaaaaggtgagcgccagatggccaaaaggttcctggaggaacggaaggaagagctgga

SEQ ID NO: 581415 - DNA, 100 bp, Homo sapiens
cagcaacaacagcagccggcccttgttaactacaacagaccatctggtgaggtttatacatggggcgacaatgatgagggacaactgggagacggaacca

SEQ ID NO: 581416 - DNA, 100 bp, Homo sapiens
gcgcggaccccgcgtgcgccttgctcgcccgcagccccgagaccgcaggtcagccatgtcatctgagcctcccccaccaccacagccccccacccatcaa

SEQ ID NO: 581417 - DNA, 96 bp, Homo sapiens
gttcatggagacttctttataagacagaaaaatatgtcgtaactgcaagtgtggccaagaagagcatgatgtcctcttgagcaatgaagaggatcg

SEQ ID NO: 581418 - DNA, 80 bp, Homo sapiens
gcagggcctgcagcgggagctggacggcgagcgcgagcggcgcgagaaatgtctttggtgcaacactaacaaggcttgtc

SEQ ID NO: 581419 - DNA, 100 bp, Homo sapiens
gctgcgggaccccgggcactgttgctgctgcgggagatgcagactcttatgagaacatggataatcccgatgggccagacccagcctggggaggaggggg

SEQ ID NO: 581420 - DNA, 101 bp, Homo sapiens
tgcacatcttcaagcatgctcagatgtggcttaggaagctactatggaacaataggtggtccagtcccatttttcagcgcacagtcaaaacctcgagaaaa

SEQ ID NO: 581421 - DNA, 100 bp, Homo sapiens
gcaaacgagagctgaggctaatgaaaaacagtgaaaactcaaatgcagcatggattaatctctatagcagcccgcactgttattacacatctggtaaatc

SEQ ID NO: 581422 - DNA, 100 bp, Homo sapiens
gcatgatgttctgaagcttgaggtattccagcgtcttcaggaaacagtttagactctcttcaagatgacaatcctccacactggctaaaatcccttcagg

SEQ ID NO: 581423 - DNA, 75 bp, Homo sapiens
tcaggataagaggaatctttatctaatcatggaatttctccctggaggggctgattcaggagatcaatgatttga

SEQ ID NO: 581424 - DNA, 75 bp, Homo sapiens
tgatatagaagggaccttattcgtatatcgaaggtttaagaattgtttaagctgcatcaatggagcacatacagg

SEQ ID NO: 581425 - DNA, 75 bp, Homo sapiens
cgctgttttgccggaggagcccctcaggcctctgaagatgatgagaaactgaaaaagaggaaggagcgatttggg

SEQ ID NO: 581426 - DNA, 83 bp, Homo sapiens
tccccgttcctggagattctgattgagctcattgctatggacagtgctatcaccctgtggcagttccttcttcagctcctgca

SEQ ID NO: 581427 - DNA, 100 bp, Homo sapiens
gtggctgtgggcaggagctggcccactggatcatccatgggcgcccggagaaggacatgcatggctatgacatcagctgaggacgatgacatgaatgagg

SEQ ID NO: 581428 - DNA, 100 bp, Homo sapiens
agatgacttcgtctcccaccgactgcctgtttaaggttgccaaggaaagtgtactgcagttttacccgaaagctaatatcgttgcctaccatgacagcat

SEQ ID NO: 581429 - DNA, 75 bp, Homo sapiens
ggaagcgtggccggcagcgtcccggacgaggagatcagcttgaacgggtctttttacgacttggccatgctgaaa

SEQ ID NO: 581430 - DNA, 112 bp, Homo sapiens
cctgggttccacttccagcaacagctcctgcagcagtaccgagtgccccggggaagccattccccaccccccagagacggggtctgactgtgttacccaggctggtcttcaa

SEQ ID NO: 581431 - DNA, 80 bp, Homo sapiens
tggtgatccttcgggacaagattcgcttctatgagggctgaccccgcactacatctacccaccagccatcgtgcagccca

SEQ ID NO: 581432 - DNA, 90 bp, Homo sapiens
tacaggcgctgcaaactggaggaaatgggctttacagatgtgggcccagaaaacaagccagtcagatcttagcaaagcaatgtctcaaga

SEQ ID NO: 581433 - DNA, 83 bp, Homo sapiens
aaacaagtgtgtgcatctggctgttagaagaattcatgctcatccggggacttgccatgaggtgttgaagccttgtttcactg

SEQ ID NO: 581434 - DNA, 50 bp, Homo sapiens
tagacaactctgggctattttcaggtgctaaagtcagagcagaaatttat

SEQ ID NO: 581435 - DNA, 80 bp, Homo sapiens
aaaaccatcaagctatggaataccctgggtgtgtgcaaatacactgtccaggttacacgcatggggagatactctggagg

SEQ ID NO: 581436 - DNA, 105 bp, Homo sapiens
ccttccttcctccccacccattcctttaaatccggagggggaaaaaatcccaaggtctgcaaaggatctggagtgggagagcaggatgggggactgatcggtgcc

SEQ ID NO: 581437 - DNA, 75 bp, Homo sapiens
tttacctacactgactctgatagatacaccaatttggaggaggtggacccaagtggagagattgtggaactggcg

SEQ ID NO: 581438 - DNA, 75 bp, Homo sapiens
ctgtgctcgcgctactctctctttctggcctggaggctatccagctactgtaagattgatgttaaaggcatggtg

SEQ ID NO: 581439 - DNA, 133 bp, Homo sapiens
tggaggaactgggtgctcctgcccgctggcccctcgcgcgtgaggatctatctcagaagacccttttgaggacttctttgggaatcgaaggggtccccgaggaagcagaagccgagggacggggtcgtttttc

SEQ ID NO: 581440 - DNA, 83 bp, Homo sapiens
gaaggagcagaacgtgagggtgtaacttacaaaaagctgtgtcagcgtgttatgatgccgtcccgtaccaacctggctactgg

SEQ ID NO: 581441 - DNA, 101 bp, Homo sapiens
cctggatgagggggaagggcctcaaagccagaaggaatttgagagcgtattttgcggtaaaactggccgaaggctaaagctgaccagaccggactccttgg

SEQ ID NO: 581442 - DNA, 100 bp, Homo sapiens
aaggaactgtggcttgtgatccatgggcgagtctacgatgtcacccgcttcctcaacgaggtgtctttcctgaagactatcttcccgtctcaaaatggac

SEQ ID NO: 581443 - DNA, 51 bp, Homo sapiens
caaggcagttggtggaaatgaggtcaactttgtagtgtgccaactctttgc

SEQ ID NO: 581444 - DNA, 97 bp, Homo sapiens
cagtgtcagaattacaaggtgagatcagccgcccggccaagctatcttctcgctagcaggcctgtgttgcctactgcttcatcaccatcccctccct

SEQ ID NO: 581445 - DNA, 75 bp, Homo sapiens
tgaagatgtccttaccagctttgacaatacaggaaatgttttgatggaatggggagaagatattaaagcagtttc

SEQ ID NO: 581446 - DNA, 97 bp, Homo sapiens
tggggaaaatggcggtgtctacagtgttctcgacttcgtcgctgagacggaacctcactatgttgcccaggctggtctcgaactccttgtctcaagg

SEQ ID NO: 581447 - DNA, 97 bp, Homo sapiens
atgtggtgaaatgtacccagttagtaagaggaattcctcctgatcagcagagactgatctttgctggcaagcagctggaagatggacgtactttgtc

SEQ ID NO: 581448 - DNA, 146 bp, Homo sapiens
cctgagctccagcgtctgcattgctccggactcagccaagttccccaacggctccccgtcgtcctggtgctgcagcggctgaagccgacgtagcttctctgaacagacgcatccagctggttgaggaagagttggatcgtgcccag

SEQ ID NO: 581449 - DNA, 100 bp, Homo sapiens
tggtgaatcccctgtttgagaaaaggcctaagaattttggcattgtttggaaattttagcattcaggtgccaggaatgcagatgggacagccagtgccag

SEQ ID NO: 581450 - DNA, 100 bp, Homo sapiens
attaaagtgtgtcagggtgaaagagagatggctggagacaacaaactccttggacagtttactttggaaactagcagagttgttcacatcatggattttc

SEQ ID NO: 581451 - DNA, 85 bp, Homo sapiens
ggttgaaaaacctgacttttatcatcatattgataatctcaggagaactctatgcagaagggcaaacttgaagataaatcttttg

SEQ ID NO: 581452 - DNA, 83 bp, Homo sapiens
cgagatcttccgccactacgacacatggattaattgatgtatgttgagtttatggagctgccttttggtggcttgctttatct

SEQ ID NO: 581453 - DNA, 74 bp, Homo sapiens
tttcatgaagatggcgccaggacgaaggccctactgggcaagcatgtggagagggccaaatgtgaactgtgttg

SEQ ID NO: 581454 - DNA, 51 bp, Homo sapiens
gtcactccccaggattatgcgcgcctatcagcttatcactgtggtgatcgc

SEQ ID NO: 581455 - DNA, 88 bp, Homo sapiens
tccagccaaattcaaaaaggataaggagatcatagcagagtacgatactcaggtcaaaggtatccaaatatatcttgtgagttgctca

SEQ ID NO: 581456 - DNA, 90 bp, Homo sapiens
gtcggcgccggggttcggtggcctctagtgagatctggagacaatgcagatcttcgtgaagactctgactggtaagaccatcaccctcga

SEQ ID NO: 581457 - DNA, 100 bp, Homo sapiens
cgctgtctccctgaagaaccgagcggccagcaattctgtggtgttcttggtcacacatttatggagtttctgaagggcagtggagattactgccaggcac

SEQ ID NO: 581458 - DNA, 74 bp, Homo sapiens
aggcaagatgatccaccagcggttccatcctacacttgggtttgagagtaccgtacaggtgagcaagttgcaag

SEQ ID NO: 581459 - DNA, 81 bp, Homo sapiens
tgctctgctgtttcctaaggattttcagcaccttgccccaaaatgtattttgatgttggactgcataatttcttaatcagg

SEQ ID NO: 581460 - DNA, 82 bp, Homo sapiens
atctttgtggctgtgcttgccaggcctggctccagtggaacacctgcagcaggagactgctgctctgaaaaagcaaatgcaa

SEQ ID NO: 581461 - DNA, 89 bp, Homo sapiens
atatcctctgttgggggagaaggctgtcccttactccagagaatttaagcagaaatatgactacttcaggaagaaattaaagaaacctg

SEQ ID NO: 581462 - DNA, 51 bp, Homo sapiens
cgaaactttcaccgcgagcggaactacagcggaaggaatctctggattcca

SEQ ID NO: 581463 - DNA, 80 bp, Homo sapiens
ttaaagatgacaccttgcattccctatttagagctggaggccgaggagtggtgcaagcacctctgcatggagtgtctggg

SEQ ID NO: 581464 - DNA, 80 bp, Homo sapiens
tgtgaaattgaggaatcccaattgaagtttttgagaacaccttccaccatgaccacctcagcaagttcccacttaaataa

SEQ ID NO: 581465 - DNA, 75 bp, Homo sapiens
aaggcataagattggctggaattttcaacacatgatgatgttttcaggtttctaagcatgaattgaggaacagaa

SEQ ID NO: 581466 - DNA, 75 bp, Homo sapiens
aaagtggaagcgaagccgaaaaaggcagcagcgaagagagcagcacttgaggcatgtcacaagggctggggcgtc

SEQ ID NO: 581467 - DNA, 49 bp, Homo sapiens
gaaaaggcctaagaattttggcattgcttcaaaagcagtggactgtctt

SEQ ID NO: 581468 - DNA, 75 bp, Homo sapiens
gtcattttactgtcaagacatttcttcggcattctgcaacagcagagaccacgcagaggctgcctttggatcaag

SEQ ID NO: 581469 - DNA, 75 bp, Homo sapiens
agtgactacccctaacgcacaataatatggctccgatgggctcaaaggaaaaattccggaactgttggcttcggg

SEQ ID NO: 581470 - DNA, 96 bp, Homo sapiens
gggagtggcacggcgggcgggcgagcgaggggctaacttcagcggtggcaccgggatcggttgccttgagcctgccacatgaaatgaagatcacct

SEQ ID NO: 581471 - DNA, 100 bp, Homo sapiens
ccaggtgttctgtaaagagtatcgcgtgaccattgtggctgaccatccaggtatagaagactgtgcagtctttgtaactgatgaagagcaaggctttgtc

SEQ ID NO: 581472 - DNA, 110 bp, Homo sapiens
gtgaacccttgatagatcctgtatatggacatggcagtctggttgcaatcccagtgtatgtcaaacataacatcagtttccgggacagtagttcccttggacgctttgaa

SEQ ID NO: 581473 - DNA, 98 bp, Homo sapiens
gactggagcagagccgctgggcgccggagccgaggcgagcgccgcgcgcaccactgacgtccttctatggccgcttcaggcacttcttggatatcatc

SEQ ID NO: 581474 - DNA, 83 bp, Homo sapiens
ccctcgcctcccggccgagctgacgagttgtctgctggttctcagcttgaagaagattctgcagtccttattgatcctttttc

SEQ ID NO: 581475 - DNA, 100 bp, Homo sapiens
atgtttttctgttttgcctgaatacatgatttaaacaagagatttccacagaagattgccttgggtccccagtgtttactcccatcaaggcagacataag

SEQ ID NO: 581476 - DNA, 75 bp, Homo sapiens
ttccacagttccgtggtttgtaaagcaatgcattgaagctgttgagaaaagagctcaactgagaagtcatttcct

SEQ ID NO: 581477 - DNA, 98 bp, Homo sapiens
tcatcatgagcgatgttaccattgtgaaagaaggttgggttcagaagagggattttcagctgaactctcatctctcaacactggcaaatattcataag

SEQ ID NO: 581478 - DNA, 96 bp, Homo sapiens
gacgaggccgccctcagttgctgctccgacgcggaccccagtaccaaggttgggataattcttcactattccacccttgccacagtactatgggta

SEQ ID NO: 581479 - DNA, 83 bp, Homo sapiens
tggtggatggcatggggcgctttggcaggcaccatgactcctgtgaggatgcagcactccctggcaggtcagacctatgccgt

SEQ ID NO: 581480 - DNA, 100 bp, Homo sapiens
gaaggcaaggcagctgttctgaaggcacagaaaactgaatctgtagataacgagggagaatgaattgtcatgaaaaattggggttgattttatgtatctc

SEQ ID NO: 581481 - DNA, 97 bp, Homo sapiens
cgcatcttgcccgaagccgggcggaggagagctcaagctaagaataaagccattattgcccgtgtcacaaccttgtcagatgtagtagttggtctgg

SEQ ID NO: 581482 - DNA, 82 bp, Homo sapiens
tctttcaatgacaaaaagtttgtcattaaacccatcgacaagaaggcacctggtacagctctgccggggggggaaaaagtgg

SEQ ID NO: 581483 - DNA, 100 bp, Homo sapiens
ataatggactatgctatgaatttatacaaggagaagcactggatccaaagcatgtctgcaacccagccattttcagcttttgttaggagtgataaaccca

SEQ ID NO: 581484 - DNA, 100 bp, Homo sapiens
cacgtttccaaagctgtgtgctcaacctacttacagtcacgttactacagaagttgcttgatagatttgactatgatgatgagccagaagctgtggaaga

SEQ ID NO: 581485 - DNA, 98 bp, Homo sapiens
aggagagcggcaagatatggcaccgcaagccgtccccggccacgcgggacggattctttcttgtggagaagttattcatgtgaagatccttggaattt

SEQ ID NO: 581486 - DNA, 95 bp, Homo sapiens
ggaaaggctggattgatctccaaagactggatggtatgggctgtctggagtttgatgaggagcgagcccaggaaatgggtcctgatgaatatgaa

SEQ ID NO: 581487 - DNA, 51 bp, Homo sapiens
gaggccgcggagcgccagctcaatgaaacaaatttacatgtattggagacc

SEQ ID NO: 581488 - DNA, 99 bp, Homo sapiens
tttccatggatctgaagaaatacttggattctatccctcctggtcagtacatggattcttcacttgttaaggcatattctcaagatgcctacctgaaag

SEQ ID NO: 581489 - DNA, 100 bp, Homo sapiens
cacgtctgcggtgttacccacgactgcctgggacctggccaagggctccacacaccaagaccaagtccagcctagggtgaatgtttccccctccaagaag

SEQ ID NO: 581490 - DNA, 98 bp, Homo sapiens
cgtccccgccttcattgagcccaacgtgcgcttctggatcaccgagcgccaagtcaccagaaagacctacaggggatcttagagaaagaatgaagaac

SEQ ID NO: 581491 - DNA, 89 bp, Homo sapiens
gagcacatcagaaaaatcttggggaagaatgagactactgttcgaagatttttggaagaatactgagaacggcataaagtgaagatcga

SEQ ID NO: 581492 - DNA, 100 bp, Homo sapiens
aagcgatgaaatccaaaggtgaatcttttggttggtgattttgatgatagccacaaagcaagcagggtgcttttgaagatgatgatatcacgcacgttga

SEQ ID NO: 581493 - DNA, 74 bp, Homo sapiens
cgcaacctggcagccgccgccgtggaagggacctggaacggtaccaccagggtggccatcaaaaccctgaagcc

SEQ ID NO: 581494 - DNA, 100 bp, Homo sapiens
ctccggaggcaggttcggctggaaggaaccgctctcgcttcgtcctacacttgcgcaaatgtctccggtaacctgtctggtcagagtgcagcttcagtct

SEQ ID NO: 581495 - DNA, 101 bp, Homo sapiens
cagcattggtgaagttgaatctgcaaaacttattcgggataaagtagcaggtgctggagaatctggtaaaagcaccattgtgaagcagatgaggatcctgc

SEQ ID NO: 581496 - DNA, 50 bp, Homo sapiens
cccaggacaggtggcactctttcaggtcacgacccccaggagacctggag

SEQ ID NO: 581497 - DNA, 100 bp, Homo sapiens
ggggccgccctactctggggcttcctgctccagctgagtctttgtggaagtggtgaaaagtacatcccacctcatgtgaggcaagctgaggagacagtgg

SEQ ID NO: 581498 - DNA, 100 bp, Homo sapiens
tggttggagagctcatctggaattttgccgatttcatgactaaccagtcgatctgcctgcctggatgtgatgagcagcatggattttgtgacaaaccagg

SEQ ID NO: 581499 - DNA, 83 bp, Homo sapiens
gccttcgcgtctgcccggccaagaggcaaaggggaggttacgcagcaaaccatccagaagcacggggtcactctggtgcccat

SEQ ID NO: 581500 - DNA, 50 bp, Homo sapiens
cgcggctactacaaccagagcgaggccgacaatgcagatcttcgtgaaga

SEQ ID NO: 581501 - DNA, 101 bp, Homo sapiens
ccctcccagtgaccccaggctttttatggctgtgagacacgttaaaatttcagggtgctggagaatctggtaaaagcaccattgtgaagcagatgaggatc

SEQ ID NO: 581502 - DNA, 98 bp, Homo sapiens
aggatcatggcctataaaatgcttcaagtagtcctgtgctcaacattgcttatcgactcacagatgaatgcttctcacccggaaacaaacttgccagt

SEQ ID NO: 581503 - DNA, 98 bp, Homo sapiens
gggacgtgtaccctgtctaccagcctgtggataccgaagtgtataaagctacagtaaaagatgacctcaccaagtggcagaatgttctgaaggctcat

SEQ ID NO: 581504 - DNA, 82 bp, Homo sapiens
gaacaaagccgcgggcctctcaggtttacccaaggtccagcctagcccctaggcaccatgtcggacagtgatctaggtgagg

SEQ ID NO: 581505 - DNA, 101 bp, Homo sapiens
cttgcgtttcgggacggagtgcacccttggctacttggacctcctggagcacgtcttggtgctacagattctcgttgacactggaagcagtaactttgccg

SEQ ID NO: 581506 - DNA, 100 bp, Homo sapiens
tggctgctcccagctctactccttctctgcctctcagccttccttgaatccagaagctggcaaacagcatcagccatgcagacctattgggacaccttct

SEQ ID NO: 581507 - DNA, 100 bp, Homo sapiens
gaaacgggactaaactggcgggctccgtggaagcgtggccggcagcgtcccggacgaggagtctgcgctcctcagaccaccggcaggtgaacagcctgat

SEQ ID NO: 581508 - DNA, 100 bp, Homo sapiens
ggccgtgtctcagtccacccaaggtctcctcggatcgcctggagaggcactcggacctgacatctcaacagtgagcatgcgctggacgatagaagtacag

SEQ ID NO: 581509 - DNA, 50 bp, Homo sapiens
agacgaggatttcagtaattgtgctaaagatacatgataatcagttgaca

SEQ ID NO: 581510 - DNA, 74 bp, Homo sapiens
atcaatttagttgttggcagcttaacatccttattgattctatttgtgtttaaggagaaactaacaatgaaaac

SEQ ID NO: 581511 - DNA, 100 bp, Homo sapiens
ccagctcccatattggtcaaatcagtgaataccgaagaaaggggtgacatgagcctttagaagaagccacactctctgaattaaaaactgtcctcaagag

SEQ ID NO: 581512 - DNA, 74 bp, Homo sapiens
ggctacggggcagatggactcggagcgccccgccggtaatcattaccaaatgaggaggaaaggacgatgtcatc

SEQ ID NO: 581513 - DNA, 100 bp, Homo sapiens
aggtgtgaagatctccaaagcccgtgacaaatctccctgccgcagccaggaaaccactgattgcttgtgtggagaaacagctattaggagaacatttaac

SEQ ID NO: 581514 - DNA, 100 bp, Homo sapiens
ctccaacttgtttcagttcattcatccttctctcctttccgctcagactgtagagctcggtcagtactcctgcatttgtaccaacgaaaactcacgtgct

SEQ ID NO: 581515 - DNA, 50 bp, Homo sapiens
ctgttacaatcaaggtctatgaaggctcaaaactgaaggagatctttgac

SEQ ID NO: 581516 - DNA, 83 bp, Homo sapiens
ctagaatcaaggatttcagcaacaatgcctctgttcaaactcccagatatgaagatcaatgatgcagactgatggttttgatg

SEQ ID NO: 581517 - DNA, 75 bp, Homo sapiens
cggagctgctcatcaccaaggccaagaacgggcacctggctgtggccctcttggactcagaggaagagaatgaca

SEQ ID NO: 581518 - DNA, 98 bp, Homo sapiens
agctggagcctcaggcggcagcgcttctagccctccttacagcctagaaaaaatgacagatctcgtagctgtttgggatgttgctttaagtgacggag

SEQ ID NO: 581519 - DNA, 50 bp, Homo sapiens
tgcccatgctgagcgcctctcacacaggtgacttaagagattaaaattaa

SEQ ID NO: 581520 - DNA, 83 bp, Homo sapiens
cgggggccgcgcccttctctcgcttcggactgcgcaacgctgcgctctgggctgacagaggcttcgtgacggagttatcagag

SEQ ID NO: 581521 - DNA, 90 bp, Homo sapiens
atcgtgggcttctacggggccttctacagtgacggggagatcagcatttgcatggaacacatgtcctgacacagctctccctgaggagca

SEQ ID NO: 581522 - DNA, 100 bp, Homo sapiens
cttggcggactttaagggcgttttgcagcgacccagctataagttcttcttcaagtctatggacgacgatttcggaggacttctgaatgatgctttccag

SEQ ID NO: 581523 - DNA, 75 bp, Homo sapiens
tgactggggttctgagactccctgtcccggaccgcaggttatgaagacagtatggagtttccagaccatagtaga

SEQ ID NO: 581524 - DNA, 75 bp, Homo sapiens
taggtatccgcactgctcaggggctgaccggttccctgatgtgttacctgcttctgctactgatccaaactgcag

SEQ ID NO: 581525 - DNA, 80 bp, Homo sapiens
accgagctggggtcttggaggaagagagggtgctggagaatctggtaaaagcaccattgtgaagcagatgaggatcctgc

SEQ ID NO: 581526 - DNA, 103 bp, Homo sapiens
ggatgatgcggaaattaaccccaaggctggtccctgcagacggcttcccatttttatgaccggatgctgggaagcctgctggtccacaggtccatacatgaag

SEQ ID NO: 581527 - DNA, 74 bp, Homo sapiens
ttttaccaactatgtggcttggagctcaaaatggctggaacaagatcactcaaggtgaaggataatctactaat

SEQ ID NO: 581528 - DNA, 87 bp, Homo sapiens
aggaggagccgaagcccaaaaagctgaaggtggaggcgccgcaagcgctgagagcagccagacacagtctccaacgccaccaaagcc

SEQ ID NO: 581529 - DNA, 100 bp, Homo sapiens
gaaaacctaaccatgaagacttgaacttaatacagcaagaaagaccatcaagtttaccagggatgtcccactcttgttcaagcattgccaggccctagca

SEQ ID NO: 581530 - DNA, 100 bp, Homo sapiens
gggcttcaaggagttggggccctactccagcaaaacccggggcatcgagtggaagcgccccacgtatcagcagcgtcgccagcaggagaatatgcagcgc

SEQ ID NO: 581531 - DNA, 74 bp, Homo sapiens
cagtcactggtttgcagagtccagttatttacagagtatggaagacttgcgatggaagaaatctaccagaaacc

SEQ ID NO: 581532 - DNA, 49 bp, Homo sapiens
aaggattccaagtaactcttatttgggcagaaaatttgagacggtgatc

SEQ ID NO: 581533 - DNA, 147 bp, Homo sapiens
aagagactgagccttgagcagaggaacctatacaaagaagtgatgctggaaaatctcaggaatctggtctcattgggtcgccctcccccgagagggtcccaggctgcccagggaggaccagccaagcagctgctgcccctggagcgg

SEQ ID NO: 581534 - DNA, 83 bp, Homo sapiens
caaggagctaaagcagcgtgcgttcagccctgggaacatccatgatagcagtcttctgtaaatcgaacttttcaagaattctc

SEQ ID NO: 581535 - DNA, 50 bp, Homo sapiens
cctcagatgctcccttctgctcctgggtgtcttttatgaataatcaaaag

SEQ ID NO: 581536 - DNA, 124 bp, Homo sapiens
gaccttgagctccaggagttcgtctcttacgtctgcggaagtgcagctgcctcagttcttagcgcagctccaaagacaacaggccctccctctgccctcccgtctgtgagctccctgcccagca

SEQ ID NO: 581537 - DNA, 83 bp, Homo sapiens
ggatgcctccacacctaccactacccgtgtgccagcgatgcagagcggttctggtgaggttggaaggatgcagccacccggtt

SEQ ID NO: 581538 - DNA, 88 bp, Homo sapiens
atgaggaaagctggtcacgaagccctcagcattattgtggatgaatataaggaactgcaagcacatgttgaccagataactgaaatgg

SEQ ID NO: 581539 - DNA, 99 bp, Homo sapiens
agaaaaggagaactataattctaggaagtggtcacaaaggaaaagctactattagaattggaaaactcaatgtgagtagtgacactgtccagcatggtg

SEQ ID NO: 581540 - DNA, 75 bp, Homo sapiens
cggcaccttcgagcgtctcctaggtcagaatggcggcagtggagcatcgtcattcttcaggattgccctactggc

SEQ ID NO: 581541 - DNA, 50 bp, Homo sapiens
acgaacccccgtactgcatcaagattatttactggcaagatgagcaggat

SEQ ID NO: 581542 - DNA, 100 bp, Homo sapiens
ccgttttacataatctgaaggatcgctactattcaggactaatctattgtacgacacctgttctacctgggaatgcaaaccctgagctgcaaataagaac

SEQ ID NO: 581543 - DNA, 90 bp, Homo sapiens
tacggcgaagtctactcaacgtttccaagggaagtaagcaatggcatagaaaaaaaaggaaagaaaaaatctgtaggtcgtccacctggc

SEQ ID NO: 581544 - DNA, 101 bp, Homo sapiens
aaagccattgcttttgaagttattaaagtctgttggtgcacaaaaagacacttatactatgaaagagttcctctgtgacgagggtgcaggtatctctgggg

SEQ ID NO: 581545 - DNA, 90 bp, Homo sapiens
cgtcgccggccgcccgcacgtccgtccggctggttggaaggaaaatcatgcaacattcatgagcgaactaaaaaatcttcaggcttctgg

SEQ ID NO: 581546 - DNA, 82 bp, Homo sapiens
gatgatgtgcgggttcaggaggtacccaaactgaagacagtgttccggccgcccttggacatttacgacgtgctgattcgcc

SEQ ID NO: 581547 - DNA, 124 bp, Homo sapiens
aaatgtgtgcagaaggaggtcctgccgtccatgcggaagatcgtcgccacctggatgctggagggtctgtacttggtgtaccaccccgtgcagctgtccaccccgcacgccgtgggcgtcctgc

SEQ ID NO: 581548 - DNA, 83 bp, Homo sapiens
agaactgccagataacctgaaggtgctatgcttacatttgaaaagatttcattggacagcatatttaagaaataaagttgata

SEQ ID NO: 581549 - DNA, 87 bp, Homo sapiens
ggtgtcttgacaaatacctgctccatctcaaccagtgtggatcagtgttaaaagtgcttcatggagaaatggaggcctgaaagcgac

SEQ ID NO: 581550 - DNA, 96 bp, Homo sapiens
gcgacgactcgctgtaccccatcgcggtgctcatagacgaactccgcaatgaggacgttcaggttgtggcagcactgcctgaaggtatgagaccag

SEQ ID NO: 581551 - DNA, 75 bp, Homo sapiens
ccggcggaggcagagcacaggccggagagcaccaccaggaaaagagcactggttgccattggtacccatgatttg

SEQ ID NO: 581552 - DNA, 75 bp, Homo sapiens
aatagcccttcagtactgttgtacggctgctgatactttggctgtgaggcaaaaaaggagaatttatgatatcac

SEQ ID NO: 581553 - DNA, 98 bp, Homo sapiens
aagaaaaaacatctgccagtttctcttggaggtaaccaaggagcagtgaacagcagctactacagtagtggaagccgtgcatctatgggcgtgaacgg

SEQ ID NO: 581554 - DNA, 100 bp, Homo sapiens
cggccatccttatcaaagaccttccaggtgaacaggcagccatcctcagcagcagtcagcaggaactgatcatcaaagacagagtctcgctctgttgccc

SEQ ID NO: 581555 - DNA, 82 bp, Homo sapiens
gcatcgcaaccaccgccctggccatctaccatgtggtggtgtataaggaggccgagaagagcccacagctgggactgggctg

SEQ ID NO: 581556 - DNA, 100 bp, Homo sapiens
tcttgatgctctctgggctttgttgaggcggcagtatgaccgggtttctttgatgcgacctcaggaaggagatgaggttctcctgaaaagaaagctgaac

SEQ ID NO: 581557 - DNA, 96 bp, Homo sapiens
gacgcagatctccgggccacctgccttgaagggcgctttcatggaactatatgatcatatgggcaacattctgttgcagtctaccttctgtctgac

SEQ ID NO: 581558 - DNA, 74 bp, Homo sapiens
gaaatgccaaggcattctgtggaatgaaatattcatatgttttcagatgcttcaagtgttgtgaacagagactt

SEQ ID NO: 581559 - DNA, 50 bp, Homo sapiens
ccgacagccaggcccgggagaaacgttgagaaagaagggccttaatggct

SEQ ID NO: 581560 - DNA, 100 bp, Homo sapiens
cagacagtacaggaagacttgaggggcaaattggatcaaggcagttcagatgtgtagcaaacccagagaatttgcattggctttagccattttggagtgt

SEQ ID NO: 581561 - DNA, 75 bp, Homo sapiens
aagatccgcatggagcctgacgagacgaacatggagaaggcgactctgccgtcggtgacgctcatcgtgggctgt

SEQ ID NO: 581562 - DNA, 100 bp, Homo sapiens
cctggatatatcagtgaagatggagaaacaagtgaccaacagttgaatcaaagtatggacacagataatgagtgtgtatatggcaactaccctgaaatac

SEQ ID NO: 581563 - DNA, 90 bp, Homo sapiens
cttcaaacggacgaaagtgttggatctgttggtttcaaggttaactacaaagtatcaccttttgccatgatagcatttctttcattggac

SEQ ID NO: 581564 - DNA, 101 bp, Homo sapiens
ctagagccaagatgattctcatcactaaagctgctattaaagctattaaggtggcttcccacacttctgactcggacgttccttccggtgtcactgaggtg

SEQ ID NO: 581565 - DNA, 75 bp, Homo sapiens
cagcggcgagcagaactacggcgagcgggccaatggtggcagagtctacatagaactatgcttcgtggtgttctg

SEQ ID NO: 581566 - DNA, 98 bp, Homo sapiens
agaaggcgcgagaagagaaggcactactgccattagaactacaagatgacggctctgacaattggaaccaaccagatggctgtgtgtgccaaagcaca

SEQ ID NO: 581567 - DNA, 90 bp, Homo sapiens
atggagtgagattccacttcattgatatttacctggatgaactctccaaagtcggggggaaggaggcatagatcaagatcccgatcccgg

SEQ ID NO: 581568 - DNA, 100 bp, Homo sapiens
tggaagcaaattatctggtggtcaaggcttaccaatacacaactctgaccagtatccaggggatgttcgtctaaccccagaagactttgctagagctcag

SEQ ID NO: 581569 - DNA, 50 bp, Homo sapiens
ttaaaaatcaccagttactttaatgagtttttcttcccccagtccctcag

SEQ ID NO: 581570 - DNA, 100 bp, Homo sapiens
gcgcgtacgagatctccgaccagtctgggggcgctggcggcctgcgcagccacctcaagggccgttgctccagggagaactgcaaatatcttcatccacc

SEQ ID NO: 581571 - DNA, 75 bp, Homo sapiens
ggtggtggtgtgcgacaacggcaccgggattgctcttaaacttggtgtgactgctaatgatgtaaagaatgtcat

SEQ ID NO: 581572 - DNA, 74 bp, Homo sapiens
acccggagcccgaggcttgcggcgaccacgaggaagtgctctctggcgtggtggtcatatcgagtaaggattca

SEQ ID NO: 581573 - DNA, 100 bp, Homo sapiens
gcgacatgtggaaaatgacggttataagaccatttatttctttggagacaaaactatgccacatttgacattgtgcagcaaagaaatggttatggagaag

SEQ ID NO: 581574 - DNA, 100 bp, Homo sapiens
caaacaagccttcagaatcagatgaatggaggacctttttatagccagaatccagaccctcgtcctttatgcccttggtgtggtacttcaggatcctaat

SEQ ID NO: 581575 - DNA, 100 bp, Homo sapiens
tgcagctgggagcggacgaagcgcgaagctggggtgaaaggaaagcaagccaggatggatatttacgacactcaaaccttgggggttgtggtctttggag

SEQ ID NO: 581576 - DNA, 50 bp, Homo sapiens
taccctaacagcaggaaggttgtagcggttctggtgaggttggaaggatg

SEQ ID NO: 581577 - DNA, 78 bp, Homo sapiens
tgcggacccggcgccgaggcggccacccgagacgcggcgcgcacgctccggcctgcgcgggctgacgcacgaggcaca

SEQ ID NO: 581578 - DNA, 80 bp, Homo sapiens
cctcaatcctgagagagagaattaaagtctaactctccaaatgtgtgatgaatgcagactctgctaccattttggctgtt

SEQ ID NO: 581579 - DNA, 87 bp, Homo sapiens
cacgactacttcgagttcttcgccgccgacctgagataacaacgaacttgatgcaagtgataggtttgccaaggtcagacctctcat

SEQ ID NO: 581580 - DNA, 100 bp, Homo sapiens
ctcttcatctccctgctctggatcatcgaactgaatgctaacacgcagttagtcttggagaccctggcccagatggacgacttgcaggattttctatcga

SEQ ID NO: 581581 - DNA, 90 bp, Homo sapiens
cagagatgtgggaatgggggccgagccaattgtgatgcttggccttcgtgcctctgcagatctggtccaaagtcctggccatctcaggaa

SEQ ID NO: 581582 - DNA, 100 bp, Homo sapiens
taaaactaccaacaggcacagagaacccacagctggccacacgctatactctgtgctctcccaaggatatgagaagctggacactcccctcaggcctgcc

SEQ ID NO: 581583 - DNA, 51 bp, Homo sapiens
gtccatggaccaggacttcggcaattctgtggtgttcttggtcacacattt

SEQ ID NO: 581584 - DNA, 89 bp, Homo sapiens
caaatttgaacctcttgttcgagacatcaacctacatgagaaagatcagtctaaagaaaaggagaagaaagtgaaaaaaacaattcctt

SEQ ID NO: 581585 - DNA, 50 bp, Homo sapiens
gcttagatgctggcatgaggaaagacaaagttggtgagatggcaaagcag

SEQ ID NO: 581586 - DNA, 51 bp, Homo sapiens
agataaaagcccggatgaacttcaggtaaaagtcttgcagtgaaaaacccg

SEQ ID NO: 581587 - DNA, 74 bp, Homo sapiens
ttatttcaggcagctctgtccagtggagtgacccgttgccagagtgcagagcacccgagaacccctcctcagca

SEQ ID NO: 581588 - DNA, 75 bp, Homo sapiens
cttggtgaagtcggccagcctgagcaagcggaggacctacgccggcctggcccaggcgcagtcgaacctcctggg

SEQ ID NO: 581589 - DNA, 82 bp, Homo sapiens
gccgcgcgcgccagcaagaagatcctgctgcccgagcccaggaagctcttcgtgggcggtcttgactggagcacgacccaag

SEQ ID NO: 581590 - DNA, 101 bp, Homo sapiens
caatattggaagcgctttgatttacagcagctgcaggtgctcatgtgactatcacggatcgaaaagtagcattagaatttcttaaatcaaacgttcaagcc

SEQ ID NO: 581591 - DNA, 100 bp, Homo sapiens
ctgagtgccaaggacaccactggaactcacaaaggttcaagcactgtcttcctgttggccctgacaatcatagccagcacctgggctctgacgcccactc

SEQ ID NO: 581592 - DNA, 101 bp, Homo sapiens
ctacgacggcgttgatatcggtggtaacgacggcctcagcaggcggggaagatgaaaggggctacaggggaagaattgaaagtgaaggcatacctaccaac

SEQ ID NO: 581593 - DNA, 53 bp, Homo sapiens
cggagtaggcaaagttatcagaggagctggagtgcaatggtgcggtctcggct

SEQ ID NO: 581594 - DNA, 98 bp, Homo sapiens
aacagtagccgatcaaacagttgcttgttctgagaaaaagtactgctctggcactgggtggccttcgttttccgaggctcatggtacgtctggctctg

SEQ ID NO: 581595 - DNA, 87 bp, Homo sapiens
gacacatttcggattactaaagcagatgctgcggaattttggagaaaagcttttggggaaaaaatggcatgcattttccacaatacg

SEQ ID NO: 581596 - DNA, 98 bp, Homo sapiens
ctgcaagcactggcatgcacgcgagggctgggagtgtgtttgtgacgagctcatcttcttggaccctcatacaacccagacctttgttgacactgaag

SEQ ID NO: 581597 - DNA, 100 bp, Homo sapiens
agatatgggatgctggaggacatctgggggccacaaatgctccttctcctggagacgcaactcaaggggtgaccacggactcagtgagtatgagaaccca

SEQ ID NO: 581598 - DNA, 75 bp, Homo sapiens
ccacatgttgtctcttagaagtgggagctgaacgctgggatctagcaattgggaggcagcagacttgggtaatga

SEQ ID NO: 581599 - DNA, 100 bp, Homo sapiens
ggggctgctgaccgagagagctcactcagccaggtcaaggtgaagatgttcttaaagggtcccagattacgtatgttacaggtgtagaaggggacgacgt

SEQ ID NO: 581600 - DNA, 101 bp, Homo sapiens
gcccccgggctccttcttcggattctcagtggagttttaccggccgggaacagacgggaggcagcctggaaggtgacagatgaatgcatccaaatcatggg

SEQ ID NO: 581601 - DNA, 82 bp, Homo sapiens
cttttactcctacctgtgtaccgagccaggaacctcggagagctgatagatcggtttgtggctgatttcaaagcccaggggc

SEQ ID NO: 581602 - DNA, 100 bp, Homo sapiens
ccccgaccgactggtgggcggcgagacgggccagggtcgggccaggggctgcctcaggggtacatgtcccagagcaagcacacggaggcccgggagctca

SEQ ID NO: 581603 - DNA, 83 bp, Homo sapiens
gccaaggaaaaactggagagcttcatcaaaaatagtgatagctttgataaaaactccccaacttttaaatcatttgaagaaaa

SEQ ID NO: 581604 - DNA, 100 bp, Homo sapiens
gcgcgctgcagccccatctcctagcggcagcccaggcgcggagggagcgagtccgccccgaggacaaagcaggacctcataaggaaatctacccctatgt

SEQ ID NO: 581605 - DNA, 95 bp, Homo sapiens
gcggacgcgcccgggacgcgcggcggcaccgggaggccgggccgagcggctcttgcagccaatgccggaacaggatttgctgttgctgagcctca

SEQ ID NO: 581606 - DNA, 75 bp, Homo sapiens
cgtgctctcgccccaacccgcgcgccaggttcgagaacttgtcttggacaattgcaaatcaaatgatggaaaaat

SEQ ID NO: 581607 - DNA, 75 bp, Homo sapiens
taccatgcttcaagagccattccttttggaacaatggtgtaccttgaaagacttttaacatacgcagagatagat

SEQ ID NO: 581608 - DNA, 73 bp, Homo sapiens
tattaaaaccagggctccacagttaggagtatgcaaccgattataaagtcgtgacccagaacagcagctctgg

SEQ ID NO: 581609 - DNA, 75 bp, Homo sapiens
gcaagatgccgctgccggttcaggtgtttaacttgcaggccaggtcagagcagcccaccatgggatggggagggg

SEQ ID NO: 581610 - DNA, 50 bp, Homo sapiens
gggatggagaaggaggaggaatcgaatcatcctgatgttgcaagcaaatt

SEQ ID NO: 581611 - DNA, 82 bp, Homo sapiens
caggctctgaagcagaaggcagcgggctcaagctctaagcgaaagacatgaggcctcagcctgaaatgaggttgttttgagg

SEQ ID NO: 581612 - DNA, 98 bp, Homo sapiens
ttctgacggcaacttcaactggggccgggttgtcgcccttttctactttgccagcaaactggtgctcaagtgcggcgagggaactccccaggccaccg

SEQ ID NO: 581613 - DNA, 101 bp, Homo sapiens
cttggcaagggcttattgttcctggatgaattgtaaaagcaacatcagcttgaccagtataaaattacagtggattgctcatctcagtcctcaaagctttt

SEQ ID NO: 581614 - DNA, 83 bp, Homo sapiens
ccccgcgttcacagccccagcgcaggaagatgatccctatgatcttgaagatgtttctgcacagaaatgagggaaatacaaag

SEQ ID NO: 581615 - DNA, 97 bp, Homo sapiens
gacatatttttggacctgaaacagaaattctggaacacctatatgggcatgatcgcactgcgcaggggtgccacggagctcacccacgaggactaca

SEQ ID NO: 581616 - DNA, 100 bp, Homo sapiens
aagagattcagccagcacactcctcgcgagcaagctggctggaggcgtgatcctgggtgtggccctgtggctccgccatgacccgcagaccaccaacctc

SEQ ID NO: 581617 - DNA, 98 bp, Homo sapiens
cgcccgcccaggggtcgctgtcgcctgctgctggctcctcactgggacaagaatccttcaagaaacaggaaaaaactcctaaaacaccaaaaggacct

SEQ ID NO: 581618 - DNA, 90 bp, Homo sapiens
cagggttttctttactctggggtcccggctgccctgtggcctcgctcctcggagggttgttaaaaacaacttgaatcctgtttggaggcc

SEQ ID NO: 581619 - DNA, 75 bp, Homo sapiens
caataatggatagtatgaatgatcaagggaacagatgctgcttgtgttgctcagagtcacggaatctgtactgaa

SEQ ID NO: 581620 - DNA, 51 bp, Homo sapiens
ctgactttcagctatggaatcggaacagtcgtggtaaaataattaaacccc

SEQ ID NO: 581621 - DNA, 100 bp, Homo sapiens
gtgattctgtcctaaacaagacagtgactccaggatttctgaagactattgtggaagaagcatccattaagggcatttgcacgccaaaggcaaagaagaa

SEQ ID NO: 581622 - DNA, 100 bp, Homo sapiens
gcggatggccccaggtgtaagcgcagaaagcaggcgaacccgcggcgcaataacgatataattggtgattacaactttcctctataaattaactcttgac

SEQ ID NO: 581623 - DNA, 96 bp, Homo sapiens
ttcgtgggccgcgcgggttacctgtgtgccgcgctggtgctcaagcagaaactcgcccaggaggtcctgcaaccctggttccagtctggcaagcat

SEQ ID NO: 581624 - DNA, 87 bp, Homo sapiens
gcacccggtgctgcggctgttgccatgtccgcaccgggacgatcatcctggggacctggtacatgcttcagacagcaaagtcctgac

SEQ ID NO: 581625 - DNA, 90 bp, Homo sapiens
ctttgtcttccatgacaccaagttggatgccatgctggaggagttcaagaaggttgctgatagtccaactccaccgccaccacctccacc

SEQ ID NO: 581626 - DNA, 99 bp, Homo sapiens
tcttgggttaccgaattcaaggtgtcattgcccagcttggagtcattcgttgcccagtttgcagccaagaatgtgcagagagacacatcatagataact

SEQ ID NO: 581627 - DNA, 116 bp, Homo sapiens
taagaattaaaagatgatgagaaataaggacaaaagccaagaggaggacagttcgctacacagcaatgcatcgaggaaagatgaatgggagggctgattttcgagagccgaatgca

SEQ ID NO: 581628 - DNA, 50 bp, Homo sapiens
catgtacctgcattctgccttagtcaagccgtcatggaaatgatgagtca

SEQ ID NO: 581629 - DNA, 100 bp, Homo sapiens
ccgccgtgctggatgccgtgatctccagcgccggcctcctcagtgcgaagaagctgcagccgcacctggccaaggcggatgtgatgctggtacaacccag

SEQ ID NO: 581630 - DNA, 90 bp, Homo sapiens
ctccctcagcttccgccccaaaaggtctgagtgtacggtttgcagatatgcctggaaaatcaaggaagaaaaagaagaacatgaaggaac

SEQ ID NO: 581631 - DNA, 101 bp, Homo sapiens
cagaggggccggtctctctaaatatgccccaggtttttcgttggaatatacgttgcacatttatggcgattctgagtgtgagggcagacttctgccaggct

SEQ ID NO: 581632 - DNA, 89 bp, Homo sapiens
gccaagatggccgcgtgcgggatcctcgggtaccgggagcgaacgaggaggttctggctcagatgttcacgtaaacataatttcccaac

SEQ ID NO: 581633 - DNA, 98 bp, Homo sapiens
acttcagcagaacgaaaggaatcggatagtccctcctcctatgtctccatcctccaaatctgtgagcactccaagtgaagctggaagccaagactctg

SEQ ID NO: 581634 - DNA, 75 bp, Homo sapiens
ttccaagctgaagaagagcaaaaggcggagctgtagccactgtagcagcaagaaaacatccagtacagacctttc

SEQ ID NO: 581635 - DNA, 101 bp, Homo sapiens
cgagcagggaccgcctgctgcactttgggttcaaggcgacagtaggagcaacggtgggaatgccctctgaggaatgcagtgatgtccatcagtcacctctc

SEQ ID NO: 581636 - DNA, 82 bp, Homo sapiens
accaagatcgagcccagcgtcaacttcctcaagtcgcccaaaggcgagaaccactgtctctgatcaacgtgcggaagaggaa

SEQ ID NO: 581637 - DNA, 75 bp, Homo sapiens
gggccctgctggaccagctcatgggcacggctcgggacggcggctgccgagtgatagagcagaaggaggttccca

SEQ ID NO: 581638 - DNA, 73 bp, Homo sapiens
gtgatgagcagtttgttcctgatttccattcagaaaaccggccatgtggaagagctgtggggcctggccacac

SEQ ID NO: 581639 - DNA, 100 bp, Homo sapiens
gccgggacgccaagcacttcctgccgcgggcggcgcgccgcagctgcccaggccggaccgggccgggcgcccgcagggtcctggcggcagagaccacgtc

SEQ ID NO: 581640 - DNA, 49 bp, Homo sapiens
tgttcaccatcctggccccggaaggaatcagtgtctgtccctgaagggt

SEQ ID NO: 581641 - DNA, 75 bp, Homo sapiens
actgcgtctgtggtgaacctgacagcaggtttgaaaagttcacagtctgtgcagtctattcgtcctccatataac

SEQ ID NO: 581642 - DNA, 50 bp, Homo sapiens
tttgcatctagaggaattgaaaattctacgaatcatggagtctatttggg

SEQ ID NO: 581643 - DNA, 100 bp, Homo sapiens
ccgtgcccgagaatagctccgtccagcagctaatgggaatgacagcaagaaatttaaacgagatagacctccctgttcgccttcccgtgttctccatctt

SEQ ID NO: 581644 - DNA, 100 bp, Homo sapiens
ccagcagctacctgatcttcagggccgcctccgagtcagatgatccagcacacggaagacatggagaacgagatcgacgagctgctgcaggagttcgagg

SEQ ID NO: 581645 - DNA, 75 bp, Homo sapiens
ttacaaatatgaagaggcattatttatgaccttttctatggaaaggatctagtgaaaagccatttgatgtatgcg

SEQ ID NO: 581646 - DNA, 75 bp, Homo sapiens
gaaggacgccagcatcatacaccggctgttcgaggccttgactgtagcgtgaagcctctgcgggccttcttttcg

SEQ ID NO: 581647 - DNA, 101 bp, Homo sapiens
tgggtacccttcaaaaatttaaacaagaatccactgttgctactgaaaggagcaatagtatggttacagaaccgacgtgaagccactgtggagcgaacgag

SEQ ID NO: 581648 - DNA, 86 bp, Homo sapiens
aaacaaaagacaactctgcttttccagaaactgtgccaggatcacgaaacaccgtgctggacagccagcgtcaacaaaagcattat

SEQ ID NO: 581649 - DNA, 74 bp, Homo sapiens
actgtaacatagtccgattgcgttatttcttctactccagtggtgagaagtagccggatcgagctgggagatgt

SEQ ID NO: 581650 - DNA, 87 bp, Homo sapiens
aggagttcaaccctccaaaagagcccatgaaagatgacgctgaaactgccgccaaccggatctgtaaggtgctggctgtcaaccaag

SEQ ID NO: 581651 - DNA, 82 bp, Homo sapiens
gcaagatggccgcgccctgcagattgtctcttgttgcaaaatgcttggacagaagagatgagtactatttccactaaggcct

SEQ ID NO: 581652 - DNA, 51 bp, Homo sapiens
cccggacctcttcattgcctaaaaatcttttaatgggtctcctacaggaag

SEQ ID NO: 581653 - DNA, 100 bp, Homo sapiens
cgttcctggtgctggctgttggagtggacaacatcttcattctggtgcaggcctaccagtttttccagaaaggaggagtcaaggaagcccttagtgaacg

SEQ ID NO: 581654 - DNA, 100 bp, Homo sapiens
ggaatgctgagaaaacagacagatttgtcatgaagaaactcaatgatcgtgtcatgagagcgcggatcaagaagatcatgcagacggacgaagagattgg

SEQ ID NO: 581655 - DNA, 75 bp, Homo sapiens
ctcaccatgtggagactcgcagacatcgagcagtctacaggtcaaaatgcagatcttcgtgaaaacccttaccgg

SEQ ID NO: 581656 - DNA, 50 bp, Homo sapiens
aagccaggagcacccggcgtcccagacaaagtctcactctgttgcccaag

SEQ ID NO: 581657 - DNA, 98 bp, Homo sapiens
cggggagccggaaggaggagccatagcttggagtagggtaatgaaagcatgggatgctcatgtgacagcagtttgctcccaagatgccagtgaacttg

SEQ ID NO: 581658 - DNA, 100 bp, Homo sapiens
tttgcttacgtaccacttaaggacattgtggcaatcatcctgaatgaatttagagccaaactgtccaaggctttggcagctggggtgcagtggcgtgatc

SEQ ID NO: 581659 - DNA, 96 bp, Homo sapiens
tgccgtcaaagaagttcagtataatcctacctatgagaccatgtttgctcctgagaaatactacccgccggactttgacccatcaaagatccccaa

SEQ ID NO: 581660 - DNA, 105 bp, Homo sapiens
attacagcattagataatgtggaagccaggagatacgtagacaggattttctgccgtctcttggcaaaaatggcaaataatgatgctgttctgaagagactggag

SEQ ID NO: 581661 - DNA, 75 bp, Homo sapiens
ctcacctggagaagggatggaaatacttcaacaaggaatcagagatcattgatttcttcctgggggcctctctca

SEQ ID NO: 581662 - DNA, 75 bp, Homo sapiens
cctactggagttacttattaacatcaaggttttccagaagagattcaatggctcagtaagtttcttccgcggctg

SEQ ID NO: 581663 - DNA, 100 bp, Homo sapiens
gctctttgaagttgggttcaggagtgtagaattggcaaagttattgccagcttcctggtacatgtcccagagcaagcacacggaggcccgggagctcatg

SEQ ID NO: 581664 - DNA, 100 bp, Homo sapiens
ctgagcagcagcagcagcacgcccgggagatgagcgaggtgacggcggagctgcaccacacacacaaggagctgaggccaagaagatgaccacctttgag

SEQ ID NO: 581665 - DNA, 51 bp, Homo sapiens
acccagtgcgcccgcatcgtcgagatacagatgtcatcatgaagaggaaaa

SEQ ID NO: 581666 - DNA, 98 bp, Homo sapiens
cagcacttgacccagacatgatccaggccctggaggacacgcatgtgactgcacttctcttcaagatggaagaagccaacctggcgagccgagcgaag

SEQ ID NO: 581667 - DNA, 82 bp, Homo sapiens
ctaaagcagcgtgcgttcagccctgggggagtggggaaggccagggccagattctgcagcgcttcccagagaaggactggga

SEQ ID NO: 581668 - DNA, 115 bp, Homo sapiens
gcgatgcgggggctgctgcaatgacgagggcctggagtgtgtgcccactgaggagtccaacatcaccatgcaggaacagatggagtcggataactgttcaggaggagatgatgac

SEQ ID NO: 581669 - DNA, 100 bp, Homo sapiens
ccttcatgcatgcgcggaggccgcctgctagcaaggaaagcaagcaagtggagaccaagacagatgccaagaatggagaggaaaggggcagagatgccag

SEQ ID NO: 581670 - DNA, 128 bp, Homo sapiens
ccaaatagcagaagaataccatgaggtcaaaaaggaaatcaccctgcttgagcaaaggaaattgagaggatccagaatccagatctctggaatagctaccaggcaaagaaaaaaactatggatgccaa

SEQ ID NO: 581671 - DNA, 75 bp, Homo sapiens
gtcatggtcccagaaacgtcactatcaagaagaaggtgacaaagtacaatttgaagaatttgcaaaagtagtaag

SEQ ID NO: 581672 - DNA, 82 bp, Homo sapiens
cggaatgctggagtcagtggaagacggagctggtcggcccgaaggacgagcctgtggagtgggagacacctgacctttctca

SEQ ID NO: 581673 - DNA, 90 bp, Homo sapiens
atgtccggctgcagcagcaagtcccatcggaggacctccctgccctgtataccgagggaacagaggttgacattgtaggaaatattcaag

SEQ ID NO: 581674 - DNA, 74 bp, Homo sapiens
gcgagtccggtctcaaaatggaggtgtttggagaagagggattgaccctgaatcttgaagacgttcagcctcat

SEQ ID NO: 581675 - DNA, 90 bp, Homo sapiens
ctgatatctcaaaaggtgatctggacaaaggaacaggtatctcagatctttctcctggcctgccctccatgtcggggagctatcgtcgtc

SEQ ID NO: 581676 - DNA, 101 bp, Homo sapiens
ggaggatggaagagctgcacaaccaagaggtgcaaaaacgaaagcaactggagctcagagtaaaattagggaacctttcggaatttctcaccacatcgttc

SEQ ID NO: 581677 - DNA, 98 bp, Homo sapiens
ggatgaagaaggacgagtcgttcctgggcaagctgggcggcaccctggccaggaagcggagggcgcgcgaggattgccatcacgaaagccaaagtgga

SEQ ID NO: 581678 - DNA, 80 bp, Homo sapiens
attcagccagcacactcctcgcgagcaagcacttgcacctcctgcgccgccgccccccatccaaggatatgccttcaagc

SEQ ID NO: 581679 - DNA, 100 bp, Homo sapiens
agtcagcgatggtgcccggcgaggagaaccaactggtcccgaaagagcattatgccagtacatacaggcttctaaagccagggatggtgccagccctttc

SEQ ID NO: 581680 - DNA, 98 bp, Homo sapiens
ggaaatccatcatggactgtgggctgctcagtggatgtcagagtacattcctctcattgaaaggagctgtgctaacattctcctgtatggaccgaatg

SEQ ID NO: 581681 - DNA, 82 bp, Homo sapiens
gtttgatttgccctatgggatgagaacatcaggaactgtggctgcaccatctgtcttcatcttcccgccatctgatgagcag

SEQ ID NO: 581682 - DNA, 80 bp, Homo sapiens
agaggctcctgcagacccctggcttcctatgccccttggtgtggccactgcaaggctctggcccctgagtatgccaaagc

SEQ ID NO: 581683 - DNA, 110 bp, Homo sapiens
tggggcagccagcacaatcgggcggaggtggcgctgccccttcaggtactccaaagattcaggtttactcacgtcatccagcagagaatggaaagtcaaatttcctgaat

SEQ ID NO: 581684 - DNA, 100 bp, Homo sapiens
tgcacaggaagccgtgaaactggtacatggccacctctggcctagaccaccagctgaagatctttgacttgcgagggacgtaccagcctctgagcactcg

SEQ ID NO: 581685 - DNA, 83 bp, Homo sapiens
actggggccagggaaccctggtcaccgtctcctcaggccaccagcttgggctccccacggagggcagcaagtgggacttgggg

SEQ ID NO: 581686 - DNA, 100 bp, Homo sapiens
ccctgcgcggccccgctgagcctcggtgcggcggcgagcgcggtcgagatcgccatgcctaccccaccactgggagtctgagtgcgattcagaagatgac

SEQ ID NO: 581687 - DNA, 83 bp, Homo sapiens
caaagagaaaaggcaacatcctgtcacaggccatgctctggcaaaaacgatagaatttttgcggcatttgaagagctttttcc

SEQ ID NO: 581688 - DNA, 73 bp, Homo sapiens
tcgacgtcgtgatccagaagtccagagctgaggactgcctgtttgcagtttgcctatctggggcgcctggctc

SEQ ID NO: 581689 - DNA, 82 bp, Homo sapiens
cgggaagggagaagacactgcgtcaagcaggtgccccgaataacaacactctgctccagccaaggtggtgagggcagctgtt

SEQ ID NO: 581690 - DNA, 101 bp, Homo sapiens
ccagcagagctacctatctatggagaaaatcattcaagtggccaagacctctgctgcacagagatcttgaaaggaggggtcttgatccagcggaaccccca

SEQ ID NO: 581691 - DNA, 99 bp, Homo sapiens
cggttctgcagcgctgtatcgtgtcgccggcagggaggcatagcgcctctctgatcttcctgcatggctcagggactgaagaaaccttataatcctata

SEQ ID NO: 581692 - DNA, 80 bp, Homo sapiens
acaaggaggcctgagtagaccgcaggcgagcccacaccttaaccgtgctcttcatcctcacctgtacgcttggctatgtg

SEQ ID NO: 581693 - DNA, 83 bp, Homo sapiens
ctgcagtacctgcagaaggtctctggagacatcttcagcagtgacaaagcataaatcatggacaccagagaataaggtggacc

SEQ ID NO: 581694 - DNA, 73 bp, Homo sapiens
aggacagtggtgaagtgcagcagggatgtgcggaagttcaaggagacaaagaagcagtttgacaaggtgcggg

SEQ ID NO: 581695 - DNA, 75 bp, Homo sapiens
tgttagagaattatgggaacgtggtctcactggattgtaaaccatggctgtgtggatacaagctcagcagctcca

SEQ ID NO: 581696 - DNA, 100 bp, Homo sapiens
tgggcaagggcgagatcctggagagcctgcaggacggcgcggcagagtccccgtacgcctacagtaacgacaatgcctgtggaagacaagtcagaccccc

SEQ ID NO: 581697 - DNA, 100 bp, Homo sapiens
gatctctcaaaattggtcaactatcctggttttaatatatctactcccagaggaattccagacgctggtgggcttaaactggatggccggcagctcaagg

SEQ ID NO: 581698 - DNA, 74 bp, Homo sapiens
cgggaactcagagtcaaagaagaaaccgtgctcagaaactagccagattgaagttaaagaagagtgtaagagtc

SEQ ID NO: 581699 - DNA, 75 bp, Homo sapiens
gtccagagcattgtccagactgcgactgcatttgcctccagacttgtcagacacagtgagccgctcaagcaaaat

SEQ ID NO: 581700 - DNA, 82 bp, Homo sapiens
caggcgccggccggctgcgaagacgcggtgggccgcccctccgtggattgtcctgtttgcggggttaacattccagaaagtc

SEQ ID NO: 581701 - DNA, 75 bp, Homo sapiens
aaagaccgcctcctagccgaggagacagcggccaccatctcaggacctcagcagccatgtcgaagccccatagtg

SEQ ID NO: 581702 - DNA, 82 bp, Homo sapiens
caatcacaaagaagaggaaaactgtcataaagtcacctactgtaccagagtttcaggaaggaaaatcacctcggcagtgttt

SEQ ID NO: 581703 - DNA, 74 bp, Homo sapiens
atttaatggaaaatcgcttggttaaaacctgacacttttaacaggtcacgtcctaggagccgccatgttcatga

SEQ ID NO: 581704 - DNA, 75 bp, Homo sapiens
cttttcacagcatcagcagtcatctcactagttatgttcaaaaaacttgaaattttgacaaacttggcaaatgaa

SEQ ID NO: 581705 - DNA, 75 bp, Homo sapiens
cgggggcggcggccacgccaaggacggaaagtagcacgtctggaaattgagaacaaagtccttcaggagcaattg

SEQ ID NO: 581706 - DNA, 90 bp, Homo sapiens
ccagcaccatggggaagcgggacaatcgggtgcgtgattggactcccaggagaagaagactggcctagagatgttgcccttcccaggcag

SEQ ID NO: 581707 - DNA, 75 bp, Homo sapiens
cttccgtcacctccgctcccccgatcctattcccagtcgtatctctggaaacatggctacagaacatgttaatgg

SEQ ID NO: 581708 - DNA, 82 bp, Homo sapiens
cagaagccgagttcaacatcctcctggccaccgactcctacaagactcggtgaaatacctggagtgctcagctctcacccag

SEQ ID NO: 581709 - DNA, 50 bp, Homo sapiens
gctgatcccgagcagcgtcatgtacccctatttcaatgggacagatgtta

SEQ ID NO: 581710 - DNA, 98 bp, Homo sapiens
cgccatggagcccgactcggtgattgaggacaagaccatcgagctcatgggcagcccaatggatccaatggtgatgaagagacctcagttgtatggca

SEQ ID NO: 581711 - DNA, 100 bp, Homo sapiens
aggaggaaggaagaggaagtgagagcagcggcagccggcggtgcagcagccggccgacccagagtattgttctctggggccggactgagaaatgcctgaa

SEQ ID NO: 581712 - DNA, 96 bp, Homo sapiens
tgaggatacaatctaccacctacagccaagtggcagatttgttattggtgggcctcagggtccagatggcccccctggtccagctggaacgaccgg

SEQ ID NO: 581713 - DNA, 100 bp, Homo sapiens
cgtgcttctgcctaagaagaccgagagtcaccacaaggccaagggcaagtgatttgacagcggagctggagtttgttcagatcatcatcatcgtggtggt

SEQ ID NO: 581714 - DNA, 82 bp, Homo sapiens
gccacaagacatttcctgctcggaaccttgtttactaattactaatagggatgccaaaggaaaaatatgatcctccagatcc

SEQ ID NO: 581715 - DNA, 73 bp, Homo sapiens
aggcggaggcagaggtggaggcgctttgaaaggcagttgcagtggtgcagaatggctgacctcagtcttgcag

SEQ ID NO: 581716 - DNA, 95 bp, Homo sapiens
ccaggccccgtccgcccgggggcgccgcccaccgcgcctcgctcgctggttctagtgagccctacatcagagcagtatgacagcctacttcggca

SEQ ID NO: 581717 - DNA, 100 bp, Homo sapiens
ctggaggtggatctgaagaacgggaaggtgggagtcaatcattttgacaagtctcctgaaaggaacagctagcaggaactgaaacctttttccatttggt

SEQ ID NO: 581718 - DNA, 96 bp, Homo sapiens
tggcaacaccgcaaggtccggctgcatcagaggctgcagctgtgtgttttccagcaggacgttcagcagcaccggaagcagtactcagaacaagtc

SEQ ID NO: 581719 - DNA, 100 bp, Homo sapiens
aggccgccatcaaccgccagatcaacctggagctctacgcctcctacgtttacctgtccatggttatcaatactctggctgaccatcatcatcgtgggac

SEQ ID NO: 581720 - DNA, 100 bp, Homo sapiens
aagaagccagtctttaaatattcgaacaactcagcttgcaaaagcccagggccatatatctcaggtggccgctgttcctccaactccccagcctttagct

SEQ ID NO: 581721 - DNA, 100 bp, Homo sapiens
gcgagtgactgcggccacgcctgaaaggcgactctcctacaatgcagatcttcgtgaagactctgactggtaagaccatcaccctcgaggttgagcccag

SEQ ID NO: 581722 - DNA, 58 bp, Homo sapiens
ggcacaagtgcgcattggtgggaaacatcgattgttatctagacaagaagaacttaag

SEQ ID NO: 581723 - DNA, 96 bp, Homo sapiens
atagtacctacagcagcactccaggatctcgctctgtaacccaggctctggaatgcagtggcacaaccacggctcactgcagtctcaacctcctgg

SEQ ID NO: 581724 - DNA, 100 bp, Homo sapiens
cgggcttttgctgatatgcatgcatgtaccgaccttctgaacaaggccaacacctatgcaggaatctggtggacagtaacaaactttggtgaaatttcag

SEQ ID NO: 581725 - DNA, 90 bp, Homo sapiens
acgatctgcacttcgcattttggcattgacatttaattttagggtcctttatatagaagggagagtagcccaattattgaagacagtcgt

SEQ ID NO: 581726 - DNA, 100 bp, Homo sapiens
agccaccatgcacatcctcgtggtccatgccatggtgatcctgctgacgctgggcccgcctcgaggccatgactgctccctgcgtctctggagcctggac

SEQ ID NO: 581727 - DNA, 98 bp, Homo sapiens
gccgtagcagccgggctggtcctgctgcgagccggcggcccggagtggggcggcgggttgcacgttttcaaaaaatacctaatggtgaaaatgagaca

SEQ ID NO: 581728 - DNA, 51 bp, Homo sapiens
ggatggcctgactcatcccagagcacccagtcagtcagagtcagagccaga

SEQ ID NO: 581729 - DNA, 75 bp, Homo sapiens
ccgcgaaatgatgggatagcgttgcaaatccttaaaagagtcttaacgctctctatcaatatcagctcacatcat

SEQ ID NO: 581730 - DNA, 75 bp, Homo sapiens
ttcgagaagattagcaaaggtgctaatccagtggaaatcaggagagctgacaagctctctactgatgatctgaac

SEQ ID NO: 581731 - DNA, 102 bp, Homo sapiens
acgctggagaacctggcacttatgtcctccctggggtctccgtctctccaccgggggcttcatccttccagggaggagaagagggactccagaatggctgag

SEQ ID NO: 581732 - DNA, 100 bp, Homo sapiens
aagccgggctcggcccgaggcccccaggacctccatctcccaatgttggaggaaagtggagaatgaggacatgaataaagaccagatcttgctggaaaaa

SEQ ID NO: 581733 - DNA, 75 bp, Homo sapiens
tgaaactgctttctaaaacaccagaactcaacctgttatctgatgatggccgctatgtcttgttatcaataaggg

SEQ ID NO: 581734 - DNA, 80 bp, Homo sapiens
gacaccgagcttcagcaagctctctccaacggaaggaacaccagccagccgtggaacctcaggtgcaacagagacgccag

SEQ ID NO: 581735 - DNA, 82 bp, Homo sapiens
cgctctacccggccccagggtacgctgccggtgtgcacagactcaaagtcctctggctcacagcctctcagccctgcagcat

SEQ ID NO: 581736 - DNA, 100 bp, Homo sapiens
agctttccgcccggctaagagccttgaggcagaggcagctggaccgagctgcggctgctgtgggtggagctcatgaaggacttcagcatttgggtccttt

SEQ ID NO: 581737 - DNA, 75 bp, Homo sapiens
aggagttcgagcagatcgacaagtccgggagctgggcggccatttaccaggtgtcttctctttagggatggtgag

SEQ ID NO: 581738 - DNA, 124 bp, Homo sapiens
cggaagaccgcgcgcagggcctgcagcgggagctggacggcgagcgcgagcggcgcgagaaactcaccatggatgatgatatcgccgcgctcgtcgtcgacaacggctccggcatgtgcaaggc

SEQ ID NO: 581739 - DNA, 83 bp, Homo sapiens
gggaccggtgtctggcggatgcggtcgtgaagatagcatcaagatggtgctcatgtggaccagtggtgacgccttcaagacgg

SEQ ID NO: 581740 - DNA, 75 bp, Homo sapiens
gccacttttcacttctgctgcactgctttcagcatgcaagttgaagctgtctccaagcccttcttcccgtgtgac

SEQ ID NO: 581741 - DNA, 80 bp, Homo sapiens
agatccattggtaaattgatcaggatttttggcctaccctccaaagaaaagcacttttccagccattaactccaggctct

SEQ ID NO: 581742 - DNA, 90 bp, Homo sapiens
catgagcgacagcggcgagcagaactacggcgagcggggcggcgacgacctggaccccaactacgtgctgagctcgcgggtgcgcacggg

SEQ ID NO: 581743 - DNA, 89 bp, Homo sapiens
cgccggctactgccgcttcagttctcccggtgtggccacgagtcgggtgtggtcactcacctgtctaccactcccgtgaaatggcagct

SEQ ID NO: 581744 - DNA, 88 bp, Homo sapiens
gggagctcctgccgcccgccgctggcttcaagtgcaagactctttttgatcagaacaatgctgcaaaaaaagaagagtcagaaactgc

SEQ ID NO: 581745 - DNA, 98 bp, Homo sapiens
attgcctgcggaaagatcgtgtcgcacacgcacctcggagtactctgagatttgcccacctgatgaccttgccagcttgccatcatgcaaagaaaatc

SEQ ID NO: 581746 - DNA, 51 bp, Homo sapiens
ttcaatatcttcacccagcatggagggtgcatctgcccggaagactcagac

SEQ ID NO: 581747 - DNA, 130 bp, Homo sapiens
gcatcatgggatggtattttagacttgccagaacagaacactattcacaaagattgcctgcagtttattggctctatccctgaagaggatgctgggaaattatataacacctgtgctgtgtttgggcctg

SEQ ID NO: 581748 - DNA, 100 bp, Homo sapiens
cccggacggcagccacagcgtccgactcgactcggagggtttctgtgagagacaaattgcttgttaaagatcaatggacagtgcagctgtttccagagca

SEQ ID NO: 581749 - DNA, 71 bp, Homo sapiens
aagacagtaatagcagggaatcattatccttggctgatttgagttcctgagatctagttggtgagagacat

SEQ ID NO: 581750 - DNA, 75 bp, Homo sapiens
gggacgacaggtttcatcaaccagaaagggttatgtaccgaaggactctaccgtgtcagcgggaataaaactgac

SEQ ID NO: 581751 - DNA, 74 bp, Homo sapiens
ggtgatttgttctgtatcagaagacaatatcatgcaagtgtggcaaatgccctggtacctgacagtgtaaagaa

SEQ ID NO: 581752 - DNA, 98 bp, Homo sapiens
cggactggtctgtctgagggagatggtgacaagctcaaggcctgcgagagttgctgggagcctgagcacctttcgtttttcggctcagagaaagccaa

SEQ ID NO: 581753 - DNA, 90 bp, Homo sapiens
ctggagcaaggaaaagatccctggaatatgaagagacacagtatggtagccacacccccaggtacaggtttgcagattccgccagcagca

SEQ ID NO: 581754 - DNA, 99 bp, Homo sapiens
gcttctaaccctcctttatgtgactcagagaaaggagacctcattccaagttccaggattaattctgttctcaacatcagcacctcggttcagctggca

SEQ ID NO: 581755 - DNA, 90 bp, Homo sapiens
atgaaaaaacgtcttgaagagtttcaacttatgagagcactccagttctcgcctgaattaccaaagcagcgttcagggatcctctcagtc

SEQ ID NO: 581756 - DNA, 100 bp, Homo sapiens
ctggatccaggataacggaggctggctccagggttccttgaaaagaaaacaggtagttaacctatctcctgccaacagcaagcgacccaatggctttgtg

SEQ ID NO: 581757 - DNA, 82 bp, Homo sapiens
tactctcctatgatggcagcgaaaacttatcacggttttgcaccttccaaaggacctactgttcggacaaaaaaagtaggga

SEQ ID NO: 581758 - DNA, 80 bp, Homo sapiens
gtgcgggacgcgggcgccaggaccggccgaacgcagaggccaccagcttgggctccccacggagggcagcaagtgggact

SEQ ID NO: 581759 - DNA, 75 bp, Homo sapiens
ccagagacccggcatggtccagacgaaggttttgatacttatagaggactcccttcaatttccaatggaaattat

SEQ ID NO: 581760 - DNA, 90 bp, Homo sapiens
gacggcgttgatatcggtggtaacgacggcctcagcaggcggggaagatgaaaggtgatccgtatgtgaaactttcattgtacgtagcgg

SEQ ID NO: 581761 - DNA, 75 bp, Homo sapiens
acaattctttagaagtggccatacaaacaactgggctgttctgggtgatgaccagttaaatgtatttggagagga

SEQ ID NO: 581762 - DNA, 100 bp, Homo sapiens
tgctggacgacagcgagtacacctgcaccatccagactcccagggaagcagatgagagtgcatggtttgtcagcccatgtctcccccacagttgtatctg

SEQ ID NO: 581763 - DNA, 100 bp, Homo sapiens
tctcagaagccatgcccctcaggctggaacttgccctgtctcctcgcagatgaggatggaggtttgcttctgaataacccttcggcattagctatgcatg

SEQ ID NO: 581764 - DNA, 50 bp, Homo sapiens
cagatgggctgaaggttgtcctgggtgaggtccagagatatatccagaga

SEQ ID NO: 581765 - DNA, 93 bp, Homo sapiens
cgcgaggaggcgcgggaggtgttcgagaacgaccccgagacgccctgggcgctgcctatggcacagccaagagcggtaccggcattgcggcca

SEQ ID NO: 581766 - DNA, 75 bp, Homo sapiens
acggacatcaacgaggcctacgtggagacgctgaaggtgaaatgacaatggatgctctgttggctcgattgaaac

SEQ ID NO: 581767 - DNA, 90 bp, Homo sapiens
gcagcacgggcgaccccccggcgcagcagcatcatcaaggaggaatgccagctcctgagcaggcctcattggtggaggaggggcaaccac

SEQ ID NO: 581768 - DNA, 51 bp, Homo sapiens
ttactccaggcccagcaacatatgagtgaagcctggtgttcggtacagaga

SEQ ID NO: 581769 - DNA, 82 bp, Homo sapiens
cccacacaggagatccaggtcaccagcatccactggagctacaagaatggtgcacacgcttgccagcaacggggccaactcc

SEQ ID NO: 581770 - DNA, 100 bp, Homo sapiens
gaagaccggcggccaatcacagtccactttggacagatgttaagggaagctaaggagaaggagaagcagagactggcacagcagctcacgatggagagaa

SEQ ID NO: 581771 - DNA, 75 bp, Homo sapiens
ttccaaaggtccagagcattcagctgtctcaaatgcagacactcctagaatatgcagagaaatggaaaacttcag

SEQ ID NO: 581772 - DNA, 82 bp, Homo sapiens
caagcctcagtctgtgtgtgcaccctcggagcagctcctgcatctcatcaaactcgatcttgcttctgaaatatctacctgg

SEQ ID NO: 581773 - DNA, 135 bp, Homo sapiens
tgagcagccaacaggccagcagcggcggaaacaccagatcacatatcttattcatcagtcccggccagtgtgcagctgcacacggcggtggagatgcaccactggtgcatccccttctctgtggatgggcagccg

SEQ ID NO: 581774 - DNA, 101 bp, Homo sapiens
gagggtgtacaaatacccctttgaattaattatggctgcatagaatgtcaagctaaccaggcgtccgctacttcagaagagtgtactgtcgcatggggagt

SEQ ID NO: 581775 - DNA, 90 bp, Homo sapiens
cgcccctcggggaagatggcgccctcggggctgaaggcggtggtgggggaaagtacaggtttgcagattccgccagcagcacagcaagct

SEQ ID NO: 581776 - DNA, 97 bp, Homo sapiens
ttcttcctcaacaccagcaccgcagatgttgtcaaggtggcctaccaggaggccaggggtgtcgccatgcagcagtgttgtactgctacttctataa

SEQ ID NO: 581777 - DNA, 88 bp, Homo sapiens
cttggaggcaagcgctgcccgcgagctgagccgccggaggaggagccgcgggcaacgagtggaagtgaagaagctctttccaatgaag

SEQ ID NO: 581778 - DNA, 83 bp, Homo sapiens
tccagtccccgctaccggcctgagcctcgcgttgcagcaagagagatgaagatccacctccgacccttaagccagagactcag

SEQ ID NO: 581779 - DNA, 87 bp, Homo sapiens
ttgtagtgggcatcctcaacttcgtagcctacactctagaccaccaaatcccattgaatttctagcatcttatcttttaaaaaacaa

SEQ ID NO: 581780 - DNA, 75 bp, Homo sapiens
gggaactctactcttcctacgtaattaataaaatgtctccaacatctctaaagatcacactaaggcaactcatgg

SEQ ID NO: 581781 - DNA, 98 bp, Homo sapiens
atattaaagacaaagacattttctgcaaacttgattatttcagtatgagtttaaagccaagaacatcaagaagaagaaagtgagcattatggtttcag

SEQ ID NO: 581782 - DNA, 101 bp, Homo sapiens
tggtggcccaggaggcggcaggacggccaagaccagcgcgagggccctgggcaaggcccgacagaggaaggaacagagccacagagaaaaatgacttgctc

SEQ ID NO: 581783 - DNA, 132 bp, Homo sapiens
ctgcaatgacgagggcctggagtgtgtgcccactgaggagtccaacatcaccatgcaggtgccactgattaatgaacttgaatcagcaatacatcagctgtacaaacagcgagcttcccgccttgtccaaag

SEQ ID NO: 581784 - DNA, 88 bp, Homo sapiens
aagggatgaaggaggactgctagcgtctaaggctcatatctggtgttagtcggccagatgaggtgctcgagtgtattgaaagaggagt

SEQ ID NO: 581785 - DNA, 101 bp, Homo sapiens
tcagttcttgcactggtgtgcaaagagccaacccagaacaagccagatcttcatctcttccagtgtgatgaggttaagtttacaatgcactcagatcttgg

SEQ ID NO: 581786 - DNA, 75 bp, Homo sapiens
cttcgcttggtgtcctcctggcctcagcaacctgacaattctgtcgtgtcccgttcacagccatgaatgaaccac

SEQ ID NO: 581787 - DNA, 75 bp, Homo sapiens
cgcagatgtggacttgaaagaagctgcagcggaggaaggcgagagctgagaagctccagctgctgaaccaccggc

SEQ ID NO: 581788 - DNA, 83 bp, Homo sapiens
taccgcctcacacgcttcctctccagagtgatcaagtgtgacccgcttccgccctgcgctgccagtctcctacctgcaggccg

SEQ ID NO: 581789 - DNA, 90 bp, Homo sapiens
ggcggcggcacgacgacggtccctcagcccagccaccatgagcaccaagcagatcacttgcagcctatgtgcttcccaagctgtatgtga

SEQ ID NO: 581790 - DNA, 74 bp, Homo sapiens
acacagtacggtagtcaaacccccaggccaggtgtggtgtcttacacctgtaatcccagcactgtgggaagcca

SEQ ID NO: 581791 - DNA, 98 bp, Homo sapiens
attaaaaaatgaaccagggagaacggatttgaaacacattgttatagatgggagcaatgttgcaattacgcgcacctatgttggcagcatgcctggtc

SEQ ID NO: 581792 - DNA, 85 bp, Homo sapiens
agtgcagctgcctcagttcttagcgcaggtggatgaaactcagtttaagaagatcctcggctacatcaacacggggaagcaagag

SEQ ID NO: 581793 - DNA, 100 bp, Homo sapiens
tgtcctaatcaggatggaattttcaaggagacagatgctggaaggcccagctgtgagatacagtaagttcaagatgtcagaggccaggccgcccccgctg

SEQ ID NO: 581794 - DNA, 100 bp, Homo sapiens
ctgcgctcctttctggccggaggggttgccctgctgtcagacgtctatcctgagaaaatcttgccggacttgttggctcaatatgacagcagcaaagaca

SEQ ID NO: 581795 - DNA, 100 bp, Homo sapiens
tgcaggcgaaatgtggaaaatttcctagaagcttgcagaaaaattggtgtacctcagcgtcaagggttccacactgttgggagtcgctgcaagaatcgga

SEQ ID NO: 581796 - DNA, 100 bp, Homo sapiens
ggcggttcgctgtgacccccgtgtgctgcacttctatgccaccctgcggcggggcaggagcctcagtctgatccagggcctggagcaaagagcggatggg

SEQ ID NO: 581797 - DNA, 74 bp, Homo sapiens
cgcaagcaggtagcgccgctgctgaagagtttccaaggagagaccatatactccttgacgacagggactaccac

SEQ ID NO: 581798 - DNA, 100 bp, Homo sapiens
tgaggctacccaaccagaggacctggagtttcaggaaggggatataatcctggtgttatcaaaggggctgaaaaactgggtggtagctgaagacgtggtg

SEQ ID NO: 581799 - DNA, 75 bp, Homo sapiens
caccacaatcaaccttattgtggcattgcgccgtacattcgagagtttgaggtgccttatgcccgctcagaggcc

SEQ ID NO: 581800 - DNA, 74 bp, Homo sapiens
ctactattgaagcctgcacctgctgcattgctgttttcctgaagccaagtacaagaagctggagaagcgatgag

SEQ ID NO: 581801 - DNA, 50 bp, Homo sapiens
tactatcctcattatctccaaaccaagttacagatgaggacacagtaaag

SEQ ID NO: 581802 - DNA, 75 bp, Homo sapiens
tgagaagcccttcgcctgcacctggccaggctgcggctggaggagcatcagatccatgctgctgctgactcggag

SEQ ID NO: 581803 - DNA, 90 bp, Homo sapiens
tgcgcgccccgtgcgcttcccgcgggagcaccagttcttcgaggccctggccaacgtcaacattgggagcctcatctgcaatgtaggggc

SEQ ID NO: 581804 - DNA, 90 bp, Homo sapiens
cgtccgccgcctccggaactaaacggggtgaggtcacattcggttatctctaacgttggaaaacgaaacaatccctggaagcctccttgg

SEQ ID NO: 581805 - DNA, 100 bp, Homo sapiens
cggtctggacacagaaagagaagaatgtatcctgtcaggtataatgtcagtgaatggcaagaaagttcttcatatggatcgaaacccttactacggagga

SEQ ID NO: 581806 - DNA, 74 bp, Homo sapiens
tatggacttcagacatgcagggtgacgctcgaaaatggcagcaattgcaggccaagcgctatgcagaaaagcgg

SEQ ID NO: 581807 - DNA, 97 bp, Homo sapiens
gtttactcctcatgccgagatggaccttgggcagctcagttcacaagggggtttctcttctcctggatcttagtctcgtttgcctgtcacctggcct

SEQ ID NO: 581808 - DNA, 90 bp, Homo sapiens
tgtgacgctgctgctggggtcagtttctccttggaccaagatgactgatggaaaactctccacctctacaaatggcgtagccttcatggg

SEQ ID NO: 581809 - DNA, 74 bp, Homo sapiens
tgattgccttaatctcttcaccaaacaagaagggatgtcttatggtgaaattgaaggtaaattcttgggaccta

SEQ ID NO: 581810 - DNA, 118 bp, Homo sapiens
tgattgtggactacaacacaacagacccactgatacgctgggactcgtacgagaacctcagtgcagatggagaaggcagttgtgaaaaacttcaggacaaaaatgtttcatttaagga

SEQ ID NO: 581811 - DNA, 100 bp, Homo sapiens
gctcgatctaggttctgcggcacgggatggcggaggcgcctcctgtctcaggtgttgacttcaaaatcaaaactgtagagctaagaggaaagaaaattag

SEQ ID NO: 581812 - DNA, 75 bp, Homo sapiens
taaccaaatattatggatcctatctgaagagttgcatgctgagaatttgaaaaatgaagatgatgtagacactgg

SEQ ID NO: 581813 - DNA, 75 bp, Homo sapiens
cacaaacttgaagatggatatcagctacagactttcctgagtcagtgtaggaagaatgatgatggagacacagtt

SEQ ID NO: 581814 - DNA, 100 bp, Homo sapiens
cggaggaggtccaaaaggccaagaccccgacgccagagccctttgactctgagaccagaaagcttgctatggcatcgttcaggtgccaacgggaccctgg

SEQ ID NO: 581815 - DNA, 100 bp, Homo sapiens
aaggtgtcatttctaagattatcatcttcagcagtggtggtgaagttaaatgtgaagaactggaagaggaggcaacagtatttggggcaagaagtttgag

SEQ ID NO: 581816 - DNA, 88 bp, Homo sapiens
cggcgccggcagcggacagctcggacagcgcccagggccggagcccgagcccttggaggacctcagcagccatgtcgaagccccatag

SEQ ID NO: 581817 - DNA, 83 bp, Homo sapiens
ccctggggctggaaattgcgctggaccgtcgccttgctcctcgccgcggcggggactgcaggggacagagcacaggaaaggga

SEQ ID NO: 581818 - DNA, 100 bp, Homo sapiens
atttattaacacctcttgccactcagctgacatatgaaggactcattgatgaaatttatggcattcagaacatatacgctcaacggcaagaaagtggaag

SEQ ID NO: 581819 - DNA, 50 bp, Homo sapiens
catggatatctctactcgctccaaagcatttgacattgtgcagcaaagaa

SEQ ID NO: 581820 - DNA, 75 bp, Homo sapiens
ctgggccaaagcagtgaaacgctccatgaattgagttaaacatgaagtttctggagagacagtggtatttcaagg

SEQ ID NO: 581821 - DNA, 99 bp, Homo sapiens
ggggcttcacctactacaaggcaggcaagcaggaggtgaccgaggcggtggcaggcaatttctaaaccgggatgacattggcatcatcctcatcaacca

SEQ ID NO: 581822 - DNA, 101 bp, Homo sapiens
atacccgcggtgcaccgcctgctgggagcgccgctcaaggcttttgatgaagccattgctgaacttgatacattaagtgaagagtcatacaaagacagcac

SEQ ID NO: 581823 - DNA, 102 bp, Homo sapiens
cccaggtgtaagcgcagaaagcaggcgaacccgcggcgcaataacgttcaaatctgaacatcaatgatgtactagggaactactcattgactcttgttgatg

SEQ ID NO: 581824 - DNA, 90 bp, Homo sapiens
gccaggtccggtgttggggtgtccgagttgccgccggagaggagtggcctcgcccgcttgaacgttctcaggttgaccagctgctgaata

SEQ ID NO: 581825 - DNA, 83 bp, Homo sapiens
gccatacccaataaccaggtgcttggcaaaatcgagcgggccattgtggagacctttggcgacttggcctttggcgacatctt

SEQ ID NO: 581826 - DNA, 75 bp, Homo sapiens
ggagtgtgttgctgaagaggaattgcctcacctgctcaccgaaaggatatgggacacagcaggacaggaacggtt

SEQ ID NO: 581827 - DNA, 99 bp, Homo sapiens
agctcctggccctggccctgatcatcctgctgggcttcgtccagatcgggaagggggtgagcccctccagactccgaataggagatcaagagtttgatt

SEQ ID NO: 581828 - DNA, 88 bp, Homo sapiens
taatggaaaatcgcttggttaaaacctgacacttttaacagggtgtcaaattgagaaccaggtagatccccaccacctacagtaaaaa

SEQ ID NO: 581829 - DNA, 100 bp, Homo sapiens
ggaacaggaggtgaaccatcgagagattctgcgtgagcacctgaaggaagagaaactccatgccaagaaaatgaaggcactaactcagcgacttggtaga

SEQ ID NO: 581830 - DNA, 50 bp, Homo sapiens
cttgcagaaggaatctcactctcaggttttgagcaaaattttggactgtg

SEQ ID NO: 581831 - DNA, 83 bp, Homo sapiens
agggagtggagcttggtttcgggatctcggtgctgcagacggcgagacctcctgcacaggaatggtcctcgtccgaagtgaga

SEQ ID NO: 581832 - DNA, 75 bp, Homo sapiens
gggatgccttcgcgtcttctcttccctcgggtgacttgagcactattcctgatcagagaactccagttgcttcaa

SEQ ID NO: 581833 - DNA, 75 bp, Homo sapiens
cttctgctgttgctcttctccgccgcggcactgatccccacagaatttcagaaactgtggaggagtgtcactgta

SEQ ID NO: 581834 - DNA, 49 bp, Homo sapiens
ctgggaaacatcattaaatcgctcggggcccccagttcccgccccagac

SEQ ID NO: 581835 - DNA, 50 bp, Homo sapiens
tatggggagaccgaccagggactcaggtcacggtctagatcacattctcg

SEQ ID NO: 581836 - DNA, 129 bp, Homo sapiens
taaagacccaacagaatacactggacctgaaagttatgtggctcaaatgattgtggctgtgtttgatgtggacaagaagaaagggttgactctgattgagctctgggaaggcctgacagtggatgacgt

SEQ ID NO: 581837 - DNA, 96 bp, Homo sapiens
attaattatcagtatatgtgaaatcatgtccactgatcaagattcctgacattcagacaactgacttgtaactgacttataactgacttgtaatac

SEQ ID NO: 581838 - DNA, 100 bp, Homo sapiens
tgtgcttctcaggatctgagccaccgcccatgaacctaccagctccggctcccaccttgtctttgtcccgtcattgagagatgtgcaccatgagcctgtg

SEQ ID NO: 581839 - DNA, 100 bp, Homo sapiens
accccactgctggggtggtggttccaatgagacagggcacaccaaactccatctgcctccaggccctgccttctgcctgcacattctgccctgatttccg

SEQ ID NO: 581840 - DNA, 100 bp, Homo sapiens
tgagtttgtggcagacagacttatgctggaactgggttttagcaagtgcaaaatggcaactcttaaggaaaaactcattgcaccagttgcggaagaagag

SEQ ID NO: 581841 - DNA, 96 bp, Homo sapiens
ccagatggagaattatttgctgttggatcgtttcatactttacgcttgtgtgataaaactgggactttgctaccaggacttgctggcccctctggg

SEQ ID NO: 581842 - DNA, 83 bp, Homo sapiens
acataaatacttgactcccatggccagcacgaggatcaggaatcaggacccagatgatgtggtaccagttggccaaagaagag

SEQ ID NO: 581843 - DNA, 75 bp, Homo sapiens
ccagcaatgcctccatgaacaatctcacccaattactctgctcaggtaacaccgtgattcacttagatcaagcat

SEQ ID NO: 581844 - DNA, 90 bp, Homo sapiens
cgccgccttgctgctgctcaaagctgctgccgccccttgggctaaaaggtaagtaaggaggtctctgtaccatggctcgtacaaagcaga

SEQ ID NO: 581845 - DNA, 98 bp, Homo sapiens
ttcgatgagctctcggattccttatgcagagtggccgacttgctgaccatgccactgcctcggtacggctccgggcagcagccactgatcctgcccca

SEQ ID NO: 581846 - DNA, 100 bp, Homo sapiens
agagcagcggaaaatgatccagtcacagcacctgtgagaatatgaacttctcttggaggaatgaatgcaaccagtgtaaggcccctaaaccagatggccc

SEQ ID NO: 581847 - DNA, 100 bp, Homo sapiens
aggcgattccagagagcggcggaaaggataagcctcgacttagaagctaccgagttaccctaagaaagtttctgatgaagaattgaaaagaagagtagct

SEQ ID NO: 581848 - DNA, 90 bp, Homo sapiens
gcggatgccctgcagtacctgcagaaggtctctggagacatcttcagcagctcttccattcctatcctcctgcagtgtcgggcatccccc

SEQ ID NO: 581849 - DNA, 100 bp, Homo sapiens
aaaaccgacgaatctttacctacactgactctgatagatacaccaatttggaggagggcagcaggatgggtgtggaagcagtgatggcacttttggaggg

SEQ ID NO: 581850 - DNA, 100 bp, Homo sapiens
ctcgtctgctccaggggcaggctggttgctagaacacatcacgtccaagcagaaagctacctggtgtacaacatcatgagcagtggagagattgaatgca

SEQ ID NO: 581851 - DNA, 100 bp, Homo sapiens
accacgcacatggtggcaggcgccgtggcagggatcctggagcactgcgtgatgtaccccatcgactgcgtcaagatgctgctcagactctcgctctcgc

SEQ ID NO: 581852 - DNA, 100 bp, Homo sapiens
agaaatgctcactgcaaaagtgaaaggttcctatatgatagtggactcttcagatcacgaccctggagaaaaagccagacttcagctgcctacaatgaag

SEQ ID NO: 581853 - DNA, 100 bp, Homo sapiens
cctaaggagcggaccccgcatcttcgccgtctggaaaggtatcgagaaccttccctgcgaacttcagaggaacttccagctgatgcgagagctggaccag

SEQ ID NO: 581854 - DNA, 122 bp, Homo sapiens
cggagagctcaagctcatcgacttcggttcgggtgcgctgctcaaggacacggtctacaccgacttcgacgcaagagtgagccatggagctacgtgtggggaacaagtaccgcctgggacgg

SEQ ID NO: 581855 - DNA, 125 bp, Homo sapiens
aaaggagcaagagcaagatcaccgtgacatccgaggtgcctttctccaaaagaactgaagcgctgcggcatggcgcgcgcctgcctccaggccgtcaagtacctcatgttcgccttcaacctgct

SEQ ID NO: 581856 - DNA, 50 bp, Homo sapiens
ctccaccttttggtgattatgcacagcagccctagcaaaccaagagtgag

SEQ ID NO: 581857 - DNA, 101 bp, Homo sapiens
ccgggttgcctgtcaaatcaaggctatcgcagaataaatcccgccgcctgccgcgaagccccggcgcaccgcaaacttcattgttgacctcctgtactgga

SEQ ID NO: 581858 - DNA, 75 bp, Homo sapiens
ggctgggagcgtgctttccacgacggtgacacgcttccctggattgggagtcctccctcctgaacctgatctcct

SEQ ID NO: 581859 - DNA, 74 bp, Homo sapiens
cgcgcaggtgctagcggccccttcgccctgcagtattggtaaaggttttcaaggtgtcatgaaaagatggggat

SEQ ID NO: 581860 - DNA, 75 bp, Homo sapiens
tctctgtgctgaaatcagtcccactttctgggaaaatttgttggcagattgtttgcagggttgttttgtggtgac

SEQ ID NO: 581861 - DNA, 96 bp, Homo sapiens
ctcagtaccagagacagaagcagatggattcgtccttttaggaggaagatgaaggctcgtgctcccccacctcctggaaaggctgccactctgcat

SEQ ID NO: 581862 - DNA, 82 bp, Homo sapiens
catacgactgaccctggagctgaaggccaggttttgcagtggtctgagatgactttgaagaagccaaggaaattttgacaaa

SEQ ID NO: 581863 - DNA, 100 bp, Homo sapiens
ctaccttggccttgagtagcaggggcctggtccccacagcccacaggatggaccaaagggggcaggatgccaggccaaggtggagcaagcggtggagaca

SEQ ID NO: 581864 - DNA, 132 bp, Homo sapiens
tcagccatagtcacagtgagaaggcgacaggaaccagctcgggggccaactctgaggagtccactgcagcagatggccgccaagaacgagtcatgtttgacaaaattacatctcgaatccagaagctttgtt

SEQ ID NO: 581865 - DNA, 100 bp, Homo sapiens
acggagcctgtcagtggccccaaagtggagcggcggccttccaggaaaccacccacgtccccttcgattaacaagcacaagccctggctggagcccacct

SEQ ID NO: 581866 - DNA, 82 bp, Homo sapiens
ctcgctccggagccgctgcacatttcggttttaaaatcaaagatgggaaaatcggagaaaattgcccttccccatggccagc

SEQ ID NO: 581867 - DNA, 90 bp, Homo sapiens
gaacagagccgggagttcaagaagaacactccagagggagaagatgtcaaccggacactagaaggtggaaggaaacctcttcattatgca

SEQ ID NO: 581868 - DNA, 98 bp, Homo sapiens
cagcatggagagatagataaacggctggagtcacatcagaagccgcgcagactatcaccacggctcctgatgcctcagggcctgaagcaaaagtccag

SEQ ID NO: 581869 - DNA, 74 bp, Homo sapiens
ccttggtcctagcacccactcgagaattggctcagcaggatgccttcgtgaagatcgtgaggcacgagggcacc

SEQ ID NO: 581870 - DNA, 100 bp, Homo sapiens
ccgagaccgtgaccgagagcgtgaccgagagcgcgaatatcgtcatcgttagaagggacagcatcgtggccgagctggaccgagagatgagcaggagcgt

SEQ ID NO: 581871 - DNA, 100 bp, Homo sapiens
attcaaaaacactatcccagggagtgcaagcttagagcgtctggccaagaatcagaggaagtggtgtaaggagaggatgaggcccgtgaaaaaggcactg

SEQ ID NO: 581872 - DNA, 87 bp, Homo sapiens
ttgtttgaggccttcacagcatgtggttttgtgcaggttgcttataaaaagggagtcaaacatctttctgctcttcttgatccagag

SEQ ID NO: 581873 - DNA, 99 bp, Homo sapiens
caggattcagactaaaaggaagagatgtgtacagagcaggaattgctacacactttgtagattctgaaaaggtaaagtcagtgataaatcttttgtttg

SEQ ID NO: 581874 - DNA, 100 bp, Homo sapiens
cccgggccccccagcatgaagaccccggcggacacagctgctcagatggaagataaaaagccctttatcctgtcttccatgaggcttcctctcctggaca

SEQ ID NO: 581875 - DNA, 80 bp, Homo sapiens
gtcctttccaacatccagagctgcatcattccttggggcaaaatgtggacaaggaaaatgtgctctcactggccagagta

SEQ ID NO: 581876 - DNA, 49 bp, Homo sapiens
gtcgcagcgagctggagccgccggagataccatgctgtgaagtccaggc

SEQ ID NO: 581877 - DNA, 75 bp, Homo sapiens
gcggaagctggtgggcactcagcaccctctgcttaccacagccaggatcttacacatttgttccatggcttctca

SEQ ID NO: 581878 - DNA, 83 bp, Homo sapiens
agcgcatgcagctgctgctgaccctggccttcaaccccgagccgctggtgctacaggaagtgggaaaactcttgcctttgcca

SEQ ID NO: 581879 - DNA, 98 bp, Homo sapiens
gccgacaggggcctgggctgtcccgagccgttcaaagaggaaatctcccggaggtttaaggctcagcaggatcagctggtcctgatcttcgcaggcaa

SEQ ID NO: 581880 - DNA, 78 bp, Homo sapiens
ggcgcgcgggggcgacgcgcgggaacaacgcgagtcggcgcgcgggacgaagggaccagtccaacgtcaggcggatgc

SEQ ID NO: 581881 - DNA, 118 bp, Homo sapiens
ctgaaaggagagacacttgtgaacattcaagtgaagcaaaagcctttcatgattataaaggcctaaagaatgtatttgacgaagcaatattggctgccctggagcctccagaaccgaa

SEQ ID NO: 581882 - DNA, 101 bp, Homo sapiens
cagcgccagcggcgcagcgtctatggcaccgcggagttcaaggagcctacgccgagcctcaccgcggaaggagagttttacatggaagtggcttacagaaa

SEQ ID NO: 581883 - DNA, 82 bp, Homo sapiens
aggaaaacagctcagagtttccactgattcttcattatgtgagacggtttaagcggaagcatcttactgccattgactgcca

SEQ ID NO: 581884 - DNA, 101 bp, Homo sapiens
gacgccctggtgcagtacgacgaactggacgccctcttctctcagtatgtggtcaacttcggggccggggaaactgttcaggttccattatcaaaacgagc

SEQ ID NO: 581885 - DNA, 100 bp, Homo sapiens
ggtgaaactgactggaagctgaaggtggcagtgagctgcacgcaacagctgccggctctgggggtgctggctgccagctgctgcgccccccatgtagaag

SEQ ID NO: 581886 - DNA, 109 bp, Homo sapiens
gggaaaagaggaactgttgatatagccagagcccgaaaagaagattactctgcaacagctaaaggtttgagcacaaaatgaacataattagggaaaataaggatctggc

SEQ ID NO: 581887 - DNA, 82 bp, Homo sapiens
ccgacatcaagttcaagagcgcgggacccggtcagaagctcaaagagtccgtgggagcctcattttacagatgaggaaactg

SEQ ID NO: 581888 - DNA, 100 bp, Homo sapiens
cgagtcagtgactgaagcgcccgtccattccaaggtggctgtacttttgatgatggtccaggggcctgtgattaccaccaggatctgtatgatgactttg

SEQ ID NO: 581889 - DNA, 75 bp, Homo sapiens
gcagaggcgcctcgggcaggaggagggcggcttctgcgagggcagcctgagaaggagttgagccttccaagaaga

SEQ ID NO: 581890 - DNA, 90 bp, Homo sapiens
cggcaagaaaaatgccagccagaagaggcgttcgctgcgcgtgcacattccgtggacagaggactgcagaaaatcaacctatcctccttc

SEQ ID NO: 581891 - DNA, 83 bp, Homo sapiens
gttctattttccctcctcaaactgactttgcagccacggagaggttcccgtgtcagtggctatgatgacacctcaagttatca

SEQ ID NO: 581892 - DNA, 74 bp, Homo sapiens
ggctcacagaagtctaacctgcccgggacgcccgcaccaactcctgcgcgcgagaagtatatcagagaattccc

SEQ ID NO: 581893 - DNA, 100 bp, Homo sapiens
gggcagaacgaattcagtgatatcattaagtccagatctggtatataatgtttacatggcagggaggcagctgtgttctaagcggtaccgggagtttgct

SEQ ID NO: 581894 - DNA, 75 bp, Homo sapiens
aaggaagcttcaggtggagacagcccgaagaggcggggtttcaccatgttgcccagactggtcttgaactcctga

SEQ ID NO: 581895 - DNA, 100 bp, Homo sapiens
cttccatggcctctcgtcggcagtgaagctcaagttgctactcgggacgctgcacctcccgcgccgcacggtggacgagcttcgagagctgtgcccagga

SEQ ID NO: 581896 - DNA, 90 bp, Homo sapiens
aggagcatttccaggggaagcgtgggctggaccaggatgtgcgggtgctgaaggtagtcaagcgatgtgcattttgtaagcactttggag

SEQ ID NO: 581897 - DNA, 83 bp, Homo sapiens
cttcgcaagaagcaccagttcaagtggccctcagggcatccccgttttcgcttcgaggcagagaatgggccgacaccatctcc

SEQ ID NO: 581898 - DNA, 50 bp, Homo sapiens
ctcctgcctccgcctcccaactcagtaaacgctctgccactgacctgtgt

SEQ ID NO: 581899 - DNA, 100 bp, Homo sapiens
gaagctggatgcactggagatagcatgtgaggtccgggagatccttgaggaaccactcgttttgactattattttatcactctttgtgaaacttcacaat

SEQ ID NO: 581900 - DNA, 98 bp, Homo sapiens
gtcagacaagtgcactcaacagaacggcccttcaaatgtgagtggaatcccccaaagaaggtaaagggagcaagccttccccactgtctgtgaagaac

SEQ ID NO: 581901 - DNA, 76 bp, Homo sapiens
ctagtatcgcatgtccactatccagaacctccaatctttcggttcgagaacatcatcgaaaattaagaaaggaggc

SEQ ID NO: 581902 - DNA, 80 bp, Homo sapiens
cagcccgccacatcaccctgacctgcttacgcccaggtgttacagcacatgaaggccgtgcaggcagatcaggagcggga

SEQ ID NO: 581903 - DNA, 100 bp, Homo sapiens
cggccgctttgttgctcccggccggcctgcacgatgcacacgccggacttcgcaggcccagacgacgcgcgcgcagcaggtgacagcagggacatgtctc

SEQ ID NO: 581904 - DNA, 100 bp, Homo sapiens
ccctgtgatccctcaagactggtccacggagtgtatgaccacaaacagccatcaagctggagtcttttgtgcaattgtttctcaccctgctgattctgtg

SEQ ID NO: 581905 - DNA, 75 bp, Homo sapiens
attttggcattgacatttaattttagggtcctttatatagaagggagagtagaactgataaatttcaaacggaag

SEQ ID NO: 581906 - DNA, 74 bp, Homo sapiens
gcagcacatggtgaatgccacacccttcaagattgctcgaggccaggacatacttccactatatggtgacacca

SEQ ID NO: 581907 - DNA, 83 bp, Homo sapiens
atggggttgcccagggggccggagggccagggtctcccggagagtccactgccagctggttcgactctttgcacgaggaattg

SEQ ID NO: 581908 - DNA, 98 bp, Homo sapiens
ggagctgcagtcggcttccgcggggcccagcgtgagtctctacctgagcgaggacgaggtgcgccggctgatcgggccccgtggttatgaatgtgctt

SEQ ID NO: 581909 - DNA, 100 bp, Homo sapiens
ccattttaccagtgtgcagaagttctcgaatcattctttgtacagaaattgaaaggcttcaaagctagcagtgttctaagaacggaagcatctgggctgg

SEQ ID NO: 581910 - DNA, 74 bp, Homo sapiens
aaacattcatggagggggaagacggcccccaagttacatgaactacctgctagactcacaccccagcaaaaata

SEQ ID NO: 581911 - DNA, 100 bp, Homo sapiens
tcccacccccggcggcggcacgatgccctttgacttcaggaggggaaggtgctattaacctggctttggctcagaaccgaagccaagatgtgagaatgaa

SEQ ID NO: 581912 - DNA, 100 bp, Homo sapiens
cttctatgaagccagagatggaccgcagcgccagtgcttaggactactaagtcgctttggtggctctgacagactgcgtcagtttaaatttcaagacgat

SEQ ID NO: 581913 - DNA, 100 bp, Homo sapiens
cttaataaactggggaccaaaaatgaacctgtgttaaaacctggagacaggatggttccaatccctatacattgaagctttgcttttctacatcatccca

SEQ ID NO: 581914 - DNA, 100 bp, Homo sapiens
caccaacaacaccacaataatccacagccaaggccgtgacttggcgagcacgaccctccccgggtaccctccacacgtcccccccgctggacagggcagc

SEQ ID NO: 581915 - DNA, 75 bp, Homo sapiens
ctgcggaagctggaggagaaacaagcgcgaaaggcccagcgtgagagtttgtacagatgatgactgcaaagtgaa

SEQ ID NO: 581916 - DNA, 100 bp, Homo sapiens
tgacattcctgaagccgaaggtggcagcatggaggtttggtgcacctcgatttggaggaagtagggcagggcccttatctggaaagaagtttggaaaccc

SEQ ID NO: 581917 - DNA, 100 bp, Homo sapiens
ggcgagatggacattctgaaatcagagatccttcggaagcggcagctggtggaggacaggaacctgctggtggatatggctttagttgcccctgaagctc

SEQ ID NO: 581918 - DNA, 60 bp, Homo sapiens
gaaggatcaaggacggatgatgaagtagtacagagatatcagtattacctgcaagtcaaa

SEQ ID NO: 581919 - DNA, 100 bp, Homo sapiens
ttcaacaaccacgggaagccgcggctctccaagttctaccagccctacacattccacttcttccatctattacatctctgagtctaaatgaaaatgaaga

SEQ ID NO: 581920 - DNA, 100 bp, Homo sapiens
gaaaagatggaactccaggaaatccaactcaaagaagctaagcacattgcagaagaggcagataggaagtatgaagagggactcggagatcatgcagcag

SEQ ID NO: 581921 - DNA, 75 bp, Homo sapiens
ggggtgcgcgcctgcgacctgcccgcctgggccactcttcacctccaccatgagcctggacatccagagcctgga

SEQ ID NO: 581922 - DNA, 101 bp, Homo sapiens
ggggaagtcaatggtgtcattgcagaggtacttggaaggctccatcgcccctgaagacaaaggaagctgctcattgctgcctgggcctccatttgccagag

SEQ ID NO: 581923 - DNA, 98 bp, Homo sapiens
ctacccgagcggcggcggcggcagcagcggcagcggcaagcacctccaaaccaggttgcagagaaggtggcctccagaatcgccgagggcttcagcga

SEQ ID NO: 581924 - DNA, 74 bp, Homo sapiens
cgctagccctgcagacagaggtgtgctgacgacctgctacaacagaaggaatctaagggaggaaattatcaact

SEQ ID NO: 581925 - DNA, 51 bp, Homo sapiens
ggagctggaggaggagccgccgccgccaggcccagtgacgagcaccatccg

SEQ ID NO: 581926 - DNA, 100 bp, Homo sapiens
aagtgagcagtccagaaagcggcttatcgaacagagccgggagttcaagaagaacactccagaggttctcagaggcactgtgactgacttccctggattt

SEQ ID NO: 581927 - DNA, 82 bp, Homo sapiens
gcgttggctatgtgcccatcacaggttgtgaccgagattcccgacgagagagactgaggggaagagaggaaggaggggcggg

SEQ ID NO: 581928 - DNA, 88 bp, Homo sapiens
gtcaataagaagatgtaaagaaataaatatttccttcattccacatgaatctcaggctgagtatgagtttatcagctctggtctctac

SEQ ID NO: 581929 - DNA, 100 bp, Homo sapiens
gaaaaggctttgagaaattttgagtcctcgagtgaatgggcggatctcatatcttcacttggcaaactcaacaagattctggctacattggagattggtt

SEQ ID NO: 581930 - DNA, 75 bp, Homo sapiens
ggcgtccctgagagaaattaaatgggaggtacagaatcgtatcccttctggaactatattaaaggccttgatgga

SEQ ID NO: 581931 - DNA, 50 bp, Homo sapiens
gcgaggaactccagaatacaagtgaaacccagggccccaggaaacctgac

SEQ ID NO: 581932 - DNA, 88 bp, Homo sapiens
ttttattaaaagttaaaactgaaattgaagaagagctaaaatctctggacaaagaaatttctgaagaggagaggagacgccgtgagcg

SEQ ID NO: 581933 - DNA, 100 bp, Homo sapiens
ccgggacctcaccaagcaagtcaccgtgcatgcaaggacactgacaactctgagggaggttcctttggcttgagtgacgagcgcattagtttgggtcagc

SEQ ID NO: 581934 - DNA, 75 bp, Homo sapiens
cttcccaggaccctcagggagagcgggcagccttccaggtggacaggaatcccgttctgcttccagaagtggaag

SEQ ID NO: 581935 - DNA, 75 bp, Homo sapiens
aagagtttctgcgcttgaagtcctccctgatagagttggaattaagtagactggctggacagattcgaaggttgt

SEQ ID NO: 581936 - DNA, 120 bp, Homo sapiens
aagatttaacattccaacacataaaaattatttatccaacagctcctcccaggaagtaacagctagcagtcgccactatgttgacaggctatttgaccctgatccccagaaagttctaca

SEQ ID NO: 581937 - DNA, 100 bp, Homo sapiens
tctacattgacctgcttcaaaagaacaggaccccgtacgtcactaccactgtctctgctcacagtgccaaggccctgcatcatggaaactctttctaatg

SEQ ID NO: 581938 - DNA, 90 bp, Homo sapiens
ttaggtctgttagaggaagacgacgagtttgaagagttccctgccgaaggtctgttgccacagttattgggagttgccccagagaaggcc

SEQ ID NO: 581939 - DNA, 76 bp, Homo sapiens
ccgcggacctcgccccgggacagcgaggagctgagggacccttccctgaagaggaaggagaaggaatatgagcatg

SEQ ID NO: 581940 - DNA, 75 bp, Homo sapiens
cgccaagaccgctgcagccgctggctgagcaggagtagggctgattggagccattgtacagtgtcgggaacatac

SEQ ID NO: 581941 - DNA, 99 bp, Homo sapiens
cgaaggccttcctttttcgtctgggctgccaacatggcatggagtcctgtggcatccacgaaactaccttcaactccatcatgaagtgtgacgtggaca

SEQ ID NO: 581942 - DNA, 100 bp, Homo sapiens
ctaaacctggcagaactacaggatctgctgtgtcaggccaaggtccggaccctatttgtcagtggccttcctctggatatcaaacctcgggagctctatc

SEQ ID NO: 581943 - DNA, 75 bp, Homo sapiens
ccccaagcaacttagaatgcagcttcagcagaggctgcagggccagcagaaggaagaggcccagcagaagggact

SEQ ID NO: 581944 - DNA, 50 bp, Homo sapiens
cagaaccttagtcccgggaaagaatgccgggacattctgcttcctgtcat

SEQ ID NO: 581945 - DNA, 74 bp, Homo sapiens
gtgtgttgatcttggcttgattcagtctgccttgtaacagggacagagcagaatgggctgatatagatccggtg

SEQ ID NO: 581946 - DNA, 96 bp, Homo sapiens
agaacaactgcggaatcagattcagatgatgaacaatggcctcctccaacagccctctgccttgatgttgctcccctgccgcccagttcttacttc

SEQ ID NO: 581947 - DNA, 75 bp, Homo sapiens
tcatgtccagagtctggagccggaccccggcacgcccgggagtgagcggacagagagaatggcttactacacctc

SEQ ID NO: 581948 - DNA, 100 bp, Homo sapiens
gtcgcgatcgaagagtccccccaagtctcctgaagaggaaggagcggtgtcctcttaagaaaatggcatacttttttgatgcaccagagatggaccatct

SEQ ID NO: 581949 - DNA, 96 bp, Homo sapiens
tcgagagacctgcgtacattcggggtgccagaaggaaagcatagttgcatgctgctgtcaccaagatccaggttccaaggcctggttttaattaca

SEQ ID NO: 581950 - DNA, 75 bp, Homo sapiens
tggcggcttctgtccgctccgcggagggaagcgccttccccacaggtcttgttcagcgttgcgtaatcatccaga

SEQ ID NO: 581951 - DNA, 100 bp, Homo sapiens
gttcatctaccacgctttcgtgtcagagcagagcatggccatgggaacaagtgccctcagcaagaagccgtggtagaccctgcctgaaaactttcatgat

SEQ ID NO: 581952 - DNA, 75 bp, Homo sapiens
gccctccgccttcagccctccgcgggttcgatcccggccacccagctttctgaaaaggatatgagcatgctcgag

SEQ ID NO: 581953 - DNA, 80 bp, Homo sapiens
cactttagaccctccacctaattgcagaatcgtccgcactaaagtcccctgcagcgtgaccatgtcgagaccccggaaga

SEQ ID NO: 581954 - DNA, 112 bp, Homo sapiens
cttatcccttaatctttgcaagcatttacaagattcttcatcttttagggaaagatagtgttcagttgctggtacatcaggaacgtctctatcaagaatacaatttcagcaa

SEQ ID NO: 581955 - DNA, 82 bp, Homo sapiens
gggatcagaggtccctggagtttctgcttcctccagagccagatttggaatctgagcatgatgagaggactcaagaggccag

SEQ ID NO: 581956 - DNA, 100 bp, Homo sapiens
ttcctgctgctattgcagaatttttgactggagactatagtaggttacaggaggttccagtggcatcgggaagtgcattgctatcgagtgctataaacaa

SEQ ID NO: 581957 - DNA, 100 bp, Homo sapiens
ctgcacccttctgtacccatcagtaacgatgaggtgggaaactacctccgtatgttccgaggttctctgtacaagagatacccctcactctggaggcgac

SEQ ID NO: 581958 - DNA, 75 bp, Homo sapiens
tctctgtttatttagaagacacagactaacaattttagatggcctgtgtcacttgtgaaaatgaagattcagctg

SEQ ID NO: 581959 - DNA, 98 bp, Homo sapiens
tggacacagcaatatctctgggctttcacagtttcaccagtgatcattaaagaatgggcagcttacaaaggaaagtctcctcaaaccccggaactggt

SEQ ID NO: 581960 - DNA, 80 bp, Homo sapiens
aatacaaagaagtaaaagtggtggctaatgtcttgggcgtctttggtactggcttttttaggggtctgcctggggattac

SEQ ID NO: 581961 - DNA, 82 bp, Homo sapiens
aagaactgaaaactctgagtgatgttcagaagtttgcagagataaatgggaaatcctcattgacgattcaatttgttgaagg

SEQ ID NO: 581962 - DNA, 75 bp, Homo sapiens
tgacagcccaagatactaccgggcaggacacgtcctcacagaaaattgaagacttgatggaaatggtgcaaaagc

SEQ ID NO: 581963 - DNA, 100 bp, Homo sapiens
cgtggaggagctgtgcagccgcgaggaggcgcgggaggtgttcgagaacgaccccgagacgatgcagggggaggcacaccctagtgcttcccttattgac

SEQ ID NO: 581964 - DNA, 100 bp, Homo sapiens
ggggagagccccacagagctattccagcagcactgtgtgtcttggcttcggagcattcagcaggtgttacagctgtttgcagacaaggtcccaaagacag

SEQ ID NO: 581965 - DNA, 82 bp, Homo sapiens
cctgaacgaagtggccaagaaggagaagcagctgcggaaaatgctagaaggccctgggaggagcggggacactgaggacctc

SEQ ID NO: 581966 - DNA, 87 bp, Homo sapiens
cggggccccgggatctcggctgtccttcctcccggtgagggagttcaatggtcagcactttattttggaggaagcaattacagggga

SEQ ID NO: 581967 - DNA, 83 bp, Homo sapiens
gaaagcaggaggaggtggcggcggcgggaagatattttgcaagaacgaggctcaaggatgtgagggacacagtattgacagct

SEQ ID NO: 581968 - DNA, 80 bp, Homo sapiens
cccaagaaacatctcaccaatttcaaatccgtctgcgctcctcagaccaccggcaggtgaacagcctgatgcagaccgag

SEQ ID NO: 581969 - DNA, 82 bp, Homo sapiens
gcagatgttgtcaaggtggcctaccaggaggccaggggtgtcgccatgttggtcgcattatgtttcagctcttctcagacat

SEQ ID NO: 581970 - DNA, 100 bp, Homo sapiens
aaagcatccccgaggaggaagacgaatcgttaaacatcttaggtcaggaccctgcccgctcagccggcttccaccccagtggctctgtcctggctgtggg

SEQ ID NO: 581971 - DNA, 83 bp, Homo sapiens
aaaaaagattcagattacgaggattatggatgaacgtaacagacagccaccttttgtggtgacattggatgaggtagagctga

SEQ ID NO: 581972 - DNA, 75 bp, Homo sapiens
gccgccgcctgccctcagccgcccgctggccgggagcggagcccctgtgggtatgcaggtgccttgagagcttca

SEQ ID NO: 581973 - DNA, 90 bp, Homo sapiens
cccagaataaagccaagctcatctctgagacccggaggaggttcgaagctgagtatgtgacagaactgataaatttcaaacggaagagag

SEQ ID NO: 581974 - DNA, 100 bp, Homo sapiens
caagcactcaatcagaaagagagctccaaggagaaaatccagaagagcaaaggcgatgatgccacattacctgtctcattcaggaacgtcgcctgataac

SEQ ID NO: 581975 - DNA, 74 bp, Homo sapiens
gactacatggcatctaccatagggctttggagtttaacccttctgccaatccagaggcaagcacaatattccag

SEQ ID NO: 581976 - DNA, 81 bp, Homo sapiens
gtccagcggcggcggaggctggcgctgtcctgagagggagggctctgtgcggaagagagttcacccagggcatgatcttac

SEQ ID NO: 581977 - DNA, 96 bp, Homo sapiens
tccaacatggaccgggagatgatcctggcggattttcagttgttgaatgttgggtcacgaagatctcaacctggccaaagaagagaacccagaaag

SEQ ID NO: 581978 - DNA, 100 bp, Homo sapiens
ggagctggaggagggaatgatattcagtggtgtttttctcaggtgaaaggagcagtagatgatgatgtagcagaagggtgtggctgggaatcctatggtg

SEQ ID NO: 581979 - DNA, 89 bp, Homo sapiens
aggccagcacagagcgttgggtggagactggctgaggcaggggtctgccagtgagattgagatacactctgtgcagttttagagagaga

SEQ ID NO: 581980 - DNA, 100 bp, Homo sapiens
gatgcgcccgtgatacaccaagaaatgattctatccgtggtcctgaaccagttatgtgtgttgcatgagaaaacgccagtaagtgacagagtcaccaaat

SEQ ID NO: 581981 - DNA, 74 bp, Homo sapiens
gaggtgcaaaaacgaaagcaactggagctcagagttgatctctctaatgtattagatcttcatgcctttgatag

SEQ ID NO: 581982 - DNA, 90 bp, Homo sapiens
gaggggctcaggaacctgggcatccctctgggccaggacgccgaggaggaggcaaaaccttcaactgaggacttgggggataagaaggaa

SEQ ID NO: 581983 - DNA, 98 bp, Homo sapiens
cgacctcaagaagcagctccacgaaaggcagccgcggatcgccgcgctcagcgacaaacaacccgtggaccgggagcccgtggaccgggagccggtgg

SEQ ID NO: 581984 - DNA, 82 bp, Homo sapiens
ctggtgggccgcgtcgaagacatggaccagggctacggagggtttgccttcccggattgggcctacaagccagagtcgtccc

SEQ ID NO: 581985 - DNA, 80 bp, Homo sapiens
cttaacgcctttcaccattaagaggaaagcgatggaggagctgagcgctgatgaggattcagaatccatggctggaagag

SEQ ID NO: 581986 - DNA, 100 bp, Homo sapiens
gacctgcgctccgcgctctggcgctacggtctggccgtcggctgcggcgccatcggtacgcaataactgtttggtattttgatgcagatgagagagcacg

SEQ ID NO: 581987 - DNA, 82 bp, Homo sapiens
gcgcggtggcaggagctgacagagtgatgggaaacgcgtgagccaggccgagagacagtgagaccgtgcactaccactatgg

SEQ ID NO: 581988 - DNA, 75 bp, Homo sapiens
cccatggcatgggggcctcagggcagcctgcctggagatccctcatgtccatgatccggaaacgatcccacccca

SEQ ID NO: 581989 - DNA, 139 bp, Homo sapiens
tgaacttcgaaacgtgataagaagcacctggatgagacatttgctacagcatcccacattaagtcaacgctatcatggtgaacttacttcagattgtgcgggaccactgggttcatgttcttgtccctatgggatttgt

SEQ ID NO: 581990 - DNA, 50 bp, Homo sapiens
atttagcgcatcatgtgatccgggctgaccaactgactgaagagcagatt

SEQ ID NO: 581991 - DNA, 50 bp, Homo sapiens
tggagagcctctctacaatgctgtgggtggaagccagtcagaaactgaag

SEQ ID NO: 581992 - DNA, 90 bp, Homo sapiens
gcggccggggcctggggctgcctgccgggcggccgggcgcggcgagcccagacaggggcaagtgtccgagtggtgaatcagctacttaca

SEQ ID NO: 581993 - DNA, 101 bp, Homo sapiens
tatcaaaatcccaggctgtcggaagcaaggtttgggccccatggtatccctgtgacagtatttcccaaaagggaatataaggataaaccagaagccatgcc

SEQ ID NO: 581994 - DNA, 90 bp, Homo sapiens
gccgttcgtggaggagtacatccccacacaggagatccaggtcaccagcatccactggagctacaagagcatcaagcagatcctgccaca

SEQ ID NO: 581995 - DNA, 75 bp, Homo sapiens
ttatgtcagaaaacaagccagcattacaactccaaagccaggtcatagaaggttatgaaatagcctgcagaaaag

SEQ ID NO: 581996 - DNA, 83 bp, Homo sapiens
ggcaaagggaccacggtcaccgtctcctcagactcggtgaaatacctggagtgctcagctctcacccagagaggcctgaaaac

SEQ ID NO: 581997 - DNA, 100 bp, Homo sapiens
agtctcagtgttgccctgttcagtctgaggagcatttcctccctctgctatttatacacggaaagacttactacagcgatctacccatattgccaccaag

SEQ ID NO: 581998 - DNA, 82 bp, Homo sapiens
gaaaaggcaacatcctgtcacaggccatgctctggcaaaaacgtacttaaagctttcaccaaaacacccagaatcaaatact

SEQ ID NO: 581999 - DNA, 124 bp, Homo sapiens
aggccatcaaatgcagaattcacaagatccaatcccttgtccttaaaagaaagcataacccctactgtagaactaaatgcactgtgcatgaaacttggaaaaaaaccaatgtataagcctgttg

SEQ ID NO: 582000 - DNA, 75 bp, Homo sapiens
cgcttcctgaaacacccagagtacctgaagatgctgatcttctggacaatcacacttttcctgctgggagcagcc

SEQ ID NO: 582001 - DNA, 98 bp, Homo sapiens
aacagctacaagccacaggcaaggagaaagatcaccaacattccttgaacgccacacatcatgctgataaaattcctttccttcagtcactcggtatg

SEQ ID NO: 582002 - DNA, 50 bp, Homo sapiens
gcagcggcagatcccaaggtagcctttgagatggggttttgccgtgttgc

SEQ ID NO: 582003 - DNA, 75 bp, Homo sapiens
gtcaacaccaagtgcatcaccatccccagatgcgagccacccctctggctgctcctgcgggttccctgtccagga

SEQ ID NO: 582004 - DNA, 80 bp, Homo sapiens
ttgggactcctctctcaagagaagctgcaagagcaacatctttcctcaccccaagggaaatcctcattgacgattcaatt

SEQ ID NO: 582005 - DNA, 83 bp, Homo sapiens
ggccacgggatcctcatgttcactacccttcatgcatgaaagacaaagctactcaggtttatcgtcttgaacttggttttaaa

SEQ ID NO: 582006 - DNA, 100 bp, Homo sapiens
gtcggcgagcccccgcggcgacaggctgaccggttccctgatgtgttacctgcttctgctactgatccaaactgcagaacttctcattcatccccaaggc

SEQ ID NO: 582007 - DNA, 83 bp, Homo sapiens
tgtcttcggtggactccttcggcagtccacccaccgccgccgcctcccaggcccactgctcagtggagcgtggaggacgagga

SEQ ID NO: 582008 - DNA, 104 bp, Homo sapiens
tggtgttgtcctatcgacccagctggatcgtgtaaccagtctatgggaagtgaggcttctccagggaaagtgaccgaggcagtgaaagaggccattgacgcagg

SEQ ID NO: 582009 - DNA, 50 bp, Homo sapiens
ccttaccctcagcgagagaagtaaccaaagaacattggagctatcatgtc

SEQ ID NO: 582010 - DNA, 100 bp, Homo sapiens
gctgctgctgcccgcgtccgaggctcgcgggcggcgggcccggtgtctttggtgcaacactaacaaggcttgtctggactacccagttacaagcgtcttg

SEQ ID NO: 582011 - DNA, 98 bp, Homo sapiens
ggcggatggggagcgtctatggtcagcttgcattcacaagagatgggctctgtggtctgtggaatgaaatggttaaagatggagaaattgtatacact

SEQ ID NO: 582012 - DNA, 90 bp, Homo sapiens
gttaagtgtaaggatcttcatgatgaaatttctgtaaatgctatgacagagactccactttcaatgtgtttgtgggaaaaggacagctga

SEQ ID NO: 582013 - DNA, 74 bp, Homo sapiens
ctattttctagtgctgagatcctgagacaatgagaaacagcacccaggactatcttccaaagagttctggatat

SEQ ID NO: 582014 - DNA, 99 bp, Homo sapiens
ctgctcagctggatgaggagctgggaggtacccctgtccagaggtgaatacgctttggccgaatacacagaagtgaaaactgtcaccatcaaacttggc

SEQ ID NO: 582015 - DNA, 100 bp, Homo sapiens
gaggaggctgcctgttactcctggtgttgacctcctgccccccgaggtctgcagtctcctgaacccagcagccatctacgccaacaacgagatcagcctg

SEQ ID NO: 582016 - DNA, 83 bp, Homo sapiens
gtgccgcgcggctcggagccctggaagcagcagctcaccgaggacggggactctccagttacaacacagggatcacaacaaac

SEQ ID NO: 582017 - DNA, 80 bp, Homo sapiens
cgaaaggactgaggaacggtgcctggaaaaggtaattaataatgcttgtgctactcaagccatagtgagtgtgttactga

SEQ ID NO: 582018 - DNA, 51 bp, Homo sapiens
cacagctgcagtctgacgagagggaggctgaggggatctggcggtggagcg

SEQ ID NO: 582019 - DNA, 100 bp, Homo sapiens
tgaacagcagcaagccgcccctgagccagatccctctacgatgactccacaggtatcccatgtataaccgattgtgtaatggctgaaattgagaaattgg

SEQ ID NO: 582020 - DNA, 100 bp, Homo sapiens
ttgccttctgagctttgtaccaaagacctgggaaaagtacttgaagtttattgagttgcccttgactcagagaaagttttgtcaaacatgtcagcagttg

SEQ ID NO: 582021 - DNA, 100 bp, Homo sapiens
cttcggactgcgcaacgctgcgctctgggctgacaggataagcacattgaagaagtgcggaagaacaaagaatccaaagaccctgctgacgagactgaag

SEQ ID NO: 582022 - DNA, 100 bp, Homo sapiens
gtagagggtgccatgcacattcagaatcattccgcgcacccacgttttcatacggacctgatggaaatggtttctctcttggatgcagtaaaaattggag

SEQ ID NO: 582023 - DNA, 90 bp, Homo sapiens
cgggtgcagtagacatgaccagtttatcggcagtcaacgacttttattcccctatgttcaatggccagctgctatttgatagaccaatgc

SEQ ID NO: 582024 - DNA, 87 bp, Homo sapiens
ttgggttttttttgggtcaaacagcaaccttggtatgaagtgtggcatccaaaatcagaatgactgtccaagtgcctccaaagtgta

SEQ ID NO: 582025 - DNA, 75 bp, Homo sapiens
agcggatcctaataaggggaaaatgaaagatgtagcacttaagcctcaggaacgtgtggagaaacgccagacgcc

SEQ ID NO: 582026 - DNA, 74 bp, Homo sapiens
agggaagtgcatcacatgtcaggagtctcgctctcagtcaaaatctccaacgggaactcctgctcgtgtaaaat

SEQ ID NO: 582027 - DNA, 50 bp, Homo sapiens
ctggaattaggcaaatatggacagggatatgatgatacatacgcagaaca

SEQ ID NO: 582028 - DNA, 96 bp, Homo sapiens
agaagatgccgcagcccgagtcccagaaggcggcgatcctgggctgcgggcaaggcgttcctggtccagaactttacacagaaaaggtgctcaaag

SEQ ID NO: 582029 - DNA, 75 bp, Homo sapiens
agcgacttcctcaaaggctactgccccctgggtgcaaagttcctccaactcctctgccaaccaatgatgttgatg

SEQ ID NO: 582030 - DNA, 75 bp, Homo sapiens
atgagcgtcccggccttcatcgacatcagtgaagaagatcaggtgcccctgtagacaatggccctcgtgtctgcc

SEQ ID NO: 582031 - DNA, 75 bp, Homo sapiens
tttgaagccaccggcgttgagtacttcaacacggatgtaagagcacacctaaaatgacaaagtcaactcaaactc

SEQ ID NO: 582032 - DNA, 90 bp, Homo sapiens
ccagaacctgtctccagtgggctctggcgcctatggctctgtgtgccagagactgctgctactttgaaacgtacgatagaggccctgatg

SEQ ID NO: 582033 - DNA, 100 bp, Homo sapiens
gatcagtgctgtcccatctgcaaaaatggtactactgagcgagtgtgcttgatccagggaacggttgaagcactgaatgcagttcatggattcattgcag

SEQ ID NO: 582034 - DNA, 91 bp, Homo sapiens
atctcgggtaacaaccgagcccctcctcgcagcagctcaggccccggggcctccagcggcaccagcggagaccacggtgagctcgtcgtcc

SEQ ID NO: 582035 - DNA, 72 bp, Homo sapiens
gatcgggacccccccgcagaaggagagcgcggctgtgccttctgcgggggcctgggtcatcggatcactgac

SEQ ID NO: 582036 - DNA, 96 bp, Homo sapiens
aatagtttaagaaagcaaagagcaggttcttcatcttcaaaaatgaacagtttggaatcagtgtctgtccctgaagggtcattaaatcagctatgt

SEQ ID NO: 582037 - DNA, 90 bp, Homo sapiens
cgcacgttgtaatcagctgaggccatgtcaggagacggagccacggagcagcccactgacaaggaactgagagagactatagcattgctg

SEQ ID NO: 582038 - DNA, 100 bp, Homo sapiens
gaagaattctgtggaagagtggacaacagaagactggactgaagatgcccggattgcatttctacaaggcgaaagaaaaggtcaagagaacctgaagaag

SEQ ID NO: 582039 - DNA, 75 bp, Homo sapiens
gctggacaaagtgtttaatgactaaccccaagaaaggcatcagggttctggagtggttgtttgagtgacacagca

SEQ ID NO: 582040 - DNA, 103 bp, Homo sapiens
ctccaaccccgggctcggcggcggcggccaggtccctgctgaatcacacgccgccatccgggaggcccagggaaggattctgagaaacgaacccctcttcatg

SEQ ID NO: 582041 - DNA, 90 bp, Homo sapiens
gcagcagtagctatggcagtggcagaagattttaattagtactatgacgacacctaccccagtgtcaaggagcaaaaggcctttgagaag

SEQ ID NO: 582042 - DNA, 88 bp, Homo sapiens
ttacagtaaaaatgacccatctatggctgcttaatgacctagatgtgaaggctggtggaggctgtgtaatgaccattggagaaatgct

SEQ ID NO: 582043 - DNA, 100 bp, Homo sapiens
gcccgcctctgtgccactttgcatcccacgccggaggaggcattaacgagaccgggtaaggttatacattggctcttcaaagacgttcacctcatcagag

SEQ ID NO: 582044 - DNA, 100 bp, Homo sapiens
tgccatgtggcccagacctatggttcagagggcgagctgcatgtctccaaactcttcaaccatcccaatatcgtgccatatcgagccacttttattgcag

SEQ ID NO: 582045 - DNA, 50 bp, Homo sapiens
ctgatgttagtgtggacttgccagatttctggtaggtcctactttaggac

SEQ ID NO: 582046 - DNA, 95 bp, Homo sapiens
gatggtgatggagattttgatgtggatgatgccaaagttttattagcagagagactttcaagcagctggctggatgttcgtcatattgaaaagta

SEQ ID NO: 582047 - DNA, 100 bp, Homo sapiens
gcataatagtggatccttgaatgttgaagatgtccttaccagctttgacaatacaggaaatgttttgtgcaccaagggtcaggtagtaagtggccagtac

SEQ ID NO: 582048 - DNA, 83 bp, Homo sapiens
ggaaccactcattcacttctagacgacaaaatgcaaaaaaggaggccaaagactttatctctctggcatggctgaaaggaaga

SEQ ID NO: 582049 - DNA, 90 bp, Homo sapiens
cccatcgaggcttccctggttgcttagctgggtctcggccacggcgtggagagcggcaaggaaaatggagctgatagtatcctggatctt

SEQ ID NO: 582050 - DNA, 95 bp, Homo sapiens
atgtggatgccctcaagtcctggctggccaagttactggagccgatcttggaactgcagttggctttttgctaccaccagttttagtacccaaca

SEQ ID NO: 582051 - DNA, 129 bp, Homo sapiens
ccaggggaggagcagcaccgggaccccgcgtcggctgggcgccccacaaggtgtgggccatgtttgaggattgccccagcattcagttctatgagtaataaatatccacaggctgttttcttggaagtc

SEQ ID NO: 582052 - DNA, 75 bp, Homo sapiens
tgctgtcccgggtggtactttccgccgccgccacagcgggagacatgactgtccagtgccactactacacccact

SEQ ID NO: 582053 - DNA, 75 bp, Homo sapiens
gaggagatgtactgtgcttggctggaaaaccccaaaagtgtacataagccgaatatgtgggagtccatgtcctgc

SEQ ID NO: 582054 - DNA, 98 bp, Homo sapiens
gggcaaaggaggacaacagttcccaccagggaaatcctcattgacgattcaatttgttgaaggccaatttgtggactcctacgatccaaccatagaaa

SEQ ID NO: 582055 - DNA, 82 bp, Homo sapiens
tttggatcggcatctagtctttccgcttcttgaatttctctctgtaaaggagaactgaaggcagaagctagtctaatggacc

SEQ ID NO: 582056 - DNA, 100 bp, Homo sapiens
gcttcgggcatccaacgcaatgatgaacaacaatgaccttgacttcacagagaatgcagttgtcttgacttcaggtctgtctgttctgttggcaagtaaa

SEQ ID NO: 582057 - DNA, 100 bp, Homo sapiens
cgagatcttgggcaccgagagggactacgtgggcaccttgcgcttcttgcagtcgggctgacagatgaagagattgatatggccttccagcagtcgggca

SEQ ID NO: 582058 - DNA, 74 bp, Homo sapiens
cggcggcatcaatcgcaccaagtaccccatcctgtgccaggcgctggacccacaaaccgtggagaccaagaact

SEQ ID NO: 582059 - DNA, 52 bp, Homo sapiens
ggcatggatatctctactcgctccaaagatatttggagttcttacaacatgg

SEQ ID NO: 582060 - DNA, 98 bp, Homo sapiens
cgggatcccagcctcaggcgtgcgcggacggtgtgcggataattgtatggaagagatacagtgattttaagaaactacacaaagaactatggcaaatt

SEQ ID NO: 582061 - DNA, 101 bp, Homo sapiens
tagacatcctctgcagccagaagaacaagaagtaggcattgaccccttgtccagttactctaacaagtctggagatggacccgattcagaaagctgtaata

SEQ ID NO: 582062 - DNA, 82 bp, Homo sapiens
gtgtgtgctgcgttcacaggtgtttctgcggcagccattgagacccagagcagcagttctgaagagatagtgcccagccctc

SEQ ID NO: 582063 - DNA, 97 bp, Homo sapiens
tcccctaaagtgcatcctcctaatgggacccggttttacacttttcaagaaacatgccctgaactgtcacagaatgaaaccagcgctcttcagcgtc

SEQ ID NO: 582064 - DNA, 100 bp, Homo sapiens
ctcagaggaaagcttagctctggaagtggagcagcagctgggcctggagatccagaagctgactgcacagatccagaaaccatcatagcctttgcctggg

SEQ ID NO: 582065 - DNA, 100 bp, Homo sapiens
ttcccaggaagcagctgatccgggaggatgagaatcttcagtcactcagcctctgaagaagcttcgggttcagactcaggcagtcagtcggaaagtgagc

SEQ ID NO: 582066 - DNA, 96 bp, Homo sapiens
attgctcagcgcggacctagacctggaatcgcccaagtccctctactcgcgagatatttggatttgacctgcattttggaatttatctacacttaa

SEQ ID NO: 582067 - DNA, 73 bp, Homo sapiens
ggcccgcccaccagttcgcccgtccccctgccccgttcacaatgagaacatattgtgatgttcgtgcctcaga

SEQ ID NO: 582068 - DNA, 82 bp, Homo sapiens
ccactttgtctcagccaagacaggagactctaagcagctgtgcccccatgggttgacactaacgatgaagaaacaattcaac

SEQ ID NO: 582069 - DNA, 82 bp, Homo sapiens
cccggccgcaggaccgccggggcctggccgccggtccggcgtgcgccaagttcagacaatgcagatcttcgtgaagactctg

SEQ ID NO: 582070 - DNA, 101 bp, Homo sapiens
ctggaggtggcagcagaaatcctactccacccataggaagacccacgtccacacctactcctcctcaggttaaaggaaaaggtgcttctggaagttttgtt

SEQ ID NO: 582071 - DNA, 83 bp, Homo sapiens
atcgatgcgggagtatgtaggagacttgtggaactgctgatggtttgtgcctggaactatgcgaacatttttccacttggctg

SEQ ID NO: 582072 - DNA, 90 bp, Homo sapiens
caatgatcccaatttccagatgccttgttcaacaggtgctggagaatctggtaaaagcaccattgtgaagcagatgaggatcctgcatgt

SEQ ID NO: 582073 - DNA, 102 bp, Homo sapiens
agcacgacgagcgcggaggaccgggaggctcccgggcttgcgtggacaatgcagatcttcgtgaagactctgactggtaagaccatcaccctcgaggttgag

SEQ ID NO: 582074 - DNA, 75 bp, Homo sapiens
aaggcagcgaggtggagagcggttttggacatagtgaaaacaagtattcgtacagttcttccacgcatctggaag

SEQ ID NO: 582075 - DNA, 74 bp, Homo sapiens
aggaatgtggtcgacgagaagccccaacagcacggcgtggcctctcagcctcgatcaatgtccgagttaccacc

SEQ ID NO: 582076 - DNA, 98 bp, Homo sapiens
tttactaccagatttggaaggaacgaagttaagtaatttccaagacctttccaggtgtcctgagatggttctccagttgagtttgtcatctgccacgc

SEQ ID NO: 582077 - DNA, 75 bp, Homo sapiens
cggtggacgagcaggaagctgcggctgagtcggtctctcaggcagctgcagagcttcaacagtactgtatgcaga

SEQ ID NO: 582078 - DNA, 100 bp, Homo sapiens
tactggaaagtatgaaagcacagtatgttgctgggaatggttttcgaaaagtgtcctgtgtgaatgttgtaccatctttgggtaggcagacttccctgac

SEQ ID NO: 582079 - DNA, 90 bp, Homo sapiens
agtgaatataaaaggacttcatctcctcaacatggaaactaagggagatgcacttatttacatggaaccagagaaacaagtgatgtccag

SEQ ID NO: 582080 - DNA, 75 bp, Homo sapiens
ggaccttcgcctttcggaccccaaagtggagacctttggcgacttggcctttggcgacatcttcctccacctgct

SEQ ID NO: 582081 - DNA, 75 bp, Homo sapiens
ctttcttcactcctcttcacttcttcagatctagtttgaagcactaagaagaataagacatcagtttgaaaagag

SEQ ID NO: 582082 - DNA, 88 bp, Homo sapiens
cacgtttcccttcctccatatttactggacagagtgctgtaggctgacccgcggctgattgagtccctctcccagatgctgtccatgg

SEQ ID NO: 582083 - DNA, 82 bp, Homo sapiens
attacagttagaacttcaaaaaattgaatgggagaaagagctgtacgatttgaggtagagctgaagtttcctgcaccaggca

SEQ ID NO: 582084 - DNA, 100 bp, Homo sapiens
accccagttttgctgaccttattcaccatgacttatcaggttgctgtctcggcttaaaatctgacctccccacccccgtgcatctggatagtgcagcaca

SEQ ID NO: 582085 - DNA, 50 bp, Homo sapiens
cccggtgttggtggtgtgcacaaaggacctcttcaacgacctgattgctt

SEQ ID NO: 582086 - DNA, 99 bp, Homo sapiens
caaaaaatgaatgaacttgagaataaggctgaacctggaacacatttatgcattgatgtggaagatgcagttccaatgattcttgttggtaataagtgt

SEQ ID NO: 582087 - DNA, 73 bp, Homo sapiens
gccctgcattcgcggcgtgtgcaggaggagcgatgggcagaaccagcacttccctcaggcactagacctgtca

SEQ ID NO: 582088 - DNA, 97 bp, Homo sapiens
cggctcagaagataaacgaggggctggaacacctcgccaaagcagagaaatagaatacggttggacagaatgaactgaagattacaagtgatcaagt

SEQ ID NO: 582089 - DNA, 82 bp, Homo sapiens
ccgccctgcgcactcaccatggcgatacgatgaatggattaaagcagataaaatagtaagacctgctgataaaaatgtgcca

SEQ ID NO: 582090 - DNA, 99 bp, Homo sapiens
aagacttactcagagataccaagaagatgaagaacaaaccagcacccaacctcatagggcaccaagcaaggaagaaggaaatcatgaccagatctgaaa

SEQ ID NO: 582091 - DNA, 100 bp, Homo sapiens
tccgccgcttcaagtcgtccaagttcggctgccgggaccctgtgagaacctgtttcgagacgttcccagacaaggcagcttgaaaactccaggagggagc

SEQ ID NO: 582092 - DNA, 100 bp, Homo sapiens
tccgcgttagagctgatttacgagataattattctccaggttggaaattcaatcactgggagctcaagcatacatctgtggatggatatactgaaccaca

SEQ ID NO: 582093 - DNA, 90 bp, Homo sapiens
cagaatttatatagagatgtgatgttggagaactacagaaacctcgtctccctgggtctccatcacatttttgcccagaggtagggggga

SEQ ID NO: 582094 - DNA, 75 bp, Homo sapiens
ggggacattattgcgcgtggaacggctgcttttggaaggttcagcagctggacatggagaaccaacgctcatcac

SEQ ID NO: 582095 - DNA, 50 bp, Homo sapiens
aaacacatttcatatactgcaggataaagtagccaatatttggtgcagct

SEQ ID NO: 582096 - DNA, 76 bp, Homo sapiens
agttccacagtctgatggagttcgaggaatttataagagctatgaagacatgattggtgaggaggtgccatcggat

SEQ ID NO: 582097 - DNA, 76 bp, Homo sapiens
agatcttgaaagtgggcgagttgcctattgacctgaaaagtggttctggaaaagtgtaccaaggccctgcaaaagg

SEQ ID NO: 582098 - DNA, 100 bp, Homo sapiens
cctcctcgccgccgtttctgagaaggctacgtgtgccgcctggccattcaaactgtcaattttaggtccagaagtgtccaaaccacaagttctcaaaact

SEQ ID NO: 582099 - DNA, 75 bp, Homo sapiens
gctcatcaaggacgggaagtcactcataagcgcgctcaagagcagtggttgcaggaatccagcaggctcacgcgg

SEQ ID NO: 582100 - DNA, 97 bp, Homo sapiens
aagtcaagtgtccattttctttcaactatatttgagcatacccaggagtacaaaccaccaggaacccgtaaacttcataacattcttggagtggaaa

SEQ ID NO: 582101 - DNA, 75 bp, Homo sapiens
ttttggagaagttcagctgagtggcttaggagaaggcaaaagatgtgattgaagagcatggtccttcagaaaagg

SEQ ID NO: 582102 - DNA, 85 bp, Homo sapiens
accaatggcttccgtgctgtcctacgaaagcctggtccacgccgtggccggagccgtgggcagatgattctggaccagatgaagc

SEQ ID NO: 582103 - DNA, 75 bp, Homo sapiens
acttctcagacaagttccatcccacctttgagtcagggaaaagaagatctcccggagcagtgccctgaaagtgct

SEQ ID NO: 582104 - DNA, 100 bp, Homo sapiens
caaacctgtaaaaccagtgacgttttccacaggcatcaaaatggggctttgttatgcacctaaagccatattggaagctccagaagaaagagcacccccc

SEQ ID NO: 582105 - DNA, 90 bp, Homo sapiens
cctgtggaaatcagaagagagaatatagtaaaaatacgcagtacagtcccagacggttgatgatgaagcgccggccgtgtaaatgaagat

SEQ ID NO: 582106 - DNA, 100 bp, Homo sapiens
cggcaaggggacccagtgcgcccgcatcgtcgaggagagattaaacagattctagaaaatgaacttcagatacctgtgtccaaaatgctgttaaaaggct

SEQ ID NO: 582107 - DNA, 119 bp, Homo sapiens
tgacatcaaggatatcactgtgtgtgaacctccgaaagctcagcacacactcccgcaggatcccgccattgttcagatgacagcatattaaagtgagtgaccctgcgacccactctttg

SEQ ID NO: 582108 - DNA, 100 bp, Homo sapiens
gacagattgtaggaccgagcgcgggcaggcgggaggcaacggagctaccagccgatgccttcaattaagttgcagagttctgatggagagatatttgaag

SEQ ID NO: 582109 - DNA, 73 bp, Homo sapiens
agctgtatcttcagtggtgtgatgaagctacagtaggggagatcacccagcactttgccgtctgccacgtgga

SEQ ID NO: 582110 - DNA, 74 bp, Homo sapiens
aactggatcataaaaatgctcaggcacaacaagagcctggctttggcccttcaaagagactgtgaggaaatgtg

SEQ ID NO: 582111 - DNA, 100 bp, Homo sapiens
ggaaaatgacggttataagaccatttatttctttggagacaaaactatgccagaagatgatccctatgatcttgaagatgtttctgcacagaaatgaggg

SEQ ID NO: 582112 - DNA, 100 bp, Homo sapiens
caatatgtctcaagatggcggccaatgtgggatcgatgtttcaatattggaagcgctttgatttacagcagctgcagtcaccaggagactaaagtccatc

SEQ ID NO: 582113 - DNA, 99 bp, Homo sapiens
ttctgccgcaccaggctcatcctgtccatcgtgtgcctgatgatcacgcagctggctggcttcagtggaccagcggcttacagggagaacacagttggc

SEQ ID NO: 582114 - DNA, 100 bp, Homo sapiens
tttttggaacaaggattttggatgaagaagtttttgagattgcttccaagtatgatcatcaggcagaagaagatcttcgcaattggatagaagaggtgac

SEQ ID NO: 582115 - DNA, 96 bp, Homo sapiens
atggaacagactccacccaaacatctggttggcaatatgatactcagtgttcactggcaggaggacttgacacagcaagcaaaagacatacagaac

SEQ ID NO: 582116 - DNA, 112 bp, Homo sapiens
ccggcgttcttccgctggctcagccgcaagtacccgtccatcatagtcaactgcgtggaagagaagaaggtgacctgctgagaaaagtggtacaaatactgggaaaaacctg

SEQ ID NO: 582117 - DNA, 100 bp, Homo sapiens
gcctagcgtcctggaattacttcaatcaaacaatgcagatcttcgtgaagactctgactggtaagaccatcaccctcgaggttgagcccagtgacaccat

SEQ ID NO: 582118 - DNA, 88 bp, Homo sapiens
ggagacaacagcaggggtcagctgggccgcaggggcgcgcagcgcggggagctgccaggcccgcagccgtgccgggtgctcttcagca

SEQ ID NO: 582119 - DNA, 100 bp, Homo sapiens
acgtgcccttctctgctggccccaggaactgtataggtgatttcagaaagtatggatatactcttcagaataagaggaggccttgatttggcttttcagc

SEQ ID NO: 582120 - DNA, 75 bp, Homo sapiens
cacgaccacaccgctgatgaagacaaggactcacagtggctgcaagcctcttagcaaatatccggctgtgatcaa

SEQ ID NO: 582121 - DNA, 90 bp, Homo sapiens
gaccccaagactttcaagtgcagagccatagcacgctggcagcgaaggggaactctaccctccagaatctcagccaccagtttcaggctc

SEQ ID NO: 582122 - DNA, 89 bp, Homo sapiens
atgagcctcggaaagtgctcctgcggctgtatggagcgattttgcagatgctggggtgaagaatggggcatgggtggctacgtaaagat

SEQ ID NO: 582123 - DNA, 100 bp, Homo sapiens
tcagagtccagccaggaggccgactttcctcctctgatcctaattatctcatggctaatgaacgcatgaacctcatgaacatggccaagctgagtatcaa

SEQ ID NO: 582124 - DNA, 100 bp, Homo sapiens
cgatgcactacagtgaccccaagcccaagatcaatgaggactggctgtgcaataaggcaacctccaagtcccagatcatgtctctgtggggtctggtctc

SEQ ID NO: 582125 - DNA, 100 bp, Homo sapiens
ctggaattatataaacgacttaaggaatttttgaagaattacttgacaaatcttcttaagttgcctttccccatcttcctggttctgctccttcgtggcc

SEQ ID NO: 582126 - DNA, 83 bp, Homo sapiens
tctgcaaggagaacattgaacacaacagcacaacatccaccttctgtggcacgccggagtacatagattctgcggacttggag

SEQ ID NO: 582127 - DNA, 100 bp, Homo sapiens
gactaagagaagtcacaaaacagcagatttcccaagagcagcggaaaatgatccagtcacagggttctcccaacatgtctttctagaaggggacacgcag

SEQ ID NO: 582128 - DNA, 100 bp, Homo sapiens
catggcgtgctagaggaatgggacgtgaagcgcttgcagacgcactgctacaaggtccatgaccgccacggactctgactacgaggacgcgctgcccaag

SEQ ID NO: 582129 - DNA, 100 bp, Homo sapiens
gacctttactgtgcagctcctgaaaggagagacacttgtgaacattcaagtgaagcaaaagcctttcatgattatagctgagctcaatgtgcagcaatgg

SEQ ID NO: 582130 - DNA, 95 bp, Homo sapiens
ctgcccgcgccatgtccgcgcacaatcggggcaccgagctcggcatagaatgtcaagctaaccaggcgtccgctacttcagaagagtgtactgtc

SEQ ID NO: 582131 - DNA, 100 bp, Homo sapiens
aggaagctttggatcagacttttgtgttgcagttcggggctttttggtggtgctggagttggcaagactgtactgatcatggagttaatcaacaatgtcg

SEQ ID NO: 582132 - DNA, 100 bp, Homo sapiens
tattcctgcctcagctgaaatgccagtcttcagcctcatctactgcacacttgagtccatgagattttagagtgggaactctaatgatccaggacaaaga

SEQ ID NO: 582133 - DNA, 90 bp, Homo sapiens
gagagtcaaaatgtggatttccgaggcaagaagttacagaagcttattctggagtatacaaatactgctacagcacttttatatgagata

SEQ ID NO: 582134 - DNA, 50 bp, Homo sapiens
gggtcctttatatagaagggagagtagacggaatcagtccccaatgcctg

SEQ ID NO: 582135 - DNA, 100 bp, Homo sapiens
gatgcagtgtgacctggaggaagaggagaatgtcagagccaccgaggctgtggttgcactctgccagctggctctcctcacggaactctcccagaatcgc

SEQ ID NO: 582136 - DNA, 100 bp, Homo sapiens
gcgtctaccagagcatggtgctcttcttcttcgagaattacaccggggtccaggcctactgtgacatggaagctggaggaggcgggtggacaattattca

SEQ ID NO: 582137 - DNA, 100 bp, Homo sapiens
ggcgattcgtgttcgtgagggccttttctgacaatgcagatcttcgtgaagactctgactggtaagaccatcaccctcgaggttgagcccagtgacacca

SEQ ID NO: 582138 - DNA, 87 bp, Homo sapiens
tgtgagccgggtcgctgcggccgaggctccggtctgaaatggttgtgacaaataatctcttggatctgccgcccccctctcctccca

SEQ ID NO: 582139 - DNA, 100 bp, Homo sapiens
ctcatagtgagtgttctgtgagaggctgctattccaaaaagctttcaactctcagcagttagttcatgtcactgtcattaacctgtttcaacttcatcac

SEQ ID NO: 582140 - DNA, 82 bp, Homo sapiens
aggaatctcactctgttaaagctggtctgttctaactgagtttgaaggatgacctctaggaagaaagtgttgctgaaggtta

SEQ ID NO: 582141 - DNA, 100 bp, Homo sapiens
cttgggcaacgtgctcaactacctggacaggtacaccgtggcagacacagcccttgacgtagcagtaaaaaccttcccccctgagagacacgtggcagtg

SEQ ID NO: 582142 - DNA, 101 bp, Homo sapiens
gcggcgctgcctgtggagatccgcggaggccgacaggattcgttggctgccgtccccgctgctgtgcattggaaatgactgctgtccatgcaggcaacata

SEQ ID NO: 582143 - DNA, 100 bp, Homo sapiens
aaccctttcaccctcaaggtcctcaccaccaagcttcttgaaaggcctgtctacacttgctgtcttccttcctcacctccaatttcctcttcaacccact

SEQ ID NO: 582144 - DNA, 74 bp, Homo sapiens
gtctctggagacatcttcagcaggatacacacctgctaaaactgcttaaaacattagaaggacatgcttatggc

SEQ ID NO: 582145 - DNA, 51 bp, Homo sapiens
ggaatgtgctttagaagttaaaaaggtgtgtttccattgtagaaaacctgg

SEQ ID NO: 582146 - DNA, 90 bp, Homo sapiens
ccaagagcagcctcacatggtgtgggccgacatgaagagctgccagatccaacagatttcctttcctggatgaaaatgttgtctcctttc

SEQ ID NO: 582147 - DNA, 90 bp, Homo sapiens
caaagagtcactctttgttcgaatggcggcgactggcggcgcgatggacctgaccgggctcctgctggacgaagaaggcaccttctccct

SEQ ID NO: 582148 - DNA, 101 bp, Homo sapiens
cctgcgcgaagctggccaaagcctgcccagacggctcacctgtgcgggatggaacaaaaggtcccgcagcccccggaagccaatagactccctcagggact

SEQ ID NO: 582149 - DNA, 82 bp, Homo sapiens
ccggaacctgctccgcctgctgacgtcttgttatgttggtacccctccacccagttcggcagcctcacgggactgcagtctc

SEQ ID NO: 582150 - DNA, 89 bp, Homo sapiens
gctctgaaccaggacctggacccggacccaaagtgccatgtctttaatgattattgcatcgagcttttagtgtcttcttattcaacacc

SEQ ID NO: 582151 - DNA, 100 bp, Homo sapiens
ctgatgtatacacgtttaatttttctaaagagtcttgttatttcttctttgagaaaaacctgaaagatgtctcagctggaagcgcaattcattgaccccg

SEQ ID NO: 582152 - DNA, 82 bp, Homo sapiens
caagattgtcattgactttgattcaattaacagcagaccgagtcaaaagcttcatgacaaagcataaatcatggacaccaga

SEQ ID NO: 582153 - DNA, 74 bp, Homo sapiens
gtctaccgcatccctccgcgggctaccaaccgtggctacagatcagttggccttatttcctcagtggaaatcta

SEQ ID NO: 582154 - DNA, 100 bp, Homo sapiens
gtatgcaggtgccttgagagcttcaggggaaatggcttcagcgcagtatattactgcagcttagcagtgtctgcaaaaacgaatcttttcctacaacctg

SEQ ID NO: 582155 - DNA, 75 bp, Homo sapiens
cctataataaacatccacaatcctcacagtgagcctttacagcaatcaaggagaccgcgaaggcgtacattcccg

SEQ ID NO: 582156 - DNA, 96 bp, Homo sapiens
ctggatttccaaggaagaatttcctctgaagcaccggattttttatcaagcagaaatgcatcgaacaacgagaatcaagatcactgagctaaatcc

SEQ ID NO: 582157 - DNA, 75 bp, Homo sapiens
acatggagaaagttgtgaagatggatcgagacatgaccaaggccataggaaaaggatacagagtagagtttcatg

SEQ ID NO: 582158 - DNA, 127 bp, Homo sapiens
cagaaatcgacttaaagcctccagagaagtagaatctgtagaccttccacactgccacctgattaaaggaattggctttttctcctccgtgacagccagagtaatccaaaggcatttgtactcacac

SEQ ID NO: 582159 - DNA, 88 bp, Homo sapiens
tacattcaaaaaaattaattcatagagatcttaagaatcttgagctcaatgatgacaccattctgaatgacataaagttagcagattg

SEQ ID NO: 582160 - DNA, 80 bp, Homo sapiens
caagaagaacaacctaactccagatatctacctaattgattgtttgtacaatgacgacagaaacctgcttcgaattagag

SEQ ID NO: 582161 - DNA, 50 bp, Homo sapiens
cgacgtcagggcaaacactggacatcgaggaaggcgccccaaaccccata

SEQ ID NO: 582162 - DNA, 51 bp, Homo sapiens
ggacaacagaacaatattggaatggtggtggtctgtttttctggggggcca

SEQ ID NO: 582163 - DNA, 150 bp, Homo sapiens
cgtttcttcgtggatggggactggtccgtgctcagtaccccatgggagagcctgtacagcttggccgggaacccagctctggcaggctgccctgagcacgctcaaccccaaccccacggacagctgtcccctctacctgaactacgccac

SEQ ID NO: 582164 - DNA, 100 bp, Homo sapiens
cgccgccgccggacgtcggcaacggagaagaccattactgggacttccacccccaccacgtgcacagcgagttcgagagcttcgccgagaacaacttcac

SEQ ID NO: 582165 - DNA, 100 bp, Homo sapiens
gggcgtcaacatctacaaggaagggcaggatgtacccctgaaaccggatgctgagtaccctgaatggcattgggatcccgtggcagttgcagcactgaag

SEQ ID NO: 582166 - DNA, 83 bp, Homo sapiens
ctcacttccccggggtgtaataatgttaactgagtcaggtcaattcagtgaagatatgatacccacagtgggcttcaacatga

SEQ ID NO: 582167 - DNA, 90 bp, Homo sapiens
cgccagtgagccttgggaggccagagagataccgccggcatgggacccactcagtcaagatcacaggatctaaccatgagctaccctggc

SEQ ID NO: 582168 - DNA, 125 bp, Homo sapiens
gccgcccccgtgcccgaccgccgcccgactgccatcgcccggcccggccgcgcccgcggaaccagaccagacaatgcagatcttcgtgaagactctgactggtaagaccatcaccctcgaggttg

SEQ ID NO: 582169 - DNA, 51 bp, Homo sapiens
ctgaggttgaactggggtgaaccggtgaatttgacaggcaagaagatgaca

SEQ ID NO: 582170 - DNA, 100 bp, Homo sapiens
ctcgaagggctctcctgatactaacagttttacgatttaaaacttcgccagaatttatccttcatgatgagagatttggggacacttctctctcctgtgt

SEQ ID NO: 582171 - DNA, 100 bp, Homo sapiens
tttggctgcgcgggttcccccgaagttcagttacctcaccgccgcgtcaccttctcggccaccagccaggcccaggagctgcaggacccatcccagcaca

SEQ ID NO: 582172 - DNA, 83 bp, Homo sapiens
caaaaaaggaggaactcaatcaatctgtaaatcgtgtgaaagaacttgagcgtttaatagagcaagaagaatatttgaatgtc

SEQ ID NO: 582173 - DNA, 82 bp, Homo sapiens
accatcgcagttggaagcccatggggcagtttcctgctctacgaaacgcactcttttgccttgaagcggcattggacagtgg

SEQ ID NO: 582174 - DNA, 100 bp, Homo sapiens
ccaaggcccaacagcagggtggagatcgtggctgccatgcgccggatacggacaccaacgtgattcggtatatccagctgacggagatgaaactcagccg

SEQ ID NO: 582175 - DNA, 115 bp, Homo sapiens
atacagcctttcccacgacttggctgaggaactgctgttgtgaaccttttgccctggtgggattattgcacccttgacagcgacagacacagccatcctctctggaagcctctca

SEQ ID NO: 582176 - DNA, 96 bp, Homo sapiens
cagacgtcctctcagaaataatgcattcttttgcaaaggatggtgccatgacaatggtgtgaactacaagattggagagaagtgggaccgtcaggg

SEQ ID NO: 582177 - DNA, 100 bp, Homo sapiens
gtgcaacgaccggcccaacaaactggagagagaccagacctgcaagctctttgacacacagcagttcttgtcagccgctccgggaattctgaagttctgg

SEQ ID NO: 582178 - DNA, 96 bp, Homo sapiens
aggtcttttgtaattgaccatcagggtatgtgctccagaagaaactacatttcaccttctacacttgtctttaatgagagagtatattgactatga

SEQ ID NO: 582179 - DNA, 75 bp, Homo sapiens
gaaggaacgaggcaaggagctaaagcagcgtgcgttcagccctggggaattcatgatttgttcctgtagctgaaa

SEQ ID NO: 582180 - DNA, 75 bp, Homo sapiens
ctgtgatgcctgcagagctgtggcttaccaggggtacacatctttctggaatgactgcatatcatcaggcctgcg

SEQ ID NO: 582181 - DNA, 82 bp, Homo sapiens
cggcattctttgagggacccccattcaagttcaagttcacaattggcgtactccaaagattcaggtttactcacgtcatcca

SEQ ID NO: 582182 - DNA, 83 bp, Homo sapiens
atgaaacgaggtcgccttcccagcagcagtgaggattctgacgacaatggcaatttgacaagatcaaagctgcaggaaaatgg

SEQ ID NO: 582183 - DNA, 83 bp, Homo sapiens
ccagacctgcaagctctttgacacacagcagttcttgtcagggtgtgggccgaagatatgctcatgtggtgttgaggaaagca

SEQ ID NO: 582184 - DNA, 100 bp, Homo sapiens
ccagatcaaggagctaactgatgaagaggcagagaggctgcagctagagattgaccaggcctatgttgtccttggccagtttctggtgctaaagaaagat

SEQ ID NO: 582185 - DNA, 74 bp, Homo sapiens
gatgagatattctgctgagtggaagaacaaaagtgcatttttatgtggagttatgaagacctacaggcagagag

SEQ ID NO: 582186 - DNA, 75 bp, Homo sapiens
tgccaccttcagcccccccgcgaacgcccaaggtgtccctggccagtgtccttccacctgtccacaagcatgggg

SEQ ID NO: 582187 - DNA, 100 bp, Homo sapiens
gtggtgggcacggaagccctgatccacgcagtgctgcacctggagcaggtgctcaccactgagaatgctctcatcactcagtcaaggctaatgcttttgg

SEQ ID NO: 582188 - DNA, 75 bp, Homo sapiens
gtcgcctaatcatcgaatttaagtcctattttgtaacggattatgatccaaccattgaagattcttacacaaagc

SEQ ID NO: 582189 - DNA, 105 bp, Homo sapiens
cgcgcgcagggcctgcagcgggagctggacggcgagcgcgagcggcgcgagaaaaggtggggctggtgtccgagcacttctcgcaggccccgcagaggctgtcct

SEQ ID NO: 582190 - DNA, 75 bp, Homo sapiens
tgacagctgtgtactttgccctcagcatctcccttcatgtctgggtcatgccaatggagatcttcgtggatgatg

SEQ ID NO: 582191 - DNA, 98 bp, Homo sapiens
ctgctgctgccgccacgcgtcctgcctgccgccccttcgtccgtcccccgcggccggcagctcccggggcgtctgggacaaggtggagcagacacctc

SEQ ID NO: 582192 - DNA, 75 bp, Homo sapiens
gaacgaagttggttttttcaagcccatatcttgccgaaatgtgtccattcaaaagcttggtgaattaaatattgg

SEQ ID NO: 582193 - DNA, 99 bp, Homo sapiens
ggaaaggaagagattcatgaagcagctactctccagagagaccggatcttcaaacattttaccaggaagcgccaaagggctatgcgaaggcgagtccac

SEQ ID NO: 582194 - DNA, 98 bp, Homo sapiens
attgatgccccaggacacagagactttatcaaaaacatgattacagggacatctcaggcttcactgtataaataggagaggatgagagcccagaggta

SEQ ID NO: 582195 - DNA, 95 bp, Homo sapiens
attatatcgcatcctatggctcaaagaaagatgattatggattgtcaatgaggcagatcagattccgatttgacgggcaaccaatcaatgaaaca

SEQ ID NO: 582196 - DNA, 75 bp, Homo sapiens
ctagacgacaaaatgcaaaaaaggaggccaaagactttaaccctaggttgttggatgatgtcagcttccatcctt

SEQ ID NO: 582197 - DNA, 116 bp, Homo sapiens
ccgggcgctgtgcatccacactggacgcgagctgcgctgcaagaaatgaccgctccttcatctgtcctgcagaaggttgtgggaaaagcttctatgtgctgcagaggctgaaggtg

SEQ ID NO: 582198 - DNA, 101 bp, Homo sapiens
aacagccatgcaaaggcaggggaggaagccacctcgagttgccagtagtcatcagagtaccaaaactgatctatttctcagtaatgagtgtgtgcctcatg

SEQ ID NO: 582199 - DNA, 75 bp, Homo sapiens
gcgaaaacgcacgcaggtcaagatccggacatgggtccctcggcttcctgcctcggaagcgcagcagcaggcatc

SEQ ID NO: 582200 - DNA, 110 bp, Homo sapiens
gtggatgttgttatgttgatatttgtgctgtcagctgttcatcctgataagatgcaccttgtcttacaaaacatttacaagggctggctgtgtgaactgctccgctggaa

SEQ ID NO: 582201 - DNA, 98 bp, Homo sapiens
tgctcttggcaagggacaggaagaaggaggtggctgggatgtagaagaagatctggagctccctcctgagctgttaagtgggcagaccaacatccacc

SEQ ID NO: 582202 - DNA, 100 bp, Homo sapiens
tggaaagtctggaccgagctcttggatgttcttggacttgacgatgtcctggagaacatgatggagccaccacagcgagactccagtgcaccagggaggt

SEQ ID NO: 582203 - DNA, 82 bp, Homo sapiens
agtggagtgacccgttgccagagtgcagaggacacattcagctaacgtattttagcaggtggagtgaggttgaagattcctg

SEQ ID NO: 582204 - DNA, 76 bp, Homo sapiens
attatggaaacctggtctcactggatctgacaaagttcccaaagatgtcacttgtgacctcattgtaggatgtgat

SEQ ID NO: 582205 - DNA, 78 bp, Homo sapiens
agtcatgaccactagacccacagctgttaaagcaacagggacaccatgtggcggatctttactggatcgctgctggta

SEQ ID NO: 582206 - DNA, 108 bp, Homo sapiens
cagcgccaccgggcagcagcggcgccgtgctcgctccagtcgcaatgtatctgctgagcaaaaagatgaaaacaaagaagcaaagcctcgatccctacgcttcacctg

SEQ ID NO: 582207 - DNA, 82 bp, Homo sapiens
gccgccccgccgcccccgcggccccggccggaggagacagctcaccatggatgatgatatcgccgcgctcgtcgtcgacaac

SEQ ID NO: 582208 - DNA, 100 bp, Homo sapiens
gatgaaaccccaggcagagacgggggaagcagcacgggatcccagcctcaggcctgcacggacggtgttggttgggccacaccatgttaccatatgtgcc

SEQ ID NO: 582209 - DNA, 99 bp, Homo sapiens
gtctactggggcctctggtcaagcaaagaggtctgcttcgcctgtgtagatgggaaagaattccgtcttgctcagatgtgtggacttcatattgttgta

SEQ ID NO: 582210 - DNA, 75 bp, Homo sapiens
agaatgcgctcttcaagcggatcttggttttgcgtgtgaagctgtgtggaaatgtgaaatactaccagtcacacc

SEQ ID NO: 582211 - DNA, 75 bp, Homo sapiens
ccatgactcagtccggcccttcgcccctgcagctgccgcctgaggatggagcgagaacccgagcagcgccatgag

SEQ ID NO: 582212 - DNA, 98 bp, Homo sapiens
aatgaggtagacgaagaagaggaagaaggtggggaggaagaggaggaggaagaagaaggtgatgtgagagccacgagccaaggtgggcacttgatgtc

SEQ ID NO: 582213 - DNA, 73 bp, Homo sapiens
gggctcctggacttcgcctttcccgagccctggaggtggggagaaaagcatataggcgggagcagaaaggcaa

SEQ ID NO: 582214 - DNA, 75 bp, Homo sapiens
cagaaacctgaagttagaaaggctcaacgagaacaagctatcagaagcctaaagaaactgttccaactcttgctc

SEQ ID NO: 582215 - DNA, 100 bp, Homo sapiens
tgacttgggagcttggctttgtgatgataattttccagatgatgaatctcgtcacggtttatttttatcccaaaccccttcctcccaggttaccagtggc

SEQ ID NO: 582216 - DNA, 82 bp, Homo sapiens
agggcattcagggagactggaataactgatgaggaacaagccattagcaggggacggcaaaacagaacagaaaggcggagat

SEQ ID NO: 582217 - DNA, 100 bp, Homo sapiens
acattttaagtataactcagcctgatgtcatttaccaaatccataagaatctacctgttactcgtattttggacaatcttatggagatgaagtcaaaccc

SEQ ID NO: 582218 - DNA, 100 bp, Homo sapiens
ggacactgcatcgtcaaactgatcccctggccgttggaggagcagttgcggcccctatcagattgaggtccacatcgtggccaccggcacactccccaac

SEQ ID NO: 582219 - DNA, 75 bp, Homo sapiens
gctgactgtgcccctgtggaaggagcactttcatttggacccgtggatacccattgaacagatgcttgaaacctg

SEQ ID NO: 582220 - DNA, 100 bp, Homo sapiens
ggacccggttccccggcccacagtgggggtgtgcaaacccgagagaactggtatacctgaggtgcaccggaggtgaagtcggtgccacttctgccctggc

SEQ ID NO: 582221 - DNA, 100 bp, Homo sapiens
gccattttacacttttctgatctcctccttcccttctgtgagctatgtctcagctttgtctcctcagcactctgctgtcactcaaggaagtatcatcaag

SEQ ID NO: 582222 - DNA, 51 bp, Homo sapiens
gttaaggattccaagtaactcttatttgctccagtgatccacaagctcaga

SEQ ID NO: 582223 - DNA, 83 bp, Homo sapiens
ctggctgcggccgccctgggccgggccccaccggacggaaaactttattctcaagagatttctcattccgcagaaataaggat

SEQ ID NO: 582224 - DNA, 100 bp, Homo sapiens
cctattgtccacactgagaccaagaccatcacttatgaggctgcccaggctgatgaattcatccgagcaaatgccaccaacaagctgacagtcatagctg

SEQ ID NO: 582225 - DNA, 101 bp, Homo sapiens
caccactgccacaaacgccgcaccaggtcttgtagcagcgcctcctcgcccttgccctgttggatgaataggcacctctggaagagccaactgtgtgagat

SEQ ID NO: 582226 - DNA, 90 bp, Homo sapiens
tagcattggtaaagaacgatcgtccagtggagttttaagacaattatctcctatattgatgagcaatttgagaggtacctgcatgacgag

SEQ ID NO: 582227 - DNA, 82 bp, Homo sapiens
gcagaaaccccgttgacaaggcactgctttttcatgacgatcatggaagggaagtggttgctgtgtatgttactggtgcttg

SEQ ID NO: 582228 - DNA, 75 bp, Homo sapiens
actttcggcggagggaccaaggtggagatcaaacagatgtggtctgaagctattaaaatcctgaaaggggagtat

SEQ ID NO: 582229 - DNA, 100 bp, Homo sapiens
gattgtgaggcctccccagccatgtggaactcaggcattttggagatcaaagatgggtagaaaagatgctgctactataaaacttcctgttgatcagtac

SEQ ID NO: 582230 - DNA, 75 bp, Homo sapiens
tgcagaaggtctctggagacatcttcagcagagcctggcccaactagagaatctgtgcaaacagctgtatgaaac

SEQ ID NO: 582231 - DNA, 100 bp, Homo sapiens
agccaaccaatgtgctattcaaactgccctgatgggcagtcaacagctaaaaccttcctcaccgtgtactgatttctctctgatcaaacggacagttcag

SEQ ID NO: 582232 - DNA, 73 bp, Homo sapiens
ccgcaggcaccttcgggccctcctgccttcgtgggaatgatggttagatgctgccgaacatacgaagaagtgt

SEQ ID NO: 582233 - DNA, 100 bp, Homo sapiens
cccagccagcgcagcgacggggcgctgcctggcccaggcgcacacggaagtgaaatcttctctacatataccctcagagtcttaattttgccaatcgtca

SEQ ID NO: 582234 - DNA, 76 bp, Homo sapiens
tcctgtttacctccagtgtcccttcttccacatgaaaaggataagggccgttgctccagggagaactgcaaatatc

SEQ ID NO: 582235 - DNA, 75 bp, Homo sapiens
cctgaagttgattcagatccaagacaatggcaccgggatcaggggctgaaaacacagttaaatcactttcaaagt

SEQ ID NO: 582236 - DNA, 100 bp, Homo sapiens
cgcagctcctcggcgcttcctcggtggcttccccgggtcgagcaaacaggtcctgtatggtggaagagtcggggaccctcgaatcccagcttgaagctac

SEQ ID NO: 582237 - DNA, 75 bp, Homo sapiens
tgaaagtggccgggtttaatctgctcatgacgctgcggctgtggtccagctgagctggtactcctggttaatcaa

SEQ ID NO: 582238 - DNA, 74 bp, Homo sapiens
ttcatcaggggaaggaagagcttgaggggacagtggagaagcaggaggtcacccctcctaatttctcagtgtca

SEQ ID NO: 582239 - DNA, 82 bp, Homo sapiens
ctgtcccgcggcctggagtacaacgaggtcaacgtcaccctggacctgggccagggtatttgtggtgcagcagattcccaac

SEQ ID NO: 582240 - DNA, 100 bp, Homo sapiens
ctgagcaagaggagagcagtccatcccatgacagaagcagaacggtttcagcctccagtactggggatttgccaaaaggatgaatcaatgagacacattt

SEQ ID NO: 582241 - DNA, 100 bp, Homo sapiens
ggagaacatctcgctgtcggtgaagaaggattttctattgcagcagaccatgctacgagtgaaggatcctaagaagtcactggatttttatactagagtt

SEQ ID NO: 582242 - DNA, 75 bp, Homo sapiens
ctgacatcatccatctacaaaaaggcccaggctgcaagcacaaaggaagtttgctcagtctcagccgaatagtcc

SEQ ID NO: 582243 - DNA, 80 bp, Homo sapiens
caaagcaggcgactacagccacgtgaagatgcctgtgaggagccaccaacatttgaagctatggagctcattggtaaacc

SEQ ID NO: 582244 - DNA, 100 bp, Homo sapiens
tgcctttttccctgacaaacaatgacttgtaccggatgcagcaaatattttggtgatgggtgtggaaaattctgcaaaagaaggtgatcctggaacaata

SEQ ID NO: 582245 - DNA, 100 bp, Homo sapiens
ccagcggccccgccgagagccggaggcaatggatgaacagagcgtggaggtgtaattacttcaagcctccaggatggcaatccagttccgttcgctcttc

SEQ ID NO: 582246 - DNA, 90 bp, Homo sapiens
gggccgcgcgcgggtctccgtggaagtccgtttcgtgagcagcgccaaggcctgcactgcccaaagtcttggaaacttgctggatatgat

SEQ ID NO: 582247 - DNA, 88 bp, Homo sapiens
caccgtttcctccaggacagcacctagtcgtggccggaggagtctcagagctgtcagaaagctttctgagaccaagatcttcactgcc

SEQ ID NO: 582248 - DNA, 90 bp, Homo sapiens
ctcgcctcctcgcagcagcgccatgttccccaatgaagaagactcatttcataagtttgtggctcctgaagaagtcctgccattcacaga

SEQ ID NO: 582249 - DNA, 100 bp, Homo sapiens
cgatttggcattgatgaccaagattacttggctgagagacttcgaagaatgcttggaaaggatgaggatgaaaatgttaagaaaccaaaacatatgtcag

SEQ ID NO: 582250 - DNA, 90 bp, Homo sapiens
gtggcctgcttcattgacatcgtggtggaaaacctggctggcctcaagtacagggtcatcaagggcaatcttcttggaaacagaattgtt

SEQ ID NO: 582251 - DNA, 74 bp, Homo sapiens
gggcagcgcttccattccgcggagctggtggcctgccatgggtatccatggtgacaagagtcaacaagagcgtg

SEQ ID NO: 582252 - DNA, 100 bp, Homo sapiens
ctggactgttgcgggccccgggacctgggctgggaacccgcggtggagcgggacacgaacgtggaaaccgtggctgccaggctttctgtttcactcttgc

SEQ ID NO: 582253 - DNA, 100 bp, Homo sapiens
actgtgtagggggacagctgtggctggtcctggagatcagctgtttcatgtattagccttgcacatgcggctttatagcattgactctgagtataatccc

SEQ ID NO: 582254 - DNA, 51 bp, Homo sapiens
gcaggagcgattccgtcgccaaacaggcgcagcccagcctcgaaatgcaga

SEQ ID NO: 582255 - DNA, 51 bp, Homo sapiens
agacctactgcggaaagtcggggtggagccgccaccaaaatgcagattttc

SEQ ID NO: 582256 - DNA, 100 bp, Homo sapiens
ctgtttgcctatgggacatacccagattacatagttcccaaaccagatctagattcttacgtgtttctgagagtgagagaacgacaagaaaacatactgg

SEQ ID NO: 582257 - DNA, 100 bp, Homo sapiens
agaaggcagacttcaggcagaccctcagcgctttcctcatgggattcgccagctagctaattatgtgaaatgacaatggatgctctgttggctcgattga

SEQ ID NO: 582258 - DNA, 100 bp, Homo sapiens
aagatggcggatctggaggagcagttgtctgatgaagagaagtacctgggatatagtaatcactcaatgaatataaactgcacttactggcatgctcaag

SEQ ID NO: 582259 - DNA, 100 bp, Homo sapiens
gtgagcgagaaagccgttgcctccagcaccacttctaatggaagatgagaatgtgcctactgctcctgatcctccaagtcaacatttacgtgggcatggg

SEQ ID NO: 582260 - DNA, 88 bp, Homo sapiens
aagttgatggagattacctttggggaatccaccccctgaagtcatctggctgcacaatgggaatgagatccaagagtcagaggacttc

SEQ ID NO: 582261 - DNA, 98 bp, Homo sapiens
cctggtttcaagaccctacccgcttcactggcaccatgctgggacgatgccggagtgtgaaggagtttgagaagctgaaccgcattggagagggtacc

SEQ ID NO: 582262 - DNA, 83 bp, Homo sapiens
gaggaaagcaaaggagtcagggatggctcttcctcagcttcctgcctgacacagctcacttcaagaagtgcacaatgtcagaa

SEQ ID NO: 582263 - DNA, 90 bp, Homo sapiens
cacacacaatccccatcagttgcacgtcttcgaaacctgctataaccccaaaggtaaaaagaacgtattctcatggtacttacagagctg

SEQ ID NO: 582264 - DNA, 50 bp, Homo sapiens
ttatttattcacttaacattaccaaggtcagaagagatcaattctacaga

SEQ ID NO: 582265 - DNA, 98 bp, Homo sapiens
tgctctgggacctgcaggtcccggaaggtccttagggaggaccccagacaccggagactgggaaatgacatggaaggtctttaatgtaactttaaatg

SEQ ID NO: 582266 - DNA, 51 bp, Homo sapiens
ccagtgttcaccatcctggccccggaaggtcttgggcgtctttggtactgg

SEQ ID NO: 582267 - DNA, 96 bp, Homo sapiens
caggagttcgtctcttacgtctgcggaagtgcagctgcctcagttcttagcgcaggagagctggaggtgtttcagaaagatggggaacgaaaaatt

SEQ ID NO: 582268 - DNA, 95 bp, Homo sapiens
gttcgtgcaggcgtacgaggatgtgctggagcggtacaaaggcttcgattctgcgacccgggatcctgaattcctgtggctgtctcggtataggt

SEQ ID NO: 582269 - DNA, 75 bp, Homo sapiens
tgaatatgggtcgaccattccaaaaaaatcggtgtggacactgccagcggctgcagccgacttggaatgacctgg

SEQ ID NO: 582270 - DNA, 100 bp, Homo sapiens
acaccacagaagccctccgagcccaggcaaacactggagctgtgtgcagaagttcgccgctggtctgggccggtccctgcgagaggcccaagcaggtgag

SEQ ID NO: 582271 - DNA, 100 bp, Homo sapiens
ggacagtggccttcgcgctaacgaagctgaaccttcacctagccccaggattacaaggaaaagcaccaggcaaaccaccatcacatctcattttgcaaag

SEQ ID NO: 582272 - DNA, 100 bp, Homo sapiens
accgtcgcggaccatgggcgacaaagggacccggccgaatacatcaagcaatggtaacatctttaaatgaagataatgaaagtgtaactgttgaatggat

SEQ ID NO: 582273 - DNA, 100 bp, Homo sapiens
agaaacatgctgagcctttgacagatgcttgctctgtcaaggcacagcctattgtctcctttgctcagtgtgacatcattcagacgcttctacagaggtg

SEQ ID NO: 582274 - DNA, 82 bp, Homo sapiens
gtgttcttgactccgctgctcgccatggaactgtggctgcaccatctgtcttcatcttcccgccatctgatgagcagttgaa

SEQ ID NO: 582275 - DNA, 90 bp, Homo sapiens
catcgtgatcccggcgacatactacctctggccccgagatcagaatgccgattgtttaacaaacaacagtgaagaattatcaaacagcac

SEQ ID NO: 582276 - DNA, 82 bp, Homo sapiens
aaatggtaccttgaaaatgtctatccagagttaaggtgtggacactgccagcggctgcagccgacttggaatgacctgggag

SEQ ID NO: 582277 - DNA, 98 bp, Homo sapiens
ttctgactcacacaggagaaaagccgtttgtgaaaatgtttataggaggccttagctgggacactacaaagaaagatctgaaggactacttttccaaa

SEQ ID NO: 582278 - DNA, 90 bp, Homo sapiens
ttggtgactggaagaggcaccagagactctcactctggggagaaaccccatttcatttcactttgcctaaagaaggtgatatcatcccac

SEQ ID NO: 582279 - DNA, 82 bp, Homo sapiens
gagtacctgaaccggcacctgcacacctggatccaggataacggaggctgggtttctctccgtcgacgaaaacgggaagtac

SEQ ID NO: 582280 - DNA, 98 bp, Homo sapiens
gttgatagagactcagctgaaagcatgtgcctcttttatacgaaccagatgccccctaaaaagggaggtgatggaattaaaccacccccaatcattgg

SEQ ID NO: 582281 - DNA, 90 bp, Homo sapiens
tgcaccaagagcaacctcacacggtgtgggctgaatgaagagctgccagatcccacagggctccatgaagaaggagttcccgcagaacct

SEQ ID NO: 582282 - DNA, 100 bp, Homo sapiens
caccgaattcgaatcaccctaacaagccgcaacgtaaaatccttggaaaaggtttggcaatgaggagcagcagctggcgtgggccaagcgggagagcgag

SEQ ID NO: 582283 - DNA, 98 bp, Homo sapiens
ggaggccctgccctcagagacgcgccccctagtggaagcagagtgggaagcagagctagcaacatggaccacagatatactggtgactccgctctcct

SEQ ID NO: 582284 - DNA, 73 bp, Homo sapiens
gaaaaccagttattgaatatcaagaggaggagttgttgtgatgtaaattggagtcaaccaggtgaaaagaagt

SEQ ID NO: 582285 - DNA, 100 bp, Homo sapiens
gcgacttctaggagcctggggttcggcgctatggaggagctcgatggcgagccaacagtcactgatgatgactttgagttcactggcagccacctgacag

SEQ ID NO: 582286 - DNA, 97 bp, Homo sapiens
agggacatcgtggagacggtgctcaacctgctgagatctgtatctgtggacctgaatgttgatccctcgcttcagattgacatacctgatgcgctca

SEQ ID NO: 582287 - DNA, 80 bp, Homo sapiens
cacttcaccggcttcaacagcagtaccctgaaggacaacttgggcggtgctgacctggaggggaagcggcagatgaaggt

SEQ ID NO: 582288 - DNA, 97 bp, Homo sapiens
cttggtttcgggatctcggtgctgcagacggcgagacctcctgcacaggggccaaaccagtgctcctgccacctctctggctgccccctagagcctg

SEQ ID NO: 582289 - DNA, 75 bp, Homo sapiens
tgtcagaccctaaaggatcaaccctctgcatacagtaaagtttatagcattcttcgtcatgttgctgaggtgtta

SEQ ID NO: 582290 - DNA, 76 bp, Homo sapiens
gagagaagctatgtttagcatcttctgtcatgagaagtggcgatcaaaattgatggagtctcgctgtgtcacccag

SEQ ID NO: 582291 - DNA, 100 bp, Homo sapiens
caacattctctttaccttagatggagatatcaaattggaaacgggtatgcaggagattagaagccagtgggcatgagcgtggctgccaccaggtgaatgc

SEQ ID NO: 582292 - DNA, 83 bp, Homo sapiens
cgttcgttcgtttccagcctcaggaatttatggtcgcctttttgaatgagggtgaagcagctgaccgatgaggaggagtgttg

SEQ ID NO: 582293 - DNA, 83 bp, Homo sapiens
gtctgaagcctgagtatgatgcggtggtgataggagcaggagagccagtgtaactccttcaagactggagtgacacacactgc

SEQ ID NO: 582294 - DNA, 74 bp, Homo sapiens
ctacttctgtgacaagtgccaaaaatggataccagccagcacttcaaaaaacgtatcagaagatacttcgagaa

SEQ ID NO: 582295 - DNA, 83 bp, Homo sapiens
cacaattaagaagtttaacacttgatgttcaagagggtgttttaacgctgcgggcaaaacctccacctcctgatgaatttctt

SEQ ID NO: 582296 - DNA, 75 bp, Homo sapiens
ccgggggcgtctttcagagcattacgattttaccaaatgttgcaagaactctggagttcttatggtagtaaaatg

SEQ ID NO: 582297 - DNA, 100 bp, Homo sapiens
gatcatgtctgcgagccaggattcccggactgcctccgggcctgccaggagcagatcgaagccctgctggagtcaagcctgcgccaggcccagcagaaca

SEQ ID NO: 582298 - DNA, 74 bp, Homo sapiens
tgacagagtggagccatggctagaggttgaaatcacaaagattagacacctttttagataggtgttcttcagca

SEQ ID NO: 582299 - DNA, 88 bp, Homo sapiens
gcagcgggggcagtcagagcggagccaagatgcgaatgggacaggagacaatttatccagcatgttgctagaaaatctaactgataat

SEQ ID NO: 582300 - DNA, 75 bp, Homo sapiens
ctattttcacgttttaatgccgagaggatctcactggcatcgaatctatggatcagtgtcgccataccttggaac

SEQ ID NO: 582301 - DNA, 50 bp, Homo sapiens
cagcatccgagagcccggactggagattttgtatcagattgtaccatctc

SEQ ID NO: 582302 - DNA, 50 bp, Homo sapiens
gaaaacaacttcgagggcagaatgcctgaggaaacccagacccaagacca

SEQ ID NO: 582303 - DNA, 83 bp, Homo sapiens
tccaagaaaaatgtccttaaagcaattgagcaggctgatctactgcaggagacctgcctagagctggaacgttacctccagag

SEQ ID NO: 582304 - DNA, 89 bp, Homo sapiens
gttaaggattccaagtaactcttatttgtgtcctgctatagactatactagacacacacttgatggtgctgcatgtcttctgaatagca

SEQ ID NO: 582305 - DNA, 99 bp, Homo sapiens
gtgaaatcctgtcctgaagactgtaaggaccgtataatagacgctggccccaaaggaaactactctcgatttatgaatcacagctgccagcccaactgt

SEQ ID NO: 582306 - DNA, 98 bp, Homo sapiens
gtcggggaggcaagatgatccaccagcggttccatcctacacttgggtgtccctggccagtgtccttccacctgtccacaagcatggggaacatcttc

SEQ ID NO: 582307 - DNA, 82 bp, Homo sapiens
tacatttgttgtcaacaagaacaatcctttcatcttcttgggcttgaaagtgaagtaagaactctgctagagaggaaatggc

SEQ ID NO: 582308 - DNA, 100 bp, Homo sapiens
actctagtaacccgcgaaatgatgggatagcgttgcaaatccttaaaagagtcttaacgagaccatcatgcagacatcagagactgggtcggacacaggc

SEQ ID NO: 582309 - DNA, 100 bp, Homo sapiens
cctcctgagtagctggcattacagggtatcggtacagcaatcggagagctgcctccatatttcatggccagagcagctcgcctctcaggtgctgaaccag

SEQ ID NO: 582310 - DNA, 82 bp, Homo sapiens
gtggacgtcactggccctggtggggattgacagccacgggaagcagcccctgtcaaagggaacaggaagcagtccacggagg

SEQ ID NO: 582311 - DNA, 75 bp, Homo sapiens
tattgtaccgcataactgaagccactaagacggaaacagagcaaatgcagcgttacaatcaaagacttattgagg

SEQ ID NO: 582312 - DNA, 100 bp, Homo sapiens
atctatggtgcagatattaatgggagcatatatgatgaggcttcgggagcaggaaagaaaagaagcagaagaagctagtcaaaaggaaatagaagaatgg

SEQ ID NO: 582313 - DNA, 74 bp, Homo sapiens
agttctctcgatcagggcatacatctttcttcgacaaaggcaggacccagtgctccataaaggataatagtttc

SEQ ID NO: 582314 - DNA, 90 bp, Homo sapiens
ggtaaaggatgctgctgaagccaccctaacatgatggcccactgcgtgaccttggttcagctgtccatttcctgtgaccatctcattgac

SEQ ID NO: 582315 - DNA, 75 bp, Homo sapiens
aacagttcatagatactacactgaatttcctacagttcttgatattacaggtacaccaggggttggaaaaaccac

SEQ ID NO: 582316 - DNA, 101 bp, Homo sapiens
agaaaatcggtgaagagaggttttgaattcacgcttatggtagtgggaaggaaaatcacctcggcagtgtttgaaggaaggatactgcaactctttgaagt

SEQ ID NO: 582317 - DNA, 100 bp, Homo sapiens
aaaagagggtggaaaaagcagggaggttatgaggcttaataaagaaggtaactgtgacatttgatgatgtggccttatatttttcggaacaagagtggga

SEQ ID NO: 582318 - DNA, 102 bp, Homo sapiens
aagaacagtgcctggatgtggtgacccactggatccaggaaggtgaagaagccttgaaggatgagcgtttccagcttgaggagttctccccacgccgggtgc

SEQ ID NO: 582319 - DNA, 100 bp, Homo sapiens
cacagaagcaccaattctcccacaatagtttcacctgctattgtttcccccacccaggtgaatctggattgggaaagtcgacattaatcaactcattatt

SEQ ID NO: 582320 - DNA, 123 bp, Homo sapiens
ccgactacaagggagagaccgtcttccattatgctgtccagggtgacaattctcaggtgctgcagctggtggtcttcgaactggaaaacttccagggccgtcgagcagaattctcgggggagt

SEQ ID NO: 582321 - DNA, 100 bp, Homo sapiens
cagatctggtcacctgtctggagcaaggaaaagatccctggaatatgaagggacacagtacggtagtcaaacccccagcaacttgagttggtggaaccaa

SEQ ID NO: 582322 - DNA, 120 bp, Homo sapiens
tctctctctttcttgttggctctggaggctttggtggaaaacggacatcagacaaagtcaagatgggagtttagctcttgttgcccagcctggagtgcagggctgtgatcttggctcact

SEQ ID NO: 582323 - DNA, 75 bp, Homo sapiens
cggatcgtggctaagtatctgaagagaacccagaactagttgcccggctggagaagattaagatacagctggcca

SEQ ID NO: 582324 - DNA, 75 bp, Homo sapiens
acctgctaacagaactggaccttttcgctacctgaacgacctggagcgtattgcacagagtgactacatccccac

SEQ ID NO: 582325 - DNA, 75 bp, Homo sapiens
gctgcgcgacccccgcgcatgctacagagggccggagctggagatgtggtctctgggagtcactctgtacacgct

SEQ ID NO: 582326 - DNA, 50 bp, Homo sapiens
gggacagccagccagcagcaggagggttgaagcactggacaatgccacat

SEQ ID NO: 582327 - DNA, 100 bp, Homo sapiens
gtcaaagctcaaagccttgcagaggccaagctcatgtacagtcaggaatggttccttctcatccaactgcccatgcgccaatgatgctaatgacgacaca

SEQ ID NO: 582328 - DNA, 50 bp, Homo sapiens
cgccgggtctgaagcctgaacaggtaacggaaggccattggaaatggggc

SEQ ID NO: 582329 - DNA, 75 bp, Homo sapiens
cccggtggccgccgcgcaggagcctcccggagctgagtttatgtggccgaggcagacaagtggaattaggccttg

SEQ ID NO: 582330 - DNA, 50 bp, Homo sapiens
cttcctcacctccctcgtcacgggtctattatcctcccagtccacaacgc

SEQ ID NO: 582331 - DNA, 75 bp, Homo sapiens
gatccgatggagaggctgagctgctccaggacttgggattggaaaatgccttttatgaacatgcacagacttatt

SEQ ID NO: 582332 - DNA, 50 bp, Homo sapiens
gccaaggtcaacaccctgattcggattgaaccagctgccctttgaccctg

SEQ ID NO: 582333 - DNA, 73 bp, Homo sapiens
aagtggtgatgcaagaagtttctaggaaaggccggacaccagttatacatgggaagctgttgataccaaaaat

SEQ ID NO: 582334 - DNA, 100 bp, Homo sapiens
gtttccgcttcatatgaaacaaccttgtctcaagaaagagattctactatatgggcttttttaaacgggtccggccacctcaagaagaacaagaaaggga

SEQ ID NO: 582335 - DNA, 75 bp, Homo sapiens
cgaacgcttcgctggccatttaggagctctgctcaaagccagacgaatggcagttcggaaaaccctcattcctcc

SEQ ID NO: 582336 - DNA, 101 bp, Homo sapiens
atcagtctttgacaagtgatgagaagctgtcggagcttcccaagaagttttcccatttccagaagttagccaagatgaacttaatgaaatcaatcagttct

SEQ ID NO: 582337 - DNA, 75 bp, Homo sapiens
gagaaaacctggaccaggcacgggaagatgcccaggaacgtcctagagctgattgagttcttcgaggaggaggac

SEQ ID NO: 582338 - DNA, 100 bp, Homo sapiens
cgcctctgcgtcctcaacgagatcttgggcaccgagagggactacgtgggcaccttgcgcttcttgcagtcgtgagaaggcaaccaaagtgcaggacatc

SEQ ID NO: 582339 - DNA, 75 bp, Homo sapiens
gcgcggccagtggtgtcttcctggcaatgccctgccctaaggaagacactcccaattctgtttgggagcctgcga

SEQ ID NO: 582340 - DNA, 100 bp, Homo sapiens
gtgcacggcggccacctgagtggcgcggcggtgtcaggagcttgatcctggatagtgtttgtatgatgtgcacacgtctctgcaaatgcttgtttgaaga

SEQ ID NO: 582341 - DNA, 100 bp, Homo sapiens
tccccagggaatgccacagcatcctccagcacctcagggtgaaaaggtggaggggctacaagctcaagccctatatccttggagagccaaaaaagacaac

SEQ ID NO: 582342 - DNA, 80 bp, Homo sapiens
cttccgaggttctcacagagttcagatttgagttctgtgaacctgcatttgttgttggtaattgcctccagatagcttct

SEQ ID NO: 582343 - DNA, 97 bp, Homo sapiens
tttggagatcatattcattggaggacactggaagatgggaagaaagaagcagctgccagttctccaaatgacaagaagtctttttgctcaattgaag

SEQ ID NO: 582344 - DNA, 109 bp, Homo sapiens
atggctactctggagttgaggtgcgagttacaccaaccaggacagaaatcattatcttagccaccagaacacagatatgtagaactcttcttgaattctacagcaggag

SEQ ID NO: 582345 - DNA, 75 bp, Homo sapiens
tctttaagaaaatcagataacttgtactggagagaaatcctacaagtgtgattggcataaacccgggactaatgg

SEQ ID NO: 582346 - DNA, 100 bp, Homo sapiens
agccggaaggacaccaagatgcggatccgggcctttccggttctaaatgagaagaaacttcaagaggttgatagtttatggaaagaatttgaaactccag

SEQ ID NO: 582347 - DNA, 75 bp, Homo sapiens
tcctctggttctggtgggaacccaggctcgagctaatccaagatatggggttccatgtcatttactgaatgaaat

SEQ ID NO: 582348 - DNA, 99 bp, Homo sapiens
ctcacagtcaccgctgtcattgtggaacatgagcctttgactgctcctcagctcttggtcccagatgtctatctaaatctgaagctttccagtgaaatg

SEQ ID NO: 582349 - DNA, 100 bp, Homo sapiens
cgagtcctagcgcctggcctgcgcgccgctgcccgcgccacaggatttttagactctgaggagcagttggagctaatccacattatggaaatggaaacca

SEQ ID NO: 582350 - DNA, 89 bp, Homo sapiens
atcagggcatcggagagtgccacattaatggagaaagcttcttgctatctacctccaccatgatgaaagtgtgttaaccaacgtgttct

SEQ ID NO: 582351 - DNA, 80 bp, Homo sapiens
gcaaaccacccaagtctgcaatcttaccagggaggccaagcgaccacccaaagaagctacacaacgcctgttggcagccc

SEQ ID NO: 582352 - DNA, 50 bp, Homo sapiens
ctcgaggatgccagtttttagggccaggtgggaccatccagttgcaggaa

SEQ ID NO: 582353 - DNA, 80 bp, Homo sapiens
ggaatgattctgatgatgatgatgaggttttgaacgaagaatgtgatcagaactggtacaaggcagagcttaatggaaaa

SEQ ID NO: 582354 - DNA, 50 bp, Homo sapiens
aagagcaatcagtaccatctggtttgttaagatgaaacactgcagaaagg

SEQ ID NO: 582355 - DNA, 110 bp, Homo sapiens
cgctcagtaacacgtccccaggagactcgcaggagcaacacgtgatgtgtctacttatcaggacaatgcagatcttcgtgaagactctgactggtaagaccatcaccctc

SEQ ID NO: 582356 - DNA, 101 bp, Homo sapiens
aaaggcaaggaaacatcttttgacaagatgtcacctgaaagtggtcacagccgcatctttgaaggtttatcttgcagattatggactttcctacagatatt

SEQ ID NO: 582357 - DNA, 75 bp, Homo sapiens
gctcatctggaattttgccgatttcatgactaaccagtaaagaatcttcaagagggagacatagggaaaaggaag

SEQ ID NO: 582358 - DNA, 111 bp, Homo sapiens
aaggaacgaggcaaggagctaaagcagcgtgcgttcagccctggggaacaagatcactcaaggtgaaggataatctactaataccagcactttgaatgaaaatttgtttct

SEQ ID NO: 582359 - DNA, 121 bp, Homo sapiens
ggtgggtctcggaaaagttcattgttgagggcttaagagatttggaactatttggagataggagcatgctgctatgtggaatgttcagctttaacccagaagggattgaagactgtttttg

SEQ ID NO: 582360 - DNA, 75 bp, Homo sapiens
ctttacagctcaccggatgtaaaagaactctggctagagaccctccaaggacaatgcagatcttcgtgaagactc

SEQ ID NO: 582361 - DNA, 82 bp, Homo sapiens
tggacatggacatgagccccctgaggccccagaactatcttttcggtttggtgcacctcgatttggaggaagtagggcaggg

SEQ ID NO: 582362 - DNA, 100 bp, Homo sapiens
ttgacagataaagatggtgaacaacctcaaatactgctggttatcctacctacaaagaaaaagtaaagaaaaggcctggaggccgcccagaagtgatcta

SEQ ID NO: 582363 - DNA, 88 bp, Homo sapiens
tgccagcagattcagtgtcatgtgaggacgtgcttcctgcttcatagataagagatctcaggaaacaggctcgacagctggaaaatga

SEQ ID NO: 582364 - DNA, 75 bp, Homo sapiens
gaaggaccagtgtctgatcagctgctgcgtgctcagccccagagcaggagggagccatggatttgctgcgggagc

SEQ ID NO: 582365 - DNA, 75 bp, Homo sapiens
tccttgaattctttgcgtggggccttttgacaactccaatgttgactgaggataagatcaatgccctcattaaag

SEQ ID NO: 582366 - DNA, 80 bp, Homo sapiens
ggacttgatgaatataatccattctcggattctagaacatggacagtttgcggttgtgaagaaatgccgtgagaaaagca

SEQ ID NO: 582367 - DNA, 75 bp, Homo sapiens
cgccaagcacgtggtgggctatggccaccttggtgcatctgcagacgcagcaggaggtgaagctgcgcatgacgg

SEQ ID NO: 582368 - DNA, 54 bp, Homo sapiens
ttgggaatgattctgatgatgatgatgagagctatcagcttcccagtttgcaca

SEQ ID NO: 582369 - DNA, 75 bp, Homo sapiens
tgcatttcctgaaggggaagagcaagatgcagtcagtggagattgagaggatccagaatccagatctctggaata

SEQ ID NO: 582370 - DNA, 100 bp, Homo sapiens
ccaggcccgggagcgcgatgtggagcgcttctttaagggctacgggaagatcctggaggtggatctgaagaacggctatcagaggactcctgaaacctgg

SEQ ID NO: 582371 - DNA, 82 bp, Homo sapiens
gccctcaagagctggatttgacacatcaagggcagccaattactgaggaactgtggctgcaccatctgtcttcatcttcccg

SEQ ID NO: 582372 - DNA, 75 bp, Homo sapiens
ccgacatcttcctgcacatctctgagtcatgctttcagaacgaaaaggcacagatgagctctatgctgtgaagat

SEQ ID NO: 582373 - DNA, 100 bp, Homo sapiens
acctcttggagattctccagggagtctttcaaggtcgaaaggggaagagcctgatgaaaacaaaggcgatatgcattatgatgctgagattatccttaaa

SEQ ID NO: 582374 - DNA, 80 bp, Homo sapiens
aacattggtctaaagtctttccaaaaggtcaaggttcacaaggctgctgagcttcgtgcttatctgaaatctaaaggagc

SEQ ID NO: 582375 - DNA, 98 bp, Homo sapiens
aatgggccaagctccactgttcagatgcaaagtctcacagaaagttctccgctcccagacatgggtccctcggcttcctgcctcggaagcgcagcagc

SEQ ID NO: 582376 - DNA, 100 bp, Homo sapiens
gcgactgtcattcacaaccccctgaaagcgttatgaagacagtatggagtttccagaccatagtagacatttgctacagtgtctgagcgagcagagacac

SEQ ID NO: 582377 - DNA, 75 bp, Homo sapiens
ggcgcagcccacgctcatgatcgacttcctcacccgcgcctgcgacctcgacctcctgccccccgaggtctgcag

SEQ ID NO: 582378 - DNA, 100 bp, Homo sapiens
ctcgtcagcctcccgccggccgtctccttaacaccgaacaccggccagatttgagtgtgtgaatttttgagtgaaacctggaacccaaatgagaagaaat

SEQ ID NO: 582379 - DNA, 97 bp, Homo sapiens
gcctcggccacttggttctgccagatgttcctggggttactgtaaatgggaaggacaggcagagctaaacaagggctgtcagaaatcccgatgatct

SEQ ID NO: 582380 - DNA, 100 bp, Homo sapiens
gagcggagaggagatgcacacggcactcgagtgtgagaacattctagtatgccagtagaaaaaaatatcactttagaaaggccttctaatgtaaatctca

SEQ ID NO: 582381 - DNA, 100 bp, Homo sapiens
ttttacctgtttggattaatatgtctctgttcagtgccctgggagctgtcattgccctcctgctctggggacagctttttgcagtggactcaggcaatga

SEQ ID NO: 582382 - DNA, 100 bp, Homo sapiens
tcccacaagtagctccagcgccgtaagcgaggcctccttctcctacaaggttattaccccaagaaaaagccagtagaataactactgccttcattttcac

SEQ ID NO: 582383 - DNA, 100 bp, Homo sapiens
caaatccagtgaaaagtcagaccgctcatcacgaacatcatcgtctgatgaagaagaggaaattcgacaccaaattttggaacttaaaaagaagattctt

SEQ ID NO: 582384 - DNA, 75 bp, Homo sapiens
tgtcattctacagtgtttcagatgacaatgctccctctccttatatgtttgtagaagactatgaacctaccaaag

SEQ ID NO: 582385 - DNA, 75 bp, Homo sapiens
gtagcaggcggcggcggcggaacgccaggcaggtgctggagaatctggtaaaagcaccattgtgaagcagatgag

SEQ ID NO: 582386 - DNA, 101 bp, Homo sapiens
caatggacctgcctgggcatagacttccttaagataaaaatgaatgccatttcccatccagtactgaagtgttaaagttagaagacatttgctaagtcaaa

SEQ ID NO: 582387 - DNA, 75 bp, Homo sapiens
gcatctatgacccagcagacaattatatccagatcgagagacagaagattctgaaagggttcaatgaaatgagag

SEQ ID NO: 582388 - DNA, 75 bp, Homo sapiens
caggactccaaaatggcgtcagttgatcccgtaccagctttggatctcggacagcaactccagctcaaagtgcag

SEQ ID NO: 582389 - DNA, 98 bp, Homo sapiens
ggctgtcagcccagcggctggcgaggaggccccagccgcgaaggagccgggcgcgcaggccggcctggagggcgtccgagctgggccacagcctgaac

SEQ ID NO: 582390 - DNA, 100 bp, Homo sapiens
ctgctgtccagtgtcttcgatctgcttctgatgaagtgattcgcaaggggtggctcaccatcagcaacattggcatcatgaaaggcggctcgaagggata

SEQ ID NO: 582391 - DNA, 100 bp, Homo sapiens
ccgagagcggattatcgcagaatgcaacgccattcgccaggctcttcaggatctgctttcagagtacatgaacaaccttgagattaagaaccatgtattc

SEQ ID NO: 582392 - DNA, 98 bp, Homo sapiens
tcagaacacaaacaaaacctgtgaagagtgcctgaagaacgtctccgcctcagcaactgttgccattcccaaagaacaccatcgctttgttattggca

SEQ ID NO: 582393 - DNA, 101 bp, Homo sapiens
agaggtcagagagagacagctcacgttccgggtacatgtcccagagcaagcacacggaggcccgggagctcatgtactcgggagccctgctcttcttcagc

SEQ ID NO: 582394 - DNA, 83 bp, Homo sapiens
ctccggcgcagcccggaaatgtccggcaagatcgagaaagcaggacttgaaagaggagattgatattcgactctccagggttc

SEQ ID NO: 582395 - DNA, 98 bp, Homo sapiens
aatggaggaccatccataattcctatctttaaaagaggccaccatgaagactttgcttagaacttggtcagaattatatagagcatttgctcgttgtg

SEQ ID NO: 582396 - DNA, 100 bp, Homo sapiens
aacagattcagtggcctgcattgtactatactggcaattgctggagaagattttgcaattgttgcttctgatactcgattgagtgaagggttttcaattc

SEQ ID NO: 582397 - DNA, 100 bp, Homo sapiens
gtcgaggacaggaagtgagtcatcacaaactgggacctccaccacatctagcagaagtaagtcagaccaggcacttccggggaaggaaaaatcgctgcta

SEQ ID NO: 582398 - DNA, 101 bp, Homo sapiens
cgtggctgctcgataaatcagacagaacagttaatcctcaatttaagcctgatctaacccctagaaacaggctcttaaaaacatgggtgaaattctgaaag

SEQ ID NO: 582399 - DNA, 80 bp, Homo sapiens
ccatggtttacagagcactagaagctccttccattcagatccaggcgcttgaagaggctcagaaagctatccaacaactc

SEQ ID NO: 582400 - DNA, 100 bp, Homo sapiens
ctattccactggattgggaaagaccatggcagccgattatgtttcgaggggaagtacgtttaaatgtggaagagaaaaaaacaagagctgcaagagagcg

SEQ ID NO: 582401 - DNA, 82 bp, Homo sapiens
tgcccccccttccccacgcaaccccagatccatttacactttacagtctctaattaacagaagatggcaaagcccagccaca

SEQ ID NO: 582402 - DNA, 100 bp, Homo sapiens
cgcagaacagccggcagctgagcctggtggcctccgttctcttggcccagcaactactcctacccaccgtgcaccctgacggatgaggagacccggacgg

SEQ ID NO: 582403 - DNA, 88 bp, Homo sapiens
ggcggcacgcacgcggtgcagggtaacatggcggatgcggaaggtcaagtctggcaccatctttgacaacttcctcatcaccaacgat

SEQ ID NO: 582404 - DNA, 82 bp, Homo sapiens
caaaggagagcacaaccatcgcagttggaagcccatggggcaggcccggaggctgtttgatgtcctgcacgagcccttcttg

SEQ ID NO: 582405 - DNA, 98 bp, Homo sapiens
aaatgcaacaacacaaacagtcccaagtggaagcaaccccttacagtagctgcagcccgatgcaacaaaggcatagaagtactgtttgcagtggctct

SEQ ID NO: 582406 - DNA, 98 bp, Homo sapiens
tggggccgggccgccgcggctggtgggcgctgctggcgctgcagctgcacttgctccgggcgctggcgcaaggtagaaaatctggtgtattaactgtg

SEQ ID NO: 582407 - DNA, 82 bp, Homo sapiens
gacaagccgctggcagccgcggatctcaccgccgctcagggtttcagagcagcgatggagaaattaaatacttgcaattagc

SEQ ID NO: 582408 - DNA, 100 bp, Homo sapiens
tgaagatctggagcccacctgctttgaaagaaatgatgatattggacatctctggaaatttcaactcctgcccctcctaaagctgaagccaaagcgaagg

SEQ ID NO: 582409 - DNA, 82 bp, Homo sapiens
ccgcgcctgcacttagccccgcgcccgagggcgaccattgacgaggtggagacggacgtggtggagattgaggccaaactgg

SEQ ID NO: 582410 - DNA, 90 bp, Homo sapiens
gggagatggaaccaaggagaaaccatttaaaacaggtctaaaggctatggaaagggcaaatggaatggagctggatggtagaagaattcg

SEQ ID NO: 582411 - DNA, 75 bp, Homo sapiens
agtggacgagcacgacttcagcatgagacccgccttcggaggtcagcccaaggccaaccccactgtcactctgtt

SEQ ID NO: 582412 - DNA, 90 bp, Homo sapiens
ctaccccttctggagaggtgcgctatgctgctgtaacacagtttgaggttgcaaagacagttgcacagaggctcaacacagatccaatgt

SEQ ID NO: 582413 - DNA, 100 bp, Homo sapiens
gatcggtgggtttatctcaaggcctgagtagccggtaacaaacgagggttcccgggattggaccgacgcagccatggtggaaattcttgcttctcttcag

SEQ ID NO: 582414 - DNA, 100 bp, Homo sapiens
cctactggaaggacgacgacaaacacgtcatgaggaaggagcagcgcaaggtgtagacggggcactgccttcagagcaggtcctgccagcctcgctggag

SEQ ID NO: 582415 - DNA, 82 bp, Homo sapiens
aaatcttcacagtgctgttactaaagcctgcctttccagagaccaagaagcgtcagtgtaaagttctttttgagtacattcc

SEQ ID NO: 582416 - DNA, 75 bp, Homo sapiens
agaaatacctgcagactcgggccgtggccgcctacaggacctcagcagccatgtcgaagccccatagtgaagccg

SEQ ID NO: 582417 - DNA, 155 bp, Homo sapiens
atctcagcaacggacactttcgcaacatcaagggagttttccggggccctctcagcaagaacgggaacaaaactctggaaaacctcacagcacgggtagctctgaacggattcagctctcaggaatgtataatgtccgtaaaggcaagatgcagt

SEQ ID NO: 582418 - DNA, 82 bp, Homo sapiens
tgaacaaatccgggggcaaggccaaaaagaagacctgcctagagctggaacgttacctccagagcgagccctgctatgtttc

SEQ ID NO: 582419 - DNA, 100 bp, Homo sapiens
tcacagccaccggtaccttcttccaggtctgagcagagggcggggtgcaggcggaatggccctcgtgccctatgaggagaccacggaatttgggttgcag

SEQ ID NO: 582420 - DNA, 82 bp, Homo sapiens
tgaccagaagaggtttagtgccctcctgagtgactgcgtcaggcatctcaatcatgctccagaaatcctgaactatgatccc

SEQ ID NO: 582421 - DNA, 76 bp, Homo sapiens
ctgcacctggacgtaatggacgggtggcgacatgtctaagaatgtgagccagtcacagatggcaaaattgaaccaa

SEQ ID NO: 582422 - DNA, 100 bp, Homo sapiens
cggcaacctccgggactctgacggtgaccaacttattagaaaaggtcaagctacaacttcaagcagaagagagaggagttgtgtctatcaaaggagtgtg

SEQ ID NO: 582423 - DNA, 75 bp, Homo sapiens
aagaggtctgcctggttctgggaaaacaacattgtctcgggcatttggtccactttggtgccatgaagacatcac

SEQ ID NO: 582424 - DNA, 75 bp, Homo sapiens
tggtcgccaccgccgtctgctgttacctcttatccgcaaggatgctctccgggcgctcaactttgcgtacacggt

SEQ ID NO: 582425 - DNA, 75 bp, Homo sapiens
tgccttgtatttccagagaacaggcccagaataaagagaccagtgttttagctgctgcaaaagtgattgacacta

SEQ ID NO: 582426 - DNA, 102 bp, Homo sapiens
gaaaaattacagcacatctcagtgaatttgcaagtggatttaagtgccctgtatgctcaaaatttgtatcctcagatgaaatggatttgcatcttgtaatgt

SEQ ID NO: 582427 - DNA, 87 bp, Homo sapiens
taggagtgctgagcccgcggaaccgcagccatgtctctaggtaacaggagaattcgagtggacgttgctgatcaagcacaggataaa

SEQ ID NO: 582428 - DNA, 75 bp, Homo sapiens
tgttatgaaaatgttttgaagcaagtaaaggctggacaccagcacaaacacagagcagtctaaagcaaccgagca

SEQ ID NO: 582429 - DNA, 75 bp, Homo sapiens
gggacaggagcatgggtggtaccctggacctgtacagcattgatggtaactcacgtagtgctccacctacacgag

SEQ ID NO: 582430 - DNA, 100 bp, Homo sapiens
ccagcccgcgaatccggccggagcattcttgttatttaacacgggaaggaggtgacttcgcctgtgatggacttccagtgtgagcactggccagagtgac

SEQ ID NO: 582431 - DNA, 117 bp, Homo sapiens
atccctgcgcgggctcgagagctcgccccgaacgggggtcttcctcctccgccgttgacagcaattctgtggtgttcttggtcacacatttatggagtttctgaagggcagtggaga

SEQ ID NO: 582432 - DNA, 100 bp, Homo sapiens
catctgctacaatgtactggatcgaaatgtccatgagaaaaagcttggagataaagttgctttttactggtcacagactgggatgagcaacgggctgaag

SEQ ID NO: 582433 - DNA, 50 bp, Homo sapiens
gccagggcccggactcggacgcgtggtagatggggtttcaccgtgttagc

SEQ ID NO: 582434 - DNA, 50 bp, Homo sapiens
tgtttaccaaccctgataatggtgaagcacttgaggaagaactggattcc

SEQ ID NO: 582435 - DNA, 82 bp, Homo sapiens
gggtttgaacggaatgctggagtcagtggaagacggagctggtcggcccgaaggctgaccaactgactgaagagcagattgc

SEQ ID NO: 582436 - DNA, 90 bp, Homo sapiens
tgcgaccgtcgcggaccatgggcgacaaagggacccggtgtgctgggcatcaaggtgaagatcatgctgccctgggacccaactggtaag

SEQ ID NO: 582437 - DNA, 80 bp, Homo sapiens
acacttacatctctagataacagtctgcactttcacccgtttcagagaaccatggagtctggcagtaccgccgccagtga

SEQ ID NO: 582438 - DNA, 74 bp, Homo sapiens
tcctgcgcgccggccagatggtcacggatgggcgtgtgtcctacccgaagctgcacctgcccttgaagaccctg

SEQ ID NO: 582439 - DNA, 100 bp, Homo sapiens
ccgggccgaggccaccacactgcatgtggctccccagggcacagccatggctgtcagtaccttccgaaagctgcatctctgggaaaggacctggggctgg

SEQ ID NO: 582440 - DNA, 102 bp, Homo sapiens
gctctccgcaccgcggcttaaatgatgtattttgtgatcgcagcgatgaaaggattttttatcaagcagaaatgcatcgaacaacgagaatcaagatcactg

SEQ ID NO: 582441 - DNA, 100 bp, Homo sapiens
ggctgggagagggaagaagtgcccagaaggtcggggctgtcggccggccacagggatgtcttttactatagggccaattcctgtccccccagcagcatgg

SEQ ID NO: 582442 - DNA, 74 bp, Homo sapiens
agtcttccagcccagtgtgccagcacattgataaggtgttcaaacataaggaactgcaacagcagctcgtggat

SEQ ID NO: 582443 - DNA, 100 bp, Homo sapiens
atggtcttccgtaacctgcgggagaggtttggaattgatgatcaagatttccagagagtcccacgaactggctgggtatacagaaatgtccagaggccgg

SEQ ID NO: 582444 - DNA, 97 bp, Homo sapiens
cacatggagcacagaaatcaatgttagcagatagccagcccatacaagatcgtaacaaaatccagtctcatagcagaggagaatataatgtttacag

SEQ ID NO: 582445 - DNA, 75 bp, Homo sapiens
cactttccaaagtggatgcctccggggagcaaaatgatgcttcaacacccaggccaggtctctgcctcggaagtg

SEQ ID NO: 582446 - DNA, 100 bp, Homo sapiens
ccctgaccaccacttgctctgcgctgaggtgctgggacagccatggtttcagacggtgacgatgcctggggagcctgtggacgtggcatgtggcgtggac

SEQ ID NO: 582447 - DNA, 97 bp, Homo sapiens
ctgaggaggagggtggcccttgggaagaagaactacttgtgtttttgcagcctgggaaccctggtggcagtatttgactacagtcattccttatgag

SEQ ID NO: 582448 - DNA, 80 bp, Homo sapiens
aaaagagcgttgagctcagagaagagcaactcggagttttgggggtgtgcttttattctaccttgtaaatactgttattt

SEQ ID NO: 582449 - DNA, 82 bp, Homo sapiens
ctcatctcgctcggctgcgggaaatcgggctgaagcgactgagtccgcgatggagaaattttactgcaggataaaactccag

SEQ ID NO: 582450 - DNA, 50 bp, Homo sapiens
gtccagcccaggaaaatggagaggagaccagccactaactggggcgtaca

SEQ ID NO: 582451 - DNA, 91 bp, Homo sapiens
gtccttctccactttcgccagcccgtgccgcgagcgcggcctgcaggagacttcccaagtaagaagcggaagaggagccgctggaaccaag

SEQ ID NO: 582452 - DNA, 75 bp, Homo sapiens
gaaaaacagtagcagtttcctggtcctgttcctcatcaacaccaaggatctgcatggaatcccccaaagaaggta

SEQ ID NO: 582453 - DNA, 100 bp, Homo sapiens
caacactgtgtggatccccgatgtacatgatcaaacagatgatggaggcagcaacacgacaaatcgaggagaggaaaaaacagctgagcttcattagccc

SEQ ID NO: 582454 - DNA, 90 bp, Homo sapiens
ggctctgggaaccacccttctactttctgtctctaggaatttcactactctaggttgcactgctgtgatccatcctcatctcctaaagat

SEQ ID NO: 582455 - DNA, 98 bp, Homo sapiens
gaaaacaggtgggcctgatggtgcaggagaggtttggctgggtggagaaggagacatactactgaccccattggaagaagaaccaggcatggaaagat

SEQ ID NO: 582456 - DNA, 73 bp, Homo sapiens
tgatgcggtcaaccatccgactcccatggcagctgcagcaaatgaggtgatcctgtgcaccaaggaggtgtcg

SEQ ID NO: 582457 - DNA, 75 bp, Homo sapiens
gggaggggaccgcgcccgcctcatttgcgccttgcagcactgctggaccaggattcaagttcgaaatatggcaac

SEQ ID NO: 582458 - DNA, 100 bp, Homo sapiens
cagattctgagggatatccagcagcacaaggaagaagcctgggtgattggcagtgtggttgcacgagctgaaggcatccgtgtcattctggaccttactc

SEQ ID NO: 582459 - DNA, 100 bp, Homo sapiens
cctccgcagacgcccccaaacaatggaaaagcgagattgtctttgaccatttgctatggacattgtcagggatggtgcagcctgaatgagaatgtctgcg

SEQ ID NO: 582460 - DNA, 90 bp, Homo sapiens
gctgtgcgaggtgatcggaaaggtaaagcatgaatcatcctccagtgatgaggagcgcgcagctgccaagccatcaaacgcaggccacct

SEQ ID NO: 582461 - DNA, 75 bp, Homo sapiens
ggcgggacagcacagaggcagcgccacctcgcttggtgtatgtggaatttgatgatcttgaatgggataaacgag

SEQ ID NO: 582462 - DNA, 100 bp, Homo sapiens
agattatcaagcgttttgagcagaaaggattccgccttgttggtctgaaattcatgcaagggttgactggaagatgactgatgtgcagattgctaccaaa

SEQ ID NO: 582463 - DNA, 100 bp, Homo sapiens
cgacggcctggctttctgcgccatcctgcaccgccaccggcccgacctcatgttgtggcagcactgcctgaaggtatgagaccagattctaatctttatg

SEQ ID NO: 582464 - DNA, 87 bp, Homo sapiens
tctttgagtctaaagaatcccttgaagaaagtattggcaagttgtgacttctcaccaggagatttggtttgggccaagatggagggt

SEQ ID NO: 582465 - DNA, 83 bp, Homo sapiens
gtgttgcggcgcgggatggcagttttacagtctccgcacaggaacaagatcactcaaggtgaaggataatctactaataccag

SEQ ID NO: 582466 - DNA, 112 bp, Homo sapiens
ggcgaagctggccgagcaggctgagcgatacgacgccaaaatgaagtttaatccctttgtgacttccgaccgaagcaagaatcgcaaaaggcatttcaatgcaccttcccac

SEQ ID NO: 582467 - DNA, 100 bp, Homo sapiens
acattttcaagcagtgtctacgaacaattattgaaggcacaagaaggtagtgggcagcagtcagtgacaggtgtaacctctgtggatgacagcaacagtt

SEQ ID NO: 582468 - DNA, 75 bp, Homo sapiens
cgagaaaaacctcagcgacctgatcgacctgaacaagaggaaagtatggggaaggagccaagcaggagacgttca

SEQ ID NO: 582469 - DNA, 100 bp, Homo sapiens
ctcgaacctgcactgtggacttttcgggccccctgatgtgccacactactaagatgtacagcacagatgatggagtccagtttcacgcctttggccgggt

SEQ ID NO: 582470 - DNA, 100 bp, Homo sapiens
ctggttcgaatgagaaaccagtcccttggacagtctgcaccttctcttactgctggcctggaagatgagaatgtgcctactgctcctgatcctccaagtc

SEQ ID NO: 582471 - DNA, 98 bp, Homo sapiens
ggagtcccggcgttcttccgctggctcagccgcaagtacccgtccatcatagtcaactgcgtggaagagaaggaatatgaagacaaggctggaagacc

SEQ ID NO: 582472 - DNA, 75 bp, Homo sapiens
gaggactgcagcctatggccactttggaattttctgaaccaacaattattctctttgaaagagaagacttcaaag

SEQ ID NO: 582473 - DNA, 75 bp, Homo sapiens
caagaagctggtgtgcggagatgaagcaagaagtctatgtgccccaggatcctggattacctgaggaagaagaga

SEQ ID NO: 582474 - DNA, 100 bp, Homo sapiens
actcaactaattggcatcatcacagtaaatattgcaacttcagcaacttcaaatattgaatatgcccacgttcctcatctcagcccagctgtgattccta

SEQ ID NO: 582475 - DNA, 75 bp, Homo sapiens
gatcattgacctcgtgttggaccgaattcgcaagctgtttcaggtttagctgtgcctcccagtgactataatgac

SEQ ID NO: 582476 - DNA, 100 bp, Homo sapiens
gggagataggtggaattattggcaccaatgatgtgaaaactgtgctatacttggtagatcagaaactcaggagtgtcttttctttaatgctaattgggaa

SEQ ID NO: 582477 - DNA, 88 bp, Homo sapiens
tacggatcccaggaccctcttcgcgggcgattcgcgtagcctcagtctgcgctcctcagaccaccggcaggtgaacagcctgatgcag

SEQ ID NO: 582478 - DNA, 82 bp, Homo sapiens
gtcccgaccctggccgccccgagcggagcctggaggtgctgggcgtcctcttctttgccatagcctgcttcttatacaagcc

SEQ ID NO: 582479 - DNA, 101 bp, Homo sapiens
cggagaggacctgttcaccagcactgtctccaccctagaggctcctgcttaccatcttattttggaagggattctgatcctctggataatcagacttcttt

SEQ ID NO: 582480 - DNA, 96 bp, Homo sapiens
tttatgaactcgaaatgaagcggaaagcagatatgcgcgtcagcatactttggcggctgatcctggagaaactaaaaccttctgcacagcaaagga

SEQ ID NO: 582481 - DNA, 100 bp, Homo sapiens
gtggaactgggcgagctgcggctgcgggtgcggcgggtcctggccgaagctcatttatttgaaaatcactgggctgctatttccaacttccgacttctgg

SEQ ID NO: 582482 - DNA, 74 bp, Homo sapiens
tctgatgcatctcatgatacttgtaaagaatgctgtccagtttcaacgagtggttttggcaggacaggttctgg

SEQ ID NO: 582483 - DNA, 75 bp, Homo sapiens
gatccaccagcggttccatcctacacttgggacttcagaaatgggcttgggaaccagctgagttcaggatcccac

SEQ ID NO: 582484 - DNA, 95 bp, Homo sapiens
tggagagcttcatcaaaaatagtgatagctttgataacccagatgacttactcaatgccttgaatgagggtatcagtcgtgctgatgtcatcatc

SEQ ID NO: 582485 - DNA, 100 bp, Homo sapiens
gggtttctttcttaaaggactgatttttagaactccacatttgagccacattgctgtgaggaagcctgggctacatggagaagcccacatgaagaggccc

SEQ ID NO: 582486 - DNA, 97 bp, Homo sapiens
cgctggagtcatgacagcttatgcagtctgagctatcagctgaagaaagtccagaaaaattaggaacctcccagctacatcgccggaaagtcatttc

SEQ ID NO: 582487 - DNA, 82 bp, Homo sapiens
agcccgctggcgccgctgcccgccaggccccgggggcggcggccaagatgtccgtgcctgttcgggtctggcggtacttgaa

SEQ ID NO: 582488 - DNA, 100 bp, Homo sapiens
cagactttcctgcgtggaagcgtttgctgccaccttctgcatcgtagcgctgataaagcagtttgtgtccgacgtggcctggggggagctggactacctg

SEQ ID NO: 582489 - DNA, 76 bp, Homo sapiens
ctggaacaacacggtgttcatcttttctacaggtgcactttacaggtccccgatgaaccaagagaaccctccacca

SEQ ID NO: 582490 - DNA, 75 bp, Homo sapiens
ggagttcttacaacatggcagacattgacaacccagtggcacccgactcgctctcctctccctcaccgacgcccc

SEQ ID NO: 582491 - DNA, 82 bp, Homo sapiens
accctgctgctgtcttcaaagaaggtgaaaggtgtagcagtcactcggcctacacccacagcatcgaccttgtgaacccagc

SEQ ID NO: 582492 - DNA, 100 bp, Homo sapiens
cggcggaggctgccatggacgacgaggaggagacgtaccggctctggaaaatccgcaagaccatcatgcagagacggggtttcaccttgttagccaggat

SEQ ID NO: 582493 - DNA, 75 bp, Homo sapiens
caccaacaacaccacaataatccacagccaaggttgatgttcttaaggcaacagcactccctttgttgaaacaat

SEQ ID NO: 582494 - DNA, 83 bp, Homo sapiens
ttggaaacgacgtcatgtgttaggtcagcccaaggccaaccccactgtcactctgttcccgccctcctctgaggagctccaag

SEQ ID NO: 582495 - DNA, 100 bp, Homo sapiens
acttctccagccgggcccgcgaagtggtggcatcccgttcatcttgactggtgagttcttccagcaatctcagcggccggctgccttcatcattgcaggc

SEQ ID NO: 582496 - DNA, 101 bp, Homo sapiens
ccctcctcccccctcccctcagcggtggctcccaagaagtccgagacacgcggtgaggcggcgacgggctccggattgttgccagcaaaggaggttttgaa

SEQ ID NO: 582497 - DNA, 98 bp, Homo sapiens
cgcgccgctggctggagcagtactacgtgggagagctccgcggggagcagcaggattttttatcaagcagaaatgcatcgaacaacgagaatcaagat

SEQ ID NO: 582498 - DNA, 87 bp, Homo sapiens
aagcgaagccgaaaaaggcagcagcgaaggtatttaccttgctgtggattgctgactggatggtccatcacttctggaggaaaggaa

SEQ ID NO: 582499 - DNA, 100 bp, Homo sapiens
cgagcagccttcagggagcgtggagacaggtgccctcaccaccaatggcatcaaccctgacaccagtactgagatcggacgtgctaagaactgccttagc

SEQ ID NO: 582500 - DNA, 83 bp, Homo sapiens
taacttttccttggagagtcataacatatcactgactgggggatatgagactttctactcggaatatcctgagtgttgcgtgg

SEQ ID NO: 582501 - DNA, 100 bp, Homo sapiens
aggtgatcttcaaattggagcaaggagaagagccatggatatcagagggagaaatccaacgacctttctatccaggtgtcatggagaaactccagctggg

SEQ ID NO: 582502 - DNA, 80 bp, Homo sapiens
ctaatgaaaacgcaattattcctttaccaacaatcaaatggaaacccttaattccatgctacaagtgaaaactgatgaga

SEQ ID NO: 582503 - DNA, 75 bp, Homo sapiens
agacacagtatggtagccacacccccaggcatccgtgtcattctggaccttactcccaactaccggggtgagaac

SEQ ID NO: 582504 - DNA, 83 bp, Homo sapiens
ccgtagacaccagctccgaaatcaccaccaagatctcctgggaggcccccgtggagaagaagactgagtgtatccagaaaggg

SEQ ID NO: 582505 - DNA, 96 bp, Homo sapiens
cagaactcaagcaggcataccaaggctgggaagacagatgctaatagcaattcctgctccagtgatcattctacatatattgtacaaacactagat

SEQ ID NO: 582506 - DNA, 82 bp, Homo sapiens
tggacgtcactggccctggtggggattgacagccacgggaaggtccctggtgctgaaccgcctgcgtccagttgccagcggg

SEQ ID NO: 582507 - DNA, 75 bp, Homo sapiens
gggatggctaccacggccgagctcttcgaggtgagcactgtgggctatgggatggatgaggtggagcaggaccag

SEQ ID NO: 582508 - DNA, 50 bp, Homo sapiens
ggaggaccctgagggctcagacatcctgagaccgtccaggctggacttga

SEQ ID NO: 582509 - DNA, 75 bp, Homo sapiens
gacagcagtacagacagctcaggctgcccagatggtggctcccggagtccaggtactccaaagattcaggtttac

SEQ ID NO: 582510 - DNA, 96 bp, Homo sapiens
tgaggctcctggcggccgcgctgctcctgctgctgctggcgctgtacaccgcgcgtgtggacgctcgccctcccctacctgcggaagagtcaaggg

SEQ ID NO: 582511 - DNA, 100 bp, Homo sapiens
gcctgggtgctggcgaagcggaggccggagggaaagaatatggcaaagctgatgcaagatgggtttattttgatccaaccattgtgtctgtggaaattct

SEQ ID NO: 582512 - DNA, 100 bp, Homo sapiens
ttctgcagccaattcaaattcaattttcgccaactctagtgccttctccacagtaggcactcctgactacattgctcctgaggtgttcatgcagaccggg

SEQ ID NO: 582513 - DNA, 100 bp, Homo sapiens
ctcacctctcccaggaaacttcacactggagagggagcatgataaagatccagaaagcttttttaaggtattaatgcatcttaaagacttaggactcaat

SEQ ID NO: 582514 - DNA, 97 bp, Homo sapiens
gggtgtccggccgtgtcccgaggaagtgcaagacccgttgaccatgttgttcctgaacctgggtccagcctactgacctctttcgagaagtggcacg

SEQ ID NO: 582515 - DNA, 96 bp, Homo sapiens
aatttgagtcctgcagtgtaccacgaaaaatcaatgtcagcccaacaacttacaggggaacgcccttttgcttgtgactggcagggctgcgacaag

SEQ ID NO: 582516 - DNA, 75 bp, Homo sapiens
taacattacgtcagcgtgatgctgaggtgactcgactaagagaattaaccagaattggcagagggggtcgatttg

SEQ ID NO: 582517 - DNA, 100 bp, Homo sapiens
atcactccaggaataggcaatgagacttggggagatcccagagtcataaaagtcatcacaggctgcagtactttgcacggggcctgcaagtttatatcag

SEQ ID NO: 582518 - DNA, 75 bp, Homo sapiens
gcggctcacggcggaggacgacgcgctcaaccagatcgcgcgggaggttcagcagctggacatggagaaccaacg

SEQ ID NO: 582519 - DNA, 75 bp, Homo sapiens
ccgaagcgggctgtgtgccccttctccacccagaggctaccggctctctgaccagttccacgacatcctcattcg

SEQ ID NO: 582520 - DNA, 75 bp, Homo sapiens
ctcaacttcatttactttggatatatacggatttaagtgccctgtatgctcaaaatttgtatcctcagatgaaat

SEQ ID NO: 582521 - DNA, 100 bp, Homo sapiens
gaaggagatggctttgcaaaaataaggatgattatgcttacaatgcagtagcccaggatgtgttcaaccacagctggaagacatctgcaaatatttctgc

SEQ ID NO: 582522 - DNA, 82 bp, Homo sapiens
ctgtcaccccgactcaacgtgagacgcaccgcccggactcaccatgccgccaccggcacggccaggccagcatggtggacca

SEQ ID NO: 582523 - DNA, 95 bp, Homo sapiens
gagttccccttcgagaggaggcagattcccctctacatagacgacaccctgacgtttcgagaggcccgtgccatgagaccgcctggggtgagcaa

SEQ ID NO: 582524 - DNA, 101 bp, Homo sapiens
aggaaggctacactcagtgctcccaatttctttatgaaactgccaagttttggaccttatctggaacagcgcaagaaaatcatagcagaaaacaagattag

SEQ ID NO: 582525 - DNA, 90 bp, Homo sapiens
aagatggcgaccgagacggtggagctccataagctaaagattttcagctgaactctcatctctcaacactggcaaatattcataagatct

SEQ ID NO: 582526 - DNA, 82 bp, Homo sapiens
cggggccttccacaccccctccgtgggtgtgtggtacactgaggaggggacggctccgtcttcacattgtgcacagatctga

SEQ ID NO: 582527 - DNA, 75 bp, Homo sapiens
agctgtgctcgcgctactctctctttctggcctggaggctatccagcgttactcactataaacaatatccaccca

SEQ ID NO: 582528 - DNA, 100 bp, Homo sapiens
agaggtcaataatgaaagtggagagtcacagaggggaacagatttcagtgtcctccttagctctgcagtctgtgatcaaaacagggcgactgctaatcag

SEQ ID NO: 582529 - DNA, 101 bp, Homo sapiens
gcggtgactccccgccgctcccgggggccgtgacggtcagacccagctgcttttgagtcccgcctggagaaacgcagtgaatttcggaagcagccagtggg

SEQ ID NO: 582530 - DNA, 75 bp, Homo sapiens
aggctgatatgcaatgtcacttacaacattaatcagatactgcatttaagtattctgaaaaggaggacaaatatg

SEQ ID NO: 582531 - DNA, 82 bp, Homo sapiens
cggagccgagagccacactttcaagtaaaccaggccactcttcacctccaccatgagcctggacatccagagcctggacatc

SEQ ID NO: 582532 - DNA, 82 bp, Homo sapiens
gtgaacaggagccgctcttaggcgacacacctggaagcagaactggttagtactgcagaaaaaccacgacttaaagaaggcc

SEQ ID NO: 582533 - DNA, 100 bp, Homo sapiens
tccagcggcggcggcggccagcaggggatatcattttcaatgcccaatacccagaactgcctcccgattttatctttggagaagatgctgaattcctgcc

SEQ ID NO: 582534 - DNA, 88 bp, Homo sapiens
aagatagctgtggatcgagtgaacgctgctgatgggagataccatgtcctgtttctcggaacaggagcatttcatactactgaagctg

SEQ ID NO: 582535 - DNA, 91 bp, Homo sapiens
cgccccgcgagcacagagcctcgcctttgccgatccgccgcccgtccacacccgccgccagaccatggtgaatccgggcagcagctcgcag

SEQ ID NO: 582536 - DNA, 82 bp, Homo sapiens
acataatggttgcattaaagcattaaaggatagttcttcaggaacagaacgaacagattttgagaagtatgctttacagagg

SEQ ID NO: 582537 - DNA, 74 bp, Homo sapiens
tcccgtttccgagccataaaaggtctaggaccgcttcccccgagccagcagtgtactaatggtcacttgatgtg

SEQ ID NO: 582538 - DNA, 100 bp, Homo sapiens
cgggctgtagtgccggcgccgccgcgtcttcccggtctcctttcccggccgcacaggaaatgcactcggtgatggaaagagagccactattctgaagaac

SEQ ID NO: 582539 - DNA, 75 bp, Homo sapiens
gggggagtgcgcggcggccgcagctgccacaaaccaggtaagaatgattgatgttggctgatattggagtgctca

SEQ ID NO: 582540 - DNA, 75 bp, Homo sapiens
gcccgctgtagatgagaaactcaggcctatattcacacacgtatgcgggcgaaaacgtctgacttcctcaaggtg

SEQ ID NO: 582541 - DNA, 100 bp, Homo sapiens
gttacagtgaactctatagattctgctggtatacagctacatccaggagagaatgctgacagtcctgcagaaagaagagattttatcgacatcgaaagta

SEQ ID NO: 582542 - DNA, 112 bp, Homo sapiens
gctggaagatggacgtactttgtctgactacaatattcaaaaggagagaaggatattcctggactgactgatactacagtgcctcgccgcctgggccccaaaagagctagca

SEQ ID NO: 582543 - DNA, 82 bp, Homo sapiens
ttcgagaacgaccccgagacgggtgtcctgttcccaaagctgagctgatctgccacctagagcatgggcaggagccatggac

SEQ ID NO: 582544 - DNA, 82 bp, Homo sapiens
gggcgctggggctcctgctctttctccttcctgggagcctgggcgcaggagccggcatcatggattccttcaaagtagtgct

SEQ ID NO: 582545 - DNA, 100 bp, Homo sapiens
gaggtccgcgcagcccagcgcagccataaatgagccgtcagactgctacagcattacctaccggtacctcgaagtgtccaccatcccagagggtgcctgc

SEQ ID NO: 582546 - DNA, 50 bp, Homo sapiens
gcgtgcacgttgagattcctcggcgggtggtccattatggctgacatgca

SEQ ID NO: 582547 - DNA, 100 bp, Homo sapiens
tccccagccgagaaccaggaatcttccctcggcccgcgcgcgcgaccggccggtgcgccgcggcccgcggtctctaattaacagaagatggcaaagccca

SEQ ID NO: 582548 - DNA, 100 bp, Homo sapiens
ctgatatctcaaaaggtgatctggacaaaggaacaggtatctcagcctgtatcccaaccagttggagctgaacaacaagcagctcttctaaaaccagatt

SEQ ID NO: 582549 - DNA, 102 bp, Homo sapiens
gcgcagggcctgcagcgggagctggacggcgagcgcgagcggcgcgagaaatgcagagcagagcgggcggaggaccccgggcgcgggcgcggacggcacgcg

SEQ ID NO: 582550 - DNA, 82 bp, Homo sapiens
gtggtgcctctggcagtgacgaggacgaagtgtccgagggtaattttatggagtgtcagcccgagagcagcatctctcaccg

SEQ ID NO: 582551 - DNA, 100 bp, Homo sapiens
agaaacatgtccaggagatgccaaccgatgcctttggcgacatcgtcttcacgggcctgagccagaaggtgaaaaaggagcatcagatccatgctgctgc

SEQ ID NO: 582552 - DNA, 82 bp, Homo sapiens
tggagcacagaaatcaatgttagcagatagccagcccatacaagatcgtagctccttaataagcatttatagtcagtttttg

SEQ ID NO: 582553 - DNA, 100 bp, Homo sapiens
atgcccaccactgccacaaacgccgcaccaggtcttgtagcagcgcctcctcggtggtgctgtgggtcggcctgggcgtcctggtggtgagcactgtcac

SEQ ID NO: 582554 - DNA, 50 bp, Homo sapiens
tcgactgccagaaaccattgacttagggaatttgagagcgtattttgcgg

SEQ ID NO: 582555 - DNA, 50 bp, Homo sapiens
ctcccaagtagctgggattgcaggacacatattgaaggaaatgtggatat

SEQ ID NO: 582556 - DNA, 95 bp, Homo sapiens
taaggctctgacaggcattgatctaagtgtgtgcacacaatgtgtaaacaggaacatcgataagtagtgtaaaaacttgcacaatgaaatccgaa

SEQ ID NO: 582557 - DNA, 98 bp, Homo sapiens
ctactacctggtgcagggcctgattgaggactgccagctggcgctgcaggtaattttaaccaatcagatgacaacaaagattgatagaaatcaggcct

SEQ ID NO: 582558 - DNA, 115 bp, Homo sapiens
ttcctcctggggaacccgttcagcacaccagtggggcagtgcctcggatacttttgtggaactctatgggaacaatgcagcagccgagagccgaaagggccaggaacgcttcaac

SEQ ID NO: 582559 - DNA, 101 bp, Homo sapiens
tcctgctcggctgggtcttcgcccaggtggccggcgcttcaggaatgggtaccacagaccatgtcatcgtcctggcgtccacgaaccgagctgacattttg

SEQ ID NO: 582560 - DNA, 96 bp, Homo sapiens
cagacaacttctggcagaaacagaggactaattttggcagttctaaatttgaatttgagtttacaggctgtgcatttggatcagctgctatttggc

SEQ ID NO: 582561 - DNA, 99 bp, Homo sapiens
tttatgcttaaacatggagaaaatattattgatactttaggagctgaagtagatagacttgagaaggaactgaaatacctggtgtgtaagaggaagctg

SEQ ID NO: 582562 - DNA, 75 bp, Homo sapiens
gagaccagacctgcaagctctttgacacacagcagttcttgtcagcgtgctcttgctaaaactggagctgaatct

SEQ ID NO: 582563 - DNA, 101 bp, Homo sapiens
tcgggccgcgacacctcctggccatgggggacgtgctgtccacgcacctggacgacgcccggcgccagcacatcgcagggtttccaggcctgaggtgcccg

SEQ ID NO: 582564 - DNA, 82 bp, Homo sapiens
cagatgtcaaagacttagcttttaaattaaaaaggaagctattcaccattgagtgcaagtggtgacccaggatgaaagagag

SEQ ID NO: 582565 - DNA, 100 bp, Homo sapiens
gatcgactgaatgagatcaaaggtcacctggaaattgccttattggaaaaacatttcttacatgcctgctctgtgcctgtatctgagatcatcgccgttg

SEQ ID NO: 582566 - DNA, 90 bp, Homo sapiens
atcttttgtgggaacactgcagtatctggggcgagaggtcaatgatcttaaaagaaaatctccttcagatctttggaaagaggatttagc

SEQ ID NO: 582567 - DNA, 86 bp, Homo sapiens
agatgttgtttgcattgacttggatacgaacatgttatatgtggagagcttatggatggagaccaaacatccagatctggagtgcc

SEQ ID NO: 582568 - DNA, 82 bp, Homo sapiens
tctctggagacatcttcagcagcactgccagtgaaagatgtagaagataaacctgaacaacaaaccagaacaagagagactg

SEQ ID NO: 582569 - DNA, 100 bp, Homo sapiens
cgtaatgccttggctgctctcagcccccaagctggttcccgctgtagcaaacgtccgcggcctctcaggaccctgatgcttggtgtgacctgagtaaatt

SEQ ID NO: 582570 - DNA, 50 bp, Homo sapiens
ggagtgtgcgacggattgggaggacttgatcatcttccctgacgactgtg

SEQ ID NO: 582571 - DNA, 99 bp, Homo sapiens
atccagacatgatcaaagccatcaaccagggcaactatggaaccaacatcccgggtaaccgggtggctgaaggacaggtgacgtgtccctacctccccc

SEQ ID NO: 582572 - DNA, 82 bp, Homo sapiens
tgacatccctatcaatgtctacaaggttttcatctctgtgaactgcttaagcacagatttctcttcccagaagggagtgaag

SEQ ID NO: 582573 - DNA, 125 bp, Homo sapiens
ccgcgcccgccgcgcggagcgccccttcgcgtcccctgcaccatgagctggggcaccgagctctgggctgaccccgcactacatctacccaccagccatcgtgcagcccagcgtggtgatcccag

SEQ ID NO: 582574 - DNA, 98 bp, Homo sapiens
cacgcccggctaatttgcaatacggaaattttaataggggatcctttcagatgatcatgggctggccgctgccctctggagaaccttcttcaaccgga

SEQ ID NO: 582575 - DNA, 82 bp, Homo sapiens
ccacccaggagtacgtgctgcatgtctacgctgtgattgggttattatacccctgcattgacagacatctaggagaaccaca

SEQ ID NO: 582576 - DNA, 115 bp, Homo sapiens
aaatgaagttatttggatttaaagaagatccatttgtatttattcctgaagatgacccattatttccacctattgagggtagacttaaagtctgaaacagaaggtttcagtgcat

SEQ ID NO: 582577 - DNA, 100 bp, Homo sapiens
tttcgtgacttcctgctcaagccagagttgctccgggccattgtcgactgtggctttgagcatccgtcagaaggttttgacgagtttgggtctgtggact

SEQ ID NO: 582578 - DNA, 75 bp, Homo sapiens
aagtgtcacacagcagtcaagtatgtcccaaacgtctctggagccagacggactgctggtgtgggtcctggcagg

SEQ ID NO: 582579 - DNA, 118 bp, Homo sapiens
tatgcactttaccctttttaatattggccaatcatcaagacaagccagcagctcgctcagtacaagagaataacaagcctttgtattcatttgaagataatgcagactatgtttatga

SEQ ID NO: 582580 - DNA, 83 bp, Homo sapiens
ctcagctctcggcgcacggcccagccgcttacaaacacgcagatggcaagaagattgatggcaggagggtccttgtggacgtg

SEQ ID NO: 582581 - DNA, 80 bp, Homo sapiens
tcttcatgaccctgcccttgccagaatttcctgcgctgttccacctcattcaacttcagacaatgcagatcttcgtgaag

SEQ ID NO: 582582 - DNA, 126 bp, Homo sapiens
gagaccgtgaccgagagcgtgaccgagagcgcgaatatcgtcatcgttagaagcaacatctgaatgaattgatgacgaagaagtggctattagggtcaaacgctgtagacattatctgtgtcaccg

SEQ ID NO: 582583 - DNA, 74 bp, Homo sapiens
ttcgccgccgcgcacaaccgcacgtgcagagttgcatgctgagaatttgaaaaatgaagatgatgtagacactg

SEQ ID NO: 582584 - DNA, 74 bp, Homo sapiens
gagcatggatgtgattcaacatgaaacaattttgggcttcctgtagacacccttttcctgcgcaacagagctgg

SEQ ID NO: 582585 - DNA, 87 bp, Homo sapiens
acctcatcccctggatgggggaccacaagatcctcatcgacagataccggggagaccacgacgctgcctcctgggcgccatgagttc

SEQ ID NO: 582586 - DNA, 90 bp, Homo sapiens
cccgttgaaggtgctaccgctgacgacacccctggtggatggcgaggatgagaggcatttgatgaagcaattgctgaattggatacgctg

SEQ ID NO: 582587 - DNA, 90 bp, Homo sapiens
ggggaaaaggcaaaaatcccatctaccgcaactctcagttcgagagtaaaggtgaagagatggcgtttgtgaagagtggctggttgctgc

SEQ ID NO: 582588 - DNA, 100 bp, Homo sapiens
cgcttttttacctgccaatcaaactgctacaagacaacaccctgatctggcatggacatgtgaatatgtttacaaaccaaggaacagtgatccactttaa

SEQ ID NO: 582589 - DNA, 100 bp, Homo sapiens
gctgcacaggaagccgtgaaactgatgacccagcagatggctgggatgaacttctatggagccaatggcatgatgaactatggacagtcaatgagtggcg

SEQ ID NO: 582590 - DNA, 100 bp, Homo sapiens
aacgtcccgctggatctgacccgaggtataattgaaatcctcaaaggaatgcaagaattgggagtacatcctgatcaggaaacatatacagattatgtga

SEQ ID NO: 582591 - DNA, 100 bp, Homo sapiens
caggaacaagccatggagggtcaaagaaactcctggttgagctcaaagttattttacattgactggaaggatcaccagcacatatgcggccagtcagcag

SEQ ID NO: 582592 - DNA, 100 bp, Homo sapiens
aaattacctaaatgcactctttcgaaagaaagtgaggactcttgtgaagatatgagttgtggagaggagagtctcagcagctctcctcccagtgatcaag

SEQ ID NO: 582593 - DNA, 82 bp, Homo sapiens
acatcagacacagatggcaaggtcaaagaattgactgtagatccaactgctgctggtgatgttcgtccaataatgcaccatc

SEQ ID NO: 582594 - DNA, 126 bp, Homo sapiens
gctcaacaagaatcactcggagggcggcggagtgatcgtcaataacaccgagaggacagtcattttgtttactcattcagccctgttgcaggtcccaataaactcttcataaggttgacagaagca

SEQ ID NO: 582595 - DNA, 90 bp, Homo sapiens
caactgttgatctgggaaatgtgcctaatggcagtgccctgacagatgtgttctggacttggtgcctctttctgttatatgctttcctat

SEQ ID NO: 582596 - DNA, 50 bp, Homo sapiens
tcaaggagataaaggacgatggcttcctgcctgacacagctcacttcaag

SEQ ID NO: 582597 - DNA, 107 bp, Homo sapiens
gccacgtgcagacatctacaaccttcgatctcctgacgaagtgaagttcccagaccctacgccccgctgtcaggcagcccgccgatcagatggaggagaacgaggtg

SEQ ID NO: 582598 - DNA, 95 bp, Homo sapiens
cccaaatatcctcggaagagcgctcccaggagaaacaactcgggttcatgacgctctcgatattcctgtgcagaaacctggaccacgtctacaac

SEQ ID NO: 582599 - DNA, 75 bp, Homo sapiens
gatcctggaggcctgggaagccaacgaccacacgcagcacattcaggaccccgcgagccagcggctgacgtggaa

SEQ ID NO: 582600 - DNA, 89 bp, Homo sapiens
gcagtgaccgtgtgtcagaacaatcttgaatcatgaagctactaaccagagccggctctttctcgggcactccacagaaggatgttatt

SEQ ID NO: 582601 - DNA, 50 bp, Homo sapiens
cagcttcccaggacagaattctgcagcaagcaacccagtgatagcagccc

SEQ ID NO: 582602 - DNA, 82 bp, Homo sapiens
ccccagcccactgggctacgcagagcggttctggtgaggttggaaggatgcagccacccggttgtcatgaaaggcctgtgtg

SEQ ID NO: 582603 - DNA, 100 bp, Homo sapiens
gttggctatcagtatgttatcactggccggaaccgctccttggaaggtcgctgggaggtggcattcaaagtgactttgaacagcttccggatgatgttgc

SEQ ID NO: 582604 - DNA, 100 bp, Homo sapiens
gctggcttctgcatcaatcgcaaactggctttgaagatggctccgtgggccaggttctacaagctgcacgagcggaggtgtgagcccattgccatgacag

SEQ ID NO: 582605 - DNA, 101 bp, Homo sapiens
actcctacgaggacaaaagcaacgacttcgtatgatgcacacttgactgaaggaggacagggaatctgaagactccggatgacatcagagctacttttcaa

SEQ ID NO: 582606 - DNA, 89 bp, Homo sapiens
gggataagactcttcgcatctgggacctgaataaacacgttcactttatccaaatgcatagatgccgtgatggtgctgggaaattcgca

SEQ ID NO: 582607 - DNA, 145 bp, Homo sapiens
aggggaaggaactttgggtcctgaatcttctgggagctgaggaaccagatatcttgaaaagctgccagaaaggacgaatgccttagtttccactttccagcctggatcccctcacactgaacccttcttcgttgcaccatcctgc

SEQ ID NO: 582608 - DNA, 75 bp, Homo sapiens
tgctccatccccggctgggccctggggcggaaatccaggatgagtcagctgtgttatggttggatgaaattcaag

SEQ ID NO: 582609 - DNA, 74 bp, Homo sapiens
agcaactaactgatgctgacaccaaagtcaccaggagactaaagtccatcaaaaacatccagaaaattaccaag

SEQ ID NO: 582610 - DNA, 98 bp, Homo sapiens
agaccaaggagctggactggtctacaccgctgaagctgtgtgagccgctcccatccctggcagagtctagagccttggcccagctgtccctgagccga

SEQ ID NO: 582611 - DNA, 74 bp, Homo sapiens
gacacccagcctgagcaagcgccacagaagcctcgtctcctggaggaaaatgctcagccagacgtccaggatcc

SEQ ID NO: 582612 - DNA, 99 bp, Homo sapiens
ctttgaaggatcctattgtttctataggattttattgcacaaaggcaacggtgactttcaaacaacgcgcagcctggatcatcccattcttctgttacc

SEQ ID NO: 582613 - DNA, 75 bp, Homo sapiens
cgcgggagctggcgcggggtccgccgggggaggcgggaaccagcacctatgacagaagatctgctagaagagcag

SEQ ID NO: 582614 - DNA, 117 bp, Homo sapiens
ggccgccgctccccgcctagtccacggagctcaatggcggcagtcgcgctgagggactcggctcagtgtcggagatgtatgcagtgtgacgccaagtttgactttctcaccagaaag

SEQ ID NO: 582615 - DNA, 87 bp, Homo sapiens
atcgcagagggaaggcgaatccccataagtaagggtggttctcttcccaaagtggaagccaaattcatcaattatgtgaagaattgc

SEQ ID NO: 582616 - DNA, 88 bp, Homo sapiens
ttagggtcctttatatagaagggagagtaggaatggtctgccgaaaaccgaccgacccggttgattggccaccacttgtcctgggact

SEQ ID NO: 582617 - DNA, 99 bp, Homo sapiens
ggcgccgccgccaccgcccccgccgccgtcgtctcggtagcagccttcgccacgccggggtcttcaggtcttgggcgtctttggtactggcttttttag

SEQ ID NO: 582618 - DNA, 75 bp, Homo sapiens
ccggaaccagacgatgagacagagttgcgaccgcgcggcagcacatggattaattgatgtatgttgagtttatgg

SEQ ID NO: 582619 - DNA, 100 bp, Homo sapiens
cggagttggacacggtgtgcagacacaactacgaggtggcgttccgcgggatcttgcagaggagaggttgcagccccacccacgtcacggtgtacagcga

SEQ ID NO: 582620 - DNA, 82 bp, Homo sapiens
gcggcgggaggagcctgttcccctgagactaatagggatgccaaaggaaaaatatgatcctccagatcctcgcagaatttat

SEQ ID NO: 582621 - DNA, 100 bp, Homo sapiens
agaatcttcaagaacttcctcgcactgtgacatgtctgatcccttgctcccatccctgcagcatgaacaagtttgcgtgtgaacttggacatgggcaaag

SEQ ID NO: 582622 - DNA, 83 bp, Homo sapiens
ctgaaccatccacacatcataaagctttaccaggagggtgaggacaaaatcttcttaatcaacaagcttcactccatctacga

SEQ ID NO: 582623 - DNA, 142 bp, Homo sapiens
cgcgccactcctcccggaggcgacatggggcacccggtgtaccgcggcgagaagccccagctgcactacgcgacccctctgccatgaaccagtccatcccagtggctcccaccccaccccgccgcgtgcggctgaagccctg

SEQ ID NO: 582624 - DNA, 101 bp, Homo sapiens
atttaacaacgttaccagcatccattgcaaaccttattaatctcagggaactggatgtcagcaagaatggtgaggcaggcgactaatcagattgtgatgaa

SEQ ID NO: 582625 - DNA, 100 bp, Homo sapiens
gaagctgaacctgagagatatagtccgagttgtctctgcaggatttaagcgagtggtattgcaggaagtccattctggctctggtggatggacagccttg

SEQ ID NO: 582626 - DNA, 100 bp, Homo sapiens
gccgcagctggcgcagcccacgctcatgatcgacttcctcacccgcgcctgcgacctcgtctgcgggccaggcatcgacatccgcaacgactatcagcag

SEQ ID NO: 582627 - DNA, 75 bp, Homo sapiens
cgttcgcctgtggctggacaacacggagaacgacctcaaccaggggaagtcctgacggccacgctggatctggag

SEQ ID NO: 582628 - DNA, 100 bp, Homo sapiens
ggcgctgccgtctctggaggagtactggcaacagtctgcgggccaggcatcgacatccgcaacgactatcagcagctgaagcgcctggagaactgcacgg

SEQ ID NO: 582629 - DNA, 90 bp, Homo sapiens
ggactccttgctggcccactcctctgaccctgtggagatgcggaggctcaactaccagaccccagaaagtcctacctccatctccgtggg

SEQ ID NO: 582630 - DNA, 100 bp, Homo sapiens
acttttggaacttagacgctagtatcatgatattagctggtttgacatcaagtcatttgtgagtcatcagatcttctcctgaaaatgggagacacagtag

SEQ ID NO: 582631 - DNA, 100 bp, Homo sapiens
ggaaggagttttttgcgaaacttagagaattactgcttagatagaagagtgatggatgtcatttctcgttcacagctttacttggatgatcttttttctg

SEQ ID NO: 582632 - DNA, 98 bp, Homo sapiens
gggccatggccgccgccgatgccgagtttgcagacaaattttcattccacttaaaaggccgaaaacttgaacaaccaatgaatttaatcccttttgtg

SEQ ID NO: 582633 - DNA, 100 bp, Homo sapiens
gcgttctgaagcccgagaggagccacaatggagacgccgccgctgcctcccgcgaattgcattttgtgaaaaaagaacaagaattttctgcaaggatcat

SEQ ID NO: 582634 - DNA, 110 bp, Homo sapiens
agaggaggatccacctggagctgaggaaccggaccccggcagctataacgaaggaggcccaacttcattcaataaggagcctgacggatttatcccagacggtagaacaa

SEQ ID NO: 582635 - DNA, 78 bp, Homo sapiens
tgaaaaccgagctgctgggagaagaatagcctaacatggcagaccagagacagcgctcactgtctacctctggggagt

SEQ ID NO: 582636 - DNA, 75 bp, Homo sapiens
agtgaaatgggctaataatgctggcaaagtggaaaaatgtgcgctccaccagatctgcagaattctgaatgccca

SEQ ID NO: 582637 - DNA, 74 bp, Homo sapiens
ctgatataaaacgatgacattttcaggaaaatcctggatttacaaaaggtgcaggtatgagcaggtctgaagac

SEQ ID NO: 582638 - DNA, 100 bp, Homo sapiens
gcatgcacatgaacgatgggcgagtagtcagcaacttcatcctgcaggcgctccagggggagccactcacggttgctgaaaagccaggagtcaaaatgac

SEQ ID NO: 582639 - DNA, 75 bp, Homo sapiens
cgggaaggaagatccggcgcggggcacaggatccggagctggagcccccaggtaagaatgattgatgttggctga

SEQ ID NO: 582640 - DNA, 101 bp, Homo sapiens
gagacgcgaaggagaggccctagaacccatgatggaagtggttcattgcatgatattcaactgtcattgccatccagtccagaaccagaagatggtgataa

SEQ ID NO: 582641 - DNA, 74 bp, Homo sapiens
cggcgagcagaactacggcgagcggaaatacaggtatcaggatgaagatacacctcctcaagagcatatttccc

SEQ ID NO: 582642 - DNA, 98 bp, Homo sapiens
tgccctgggcatccaggggggtcagtccgagtgcctcagcctggccagaggagaagaatgtggccccgtcccagagcaccacccgagacatcaggagc

SEQ ID NO: 582643 - DNA, 100 bp, Homo sapiens
cgctgctgggcacccacggagcctccggggctgttgtcgccgtgatcctgaaggcgctgacctacgacgagaagcggggtgcctgcagcgtgggcaccaa

SEQ ID NO: 582644 - DNA, 122 bp, Homo sapiens
cgcggagagagccactcccgcccacgtcccatttcgcccctcgcgtccggagtccccgtggccagaaatgtctttcctccaggacccaagtttcttcaccatggggatgtggtccattggtg

SEQ ID NO: 582645 - DNA, 51 bp, Homo sapiens
gcctcccaacgtgctgggattacaggcaggcccaatgccgaaacacattgc

SEQ ID NO: 582646 - DNA, 83 bp, Homo sapiens
ggcgatcggccgcggccgctctctgaagaacctccgagtacgagatctctggaaacatggctacagaacatgttaatggaaat

SEQ ID NO: 582647 - DNA, 75 bp, Homo sapiens
ggcagaatgttatcgggctgaagacagccccgaagatttttggaggtgaaatcaagactcacatcctgctgttct

SEQ ID NO: 582648 - DNA, 82 bp, Homo sapiens
agccgatccagcctgcggagcctgtggggcagatacaaggtctcgctgttctacctaggctgttctagaactcctaatgtca

SEQ ID NO: 582649 - DNA, 50 bp, Homo sapiens
catgaatgcccaacaagataatgaccaggagctgcattatctattctaga

SEQ ID NO: 582650 - DNA, 97 bp, Homo sapiens
agtttcctgtagtcccaatgcagccaacaccatcctgaggcaactggacatggagttgatctctctaaaacgtcagaaagaaggactttgctgcttt

SEQ ID NO: 582651 - DNA, 100 bp, Homo sapiens
tgaaaccctcgaatacattgaagccaactatgcacttaacttcaatttggataactcctcatcccatttgaacctgaaagttgaagatacatgtgtagag

SEQ ID NO: 582652 - DNA, 50 bp, Homo sapiens
ggggcggcggccacgccaaggacggagaaacagcacccaggactatcttc

SEQ ID NO: 582653 - DNA, 74 bp, Homo sapiens
cgcgccgagcggaggaggaggaggaggcgaggaggagagacttctttcctgcagctgcgcaactggacggcctc

SEQ ID NO: 582654 - DNA, 73 bp, Homo sapiens
ttgaccttgctgggaatgctcggagcctgaacgaactgcgggtgttgctgctggaggccaatcgtcactcccc

SEQ ID NO: 582655 - DNA, 82 bp, Homo sapiens
tggacctcagctacccccgcacccacgcggccctgctgaaagtggcgcaaatggtttttagaacttcagccataaaaatggg

SEQ ID NO: 582656 - DNA, 75 bp, Homo sapiens
gccggcagaggatccagtgttcaccatcctggccccggaaggccaccagcccctcgggttccaagatgcagctac

SEQ ID NO: 582657 - DNA, 83 bp, Homo sapiens
aaaagagcgatacctctcaagtcaaagcagcaggaagataccacaatcagaccctccgatcagccggcagtccattgatgcac

SEQ ID NO: 582658 - DNA, 100 bp, Homo sapiens
agtgagacacaatttatcattgaataagtgttttaagaaagtggacaaagagaggagtcagctgagatgagtgaactgagtgtggcacagaaaccagaaa

SEQ ID NO: 582659 - DNA, 90 bp, Homo sapiens
gaccactttgaaggaggatgctccagcaggacctgctgtcctttgagctgttggatataaacattgttcaagagttggagagagtgcccc

SEQ ID NO: 582660 - DNA, 96 bp, Homo sapiens
ttgatttccgggagtccgcaccaggggccctcagggaagagaccctgcaaagatcctgggagaccaaggaatgggtaccacagaccatgtcatcgt

SEQ ID NO: 582661 - DNA, 101 bp, Homo sapiens
gctcaaataccctccttttgcgaaaaagtggatcaatattcggaagtcatatggaaatttttacaagggctcaaaatctccttcgccaagaccaaacatgc

SEQ ID NO: 582662 - DNA, 75 bp, Homo sapiens
gcctggccgtggttgctaacgcgaaaccaaggtcagcctgggccagtgggcccccaggggtacaatgggccacca

SEQ ID NO: 582663 - DNA, 76 bp, Homo sapiens
cggagcgaacccgagagcgtggagcgggctgggccagggtgatgatgatgcttatctgtgtattcatgaagatcag

SEQ ID NO: 582664 - DNA, 98 bp, Homo sapiens
tggggaaaatctccccggtgactttcaggctttccttaaagtttcccatgtctcaatggactcctgaatataacgagctctacaccttaaaagtggat

SEQ ID NO: 582665 - DNA, 71 bp, Homo sapiens
ggagtatgcagctgtgatcccaagtggacaggatctgactgctcaacagtcaggatggctaaaggtgaccc

SEQ ID NO: 582666 - DNA, 82 bp, Homo sapiens
ggagcctcagttggaagcagccgatccagcctgcggagcctgtggggcagacggttgatgatgaagcgccggccgtgtaaat

SEQ ID NO: 582667 - DNA, 74 bp, Homo sapiens
ttcgcccccatcctcaacttcctgcgcaccaaagagttggatcccaggaacttccatgtctggaatgagtgctg

SEQ ID NO: 582668 - DNA, 74 bp, Homo sapiens
cagcaagaaatcctggcggcgaagccctggactaaggacatgaatacaactttgtctgagagccccttcaagtg

SEQ ID NO: 582669 - DNA, 100 bp, Homo sapiens
ggaagaagcagctggacccgctcaccatctacggcatccggtcaattctgtggtgttcttggtcacacatttatggagtttctgaagggcagtggagatt

SEQ ID NO: 582670 - DNA, 80 bp, Homo sapiens
aatcaacccaaggtgatgcttttgctacgacctcattttctgctggaactgttgtgacttctcaccaggagatttggttt

SEQ ID NO: 582671 - DNA, 75 bp, Homo sapiens
agttgcattcctttgagtcacataaggatgaaatattccaggtgcccctgggcgctgggattgctctagcctgta

SEQ ID NO: 582672 - DNA, 97 bp, Homo sapiens
taaaggcgcccgagtgtaggcgacaggccgctgacggccggaaggaaaatgtgagtgatagttgcttcaggaatcttgcagaagaccgcagtgggat

SEQ ID NO: 582673 - DNA, 100 bp, Homo sapiens
ccacctggtcctcctccacctcccacatttcatcaggagaactgtgtttatgaaactgtagttttgcctttggatgaaagggcatttgagaagactttaa

SEQ ID NO: 582674 - DNA, 101 bp, Homo sapiens
gccgccggagatgcctgacgcatctgtctgaggagcggtcagtgacgcgatggagcgggcaagggagttctgggaaatcgttcattcatttacagatgaac

SEQ ID NO: 582675 - DNA, 51 bp, Homo sapiens
gttcgctacacagcaatgcatcgagatgcagacagacatgctgaactatct

SEQ ID NO: 582676 - DNA, 98 bp, Homo sapiens
gggagtactcattcctgtaatagctgtggtgatagaggcgcctggtgcctcaaaatgtattggccccgggtgctgtcacgtggcgcagcccgactcgg

SEQ ID NO: 582677 - DNA, 98 bp, Homo sapiens
aaaaatatcgagatatcctaaaatttcctgaagaactggaacacgtagaaagtgcaagcaaaggtgttccatttggtttaaaaaatacttcaagtctc

SEQ ID NO: 582678 - DNA, 90 bp, Homo sapiens
cgcgaccgcgggtgcatccagtttctgcgcccaggcgaggattaaatccaccacacagggtgaaatctatctccatgacaacattcacac

SEQ ID NO: 582679 - DNA, 75 bp, Homo sapiens
ggactcggagctgagaggagctgctgctcggaccagcgcgcccagaagaatcagtgcggtttctgtggcagagcg

SEQ ID NO: 582680 - DNA, 100 bp, Homo sapiens
actaagcagttggaggctgtgtctgcttcttggacacttaatgattgttggcaagaaatgtgctgctgatctgggcctgaataagggttatcgaatggtg

SEQ ID NO: 582681 - DNA, 87 bp, Homo sapiens
actccagccagagcccccccacggcttgcagggtggcccccgctccgacttcgacatggcctatgagcgtggccggatctccgtgtc

SEQ ID NO: 582682 - DNA, 100 bp, Homo sapiens
cgggatggtgccacaggaggctgtgcgggccccgctccgcttcgaatgggtcatcatcaagaatatgggctggaatctcgttggtcctgttgttcgatgc
